United States Patent Application Publication US 2007/0072175 A1 - sequence listing, part 4

SEQ ID NO: 8212 - DNA, 2277 bp, Macaca Fascicularis
tatctaggcaaaaatggaggtgctgagtaggataacaacagagtgagattctgtctcaaacacacacacacacacacacacacacacacacacaccccggggaaagaatgcattttaaaggaagctactagaaatattcatgttccctttgaccattttgctttcgtgagttttctgtcacaggtttcctgccaagttaattgaaagaacagtgggactagcatgcccttctctgcaaaatattctccagagcttctgggaatacctcacagctactgctgccaggataccacaatatttcccaaatacacttgcagctggaagcaagatataacatttcctctctaactccttcttgcctgtgcttttcaaataacctcagccatgaatggagggcttagaaataaacagtggtctcttacttgtttgaaggcccgagtatcagctttcacagatgtgagtgctcgcattgcaggtgtgagatgcgcagaatgtctttatgttctgttataaatcacattgcatgtatgtgttacagattcaaggcctgagaggtctgtctttaatgctcggtgctgggggtggctgaagtaatcaggctgcttatctttagtgccaccttttggatgcttaggaaattgcattttaaagtaaattgaatgaccatagtcctacgtgtcatttctacgattaaatcagttccaacacagctgtgtaactgtagaatggtttattttattattgctgatcaaaataactattatgagtaacagcattctagtgtctggaaatctaaaaggagtagttttgagtttagaagaattagctcaactgtctttaatgtaaacttcaaggccttatacttgaataacaaataccaaagcagtttgacaaccctgaaaaaaagttagtggaatgtgcaagatttagttcgtgtttatgctggctggacttcacatacccatatatactctatgttattcatttaagtgtgcttttgtatacaattgtcaccatcaaccttggcccttattactgaaatctgtcagcctcatttgaaatttttgcaaatgtgatttgggagatgtaaatataaaagtgagcagctctgtgcagatacatttttgtgtgaggcagaagtacacgactggagtcacatgcagaggatgaacgctcaggagttacagaacctcaaaagccttcttcaggtgactgtctgtctcatgtgactggcatcggccggtcagacagggcccccgggacaatgggcagccatactgacgatgaagtggagtgaatctgagcacgtcctccaacattctctctttttatagaaaacaaagaaacccaaggcagcagagtctgtttcaaaaccagatgtcagtgaagaagccccagggccatcaaaagttaagacagggaagcctgaagaaaccagccttgattctagagagaagaaaaacaacttggctcccaaaagcgcagcaacaaatgagagcttttctggaaaagctgggaagccgctgtgtggagccacaaagaggtccatcgctgacagtgaagaatccgaggcctacaagtccctctttaccactcacagctccgccaagcgctccaaggaggagtccgcccactgggtcacccacacgtcctactgcttctgaagcccacaatgccaccgctcctgcccccgaaggttgtttagtttccacgtaggcaggtcgctgtgcacctctgagtgcactgctgtgtgatctctctagctctgtgtcataaagctgtcctggccagccttcgagatggtgtggtcactcttgctgtgaggcgtgtgggttccaggggggacatgggaggggctgcacagtggcccgaggtcacgcttgcttccacctgcagctgcatttggtcctttccacggccaggaagccctgtgggctgcactttttatgcttgcagtaacaagagactccagagtcctcactggtgcagagttggcaagtattgactacaattctaatgattttgctaccagcaataagtaggccaagtgaaactgggctttagaaaggatggatttcaaatacactgtgcccactagaagctttgaagaggccccgtccctctgctacagccctgggaggagccaggatccttgttggtctagctaaacactattagaggaatcacttgaaccctgaaggcggaggttgcagagagctgagatcgcacttctgtactccagcctgacagactctcaaaaaaaaaaaaaaaaaaaaa

SEQ ID NO: 8213 - DNA, 2274 bp, Macaca Fascicularis
aggccagtattgccagagaacaggagaggagtatggtataagcgtgtccagaaataaggagaacttgaagcagaatggctgcaagatgtgggtttatcaactctgatctcaggtgatgaagaggaagatggcaaagccttgctctctacattgactcgaacccaagcagcagccgtggaaaagagatacaatacctatacccagaccatgaggaaaaagaataagcaatctgtcagggatgtcagagacatttttggagtcagggaatctcctcctcgtgatacctgtgacaaccacactaatcagctggatggcaccaaggaagaaagagagcttccaacagttatcaagccagatgatgcttctctcaacagtactaccctgtctgacacatccccggataaagaagggagttttgcagttcccaagagtgactctgtggctatacttgagaccattccagatctcccagttcattccaatggatcaccggagccgggacagccagtgcagaacgcagtcagtgatgatgattatctagaaaagaacattccaccagaggctgaagagctgtcatttgaagtgtcttattcagaaatggttacagaggctctaaaaagaaataaacttaagaaatcagacattaagaaagaagactatgttttgactaaatttattgttcagaaaaccagattcggcttaactgaagcaggagatctgtctgctgaagacatgaagaaaatccgccatctctctctcattgaattgactgccttttttgatgcctttggaattcaactgaaaagaaacaaaacagagaaagtaaaaggacgagacaatgggatttttggagttccgcttacagtcctcctggacagtgaccgaaagaaagaccctggagtgaaagttcccctggtattacaaaaattttttgagaaagttgaggaatcaggtctggaatctgaaggaatttttcgactttcgggatgtactgctaaagtcaagcaataccgtgaagaacttgatgccaagtttaatgctgataaatttaagtgggacaaaatgtgccatagagaagctgcagtaatgttgaaagcatttttcagagaactacccacctctctcttccctgtggaatacatacctgccttcatcagtctaatggaaagagggcctcacgtcaaagtacagtttcaagccttacacctcatgatcatggcgctgcctgatgccaacagggatacagctgaggccctcatgacattcttcagtaaagtgatcgccaatgaatcaaaaaaccgaatgagtctgtggaacatttctacagtgatggcaccaaaccttttcttcagtagaagcaaacactctgattatgaagaattactgttagcaaacactgcggcccacatcatccgcctaatgcttaagtaccagaaaattttgtggaaggttccatcttttttgatcactcaagtaagaagaatgaatgaagccacgatgctgttaaagaagcagctcccgagtgtcaggaagctgctcaggaggaggacccttgagcgggagactgcaagccccaagacttcaaaggtactgcaaaaatcaccctcggcaagaagaatgtctgacgtgccggaaggagtcatacgggtccatgctccacttctctccaaggtgtccatggccattcaactcaacaatcaaaccaaagccaaagacatattggcaaaatttcaatatgaaaacagtcatggttcatcagaatgtattaagattcagaaccaaaggctatatgaaattggaggaaatataggagagcattgcttggatccagatgcttatatattggatgtatatcgtataaatcctcaagcagaatgggtgattaaaccccaaccaagttcttaaaatatcctcaagatagctgctatcatgtattatatgccaaaaagatcctacattttggtagggaaaaaacaacactgtgtttgacatatttgttcctacagccttctcagtatttctggccctccacagtggacattgtcagcatgaactatggaaggggcactggttcaccaattcagctgaagctttctcatgatttttttttttttataaaagtaaaggaaagatgatgtggtccttccagaagaaagaccaatctagaaaaaaaaaaaaaaaaaaaaaaaaaaaaaaaaaaaaaaaaaaaaaaaaaaaaaaaaaaaaaaaaaaaaaaaaaaaaaaaaaaaaaaaaaaaaaaaaaaaaaaaaaaaa

SEQ ID NO: 8214 - DNA, 763 bp, Macaca Fascicularis
  misc_feature (1)...(763): n = A,T,C or G
tactgtgacntnntanntnntcttatttacctatatatttctagtgtgcaaaccatcaccactgtctagttccatccaaaacattgccatcccccccaaaaatcttgtacctattaagcagtcattccccactcaccccacgcccccaggccccggccaccattgattctgctttctgtctctatggacttgcctattctggatatttcatataaacagaaatctcttactaatttccaaacagttggatgatctgtgtcacatgcctatcattaatattttccagttacttggtgtcagtttcagtctttgttttgcttgcctttttttcctggcattgactccccaagggccttttgtccccctgctcccatgcggctgctctctagggcagctgcacaggtgtcatccttggactccactttgctgctcttctatgttacagtctcttgttcactggatcctgtttttctctttattgctttatgctcttcttttgctggagcctatcctgcagaagcttcctgccaatgattgttttggaggaaattaaaagaaaaccaaaccaaatctctcctatccaaggggaagaactttatccccatattaattgaatataggattcgagatttaaaatgttggtggcagttagagtttgctctttttttttctattggaaaggtccacaaatgttttgttgacatttttgtctttaatccatttgaatttggggtacatgttatgatttgtctacattaattcc

SEQ ID NO: 8215 - DNA, 979 bp, Macaca Fascicularis
ctgtctattcagtcacctggtggtcatctttcttgtactaattaactgttgataagcattttggatattctaggagaaagcctataatttcatatagtttctctttttcacataactgtaacctaaatgtattacttctgataaaactacatatcaaatgtcactgcaaattagttttatatctatcttgtgaggtttgtcttacttattttccttttggttgccatgtaagttatcaccctgaaaatcgtctccctccccttctcttgctgtacagcatgcgttccttttttgtggttgctggctgggtactctgtttaatgaagtagagaatagcacttgcaaaaatacagtcttggtacctagagactgtcatgcagatagtataatttggtatatgtgctaatgcactgagtagaggattattttaacacactattttgcttttgtattttagttaaaataatcgatggggatgtgtagccccctgtgtgaggatgacatcaccacatttctagtttcatggagctcaagatgtcttgtgtctgtgtcgctagatggcctctgcttggtaatcttaagttatttttaggcctaaaattctcacttcaatccaaagtaaaaatggttatactgaagcataaaccttgcctgtgtaattttaaagaattaatagagctgtgcaaattattttattttttgtaaaaaaaaaaaaaaatacatatctctgtatataatgtgtgtgcgacacgcacactctgtgtatgtgaagtcggggaggccctgggggatgaccttccagtttatgacgcttttctctaggccgctggacttcattcttactggtccacgcagatgcaggcggcctgaggccagcgttggaccaagtagaagatggttcctaaggacacagtttgtctgttttctaacaaagaaaaattctacaaaggagaggttgggcaatacaaagaataataga

SEQ ID NO: 8216 - DNA, 753 bp, Macaca Fascicularis
  misc_feature (1)...(753): n = A,T,C or G
tccatcgagnnnnnnnnnnnnnnnnnnnnnnnnnnnnnnnnnnnnnnnnggtggggggcgggcactggactggaaatgccatctgcagcctcgagaggtgtgnnnnnnnnnnnnnnnnngtcaccggggctgtggacctggggctgcctgcagggtcactgggctcctttaatnnnnnnnnnnnnnnnnnnnnnnnnnnnnnnnnnnnnnngcagccccacgtggggtggggctgctgaactctggggttcccacattcttcccttcaggatccaccacaaacagacactttttgcttccctaaagtaggatcaaatctagatcctccagcctgggcaagtagaggaagaaatgctagcctggaagctgggcatttggtttcactaagggccatgtggttccctgcagcctcatgcccggccccatgacatatccaaagcaaagggagtcctgctccctctccccgcttcctttctaccctgcctgtgcacagtgggtgggttgttggtgtgtctggacactgaggacttcctcccctctgcctgtctttccctgggccctgcgtgcctcagggcagatagagcaaactctttcgaccatggtttatggtaggacattttagattttgtttctcagctctgtacaaacacaaatacacactcccacacaactaaaatcaaagtttcacgacataacactgggccttattacatgtgatacattctagcatttctgttctgtgctgtgctaagc

SEQ ID NO: 8217 - DNA, 2215 bp, Macaca Fascicularis
aaaaaaaaatttgcatcgtaacctctctgggggccgggactgtgcacttgttccctttctatacctctccacagttcctagtaccggccaaaaacactgctgaaatgcctaatgaatcaactggaagttccttagcataatataggggtgtggaagtgatgtttagggggatttcctttgtttccctgatgtccagatggagagaaatggcaatttgcccttccaagatgaggaaactgaggctcatcaaggctaagaaactcgttcaatatctttttgagtcagatggtgaaaaggagagatgttcctgctgagtttatttatgctgtgcttcagaggatgtaagacaagcagcaaatcagcagagacaagttttcagatgcttcaagtgttgtgaacagagacttgtttggattatgcgtttctcagctggactaaataaatgctaacaatggataagtgcaaacatgttgggcagctgcggcttgctcaagaccattccagcctcaaccctcagaaatggcactgtgtggactgcaacacgaccgagtccatttgggcttgccttagctgctcccatgttgcctgtggaagatatattgaagagcatgcactcaagcactttcaagaaagcagtcatcctgttgcattggaggtgaatgagatgtatgttttttgttacctttgtgacgattatgttctgaatgataatgcaactggagacctgaagttactacggagtacattaagtgcaatcaaaagtcaaaattatcactgcatgactcgtagtgggatggttttacggtccatgggtacaagtgatgattcttatttcttatatgacggtgcgcaatctctgcttcaaaatgaagatcaaatgtatactgctctttggcacaggagaaggatattaatgggtaaaatctttcgaacatggtttgaacaatcacccattggaagaaaaaagcaagaagaacaatttcaggaaaaattagtagtaaaaagagaagtaaagcgaagacggcaagaattagagtatcaagttacagcagaattggaaagtatgcctccaagaaagagtttacgtttacaagggctcgctcagtcgaccataatagaaatagttcctgttcaggtgccagcacaaatgccagcatcaacagcaaaagataaagtactctctacctcagaagatgaaagatctcaaaaaatcaatgactcctcagttaaacgaaggccaatagtaactcctggtgtaacaggattgagaaatttggggaatacttgctatatgaattctgttcttcaggtgttgagtcatttacttatttttcgacaatgttttttaaagcttgatctgaaccaatggctggctgtgactgctagtgagaagaaaagatctttcagtaagcatccaccagtcacagatacagtagtatatcaaatgaatgaatgtcaagaaaaagatacaggttttgttcgctccagacaatcaagtctgtcatcaggactaagtggtggagcatcaaaaagtagaaagatggaacttattcagccaagggagccaacttcacagtacctttctctttgtcatgaattgcatactttgttccaagtcatgtggtctggaaagtgggcgttggtctcaccatttgctatgctacactcagtgtggagactcattcctgcctttcgtggttacgcccaacaagatgctcaggaatttctttgtgaacttttagataaaatacaacatgaattagagacaaccggtaccagtttaccagctcttatccccacttctcaaaggaaactcatcaaacaagttctgaatgttgtaaataacatttttcatggacaacttctcagtcagcaaagcgtagaaggttttcctccaaaccagttgtactcacagaagcccagaaacaacttatgatatgccacctacctcaggttctcagactgcacctcaaacgattcagggttctgggtacactgcaatgattccaagctaagcatgtgcactatggatgaagtatgcaaggctcaagcttatatcttgttttatacccaacgagttactgagaatggacattctaaacttttgcctccagagctcctgttcgggagccaacatcccagtgaagatgctgatacctcgtctaatgaaatccttacctgatccaaagacaaaaaaaaaaaaaaaaaaaaaaaa

SEQ ID NO: 8218 - DNA, 719 bp, Macaca Fascicularis
  misc_feature (1)...(719): n = A,T,C or G
aagatgataatagtnnnnnnnnnnnnnnnnnnnnagaagtgggtctgtatgagcctaggcctggtgtgtagatggggagatcacacatgcatgagtgcacacacatctacacgtatgcattagaggtttcccaagatttacttcattagatgctgtaggctctcagnnnnnnnnnnnnnnnnaatactaaaaggccaggggattgggaggtgagctgctgtttatnnnnnnnnnnnnnnnnnnnnnnnnnnnnnnaaagatnnnnnnnnnnnnnnnnnnnnnntccatagaattgatccaggagatctggagttactatgagaaagtagagatcttcgttggtctgttattggagctgtgctttagggacannnnnnnnnnngtcttttctcagggtgacttctgctcctttcaaaggagaagtgaattgtctgatctatgttaagttagtgagtataannnnnnnnnnnnnnnncgggcgcggtggctcaagcnnnnnnnnnnnnnnnnnnnnnnnnnnnnnnnnnnngcggatcacgaggtcagnnnnnnnnnnnnnnnnnnnnnnnnnnnnnnnnnnnnnnnnnnnnnnnnnnnnnnnnnnnnnnnnnnnnnnnnnnnnnnnnnnnnnnnnnnnnnnnnnnnnnnnnnnnnnnnnnnnnnnnnnnnnnnnnnnnnnnnnnnnnnnnnnnnnnnnnnnnnnnnnnnnnnccggccac

SEQ ID NO: 8219 - DNA, 728 bp, Macaca Fascicularis
  misc_feature (1)...(728): n = A,T,C or G
acttattgcagtggnnntcatnnnnnnnnnnnnnnnnttcttgatcattnnngccnnnnnnnnnnnnnnnnnnnnnnnnnnnnccaagcagatgccagtggaaatgtccaggccagcagtaccacttctgaactccaacaacgagaaaatgtcagatcccagtatggaagctaacagtcactacggtcacaatgatgatgtcggaaaccatgcaatgaaaccaataaatgataataaagagnnnnnnnnnnnnnatgtgcagtacacggaagtgcaagtgtccttagctgagcctcacaaagatctagtaaagaagggcacagagacagtgtacactgaagtnnnnnnnnnnnnnnnnnnnnccatggaaaacagatactctaggacggaaggctcccttgatggaacttagacagcgaggccagatgcacatccctnnnnnnnnnnnnntgtgccgagaagagcagatgatccctatatttcaagagctctgtgcacttatttatgaacctgccctgctcccacagaacacagnnnnnnnnnnnnnnnnnnnnnnnnnnnnnnnatccatcctactgagttaatgttgggtagaaagagatacagannnnnnnnnnnnnnnnnnnnnnnncctccttccaccaagttggagcatccttggcaattggaagggcagaagaggagatccagggcaaacaggccattgggatattctgaaactgaatatt

SEQ ID NO: 8220 - DNA, 735 bp, Macaca Fascicularis
  misc_feature (1)...(735): n = A,T,C or G
aggggggccnnnnngntgggnnnnngntctttggacagagagacagggtgtggcttacggggtcagtagtgatgccttctggatcaaagaaagtgggtgcagtgcttagtccgctgtgtggaagagggcacctcctgggctttcgtggctggagactgtctgccaacattccttccttcaaactagacaaaccctcctctgccacccccagcacattctcagaggtttccaagctgtagaaaagggaaggaaggaaggacggcattcatatagctttactttccacttcagaacgtcttaagtagcatatgttgttttactgcttttaacttgggtgagttctaatttcagaacgttttgttcactgagcaaaaaaagatgcaaccaccacaggccaggacttcaagtgaggaggacgcctgtgtttgccgtggttggtggttggtgggagcccgctctggggcctggtaacatgcctgtgggaagtgatccaggggccacccgcccaagggaaaatgttcatttttcatcagctttgctaattttactttgaggcagtaaaatgcaaaaggccatagaatttgtatttccttttttaaaatacaatttataacattatattttgtactctttatattagaatttgtaactagattgatgtatttaactctatttctgaaaaagtaattcaatgttttagttgtgtgataaaaatatttagataaaacatattca

SEQ ID NO: 8221 - DNA, 762 bp, Macaca Fascicularis
  misc_feature (1)...(762): n = A,T,C or G
tgaaagcgatgaggggaccatttacataaaacacagagcttagacactcttcccctcctatgaaataattggttgttggcaccctctcaccaccgcgtatccctcaccccaccggcaagcaccaacccttggtgctgcagtttttaaaatcttccaaatgcctttttttcctcagaggcagagaatgactaagtacggggagcagactcctnnnnnnnnnnctcctgtccccttggtttctgtgtttgtctctctgccatcttaggttgccatgagccannnnnnnnnnnnnnnnnnnnnnnnnnnnnnnnnnnnnnctttagttcaatggacagagctcccaaggcaaaaactaccttctgacttgggttgaggctgggttcccctctattattcccccatcataagagcnnnnnnnnnnnnnnnnnnnnnnnnnnnnnnnnnnnnnggatctgtggtcaaaggacaggcgaggnnnnnnnnnnncagggcctgccccactgcctacatcttctctcttccccatcttgccttggaggccctagaaaacaattaacttctggcaaagggggtacccagttctttccctgttgactttgctgtttcccaggctcctttttgtgtttttataactgtcaccnnnnnnnnnnnnnnnnnnnnntatatattgttctgaggcgcctggcctgtcccttcagtgagccnnnnnnnnnnnnnnnttgtagtgaaaagctgttgtcacgactaaccttctgtctctga

SEQ ID NO: 8222 - DNA, 2088 bp, Macaca Fascicularis
atggccttgctcctggtctctttgctggcattcctgagcttgggctcaggatgtcatcatcggatctgtcactgctctaacagggtttttctctgccaagagagcaaggtgacagagattccttctgacctcccgaggaatgccattgaactgaggtttgtccacaccaagcttcgagtcatccaaaaaggtgcattttcaggatttggggacctggagaaaatagagatctctcagaatgatgtcttggaggtgatagaggcagatgtgttctccaaccttcccaaattacatgaaattagaattgaaaaggccaacaacctgctctacatcaaccctgaggccttccagaaccttcccaacctccgatatctgttaatatccaacacaggtattaagcaccttccagatgttcacaagattcattctttccaaaaggttttactagatattcaagataacataaacatccacacaattgaaagaaattctttcgtggggctgagttttgaaagtgtgattctatggctgaataagaatgggattcaagaaatacacaactgtgcattcaatggaacccaactagatgagctgaatctaagcgataataataatttagaagaattgcctaatgatgttttccacggagcctctggaccagtcattctagatatttcaagaacaaggatccactccctgcctagctatggcttagaaaatcttaagaagctgagggccaggtcgacttacaacttaaaaaagctgcctagtctggaaaagcttgttgccctcatggaagccagcctcacctatcccagccattgctgtgcctttgcaaactggagacggcaaatttctgagcttcatccaatttgcaacaaatctattttaaggcaagaagttgattatatgactcagactaggggtcagagatcctctctggcagaagacaatgagtccagctacagcagaggatttgacatgacgtacgctgagtttgactatgacttatgcaatgaagtggttgacgtgacctgctcccctaagccagatgcattcaacccatgtgaagatatcctggggtacaacatcctcagagtcctgatatggtttatcagcatcctggccatcactgggaacatcatagtactagtgaccctaactaccagccaatataaactcacggtccccaggttccttatgtgcaacctggcctttgctgatctctgcattggaatctacctgctgctcattgcatcagttgatatccacaccaaaagccagtatcacaactatgccattgactggcaaactggggcaggctgtgatgctgctggctttttcactgtgtttgccagtgagctgtcagtctacactctgacagctatcaccttggaaagatggcataccatcacccatgccatgcagctggactgcaaggtgcacgtccgccatgctgccagtgtcatggtgatgggctggatttttgcttttgcagctgccctctttcccatctttggcatcagcagctacatgaaggtgagcatctgcctgcccatggatattgacagccctttgtcacagttgtatgtcatgtccctccttgtgctcaatgtcctggcttttgtggtcatctgtggctgctatacccacatctacctcacagtgcggaaccccaacatcgtgtcctcctctagtgacaccaggatcgccaagcgcatggccatgctcatcttcactgacttcctctgcatggcacccatttctttctttgccatttctgcctccctcaaggtgcccctcatcactgtgtccaaagcaaagatcctgctggtcctcttttaccccatcaactcctgtgccaaccccttcctctatgccatctttaccaaaaactttcgcagagatttcttcattctgctgagcaagtttggctgctatgaaatgcaagcccaaatttataggacagaaacctcatccactgcccacaactcccatccaaggaatggccactgctcttcagctcacagagtcaccaatggttccagttacatacttgtccctctaagtcatttagcccaaaactaa

SEQ ID NO: 8223 - DNA, 746 bp, Macaca Fascicularis
gggggaggaggacttggctcaaagagctagctcgctctccagtgttcttcagaggtgagtccacgatactcttaccacaatttggaagtttgtgaatctttttaaagaactaatcaatctcttaatagcattgaggttgtacctacatattaagttgaatggactgttctatttaaaaagtaaacaactagactattaacaactagtttattaactatcctatcagaattgaatttttttttttaattttcagtcttaacacatttttaaaaatgtattaaagtaatacattgtagtagtaggattatatactccttggctgagaattccaagtactgtggttctactgttgagtggaaaactctggaagttaaaatatagaatatgagaggaggcttttttataatgggcatcattgtgtggaaaatgacccatgtgaatacaaatatttcctagttcagagattttggttatatctggtgcttggaacaagtttaaaaatggaaggtgacattttgcgtgagcctattaaaaagcatagtaataaatgcaaggccagctggtggagaagtgaggcagaatggagcttgtttataggttttctgataacaattataaaaaatgtgctttatagattaagatttattgaagtataaatatgtagtaatgatataatgtattttaagttatacaagaaaatgtagggacttttgtttgggtctttttctctgtggctgagggaaaac

SEQ ID NO: 8224 - DNA, 640 bp, Macaca Fascicularis
  misc_feature (1)...(640): n = A,T,C or G
caggctataagagagaagagaagacctggcttgcaaatgaggtcttgttatagagctcatactttacagccagcagccctcagagagggtagatggtagaggttcctttaaacgtgagatgaaatacgtgtatttagttcaatgcgctagccaatagtatcccaatctgttctcagaagatcaggcaggtagcagcgagacgggattggaatgaaacaccaatgaactatactgggtctcacagtcttttgaaatctccattttccctaaaacatccaggcaatgttctatgacgtcctttggtgggagactgacttctcccggccacgaagggaggaaacggtcccggcgctggaagtccggtgtgcagctgcatcttcccactggaccagaagatcagcactcggtgggagctcagggttttaaaatcggtgatcggggccgggcgtgnnnnnnnnnnnnnnnnnnnnnnnnnnnnnnnnnnnnnnnnnnnnnnnnnnctcgaggtcaggagatcgagactgtcctggttaacagagatgaaatcccgtctatgctaaaaaaaaaaaagaaaaaaatcgctgatcgggagaaacagtgtgactcagtctgtcaatccagagtgttttacacatagagg

SEQ ID NO: 8225 - DNA, 2048 bp, Macaca Fascicularis
ttgcaacctcaagagggaggtttgccttgaggaattgtcatgaggattagagagaatgttgtaaagtgccatatgtcataatcacaaaggacttattaaacattttctgaaatattcgctgacttgtagaaaaccaggactccaaagtacttctgcttgttgttctggctgtccgtccatgcactgatgtcttgttgacttcctctgtggagagcactcgatcctcttttaggttgtccacctcttgaagtttttatttctgctcacatttatacctaatggctgtaacctcttcttccagagagccagggccctccggtaagcccattgcactactactggaggcataaacctgagtgacagtggaccctaagcctggggctctttgctatgtaggttgccttcctcatacttagcctattgtggttgtgctgaggaactatgtgtgtctttaatgggtatgctttactagacccttggccattggtctcctttaaaaaaaaatggagtaaaatttacatgtaattaaatttagatctaccttttcaaatgtacagttcagtgtgttttgcatacagtcatgtgaccaccatctcagtcaagatacagatcatctcctttgcccccagaaggtcccttgtgcccctttgcaatcagtcccatcctcacaccactcagtcgctggcagctactaatccgttttttctgtctccagttttgtcttttctagaatgtcatataaaaccattacgtatgcagccctttgtgtctggtttctttcacttaacataatcatgctttttatattcctccacgttgttacatgtatccataattgattctttttattgctgagtagtatccattgcatgagtgaaccataatttgtttatccattcattagttgatagtctttgaggctgcttccaatttttagctgttatggcttagttattttaatgtaaattcctggtaaacaatttagaaactgcctcttctttcttccttaaaactcacttgtaactgctgctaatcagagtatgttatgagggcaacttgaatctgtgcaccccagtggccattctcaagttttgggctcaaatatactctatacttaattatgaaaaaattactattatgaatagtataatatataattatactattataaactgctataaatactcatgtacaggtctttgtgtagacctatgtttttatttctcttgggtaaatacctagaggtgaaatgatggggttgtatgggaaatgtgtgttaactttcggcaaattgttttccaaagtggccgttcccttttggattcctaatgtataacagttacagttgctccatatcctcaccaatacttaatattgtggtcttttaaattttagccctctaataggtgtgaagtggcatctcattgcagttgtaatttgcatttccccaatgactagtgatgttttgcacccccttacatgcttattggcctatctttttaatgaggtatttgttcaaatattttgcctcttaaaattcagtcatctacttcttttgatatgttttttattggaaaataattgtagatttacaggaagagtcaaaggcacaggagggaggtccaggtccagagcacccttcagctgggcttcccagtgttaatatcttgcataactgtagtacattatcgaaaccaggaaattgacattggcacaatccatagagctgatgcagatttcgttagttatacagatactcatttgtttgtgtgtgtgtttgtgtatagctgtatgcagttttatcatgagtagctttgtatacaccactaccataaactagatacctaactgtatcatcacctcaagactcctttatgctacccctttataaatacccactcccttcagtcccccacatccctaaccttccccagaagccacgaatttgttcttcatctctataattttgttattcttggaataaataataataattcaataaaaaaaaaaaaaaaaaaaaaaaaaaaaaaaaaaaaaaaaaaaaaaaa

SEQ ID NO: 8226 - DNA, 753 bp, Macaca Fascicularis
  misc_feature (1)...(753): n = A,T,C or G
aaataaaactcaatattatgcagatttatnnnnnatttgttagcattttttaagnnnnnnnntttcaggctggttttggtttgtattagatctgtatagtttaattaactagtgatttagttttatatttatactacaattaatcttttttctttggtgatatttatttctttgcctttttttttttttaacaactttcaatttttagatgtttcgttgaatctatttagagcttcaccatggcaatatgtatttcccttaaaacactgcaaacaaatatactaggagtgtgcccttttaatctttactagttattgtgagattgctgtgtaagctaataaacacatttgtaaatacattgtttgcaggaagaaaacttctgagttacagctcaggaaaaacctgctgaatttatgttgtaagcattacttaacacagtatacagatgaaaagacaacaaaactatcttcatacttcctcatcctctcattgcaacaaaaccttaaactgggagaaccttagtaccctctctttcctcttcctcctccacttcccacttattgtcaccttgtaatattcagagagcacttggattatggatctgaatagagaaatgcttacagataatcattagcccacataccagtaacttacacttaaaagatgggatggagttgtaaagtgcttttataatacaatataattgttaaaagcaagggttgactcttcgttttagctcannatagatcaacg

SEQ ID NO: 8227 - DNA, 3514 bp, Macaca Fascicularis
aaaaaaaaagccgccggctggcgcgcgtggggggcaaggaaaagaggggggaaaccagtctgcacgcgctggctccgggtgacagccgcgcgcctaggccaggcagcgtctccctctgtcacccagactggaggcaatgttctgatcactgcacactgcacccttgacctcccagactcaagcaatcctcccatctcagcctcttaagtagctgggaccacaggatctgagtgatgagatgtgtccccactgaggtgccccacagcagcaggtgttgagcatgggctgagaagctggaccggcaccaaagggctggcggaaatgggcgcctggctgattcctaggcagttggcggcagcaaggaggagaggccgtggcttccggagcagagcggagacgaagcagttctggagtgcttaaacggccccctgagccctacccgcctggcccactatggtccagaggctgtgggtgagccgcctgctgcggcaccggaaagcccagctcttgttgatcaacctgctaacctttggcctggaagtgtgtttggccgcaggcatcacctatgtgccgcctctgctgctggaagtgggggtagaagagaagttcatgaccatggtgctgggcatcggtccagtgctgggcctggtctctgtcccactcctaggctcagccagtgaccactggcgcggacgctatggccgccggcggcccttcatctgggcgctgtccttgggcatcctgctgagcctctttctcatcccaagggctggctggctggcagggctgctgtgcccggatcccaggcccctggagctggcactgctcatcctgggcgtggggctgctggacttctgtggccaggtgtgcttcactccactggaggccctgctctctgacctgttccgggacccggaccactgtcgccaggcctactccgtctatgccttcatgatcagtcttgggggctgcctgggctacctcctgcctgccattgactgggacaccagtgccctggccccctacctgggcacccaggaggagtgcctctttggcctgctcaccctcatcttcctcacctgcgtagcagccacactgctggtggccgaggaggcagcactgggccccgccgagccagcggaagggctgtctgccccctccctgccgtcccactgctgtccgtgctgggcccgcctggctttccggaacctgggcgccctgcttccccggctgcaccagctgtgctgccgcatgccccgcaccctgcgccggctcttcgtggctgagctgtgcagctggatggcactcatgaccttcacgctgttttacacggatttcgtgggcgaggggctataccagggcgtgcccagagctgagctgggcaccgaggcccggagacactatgatgaaggcgttcggatgggcagtctggggctgttcctgcagtgcgccatctccctggtcttctctctggtcgtggaccggctggtgcagcgattcggcactcgagcagtctatctggccagtgtggcagctttccctgtggctgccggtgccacgtgcctgtcccacagtgtggctgtggtgacggcttcagccgccctcactgggttcaccttctcagccctgcagatcctgccctacacactggcctccctctaccaccgggagaggcaggtgttcctgcccaaataccgaggggacgctggaggcactagcagtgaggacagcctgatgactagcttcctgccaggccctaagcctggagctcccttccctaatggacacgtgggtgctggaggcagtggcctgcttccgcctccacccgcgctctgcggggcctctgcctgcgatgtctctgtacgtgtggtggtgggtgagcccaccgaggccagggtggttccgggccggggcatctgcctggacctcgccatcctggatagtgccttcctgctgtcccaggtggccccgtccctgttcatgggctccatcgtccagctcagccagtctgtcactgcctatatggtgtctgctgcaggcctgggtctggttgccatttactttgctacacaggtagtatttgacaagagcgacttggccaaatactcggtgtagaaaacttccagcacattggggtggagggcctgcctcactgggtcccagctccccactctttgttagccccatggggctgctgggctggccgccagtttctgttgctgccaaagtaatgtggctctctgctgccaccctgtgctgctgaggtgcgtagctgcacagctgggggctggggcatccctctcccttctccccagtctctagggctgcctgactggaagccttccaagggggtttcagtctggacttctacagggaggctagaagggcagggcatttgattcgctccatgcactggaatgtggggactctgcaggtggattacccaggctcagggttaacagctagcctcctggctgagacatacctagagaaggggttttgggagctgagtaaactcagtcacctggtttcccacctctaagcccccttaacctgcagcttcgtttaatgtagctcttgcatgggagtttctaggatgaaacactcctccgtgggatttgaacgtatgaaagttatttgtaggggaagagtcctgaggggcaacacaccaggtcccctcagcccacagcactgcctttttgctgatcccctgactcttaccttttatcaggacgtggcctattggtccctttgttgccatcatagggacacaggcatttaaatatttaacttatttatttaacaaagtagaagggaatccattgctagcttttgtgtgttggtgtctaagatttgggtagggtgggatccccaacaatcaggtccactgagatcactggtcattgggctgatcattgccagaatcttcttctcctggggtctggctcctcaaaatgcctaacccaggaccttggaaattttactcatcccgactgataattccaaatgctgttacccaaggttagggggttgaaggaaggtggagggtggggcttcaggtctcaacagcttccctaaccaccccttttctcttggcccagcctggttccccccacttctactcccctctactgtctctaggactgggctgatgaaggcactgcctgaaatttccctcacccccaactttccccactggctccacaaccctgtttggagctgttgcaggaccagaagcacaaagtgtggtttcccaggcctttgtccatctcagccccccagagtatatctgtgcttggggaatctcacacagaaactcaggagcaccccctgcctgagctaaggaggtcttatctctcaggggggtttaagtgccgtttgcaataatgtcttatttatttagcggggcaaatattttatactgtaagtgagcaatcagtataatgtttatggtgatgaaattaaaggctttcttatatgtttaaaaaaaaaaaaaaaaaaaaaaaaaaaaaaa

SEQ ID NO: 8228 - DNA, 217 bp, Macaca Fascicularis
  misc_feature (1)...(217): n = A,T,C or G
aaacatcatctggagaaacgccctatcaaccccaatagtcataggcacactctaccctatctactcaccagaggtattcacaacaggannnnnnnnnnnnnnnnnnnnnnnnnnnnnnnnnnnnnnnnnnnnnnnnnnnnnnnnnnnnnnnnnnnnnnnnnnnnnnnnnnnnnnnnnnnnnnnnnnnnnnnnnnnnnnnnnnnnnnnnnnnnnngct

SEQ ID NO: 8229 - DNA, 733 bp, Macaca Fascicularis
  misc_feature (1)...(733): n = A,T,C or G
cagnnncaggcgnnnntgnnnatgccgcagaggagccagcctgntttcacnannngcaggacgaggacgcnnngaaccagtgcctactnnnnnnnnnnnnnnnnnnnnnnnnnnnnnnnnnntaattaggcccttggcagtctcacctgagcccgccaataaaacagacaaacaccttcagcttctgttcaggagggagagaggagaccaacagggtggaagggaaggaggaaaacttttttctattctaagacttggcaaccagaagggagaattcatttacaaagcagccactccaacaccccactcctgctccacaccaagggttgtccccnnnnnnnnnnnnnnnnnnnnnnnnnnnnnnnnnnnnnnnnnnnnnnnncaggggacannnnnnnnnnnnnnnnnnnnnnnnnnnnnnnnnnactgagggccgaaccttgtagggcaggcnnnnnnnnnnnnnnnnccttccagcagaggagagaaggctctctcccactccagcagccacaccacccccgaaaaatgtctcaaaggctgctccagagtgttagagagcaactgagtgacttctttgaaccctgccttgtgtcaccaccagatgttgagggctcnnnnnnnttggtgtctgggctccttcagaccgggggccattccttaaccatccctagactggggcagtacccaggagatactaggcacccagataggaatttccttttccccctaa

SEQ ID NO: 8230 - DNA, 740 bp, Macaca Fascicularis
  misc_feature (1)...(740): n = A,T,C or G
attgctcagagagattttaagtgttctcaccacaaaaaatgatgtgagataaaacatatgttaaataacttgatttagccattccataatgtatacatatatcaaaatgtcatgttgtacccaataaatctatacagtttnnnnnnnnnnnnnnnnnnnnnnnagcgtaatgtaatatagtataacaacagaaaataaatcaatagtaagtgctatgaagaaaaatcagcaggataggcattacaggataaggaatgctattttttaaacagggtggtcaggaaagcctgagaaggtggcatttgtgtagagacactggagtaggggagtgaaccatgccaggtagaggaaagagcaaatgagaggcttcacattcaggcatgtgcttggtgtgtaaggacactgggagacgggggaacgaggctgtattcctggatgtggtcttaggttttgattctaagatgccttcagagtttaagagcattctcaagagtcagtgttgtgtgcaaggctcattgctaggctctgggagtacccaaagataaaacacagtctgtgctagaggacactcctaagggacacgcactcatctacacaagagaaggtactgatggtggaaggaggtgtgtgccaagaatccaatgcnnnnnnnnnnnnnnnnttctgaaggagctccannnntggggactcnggcactcagagatgcctgggcgannnnngggagtttaatgtggaccttg

SEQ ID NO: 8231 - DNA, 752 bp, Macaca Fascicularis
  misc_feature (1)...(752): n = A,T,C or G
gatgggacagtcggaggaagagcctnnnnctgtcctctggagaaggcaggaggaangcaaagtccatttccagaggcccagaggctgtcctctgaggtccccactctcccccagggctgcccctccagctgagccctgcccctctcacagtccaaagggcccccttcaatactgaaggggcaaagaacagtttgatttgcagaaggcggcccagtgcaccaccaccctgccctgccctcatggcttcagagagcagaggggtcagcccaggggaacgagctggccttgccaaccctctgcttgcctcctcactgccacttgttcgcccacacccgtccacctgcccagagctcagagctaaccaccatccaaggtcaaggcctctcctggctccgcacaagcagtagagtctcagctccacagctttacccagaagcccttgttagcctgacccctggcccctctccatgtccctccagacctcagccacctgcccgccacatcctctgcctgcagtccccttcccacccttatccctgacagactccacttaacccccaaacccagacccacttccagggctccagggccagcctgagatgcccgtgaaacttctacccacagttacagccacaagcctgccttctcccaccctgccagcctatgagttcccagagggttggggtggtcccatgaccccatgtcccagctcccacacagcgctgggccagtggggcattggtgcgagggat

SEQ ID NO: 8232 - DNA, 718 bp, Macaca Fascicularis
  misc_feature (1)...(718): n = A,T,C or G
gaagnnnnnnnnnnnnnnnnnggaaggcagctgcaganncagcttgtggggcggnnncggggaggttcnnnnnntggccttgtgggactacaaggtcccacagatcttgaagcacagagtagtgtggagannnnnnnnnnnnnnnnnnnnnnnnntagctatccctgcctccaccaagatattaacgggcattccgcagatggaaacttatctttggaaacagtgtgttgggagctttggattaaggcagagctgagtcccaagcctggcccctcctcttaggatcgaggagtaaggccttgacctctctacacctgtttcttctcctttacaatggggataaagcctcagggactgttgtgagggctgaagaggagaaagtacataaaacttctaatatagttttggtcatggtacatatgaattctcccacaagatgttctgaggtttggggtgacacattaagaccacactgactattccagcgacttgtgaggcttgggagtgggggggatcacttgaggccaggagtttgagaccagcctgggcaacatatcaagagcctatctctataaaattaaaataaacataaatgagctagatgtagtagtgtgcacctgtagtcccagctacttgggagactgacacatgggaggattacttaagcccaggaatttcaggctgcagtaagctgtgatcgtgccactatgcttaccct

SEQ ID NO: 8233 - DNA, 1034 bp, Macaca Fascicularis
  misc_feature (1)...(1034): n = A,T,C or G
tactggtgaggctgttcttcagtttttgaatccttgtgaatcaggatttcaatcagagaagcaggatgactgtgagtgtactgtaataaggaatttgctataggatttagacctatacaatttcagtaggagctgggaagtacaaggtctggaaagcctcagagaataattattaaccaaccctggtgtgggttgtgagtcagaatgtgcaggaagccaggcacatccatgtgctaggttacaactgcaaaggggacagggcagaagtctccggaaggctgttcgttcttcgtggctaccacctttgagtttgcagtgaagtttctgacagtgggcctgagttcactattgttcagcaggactgattgtcatgaaggagagctcgatgccaagctaggtacaggggaaagtgaggacaaactttaaaagaacaaaacagctcgctggcaccttgacgtccattgtttcccacctctagccagtttgacctccagcacataatagctgctgcttcacttccacttcccaaatactcccacaaatttttcttatgggcaaccctaaaataggagagggaatgctgagacacatagttactagcctaggtgagtcgacccagtgtaaaactaccacatcaggttctagtaataggctacttctccctccgagttttttgctaagggcagctttaataagagtagtttcatcagtcagcgtggtggctcacacctgtaatctcagcactttgggcagctaagtcaggcggatcacttgaggtcaggagttcaagaccagcatggtcaaagtgatgaaaccccatctctactaataatacaaaaataagctgagttgnnnnnnnnnnnnnnnnnnnnnnnnnnnnnnnnnnnnnnnnnnnnnnnnnnnnnnnnnnnnnnnnnnnnnnnnnnnnnnnnnnnnnnnnnncctgggcaacagagtgagaacctgggaggcagaggctacactccagcctgggcaacagagtgagactttgtctcaaaaaaaaaaaaaaaaaa

SEQ ID NO: 8234 - DNA, 702 bp, Macaca Fascicularis
  misc_feature (1)...(702): n = A,T,C or G
tgactgcagcacaaatnnncagccactaccatattagccccttcatttgaagatgtctttgtcattgacaagattccttttcctcctggccccctaagtcttcaggattctctcatctcatctccccagaggagccaccacactatctcctccaagaacaaagtcagagccttcactgtagacggacctgtgttcttcccccaaactcggtccaccttatcgccagaaaaacgatatgactcgccctggagaaggcgggggaaaaaatcctctcccaccaactccaccnnnnnnnnnnnnnnntttggggtaaatttacaggctggagacagaagaatggatgtgtatttagctttcaaattgactattgttttatgcgaatgtctgattaaaacaacacaatggctgccagatgggggctgggagtgagatttcccatgtggagaattctagaagacatgcccggagttctggagcctggatcctctggacagacaggtggccaggcaaccagggtggagacaccaaagataactgtggggtggggagaagaccccagcccgagagagatttgactgggattggtctacacaagaatggaaaatggaggcagcgtgagttagcagcaagcttgtacactgctatagaatctgagagacccggccagtgctggccaatagaaatagaatgtaagccatagac

SEQ ID NO: 8235 - DNA, 742 bp, Macaca Fascicularis
  misc_feature (1)...(742): n = A,T,C or G
tagctctaagtatgctgcctactccagattacttcacctttccagactatcagctcttccagttttatcctttataaagaaaattttaataacctgtttcacttaggtttttctattactcttcnnnnnnnnnnnnnnnnntccctgactatatcttacctgtgatctctataactgatggattgctatcctagactatgttactctaattttaccaagannnnnnnnnnnnnnnnnnnnnnnttactttgaaacagctgtttaaaatgtcttgtaatctgcttaaatctacatactttttgtggttctcaatccagttacctaccttccagataattccctcattgtcctgtcctctccattctctgatatttgagccctgtgagccacctttcccccatcctttgtgcatagttaccattttactctttnnnnnnnnnnnnnnnnnnnnnnnnnnnnnncatcttggctcactgcaacctccacctcctacgttcaagcgattctcctgcttcagcctcctgggtagctgnnnnnnnnnnnnnnnnnnnnnnnnnnnnnnnnnnnnnnnnnnnnnnnnnnnnnnnnnnnnnnnnnnnnnnnnnnnnnnnnnnnnnnnnnnnnnnnnnnnnnnnnnnnnnnnnnnnnnnnnnnnnnnnnnnnnnnnnnnnnnnnnnnnnnnnnnncatgcctnnnnnnnnntttaccctttttaggtacagtaatgtaatatccaaagtct

SEQ ID NO: 8236 - DNA, 2739 bp, Macaca Fascicularis
ataattgatgagctcacaagggaccgagaaaagctcatccgtaggagaaagcatagaagaagttccaagccaattaaggtaataagaaatcgaagttatcaggcacttgctacaagcagccagagagatgaggcttggcatggcatcttcctgcaagggtgtgatgaaccaggtgttcccgaactgtcgcagcaaaccatgggcttcatttgctagaagaaaatcttttctgttgacatttcttcgaagtctaaaaatgattccgttgtaaattttaacctgaaagggtttgctttaatatgactttctctaaatggagatgcccctaggtttgatgtagaaaggattacctgacgagttggagagtcctattcaagaaatgtacatgattttgatgtctcccactgaatagtatgagaatctgatgcccagtttatgacaattaatatatttttattattcattcagacaatattattgataacaatgctcccaatccaccaatatctctatagcctcttacaatccacaaagttttgttttcagtttgtctatttgatttttaattttgtttttaccaagtataccatttgtttttaatgtggacttggatgacaagacttaagatttgatcatctctatcacctgagttttcgaagtcctttggtcatagtttaagtacaggaaagagtaaaccatatttgctcatcatgatataaaatgtaatctaaaagaggcttcagtgtttctatgaaaaaagctaaatattaatgaattttcttaagatgtcagaagtgaaataatatgggagaaacacttgttggaattattatgcttgtgcctaatgtttttatttcagcaaagaagcgtaaaggatccgtgtcttctatattcacttacatgtatgccagttgacagtattttaacattcaactttccctactgttagctgtgtcagtaaatatgtattttccctccatgtagaggcctgttttagacccttttattggctatgatgaggactctatggattcagagacatcatccatggcctcatttagaacagacagaacaccagctactcctgatgatgacttggatgaaagtttagcagctgaagaatctgaactaagatttcgacaattaacaaaagaatatcaggccctccaaagagcatatgccctcctacaggagcagacgggaggcatcattgacgctgaacgagaagccaaggctcaagaacagcttcaagcagaggtgctaaggtataaagcaaaaattgaagacctggaagcgacactggctcagaaagggcaggattcacactgggtagaagataaacaacttttcattaagagaaaccaggagcttttagaaaagatagaaaaacaggaggcagaaaatcaccggttacaacaggaactacaggacgccagagaccagaatgagctgctggagtttcgaaacctagagctagaagagagagagacgatcccctccatttaatctccaaattcacccattctcagatggtgtgagtgctctgcagatctactgtatgaaagaaggtgttaaggatgtgaacatccctgatctcataaagcagcttgatatcttgggcgataatgggaatttaagaaatgaagaacaagtggctataattcaggccagcactgtgctgtccctggcagagaagtggatccagcagattgaaggagcagaggctgccctacaccagaaaatgatggaattggaaagtgacatggaacagttctgcaaaataaaaggctatctggaggaagaactagactacagaaaacaagctcttgaccaagcatatatgagaatccaggaactagaagctactttgtacaatgctctacagcaagaaactgttatcaagtttggtgaattattaagtgaaaaacagcaagaggagctgaggacggcagtagaaaagttacggcggcaaatgctgaggaagagcagagagtatgactgtcagattcttcaggagagaatggagctcttacagcaagcccatcagagaattcgtgacttagaagataaaacagacatccagaaaagacaaatcaaggacttagaagaaaagtttctgtttctattcttgttcttctctcttgcctttattctatggccttgatgtcaaggtgcctcttaaagagtaaccgaaaacatggataagatcccagaaagacaaatgcttctaaaccttcaaagatggcaaaattgtttacaccagtgagagggagatcaaaagctaagaactaccctgtagccaggactacaactgtgtattttaaagccattattcaaggtttcttacttgacagttcctacacaactctgttgaaaatctacaatatatgctgcatttaatgaaacatgtaaatgtcaaatcagaagagaagaactataaacatatattgtgtaaagaaaaagttcagcaatggaactagtttcggcagatcaagcaaagatgtgtcttgggcatggaaccaaagttacaatgaaacattcaacccctgctgtgcaggggggtcattttaatgtaacaccacaccccatggaaacactagtcctgataataaacatcattttaaaagatcaaaacaaacaaacaaaaaaaaacaagggtgggtggggagtgaagcacgaggaatacctatgaagagctatttacaataaaatgtttcatttgaaaaaaaaaaaaaaaaa

SEQ ID NO: 8237 - DNA, 2352 bp, Macaca Fascicularis
ttacaacccaactttttctgcctctgtctaaggcactctgatgtacctgctgtgcactggtacagagtgggcctaaagcagtcaggggtagcccaacccctagccccgaggaatagaaggaagcagggcgcaccatgagtggtaatcagaggcttagaggcgcagcagcagggcagacccagggctccatggcacttgtggcctagggtagatgaggcaggagagcttgcctccagggcggcagggttggcgacaaactgactggctcacgatggccccccactcactgagcactctgctctgggctctccctgaaggcctacagacctgagcctgctggtccgccacttggtgagtatgttcatttccattgtgtagacaggaaatggaggctccagagaggttaggtgacttactcagggccgcgcagaagctaagtggtgtagtggaaaaaaaaaaaaaaagatgttgcacaaccatcaaagtggcaaaaataaaaaaaaaaatcaagtattggcgaagatgtggggaaaattctcgtaagctactgatgagaatttataaactattatgacacctttggcttgcaatctggggatactagcaaagcagaaaattgtataacttgtgatcaagcaattatgattttaggcacccatcctagagaaaacttgaattcatagaagaaataggtacacgtaaatctgttcaatgaatcattgtttggcattgaaaagaggagagagataaaaagaaattaccaaaatgtccaccaatagaatgagtgaatcacctgtggtatattcataaataaaaatcttaagtagaagttaaaacaaatcagatatatgcaccttagatagataaatttagaagacaaaatgaggaacataaaaagcaaatagcagatggcaaatgtaatataatgtactatgcataaattttaacaacacacagtattatattgcatattgcccaataagcagaagccataaggtctcacactttccttataatgcaataaaataaaaatgacaaaaaagtaaaagggtattccaaaaataaaactatccttttggaaaaaaaattttaaaatagttcctgatttgaagacgtaacagaaattaaaagccatatacaaatggttaacaatattaggtggacatatttgtttgaagagatgggtgaaagatagttgaaaagcctgggggtattttcaaggttatatgtcttagaaaacaaaaatacttgtttgggttcaattttggatctgggcttgttcttgtggcttctgatgatttctgacatggggaaaaatgggaagagttgaaatacatccttctacccaaaccttcctttagtaataggtagcaaaatgaagaagaaaatagaatgttgcagaatgtggagggatgtaaaatggacagtactagggtagagggaagatcagattagaggaaagaaagagcatcaggaacagtcttgtgctaggagctggtgtggccaagcacagtcagatgcccaaagatccaacaaggccatggttctgtgtctttgagtgggcacaaccattcctagccaagtttaagaggcaagtaaaaatatgggggcaatgtcagacgaagtcttgttcagggtatggggctaggatgagagagaatgccacagaatagggaggaagagtgatagatccagatgagatacagctcagagtgccatgcccccagaaagaggaatcaggcaagtactgtcccaaggcagctggagagtgagggctgagtgccctggctttctcacttggggagaccatgggtctctgtggaaattccaataaaaaggcagggaaatttgactgcatggaatcttcaggtagaaatgtttctcttgcctaaattcaggtgctaaataaacaacaaaatggtaacctctactatgaagcgtttccaatgatggggtatctgaggccattacattcctgagaataacatggtgaggtgcagggtggtggtggtggtgaaacatatgacagaccactgtaagtgagaagaaattactggcccagcccaacccacaccaaataagaaatttaatatccctttggcttgttttagattttggcaaagccaggcccatagcgcttgctgggctctctcttccacatcatccagaagacacacatttgctgtggaatgattgtggaggtgagagtatagtgcatattaattcatgcgaaaagttagatattagctcagaaatgttaataacaaggaaatactgaattctctgtttgtctgttgtggaaataaaaccttctggggatgaatcaaaaaaaaaaaaaaaaaaaaaaaaaaa

SEQ ID NO: 8238 - DNA, 703 bp, Macaca Fascicularis
  misc_feature (1)...(703): n = A,T,C or G
aattttaggcccatgaatcagccgcggtcttaccacggtgatacctgtgtgcccagagatgggactgtgcggccagatatgcacaaatatttggcttgtgtattccatataaaattgcaatgcaaattacacatccctgtgagccagatgctgaatagattttttcctgttaatttcagtcctttataaaaggaaacataaactagtttttaaatgtatgtatataattctcccccatttacaatccttcatgtattacatagaaggattgcttttttaaaaatatactgcgggttggaaagggatatttaatctttgggaaactattttagaaaatatgtttgtagaacaattatttttgaaaaagatttaaagcaataacaagaaggaaggcgagaggagcagaacactttggtctagggtggtttctttttaaaccaatttttcttgttaatttacagttaaacctaggggacaatccggattggccctcccccttttgtaaataacccaggaaatgtaataaattccttatcttagggtgatctgccctgccaatcagactttggggagatggcgatttgattacaggcgtgggggggcttgcagtttgttttggagataatacagtttcctgctatctgccgctcctatctagaggcaacacttaagnnnnnnnnnnnnnnnnttgttgtcaaaattt

SEQ ID NO: 8239 - DNA, 741 bp, Macaca Fascicularis
  misc_feature (1)...(741): n = A,T,C or G
gagataattcttctgtgatgcttcctcatcatgctcataaatgtttaaagtcttgggatttcannntcaggctgaaatagataacaagaaaaaaaattgtttaaatgtttacattgacttactaaattaataccaattcaaattaagtgacctatagtaaatgaatggcaatgggggggaggggattttaaagttattggcatattatgtgatactgtatcagtgatttagtgaaataatatgtatcatagcacaactctgttgggtattaaggcttcatcttagtatttccctgcgttgctctttgaaataaaattactatcataaaaataacctcttatcatattgatgtgtttaatttactgagnnnnnnnnnnnnnnnnnnnnnaagattaaggtagtatttttgtactattattggaagcatgccttccctttttcacattattaaaatcgtatttatatttgtgnnnnnnnnnnnnnnnnnnnnnnnnnnnctttgcggcttcaaggtcttttcaggaatctttcaaaatgggatttgggaatcagaactgcttctgatcaaatggaatccaatttgtactactggctaaaggtcctttatgaaatactgaatattactacnnnnnnnnnnnnnnnnnnnnnnnnnnnnnnnnnnntgcatttttggatatacaacaaaactttaaaaatcttcctcctttgttaattttttaagactaaaatattatttaatct

SEQ ID NO: 8240 - DNA, 112 bp, Macaca Fascicularis
gagagaggggtgttgttgttgtacaccacatctggccccaaaagtaaaatgtcgcgtaacaaatgtagagtggtagagcactgtttttagaaaacccacagcgtgtgggtgt

SEQ ID NO: 8241 - DNA, 2880 bp, Macaca Fascicularis
  misc_feature (1)...(2880): n = A,T,C or G
caggcagctggtctaccctgtccccgcacacttcacaggcgctccactgcttggcaggaattctgcctggcatctgccacacatgctcacagggtgaaaaaccaagctgtcactctgcaaaacctcaaaaccctggaaaggtctataagatgacattagacccagttacgcaggtgtcacctgagttggccatgcaatgaatgactgtcataagcagtattggagagctaggcggttgcttactaacaagtgtcttggaaacgttcgagttcatacagtgcatgagaaagtaatagaaggctgcaggcgctgaaaatgcacctgaatctggtacctaggatgagtgcatgaatagtgatgaatagccctttgtgctgtgtgctatatacaaccatttgctttcagaaagcagcatttgaagctgagttccatcactggtgattgaagtagtttcaggagcaggtatatgtggtgcatgttatatgcacttagtttgaaagtatccctcacccgaaaagtgcagaacctctgaaaggtgagccgtggggcaggtgtccccctcgctgtccgggtcagttcttggccgtgctttgcctgtcacacgccaggtctcaacaacgtcgtgcgaggaggcagtgactggtgccagcccaagagtcgactgttgagaatgacgtcaggaaaccggtactgtcccgataccaccaggcttgagttaatttcctattgttttagaaagagaggagctcttgtgcttttgagagagctctcatggtaaaaagacagacgttgtctttgccctgcacttggtatgatttattagaaaacaggaagaaaacctagaatgtgcctttcgtgaaggtctgacaaatggggtcgcagagtcctaggacccgcgccgaggtcagattccacccagagcggctgagcgttcctacgcgcacccagggtgctgggctgaggctaagggtggacgcatggaccccaccgcaggcttccttcctgagcccaagtccccccatgtggccactatcccttctcagagcacgtggattctcttttccttacttggaatattcagtgttgtagtggcctggagtggcctttccctcagctgcctgtctgggctccctggcttcccggatcttcatctcatacgtgaggcaataggaggagtttcattcattgagacaaacagtgagcaggcaccaacaggccagcagcttggccctcttcacagaggtggccttggagtctgcagtctgggcagctctctgcctccctacagctctgcttcccagcaggcgcacaggtccggagcctcagaatgaagtggtgcaaaggcacagggcacacccaggagaagtgcaatgaccaccaaaagcccttgaggagagacgaggttgctgtgttagagaaacggccacccccaggaccgtgcatggctctggcagcgcgcagtggctggttttcaccagttcctcctgcccctgcctctgtcggagactagaaaacatcattctcccccttcaggtctccttttgaaagaaaagaactatggcaaagcatgccatacaaaatcaaaaaaaggaagagtggctttgtgttcttggcggtggccacaattctggtcacttctagcatctgaccttgagaatggggtagggcgtctgagcccccgctggcctttcagagggtctcactctccagctagctcttcgtgtagtgtccagggccccggcagtcaggatagagcaaaagaagatgggcagggcgcagtggctcacgcctgtaattccagcccttagggaggccgaggcgggcagatcacaaagtcaannnnnnnnnnnnnnnnnnnnnnnnnnnnnnnnnnnnnnnnnnnnnnnnnnnnnnnnnnnnnnnnnnnnnnnnnnnnnnnnnnnnnnnnnnnnnnnnnnnnnnnnnnnnnnnnnnnnnnnnnnnnnnnnnnnnnnnnnnnnnnnnnnnnnnnnnnnnnnnnnnnnnnnnnnnnnnnnnnnnnnnnnnnnnnnnnnnnnnnnnnnnnnncagaaaaagatggccatgctggtcaaggcggggctcataggaaacatctatagtcggatgaaaggaatctggcctagggagccccggactcagtttacctacctcctactcatcccactcatctgtctaccctagtgtccagcatgccccggatgaattgtaggtgggaggcactcaagccaagaacagcaggcacacggggtggagggaatggagggagcccaggtgatcccctttggaaggtgaattgatcctctcccctatggaatgacagcttaacccgattaacccactggggcttgctattttatgagcagttttaaacagaaagatgatatcccagtgcagggagactttagctttgaaagcatcatggcccctcgcccctccctctgccccagaacctgggccggccagaactgagtcttcgcactggggaggccacggtggaaccattgctctagggctgaaggtagaagtagggccactgcctcagcttcagccagagcactcgctgctttgcggaatttcacaagcgcatgactgggattcctttggatatgagaaaggaaggcaagcgccggcaaagggaagctccccctgtttttcataaacagaaataagacgtcctctttcccaggtttgcacaatcacttctggcaaatgaattctggcactcgaattcagccagtgcacgaaacctttgcatgttcttctgaaactgtacttcttccccattctgtctacccacactctgcgaactttgccttttccttaaacacattccagaccaaacactgttcagtttgttcaaaaaaaaaaaaaaaaaaaaaa

SEQ ID NO: 8242 - DNA, 730 bp, Macaca Fascicularis
  misc_feature (1)...(730): n = A,T,C or G
aattgcagagaaaggttgcannnngcacaccgtagcccannnnnntgagcagactttggttctgtgtggtgatgtggcgcatgtttgtacactgggatttttnnnnnnnnnnnnnnnnnnnnnnnnnnnnnnnnnnnnnnnnnnnnnnnctttgtcagatggagtgccagtctgcagaggactgctctttcgaatccacagtgttatctgtgtaaatagctttaatttttcctctgtgtcttaggtgtgaagttttgttcatgtagcaatcaggtagagtgaccaaataaggctgtaaatgtgctgtagttttctactgtgatgtacttgaaggagaacctgtgtcctctacttttctgatctccctcaagtattttgtgtttgtttcctgagtcctgaggttattatttcactcctgttttgcccccagttttctttgtttgtttgtttgtttttnnnnnnnnnnnnnnnnnnnnnnnnnnnnnnnnnnnnnnnnnnnnnnnnnnnnnnnnnnnnnnnnnnnnnnnnnnnnnnnnnnnnnnnnnnnnnnnnnnnnnnnnnnnnnnnnnnnnnnnnnnnnnnnnnnnnnnnnnnnnnnnnnnnnnnnnnnnnnnnnnnnnnnnnnnnnnnnnnnnnnnnnnnnnnnnnnnnnnnnnnnnnnnnnnnnnnnnnnnnnnnnnnnnnnnnnnnnnnnnnnnnnnnnnnnnngaannnnnnnnnnnnnnatgac

SEQ ID NO: 8243 - DNA, 735 bp, Macaca Fascicularis
ctatctcaatcctaatgtctcctcccttccttttccatgcttccaggaaactccacatctgccttaaaaccaaagagggcttcctctagaagccaagggaaaggggtgcttttatagaggctagcttctgcttttctgccctggctgctgcccccaccccggggaccccgtgacatggtgcctgagaggcaggcatggaggcttctccgccagcctcctctggacagcaggctcactgccaggccagcctcccagagggagagagagaaagagagaggacggcttgagctgggcccctgggcttggcctcccgtgattctcgactacacctggctgaggttcctctgcctgccccacccccagtccccacccctgcccccagccccggggtgagtccattctctcaggtaccagctgcgcttgcttttctgtattttatttagacaagagatgggaatgaggtgggaggtggaagaagggagaagaaaggtgagtttgagttgccttccctagctttagagcctgggtgggctcctgtgcagtcactggaggttgaagccaagtggggtgctgggaggagggagagggaggtcactggaaagggggagatcctgctggcacccaccgtggaggaggaaggcaagaggaggtggaggggtgtggcagtggttttggcaaacatctaaagaacccttgccttcctcgtttctcagtctgcaccccttctctcctccc

SEQ ID NO: 8244 - DNA, 726 bp, Macaca Fascicularis
  misc_feature (1)...(726): n = A,T,C or G
agnnnnnnnnngagnnnnnnnnnnnnnnnnnnnnnnnnnnnnnnnnnnnnnnnaaaannnnnnnnnnnnnnnnnnnnnnnnnnnnnnnnnnnnnnnnnnnnnnnnnnnnnnnnnnnnnnnnnnnnnnnnnnnnnnnnnnnnnnnnnnnnnnnnnnntgttnnnnnnnnnnnnnnnaccatttacttcaagggcctgtggaagtcaaagtttagccctgagaacannnnnnnnnnnnnnnnnnncaaggctgatggagagtcgtgttcagcgtctatgatgtaccaggaaggcaagttccgttatcggcgcgtggctgaaggcacccaggtgcttgagttgcccttcaagggtgatgacatnnnnnnnnnnnnnnnnnnnnccaagcctgagaannnnnnnnnnnnnnnngagcaggaactcaccccagaggtgctgcaggagtggctggatgagttggaggagatgatgctggtggttcacatgccccgctnnnnnnnnnnnnnnnnnnncagtttgaaggagcagctgcaagacatgggccttgtcgannnnnnnnnnnnnnnnnnntccaaactcccaggtattgttgcagaaggccgggatgacctctatgtctccgatgcattnnnnnnnnnnnnnnnngagaaaggatttcctagaggtttaagaggaatcagcaagccaacccatgaggccgaacttgaccaaacttcacagtgctgaga

SEQ ID NO: 8245 - DNA, 757 bp, Macaca Fascicularis
  misc_feature (1)...(757): n = A,T,C or G
aaaagcatcagagtggggggtactttagggaaacctttgcttaccnnnnnnnnnnnnnnnagagcagtgggttggagggcagttggccagttttctgttcagcttttcagtgaatgtacccctttaaggttaagacttaaattcccctaaaaagtggggttgttcatagaatcattgnnnnnnnnaatgaatcgttaaattccactcactgaagcccagacctccgtacccaggcccagtctcaccaggctgccagagaaagttggtgctgctgatactggtctcacagtctaagtaagtgtcnnnnnnnnnnnnnnnnnnnnnnnnnnnnnnnnnnnnnnnngttaatgtatttgatgtcttagtgttttagtgactagggagannnnnnnnnnnnnnnnnnnnnnnnnnnnnnnnnnnnnnnnnnnnnnnnnnnnnnnnnnnnnnnnnnnaagaggcctgttcatacaagccagctggtatatatgtgtggttcatccgtcatctgctgctcatggcagactagaattctgggaaccctgtgtaattcagtctgttctcccttctgggccctggtaaagacaagccnnnnnnnnnagtgaacacagcagacctagaaatgtagcaacagcctaatgagtaactgtcatttactgagtatctgctgtgactgtggccctgtctggaggttcctaggttttgagatttagaannnnnnnnnnnnnnnnnnnaaccagcaaaacaaccatttttcaat

SEQ ID NO: 8246 - DNA, 1690 bp, Macaca Fascicularis
gattgtggtgcgtaaacaggatcaactccctcgcccccagctgcgcggatctgcgcggcggcctgcgggccgaagcgagccctcgggtgcgcggagggcgccgcacgggagcgggggatggggaatcgcgcggccttggagcagtctcttgggcccacttcctcgccaagtggggaggggggccacagcctaaggagttgctcctcaaaagcctgggcggacggcggcgacggcgcggattcctagcggcagcctcagctccaccacctccctcaccctccccgcgcttcctctccgcccctcgcgctccagccactcggccgcagcccgcgctgtcctccgccccccggagccgccgcgccagaccctcgcccagacatgggggacctgccgggcctcgtgcgcctctccatcgcgctgcgcatccagcccaatgacggcccggtcttttacaaggtggacgggcagcgcttcggccagaaccgcaccatcaagctgctcaccggctcctcctacaaggttgaggtgaagattaagcccagcacgctgcaggtcgagaatatttccattggcggtgtgcttgtcccactggaactgaagtcaaaagagcctgatggggacagagttgtttatacgggtacatatgacacagaaggtgtgaccccaaccaagagtggagaacggcaacccatccagatcaccatgccgttcgcagacatcgggaccttcgagacggtgtggcaagtcaagttctacaattaccacaagcgggatcactgccagtggggaagccccttctccgtcattgagtacgaatgcaagcccaacgagacacgcagtctgatgtgggtgaacaaggagtccttcctctgaaagtggctctttctgatgctgctggacaatcttttcagaaacccacttttagataaaccagcgcaagccttaaacaaggcacgccgcaccactgctgttccccatctggtcccgatgacctactagccctgattattttgaaagtgtaattcccctctgatacaatatccctcacattcaagatggtgatgtaccacccccgagaatacttccgtctgtattttgtgctcatgttcctgcatccagttgttctcggtcatattattgaccactcgtgaccggagttcagtggccctggcaggcttgtcctgctcttgactgttccactgactgactatggtgttttgtttccaagtaaagtgattcctccttttttttgttcaatgttaaatttaaaaataaccatgtgtatgggtcctcccatgtgtaatacggtaacatgtaacttgcagtgtttgtcagctttcaaagcaggctttgtgaaaatgtaacacaaacagcagcgaatggggctccaatgttgtgcttcctatcaacagctctactctttcagggaaggatgataacaaaccagaaggacaattatgtacgtatttataatgtattaaaactcttgtaagtaacttaaggtattgtgcaatggcctagcctagtagaaatgagggaaaagcattgccgtggaccattgttaaagtgacaggagttgtagggttacccctttgacaagcttccacagtcttcagacatgcacattgatggcatccctacattcttcttcacttgaactttgtaaaactgcatatgggcctgtaatcaa

SEQ ID NO: 8247 - DNA, 1868 bp, Macaca Fascicularis
  misc_feature (1)...(1868): n = A,T,C or G
aaagaggaaaacttttgtcatctgagtgggatttgaatgagacatagtttaaagttttcatagaaaccaggaaggatttgcccaaagtctaagattttactcatgatgtcacacttaaaattgatcaaaagaaataaatacccatacaacaaatggaaaatattcagagtttgtgtacaataataggtatagagaaaataaatgcaggtaacaaaatttcattagtgtaatacactcatacgtatgcttaaatacttatagaataagagaacatgttaatgatttggccattaggaactgtgtgcagtattataaaaattatgaatatgtgaacaaattatgttacaattatgaatatgtgaactaattttgttacagactatattaatatattacaagtttggagaatattaaatagagtgtagtgcctataattattgagtgatgttcagatactacagtaatacatttggttgtcatttatatcaaatattaaatatttgcattatgatatagacctatacacagacatatatgtatgtatataccacattcttaagttatctggatgaattaacatatcttaaacaattaaatagacttaagactataatattcttatccttaagtcatttcattataatgtcttatattgttgaaagcatctaataacagtattactagagaaatggttattatgcactttttcttcaaaacttaaggaacacaacagcactgagattgtaacatgatcagtcctctaaagagcactccacagatgtccactaaaaggtattattagttgtataaaattgtttaataaagaaagaaaacaacaatattatatgcatttttgtgacactaacagtacaagactaatcctacaagatcaaaagtcactgagataaaatataaaccaaaaattcataaaactcaattgaagtacaaaaatgtcacctttgaagatacctatccaaaatgctatctgatgtcaaacgagtgatagctgtaaatgttctcatttttattactctgcccttcttataactcataaaactatatagatttttcattatatgtgctaggaaaactggataatgatgcccctagcatattgaagaataataaaagagaaatatgttacaaccttgtttaacagaactgatattggtgtagaaaaatagtggaacatacgtacgtacatacatacataagtggctgtctatgaaactatataacataaacaaatttaggcaaaattaagattaaaatcatttgttgggttttttaagctacatttttaaaaacattttactttttcactgaaaaatgtatgtggatatccctatgttcttggtactgccttttaagatcttacattacatattttagtttagtctttatgtagttaacaaataattatgcttagttatttctctatagctattatgctctaagaaacttagttcttgagtcaccataggatatattatattaactaagaaacattaatatttgcgaagagcttaaagcctacattgcagagagaaaaaaaaaaaaactgtgacaaaatggatcttaaactagtgtctgctgggcccannnnnnnnnnnnnnnnnnnnnnnnnnnnnnnnnnnnnnnnnnnnncagatcatgaggtcagnnnnnnnnnnnnnnnnnnnnnnnnnnnnnnnnnnnnnnnnnnnnnnnnnnnnnnnnnnnnnnnnnnnnnnnnnnnnnnnnnnnnnnnnnnnnnnnnnnnnnnnnnnnnnnnnnnnnnnnnnnnnnnnnnnnnnnnnnnnnnnnnnnnnnnnnnnnnnnnnnnnnnnnnnntcctgggcaacagagcgagattctgtctcaaaaaa

SEQ ID NO: 8248 - DNA, 2051 bp, Macaca Fascicularis
  misc_feature (1)...(2051): n = A,T,C or G
atgagccaaggaaggcatgaatgagctgtacctcacccaagatctgacggcagagatcagtaaacttcacgatgtgcttcatctcaaaccctagtctaacgccagtcttcccgcagacagttccgagagcaggtctcgacgtcgcttgccctttaagagggctctcggctgctcgagtgggtgaggatcagtgtgtgaagattgatattagactaggaaaacaaaccttagttaacttttattttcatttctgctgcagctttgctgcacctcctttctcttcccttcagggtttactgtggttctcactggtctgtttctgtagccttccaggagagaggagagcattttggggactgaaagcttcaagttcctgccaaggaactggttcctgccctcgtggttggtgaggagggtagtctgcatatttagctagctagttatttgcatgtgaagtccccagaggcttacagactgttgagaggttctgcaaggcatgcaaacaaacagaccaacaggctggaaagttcttggagctctgcagcattccggtgtgtgaaaggctctgagaagtctcaacccagcatttccaaacttctttgagcctaaaactcttttctctcatacctggtcccagacccccacaaaacatgttttgcagaacttctggcaactttgggataacttacccccttcctattctgggaaaggttttattgcttgcagacccctcagaagctagcgtgtggtgtatgtgggctgttttccccagctcagcctgggtcatgaacaaacgggcagtttggcctgaatcttggggcaggttggggagagcacatagactctgtgatttggggagtgggagaacaccgccttctccaagaccgtgcaggtgtacgaccgagaggccgacaagtggagcaggggcgtcgacctgcccaaggccatcgctggcgggtccgcctgtgtctgcgccctggagccgaggccagaggacaaaaagaagaaaggcaaaggcaagaggcaccaggataaatgcctggaatatacggcggcgccacgggcacttggagaccctgtcctgcgcatctgccaagcctggcaatttttagagttttttgaaatgttttgatactttttgatacaatttgctaataactgttttatagaatgcctgacgggggttttccacctcatccccttcctccggccccttgatttgtgctggacaacagatggccagtggtcagcaccaggacctcgcctcgtgtggctttgtcttggatcttgcccttctccgtcactgatgcgatgcagctctagaatttcgtgaagctgcatgcaaagttgcacgcagcccatgggtatgactgtctcaggcccccagctgatttgccaagaggaaaccttaattcccttgagagggtctgcttcttccagagctcctacctcagtggtgtgcacagagttggagagacacctgagggccggtccacgtctcacctttgccatacgggtcatttcttgatcaaatatatgactggggtcctggtttactcccgtccaccctttcttttaaagtattcttaacatgaaatccacaaaagcagaaacaatgaaccattcttgcactttacagaatcattgtccttagctttagaggttgttaatttttgttgtttttaacatgaatagaatgtgtggttctgaaggtgtgtgggggtctcaagaaattgtcctttggggctgggcgcggtggctcacacctgtaatcccagcactttgggaggccaaggggggcggatcacctgaggctaagagttcgagaccatcctgaccaacatcgtgaaaccctgtctgtcctaaaatacaaaaattagacagtcgtggtnnnnnnnnnnnnnnnnnnnnnnnnnnnnnnnnnnnnnnnnnnnnnnnnnnnnnnnnnnnnnnnnnnnnnnnnnnnnnnnnnnnnnnnnnnnnnnnnnnnnnnnnnnnnnnnnnnnnnnnnnnnnnnncaaaaaaaaaaaaaaaaaaaaaaaaaaaaaaaa

SEQ ID NO: 8249 - DNA, 725 bp, Macaca Fascicularis
gaacaggaactagtttccatcatcaactcagaaagcactaaaatctaggtggtgattcagggaggagcaggggaagagagcctattctatggcggcatgaataagatgcttccagaactagtagggaagtaagtaacctcttcaggctttatcaggactggaggggaaccttgctcatgttagcaagcaaggtgtcctagagaagccactcaaaaggctccctaatccagcctgtctccacatacatactgaaaattcttccctactctgaggcagggtgtagtggtttaggggtttctccagactggaatcctacctatctgcacccacaattgagcaaaacaacagttgagagagtccaaaaaaaaaaagtattaaaatgtgattgatgtaatttaccatgtttactttgtgcatgcattttattggggaggggaagtcagaataattcacccaaatctaatggtcttatttcataggctaatctggtttatatttgcattacagatactggagggcaatatttaactacagagtttagtttttcttaattaaaaacagtcctctattaatatagtgtgaaatatctttcaaaatgtagagtttaggtttaagatgtctactagatatcttacgattttcctgtaaactcattgcacaaactggaattactttccaaaagacttagggaatgcaaatatgttatttgtaagatgcattgagta

SEQ ID NO: 8250 - DNA, 2037 bp, Macaca Fascicularis
  misc_feature (1)...(2037): n = A,T,C or G
agaagggcctggctgggcgagcgcacggccatggccccgtggctgcagctctgctccgtcttctttacagtcaacgcctgcctcaacggctcgcagctagctgtggccgctggcgggtccggccgcgcgcggggcgccgacacctgtggctggaggggagtagggccggccagcagaaacagtgggctgtacaacatcaccttcaaatatgacaattgtaccacctacttgaatccagtggggaagcatgtgattgctgacgcccagaatatcaccatcagccaatatgcttgccatgaccaagtggcagtcaccattctttggtccccaggggtccttgaaactctgtctcaaaaataaataaataaataaaaaacaaaagaaaaaactaaaagaaaaaagcaaaccggtattatatggctagattcgggttggggctaaatctgcttgtcctcttgaatgaattgaagatacataggaaagaacgggttagccaagtgtgagatgtaggaaggggaccatttgttcagatgggcctgggttttaacccactggggtttccaaaaataatattatcttaacatttaaagattaaaaacattttctgtagataaaaaggaagtagtcattccatgtaaggcttaaatggttaaggagttagactgatgaattgcaggccccctcgttagaatgaaagtaagagatgtgagctggtggcaggaaaactgacatggaccagtgggggcagaagtctgtgcttttcctggatgctgatttatgggtgggggtggctggagagtttctgttaggttctatcaaggacacttcttggaaggtagaaaagcatgtgagttaagagcactggctgagagccagacacttcctgggttcaaatctcacctctgccattttattcctatgtgaccctgggcaagccagttagctactgtaaacctgtttcctcatctgtaaaatggggataataacaccttcctcctatggttgttgggaggatttgatgagtttaaatgatggaagagagagcaaataagttctttcttgggaagctcctctataaaattgctaatcattacataactacaaggtgttaatagtactgtaatgtgtcacagtgataaaggaattacgttcactgcctcttccctcagccttggaaccttggcatagtggtttttaggccaatattttaaaaataagaacaagaaccaccccttgccaccctaactgatgaattttttttttttnnnnnnnnnnnnnnnnnnnnnnnnnnnnnnnnnnnnnnnnnnnnnnnnnnnnnnnnnnnnnnnnnnnnnnnnnnnnnnnnnnnnnnnnnnnnnnnnnnnnnnnnnnnnnnnnnnnnnnnnnnnnnnnnnnnnnnnnnnnnnnnnnnnnnnnnntttttttttgtatttttggtagagacagggtttcactgtggtctcgatctcctgacctcgtgatccgcccgccttggcctcccaaagtgctgggattacaggcgtgagccactgcgcctggccccagctgatgaatttttatgtaattgtgagatgtatggctgttaatagtattaatcacctggattttgctaaatagtcattctggtaatgttgtgtaaattaaatcttagtattaatactgaagatttgttttacaaagtttttttggatctcaaaaggcaagtcctgtgagatctaaaatagtcgttgatctaatgaccttgtcgtcaccttatctgaatctctggtggttgctcagctggctttcacccccacaggaagctttgtaattgagatacaacatggcagagtccatacctgtgcacagtaatgctctgaaaccctaaagtgtgaagctgtaattgttgctcctgctcctctgccctactcaccaagaaatatgtattcttcatcaaataattataggattggagaacctatttgaaaaagattttcctgacctttgtcatcaataaatttcccacttggttaattgcaaaaaaaaaaaaaaaaaaaa

SEQ ID NO: 8251 - DNA, 714 bp, Macaca Fascicularis
  misc_feature (1)...(714): n = A,T,C or G
agatttggatataactgaatgatagctctcctttcctggaagcagcatttatacccctgaaatatgtgagggttgctccattggtatggttttaaggaagaaaggaagaggaagagtttttttagttagttgaaccgaaatttctcttgtgatttcctgcaaggagttaatatcctttgaatcttggtaaatattttcttataaaaatattgaagttaaatgtaagaaatcctagacggccgaagaaggcagggagtggagctaagcacaggaaaatgcaacgacttacaaataaaaacaggaaagatgaaaatattttagctaatttttaatattaaatggtgaggaacaaaaatgatctctagtgaatgatgccaactggcaccaaattctttttgaatcttaaacatgtatgcacacatgcacacacacacatgcatagagcttcggcataatttagtaaatgcataaagatgctgtaagaaggagttggctctcatttggagtaattgcaggtctttgctcttggccttgtagcacacttgattcctggcatacacatcctagcttaacatataacagtgtggcttcttcacctagtgtaggcataaatcctttacttttcatggttttgaaaaaaggtagtaacatacnctattatgctttgaaatttgattcattatgctctgcataagtggtaaagggctgtattgc

SEQ ID NO: 8252 - DNA, 737 bp, Macaca Fascicularis
  misc_feature (1)...(737): n = A,T,C or G
tgctgatgtgtgatactagaagnnntctagagcggaattctgcatctctgttgaaggaaacagggaactcacacttggtcatccacagtctgactgaggcttgtcttgagggtgactctctgccatcaaaagacggaggacatcagtaattcatcaaatattggaaactggaagtttctgtttactgagctttaaatgatgggcgctgtactccagagagaagaaaacgtcatgaggatgtcctcaacattttcttaggattttagttgcctgagcaataaaatatggatatgcagattacatagttgatgnnaaatatgtagtactgacaaaaggttctctgtcgtgatttggaatcacatactagcaaaaatactggttaagttaattggtcacacttctggcagctttttgggaatacaatagactcaccattttccgtgtgtggaaaaggcaaggggcaagttattcgtcngtaaccgatcctctatcaggacatgcggagaacaagagcaggtaataaatagacgttgtgtttgttgagggatccagtggcctttagggcccttttcagaatgttttggtattactgtggtacgaagagaatttttcagaggagtgagaaaaacatgcacattatggcaagatnnnnnnnnnnnnnnnnnnattttccnnnnnnaagagtaaagctatgtagttcacctttatagctttagttataatcnnaatatccttct

SEQ ID NO: 8253 - DNA, 2341 bp, Macaca Fascicularis
  misc_feature (1)...(2341): n = A,T,C or G
tttcttctgttccagaagttggcagatttttttttttttttttggtatatgctagctagtaaatatttttagttttgttggccagtttcagtcacaactatttaattcagccataaagatccataaacaataacaaataaatgggtatggctatgtctgataaatatttacttacaaaaaaaaaagtgtttgctgatttggcctgcaggctgtcgaatcacttgtttataaaatttgtactacactagttgaatacggtatgcctgatgacaaacccaattcttacatttattaaaatttagaatgaactagtattctgaagattagtaactccctttttaagctttgtgatttttttcatatttgtccattgttattttaataatactgtaaacgttcaaatctgtgccttccaaggacaagctttaggaatgagcatacctcatctagaggaaggaactagtaagactccctcatctggctccaacactgttctgggctgtaatagtgcattctcacaaggacaatccagaaacaaaagtccatttatgactctgtgacctcaaggcgtggcttttgatttgaggccacagggcaagggagaatggtagcgtggcaggcaaggaggggctgacagcaccttgtgcagtcgagttcctgcagccacttcctgcacagaaagacttccactctgcagtcgtaaagagctggccttgacagggagttactgattccccaggacttaattgatataagaaatagcattacaaggaattaattagaagcccttgagtcttgacaagagtttgttacaggctgatgtgcctttttattataaagctagggaagcgaatgaggaggagaagtacagaggatgttaaccatgaagatgtggaagagattttgtagacagcctgcagagtggcccctgcataatgctagctcactcagggaaaattcagagactctcatgagtcctaagatcatgaagaaataagaacatgaaacagttcctgacaagtcccatagcttaactggaagaaagagaacctctttgcttatgaaacatcctgaagctagcgtaaaagttaaagagcactttgctctgaaagagaaatagagggatggaatgggggaagggacatagtcattagggtaagtaaagtaaaactggcttccccacttcctgagaccacaggacatcaacacagtagaaacatccagaattgtctctaagtcttactcctgggaattcaccccacagggataaatcagatcaattagtactggccacctagtggcagagtggggaacaacatgctgatctgtgtgtgggctgggaggtttagtatagtccatattcacaatagaagctaattgttataaaaatgttaagagggggcataaaatattttagagcaggggaagatttttagcatgaaaacaatatattttttcacttaaacaattcatccagctcagaattagatgatcctgagtatgaggataactgaatatagtaaccaattctacatcttccatgcatgtgtgtatttaaagattacaattattatgctatttttaagatgtctgttctagataaagttcttccatgagatactacttttgatgtattctgaagagtgctctcatgctgggagaattcagtgctgaaaatagcttttggcctagagttgagacctgggtaaccacccccagcttagctatgcgaaacttgggtgattgtcagaaagtcatttacgtatcatgtggggatgtttgtgtatgtgtgtggggagtgtgtttgtgattgtttgtagtgtgtgggcatatgtataaatatatttgttaagttgaagcaaatacagtagcccccctcttatccatgggtaatacgttccaaactccgcagaggatgtctaaaactgcagatagtactgaaccttatatacactattttttttctatacatacctatgacaaagtttaatttataaatcgggtacagtaaaagattaaccacaatagctaataataagacagaacttttatggcctggtgtggtggctcatacctctaatcacggcactttgggccgtgatcacctgaggtcagttcgnnnnnnnnnnnnnnnnnnnnnnnnnnnnnnnnnnnnnnnnnnnnnnnnnnnnnnnnnnnnnnnnnnnnnnnnnnnnnnnnnnnnnnnnnnnnnnnnnnnnnnnnnnnnnnnnnnnnnnnnnnnnnnnnnnnnnnnnnnnnnnnnnnnnnnnnnnnnnnnnnnnnnnnnnnnnnnnnnnaaaacgagcaagactccatctcaaaaaaaaaaaaaaaaaaaaaa

SEQ ID NO: 8254 - DNA, 732 bp, Macaca Fascicularis
  misc_feature (1)...(732): n = A,T,C or G
cnnnnnnnnnnnnnnnnnnnnnctgttgccattttgtaagcagtgtnnnnnnnnnnnaaaggggcaggtgttaaagtcaccnctcatccaagggagtatttgcctgggcagaggaagtcctaccagtnnnnnnnnnnnnnnnnnnnnnnnnnnnnnnnnnaaatgaccttggttcnnnnnnnnnnnnnnnnctgcagccacattcaacattccatttcttaatttgtcccaaacttgttttatctcctaagtcctgtnnnnnnnnnnnnnnnnnnnnnnnnnnnnnnnnnnnnnnnnnnnnnnnnnnnnnnnnnnnggttggtaacccttagcttctttgcagacagcggcctcaggtggagctcacctttgaggagactgagaggnnnnnnnnnnnnnnnnnnnnntggtccttgtacaagcagcaagagcataagatggagagggacaccatcagggccatgctagaagcccagcaggaagctcttgaggaactgcgactcgnnnnnnnnnnnnnnnnnnnnnnnnnnnnnnnnnnnnatcccaacctgttcccctttgagaggnnnnnnnnnnnnnncacaccaccgatccctaactaccnnnnnnnnnnnnnnnnnnnnnnnnnngtcaccaaggtgtacacacaagtggagtttaagagatagacttgnnnnnnnnnnnnnnnnnnnnnnnncnnnnnnnnnnnnnnnnnnccagggttcaagtctg

SEQ ID NO: 8255 - DNA, 620 bp, Macaca Fascicularis
  misc_feature (1)...(620): n = A,T,C or G
cccccaactatgaccatgtggtcttgggcggtggtcaggaagccatggatgtaaccacaacctccaccaggattggcaagtttgaggccaggttcttccatttggcctttgaagaagagtttggaagagtcaagggtcactttggacctatcaacagtgttgctttccatcctgatggcaagagctacagcagcggcggtgaagatggttacgtccgtatccattatttcgacccacagtacttcgaattcgagtttgaggcttgagaagctggatctccggccgggcgcggtggttcatgcctgtaatctcaccactttgggaggtcaaggtgggcggatcacctgaggtcaggagtttgggaccagcctgaccaacatgaannnnnnnnnnnnnnnnnnnnnnnnnnnnnnnnnnnnnnnnnnnnnnnnnnnnnnnnnnnnnnnnnnnnnnnnnnnnnnnnnnnnnnnnnnnnnnnnnnnnnnnnnnnnnnnnnnnnnnnnnnnnnnnnnnnnnnnnnnnnnnnnnnnnnnnnnnnnnnnnnnnnnnnnnnnnnnnnnnncaaaaaaaaaaaaataataataagctggatctctatccgggccagagaagatctcaca

SEQ ID NO: 8256 - DNA, 736 bp, Macaca Fascicularis
  misc_feature (1)...(736): n = A,T,C or G
aatggaagtgcaagaaggaggatgagtcaaaaagtggctactccaaagacgtcnnnntacggcttttgcaaaagtatggcgaggttctcaacctggtgctttccagtaagaagccaggcactgctgtggtggagtttgcaactgtcaaggcggcggagnnnnnnnnnnnnnnngaagttggcctggtggataaccctctgaagatttcctggttggagggacagccccagggtgccgtgggccgcagccactcaggactgtcaaaggttgcttggttgtggtgcgtgaagcatttggagcttagacgaccnnnnnnnnnnnagaagggnnnnnnnnccacggcagccacttccttcccagcacttcagttttccgggtatgtccctggctgccccagacagggaccgactgtcaagaggcaatgtctcctcttagaagtaaccctggcaggcnnnnnnnnnnnnnnnnnnnnnnnnnnnnnnnnnnnnnnnnnnnnnnnnnnnnnnnnnnnnnnnnnnnnnnnnnnnnnnnnnnnnnnnnnnnnnnnnnnnnnnnnnnnnnnnnnnnnnnnnnnnnnnnnnnnnnnnnnnnnnnnnnnnnnnnnnnnnnnnnnnnnnnnnnnnnnnnnnnnnnnnnnnnnnnnnnnnnnnnnnnnnnnnnnnnnnnnnnnnnnnnnnnnnnnnnnnnnnnnnnnnnnnnnnnnnnnnnnaannnnnnnnnnnnnnnnnncaaaaaa

SEQ ID NO: 8257 - DNA, 730 bp, Macaca Fascicularis
  misc_feature (1)...(730): n = A,T,C or G
gnnnnnnnnnnnnnnnnnnnnnnnnnnnnnnnnnnactnnntccccggcaaggtgncnngagagctggctgcgcctcatcactgtgatccaaccccaatgacaccttctccctgaggccttccctgannnnnnnnnnnnnnnnnnnnnnnnnnnnnnnnnnnnnnnnnnnnnnnnnnnnnnnnnnnnnnnnnnnnnnnnnnnnnnnnnnntttctttatttgattactgtcnnnnnnnnnnnnnnntgggctgggcgtggggccctgtctgccttactccgggctatttctccagggtnnnnnnnnnnnnnnnnttgatggggggcaatgtggaggtgcctccagttagcagccagaggaagggccgnnnnnnnnnnnnnnnnnnnnnnnnnnnnnnnnnnnnnactcacccattgatgcccacagtcagctcccggggcgcaggccccatcttaggaggaggagtagcagggcgaggaggcggcgatggtggcggcggcggctttatttcctccctgactggtgtgggctctggnnnnnnnnnnnnnnnnnnnnnnnnnnngggnnnnnnnnnnnnnnnnngtctggtcactatgcggggaaagggagggaaaatgggttgcgcgaccaccaaagtgaaagagaataaactgtctttactgcccagaatctgttgctggttcctggcccctagtgaccaactatttagcccagtgtttcccaaacccac

SEQ ID NO: 8258 - DNA, 734 bp, Macaca Fascicularis
  misc_feature (1)...(734): n = A,T,C or G
aattaaaatcagtattatattaaataacagaacaaacagtatgtgatctaagttgtatatatattacatatatataaaatagtgtgtaatacaaagccattatgtggaggactaacttgagatggtgtcctaagatgcaggacagaaatggagaagtaacagatgacacagacaagacattatatgtccagtgnnnnnnnnnnnnnnnnnnnnnnnnnnnnggatgtgtacagtcacgcaccacataaggacgtatcagtggcagaccgcatgtagacaggggtcccataagatcataatggaactgaaaaattcctatcgcctagtctgtggtagccatcctaaggtcacagctcatgtgttatttgtgtttgtgctgttgctggtgaaaacatgcctactgtgctgccagttatgtaaagatccagcacatacnnnnnnnnnnnnnnnnnnnnnnnnnnnnnnnnnnnnnnnnnnnnnnnnnnnnntacatcctattttttgctattttagagtgtattccttctactgataacaaaaagcgaactataaaacaggctcaggcaggcccttccgcggannnnnnnnnnnnnnnnnnnnnnnnnnnnnnnagatnnnnnnnncatgtgtgttattgtccctgaagatcatccagtgggacaagatatggaggcagaagacagtgatnnnnnnnnttctgaccctgtgtgggcctaggctaatgtgtgtgctgt

SEQ ID NO: 8259 - DNA, 772 bp, Macaca Fascicularis
  misc_feature (1)...(772): n = A,T,C or G
gtatnnnnnnnnnnnnnnnnnctttggacactattaaataccttgagcatggctatgttatgacacatcgccagattaataaatttaaacctaataagaacctcctgccattgaatggtctgagaagctagaggtgccaacctcggaagattgtattgcaaacnnnnnnnnngtgctgcaaaataattcctatggaatcatcattgattgagcccctaggggacannnnnnnnnnnnnnnnnctggacagagagaagattgtagagagactacttttgcaaacgactacccagataatgcaccaaaattacatagaataattgaaacaaattaccctattaagtgggaggagaatggtatggctcctccaagcccaaaaatgattgacccaattaaaagtacagaacatccagaattgtggaaattaatgatggctcaaaccccaattcagatttggaaaggagaatataaaacagagacccatggtaaaaacttcaatttgttgtagccatgacctctaatcggacggtcccattgcagagctgtgttaaacctccttttatgttggcagtgggaaaaattaacatcctacctgactctcaaaccatatcatgcctcagctgttgtctttttacctgcattaattctacctctaataaagatagtggttagggcctgagaaggagtttnnnnnnnnnnnnnnnnnnnnnnnccttnnnaggcctgtccctccatacagagtatcaccgaaagtactaaaggaatacttagt

SEQ ID NO: 8260 - DNA, 758 bp, Macaca Fascicularis
  misc_feature (1)...(758): n = A,T,C or G
accaaggtccattgcagcctnnnnntatgattcaagttttcacatgtgtctttatatagctatnnnngatccactaatagggtgttacaatanntgcttacataagacagctggaaggaaggaggaatttactgaatgtgtctgaaatttcattgtttagaagttggaattttatgcctgtatctatgttcatgcctttgtaaaacccactgattttaaaagtgaaaatggacttttttctctggtgttactctaaacaccaaacaatccctgcaaagggattattctgatgtttctttatttcacatgaaaagttaattgttgactctggaacttagataatatttttgacaatattgaagagtgagttttagtccagtaaagatgttttaatgagcttgaaggtaaagttttggttaagttaggattttcacaggaagttacatactgaatgaaatataatgtttgtacttttggtaatgtgctactcagttcttaannnnnnnnnnnnnnnnnntaaaagcccagtctatagcaatgggatttaataaatttccaatatgtgtttttatttgtttaatttctnnnnnnnnnnnnnnnnnnnnnnnnnagtatcagtctttactgannnnnnnnnnnnnnnnnnnnnnnnnnnnnnnnnnnataaaaaattccaagtgtgaggcgttgatgtttaataagtttctgaaagtaggaatctgaattttaattgtaggtttctaagttatataatttag

SEQ ID NO: 8261 - DNA, 791 bp, Macaca Fascicularis
  misc_feature (1)...(791): n = A,T,C or G
gacacataggccattatcctgtattccttgggttgtnnnnctttagctcaggaaggtagacgagatctgtgcctatgggtctccttgcttcaatcccttcttgtttcagtgacatatatatattgtttatctgggttggggatgggggacagataatagaatgagcaaagtaacctatacaggccaacacggaacagcatctcccctgggcttgctcctggcttgtgacgatgtaagacagagcaggccacagatggccatctgctccccattctnnnnnnnnnnnnnnncctccttgcgggcttctgagatctctggtcaaagtgaactcttgcttcctgtattcaggnnnnnnnnnnnnnaaagtaaggagcagactcatacgtgtggccaggaagtagccagggtgaagagagactcggtgcgggtagggaaaatgcctgggggtccttcacctggttagggagatacnnnnnnnnnnnnnngtactgaagacttctgtattctttcctcctgctaacccagggacggtcctaagaggaaggtgacttctctctgtttgtcttaagttgcactgggggatttctgacttgaggcccatctctccagccagccactgccttctttgtaatattaagtgccttgagctggaatggggaagggggacaagggtcagtctatcgggtgggggcagaaatcaaatcagcctaaggatatagttaggatttctctattaagtaattaatcctaaatatatcacacaaagggacacaattataaatgtaataaag

SEQ ID NO: 8262 - DNA, 2176 bp, Macaca Fascicularis
aaacgagattacagaacagtgtctaccacaagtgaaggcttcagcttttattcctatgacaatccacttgtttttgaaaacagcagcacaattgacatatgttttacaattacagcatgcacaaaaacgcagaatacaaaaatgttattttcttttatatctaaaatacatttcttgactctgagctcacggttttgcttggcagtaggaaagttaaacttatgtagcgaattctctcctttttcaaaatcagatttaagctttggtgagttggattctttgaaactgcccctgcaaatgactcccgctccctacttcgcctccccacgtcctgctgggggacgggacggtggctgtgttcctgacctgtcctccttgctatctgttcttgtctgacctgtggcatggtgccgcccagtgcccgctctcccaggcagcacgttggacagtctgcagcatcctggcttgggagcctgtgtagagtcagtcttctcacccaggccacctgcctaccttgttggcagctgttcctctgagtccatcctttcccagcccctccagcctctgagacttgagccctagttaagcactcagacaatttctgccattctttctgtatgtgtgggtcacacacaaattcccctacagctgtgaggaaaagtcagggctgatacaagaccttcattcctcattgttcgcagaagcctccatgactatgttgagtcccaggcaactgtggcaacagagctgtctaggaaaaaatgcccctcaaccatcacaccccagaaatgtcagcttctctgctcctcggtgaccccactcccacttccatagggcagtttttgaaaattaacaaaaaaccaagtatgtaacccagttgagtggtgaggaagacatgccatgaatgccccaaactttacctgttatgattcttttatgttaaatactagaaactgagattttaataggtcagattatggccgttgggataagattacctgtattcatactctaactttgccacctgcttgctgtgtgacctttaccagtattatcagtcaccccaatttctcacgttcttccactctaaaaatgagatgatggccaccctatgcattgagtgttgttttgagattaatgagataatcagtcagtgttacatttctgacagacggcatggcgtacttgctaagtagtaagctaatcttaaaatgcagagggactgaatactagatgccttaccagcacccacagggttcattgcacaatgttcttgtttatactactccagagctgccctccttttcctctgaagttgcaaggtttcactagtgcagtagttaagaggaatgagacaatatgctaatggaaaattctgggaacattaattagtaatttgtatgaggtatttgtggaggagcattctctaagctagaccctaatggccaagtttgacagatagtttctttatcttttcttgtgtttaaaattacattttgtattttgcacacctaagaaaatttctctcacttttgttagaacattgattcttaaaaagtgtttctgaagggatagtccattaagtgattgagaatgccaaagtcagcctgcctgggacttaatctccttttcctacactctaactagacttgggggacaagttagttaatgtctcgaaacttgatttttctcatctgtaaaatgggaatgataataggacccatctcgaagttgttcttgtgagtgaattcatgtaaaatgctacacatgatagcatagaaagtagaggcactggagacaaatagacttgggattcaatcctggatttgtctcctgcaaactatgtcatgggcacatttttaacctctctaagccccaggtttttctataaaaatgggataactactagtagaataggttttggttatggatgaaaagaatatcttgaaaacatctgttgtatcataagtggccaattaatactggttttcttgtattaagttgttagaaacaacatgatacaactaaaaagcatgaacttttgatggaaacagacttgaaattgactctacaattaacagcagtgtggcctctccttgcacaagttacatacatctttgagcctcaatttcctcatttataaaattatcgaataactgcaaaaaaaaaaaaaaaa

SEQ ID NO: 8263 - DNA, 771 bp, Macaca Fascicularis
  misc_feature (1)...(771): n = A,T,C or G
acacacacacacatttacacacgcagganncnnnagccagagtagaggctgtggcccaggcactnnnngctgnctcccannnatggtttgggggccatacctgttccagctctgttcccagggtagggcagggaggtgggggttgggggagtagtggggcacggctcctgagatgcagcccccagactgacagacggacagacagacatgcaaacaccagactgaagcacatgtaatatagaccgtgtatgtttacaatgttgtgtataaatgggacgacaactcgccctctacctgtcccctccccctttggttgtatgattttcttcttttttaagaacccctggaagcagtgcctccttcagggttggctgggggctcggctcatccacctcttggggtacctgcctctccctctcccgtggtgtcccttccctctcccacgtgctcggtgttcagtggtgtatatttcttctcccagacgtggggcacatgccccaagggacatgatcctctccttagtcttagctcatgggactctttataaggagttggggggtagaagcaggaaacgggaaccgagctgaagcagaggctgagatgggggactggaagacagtgctcctggccacccagcctctgctgagaaccatttctgggattagagctgcccttcccagggaaaaagtgtcgtctccccgaccctcccgtgggccctatggtgtgatgctgtgtctgtatattctatacaaaggtacttgtcctttccct

SEQ ID NO: 8264 - DNA, 596 bp, Macaca Fascicularis
  misc_feature (1)...(596): n = A,T,C or G
atgggtcactgtgtagacgactcacccagtctgcatgtggttcaaggccccagagttatctcaatgatgctaatgggtgatctgtgctggagtttgtaattggcacctttcgccagctccatctccatgttcaagaccgagggccngagggggagccgggnggggggccagcacctcccagtggcgggcatccaccttcccccagccccacagagtgacctcaggaagcagtaggcctcacctggctatgactgacccggctcagagctggtgagacccaacacagtccaagtcatttgcttacatttgccaaacattttgccatttttaaaagaaaaaaacacaatccatatgaatttcaaactgttgtatgtataatcctctaatactatttttaactacttctaaaatctgttaacccttcagtcactaacacagttctctaggccggatttatcatgctggttgcttttacttttttttctccttttttaatgcaccaaaaatatgtgatacaagggatgcaattaacctattgtaatttttatcactttatcctcattcggatattctacaaaaacaagaatatataatgt

SEQ ID NO: 8265 - DNA, 407 bp, Macaca Fascicularis
cgtgtttcgggccagggttggcttggcattgaccttcatgaccttacatagctttagagaagccataacgttagactgcaatactaacgacctacgcccctcccggcagagaccaccgcgcccctctgcgccccagcgacgcggcccacggggacgccgctgtccgtcctgctcgccctgtgccctctcgctgacttctcccgggtcgtgtcttaaaaaaactcctgttttcacacctttcaaagccagctctgagcagacagggcgtcctctcttagaacctgcgcaccccgttcccagcgcatggcgcccggggcctcgagcttagcttagaccgtggtgtcctctgtccgtttgtcctgcgcctgcgcctcctcctgcatgtcggggcccctgcgtgtgttctc

SEQ ID NO: 8266 - DNA, 753 bp, Macaca Fascicularis
  misc_feature (1)...(753): n = A,T,C or G
tttcagtggcagcaaacaacnnnnnttgcgtagatataaatgaatgtgatgccagcaatcaatgtgctcagcagtnnnacaacattcttggttcattcatctgtcagtgcaatcaaggatatgaactnnnnnnnnnnnnnnnnaactgtgaagacattgatgaatgcagaacctcaagctacctgtgtnnnnnnnnnnnnnnnnnnnnnnnnnnnnnnnnnnnnnnnatgtgcccccagggataccaagtggtgagaagtagaacatgtcaagatataaatgagtgtgagaccacaaatgaatgccgggaggatgaaatgtgttggaattatcatggcggcttccgttgttatccacgaaatccttgtcaagatccctacattctaacaccagagaaccgatgtgtttgtccagtctcaaatgccatgnnnnnnnnnnnnnnnnnnnnnnnnnnctacaaatacatgagcatccgatctgataggtctgtgccatcggacatcttccagatacaggccacaactatttatgccaacactatcaatacttttcggattaaatctggaaannnaaaatggagagttctacctacgataacatgttcacatgagagctgattatttaaaggagtctggcttctcctcctgtcctttgctcctgctctggccatgtgatatacctgcttcactttccaccatgattgtaagctttcagagggcctcatcagatggtgatggtggtatcacgttacct

SEQ ID NO: 8267 - DNA, 798 bp, Macaca Fascicularis
  misc_feature (1)...(798): n = A,T,C or G
acaactgaagatggcacagacnnnnnnnncannnaatataaaagccaatataatttctcattgtaagtactatggaatatgcaaattcagaacattttatacctaaaggtaattctgtctttcctaatgtgtttataacacaaaaattattggaagatgtggttactatttggaaagcataacgtaacaaaactctctttcgttaccacaaattttgggagtttagtactttacagattgtcccataaggtcagtagttttgaaacccataattctccaaaataaatgaaagacatttaattcaaggatcaaaaattgtggccacttttgcaaatgactacctatagcctgtgaaaatacatttcaaaaaatgtcatgtgcaatgaacactaaatgtaagagcagttacagtgtgactcactcatgttaaaaaaatcaaagagctaaaaaatacatctaatttatgtaacccattggaatgtatttctaggttttcttcaggattaattaaataaacatgcaatttatgaaaacatataaacaattatttatcacttttatgacccaaatcacaataaaattgtcatttaggataaactggggagaatagactgaacatatggttatattcacagttatttattaacttaaatgttattccaacattagagctaatgttaaaaagatttaaactgtnnntgtctanntatttggaataatatattaaagtattagcattgtggttgattttcacaaattatgttgcatcttgtactactaagctcgtgaaaataaaca

SEQ ID NO: 8268 - DNA, 712 bp, Macaca Fascicularis
  misc_feature (1)...(712): n = A,T,C or G
tagcatatacatgatgtattccagcacaagcaagaaccaagacatctatatagcttgtgtgtcccaccaagggaaaattcatggtttgtgttcatcttttaaaatagtaaaaataacttgtgagtttcatttctactntcttggagccccagtgattgcagaatctaccacagccacacatcccatttaattctctcctgccccctgaggcttttatccttatcctcattttcaaggtgaagagactgatgccaggtgtagttcccagtcttttcataatttttcagtcacctctttaaatggcaattaggacctggggcagtggctcacacctgtaatcctagcactttgggaggctgaggtgggaggatcacttgagcccaggagtttgaaaccagcctgggcaacacagtgagaccccatctctacaaaaaattttaaaaagtaggtggatgtaggctgggcgcggtggctcacgcccgtaatcccagcactttgggaggtggaggtggaggcagaggcgggcagatcacgaggtcaggagatggnnnnnnnnnnnnnnnnnnnnnnnnnnnnnnnnnnnnnnnnnnnnnnnnnnnnnnnnnnnnnnnnnnnnnnnnnnnnnnnnnnnnnnnnnnnnnnnnnnnnnnnnnnnnnnnnnnnnnnnnnnnnnnnnnnnnnnnnnnnnnnnnnnnnnnnnnnnnnnnnnnnn

SEQ ID NO: 8269 - DNA, 2917 bp, Macaca Fascicularis
  misc_feature (1)...(2917): n = A,T,C or G
acatttatccaataatgacaaacactttccgtatagcaaacattctgctagatgctggaataacaaagctctcatccctggcagccctcttgtagactgccacagcaatagcagaaagaaggacgggagctgggacagaggtgtgagcaaactgctctccgagaagccaactccccagtggagagttgggctcactatggaggagacttccaagctgttccttgaagagtggacaggacagcagggattcaaaatgcaaaggcatcacaagaagagctcggctgtgggaagctctggttatgttgctggatatgaaaagggactagggggagttgaaactttcaagggttcctcaaataactaaatttctgacctcttaccattctgggcattctcctccgaatgctttctaatggcatctagaactgaagacagtagacatcccaggggtccccatcctctgggctgtggaccagtaccagtccgtgccttgttaggaactgggtcacacagcagaaggtgagtggccagcagtgagcattactgcctgagccccacttcccgtcagaggcgacgttagattttcataggagcacaaaccctactgtgaattacgcatgtgggggatctaggctgtgctccttatgagaatctaactaatgcctgatgatctgaggtggcacggtttcattccccacacccaccccattcatagcaaagttgtcttccatgaaaccagtacctcatgccagaaagattggggactgctgctttatactgtccaacttgtacagtatagagtggactaatgcgtcacttggtctgaatactatatggctactgaattaaattgcctgggttctttgaactttcgatcaatcttgtatcagcacagttgattttaggaaccaaagtgccagacttccttaatatgttcccggaaatatcaactcgttgttatatttgaacagactgtgaacatcttttttattctagattctattgttttgttaccttagccaactcttccaaatatgtaccattgcattttaacaagcaagtatttatgtccgttttcttgcaacacttgaagttctctgagatcagggactgtatctacatatggtagagacaatgtatatgtttcttgaaaggataaagagtgaataaatccaatctaaatcattgttctctgttaaatagaatttaagaatgcattcaatcccactaaacctctccatacatgtagacttacataatccggaagcgtaaatatgtttaagtaatcaaaacttttgaaacagatgtcaaatagagatcaatccatgtccatgctaatttcctcagtaatgtagaaaattgctcagtcttcttgctgtgactccttaattgggtgcgtttacatgcagatcattcatatgaccagatatattagggtgggttccacaaaaattgactctgagatggagacttttgtgcagaatgtgcatcagggagcactgtcaggaagaacacctatgaacaggaaggggatcagaactggctgaaaggaatgggggacattgttgcagtcatatcagaggcctcagtcagtcctgtggagattctggtgcagtaatgaccttcaaagttgccaccaaacaaagggaggatgacagatgtttccactgccatatagccgtagtcctggaagtgggctgtccctgcaaagtgcagtgacctcgaatgaggcagcttttgtccactgagggcagttcccagagagaggttcagctaggagccttccacagctaatattcctggcagctggagaaatatgtgcttctttcccaaaggggaatctgggaaccgcatcatggcatccaccacgtcagagaaaaaaaaatcagaaaaggacttccagagcacaatcttggctgtcttctgacattgtgctctgattttgaaggaatacattcctttcacatctctttcccattttcattttagttgtttaccacacagtagtgaggcaccacaatcgattgtcagctctctatgatgcaccactttcttgctccactgcgccccaagtggttaaccctgtgtagggcctgagcgtaattctctagccgatggaatgacccaaggattcttggtcactgatgctattttaaagacatctttctgcccaagaggcttggaaaactgaagacctatagtagaaggtgaaaaccttggagaatctgagagcttccaatgcaagtagctatactacaagatcccaacgatgagacagctctgttgacacagcacctgcagtgcacgtgaagcatatgcagacgtgtgcctgtcctcatggaatgcttggcatgtctgtgaatatataaaacataaatgcacaatggacctcaaatacagggcaatagatccaagaaaaccgtaaaccattttccccaccatcttttgttctaaaattaccatccatgtatcaactgcaaaaagctgagtgatccggcctctggaagacatgatatatgtgctaactattcaaagtgtctatgcctgcgtctttgcaccagtctgtgtgggcctgggtctgcttccatcagacattgaactttttctggcctaatttcttcgtctctctgtgtgcctattatttcaataaaagactgaaagagaggccgggcgcggtggctcacgcctgtaatcccagcactttgagaggccgaggcgggtggatcacgaggtcagnnnnnnnnnnnnnnnnnnnnnnnnnnnnnnnnnnnnnnnnnnnnnnnnnnnnnnnnnnnnnnnnnnnnnnnnnnnnnnnnnnnnnnnnnnnnnnnnnnnnnnnnnnnnnnnnnnnnnnnnnnnnnnnnnnnnnnnnnnnnnnnnnnnnnnnnnnnnnnnnnnnnnnnnnnnnnnnnnnnnn

SEQ ID NO: 8270 - DNA, 1817 bp, Macaca Fascicularis
tctcgacccatttctgtcttgggtaactcctgagtctcttcaccatggccagtttggaagactttaggcacaaggacctcgtcttttccttcagatcttggctcaacaaagaggtggactcaccgtgatatggatacagcttgagcgtccaggagtctccccagatccacgggagggcctcggtggtgtgttcatgttgtcatatttttgtaaaatttgcaaaggtaagatactttaaccatagtacaaattactattttcttcccactccagcttcgtttgtgtttcaattttcctttatatgggataattggagtggccatgggcacttctgggatctgaccaaggggaagctgagtggggaactgatttgagttgggttcattaggacatgtttatgtggtcctctgaaacacaggatgtattaatatttatgtggttctctgtgtatagataaatcattgctagtaatctctgtgtagagaatagcttctaggaattctacccactgcccaactcacttggcatggtgatattaagttgccatatcgtgatatgaatgtgtctcatggcacccagcccaggaagtgtatggtcagtagagaagaaacaggagaaaccaggcttgaaatgtacagagccagaagctagtctgtggaaaattcttctaatcatcgggggagaaaatgtgttttagaggttatgcagggcagttaataaaagtattatgcatttttgggggattgtgtgatgtatctgttttgcattcttttctcattataggtaaatataggtactttgtacctaattttatgtttataattttgtatatttttcttaaagagggctcctcaaattataaaaccttcagttcccacaaggtcttcacatccaaccttggctccatcatttattttctgtgatcttggggaactcacttgtgctttctgagccagtttcctcttctgaaaaatgtgaatgataatttggacaggtgaggattcagaaatcctcgtgaccttattccatttttgaaaccattagtagaagaagtcactcagtcaaacaaaaattaaaccagaatataaagataggaaaagatgtaatatacaagcaataacggtgagcaatgaatccagtaaaacttaaatctaagttaatggaaatgatgtggttgttgcaaacctctaatgcagtttataaagaaagaatttttgtaatagaagagacattatgcaagaacaaatttaataataagctgtatctataattccagactttttttcccctgcaaaacctgggaaacaagagggatgaaggaatataaacatcctaaaagcctcatattgttgaaggagactttgaaattcttggcgttgatagatacatgctcagatatttattaaacatttacagataccaaccagcaaaataaaaagggaattggaacttctgtacctcccttttcttttatcatgtgggaaagtctcaaagccctggcactgggagctgctcagaaggcaagggccacatgtgcccccagcttccccccacccccagcacagggccaggaagccactgctggtggctccctgtctgctgcctcccgagcagtaggtcccagcgaggtggggtggtaataggttgggctgggagcagattagcaaaccctctcctccccgcaaggaaataaccaggccagataagactagccataaaacaaaacaagggctgctgtcacttggctctctggctggagcttgaggacgcaaggagggtctgtcactggcatactcgagactgtaggcactgccatg

SEQ ID NO: 8271 - DNA, 725 bp, Macaca Fascicularis
  misc_feature (1)...(725): n = A,T,C or G
aatgaaaagcaggcactgnnnaaccaagttgtacacattgtaccacnnnnnnnnnnnnnnnnnnnntaaattccactttgtagaacattctccagaaatctgagattattcaggtaagagttagtatattaaatgtacatctttttactttatatttgatgccaactgattatactagatgtattgaacacaaagcattaaaagaatattgcactgatactaaattattcttttaataggctgaaaaagcccttactaaaagccccacatatttcaattattttatttcattatgactacttaggttctgggctggggacaagttcacttaaaacaattttatttaacaagnnnnnnnnnnnnnnncttctgctttgtagctatatgcagaagccatcaaacaaaggggaacttttaactgcaacactaagctaaagtatgtaaaatgctacattctactcagtcttggagtgctttgtagaaagtcatnnnnnnnnnnnnnnnnnnnnnacaggtgtggagtgctggtaaatgctttgtgtttttatgtaaaatatttcctcaacaaaaaatgctaaaagtacatgtcctctgtagtaaactgatatctatatatatgaatcattcgagcctannnnnnnnnnnnnnnnnntacttatgactagagaaaccctaaatattcatgcagtaaaagttacgtggtctgnnnnnnnnnnnnnnnaatt

SEQ ID NO: 8272 - DNA, 2056 bp, Macaca Fascicularis
actggtttcttgtttgtgcgcattaaagtatttaattgcaaagagtgcaccaaggtgtataaacttagactagacagctgttcagctttttctgtagtagcattagcaatttggtcatttaactactttaagatatttacattttatggcaggtagctgtaacagcatttacatatatttcctagtcatcaagattaccatcttctttcaactttttaaaagtcacttgtttttaaaggcctctcaaagccttgtttttagtcttccatgtcatgccgataaggagaggctcattcaatatctgtgcacaaaaccaatctatcatttaccgtcagacgtccatacctgttttgctttgcattcttactcaaaagctgacaatcttggaaagggtataatgtatattttattgatggatatatttaaatgtttactttaatttggcatattctttccccttccttctgtaataagtttatcttcctcagataaggggatatacatcttattttttttaaagacttaagagtttattgtgtaaatgatacttaaaatctagatatatactaaatgaaaagttttatttttgccaagcacaccaagcacctttgaaaaatacatattccataaatactttgtttttaattaatttcatttaaagatagcaaatgattataggcaggagaaacaagtcttttactgtttggaggctgttttaacttacagtacaagccacatactagaattctgtaatttcagtcacagacatataataatatggactcatgtgagaatgtggaaatgtagttctggaaaaaaaaaggaatgcaatttgtcaatcctgatgttaattctcaagggtataatgtgactctaatattataaccaacaacattatcttgtttaacatttaaagcaacacttagaaatgtttataagtgatgattctctcttatctttatacagttctattggagagaaggttgaaattgttcacaatttagactgatggtctttcctactaagagtcttaattttgtgactatataagtcattgcagttagtctttaatgaaacgaattttattaatgtgaaacaaattctgagacaattatttgttccctttaaataatctgctatttaattgttgttgttgttgcaaaatgtatttttggaatgttaacctcttttcatacctgcatacttgaacttgtcttttgtgtgggggccttaaaattcataataggaagtggaggcagtgaaaggaagtaagaaaaggaaattattctaaaagatggtttgcaaatttaaactctttaaatgaacatatcacaaaatgttgttaagacccaggatgtccattaagaatgtttcttggcaaccttaatttgcatgttagtatatattttcttagttacacagttttattttggtatttgcttaaaaaatgtaataccattatagaaattaccctatgtactgatatatttactacctcttctctagagaagacaatctgtctttaaagggaaaaacactggtcaataagtagtgatcaaaattatcactattctggctaaccttgctgcaaaactaaatgcatagagtgttaaaatatgccttccctttagattttaaactgtttccaaaatgctctttgacaccctttcatttctttcacgttagtgaagttttctttgaattgatccacagtttatcatgaggcaaggttaatttaacatgtaagtcatcatagggaacaaaacaaactgcaagggaattgcctttgtgtgcaacttgttataatatctagttctaagtctaaaagagagtagaagtccagagactttatgtttaagagcagctggtttgcaaatccacattttgttggtccttgacttctgcagagacccagagcatgacttagctatttactgggtaaggatatgcattatcttggactcccatgtaattggaataaacttcatatcaatgtttcaaataaaaaaaaaaaaaaaaaaaaaaaaaaaaaaaaaaaaaaaaaaaaaaaaaaaaa

SEQ ID NO: 8273 - DNA, 742 bp, Macaca Fascicularis
  misc_feature (1)...(742): n = A,T,C or G
gactnnnnngcaaatattaaaaattattgccaaaattgggccgtatgtattaagattataatgtttgtataaatgtccttgaacttgccatttaaattaactcattttcttttcagtttgatttgaaagagcacaaagctgataagtacttctgcagcagatacagtattaaaatcaggttgtgtgtacacactgcactgtaaggtaccttggtgtcctggtgtgaatagacaagaagctgtactatatgttgctctctcagtggcaacaatgaagtttttgcaattctagaacttggattttttttaacaaaagtcccaaaacaccaaaaatgtaaacaagataagagagtaatattatagtgatgtaatttaattaaagttatattttgggttaacaactgaagtctttaagtagaaacttattttcaacaaaactgtgcagttaaatttatgtattcacatactgaaaaatgaacagttaaagtagcacttaattttgtgtttcttcaatatgtcttgatatactttgtgcaattaatattacacatgtgagttgtatggcggtttacagaactcagtgacttgtcatgacattttcacatgagctatacattgtgtacattgtttttgatttttacataaatccattctgtcattttcaactttatatataaatctccaatgttatgggaaacaatagattgacacataatttttaaaaattatatatttgtaaaatt

SEQ ID NO: 8274 - DNA, 1224 bp, Macaca Fascicularis
  misc_feature (1)...(1224): n = A,T,C or G
aatgttcagcatgtgaaaatttattgataaaatgtgattttaatattctttagctataaactttcaagatacttccctatgagggttataatagccctgctttattaaagaccataaaatattaactttccccaagatgttatgggttccagttcttctgatcatttgatttctttaattcctgtccctcaatttcttcatctttacaataggtatattaacatttacagatcaactgtttcctttcacctcctagaagaaactttacgtggggaaagataattctgtattattcagtagcatagacattttgtatatcaaagatgttcatttggcactaatgttgattgaaatcagatccatctgagatgcctagcttgtatttgcattctggaagcttccatcgcaggggagcccggcagggtatgcgagctttgttggaggtgcggtgtttcattctgcagctgttgtgaggacagacaggcatggcctacaggcaaaaaaagtcaccacctagaagatgctctgggatagaggaactgcccctttttannnnnnnnnnnnnnnnngtgggagaggtgatcccagtcttctctgtacatcttgtgcttttccattaagacttgttccagtgggaaggagctttggaaaaattgcaaaggtctgaatcgtgagggcatnnnnnnnnnnnnnnttgccaataataataataataataataataataataaagctccaggggtctaactggtttctcatgtcatttcaatactatcataaacgtttttgtggtactttcctttgtctttcactgtttcgttnnnnnnnnnnnnnnnnnnnnnnnnnnnnnnnnnnnnnnnnnnnnnnnnnnnnnnnnnnnnnnnnnnnnnnnnnnnnnnnnnnnnnnnnnnnnnnnnnnnnnnnnnnnnnnnnnnnnnnnnnnnnnnnnnngtatctgnnnnnnnnnnnnnnnnnnnnnatacaattcttttttgtagtactttggnnnnnnnnnnnnnnnnnnnnnnnnnnnnnnnnnnnnnnnnnnnnaaacaagctnnnnnnnnnnnnnnnnnnnnnnnnnnnnnnnnnnnnnnnnnnnnnnnnnnnnnnnnnnnnnnnnnnnnnnnnnnnnnnnnnnnnnnnnatgacaattggcnnnnnnnnngatgtgtatnnnnnnnnnnnnnnnnnnnnnnnnnnnnnnntattttatagttgtaa

SEQ ID NO: 8275 - DNA, 790 bp, Macaca Fascicularis
  misc_feature (1)...(790): n = A,T,C or G
ttcaccccaggccnnnggtagagacgacgggtttctgctctgnnnnnnnnnnnnnnnnnnnnnnnnnnnnnnnnnnnnnaatgctccctgtcccatggagagggacccagcataggaaagccacatactcagcctggatgtgtggagaggctgagggactcgcgggagggcacccagccagcccacagccagggaagtggggagggggcagaaagccatgcctcccagctgagcactgggaatgttagcnnnnnnnnnnnnnnncagtcaggcgcctcgtggtcagagcagagccaccaggtcccactgcccccagccctgcacagccctccctcctgcctaggtgggggaggctggaggtcattggagaggctggactgctgccaccccgggtgctcccgctctgccatagcactgatcagtgacaacttacaggaatgtagcagcgatggaattacctggaacaggttttttgttgtttttgttttgtttttttgttgggggggcaactaaacaaacacaaagtattctgtgtcaggtattgggctggacagggcagttgtgtgttggggtggttttttccccttttttttttgttcgtttcttgttttttaataatgtttacaatctgcctcaatcactctgtcttttataaagattccacctccagtcctctctcctcccccctactcaggcccttgaggctattaggagatgcttgaagaactcaacaaaatcccaatccaagtcaaactttgcacatatttatatttatattcagaaaagaaac

SEQ ID NO: 8276 - DNA, 664 bp, Macaca Fascicularis
  misc_feature (1)...(664): n = A,T,C or G
ggaggtggaggnnnnnnnnnnnnnnnntcgnnnnnnnnnnnnnnngcctgggggacagagagagacccgtctcaaaaaacaaaaacaaaaaaaaccggaagggaaattagtagttttctacatggataataagcatacctctgacaatctgacagttgacatagacaacaaactcatttttgttggaaaaaaactatttctttgttttgtaggtgggaatctgtattttcaatgtaattattcagttgttcaagtccttagttcaagcacacttttttggttgtagtttaaacttagtaaaccatgaagcctagagtcacagagttcaatatatttggtttcctagctctgcggagtttagcaggcatgcttgttgccagttaagagtttcagatattaatggccattggagagtgctggtcattgggagtactgtgacaacatgaggaggggaaccaaaatcaacaactccaaaagatggctaaggtacaaaagaaggaaagtaaagagcaggcttagaagcttctaagatgcgagccaggcaacagctgctgtgtgctttaggagctgagctgccacacactgtgccagggattttaaattcctttccaaatattttcaacagctttaaagtttctattatttatttttgctgcggtctagg

SEQ ID NO: 8277 - DNA, 720 bp, Macaca Fascicularis
  misc_feature (1)...(720): n = A,T,C or G
cgctcgaaacacaaaacagggcccgcagctnnnnntagagggagtcccaatcacaaaacagtccgagagtgggagacgctagagaagtctggaattacagctgataatgtggctggttggaatcaattagcactggattttgccccaggattgctccccagggcggacaagtggagccaactcatctccagcgactttttcttcgctcacgtgcatatccacgccagggcttnnnnnnnnnnnnnnnatccccagccttggtttcacttgatttcgttgttgttattgataaatattgggtcatacacaagccacttgtcagagcctttggctccatctcgaagctgcagctcctagcgggacgtttgagtcttgtcctaggaactggaaggatttactgggagaagaattacacattctctgctccttcagttttggagatggtcccttaaatcatatcatatcgtctgtctgcttgctgtcacatttatttcttgattattccgatatgtgaacaatgggaagatgtgtgcatcttttcccccatcttttaaaaacaattattgaaatggtttaaaaaggggggaggggagaaagtattgatcccagtcctttccgtatatttggaaccaaaagagcataggcaaatagataattgttttaattgtcggggtagggggtgggttggtaggtaggacctttgggttttgtgtaatggag

SEQ ID NO: 8278 - DNA, 562 bp, Macaca Fascicularis
agctgcactcctagttagtgacaccaccaagaccaaaagtcaggttcatttccagatcattttccatcacccgccttggctctgagactggcctttgtgagggaaactccattcctcaaatactttgctctcctcggaagcccaggacagacactcggtgaagatttgggaaagcttttctgaaactttacgctcacctcttcctctcttcctaaaccagcacctagtcccatccctggtgccctcgcccccatgactcctcaatacactgtttctctgccatttgctttcacttgttctgtttgagggggtacatttccctctgctctgatttatgaacactggaactttgcctggtgtagtggttgggagtgggcgttttaagatgatgttaactattggaaagttcatagaaatggtaccaagccaagcgccagtggctcacgcttgtaatcccagcactttggaaggcctaggctggaggatcccgcgagcacaggagttcgagaccagcctgggctgttagtgagaccctgtctctacaacatacatacatacaaaa

SEQ ID NO: 8279 - DNA, 712 bp, Macaca Fascicularis
  misc_feature (1)...(712): n = A,T,C or G
atatactaatacaaaaaaataacaagaaattcacagttttttcactactaattctttgaaatccaacacatattttgtacttgcagcctattttaaattcagacactaagctgtgatagttaatactgagtgtcaacttgattgannnnnnnnnnnnnnngttcctgggtgtgtccgtgagggtgttgccaaaggagattaacatttgagtcagtgaactgggagagacagacccaccctcaatctaaatgggcaccatctaatcagctgnnnnncgtggctagaataaagcagnncaggagatggaagagcnnacttgctgagtcatctggccttcatctttctcctgtgctgggtacttcctgccctcaaacaatggactccaagttcttctgcttttggactcctggacttacactagtgatttgccaggggctctcaggccttcggccacagactgaagggtgtactgccagcttccctacttttgagatatcgggactctgactggcttcctcgctcctcagcttgcagatggcctattgtgggactnnnnnnnnnnnnnnnnnnnnnnnnnnctcctaataagcttctatatttttatatttatacatcttattagttctgtccctctagaggaccctaatacactaagctgttttccaaataactgatctgcatttacatttcnnnanattataattgaaaagta

SEQ ID NO: 8280 - DNA, 699 bp, Macaca Fascicularis
gcgctggaggagggagccttcgctctcagcgtggaagggcggagaccccaccctcgatggggcctggcctccctgctttaacccgtgctgggggagaggagccctcgctctcagggtggagaccgcagctggatggggccggcctccctgctgggcacagcctgagccacatgaccaaggccagagaggattaccaaggttcacctagcccagcttcccgcagcccctgacgaggccactaccctcatctgaacagccctgtccatcaccaagccccaccctcttctgccagccctgcccccacaaggccacgcttctcccatgcaagccccgcccccaaggcccagcttgcctgcagccccgccccactgtctccaccccatctcctgcaagccccatccccaaggcccagctcacctgcatccccaccctactaggctccactcctcacctgcaaagagccactcctcactaagctcctcacatcacttgcacagccccgcccaacatagcacgcccttctagaaaccctagacacactagggtttctgcagccaaacctgatgattcgctgagtgtgagcacgaagactcagtgccctgatctgttcagtcaggttttgccatcaaatagtttgctctaaacttctgcagaatctttcagttttctgagccatttgggtttcaaaattataaagaa

SEQ ID NO: 8281 - DNA, 3662 bp, Macaca Fascicularis
  misc_feature (1)...(3662): n = A,T,C or G
cgcacgcctggcatctacatgcttatcttcgacaataccttctcaaggtttgtctctaaaaaggtattttatcacttgacggttgatcggcctgtgatctacgatggaagtgatttcctgtagcttcagcacctcggtaacttcacttcatccacaggaaacactactcttcctcacctgtcacataaagcattttttcaaaacgtcagctgctccaaaatcatcaactctgcccctctggaagagaggcccctgggctgcccctcagaggcggcgtccggggagcactttgtgctcagcactctgcaccggccactcttagcccccaaggctttgaagggctcaggcaatgtttccattaagtagagacccagctgttctcacacccaaagggatgctctgccagacgtttagacacccaggagaccgtcagcctctcctgggagcacggttggcgctaggcctcctgtggagagtttcacgggtaggggtgatcccaacttctgcctgtggagagattttctgccctgccccaccagggtcccgcatcttggagacctgagctgggtgccctggccatgccctgtggctgtgacgccctcaggtactcccgggaagaggaggcacacagccattgcgtgagtcagggtgccagggaaccctcctgagatcctgactagcctcctccagtcatgctcttgtccctcactgccccagtaagctggaggctgctccagaactcagcagtgttggaggggcctctaagctgcactctcttcctggcccttttgtctgggtgattctgtcctcaaagcccttcactcagccaggcctctccacagctcaaagcattgccctaagaatcagaagtaaagataatccgagaacaaaacccactgtactgggggcccgcggtggctgtgtgtacactacatctaatgcccaaatgccagccagtgtggatgtcgtgaccacagagcaggcttgtgcattggctttagagctactcctcagctgatggcccacgtttgtttatataaataagagcttctgccccgcctgcagacgtgtttactaatgatcatagccaggattagaaccactttcaaacattggggccttcttaacaaaagtctttgataacttaaaaaccaaagtgacagagtaaacagaggcatgatggatccctgggccccactcccctcctgacaggttccccgacagcccatttgcccacttcccgctgctcagcccgcacctgacctccaggagacatccccccttgaggcagagagatcctgttgcctgttcccagacaagaattagttaatcttccctgttctttgtggcccttttcttctccaacaacagatagctcaccttggacagctctttgttccttgttcatggaaccagctgcccgcagtcaggccccaggttcttccctgggtgaacagagcatctgacaaaggtcctactttggaggggagagagccccaggcaggctatctgagaatctgagcgctgggcccagcaattcctccagctagccttgtgacccaagtccagtcacacatttcccaaagtttctctttgtcataaccctggtctggctggttttgagggcttgagaatgggtcaggaactccaggcgaagtccaacagagaccccaaacccaccacacaccagcagccacagcctcaccaccagcaaagaggactattgtggggccacagctaaggagtcatttctggaatggactcagacctttaaacaggagagttgggcacttcagtcagttgaagcaaggcataaggaatggggaatagaacctttcaaagaggttacccagagaaaagctgagcctcttgcatttggctttcttggagcagcctcttctggcagaaagccatcaggtactcaatcatcttcccctggccaaggctctgaccatgtttaatattggaatagaagtggccaggcccccagcgactcttcttggcctcatgtttgtcctcacaggcatgccacatggcctgagatgattcagagcaaatcatgctaactttgaatccatccagcctcttgcaaaagataatcaggagtcagcctgttcactgtaagaaagaaactaatgaaagagaacccagagcaatctagaatatttgagtgcttagctttctgaggatactgcggagactctggccaagctgatgaccttctgaagtgtcattggcaccatatgcaacaagaaccaccattcactgagtagctgacaggtttggggcccgagacattccatctgaggtcctttctgaacatgtcactcaccacagcagaagaccagttgcagcttacccagaaccactcctccaggagagctgggtgtctcgtgcgcaccaccttcagcgctgactgccattgttcaaagaaagcctttgctgcattcggaggactgccccgtgccccaaggtgacttcctaactatgtggtttcattagcaaatttattttttgtgctgggtggacatttgtattttgttaggttgctgttcaagctcaagtttgctgtgctctctgcagctacagaacatcttggcatatttaagagtggcttttataaatagctttattctgattttaatcagattcccaactttactgagaattaaggactggggtactttttaaaaaatgcaaataacaattgaagaagcactgctgcaggtggtagccctggctagactgaattacactagaaatcagccagaaggaagcgtccttgggatcccagatcactctttaaaaaaaaagggggtggggggcgggtgggcagccccttgatggctcatctctctgtataacagtcacgtcttcatatcgataccagatgccttcttcatcatgccactgcagccactcaccaccttcaagaacatgccaacctctgtcagacgcacttagccgcaaacaaggaggcacgtttggcacaaagtgtcctccagggccaagtggactctacagagtgcttgacctcaacacactggactccaggtgggctggaccaagagcaggcaaagacacgggaactgaaaaactccacagggtttggaaaatagaaatgaaaagccacatcatataactcaaaaataaatagtgttttggaaattttaaaattatcgtctaaggtggtgaaactatttcaggcccaaatgaaaggaaatccccatttggggatgaaatcacagagcctgtgttttgtaatatggttggatgtccactgatgaaattttaaagaaggttcatttttaaaagtgtacctgatttcattttttaaagtgcacatgattctacatgtgagaattctttaggccaagaaactgtccttggctcagaggtgttgggaattaaagcagagagaagccattcgtgatgctgagaaccaaggatggtcatgtacacaaagaccatggagacggccattcttgtttacaaaacacttaccaagaaagcactttgtaggggaaccttagtaagttctcgtttcattacgtttcttccaaggaaacaggagagactgaattaataattctctctttcctcttaagcacttttaaaataataaagtactnctgtaantttaggaggctttccggnttaaa

SEQ ID NO: 8282 - DNA, 755 bp, Macaca Fascicularis
  misc_feature (1)...(755): n = A,T,C or G
gtagcacactnnnnnnnnnnnnnnnnnnnnnnnagttgttgcnnnnnnnnnnnnnnnnnnnnnatnnncttaaccatggannnnnnnnnnnnnnnnnnnnnnnnnnnnnnnnnnnnnnnnnnnnnnnactgttgggaaaatgagttcaagaatatttcagtttatatatcctggtcgctgtcatatattttttcatttcaccacttgtttgtgtttgcctcactcaacagtcataggtgtggaagctgnnnnnnnnnnnnnnnnnnnnnaaactcccaacacaagccatgtagctgcagcccagggtttctcccaccctacagcttcagcggtgggttccctggccctcttgataacaaatattccagtctaatggctagattaatgctgctcagaggctattaactcaaatccttgatgtgtttcatttacaattatgtggattatttattttaggagctttttttttaagggccaaatagcccgacagataaatgagctgctgggctgtgtagaaaatactgtccaaatgttgccaaatattgacttcataaaggggatatcaagctgctgtttataaatctgaatgtcttaaaagcattcttgcttgctctctctgttatagatggtgtcttagccagtcctgagttttccaatgaacccaattttaatatatggtatttttgtatgccaaacnnngtgtcttgtcctttgtatatgtggtaatgttgatcttatgactactgtaaaaacac

SEQ ID NO: 8283 - DNA, 2238 bp, Macaca Fascicularis
aagatggagcggaggcgcaagccccacctggaccgcagaggcgccatcatccagagcatgcctggcttctgggccaatgttgtatcctttgcagtgtttcttctgcttttccagttgagaggtgctcttgggaagtgtaaggaacttacgggcggctcggcgtcgatgtgaccatttggggaacacgggtgagtgtccacagacaaatgtggctgaagaaagccagagcagacacgggtactattttcctgcgtgcgtgagagaaacgcttcatggtgccaagcagcagacgtttggggcatctttctgaagagcagaagcgagttctcagcagaacacgtgttgctgtgaatcaagctattgttaagggactgtgactgctccgcctttgccagtccgatctgggactgggcttcttcgggtatgagcagattctgccaggcctcagacaccggcagttctctgcatatcgcccctccccgtgtcagtgcggtcagcctcacaatgatacaccctcggtgaaacccgagaggtctgaattcagggggagggagaggagaaagggaggtcattcatggatgcagatctgaaaaaatcccctagccgcccctctgggtgctcttaggccttccccgttgcttctagcttttctttccgttgcatctcaaggctctttgacctcaatcagattgcaaaccaccctcagatgtcggccctgatcactgaccaagatgaagacatgctgagctacatgatcaacttggaggtgaggccgggaagactaaggctggagggttgagtgggggagggcaagggacataatttattcctgcaagcaacagtgggcacctcagccaaaaaggtgtttaagctttctccaccttgtccggacaggtgaaagaagcgaagcatcccgttcatctctgccagatcatgttgttctttcggagtaacccctacttccagaataaagtgattaccaaggaatatctcgtgaacgtcacaggtgacaggtggctcccaggatgggtagtggaaggaggaaggtgggtggatcagtgccaacgtgttccagcccccttaccaaaacatcctctgtctgtagaatacagggcttctcattccactccaattcagtggtgtcaggattatgaagttgaggcctatcgccgcagacacaacaacagcggtcttaacttcttcaactggttttctgaccacaacttcgcaggatccaataggattgctgaggtgggtccttgctgggaaacatgaggaatgaccccggtgtgttcccagctgcttgggtcaccagtctgagctctcatgaggccttttccggttgattcccctgacagatcctatgtaaggacctgtggcgcaatcccctgcaatactacaggaggatgaagccacctgaagaggaaacagagatttcaggtgaggcgtacagttggaactggagctgtctgatacccgggataagggtgttgacacacctctctattcagggagcctggaggctcatttcagaaatgtagaacctgggggtccgtcttatccatgtcgaaattccttgagaggaagacacagcatgacagaatccaggacattcatggcattgggctgaaaaaggcacatgagacactgcactgcaaagcaggttataactgtggagtcttaagcccggggaagcatagtgcgtgtccacactcactgagaagtagagccgagttattaccttcaatctgtggcacttggttccatggccgtcaacccgacggggagtcatcttaccgacccctaaagcttgggctcccggaatgtgcctggttgtcctccttgccacagaccacaaaggactgtttagatcgatggatttccttaagctattaccccatcggatttccgtgtgcttttagtgtacaacgcgtcttgttagctgactcctgtcacagagaatactggaaatggggcaggtattgcagagaatagtttgtaacacatgcacggtaggaggaagttgaagagatcacaaaaggggaaggggtagtcttttctcagcaggccgtaaaattaaaacattttaaatggtggctcagaggagatgcattttgacatgtgtttgtgtttctctagggaacgcgcagatgttgggttgaatatgatggagcatcggacacaggtgctgtgttcacctaacacggcagaactcctgaaaacttactacagtatgca

SEQ ID NO: 8284 - DNA, 621 bp, Macaca Fascicularis
  misc_feature (1)...(621): n = A,T,C or G
ggcctcagattccagtgcagttggcggggaccaggctgggtgattcacgccctccctaggtcatttcgaagacctnnnnnnnnnnnnnnnnnnnnnnnnaaggtccccagaccccccatccccttgccagtggtcagatgccagccctctcaccctgcgctgcacctcactggtctgaagtctagagggatgcctgggcctcccctgtgatctgtggcccccaggtgccctctgctgcccaagggacacccctgctgccaggtccagaggaggggcctatgctctgctcctctgcaatgtttttgaccccatatgaacttgaggcccggaagttctccccaaggtctggccctgttctcccctcccggaaagctcctttgccttagccctaccaccggaagacacggtctactcagagtcaactctttcccagagggacagggtgaatggccagtggagggcaggcaggagattctacaactcaaaagtgggttgcttcccaactttgcccaacactggcttnnnnnnnnnnnnnnngccctcagacttcttggagccttatttcccaacccataacctggaatgataatttttgcnnnnnnnnnnnnngtgaggattgag

SEQ ID NO: 8285 - DNA, 709 bp, Macaca Fascicularis
  misc_feature (1)...(709): n = A,T,C or G
gaattaaatgactcccncnngaacacacacacacatacacatacacacacacactcacactcacacacacacacttccnnngaggannctgaacaattgcttcattttcctatcagcacacttccaaatctattcatgccccttaacccatctggctgtcgagatccacaagaaaaaaaggcttaatacccacaacagagccttgtttattacttatttatccgctcccacccttgttcccgatgggttttcaggcagcttactgagatggacaatacgttcatcgttcctgaattccttagcagggcacacaaagtcctttgtgannnnnnnnnnnnnnnnnnnnnngcctcatccctgctgcctccccccgactcccatgcaaacatacattccagcaaccccacactaccttagttacccgaatggtccactgcgtttcctctcatgcctttgtggtgttttatatgctgatccnnnnnnnnnnnnnnnnnnnnnnnnnnnnnnnntacccctcctctaagctggagttcaagcatcacctcctctgtgaagcctttcttgattnnnnnnnnnnnnnnnnnnnnnnnnnctctctgctcacttaccacttaaatgcccatggttccccctctannnnnnnnnnnnnnnnnnnnnnnnnnnnnnnnnnnnnnctatatttcccttgtgtctgctactggacacatgg

SEQ ID NO: 8286 - DNA, 760 bp, Macaca Fascicularis
atgtatatataactattatacatacatacaggtatgtatgtgtaatggttatatgtactcatgttccctgtgtagcaacatgtggtacggctgcacagagaacatgagtacataaagccatttttatgctcactactaaaggctgtccactctagagttgctgtatgtagcaatgtgtgtccactctacggtggacagcttttagtggtgagcataaaaatgataaaatatttcttgaaaacttagtttactatatatcttgccctattaatatgttctcttaatatgtgccattgttctctttgacaattttcctttaatggttgatgttcaacacctggactgaatgtctgttctcagatcccttggatgttacaggtgaggcagtctgactgtcctttctacttgaaagattagaatatgtatccaaatggcattcatgtgtcacttagcaaggtttgctcatgcttcaaagagcttagtttgcggtttttctagacatggaagcaagtgcctgagttccctggagatcaacgggatgaggtgttccagccgcctccctctccatgcaatctagtgagcaatggtgcaggcagggagccagagaaacttgccagttatataacttctctttggcttttcttcatctataaaacaaggataatactgaactgtaagggttagtggagagtttttaattaaaagaatgtgtgaaatgtacatgacacagtagttgcttgataataattactagtagcag

SEQ ID NO: 8287 - DNA, 738 bp, Macaca Fascicularis
taaatttgatggaataatgtatacaggctgaaaacttctacaaaaaatgtttgctgtctttaacatggtgtcgtgttacttggtcctttgaaaacaaaacaaaacttccatacacagcactgcccaataaagcagtgttggaatattggaagcctagacgtttgaggatccttcttggtcacatgcattagaacagaatcctccactttaggactcagagaagctatggagtcccacaggctaggtatagcacacaacttagagaatggtagttaaagcacgtcaaccacaattcaatgatctaaaaaacatttcttaactctgagggttaaaatgaagacacagtgttttcaaataaaagcttttacatttcttaggaaacaaactgtgacatcgcttttaaaaatgacattcaaatgtttataatgtgtgtttttgagttggcttggactagtacaagttcaatgctggcagtggttgtgccagtagttaagttaaaataagttgttactttcagattgatgtcttatataaccagacaatcatcttcaagcaaaaaaattggccaggaaatgtcttttattaaaaaaaaaaaaatgtcagccagaacagctatcacttagaccattctggaatgatttcgaaatctttactatggtacaaagttggggaaggcctcagtatggcactttcatattcactctatgtaaagatgaagcccaaagatgagttaatcag

SEQ ID NO: 8288 - DNA, 372 bp, Macaca Fascicularis
gaatagaatggcaaaggaattgtatggaatttgtcgttaggaattctcatgttccgggtgtattcctgtacaaatccatgtcaaactacggagtgagtattcttcccagaaaaaaaaaaaaaaaaatcccggtatactaaaactatgtttggaaacatttaaacaaagaagagtaattactgagattactcaaagttaatttctttacatatatttattattatttcttagtcaaagtttctttacttactggatagtgccatgagcttcagtgctctccttaacgatattcccatttaagattgcctgtttggtcactgtttatacgttttcattctcatacttttgtgggacttttgtagtaaaagatat

SEQ ID NO: 8289 - DNA, 141 bp, Macaca Fascicularis
ccgccctttttttttttttttttctgaaactggaagcagccttgatgtgttttgaaggtgtgtgccaaatgcttcagacggaggtgctgaccttggttggtttctctctgcccagctactctgggggcgagcctgaccgcc

SEQ ID NO: 8290 - DNA, 2341 bp, Macaca Fascicularis
  misc_feature (1)...(2341): n = A,T,C or G
acacttccggcctttgtgactcattgtgtctgtgtcgaggcgtcgggagggcctaaatccgagtgcggtgcccttcggccggcctgagcatctcagccctggaaagggcaatgggtttggaaatagacggactttcttcaagccccaacataaccacttaatggtttcataactagacaaagacccgttaaccaagaggctggatggagccctgccaaagcatcaacacaggtgtggctcttggaatgtgtgcaggtttcctggctcttccctctgtcctagtgatcctgtttccatttcccatctttcttccccgtctaactgacaggcagtagagcacaggctttggagaaaggaggccaagtttcacttctgacgctcccacctatcagttgtgtgatattggaaaagtgacttttctgagcctgtttcctggtctataaaatggagattttagggccaggcacagtggctcacagtggcnnnnnnnnnnnnnnnnnnnnnnnnnnnnnnnnnnnnnnnnnnnnnnnnnnnggaggctacagtgagctatgatcacaccactgcactccagcctgggcaacagagtgaggccctgcctcaaataaataaataaaaataaaaaatctcttgagacatagcaggcacacaggattggagaatctggcttgtgctctcagctttgatactaattagctaactagtgtaccctggatctgacttcttcaggcactggtttcttcatctgaaaacgagtttaaccagattgtccttaaggtctcttttgacattaatattttacagcagctcaggggtaattagagcaatggggagtggctgtagatacaggtgaagcttcgctcctgcagctcatctcctttagtagggcccagttcctaacaggccatggactggtacctgtctgtgccccagggattggggacccctgccttaggtaacccagacattcctttctattgattataggtctttagacaataactttcagccagttaccaattagaaaatcattgagtccacctatgacttggaacatccccgcctggaattgtcctgcctttcccacaggagaaggatggtatcgtaatagtgaaggtggaagaggaagatgaggaagaccacgtgtgggggcaggattctagcctacaggacacgcctcctccagacccggagatattccgtcaacgcttcaggcgcttctgttaccagaacacttttggaccccgagaggctctcagtcgactgaaggaactttgtcatcagtggctgcggccagaaatcaataccaaggagcagatcctggagctgctggtgctggagcagtttctttccatcctgcccaaggagctccaggtctggctgcaggaataccgccccgatagtggagaggaggctgtgacccttctagaagacttggagcttgatttatcaggacaacaggtcccaggtcaagttcatggacctgagatgctcgcaagggggatggtgcctctggatccagttcagaagtcctcgagctttgaccttcatcacgaggccacccagtcccacttcaaacattcatctcggaaaccccgcctcttacagtcacgagctcttcctgctgcccatgttcctgctccccctcatgagggtagtcccagagaccaagggatggcatctgcactattcacagcggattcccaggcaatggtgaagattgaggacatggctgtgtccctcattctggaggaatggggatgtcagaatctggctcggaggaatctcagcagggaccacaggcaggagaattatgggagcacatttccccaggcaaatgtcttcgcagctttccaacatgctgtacatgtcttctgcttcctggaagaaaaaggacatgttcagagttgtcatgggccagaggcttgcccagcctgctctaacggaagtcaaggtttggttaccctctactggccagctgatggcagcaaaaacaggtgatgatgagaatgagcgaggaagatccagaaaggcgcctttttggagagaaccatgaacaccttactggaaatggaagggaggttccagagacaacactaaacactggaatcttttcctctcctggatttctgctgtaaaggacactggaattatttttcttttgtcaaaccagtaatctgccaggcatggtggtgtgcatctaatnnnnnnnnnnnnnnnnnnnnnnnnnnnnnnnnnnnnnnnnnnnnnnnnnnnnnnnnnnnnnnnnnnnnnnnnnnnnnnnnnnnnnnnnnnnnnnnnnnnnnnnnnnnnnnnnnnnnncaaaaaaaaaaaaaaaaaa

SEQ ID NO: 8291 - DNA, 770 bp, Macaca Fascicularis
  misc_feature (1)...(770): n = A,T,C or G
gaggtgcactgtggnnnnnnnnnnnnnnnnnnngaaagcagcgcaggnnnngctgttcgaggtcacccagtgccgcccctctgctgccctgcccaggtgtccccccaacacagacccctgtccctgggaggggacgaagctggcctcccggagccaagaccnnnncccagggcctctctgttnnnnnnnnnnnnnnnnnccctgactcagagtccagccaccggctccatgcacggcgaggagnnnnnnnnnnnnnnntgcacccgggccacggagctgctgaccctgcagaagatgcccagagaggcccagtttgtgctcacacccagcacggaggtgtgcagcccccgatnnnnnnnnnnnnnnnnnnnnnnnnnncccctggccctgcgcacggtcagccggctggtggagagggaggccggcctcctgccgggatgaagggacagcggccagggacgccggtgcagatgaagagggcgagggagttctgggagaggaggcaaggcccagggtgcgcttggcaccctcagacccgtggggctggcccctgctcaccctctgggctttgtctccgagcctttttctcccgggcaacgctgagctgagctgaactggagccatggagcggctctgattggcggctgaggctctgattggcggctgaggctctgattggcagctgaggccctgtggccgggctgggtggaggctgctcgggctgttccctagtctttgtttttggacagtttaggggcagaaagagctgc

SEQ ID NO: 8292 - DNA, 2121 bp, Macaca Fascicularis
gtctcattttgaatcttttgtctgccttttgttttcccatttccttcattactggattcactgtcactttttgctcttaacagtaccaccttcttaagctacaatgtagtctgtttataatatatggtatggttacaacatgttagaattttatttcaaataagattaattagcttccgagaaaatatctaactcagtcactcaaactgaaaggatggtgcattactgcaagtgctgtgataccgggtcctagagcagacacttaatatctgctgttagacacttaaagcattgagtggccaacacttattatttcccacttccaagccattttatacatttgggattgccagatatttagcttataagtgagtgaagtgtctctgggcctttttaaatttcatctttgtggtgcaacagtaacctttattaggaattttgtaagactttttctaggtaaattgcataaataccagtgagtcttagtttaggatgttgacttgttagtcaacacataaatattaaataaaaactacattgtgataaatgtctacataaaagtaaatatacacttcattttatacttttctatctcaatctcaaaggcctcacttaagtgttttctcatgttccaagttagtgttgaacatgagtcatttgtgcctaagttctcacgttccattaataagcacttgtctgtgcagtgtttgattcttccctataatttttggctttacctgaatcgtcagtgatagccagttactgtctgaagtatatggaagctcttaaagtcagactaccttctccctgggatcagctttccttctgtattctgatctctggtggccttgcatcatcttctctgatttctgggattccagattcattttcttatgctcttgaattgtcctctccttcagtaggaatcttcctatttctctagggactatgcaattattgtgcctttaagttttgttctgacctataaccttgatccaaccaacaaatacttttaaagttatataattgcacgttaataataagagatacaactgttgaagaatttgtacatgccaggaactattctaagaacttcccacacgttattttatataatctcagcaccctatgacatttatctttaatttctaaaacagctaacgattttcatagtttctattagttttgactaattattagttttgactatctcagatttttaaatgtatctgtcgttattgcctatttcaggtcactttttatatctgacataatcttttatttttgactgttctttacgttataaatgtggttcctttcatagctgctcctgctgctggtactcagagtgctaaatttccccacctgcctttcaatttcaaagtgacttaaccatctctcttgccaaacagatcaacaagccttgagtcttcattctcctttctgttatctgagtatctctgagaagtaccctgcctgtttttaatttacaccttagtgtttctcaatatattggccacagatcaaaggcagcagaacagtaggatgcttgttaaaattcagattcctggatcccactcccaagaaatgattctgtggaactgatcttgcgtttttatactagcatctagtgatagtaatatgactaaagtttgaaaatcaatgttctagatgaaaaattctaatcacttggcttcttaaagggaccttattttttgatatttaaataccatcaaaatatggataaagcagatttcttcatagggagaaagacatagtgctgaaatttctcttcatagatggccttttatatactctcatctagccccgcctatcctatttctaaaagctcctgtgagtcttcctagtaaacacctaataagcacttgtctgtgcagtgtttgatggttgccttggggcctgctgcaccaagattaaattggttccataggctcagaagaggtaaatttcggatgattacaaatgtgtgcttgtgtgtgtctgtatacttgatgtatatgctttacctatatgagtgtaggcagccctccatatctgtggattctcatccatggattcaaccaactgctcacaaccaatgtccaaaaaaaaaaaaaaaaa

SEQ ID NO: 8293 - DNA, 584 bp, Macaca Fascicularis
  misc_feature (1)...(584): n = A,T,C or G
agtnnnnnnnnnnnnnnnnnnnnnnnnnnnnnnnnnnnnnnnnnnnnnnnnnnnnnnnnnnnnnnnnnnnnnnnnnnnnnnnnnnnnnnnnnnnnnnnnnnnnnnnnnnnnnnnnnnnnnnnnnnnnnnnnnnnnnnnnnnnnnnnnnnnnnnnnnnnnnnnnnnnnnnnnnnnnnnnnnnnnnnnnnnnnnnnnnnnnnnnnnnnnnnnnnnnnnnnnnnnnnnnnnnnnnnnnnnnnnnnnnnnnnntggccgcatttatgggttttaaatatgagaatgacaacatcaggttattgggcagcaggaggtgggctggttttgaaaggcaggggaatgaggcagtgagataagttgggaggggctgcaatagttcagaaattttttttggtgcaagtaaatcacacgtggcaccacagatgaagacaaaagcccaccgtgacacctttggtgcacgatacaacgtgcgaaacgcacgactgagaacagccagacgccatgatgccattaccagcatgcatttcgtacttatcacaacctatttacattttctgtatcaaccttgacctcattacactgtgaac

SEQ ID NO: 8294 - DNA, 2772 bp, Macaca Fascicularis
atggacgctgggaggacaatatcatttgggatgctcaggccatgccccggcttttggaacctcctgttttgacacttgatcccaatgatgagaacctcattttggaaattcctgatgagaaggaggaggccacctctaactccccctccaaggagagtaagagggaatcatctctgaagaagagtcgaattctcttggggaaaacaggagtcatcaaggaggaaccacagcagaacatgtctcagccagaagtgaaagatccatggaatctctctagtgatgagtattattaccccaagcaacagggtcttcgaggcacctttggagggaatattatccagcattcaattcctgctgtggaattatggcaacccttctttcccacccacatggggcccatcaaaatccggcagttccatcgcccacctctgaaaaagtactcattcggtgcactctctcagccaggtccccattcagtccaacctttgctaaagcacatcaaaaaaaaggccaagatgagagaacaagagaggcaagcttcaggtggtggagagttgttttttatgcgcacacctcaggatctcacaggcaaagatggagatcttattcttgcagaatatagtgaggaaaatggacccttaatgatgcaggttggcatggcaaccaagataaagaactattataaacggaaacctggaaaagatcctggagcaccagattgtaaatatggggaaactgtttactgccatacatctcctttcctgggctctctccatcctggccaattactgcaggcatttgagaacaacctttttcgtgctccaatttatcttcataagatgccagaaactgatttcttgatcattcggacaagacagggttactatattcgggaattagtggatatttttgtggttggccagcagtgtcccttgtttgaagttcctgggcctaactccaaaagggccaatacgcatattcgagactttctacaggtttttatttaccgccttttctggaagagtaaagatcggccacggaggatacgaatggaagatataaaaaaagcctttccttcccattcagaaagcagcatccggaagaggctaaagctctgcgctgacttcaaacgcacagggatggattcaaactggtgggtgcttaagtctgattttcgtttaccaacggaagaagagatcagagctatggtgtcaccagagcagtgctgtgcttattatagtatgatagctgcagagcaacgactgaaggatgctggctatggtgagaaatccttttttgctccagaagaagaaaatgaggaagatttccagatgaagattgatgatgaagttcacactgctccttggaacaccacaagggccttcattgctgccatgaagggcaagtgtctcctagaggtgactggggtggcagatcccacagggtgtggtgaaggattctcctatgtgaagattccaaataaaccaacacagcagaaggatgataaagagccacaggcagtgaagaagacagtgacaggaacagatgcagaccttcgtcgcctttccctgaaaaatgccaaacaacttctacgtaaatttggtgtgccagaggaagagattaaaaagttgtcccgctgggaagtgattgatgtggtgcgcacaatgtcaacagaacaggctcgttctggagaggggcccatgagtaaatttgcccgtggatcaaggttttctgtggctgagcatcaagagcgttacaaagaggaatgtcagcgcatctttgacctacagaacaaggttctgtcatcaactgaagtcttatcaagtgacacagacagcagctcagctgaagatagtgactttgaagaaatgggaaagaacattgagaacatgttgcagaacaagaaaaccagctctcagctgtcacgtgaatgggaggagcaggagcggaaggaactacagcgaatgctactggcagcaggctcagcagcatcaggaaacaatcacagagatgatgacacagcttccgtgacaagccttaactcttctgccactggacactgtctcaagatttatcgcacatttcgagatgaagaggggaaagagtatgttcgctgtgagacagtccgaaaaccagctgtcatcgatgcctatgtacgcatacggactacaaaagatgaggaattcattcaaaaatttgccctttttgatgaacaatatcgggaagagatgcgaaaggagcggcggaggattcaagagcaactgaggcggcttaagcggaaccaggaaaaggagaaacttaggggtcctcctgagaagaagcccaagaaaatgaaggagcgtcctgacctaaaactgaaatgtggggcatgtggtgccattggacacatgaggactaacaaattctgccccctctattatcaaacaaatgtgccaccttccaaccctgttgccatgacagaagagcaggaggaggagttggaaaagacagtcattcataatgataatgaagaacttatcaaggttgaagggaccaaaattgtcttggggaaacagctaattgagaatgcggatgaggttcgcagaaaatctctggttctcaagtttcctaaacagcagcttcctccaaagaagaaacggcgagttggaaccactgttcattgtgactatttgaatagacctcataagtccatccaccgacgccgcacagaccctatggtgacgctgtcatccatcttggagtctatcatcaatgacatgagagatcttccat

SEQ ID NO: 8295 - DNA, 783 bp, Macaca Fascicularis
  misc_feature (1)...(783): n = A,T,C or G
aaacactgacacattggtgcttcagannnnnnnnnnnnnnnnnnnntttaaccaaagcatgagggtgggagaggcnnnnnctcaaattcagtctccctttgcacgtaaccggtggcttttatgagtaaggtaggtatatgggaagtgagagcctctgattatcaaagctccttgcatcccttggccagtcaaacttctggatgccatcaaagaggtcaacatgacccaaggatcattgttctttacaagaaaaacaagttcattaatcttgtaagcagcccctggggattagaatatgaagttaatcacttattagtgactaccctctaccaaaatacgtgcaaacagtcctgcctggaggaagttaaggacagagagaaaggaaaataagtaaaacaaacatgatttttataacataggcttggtcacattgctgtatttcatataagtgacggctatacagttttttctctacttgccacatttaacagagatataaaagtgcttactaaaaggctagtcttgtagannnnnnnnnnnnnnntcatcatcaagacatcatgaaagcccacttgggaagaagtcagagcaagacaactggcgaggcaaaaagaacatgcaggggcaggcatggaaatccagctattttgttttaaagagcccctggacagcaacttctgaggaggacactgtcagcccaagtgccatcatattaacactacaccttcaaaaattttcctgaccctgttgtcccctctgtgtcctcctcatttcagttaacat

SEQ ID NO: 8296 - DNA, 718 bp, Macaca Fascicularis
  misc_feature (1)...(718): n = A,T,C or G
ataaaattctacatatttaaagtttttgtggacctaccaaccaggaacatgttgcttctcaggtcctagtatattctccaaagaatataccacaagttttnnnnnnnnnnnnnnnnnnnnnntgaagtggtgagtgctgtgttttgagcttattttgaacctagacccttgtgaaaggtacaaatagaggtaatagttaagttatggcatttattatttggcttcctttagaattattgtgaagtttaaaaatagcctttctcctgcaaattttcctagtcttatagtaactgttagtgttctgtatagcacaaacttgaatctctcagccaaaaaaatgaacatatgtactgctaatgtatggcaagtttttggggtatcaatttgtttagataatttaaaaatgttttttagttctagctactaaaacctatatgaactcaaatggataggaatcttatgagggtgtatttttcccagtgcaaagtggcttgaacagccatgggctaaattggtactagaacaacaactgcccctcatgtacgccaaggatgnnnnnnnnnnnnnnnnnnnnnnnnnnnnnnnnnnnnnnnnnnnnnnnnnnnnnnnnnnnngccccatctgaccactgactcaaacacgaattgcttgagacagacttcatttatgtagttctttgcagtgcccattgagacactataaccagccttgtaaccat

SEQ ID NO: 8297 - DNA, 734 bp, Macaca Fascicularis
  misc_feature (1)...(734): n = A,T,C or G
ataaagaccttgtnnnctgcancnaaatgaataaacacccaaaaggaaagacaataatctttcaaatgccattnnntttgcatgcatcgtgtactctagacgcccctacggtgatcctctttatacaagaagtttattttcctattatgtccacagttattccatctaatcttttaccattttagggtcacaatcaatgttttcacaaaaaccacaatataggatccaaacaactcaaatactccttcagtttcccttgacacacattaaatatatgatagtgcacatgcacatacatgtaaggtatttttttccttttgttatctctactgagaaattgtctggaaatataatatgtgactataagactttttacatttttgtatttataatgaaattatctaggatattatatatatgtatatgtatatacacatatatatgctgaagattcttagctttacatatataatccattttcaagaacatggtaaatatacactataatgccttttctcttgctgagtgaataaaattggagaatgataaagcaattagtttaaattcaattagaaaatgtattgcaagtttgttagctccatattattagggtgaaaggaaaaataaaccaagctggcctgaggaagagtgctgtagagggcttacccaaacttgagccttagatgtggatgcttattgaaggaatggggacattagtagtgcagaaaacagca

SEQ ID NO: 8298 - DNA, 950 bp, Macaca Fascicularis
atggagtcagaagctgggaccaacaggaccgctgttgctgagttcattctgctgggcctggtgcaaacagaagagatgcagtctgtggtctttgtgctcttcctctttgcctatctggtcacagttgggggcaacctcagcatcctggcagctgtcttggtggagcccaaactccacacccccatgtacttcttcctggggaacctatcagtgttggatgtcggatgtatcactgtcactgttcctgcaatgttgggtcgtctcttgtcccacaagtgcataatttcctatgatgcctgcctctcccagctcttcttcttccaccttctggctgggatggactgcttcctgctgaccgccatggcctatgaccgattcctggccatctgccggcccctcacctacagcacccgcatgagtcagacagtccaggggatgttggtggctgtgtcctgggcttgtgctttcaccaacgcactgacccacactgttgccttatctacactcaacttctgtggccctagtgtggtcaatcacttctactgtgaccttccacagcttttccggctctcctgctccagcacccaactcaatgagctgctgctctttgttgtgggtttcttcatggctgtggtgcacctttggttctcatcatcgtgtcctatggccatgtggtagctgctgttctgcgaatccgttcagttgagggcaggaagaaggccttctccacatgtggctcccacctcactgtggtttgtattttctatgggacaggtgtcttcagctacatgaggctgggttcagtggagtcttcggacaaggataagggggttggagttttcatgactgttatcaaccttatgctgaaccctcttatctacagcctcagaaatactgatgttcagggtgctctgtgtcggatatttttggggaggagatcactgacctga

SEQ ID NO: 8299 - DNA, 702 bp, Macaca Fascicularis
  misc_feature (1)...(702): n = A,T,C or G
gccggagcgcgcagcagggcngcgtctccactcctagcccggggctgagctaagcgctggcgtccgcgccccggcagggccagggccttgccagccgcgtcccgcagcgtggtcggtactctctgccccgatggggcgagagcgccgggaacctgcccccagcccggagtggcgctcggagccacgctacccctccgcccactcgaccgctaagtccctgggattcgggagataatctgcaattcgcggggtggaaaccactgggaaggtgggaaggtctcccacagggtcctgaacgccggggtccgggggcgccgagccggccacagaactgcccaccggcggccctcgcgggacccccgtccttcccactgcctgtaagtctgtctcgttatcctccggtctcnnnnnnnnnnnnnnnnnncgtctaccgccggcaggcggggtggaggggtgtccctcccccggaacctgcaacgagatcaaacccgcgcacgcgacagtgagcggcccactgccaggagcgcgcgccnnnnnnnnnnnnnnnnccccgtttacagttgctacgccattcattcagctgtgtactcagcgcctactcgccgcggggcctgctccagccccggggaattctgcagggcactggactgccctctgcgagggacttggcgtcctgggagcaggatggggagaagacacacg

SEQ ID NO: 8300 - DNA, 582 bp, Macaca Fascicularis
  misc_feature (1)...(582): n = A,T,C or G
agcannnnnnanngganntttgtttggattctgtgtctgtatttataatttatttgaaatgtgatgggtagtgttctnnnnnnnnnnnnnnngttagcaactgggccttcagctagggannnnnnnnnnnnnnngggggtggggggagattatattcactcctgccaaggactccnnnnnnnnnnnnnnnnnnnnagcaaggaaggctcgttctctttcttctcagggggctcccttgttctctgtcaaaagaaccttgatttaggctatggcctcactctccatggccaccctaagaggaaaggctacttcacctcattacctccggagggctgggcggggccaagtgcctcatcggactcannnnnnnnnnnnnnnnnnnnnnnnncgctgctttgcaaagtggggcctgaggtagaagaaggtgtctggtttctccagctgctgtaggaggctaacgggcagggcacttgccctttgtaccactagattctaacccagcgccagggtgcccacctaggacctttcctggacatgagtttccatcactatcacggccatcagtctccnnnnnnnnnngga

SEQ ID NO: 8301 - DNA, 721 bp, Macaca Fascicularis
  misc_feature (1)...(721): n = A,T,C or G
cagctgtatacattacacagtagtctccctcctgagggtaaaaaggaataatttcaacaggatgaaggcctggcacggtggctcacaactgtaatcccaggactttgggaggccaaggtgggtggatcacctgaggtcaggaatttgaggccagcctggccaacttggtgaaactctgtctctactaaaaacacagatgtnnnnnnnnnnnnnnnnnnnnnnnnnnnnnnnnnnnnnnnnnnnnnnnnnnnnnnnnnnnnnnnnnnnnnnnnnnnnnnnnnnnnnnnnnnnnnnnnnnnnnnnnnnnnnnnnnnnnnnnnnnnnnnnnnnnaaacagtgagacacagtctcaaaacaaaacaaaacaaaaaactggagaaaactgaggtacaggtaatagctgcccatagttatacagaaactattgattgggtaaccctgaacctttccaagctgtggccagcagttgattctaccttcctttcctccattatttccccatgtctgaccttccctgttgcaaagtagtggcctacttcagagtctctctggagggagcaaggaggctgagtggctcccttcagcaattcgaagtctctttaattgttttgtgcttccaacctgttttactccccttcagatttctctcaccttccaatcaaaaccctgtcctgtgccccagtccctcagagtccacaagaggttcatcttgctcatctga

SEQ ID NO: 8302 - DNA, 702 bp, Macaca Fascicularis
atgatgactggtcagtgtggggatataaaggtcctaaatcctttccctaatttgggccaactctgaagggctcttacgagcttcagaactccctcggggttaggctgaagaatttttgtgactgaatgatagtccaatttctaaaaccctgctttaattcaaagcctttttacctaattcttttggttacaaatgtaatttaaatgtagtgatttttgtgacttcttccttacctatgggcaatgtctcttttctgcttcttggaagatgaagttattgatattgttacccttcatttcccctctactttatgcttccacttggcaaaatgaggtacatgcacccttttttcaatattgtcaaagctgacaattttgatattctgctgtaacactaagcgtccttgggctttgctcgtagcttaattctaaaagttaaaaaaattgttcatcattttctaaatatcactcatgtatcaggctttctttgcttgccaagaaactgctatagtaggatcccttttcagtgaggtcctgcattaaattcagtttcctggttccctacctttccatttcctgattaacagtttcactttgctaagtaatatccttagtcaatttttaataaaactatgtgtggtaggtaaaatttatgtcctttcatatccaacagtatttttattctttctatgtgcctgattgt

SEQ ID NO: 8303 - DNA, 699 bp, Macaca Fascicularis
  misc_feature (1)...(699): n = A,T,C or G
cagctgtttttaactcagtnnnnntgacttctgcactatagctgaactgacctggctattcctcgataccaagtcctctgtcattaagcatttaagttgtcttttccctttggaatgctctcagctgagctgtgtgtctaactcacttaccttcaggtctattcagtgaatcctgccttgatcactcttaaaaataggggacctgctccttaaacttgtcctactgtctctttacccttttccacttgtttttgtccatacatttgtagttctgatatttacaatgtgtgtattcgttatatgctttttttctgctggaatgtaactttaacaaggatgtaattttgtactctggtgtattccaacnnnnnnnnnnnnnnnnnnnnnnnnnnnnnnnnnnnnnnnnnnnnnnnnnnnnnnnnnnnnnnnnntggcagtgggactggaagatgttttggaaggtattgacaggatttcaaaacagtacgaggcttgtgggagaaattnnnnnnnnnnnnnnnnacagttgggtggagnnnnnnnnnnnaggatcagcttgtgggtagtagctgctgtgggagtaaatgggatttctttgagcatgnnnnnnnnnnnnnnnnnnnnnnnnnnnnnnnnnnnnnnnnnnnnnnnnnnnnnntagctcaactgtgttttttgttttttttttttgtttttttt

SEQ ID NO: 8304 - DNA, 711 bp, Macaca Fascicularis
  misc_feature (1)...(711): n = A,T,C or G
actgtaattttttttttttaacgaagcacgtgactggactaatgtaaggcagatgacgtgatctttaagactgctatatatatcagtctcttactctataaggttttaaattagaataagcttttatcaaatagataattgatgcaatttaagattcacacaagtttcagggtcaaatggcggtcttatagtttcaannnnnnnnnnnnnnnnnntaataaacagccactttaaacttgttctggcaaaccagaccctgctgtagatatagtctaaggtagttaaccatataagccttttcaactcttaatgcccnnnnnnnnnnnnnnnnnntaagaaggttctagaacccatgaaagcttttgtatgtattactaggttttgtttttcttatgttgctgattttacagttctgactaaagctgacctaaatggatcagtttatgtgtaatattctagtgctttaatgcctcttttttttttttttttggagggatgggtaatattatttggacagatgcagaaggaactgttagtgagtcaagacaaacacatttgaaataaaggaactgtgtattaacatgttaacaattcataactgcactttttatgacattttgaaaatctatttataggtacagaacaatgggttttgttaaanntgtatcacnntttatacttgcagaaatttatttcattgttattagtagg

SEQ ID NO: 8305 - DNA, 1951 bp, Macaca Fascicularis
agaaggggcggggccgaagccggttgccagggtgtctcggagcggcccggaaggaggggctgggaatcctgtagccccttggcccgcggggaaagcgggtgacccgccctgcaagtgggatgcccccttcggccttctggagcgcaggcgggaactcgcactgcacggagggtcgcggtgcccgggagttgaggttggaggatgcggagcggtggccccggtgcaccgaagaggagttcgcacgccgggcagcggtctcctgccgggacccggcgttcgtcacacacggcgcattcgtgactgatcaacagcacagtacactctgaggcgggagggtagaaagtgctggagtgcgcgcccaggccctggctgtcgcagctcccaggctgtcgcgagccttcagcgagccagtgcgcacggaaggctgcccagagctcccggtcagcgctcgcagttcgaggtggaacgtgtgtgtgccctgcgctagcccccgttcccggaggtgcccccagcgcgtgtggagggggcgatgaacggacccgcaatctggaggaggctgcgggaaggaggcgcggagtccaggggtcagggttaccttcggtcaggagaacagatccctctgctcggaggtgaggaagacacacgaggcggggtgcacgcaggcgaggagagtgaggtggggggagaatgagttcagggtacatctgtttccttcagtcgaggagtggggatggagcggagtgctggtaaagatggacagtttagaatcgccggaatgagaaacgggcagagagagctgatcaggggagggcatggggatctctgagcagctgcgagaccccagggaagtttgcagtggcgcctcccacgcggcatctggggcagggggagaaaccaatgctgggctggtctagacggaggagtttgctggttagcagtggtcaaagaccagggagaaaagggaggccaagatcctcgagggggtgtttgcccaagaatggtgtagtgcaggaattctgccccacttgccagcagacaggccagcctgccagagttgcgtgggcgcttggcagaaacacgcaatacccccgagtcagagaggaaagactacaacggttaatgggcgacgctgatgtgcccagacacatgttgcaccacagtgggtgcgctacaaaacggcaccctggagcttgtggaccaatgtggtctttgtcccagagggaggctgtctcccgggcaaaggtgcccactgcaagcacaggcctgagaaatggcccggaaaagagtggtcagggcaatatgttcttggcacgcccagcaagaccggccagagggacttacagacgagtgtgtctcccacgctatctccccagcggggaccttgaggtccactgtgtccagtctggttagaaatggccgcagatccaacaggcgctggtgagtgggagaatacccctgagggaggaagaacagaggggaggagggagctgagtgaatgtatatgagaaatacctggacactgcaagctgtggtcagtgatgagcaactagaaccagaggttccagagagggagtgagaaagagggaggggaagggagaaagagagggagagagaatgggggcgagagagagggagaatgagggagagttctgaacggacgccaaggatggagctgtggtcctggaaccagatgcccagggagtgggatgaagaaccctgggcatgggagcccagggccagtgacactggctggggccgaggctgcaggctgctggcgggagctggcaggacaatgaggattatgaaccaggtgcctgagccttctgtggatatggggagtgacttggatgtctatacataaattccagaaatgacaggagggatagatgatggagggactgtgttttagacaataaacacatttcagtcagtgaaaaaaaaaaaaaaaaaa

SEQ ID NO: 8306 - DNA, 663 bp, Macaca Fascicularis
  misc_feature (1)...(663): n = A,T,C or G
accccacgggcccctgtcccaagaaccccgccctctgacttcctgccctttggaaatggtgccgcactctgacgtttatcagaccccacctgggttccnngcaacctcccatcaaaggatgacccctaaacacagaggagcggggcaggcagggaggcaaggactggnnnnnnnnnnnnnnnnnnnngactgggtgcagttggccagctgtgttcccgtcagctacctgtcctccttccttccctcgttattgatctgtagatattaggaagggagtaacacggctcctccaccgtcctcagccagtacagcccattccctctgctgctctctctctctctccctccctctccctccctcccctctcgccatctttcttggcttctctgagggtctctctgtgcatctttttaggagtcccgctcccactctgtttctgcgtagccactctccttcctccatttctgcgtccacccctgaactcctgagtggccgaaaccccaggnnnnnnnnnnnnnnnnnnnnnnnnaaaggggcaggacaaggggactcctctcactcctgctgctgcccatgctccgccctcccttctggttgctctgagggtttggagcctccctctgggactgaaggagtatccattatcctcccagcctccaggct

SEQ ID NO: 8307 - DNA, 772 bp, Macaca Fascicularis
  misc_feature (1)...(772): n = A,T,C or G
annncagcaatttaatcannnctaaaatagaataatatnngtgcacagctcagatgagaatacattgttttgtnnngcttggtctttttgatagaaagcattgtccaaatgtaaaagtctgataatggtagagacgatgatggcttgggatttagggtaccactaagtgtaaaagaacacagtattcagtcctgactagaccacattacaagttattacaagttaccacctccagctgtcacaccaccgccctcagcttcatgatgacattcctctcaataaccaaagggagagagaagcaggcagaaagaagacagaaattaatatcagtcctgattaggctttcttgatctactattgttattaataatcgctattattattatatcattcttgatctaaagggtctttacaaatctttttttaagagaaaaatgcaagttaaatacccagctacagtccagctctcatggcaaacaggaccatattctttcctctaaagatagcaaactacttattcagatatatttactttacaaaacagggcataggattatataaacagaaaaatcctatttatatttaaattacagagaaaacaactagaagaaaatacttaaattattgtctctctgcattttgtaaatatctacactacacatatatacaaattttaaccaaaaaagtgagttaagtattctcaaatagacgcccttcttagtaagcttagtgacaagacagagctatgacagtgagcccatttcaaaggatt

SEQ ID NO: 8308 - DNA, 2560 bp, Macaca Fascicularis
tcattgattcgatcggcgccgcggtgcgcggaaggtctttgcgctgaggtgtttccggtttcaagatggtggcctaagccttttagtgaaacaacttctacggctttccattcccctagatgtttttttctgaacctggatgtgacgcattaaaggatccgacggaaatagaattgaaggcattctaaaatggctaaccgtacagtgaaggatgcgcacagtatccacggcaccaaccctcaatatctggtggagaagatcattcgaacgcgaatctatgagtccaagtactggaaagaggagtgcttcggacttacggctgaacttgtagtcgataaagccatggagttaaggtttgtgggtggcgtctatggtggcaacataaaaccaacaccctttctgtgtttaaccttgaagatgcttcagattcaacccgagaaggatatcattgtagagtttatcaaaaatgaagatttcaagtatgttcgcatgctgggggcactttacatgaggctgacaggcactgcaattgattgctacaagtacttggagcctttgtacaatgactatcgaaaaatcaagagccagaaccgaaatggggagtttgaattgatgcatgttgatgagtttattgatgaactattgcacagtgagagagtctgtgatatcattctgccccggctgcagaaacgctatgtattagaggaagctgagcaactggagcctcgagttagcgctctggaagaggacatggatgatgtggagtccagtgaagaggaagaagaggaggatgagaagttggaaagagtgccatcacctgatcaccgccggagaagctaccgagacttggacaagccccgtcgctctcccacactgcgctacagaaggagtagaagccggtctcccagaaggcggagtcgatctcccaaaaggagaagcccctccccccgccgagaaaggcatcggagcaagagtccaagacgtcaccgcagcaggtcccgagatcggcggcacagatcccgttccaagtccccaggtcatcaccgtagtcacagacacaggagccactcaaagtctcccgaaaggtctaagaagagccacaagaagagccggagagggaatgagtaatggactgtttggttttagtccacatggcctcctgtggatatgaggatatctgtctatgtgaaaggattaagatctcccccaggcagctataaaaattttagtttttttcttatcaagttaatgaaggaggtgctaagttttgtatctctttttaatcataatcaacatcagtttttgacccaactaaccttgactgtattcaaacttatgagtagaaaggatctgaaggttggggatatgaatgacaaggaaaggatgtggccacctgatgaccctttccctttttattaaaccggacacacctgtttcccatttctctgtagttcagtttttggtttgttgtggttggaactgctttgagaatcctgggatttgtgctgctgctattatttaaaaatcaaaggagtaaaacatagtagctcctaactttttcccagcagcagcaagtagtaataaacacgaaacctggttagcagttttgaaagaacagaatgcattcaaatgtaaggcttcctctggatcattaaagccagtttcatccaacagttcaacagagagcggcacttaataccctttatacagcccattttttcttagtttcatttgttcttgcccacaagcttgaaatccaggttaaggtatccagcctttatcatataagcattgacattatccaggcctagttagtagcagtagggtaacaggattgaaaaagatttgatggagaggaaagtatctaatattagtcatggttttgacctaaattgctagacaatagtgccattcaaagtctaatgaaaatgatgcattcagttgaacaagtttgagctttggtatagctaaaaacaaaagcccataaagttggagatggggaccagagtttaacatagcgatctaggccagaattgacaatgtttaagtaattgtggaatctgtcaataagacttctagagtgtttatatgtatcagaaatgcacacaacagaaccacaggcaacaccaacactggtgacaggaagaagtagaagtcacctattgaaaactggaatggcccattcagaaagacaggagaattaggagaggtgaaagcagccaagggtcaagaatgcagaagcaaaggaaggactaaaaagcctccatggacattgataatcaagagattattaagatctttgctagaagcattcctttacctgtacttaactaccttaaaaagagaaaagtcaatgacgtcctgcaactatagtcccagtaggaactgtgaagaccagctgccctgcaggatccagtttttcttgggaggttgtatctggtcataaggtaaacattctatacattctattgcctgctcctgaactgaaagacttctgcagcagtattaaagcattttttaatcttaaaaaaaaaaaaaaaaaaaaaaaaaaaaaaaaaaa

SEQ ID NO: 8309 - DNA, 666 bp, Macaca Fascicularis
  misc_feature (1)...(666): n = A,T,C or G
tagcaaacaatgattacctagagatgcaagtgctttgaacttgaacattagagaatcttgtgaatttgtaggagttaaccaggacaagtacccatctcatgaacattggtaagggaagcacgtgttttggaggcatttcaggtagtccagggcagaccaagaagggaaggaaagagagaagatgtcagaaaacatctttgaatacccagagttgttatcccctccacaaaacattggagggcaaattgtttgtgtcagtaaaatagaatcataaagtgtgaggaagaaacctgtggaacattctggaagaattggtcagagatgggccgggcgtggtggctcgcgcctgtaatcccagcgctttgggaggccgaggtgggtggatcacctgaggtcagnnnnnnnnnnnnnnnnnnnnnnnnnnnnnnnnnnnnnnnnnnnnnnnnnnnnnnnnnnnnnnnnnnnnnnnnnnnnnnnnnnnnnnnnnnnnnnnnnnnnnnnnnnnnnnnnnnnnnnnnnnnnnnnnnnnnnnnnnnnnnnnnnnnnnnnnnnnnnnnnnnnnnnnnnnnnnnnnnnnnnnnnnnnnnnnnagagcgaaacgccatctcaaaaaaaaaagaagtggtcagagatgaatactccatagcagcccctttgatttcagag

SEQ ID NO: 8310 - DNA, 704 bp, Macaca Fascicularis
gctaaaaacaaactaaattcctagagatgacaatcattgtagtcctcggtgaaatgaaaataacaatcacatgaaaaaaaatttgagcataaaaaagagaagtaaaggtatacccttagcctacatactgagctgacaatcagatcatagaatgctttatttaatcaagacatttaaaaatacttatttcatctacatactttcaaagcaaaataatttctggggccacagtttcctttgtataagacttaagcaaaaaatatatttccatgccctttgatccaagtaaaatctaaggaaaagggaaagtaaaccttgaaattaagacctagaaatagatccacccttgcagattgataaaagtgggcaatccagtaggccagttcacattatagttatctcagttttgcttaaagcaaaccctaaccctcaacctaggaggccagatagcaaaagatgtgcaactggtttatattgcaaatttaacaaaatgaacatgcaaagaattacaatagaaataaacttttacaaatctgagaactttctatgcaatctgcagacatttttaagaatataaatgtgcttccatcattttttacccagtctggcccgggcttgcactgccataaattcagttttaatgggaacagaagactccagatcctcttgatgggaaagaatcatgaatttagatgatgactttg

SEQ ID NO: 8311 - DNA, 714 bp, Macaca Fascicularis
  misc_feature (1)...(714): n = A,T,C or G
gttaattaccagttctcacagtgattactgtagacttctctgtgaatatatccttgggaatgattttacagacctttttgacgttgtgattacaaatgcactgaagcctggtttcttctcccacttaccaagtcagagacctttccggacgctcgagaatgatgaggagcaggaggcgctgccatctctggataaacctggctggtactcccaagggaacgctgtccacctctatgaacttctgaagaaaatgannnnnnnnnnngaacccaaggttgtttattttggtgacagcatgcattcagacattttcccagctcgtcactatagtaattgggagacagtcctcatcggggaagaactcagaggggaggaaggcgcaaggagtcagaggcctgaggagtcagagcctctagagaagaaaggaaaatatgagggaccaaaagcaaagcctttaaatatttcatctaaaaaatggggctctttttttattgattcagtttggggactggaaaacacagaagactccttggtttatacatggtcttgtaagagaatcagtacttacagcactattgcaattccaagnnnnnnnnnnnnnnnnnnnttacctctggactacaaatttacaagattctcttcaagcaattcaaaaacagctggctactatccaaatcctccactggtcttaacaagcgatgagacactgtgncc

SEQ ID NO: 8312 - DNA, 733 bp, Macaca Fascicularis
  misc_feature (1)...(733): n = A,T,C or G
accaacagtatatgannnnnnnnnnnnnnnaagccccgtcgctccagcgtgggnnnnnnnnnnnnnnnnnattgtttctgcactaaccactcggatgtgtaatttagttgttttgcnnnnnnnnnnnnnnnnnnnnnnnnnnngggnnnnnnnnnnnnnnnnnnnnnnnnnnnnnnnnnnnnnnnnnnnnnnnnnnnnnnnnnnnnnnnnnnnnnnnnnnnnnnnnnnnnnnnnataatgacacacatgcagtaagaagaattttggaaggggattcaagtaaatccaaatgaaattgtgacaggacgtttgtatggttaacttttgatnnnnnnnngttaaaagtcccttctttcttaaatctcaaaccaaatattttgtgtgttgaccttgggcagaagtgtcctgccctcccgttttccnnnnnnnnnnnnnnnnccgcactctgcagaagggtccnnnnnnnnnnnnnnactcctccggttgggaagcagcagtaatgtttttgcttcnnnnnnnnnnnnnnnntttatgttaaaaacagtcaatgagaccagtacctcttgagtgctttatttgccttctctttgaagggaggggacaggctctgctctgtaaactcaaatgtgtnnnnnnnnnnnnnnnnnnnnnnnnnnnnnnnnnnnnnnnnnnnnnnnnnnnnnnnnnnnnnnnnnnnnnnnnnnnnnnnnnnngaattgtaatgaacttttca

SEQ ID NO: 8313 - DNA, 2166 bp, Macaca Fascicularis
gtaaaaatagatgcattaatcctttcagctattgagctttaacatcctcttggacctacatctgtgtctttaccctcttcttgttggcagtataggcataataataaacaatgctgcagaaaacttgcatgtgctttcgttttaatgtgctgtgataacatcaatagtttctagaacagcagaagatattttgggactttgtatatagtagtgagtgcctacacccttgaggaatttcagtctgactgaaaggaaccaggagcatttccattataaagttttttttgtttttaaaacttctgagctgcagctgattatctcagggtaaaattgttgtaatttagtttgaaatatgactgtgaaattattttagttctacaaatcatgacttcttgatgttggttaggaccttgaatatgcatgttatatactaaagtctgaaagctgattttatttgcttatttttatctgtcagttaattggggagactaattttgtaaaatcacttgggcatttagctaattaaatttaattatgtttttgtgggtagatttgctgtccatggatagttattctagtataaatatatgaaaatggacaattattttcttaaccaagacagtctgattatttttctttaacaatttgacctttctacaaaacttttaatagtgtgaaatgtctgaattaatgcttttaaaatatcagtcaagtcagcttaaaaaacttacagttcagctagcctaccccctccttcattttcctacagcttatttgtagcctggaaagactattttggtaatagcattagaaaggatcctggaaacaaaatacaaagcatggtagagcatatgaaatctgtttctcttcattgggaatactgcatggttctgatggtcacacttgacaatgacgctaagaacagtccagagaagaatagataaaaatgacaaaggagaaaaagtggcttctatgacagtttaaagattaggattcttaagtaaacagaaagctaattggtgatatgagccttctacatactggaggatttgaacacgatcatcagaattcgaaaaacaccagaaatgaaagatctttcctgaaactgtttaggagtattcatgatatacccttaactgttctagagaacaaaatgtgtctgtgctccttcacagaagtccctatgaatttgtttctcaatgtgatccttcttaagctctatagctctttgctttcattaattttaggaaaatcctgccttgcttcgttggacctatgcaagaataaatgtctatcctaatttcagacccactcctaaaaactcactcctgggagctctgtttggaatcgggcccctcatcttcctgtattgtattatcaaagctgacagggtaagtattcagaccagatgtttagtatttgagtgacagggtccctcgctaggggccagctgcagctccttctccaccagtgcccctcccaccttggggctgtacgctgccttcccttcctctcttcttttatctttattcctttccagcaggagttaaaacaaagttttcagttacctttgtctatttttcttagttcatttgtttttaaaaaagatgatgtttattgggtgaagtattagcagaatacataaatcatttagtgcgtttcctgtttgtgtgaattctgtttacgttggccacattttgcgaattaatgttaaaacctattaatactctagggacagagaagcacaaactgcctgtggggaatagctgccatcagcagcctgggtatatgattgtagagaaagtcaagctgatctttggcaccaaactgttccacatctggtactaaagcctgggctttagacagtgggattgcaattaggtttggagtgtttcattctctttgtcagttgtaccatgggttgtgccaaaatgcagtttttcttgtcttttttattatttatttttatctaatatagccaactggcagaatatattgtttttaatgtactttttttctgtctatacaggataagaaagaaaaacttatccgggaaggaaaattggatcgaacatttcagctctcatgttaagtctggcaatgatgactatatgtattcctgcctaaataaatagtttattaatcaaaaaaaaaaaaaaaaaaaaa

SEQ ID NO: 8314 - DNA, 1010 bp, Macaca Fascicularis
cttctttatgctcgttgtcagccagttgccaagagcagtggaacagacacaagtgggggctgtttggagcgggaatgaagagccttcaaggcccaggagagcgcggattccggagtagggaggcgagggggcagcgtgggagaccagaagggaaaatgggctgaaaagccaagcaaacaaagaacaaaaaacaaaaacaaaaacaaacaaacaaaaaaggtaaattgggctttgctccggctttacaaaggcagagatggtcaagccctctgactgactttgtgccttctttatccagtcctttgtgaaataagccgctttccgccccgctgcaggagcttaggctgtgggagactcgcttgcactgccctgggcctccaagctccctgctcgctgagcccagcgctgacactcacagaagctgcgttcgctggatcctctgagaggctctgcaacgatcccgatccaattcagcagcgttataaaaggtagccgagtggagatgccttttcttgtctttttcattctttcattctctgtcttttaaaattttagcaatatcctgtcttttccccgtggagggtctaagaatcttcactgggtttaatttaggaatttcaaattggatatctcaaaatttgaatgtggtcaccttaattggtaatcaagattgcgaagtcttccaaaatagcctttttcatcttatgtaattagaggtccatgagctttccaaagaagctctggattttccacggtacaaatctgtatttctctctctctccctctctctctctctgcctctctcgtgcgtgtgtgtgcgcgcgcctgtgcgtgcgttttctttcatttctggcattaggaaactcgttcagggccactgaaaagtcaggggaggctcagatgttatttcccacggattcctgtttttccggaaacgttgtcaccaaataagaatgagactgttattttgtagaaacaattagcccctaccaaaaaaaaaaaaaaaaaaa

SEQ ID NO: 8315 - DNA, 676 bp, Macaca Fascicularis
  misc_feature (1)...(676): n = A,T,C or G
atatcaatttccttcaaacatacaagtcnntgggatnnnnncacgtgtagggcctgcacgntnnntacaatggcaaagcattttttaaaatttagggtcaggttgaaaaattctaggactaattctgtagagaggagggactgttactaatgtgagtggggacagaggagtaggttaccacatttggagcagtaatagacgcaaacgatgtaaatttgaaatttgcccctttagttaaagaaggagcctgcaaagttcatttctctgttttcagccctgtcagtcacccatttagtatgttggcaaagtattnnnnnnnnnnnnnnnnnnagaaagtaataatgacagtaaaagtatgtcagagagttacttctgccacatggttagaggcatgtgattttcagcactgtgtgttacagaaatgtcaggaatggtgtattataacgtgtgcaagataatgtcagtgtgcacagagggtttttccttatctgattagtactgttaatgttcaaagaataaaaatggttttacagtttagattctgaatagcaaaacctgatttttcaaccatgacctgcatgagagaagcatcctaggaagtcttagatcatacttttgagtttttaattttaatttatatagtgtttttttatgtcttaatatttttgtgaacctg

SEQ ID NO: 8316 - DNA, 589 bp, Macaca Fascicularis
taccggatcactactgctggggtattttgctgccaagataatggtctctattatggattgaatgttaatgggcagtcctctaccccagcctacacccagccccttctgcagctccacatttgaaggccttgtctaagtggcatctcaatgagacgggcatggaagtcatccaacagctgctggagggactgtgcagagttacgacggagagagtgactcctccgaaggggactcgaggggatgcattgtgctggagtctcaatcaagtgcctggaagttgaatgtgaaaaacagtgctgccaagattatagagatattgaccataaatgcattcgtgggctctcaagaagcatcagggatgccatgaaggaggggcatttttactctgtgtcctaccaaattcagttaattatacattgcaatgaggaaagtgtgggcaacagcaaatctgatcttaatgtccctttgactaatccaaccttgttgtttgtgagttactattgtgaaatgatctcctgtgcatataatgcagttagcttcaaataaaaatctgtggcttcagaaaaaaaaaaaaaaaaaaaaaaaaaaa

SEQ ID NO: 8317 - DNA, 716 bp, Macaca Fascicularis
  misc_feature (1)...(716): n = A,T,C or G
gcctgtaaattatcttgaagtcnnnnnnnnnnnaacaagcactctcttttcaccacatagttttaacttgattttcaagataattttcagggtttttgttgttgtttttgtttgtttgtttgtttgttttggtgggagaggggagggannnnnnnnnnnnnnnnnnnnnnnntttcaagtcactttactaaacgaacttttgtaaatagaccttaccttctatttttgagtttcatttatatttnnnnnnnnnnnnnnnnnnatcnnnnnnnnnnnntacccnnnnnnnnnnnnnnnnnnnnnnnnnnnctgggtatctgcacttcatggtaannnnnnnnnnaaatgcctggtggcttttcacaaaaagcagattttcttnnnnnnnnnnnnnnnnnnnnnnnnnnnnnnnnnnnnnnnnnnnnnnnnnnnnnnnnnnnnnnnnnnnnctagacatagtcttggtgtgtgtggtcttactcatcatcttctagtnnnnnnnnnnnnnnnnnnnaaggacttggacacttgcaataaataaattnnnnnnnnnnnnnnnnnnnnnnnnnnnntataatatatnnnnnnnnnnnnnnnnnnnnnnnnnnnnnnnnnnnnnnnnnnnnnnnnnnnnnnnnnnnnnnnnnnnnnnnnnnnnnnnnnnnnnnnngtgcctcttctgaaaggtataaccattattggcttttttcttccta

SEQ ID NO: 8318 - DNA, 724 bp, Macaca Fascicularis
  misc_feature (1)...(724): n = A,T,C or G
gatgacagtggccgacttcctgtgctgggctttccagtgtccccctggcctccaggctcccccnnngcctctccatggagtggatggggaggttgtgggggtcggcgtcccttgtgtgcgtgtgtggatgtattgacctgtgtttcccaggacagcaggtgccacggcctgccccgcctgccagcccaaattcccgttctcctgtgtctactaacaaggacatgggggtgggcnnnnnnnnnnnnnnncctcagagttcagagggtcctcactgccaccgatccccctcnnnnnnnnnnnnnnnnnnnnnnnnnnnnnnttccgttcctggttttagggcagaatccatggagactacttccagaaggcatctggctctgagttataaattacttccctggtcctgacagtcacctggggtcccccctctccctgggttccacctttctgaggaggagcctggggtcagggctgggttttggattaactcatccttcctagttaacacctctttttgtttttattttattttatttttgtttgttttctccgtgtgtgtgttttcctaatttatttacctctgtttcccctttttccttttttttttttttttttaattaaagagcaaagctttttattactttgtaatttaaaaaactgaaaaaaaatactgaagaactttggggggaattttgtacttttttccnnnnntaaaaagttcacc

SEQ ID NO: 8319 - DNA, 706 bp, Macaca Fascicularis
  misc_feature (1)...(706): n = A,T,C or G
cacaacaaaaactaaagttgtaaggggagaaaagggttatgtgtgaggaactcttctagattaagagagactgtctagagaaaaccaaagataatgtgtcatatttgtatggatccttgtttgaaaaatcagctgtaaattttggggaagtttctatgtgttctagtattggaagatattaggtaattatcaatttgaataaatttgataatgtagttatgtagcagaaaatattgtagttgtgtaggagaatatagggtacagccaggtgtggtggctcacgctcataatcccagagctttaggaggctgaggtgggaggatcacttgaggccgggagttggagaccagcctggacgacatagtgggtcctcagctctacaaaagataaannnnnnnnnnnnnnnnnngtgttgtcacatccctgtagttcctagccacttgggaggctaaggcaggagaatcgcttgaacctgggaggtgcagattgtagccaagattgcaccactgtactccagcctgggtgacaaagcgagactctgtctcaaaacaacaacaacaacaacaacaacaacagcaaaaaaatgtgtacatgccttaattaaaagtactttattgggccaggaatggtgactgacatctgtaatctcagcactttgggaagccgaggcaggcagatcacctgaggtcaggagtttgagaccagt

SEQ ID NO: 8320 - DNA, 726 bp, Macaca Fascicularis
  misc_feature (1)...(726): n = A,T,C or G
agccccacagctgcccgtttactgacttgggagaagtaaagttagaactaacgtggggggaaaaaatctcagttgtcaaaaaaaactgatctgcttggaatgtggccctggtttcttttcccacatgaacctccagcaaatagcaannnnnnnnnnnnnnnttctcattcgaagaggaatgattcaaaagtaatcaaaaccacaaatgcatttggttttggggccagcaannnnnnnnnnnnnnnnnnnnnnnntcacacatgtacaaaatgatgaacatacagaagtattcattaatgcactgtttgtgaaaacaaaagattggaagctgtctaaatgataccgtatcagggttctggttccctaaattgnnnnnnnnnnnnnnnnnnnnntcctgggtagacaacaatgaataaataaggagaactaggataccatttatgtagtgatgtgggataaccttcagtttatgttattaggtaggaaaaacaaggttaaggacagtgagtataatatgctgccatttgtatataaaaaggagaaaannnnnnnnnnnnnnnnnnnnnnnnnnnnagttatctctggaaagagacacgagaacctggtaaccctgattacgctggaaggggaaggagcagtggtggctgtggggatggaattgagagggagacaactgtatcctttcatagcttttgaaaatgtggatgtactatgtactatgtggat

SEQ ID NO: 8321 - DNA, 737 bp, Macaca Fascicularis
  misc_feature (1)...(737): n = A,T,C or G
ttggggcagctcccactctacgaacacaatgatagctccccctgggcaatacaatcacagaacaatgggttttgtcaaattggaaccagtaaacagagccatagaaataaatggannnnnnnnnnnnnnnnnnnnnnaggttacttttttttggggtaaatgttaaagcagaggggacttccttatgatgttgactcagggagactggaatcttctgttttcagaaaacactagtctgttttgagatctgcttccttaaaattccagttggagtatgtagcatgtagcatgagtggctctaatttggagtctttagactctcactttnnnnnnnnnnnnnnnnnaacttaaagcattagcattaccttcagttatcatcatttttggcttccatcatttataggttatgatatcctcctgatcacacatttctttgagtttatgtaattccagccaaatagagaccatttgatatttgatggatggcagcacgcaaacatttaaaacttttagagattacagcacaccagggagaccgctagtatgacgatgaggaagataatgttaagagtttggagtatgcacttttggcaagatgcaaaccaactaaaatagaatagatcaaagaatgaaccagatgagtgtagccattttaaccaagtagcatgtttgttagtttttgtaactgagactctgtaacacctgatatatttgtccatgtnnnnacaagaagcgtc

SEQ ID NO: 8322 - DNA, 1297 bp, Macaca Fascicularis
aagtcagtagaacagaatgaagagtccagaattagacacatacctatatagtcaattgatttttggcagatgaaattccaaggtagttcaataggggaaggataatctttttaacacatgatgctgggattacaggcgtgagccaccgtgcctggccagaaccgtgaaatttctatggatgaaaatttcagtatctgaagtgaaaaattgattttcttgtgcagattagtccctacataagaaaggaccagttaacctgaagatgctgtaatagagctatagaaactgaagcacaaagaggaaaagactagaaagagataaagagcagaacctcagagacctctgggacaagattcaagtagtctaagttacatgtaattggagtctgggggaaagggcaagaaaagaatgagacctatgggccaatttcagaggcaggtaagacaatgtcatgctgatgaacatacaagtaactggagtctcaggaaaagaggggctgtgctggtagtaaacaactgggaattgatgtgagaaaaaaacacagtttaccataatatcaaaaaataggaaatactgagggacacatttgacaaaagatatcaaaaccttaataccagaaaccacaaaacattcctaagaagatttaaagaagacctaaataaattaaagaaggcctaaataaatggagaatttaaagaagacatgaataaatatattattgatgagaagactcgtgttgttaaggtaacagttttgctttaagtgctaaccctatgattgctatgtaggcaattgatatattaattgatctgtagatttaaagccatcatattgaaaatcccagaagccttttttgtcaaattaacaaattatatctaaaatttacatgaaaatgcaaaggacctggaatagctaagacaacattgagaaaagaaaaagctggggacttagactacctgattttaagatttattatagctaggtgtggtggtgcacacctgcagtcacagctccttgggaggttgaggcggtaggataacttgagcccaggagttctgggctgtagtgtgttaatgccagttgggtgtctgcactaagttcagcatcaatgtggtgacctcccatgaacagaagactaacaggttacctagggaagggtgaactgacccaggttggaagtggaacaggtcaaaactccagtgctgattagtagtggaatcacacctatgaatagccactgctctctagtctgggcagcataaggagaccctgtctctttaaaaaaaaaaaaaaaaaa

SEQ ID NO: 8323 - DNA, 757 bp, Macaca Fascicularis
  misc_feature (1)...(757): n = A,T,C or G
tagttgtacatatttaactttggacagaaaattattttttgtatgtttaaactgatatagttgtacatattntcagggatacatctggtattttgatacacgtattcaatgtacaattatcaaatcagcgtaattgggatatccatcatctcaaacattatctttgtgttgggaacattttctgctatgccttctcttgtagcaggaaattgttatttttgatcaactcactattcacacatttgtgaagattacaaattcagtaactaatgtaacatttagatgtaagctcttgttgcaaatgtagcccaaagcgctgtactttggggaatctggcatctgttacattttgctagtttgaacaggcaatagaaatagctattagatactgtaaaagaaattgactttctttgccaatgtgcttcccagtgtcaataaattaaagtatccttttttagaaaatggtttcaaaagaagagcagtatttattgaattctggagagagaatgctctttaaaaatctgcaatttttactatcagggatcatttctatagctcattactcgtgaatttccctgaatgtgtagagcaaaataaaatctgctgttagatgtaggctatttgggattttttttttttaatcgaactagagttaatctatttaggcttgagtcctgcttttgctacttactgggtctatgcctttgagaaagttatttaagcactccaagtctcagtttccacttctataaacagg

SEQ ID NO: 8324 - DNA, 732 bp, Macaca Fascicularis
  misc_feature (1)...(732): n = A,T,C or G
cacaagattgannnacatnnntnntgtttgggcnnnntgaggaaattgtattacagttagctattaatgctgtgtgagtttagaaaaagtcttgatagtaaatctagtttttaacagtgcatgaactgagtagttaaacatnnnnnnnnnnnnnnnnnnatagtggaaaaggtatcttaggtgtgtcaatccaaatgtgacttgagtcattacagtggaccctctgggtgcactgaaaagccgttttatatccaggtttgagaagacctggaataaataaaagctttgaattttgcattcagtgtagttggatnnnnnnnnnnnnnnnncagtgttagctactgggattggcnnnnnnnnnnnnnnnnnnnnnnnnnnnnnnnncacgggtnnnnnnnnnnnnnnnnnnnnnnnnnnnnnnnnnnnncttcctttttttttttttttttaatttggtgcttacaacttggttacgatgattatacttcttgggctatcacgttataatgctcttggccttttttttgctgctgttttgctatttgttctcacacacacctaggccaagtaccagtgttggttgttagaagggattctgttcattcaacatgcaactttagggaatggaaggaagttcatttttaggttgtgttgtcaggtgcagtgtatagggtagtgaatcctgtaagttaaaatttatgattaggtgacaagttgacattgagattgtcc

SEQ ID NO: 8325 - DNA, 713 bp, Macaca Fascicularis
  misc_feature (1)...(713): n = A,T,C or G
accgcctccttgggcaaagctttactccagaacaggcctttcactcaggaagtcttgggcttcaatcctctaagtgctgtgtggccttagccaagtcgctttccttctctgtttccctctctgtaaaatggcaagaatctctggacttagaattgctattgggagatccaggaagtagcatttaagtcacccagaacgtggtaggtgctcagtgaatgactctgttgtcttacttcatcatgaccaggaggcagtgctgccagctggagagatttggccaaaccaaattcagtcaatatttattgagcgtctgctgtgtgctcgacaccatggttataaaaaataaacgagacatgcccacagaactcatggactgttgggaggcacagccatctcatgatataatatccagtgctattcccgcgttcattttagaatcatggagaatgggccacgtgtgnnnnnnnnnnnnnnnnnnnnnnnnnnnnnnnnnnnnnnnnnnnnnnnnnnnnnnnnnnnnnnnnnacttggacagtgttcaagtgtggacaatgaccagtgtggacaatgtggcaaaaccccatctctattaggaaaaattaaaaattagccgggtgtgttggcgcgtgcctgtagtaccagctactaaggaggttaaggtgggaggatagctggagccctggaggtcaaagctgcagtgagccatgatcaca

SEQ ID NO: 8326 - DNA, 722 bp, Macaca Fascicularis
  misc_feature (1)...(722): n = A,T,C or G
gaggtagaatagtgagaggtagaatagcgggaggaattttgaaacatggannnnnnnnnnnnnnnnnagaactgacgaagtgcagaatctctccagacaatggtagaagccacaggactacattaagattgggcccaaatactagtttagaaaagggtaaataaaactaggtttacttaagagtagagccagcttaattactggctcgtggacatatttcagacaaatctaactggagagaaaaacagaccaggagagaaagcgaagttataaggaaatggaactagagaaacctcacaaagggataaaggaggtaattaaaggttaaagccannnnnnnnnnnnnnnaaaggagaaatactggaggccagataggaannnnnnnnnnnnntcagggggttatggatccagggtggctagaggatagaagtagagttccacccagggccagagggaacaacctgggattcagacacagcagtggtgccaacttgaatctacctcgtgctagagtctgagcagcctggtctatcacctaacacagataagactggacagaggctcccaggaaccaacatctaagaggggagtttggagaggggctaaaagaaagcaggttaagccccaaatgtaactgaatgatgaccagggataactatttactagtgcttttatgatttcttgtaactctgtaacttccnccngtatttgttaatttttta

SEQ ID NO: 8327 - DNA, 712 bp, Macaca Fascicularis
  misc_feature (1)...(712): n = A,T,C or G
agccacacgggcccctgannnnnnnnnnnnnnnnnnnnnnnnnnctnnnnnnnnnnnnnnnnnnnnnnnnnnnnnnnnnnnnnnnnnnnnnnnnnnnnnnnnnnnnnnnnctgacagcgccagccgaggtggagtggccgtggtccccgcatcaggtaattctgcccaaggctcaactgccctctctaccctactccttttcctccccctgcaacnctgggtcacctgacctgtagtcctttaacccaccatcatcccaaactctcctgtcctttgccttcattctcttacccacctttacctatgggtctccaatctcgnntacccaccttgtgacttccatcccagctatccgagtcttcaccctgtgaccccagccctgccactgaccatctgtgacccttccttgccattgggccctccacctgtggctcacatctcaccagtcccacagagcatcctcaggcctctccaggggtcctcatcacctattgcagtcttcagggctcagcctattttccgctactcccttcctcctcctgtgtgccgtcccctttagctgcctcccattgatctcagggaagcctgggagtcccttccccatcccccaacctctggagtccaggagaacccgtacccccacagagccttaagcaactacttctgtgaagtattttttgactgtttcatggaaaacaagcctggaaataaa

SEQ ID NO: 8328 - DNA, 763 bp, Macaca Fascicularis
  misc_feature (1)...(763): n = A,T,C or G
catggaactcagtcnnngggagaggaatatgtaaatgataagtgcaatgcaatgtgacataaataatatcaagaggaagagaatcagaaaaaaaaaggagaggagactgattaattctgtcagaagtagacaaagccttaacaatataagtaatatgtattaaattgtaagaaatgttagataaaacagctttctttagtattttttgagttagaaagcaagtttttagcttggggtcagaatatttttagagaaaaattttaaaatgtgcctaaatctgaaattctggatttaaaaaagtgaaactatgcatgtgcctctaatacctaatgacgaattctaattgcagaagaatgccaataactgaaaccacaaaatgagccctacgtataccggtgaccttctttactcagaattaattaacacaagcacttgtttcttgcagagcactttgctgtaatttagaacaaattaaggaaaaaaatcattcaagtgctgttttcttcacaccatgaagtaagcatgatggaccaaagttaactcatttaagatattatcatccattttttgtaattatgaacagcaatatcatctttttccttcaaaaaaagaaaaagacaccctgatctatgctattttcagcttgtttcctgtgcttctatttattaatggaaattgatttttcaagattaatgtaaaatgtgtttatgtttctcccattaagtctcttatttatattagattcaatgtatatgttctggat

SEQ ID NO: 8329 - DNA, 702 bp, Macaca Fascicularis
  misc_feature (1)...(702): n = A,T,C or G
acccagtcactgcctatacccctcatcacgtcacaatgtccaaattcccagcctcaccaccccccttctcagtaaggaccctggttggctgtgggaggcacctactccatactgagggtgaaattaagggaaggtaaagtccaggcacaagagtgggaccccagcctctcactctcagttccactcatccaactgggtccctcaccacgaatctcacgacctgattcggttccctgcctcctcctcccatcacagatgtgagccagggcactgctcagctgtgaccctcggtgtttctgccttgttgacatagagagagccctttccccccgagaaggcctggccccttcctgtgctgagcccgcagcaggaggctgggtgtnnnnnnnnnnnnnnnnnnnnnnnngatgggcgggcaaggcacccagggcaggcccacagtcccgctgtcccccacttgcaccccagcttgtggctgccagcctcccagacagcccagcccgctgctcagctccacatgcatagaatcagccctccacatcccaaaaaggggaacacacccccttcgaaatggttttctccccggtcccagctggaagccatgctgtctgttctgctggagcagctgaacatatacatagatgttgccctgccctccccatctgcaccctgttgcgttgtagttggatttgtctgtttatg

SEQ ID NO: 8330 - DNA, 744 bp, Macaca Fascicularis
  misc_feature (1)...(744): n = A,T,C or G
gaaatgctatttttggagccagaattttcacgtctgatttgtggtgattttcttaannnnnnnnnnnnnnnnnnnnnagggggcacccccacgcttnnnnnnnnnnnnncttattagagggcagtttgtggttcctggtttggaatttaacattcttcaaacattccagtccactgaaagttttatctgctttcccatataaaaattcttcccacgatagtgacttgcttctcacagtcacgttggaaggcgtgtgtgaggcctacagtgtgaggttcagaattgccatttccaagtgctcctcgtagggaaacagcttctggtnnnnnnnnggttcggcctcccatctgatccnnnnnnnnnnnnnnnnnnnnnnnnnnnnnnnnnnnnnnnnnnnnnnnnnnnnnnnnnnnnnnnnnnnnnnnnnnnnnnnnnnnnnnnnnnnnnnnnnnnnnnnnnnnnnnnnnnnnnncccgaccagcgacacgatggcttctggacaannnnnnnnnnnnnnnnnnnnnnnnnnnnnnnnnnnnnnnnnagagagctgacggactgtcgtgacgtcccagtcnnnnnnnnnnnnnnnnnnnctggggctgtctaagttggcagtgatgtctgcctnnnnngagaggccattgagaaggacattccctcggagctgctcgaggacccgnnnnnnnnnnnnnnnnnnnnnnnntgcccnnggncggcacatcttgcnnnnnnnnnnncctg

SEQ ID NO: 8331 - DNA, 299 bp, Macaca Fascicularis
tgcaggcgtgagactctgcacctcgtcaagtgccatgttttagcagtccagttttaacaatgttcaattcacgggcaattttgtaaacccgcccatttaatcatccttgcatattgggttattttgaagatgctttcagatatcatttttcattcataattattttattacgaaaatctaaagcgtaatgactttctagaaacataacagcaatgccattgccacactaaaattagagaataccttaatatggtcagtgtcagtttttatgatttcctcatataaatttggttcatata

SEQ ID NO: 8332 - DNA, 675 bp, Macaca Fascicularis
  misc_feature (1)...(675): n = A,T,C or G
ccccatgaagctgggctaactttctaagtcagttggcttagaaattcattgtggcccagaccctttttcctcccagcctggcatccaggcagggacaccctcacaccaccagccccaaggagcttacctgctgtaaacacagaccgccttgtctttgcctctggtttttacacactgtagagtggccagcagtgaacaggttgaggatgtgcggtttgatagatacctttgggtctgctttgtgtctgtgttcatgtttaagggatgtgtgcgactgtgggtggggacgtgtgattgtggggcacaggtggcccctgctggagcccggctgggtgcaacacccgtgtaggacaggtgttctcagtgacctacctcccaggctcctctgcgcctgcaaaggaacaggagtgagtcatgactgacaggggtggttgagactagactaggtagagtagttaccaggagatgtgaatgtgtgtcaggtgatggatgggtttgtcaagggaatcgttaccgttttataccaaaggtattaacatgggcagcctttgacatatatattccaaaaagcgagtttatattttcaaannngtttttacagcttagactttgtacgtactgccctgcctgtgacagttgtatgccttcattttgtatccaacagcaaagcctaca

SEQ ID NO: 8333 - DNA, 1808 bp, Macaca Fascicularis
aaagcacatgacttatataacacactagtgggtagtgggatctggcttagcatcccataatgaaacacgttaatatttcttcagaaaacaacatatgagtattcatacatctgttcaggttaggttttggctactgaatgaattttggtgttacacttaaattattttgttcagaaacgttgggatctctgaagtgtggataagggcttgtagatctgtgtaagggtttgctgtgattattgttgaatgtgcatctgatataactgccatacagttgcttcttgaggacaactctgagcttttatgctcaaggccctcctgggctcttggagttttctagcagggccttcctgtaccaagagctctgaataaactttgaagactgacaggacactctcttctctctctacctaggtcctcaatttagtgatgtctccctgttcctttcagtgtggcagtagaggttggcaggggaggggtaggttgcaaatgcaatttccaggagccttccccagcctgacccccactccttccaccccagctggtcccagtgggggaggggcacaggttgtgtggaagtgatgagtgagcccctcttctggcaaagctgttgtgggttcaggcagtcatctggcctgcacaggcaagataatggagtcaaaggaggcttatggcccctcagccgcccctgggcgtgcaccgaggtctctgtgagccaccacacccggccacaccagtccttttaggggaaatagatggtagaattgttcagagaatgggctctggaactgggctctggaagtttcagctacagcattcattagctgtatgtgtttgggcaagtcacttcacctctctctgcctcagtttccttatctataaagttagaagagtaatagtaagttctactctgtcaggtcattgtaaagattgagtgagttaattgatggagagcagttagaacagtgcctgtcatggaggaagctacacaggtcacaactccttaactgaaactccagtgtcttaggatcctgatgcattttggaatttagggagttctggggttttggtgttcggcgtaactgtctgagcttgctcgcatggctagaaaatacttgcagcaacgagagagagattcttttggcagtaagtagctcttgccaggtagaggtgatttcaagggcatatgggcagctacaccagcccacacctttgtaaataactcccatattaaaccctcttcaatgactcagtttgagaatggcatctggttcctgccaggcccccgagtgatacaggctagtcttgagcgtcttcacagcaatacagagtggaccagcgactacagaaagcttgagaggggctggagagtgacaccttccccaacattcattatccacacagctcgccactcctgtgagaagacaacagagattgtgtatgtttgagaatgtctctctacctctcatgtagccatcctgaaaaatctagttcaagatctattccaggccgggcacagtgggtcgtgcctgtcatcctaggactttgggaggctaaggcgggtggatcacttgaggtcaacagttcgagaccagcctggccagcatggcaaaaccccgtctccactagaaatacaaaaattggccggacgtggtggcgggcacctgtagtcccactacttgggaggctgaagcaggagaatcactcaaactggggaggcggaggttgtaatgagtcgagatcataccactgcactccagcttgggaaaacaaaaaaaaaaaaaaaaaaaaaaaaaaaaaaggccaca

SEQ ID NO: 8334 - DNA, 562 bp, Macaca Fascicularis
  misc_feature (1)...(562): n = A,T,C or G
caggaagacggattgcagctggctcatgatttccacatcatgagcgaagttctttgttttttgtgtgcatgcaaaatgttgtttctttaaatttaatatcttttcctaacttttctaacctagaaggtatgtgtgattattatcttttttattcttatcactatacttgttattatctgatattaggcattcccaaatagaacataatttattttgttaatgttctctatttcttcttgattatttattagctttggatgttaaaaattagccaaaagcggccgggcgcggtggctcaggcctgtaatcccagcactttgggaggccgtgacgggcggatcgcgaggtcggnnnnnnnnnnnnnnnnnnnnnnnnnnnnnnnnnnnnnnnnnnnnnnnnnnnnnnnnnnnnnnnnnnnnnnnnnnnnnnnnnnnnnnnnnnnnnnnnnnnnnnnnnnnnnnnnnnnnnnnnnnnnnnnnnnnnnnnnnnnnnnnnnnnnnnnnnnnnnnnnnnnnnnnnnnnnnnnnnnnnnnnnnnnnnnnnnnnnnnnnnnnnnnnnnca

SEQ ID NO: 8335 - DNA, 739 bp, Macaca Fascicularis
  misc_feature (1)...(739): n = A,T,C or G
gctggcccagccagacagtttgagcaaggaggaggaggtggattgtttggtgctacagctgcaccgggtcggggagcagctggagaaaatgaatgggcagcgcnnnnnnnnnnnnnttgtgctgnnnnnnnnnnnnntcctgctcccaactggcctcagctccctgnnnnnnnnnnnnnnnnnnnnnnnnnnnnnnnnnnnnnnnnnnngctggaagacgacgccagctgctcacaagtattannnnnnnnnnnnnnnnnnnnnnnnnnnnnnnnnnnngcttccttgccagcactggcctttcttctacannnnnnnnnnnnnnnnnnnnnnnnnnnnnnnnnacccaaagacnnnnnnnnnnnnnnnnnnnagtgtcttcccttctagactttcccatctcctggtgagatgtttcccacttatgccatggtcctgccctgagcccctttccccaccaccttcccaccagggccaggcagagaagagcaactcctaagagccactgcactgtgtaaccattagtgcaactactaccttggtgcctcagtttacccatctgtaaaatgggnnnnnnnnnnnnnnnnnnnnnnnnnnnnngtcaacgggcggaggcannnnnnnnnnnnnnnnnnnnnnnnnnnnnnnnnnnnnnnnnnnnnnnncaactctggaagcaagcctatttcctccannncagtttcaatgaannnnnnnnnnnnnnnnnnnnnngttcagc

SEQ ID NO: 8336 - DNA, 740 bp, Macaca Fascicularis
  misc_feature (1)...(740): n = A,T,C or G
cagtactaaacnnntggattgtcctgggaggagttgctaccactgtctgtcagnnnaannnnnnnnnnnnnnnngacaatgcagtaccaggggatgtgctggtgttgacaaaacccctggggacnnnnnnnnnnnnnnnnnnnnnnnnnnnnnnnnnnnnnnnngagaaatggaataagatcaaactagtggtcacccaagaagatgtagagctggcctaccaggaggcaatgatnnnnnnnnnnnnnnncaacaggannnnnnnnnnnnncatgcacacgttcaatgcccacgcggccacagacatcacgggcttcgggattttgggccatgcgcagaacctggccaagcnnnnnnnnnnnnnnnnnnnnnnnnnnnnnnnnnnnnnnnnnnnnnnnnnnnnnnnnnnnnnnnnnngcaaggcctgtggaaacatgttcggcctcatgcacgggacctgcccagagacctcaggcggccttctgatctgtttaccacgtgagcaagcagctcggttctgtgnnnnnnnnnnnnnnnccaaatatggtgaaggccaccaagcatggattattgggattgtagagaagggcaaccgcacagccagaatcatagacaaaccccggatcatcgaggtcgcaccacaagtggccactcaaaatgtgaatcccacacctggggccacctcttaatctagacagaaatagctgtttggttttgattttaaatagatctattcccta

SEQ ID NO: 8337 - DNA, 769 bp, Macaca Fascicularis
  misc_feature (1)...(769): n = A,T,C or G
atgtgggttataaaacaaggagctggagtaaaattgnnnnnacctccaatcnnnnnnnnnnnnnnnatttgggagctacccaacctgtgggtatatggtgttggtttccattttttgtttgcnnnnnnnnnnnnnnnnnttgcttggtactgcatggaaagttcaagcttttcttcttgcccgctcaggaccacctgtctgggctggcctcttccccgtgtnnnnnnnnnnttcctaaggaagatttttgcagcgctctctggagctgaggggagtggaatttggtccagagaaggcggaaggaaatagttttcctgtttccttttctcgaggcagatgttgtcaggcttccttcacacctccttcccatgggtgcggctggcagtacagtcaggttgtggaggagggctcagaagaaaggggcactgnnnnnnnnnnnnnnntggtctgagacaggcacacagcagatactatcccaccttcctctcttaagaacaggccagccacacatataaccctttccctactttactaatatgtcccttatgtggtatcagcaacggaggacaggcagacttaccccctgccatctggagagaatgttgttactacccgtaaaacttgaccacccccatatcccactcctttttgtaaaaacaaatgcttaaacctgtgagcctgccattcctttctatgtgttaatcagtttccttccatttgagctgtgtgggagggaagggcgatnttgaaacnngtannnntgtaatct

SEQ ID NO: 8338 - DNA, 424 bp, Macaca Fascicularis
gaccttttgcagggattttgttcctctaaatcttaaatgttgccgttggcttaggtcggagagcaatcagggaatcaggaagccttctaaacctattattacaaattgcatctataaagattaagattgttgtctctggctcacactatggattaaacacacatatacgctctgttcagtagcagatactgtgctcccaaggtcggcattgcctgggtgggaaaatggctcaaacacaatccagggaagctctctatgatatgtgtttgacatccccctctagtttctttgtgtgtgtgtgttttatacatatcacaagcttactggtaatggtaacatttgccttgcccagcgagcaagacccactggttttgagaaagtgggtccaaagatttctgtaggccttgtaggcctgattaaggtc

SEQ ID NO: 8339 - DNA, 726 bp, Macaca Fascicularis
  misc_feature (1)...(726): n = A,T,C or G
gaagcnnnnnnnnnnnnnnnnnnnnnnnnnnnnnnaggtgacatnnnnnnnnnnnnncgcacgttccaggccctggagattgacctgcaggcacagtacagcacgaaatctgctttggaaaacctgttatctgagacccagtctcggtactcctgcaagcnnnnnnnnnnnnnnnnnnnnnnctcccactacnnnnnnnnnnnnnnnnnnntacgccacgacctggagcggcagaacaacgaataccaagtgctgctgggcatcaaaacccnnnnnnnnnnnnnnnnnnnnnnnnnnnnnnnnnnnnnnnnnnnnnnnnnnnaagggacaatggaagaatccaagtcgagcatgaaagcgtctgcaannnnnnnnnnnnnnnnnnnnnnnnnnnnnnnnnnnnnnnnnnnnnnnnnnnnnnnnnnnnnnnnnnnnnnnnnnnnnnnnnnnnnnnnnnnntgaaagtttctgcctattgtaaaatctattttcccccaaggaaagtccttgcccagacaccaatgagttctaaaagatatctttggagttatcagactcagaaacttgtattatttttttctgtaacattctacaatctcaccagacttctcataatgctcttaatatattgcacttttcgaatcaaagtgtgattttatgggtgtaaatctctactttcctannnnnnnnnnnnnnntctcatcattgtgcgtctattttgtagcc

SEQ ID NO: 8340 - DNA, 777 bp, Macaca Fascicularis
  misc_feature (1)...(777): n = A,T,C or G
gaagctagatgaaagggaagctggcatcactgagaaggttgttttcgagcagacaaagtcancgcagataatgtgaaagactggagcaaggttgtcctggcctatgagcctgtgtgggccattggtactggcaagatngcaacgccccaacaggcccaggaagtacatgagaagctccgaggatggcttaagtccaacgtctctgaagcagtggctcagagcacacgtatcatttatggaggctctgtgactggggcaacctgcaaggagctggccagccagcctgacgtggatggcttccttgtgggtggtgcttccctcaagcccgaattcgtggacatcatcaatgccaaacaatgagccccatccaccttccctacccttcctgccaagccagggactaagcagcccagaagcccagtcactgcccctcccccgcacatgcttctgatggtgtcgcctgctccttcctgtggcctcatccaaattgtaccttcctttactatcttcagcctgtaatggttgggaccagcccaatcccttctccacttactataatggttggaacnnnnnnnnnnnnnnntggcttctcctcggctgagaggtggaaggggtgggatttgctcctgggttccctaggccctagtgagggcaggagagaagccatcctctcccttcttacacagtgaggccgagatcctcccctccgaaggcaggagtgccgccctctcccatggtgcccatgcctgtgtgctgtgtacgtgaaccacccacatg

SEQ ID NO: 8341 - DNA, 2238 bp, Macaca Fascicularis
aaaattgagggtgggtgagtggtcagaggtggggacccccttgttgggaagtgatgcatgatctcagttgcagtatttgaattactagggtgctaatggtggtcctgggaaggaagggagcagagcacaaaggcttttcaaaggaagggcatgttggatttgcgagggattggttgggcagggtggaagacagagctagatcttactgttcactaatgtggcacaaagtgttgggtaaaggactatggtgagcagataggatactactgggagaccaccttggattcatctttgtttcctctctggcccatggcacttatatctagtcagttgcctgtagctgggtcaagtgaggtagggggccagatctccatcatcagaagtgactcatgggagtcagtaaaacttctggggttggggccttggagagtctcaaatggttgctgtggtttttccttttatttttatagatttgggggataccagtacagttttgctacatggatataatgcatagtggcgaagtctaggcttttaatgtaaccatgatccaaatagtgaacattgtacccagtaggtaatttttcaaccctctcttggttgctgtggttttggagacaggttcatggtgaagctggctgaagagacagatgggataattgtctccaatgaccagttccgggacctggcggaggagtctgagaagtggatggcaatcatcagagaacgcctgctgccctttacctttgtgggaaacctcttcatggtacctgatgacccactgggacgaaacggccccaccctggatgaatttctgaagaagccagccaggacacaagggtcttctaaggctcagcatccttccaggggctttgcagaacatggtaaacagcagcacgggagagaagaggaaaaaggtagtggtggcattcggaagacccgggaaacagagcggctccggcggcagctgctggaggtgttttggggtcaggatcacaaggtggacttcatcctgcagcgggagccatactgccgggacattaaccaactgtctgaggccctgctcagtcttaacttttgagcctcacctgcttgagtggttgccgccccgtcagctccagccgcctccagctcagccctttctgtgagagtccctctgctgctcacactctgatccagaggcaccctgagttgatgctttggatcagggaagccactttgggacaggtccataaagtgacctgatcttaccgagtgaggacctcagccagctctcaagaggttctgctcagccttaacttctcaactttgccttagcacagggtttctgtagggagtaggggctgctggagaggattagttctggacactgagactgttggctccacctccaagctgagctggggtggagggcagggtgggcgggaactgacaggaagttaagctgttcctctctctggctgctgctgtggatggccagaggacaggatactccctggctgagctcctgggagtgtggaaggagacgctgggccctggaagggccacagcgttatgtggatggggccacgatagaatggagtgagctagtgaagaaggcagagggagacttggcttctggtctcagctatgcctgtttgtgaccttgattgagttgcttgggctttacttccgcccacaaatcagtggtaaaaatacctgttgggaggagaaatgagaacatagaggaaagcttcttggagaaaaggtgcttggaccaagtctcaggtgtgtctgcctgtggctgcacaggctctctaaccaaaacctcactttcagagagatgtgggtcctttgtcttcagggtccacaccctagattttaacactgcattctcactataacatgccctataatggctgcatcccttttgagcaacctccaaaatccacgtttatacaataggtaaattagggatgactgcattatcagaatactctcagggttcctataaatggcagctctcctgttgtattcaagtgtttgtttacagactaacaaatttgttggcaaatccctggttagatgcacttgctggtgttgagatgaacacgtcgatttttcaccaaatcgatgaagccatgctctgcaatgacaatattaatgtgatccaaccctaacattttctctatggaagatatatgttgcataaagtgaggcacacttctgctttaaaaaaaaaaaaaaaaaaaggccaca

SEQ ID NO: 8342 - DNA, 740 bp, Macaca Fascicularis
  misc_feature (1)...(740): n = A,T,C or G
tgtgagatggatgttgaattgtgtagaatttgacagcagtatcaagagctgaggagaaggagaagatggaaaggagtctagcaacttaaaaatctcacagcattctctnnnnnnnnnnnnnnnnnnctgttggtggctcaatttctttaggacataaagaagatactgaggcctgtgacagcctgtgacagtatcatcaagttgtatnnnnnnnnnnnnnnnnnnttcctcccctttcttattctttattcacagtttacttttcatgtgcataagttgactcatttgtttnnnnnnnnnnnnnnnnnnnnnatatagccaccataagtcctgacaaaatgacttctaatgaggagggggaaggtccatgtcccaccttcctatgaaattttggcctattcacaaatctacccccacataagagaagtagttnnnnnnnnnnnnnnnnnnnnnnnnnnnnnnnnntagcatggtgttttgtgacttagaagttttaagtagtcgttgttatatctaagcatttattaattttggtaagaacattaccatatgtttctgatgtcacttctactgttaagaggtgccaggcatctggcggcctgccacttcaggatttgtgtgaatcggactatctaaatatagtataaattagagaccagtacttgtatttnnnnnnnnnnnnnnnnntaacctctgtttcactattgaagtaagagtactttacaatgaacacaaaaaat

SEQ ID NO: 8343 - DNA, 778 bp, Macaca Fascicularis
  misc_feature (1)...(778): n = A,T,C or G
ccctgagcctcaacagactatcatgtgcacagagctgggggagnnnnnnnnnnnnnnnnnnnnnnnnnnnnnnnnnnnnnnnnnggacacgctgcagctgtgccaggctgcactgggggccagtgaagcaggcgggcnnnnnnnnnnnnnnnnnnnnnnnntgtgacgcagctgaaaagcaacaaaagggtttggttgcaacagccagtgtgggtacctctggggagagaggnnnnnnnnnnnnnnnnnnnnnnnnnnnnnnccatgtgccaggatccaccctggcctcttttacccactgactccnnnnnnnnnnnnnnnnnnnnnnnnnttnnnnnnnnnnnnnnnnnnnnnnnnnnnngaagctctgagatgcaatgtgatctgtaccaggtcacccagctacgctgcaaagcgggttggccaaggccctttgcactgcatcaccctggtgcccagcaacatnnnnnnnnnnnnnnnnagcaccaagcttattccaggtctgtgctggccactctaatatacctcttcagatcctctgcttgtacccccagcccttgccttccctggattttgggtacccaggactttgctctgcctggtggaggagggtacttgatttctctgggcttcctttgtctcaattctgacagtgtggaaggaaatctgtaggtacccaggtcctcagctccagactgggtgatgctggagacccaggagcaagtcagcacaggctctgcccacagaaggcatgcacagtctgataggagaaacacac

SEQ ID NO: 8344 - DNA, 107 bp, Macaca Fascicularis
tggaccccacagtgatctcgagaaaagaggacacataggggagtctcacaaatctcggaaagagaccccgtgtgaaaataaaaacggtcacattgagacttaaaagg

SEQ ID NO: 8345 - DNA, 647 bp, Macaca Fascicularis
caaactgtcacgtgctctcagtggagctctgcttcaaaggcagaggtctgggctggggtctgtgattgtgcatctccaaccagctcctggggggctggctcatgtcgatggtccacaggccacactttcagtagcgaggcttcatagctgcccagaggttcccagtggaactgagccctggctgccagccatagaaacctgctcgctaacctgaaccggctcctgaagttccccgtctcaacctctcttcttgggaatgccttccaaataaaccacttccacttggatcctgtttgggggccccaacctcagaggacgctgccgcactccacctatcagctggatggcctcgagcaagtcacttggcccctgtgagcctcagtttccttaatcttcaaatggagacagtaaccaggaggtgtagaagacagcatgaatgaacacgcgcaaggaaccggaaatgctagcaccagtgccgaggtttgcacagctgtgctggagaagagcaaggctgatccccgttgccacagcattgctggggtgttgggttctcagtgaaccggacgcttcatcaaagactggggatgctctgtaggtgggggtaggtgcctctttggagcaaatccgagagtgaggatttatgtgaa

SEQ ID NO: 8346 - DNA, 1219 bp, Macaca Fascicularis
  misc_feature (1)...(1219): n = A,T,C or G
cgctttcatanaanntcacttgtggctattagagnnnnnnnnnnnnnnnnnnnnatttcattcccctgatgggccctgactcttccctggccagccttgacacttcccttgcaaaccctcccagcactgcaccccaggcagccactcctnnnnnnnnnnnnnnnnnnnnngagatggagccctccttattccccatctggtccggttccttcacttacagatggcagcagtgaggtcttgggctagaaggaccctccgatgtcacacagagtgcctgcctcctggtcccctctgctctccctctgcagcccacttcctgcccagtgccatcaggatgagcagtcctggccaagcataatgacagagagagcagacttcagggaagccctgactgtgcagagccaaggccgcagtggagattctctggcactctgaggtctccagggcaggcctggtcaggctctccatgaggtcagaaggccaggtggtgttccagaagggtggtggccaggccaaccccatgactgatgtgtacgattcactcctttgagtctttggatggcaactcagccccctgacctgaagacagcctgtctagacctctagggtgacctagagccacctccagatgtgaccagattagctttcaactgatgaacaaatctgcacccaacttcagacttcagtgggcattcacaccacccccacaccccaggctctgctttctcctttcattaatccattcacccagatatttcattaaaattatcgtgtgccaggtcttaggatgtgtcgtggagtgggctagttacccagtgacagttgaagatttttttttccctgagcctgtgtcttctctgtgaaatgggaataagaatcttgttgccatcacagttattaccatccccccggctaccaaagttactaccagaactgttactacacacagaggctattgaccgagcagctatcattttccaatcaccttgacaagcacttctaatacagcttattatgtcctattcaatcttcacacaatgtcacgggaccagtattgtttacccattttctataaggacactgaagcttggaggagttaaatgttttgagtattattccaaagagcaagtggcagaggctggatccaaacccatcttcctgtacctgaagcttatgctcccagccaccccactcctgagctgaataaagatgattaagc

SEQ ID NO: 8347 - DNA, 758 bp, Macaca Fascicularis
gtttatgctactctatgatgaagatgctgctcttccattcagctgctagaaacagttgctccttccatgagaaagtgaacctacacagcataaggcaatcccagacttgagctaaatcagaggctcagtctgttgagtgatttggcaatttgacccagtgtaactttggatcagcctggcagaaaaagcagacacctttccatgcttgcgtaaccacatctaacatcatttcaagcaagaaaatatctacatactaaagactaagtttcagaatagtttctaactattgcacgagaataaagctgatgcttaaggccacagggtatcaagttaatgatctctgccataaacatatctcctaatttttttctagagatttttctcctaattttagtccacttatgttagaaccaattcagtaaagaagaaccattaactactcacatctcattaaagcactacctacactacagtacagcaagcccagagtcacagctgggagatggcttgaatgtgaaaggccagtaatgacctctactaccagggagaggacggtggttcatcatattctcatgcccagttgtgtcatctaggattcctggtaaacctaacctgataaaccatttttagtgacttgactgctgtataaaaagtatagtatgattctctcaattatatggccatattccatgtttgccctaatccaccttgttttaggagtttggtacatatagaaaatatatcatacctttacaaag

SEQ ID NO: 8348 - DNA, 773 bp, Macaca Fascicularis
  misc_feature (1)...(773): n = A,T,C or G
cagtagacaggatcactnnnaaaatagcaacatcaatcccgttacacaggagcagtgacacaggggtggctgcagagtggcacacgccacacaagtgatagagaaagtgcccgttcattgcagtttcctcttcctgggggacctnnnnnnnnnnnnnnnnnnnnnnnttaggggaaggcagaggaagctgcactctagtatccatgccaccttctaagatggacatgcagagacagaactttagctgctcagagagagtacagtgggcatggtctgccctgggggcttgctccatcagaccctgatttggcatgcaaccaaannnnnnnnnnnnnnnnnnntatcgttgcacacactgacccactcagtgtctttcctgccgctgatgtggctctgtgctgnnnnnnnnnnnnnnnnnnnnnnnnnnnnnnggacattaggagggcgcaggagcgcnnnnnnnnnnnnnnnnnnnnnnnnnnnnnnnnnnnnnnnnnnnnnnnnnnnnnnnnnnnnnnnnnnnnnnnnnnnnagggaaacaggagtaaccgaaagccagatggaacaaaannnnnnnnnnnnnnnnnnnnnnnngcgaagagccatcctggtatttaagaattaactttatgaaatactgcagcatttggtgtggcattaagttataatgaccgcatagagtaccaaagtgctttatatttagaatatattttaagttgtggtgcagactgagggggcttattcaaaatgaaaatactaacgtaaatgtctac

SEQ ID NO: 8349 - DNA, 557 bp, Macaca Fascicularis
  misc_feature (1)...(557): n = A,T,C or G
tacattaactttnnnatnnnaaannnnnnnnnnngactnnnnnnnnnnnnnnnnngtacacattnnnagaattctgtttaaaagtctagttaaaggtgtttcttagaagttggagactgttaactgccataaaatagatccaggtttttcagttccctgaagcagcattcagtagcatctatataaataaaggcaccttcggagaatagaactattccatggagtgtgtgaacacacttgttacgtcacctgggttcatcctgttgtgaagcacattacgtccaggtccttccctctgggagtctgactgtgaaactctttaacccaacaactgtattagcccctgtagataagacatgcttcccagagtgagatttttgaaatccccttttcatccagaactatatttacccacctattgtaactattcaaatagagcaaaattaggaggcttgataaatgctaagaatttagtaccacagaaattatttatttccctgtagtccacaattagtgataacaaatcctatnnnnnnnnnnnnnnnnnnnnctttgat

SEQ ID NO: 8350 - DNA, 766 bp, Macaca Fascicularis
  misc_feature (1)...(766): n = A,T,C or G
agcatcggtgcangnntnaaatgatggagctgctnnnnnnnnnnccgccgaggaaannnnnnnnnnnnnagccatggtcaaccctaccgtgttcnnnnacattgnnnnngacggcgagnnnnngggccgcgtctccttcgagctgtttgcagacaaggttccaaagacnnnnnnnnnnnnnnntgctcnnnnnnnnnnnnnnnaaggatttggttataagggttcctgctttcacagaattattccagggtttatgtgtcagggtggtgacttcacacgccatnnnnnnnnnnnnnnnnngtccatctatggggagaaatttgaagatgagaacttcatcctaaagcatacaggtcctggcatcttgtccatggcaaatgctggacccaacacaaatggttcccagtttttcatctgcactgccaagactgagtggttggatggcaagcatgtggtcnnnnnnnnngtgaaagaaggcatgaannnnnnnnnnnnnntggagcgctttgggtccaggaatggcaagaccagcaagaagatcannnnnnnnnnnnnnggacaactcgaataagtttgacttgtgttttatcttaaccaccagacnnnnnnnnnnnnnnnnnnnnnnnnnacccctccaccccatttgctcgcagtatcctagaatctttgtgctctcgctgcagttccctttgggttccatgttttccttgttctctcnnnntgcctagctggattgcagagttaagtttatgattagaaaaaaaaa

SEQ ID NO: 8351 - DNA, 726 bp, Macaca Fascicularis
  misc_feature (1)...(726): n = A,T,C or G
tctgcaaatgctcaagtnnnngatataaactggcatattagttgcatataacctatgcacatcctcctgtacacattaaatcatctctagattacttataacacttaatacaatgtaaatgctatgtaaatagttgttatactgtaccagttagtgaataatgaaaatgacatggaaaaaaaaagtctgtacatcttcagagttttcagtcggcaatttcttggccatggatgtagaacccacaaataaggtgagccaactgcattaggaaatatctctcataattctgttaattcttaggaaagctttcaaaatcttcctcaggtattcattacagctgcctttaccattttatttgtaacacagtttcaattgttatgatcacaagtaaataagagcaaagaatttatttcttgattcaaaaaaaactatgtttgaattcaatatagtataataactgttaaaacaaagtggtataatacaatgcatgaatcataatggattctttcataagttattaatttttatggtttaatcagtctaattcttttgactgtatagaaaccaaatattttactgtttcttttaagaactaatattgtcaacaactgctgttattaatgtttacttgagttaacttttttctgttttaagactaattaaaaattactattttgttatatggaatggttaatttttacttcataaaattatgaatacattgta

SEQ ID NO: 8352 - DNA, 707 bp, Macaca Fascicularis
  misc_feature (1)...(707): n = A,T,C or G
taggaacaactgcncctgctgctgagcacagacgccactgctcacacctctgacacctggtgctggacactggaccgtgaggccaggacagatgtcactgctgcacctggaaattggacatcaccactgtcactcagccatctttactaaaatgtgttctgcacagtcccagcctctctgtcacctcattctggctcagaggctggcagtgatataggagttaagaaattatttatacagctagtgagggtacggaaggcttttaatgaaaagcaggctccaaattattttcttttctaacaaggagcagcctgtaatatcaagcttcagacatagacaagtaagctggaagcttgcacaggtgaatgccggcagctgtgcgaataggaatcgggtacctggcactgggcatgatcacaatggcgactccatcttcccttctctttgccaggcacgtttacagtaaggagcagacaacatggcgccggccaagtggaaagcccatttgcataataggatgagggtggggtgaacagccttccacttgcactatgtaaatatcacacctggtccaaccaacctgtgggccctacataaatcagacaccatctcctcaagcctgcctgtaaaatccgatgcactcccattccaggccggaattcccttttgggtgcccctctatctcacaagaagagaattgttcccct

SEQ ID NO: 8353 - DNA, 1746 bp, Macaca Fascicularis
tcctgtctgctctaaaagctgcggaattcctcgagcactgttggcctactgggctagccaagatggcggtagcgatcgctgcagcgagggtctggcggccaaaccgaggcctgagccaggctgccctcttgctgctgtggcggcctggggctcggggactggctagatctcacccgcacaggcagcagcagcagttctcatctctggatgacaagccccagttcccaggggcctcggctgagtttatagacaagttggaattcatccagcccaatgttatctctggaatccccatctaccgtgtcatggaccggcaaggccagatcatcaaccccagcgaggacccccacctgccaaaggagaaggtgctgaagctctacaagagcatgacactgcttaacaccatggaccgcatcctctatgagtctcagcggcaaggccggatctccttctacatgaccaactatggcgaggagggcacgcacgtggggagtgccgccgccctggacaacacagacctggtgtttggccagtaccgggaggcaggtgtgctgatgtatcgcgactaccccctggaactattcatggcccagtgctatggcaacatcagtgacttgggcaaggggcgccagatgcctgtccactacggctgcaaggaacgccacttcgtcactatctcctctccactggccacacagatccctcaggcggtgggggcagcctacgcagccaagcgggccaatgccaacagggtcgtcatctgttacttcggtgagggggcggccagcgagggggatgcccacgccggcttcaacttcgcggccacacttgagtgccccatcatcttcttctgccggaacaatggctacgccatctccacgcccacctccgagcagtatcgcggcgatggcatcgcggcacgaggccccgggtatggcatcatgtcaatccgcgtggatggtaatgatgtgtttgctgtgtacaatgccacaaaggaggcccgacggcgcgctgtggcagagaaccagcccttcctcatcgaggccatgacctacaggatcgggcaccacagcaccagtgacgacagttcggcgtaccgctcggtggacgaggtcaattactgggacaagcaggaccaccccatctcccggctgcggcactacctgctgagccaaggctggtgggatgaggagcaagagaaggcctggaggaagcagtcccgcaagaaggtgatgaaggcctttgagcaggcagagcggaagcccaaacccaaccccaacctgctcttctcagacgtgtatcaggagatgcccgcccagctccgcaagcagcaggagtccctggcccgccacctgcagacctacggggagcactacccactggagcactttgataagtgaggcctgctcagcccacccccacccgccttcagctaccccgagaggtagcccactctaaggggagcagggggacctggcagcacactaccctcttccccagtcagctccctctaaaacactcggcggcccgggcggctgccgctcttcacccctgctcctccaggctgttacattgtcgggggataggatctgctgcagttgctggggttccgtcagcccccttttcacctgttgttacagtgccttctcccaagggctgggtgagggggtgtacaggactagaagcccctctgggtatggggtggacatggcaggtcagcctgtgggaacttgcgcaggtgcgagt

SEQ ID NO: 8354 - DNA, 819 bp, Macaca Fascicularis
  misc_feature (1)...(819): n = A,T,C or G
agttatagcattatgatcntnctgggcactggcattttgtgaactctcaagggaaggtgatgcaggggagaaaatgtgaattaaattacatagatgggtgttttaatgtcttctacccctttcctagaattagtacaactcttaactgtgccagtccccagttcaccagctttgtatccagtcgtcatctcattnnnnnnnnnnnnnnnnnnnnnnnnnnnnnnnnnnnnnnnnnnnntggcatgtttgacttttgacaataacagaaattgttttggattttgttttatttccaaaaaatgtatacaatgtcagaacttcacattttatatactagtatctggctattagtattttacaggaaccatagttcttggtgacnnnnnnnnnnnnnnnnnnnnnnnnnnnnnnnnnnaccttttttgtaaactaannnnnnnnnnnnnnntacaatcatttttagagttattgtaatcaatgtgaatatcatgttttttcaaatctgttctgagcctatagtgtttgctttgtgaacataagtgtattgtatatattctgtatagttatattgtactgaaattagcttgtttgatataaggaaaatatgtattgagtacctttttgctagcctgattgtttaatctttttaaaaaaggtttaaacttttttaaaaaaaaaaaaaaattctttaaactggcctttattacatggtcacacataaagttgcagttaggaaagggatgggcagggaaaaactagttttgagtgtctttagatagaaacatgagactaaggtttggttttgttttcgttttctca

SEQ ID NO: 8355 - DNA, 732 bp, Macaca Fascicularis
  misc_feature (1)...(732): n = A,T,C or G
cactccagannncatgccctgaggtccaannnnnnnnnnnnnnnnnctgtggccctccggtagcccttcatctgctggggaggctggcgagtaaacaagtcaatggaacattatgccacaatgacacagcgcagtgagtgccatcctgcgggtcttgctctgtggcccaatctggagtgcaggggcgtgatcatagctcactgcagcctcaaactcctggtctcaagcaagacatcctcctgcctcagcctccccaatagctgttacgggcgcgcaccgccacacccagctcacctatttcaaggaacgaagcccagaaaaaaatactcaagatgtcttccaagatnnnnnnnntgatatctgagccaatccaaccaactcagcagccaccttatcctcaaggatcttggatgtgcagtaattcccatctcccacccagccctcctgacactcgccacaggggaactttcacccggcacaacacggacagcgtcgcctagtgaacacacccccaccccacgccccaaagttcgaagttgagaataagccatttgctggtggactcggttcccacaggagggacgannnnnnnnnnnnnnnnnnnnnnnnnnnnnnnggacttaacatttcgcacgtcacgtttcnnnnnnnnnnnnnnnnnnnnnnnnnnnnnnnnnnnnnncaagtatacttagcccttactatattggaagaaaacatattcccagttcc

SEQ ID NO: 8356 - DNA, 603 bp, Macaca Fascicularis
actttataagcgtgatgattggtgtactttataagcgtgatgattggtgtactttataagcgacggcggcacattgcgcgtctgacgtgaagaaaaaaaaaattcagttagtcggccaggaacagtggctaaggcctgtaatccctgcatttgagaggccaaggcaggaggatcacttgaacccaggaggagttcgagaccagcctaggcaacactaggcacattaataataaaaaaaaaggcaaaccatgtgggagagaaatgtgggtttccctttgtttccccatctaaagctcccagaagacaggacaaggtttgttgtttatctttgtatcccgaatgaaacacactacctggtacttacaggatttgatgttctctaatgaatgaatggaacacattgggcaacttcttaataaaatccttgaactctggaaggatatatctttatgcccccaaaggtactcttccccctcccgagcgcgctaagtggctgcgtcgtgtcccgtcgccggcgggccggaggtagaggaggaatccgcgggtcaaaggccgcctgagaaggccccctgagagcgggctgagagagggccggaaggaatg

SEQ ID NO: 8357 - DNA, 1853 bp, Macaca Fascicularis
tatttgtttttcaggaatagagaaaagggttggggaaatgcatgatttctcttattcttacccagtggtagcattgagaagataccttgtccccatttttattacttctgatattttattgctggcagccagatgtgctaaaactcctgacgacagcatctattcattgcgtgtttttaataggcttagagaaatatgagtagagtacatgaaagcagctcagcttcacacttctgctgggaatgcccaaaaagcttactgctgtttagaattcttgctacagtcaggagaaagccgaaagctgcacgggtactgaatctcctacaactgaattagaagaataatgactgtacaattaactatcaacctctgttcatttaagcacagtttttacagagctcaggagaaatatggaacttgattggcatgtttttatttgatggtgtcagcaaatagatgattttgaagacaggtggtagagaaaaataagagaagggggaaaaaaaagaaagaaaatgcaatttgagacattgcgccaggtctgcaattctgttttatctcattttcatggggttttttcatccccaccaaatatcttacaaaatgagctttttggacaaacactgaacaatgcaaggaaaagaagcccatctgtgtccagagatcagaatagaagatacgaccaaagagaagaaagagaggaatattcacagtatgctacttcggatagcgcaatgcctagatctccatcagattatgctgataggcgatctcaacatgaacctcagttttatgaagactctgatcatttaagttatagggactacccaggaaggccgtgagtggtgcgagcgccgctttcgctttcccttcgcggtgcccactccgttcctcgtgcggcgctaggccccccgtcccggtcatggccacgctcagggtccagcccgaggcccaggccaaggtggatgtgtttcgtgaagacctctgtaccaagacagagaacctgctcgggagctatttccccaagaagatttctgagctggatgcatttttaaaggagccagctctcaatgaagccaacctgagcaatctgaaggccccgttggacatcccagtgcctgatccagtcaaggagaaagagaaaggggaacggaagaaacagcaggagaaggaagacaaggatgaaaagaagaagggggaggatgaagacaaaggtcctccctgtggcccagtgaactgcaatgaaaagatcttggtccttctgcagcgcttgaagcctgagatcaaggatgtcattgagcagctcaacctagtcaccacctggttgcagctgcagatacctcggattgaggatggtaacaattttggagtggctgtccaggagaaggtgtttgagctgatgaccagcctccacaccaagctagaaggctttcacacccaaatctctaagtatttctctgagcgtggtgatgcagtgactaaagcagccaagcagccccatgtgggtgattatcggcagctggtgcacgagctggatgaggcagagtaccgggacatccggctgatggtcatggagatccgcaatgcttatgctgtgttatatgacatcatcctgaagaacttcgagaagctcaagaagcccaggggagaaacaaagggaatgatctattgagagccctctctcccattctgggatgggtacagcagagaccttcctactttttactggggactccagattttccccaaacttgcttctgttgagatttttccctcatcttgcctcccaggcacaataaatatagttataccactgccaaaaaaaaaaaaaaaaaaaaaaaaaaaaaaaaaaa

SEQ ID NO: 8358 - DNA, 1874 bp, Macaca Fascicularis
taaactgggtacttacattggctcatatatcagaagctgacaaatgatacatctcatcaaagtatgcaaaagtattatttcagcagcaaagtttcttcatggaatatgtaccactcagatctaccaaggatggtccttcagattatttagatttgggttcataacggtacctcatcacagaccaccatatctatagttttcccagatccactcctacttccagtgcctcagcacatcatgctattttctttataacacttggcactatctgaacttttatttacctgtaaacttctttatgatctgttccccacttttccacccaaccagacagaaagttcatgagatcttgtctgttcactatagtaatcccaggaacctaaaagtgcttaacacatagcagtcactcaataagtatttgactaatgaaagcatgaatgtatgccactcccttctttcctctcttcctttcttccataggtccatctatccatccatatgtttactctctgcttaatagaaggcatggtgttaggtacaatgggggacatagaaatagagcccagtctggcaggcacatcaagagcctggctaggagtcatgagtaacccaacagtaaagaggagctggagtcagaccctggtaggactcgcaggacaggttgagaaatctgggaatcatagaagccaagtgctaactagaacttagagcctgtctgaaaaaacctgtgctgacagaagtgtctgagaatctgtactgcgtatatggcagccatgagccacatgtggcttttgagcacttgaaaagtagttagtgtgactgaggaactgagatttaattttaattaaataaccacatatagctggtggctactgtatcagccagtacaaaaagggagccgtttcagacaatcctatatacagggatgttgtggaaagagctttgggttcactttcttacattcttatattctagcccctagccaaacagctctgggcaaatcatttaactagagtgactcttgtttcttcaggtgtaaaatgggaatgaaaaatgatttctgttgtgagtaacaactgaagtcccctagactagttaccatggtgctctgttggttacagatgaggaaactgaagtgcattgaggtgaaggtcaatggcagagccggaactataacccaactgttccgagaccgagttcaatgttactgccattgaactgggtttttattcaggacactatggagaactatcaacatatttggagtaagaaagtgagataaatttcatactaccagaaacacctggaaatgggtgtagaactataggaacacagatggcttggggcaggccggacggctaaggtatgagagcctggtgcagcaggctcttcataaatatttgtaggatgaatgcatgaaagctggtggtatgaagagagagagaggctccttaatactgataaacttgagcaattagctgaattacagtcaagggaggtgatatgatttggatgtcccctccaaatctcatgttgaaatgtgacttccagtgttaagaggtgggcctagtaggaggtgtttgagtcatgggggtggagccctcatgaatagcttggtgctgtttttgtggtaatgagtgaattctcactcttagttcatgtgagagctggttgtttaaaaagagcctggaaccttctctctcttgctccctctcttgccatgtgatgtgcctgctctcccttcatcttccaccatgagtaaaagcttcctgaggccgcactagaagctgagcagatgctggtgccgtgtttgtatggtctgcagaaacgtgagccaaataaacatcttttctttataaaaaaaaaaaaaaaaa

SEQ ID NO: 8359 - DNA, 729 bp, Macaca Fascicularis
  misc_feature (1)...(729): n = A,T,C or G
agaagtatgaagaagaggaagatgtagaaacgggagccagtcaagattggctgcctgatgttgagggttcagagttacgactcggactggacagaggcgccggcagctgnnnnnnnnnnnnnnnnnnnnnnnnnnnnnnnnnnnnnnnnnntnnnnnnnnnnnnnagcactnnnnnnnnnnnnnnnnnnnnnnnnnnnnnnnnnnnnnnnnnnnnnnnnnnnnnnnnnnnnnnnncaagcatcctgcttttcgaagggaaacgacagctgcgggggagggcggagcacttgagcagggacaggagtcaccactgagaaggacgcagaagtgactcctgcttcaggnnnnnnnnnnntcctcctacaccagcacacgggttggaggctggcagagtcagtgactnnnnnnnnnnnnnnnnnnnnnnaggtgtgatgcctcacacggttacgggaaaaataagannnnnnnnnnnnnnnacaggtccaaattcttcccatcgcgtcactaatttcaaggttctatcttttttctcttggtgacccacgtggctctgtgtgtttttaaaaattgtccaccaggaagcactnnnnnnnnnnnaagttcctgaagcatcaacctgggcagggagnnnnnnnctccaccagctggtgggtgtttgcgatcgtcaagcaccagttacaggtcatagccacgtcactcacagatgattgttggtcggtgagaataaa

SEQ ID NO: 8360 - DNA, 2272 bp, Macaca Fascicularis
  misc_feature (1)...(2272): n = A,T,C or G
aaaagaatagaaagagatgggggggcctgtaaattgaatggggggcaattcagacaggctcacaccactactaccatctaggttggaatcttaaactcagtgtggatttatctcaatctagtcccagccccctgaatccaggcatgtacccacaggggacatttgttcgttcgttcattcgttcgttcattcattcattcattcattcattcattcattcattcattcattttattgagtagctcctctgttccagtcatttaggaaacagaagagaagaatccagcaaaactctgcctcttggtgcttacatccctgtaggcaggcagtgtacctggaaagaggtcattttggactgaagttaggtcctactacagagaaagtaaaatcaagtaatgaggatagagagtgatggagtaaggaacatagagggcgcctttaaccgaggtactcagacctgggtgctgtttgaacgcaacttttaagggagacatttaggaataacatttagaaatgatgataaggaggtatcatcatttgaagatccaaatgagcattcctggtggaaggggcagtgacaaagtcctgagataaaaagcggtcatggtnnnnnnnnnnnnnnnnnnnnnnnnnnnnnnnnnnnnnnnnnnnnnnnnnnnnnnnnnnnnnnnnnnnnnnnnnnnnnnnnnnnnnnnnnnnnnnnnnnnnnnnnnnnnnnnnnnnnncaaataaaataaaatttagaaaaaaggtcatggagtatttgaggggtggaaagaagactggtgtggccagagtggaccagggggcagcagtgggagaatagggcccagaggccctaataaaccccaccatcctggtacaaccaccctgacgttccttctgtggtcccaaactctatgactcgcagggagcccacaggggcaggctacctccatgctcacaaacaaaggagacctgaaatcccagttcagtgcaagaagacaccttcatcaaggacagacgtaaatctgggtctggagctagaagtgacgctgtttcttgtcccttggccaccacaaagaaggggggtagagatggccacaggatgacctgtctgcactccaggggttctgggggtggtgcactgggggtctctgcagaaacagacagtgtccacttagtccgttcaaacaactgtctccctgccctgggcaagctttagtcttaacccctgcagaggacagcaagaggccagaaataggccctgccttaaagagctttactcaccggggacaagaagacaaacatgataataaaacaaggatacaaaccccaagattagcaccacaggcagcctctgggtctttgcacaagtggctgcctgactcactcttccctcccctctttgcctgtctgtcctcccgttctctgcccaagcagcattttctcagggtaactttccctggcctcttgaccagatcaaattcgtgtcttgacagccccaaaagtaccatctgccacttcttcaaagcactcgtcccaagtgtatacaggtgtttctatgactacaggcctcaagagggtaggatctatgcctgtttatgttcatcctggcatccccaggatctaaagtgactcggctgtagtaggtactcaacaaatgcttagaaagtaaaagcaaagcatggtgtaaatgggagtaatgaaatcagttggaaccatcagaagtgacttaacagaaaggaaagagaggaaggatgttggtggatagaagtggaattgaggtggcaatgccagtggaaaacacagtgttgaggtgctgagggcttgacaggtgtttgggacacagggtggtcaggagaaaaggaggggagggtgtgaagaggagagaaacaggccgactgtgagcttcttgaagggagggcatggctgatctttctccttgtatccccaacacctaccattgaagcctggcacatagtaggtgctcagtcattaggaatgaatgaagtattgggtgcaagggactgagatacttggaatgaagaggcagaaccagtagacaaatctgtcatcaaagacagtgacagagctgtcatcagaggcacaagcgaggtactgatgccatgacaggcgggcggcatgcatcagtgtggacgacctgggcaggaagagcggcatgtggggccccctggtgggcaaacgtgaggcgcacagggagggatgggaaggggagcgtcaaaaaaaaaaaaaaaaaaaaaaaaaaaaaaaaaaaaaaaaaaaaaaaaaa

SEQ ID NO: 8361 - DNA, 760 bp, Macaca Fascicularis
  misc_feature (1)...(760): n = A,T,C or G
cagtgaccatgtggagnnnnnnnnnnnnnnnnnnnnnntcaannnnnnnnnnnntgaagaggtgctgagccccacaggccgccannnagagaaggagaggcacaagaggggcatggagcagggcnnnnnnnnnnnnnnnggggccctggcccaaggcctgcaggggctggagaagaccctgcgtgacactgaggaggtgcagcgggcccgcaccannnnnnnnnnnnnnnnnnnnnnnnnnnnnnnnnnnnnnnnnnnnnnnnnnnnnnnnnnnnnnnnnnnnnnnnnnnnnnnnnnnnnnaccttcatctatcagaagctccaggcgcaggagnnnnnnnnnnnnnnnaacctggtgaacattcagaaaatgcagaaaacnnnnnnnnnnnnnnncaaaatcctgaccaagatgaagcagcagggtcatgagacaactgcctggccggagactgaagagataccgcagggagccagtggctgctggaaggatgacctccagaaggaactgagtgatatatggtctgctgtgcacgtgctgcagaactccatagacggccnnnnnnnnnnnnnnngggcccgtcccaaggcctcaagcctcaggggccataaggggcaccggtgcctgagccctccactcgcctcctgggactctgactccgactctgaccaggacctctcccagccacctttcagcaagagctgccgctccttcccacccgcttgagcagccgggactgctctccctgaagacccctcc

SEQ ID NO: 8362 - DNA, 720 bp, Macaca Fascicularis
  misc_feature (1)...(720): n = A,T,C or G
ttttacagtatagagaacaaaatgacattagtttgaaaaatacatatcacttggtatcgctgtcttggttgcagtggtgatacagaattggtttcattaattcctatatggttgggaatcactgatcaagaaagtgggggaaaaaaaaacgttaaaacctcaatcctcagtaggaaggtagattacattaggtgaaattgtaggtaattatatatgtgctaatggggttggaaagaaccttacagagcatattacctgataaacttgagtggggtgggtttgggagaacaaactaataggattattgtgtctcgtagttggtacctgggagcaactgacatgcccccttcagaaccttaactgttagtaacagtggctgtaacaacacaaaccagtgaccagagatagagctcttaggtcaagctggcctgacggtatggctgaaggaagtgactgagcagtggtggtactcagccagaccaagatggagagggaagagtccacagctttctggaggctaaggcgttctggtggtagaaaagtgtgccccaagccttcatggatgagttacaggtcttaaaattagtctcctcttgtttggattccatacttgctaaataacctgataataacctggttttccatgttaactgcctctaggaagaaaatgtactgttcatgctgacacagatatttcagtctgcatnnnaaagttctaca

SEQ ID NO: 8363 - DNA, 243 bp, Macaca Fascicularis
cactatctcaaaacgaaatgcctcaaaagactatcttatccggcgaactgatcaaaaggggatctacttccttttaatgtaataaggcctattcctacatgataattgaaggaataggcctttttctatgagtcaaacaagaaatttaaagcatctgtttttttactcgagaattgcggtaagagcaaatacaagtggtgaattccaataaatagtaatctcatttaatgagtagcaatcaac

SEQ ID NO: 8364 - DNA, 679 bp, Macaca Fascicularis
  misc_feature (1)...(679): n = A,T,C or G
tgggtaatgaaggttgatattcctgacatcttcaggacctttngcacttgttgttttctgtttttggttcacttgtccttcattgttcatcccttatcttcttgggtctttacccacatgtcacttaaatgaggccttccctgaccttgccttaccttacttaaaagtggaactcaaggccagacatgnnnnnnnnnnnnnnnnnnnnnnnnnnnnnnnnnnnnnnnnnnnnnnnnnnnnnnnnnnnnnnnnnnnntgagaccaacctgagttgacatggtgagaccctgtgtctacaaaaacgtaagaaaatcggcacatgcctgtggtcctagctactcaggaggctgaggtgggaaggtcagttgagccctggagttgggggctatagtgagccatgattctgccactacactctgctgtctcaaaaaaaatacaactcgaggccaggcgcggtggctcaagcctgtaatcccagcactttgggaggccgagacgggcggatcacgaggtcagnnnnnnnnnnnnnnnnnnnnnnnnnnnnnnnnnnnnnnnnnnnnnnnnnnnnnnnnnnnnnnnnnnnnnnnnnnnnnnnnnnnnnnnnnnnnnnnnnnnnnnnnnnnnnnnnnnnnnnnnnnnnnnnnnnnnnnnnnnnnnnnnnnnnnnnnnnnnnntggga

SEQ ID NO: 8365 - DNA, 1696 bp, Macaca Fascicularis
gataatcgcgtttctgcccttagaggatcttacatatgagaagtcacaaacggtttcctcctgattcaaggaagcctctcgctcgccggccagctgtgctctcagtccccgactgactcagatgcagatggcaacagcggcagccacaggaagtgggacgcagcctgtggtctccgagattggcttctgtgtgtcctccttgctgtggaccccgtgaggtcacaggtcttcgacagcccgatggctattcgctcccgtttaagaattggccaagcggaactgcaaggcgcagactcagtgctgcagtcagggtgggttgcgagaggcgcctctggagctgcagccgcgaagccggaagcagaactactgcccccagcgccactgccatggacccttgcctgtcacctcctgattttcagaggaagaaactgtggttcagagaagttttgacctggaataaagtaacctatcactatatttctgaagttgagtgctgcccttggactcccaaccctgcatgaggattcttggaactttcaggtctgcccggaacctagacagagttcccttcatgcttgtgcatctggatgttcatgcatgtgcatgagtgcccctgtgtctgtgttcacagatacccacaactagatccatctcctcaatcctcctagagtaaagcgcggatacttcattttgcattcttttgatagaattaaaaccttctgtttaaggaaagaagaaacaggcaaaacaaatttagacttggcacttttgccatcagctgcatttagcagcttaataaatactctctgcatgggacatacagaaggatgtctcaggatctgagagagacttgtaggagtgccacacacgcagtaggttcttctcaaagttgactgtggaacagaaccacataaagggcttgttaaataacagattgctgggccctatccccagaatttctgatttggcaggtctgtagctggaccctagaatttgcatttctaataagttccctgttgctactgatgctgtttggctggtgatcacattctcagaaccactgcttagatctttaccaaggagtgcttcccagcctgaagaatgattattctgggcaaggaaagcctgcagatttagtgttttcagaatgagttcagctgtgccgaaagtgccaacaaagaggagaaatacttctttataaatggggtcgtgttctgggataaatcatatgatgacttactctctgagacaagtgccacatttggtgaaaacataagagttatttgtcagatatgggaaactcagatttcattttcaaagggcagattttctttagacagatggaaagagcttgaactttagccttctgtgctcaaattatggtctacaatttatttgctttaaagccttgagcaaaactagttaatttctataaactcatgtaaaaatgaagatattaatacctattcttgaaagattcttgtgagggcctgatgtagtggttggctgacagtagaaactgaatgaaaagtaaatatttgtgttattattcaggtcactttcctgtcattttcctttagagtgctaaatgagaggatgagtccatacttgtctatgggctaaacccccaaatatcttttcccttcagtctatcattgcaataaaattcacacaattccaaaaaaaaaaaaaaaaa

SEQ ID NO: 8366 - DNA, 716 bp, Macaca Fascicularis
  misc_feature (1)...(716): n = A,T,C or G
cagcaggagctggcctnnntccactccannnccaagggctacatgggcgagtgcgggttccgcggcggctatgtggaggtggtgaacatggacgctgcagtgcagcagcagatgctgaagctgannnnnnnnnnnnnnnnnnnnnnnnnnnnnnnnnnnnnnnnnnnnnnnnnnnnnnnnnnnnnnnnnnnnnnnnnnnnnnnnnnnnnnnnnnnnnnnnnnnnnnnnnnnnnggnnnnnnnnnnnnnnnnnnnnnnnnnnnnnnnnnnnnnnnnnnnnnnnnnnnnnnnnnnnnnnnnnnnnnnnnnnnnnnnnnnnnnnnnnnnnnngtactccttcccgcgtgtgcagctgcccccgcgggcggtggagcgtgctcaggagctgggcctggcccccgacatgttcttctgcctgcgcctcctggaggagaccggnnnnnnnnnnnnnnnnnngagcggctttgggcagcgggaaggcacctaccacttccggatgaccattctgccccccttggagaaactgcggctnnnnnnnnnnnnnnnnnnnagatttcatgccaaattcaccctcgagtactcctgagcccagccggcgccaggctgggcgccccggactgtgtgctcaggggccctgggggctctggagcccactgtacttgctcttgctgcctggcgggcgggggtgggggctgggcccctgcctctctgcaggtc

SEQ ID NO: 8367 - DNA, 706 bp, Macaca Fascicularis
  misc_feature (1)...(706): n = A,T,C or G
aaaataagatccnnnnnnnngccatggcccgtgaggccctgcctatcctggtcctcatcttgaacttgtcttcccaatgcatcaannnnnnnnnnnnnnnacagtccctgcctcggggtccttgctgctcccactgtctgggggcacttctgggctctttacatgactgcttcttttatagtcctcatgnnnnnnnnnnaacatcacctcctaagtcagcgtccccacctccagccctgatgacctnnnnnnnnnnnnncaccacctgtgattctctattgcaatacagggtttannnnnnnnnnnnnnnngatcacacgctgtaattactgtgtttnnnnnnnnnnnnnnncatctgcctccctctctaaaatgtgaactctagaactgcctgtgtgggcagcagaatccactgcattcccagccctcagcatagtgcctggcacacagaagatgctcaacagccagacgcggtggcttacacttgnnnnnnnnnnnnnnnnnnnnnnnnnnnnnnnnnnnnnnnnnnnnnnnnnnnnnnnnnnnnnnnnnnnnnnnnnnnnnnnnnnnnnnnnnnnnnnnnnnnnnnnnnnnnnnnnnnnnnnnnnnnnnnnnnnnnnnnnnnnnnnnnnnnnnnnnnnnnnnnnnnnnnnnnnnnnnnnnnnnnnnnnnnnnnnnnactgcagtgagctgggattgccccact

SEQ ID NO: 8368 - DNA, 711 bp, Macaca Fascicularis
  misc_feature (1)...(711): n = A,T,C or G
acggaccatcagttcccagcaaggccctgagaggctggtgacttatttccttaatgccactgctgcccacaatatccagggagcttgactttgggactcaaatgtgtgtgttttctctctcccannnnnnnnnnnnnnngcaactcctcaccagaaacttgaaacttggcaaaagnnnnnnnnnnnnnnagtccagggaactggggtctgtgcagccacctacattcaggctgcccccacccccgtcacaggctcctgtnnnnnnnntatttctaaaccccagccttaggcacttcagtgcttttgaagattttaaattggcacgtactggggttgcaaactcaactgcctgctgaggctgggagtggccgggctaggtgggcctggggcaaactagagagccagcccggccccttcgaggggattgtgccactcagttccagccccagaccttgatcgcctcaaatttcaaacttggaagtcatcacataggataaaggcnnnnnnnnnnnnnnnnnnnnnnnnnnnnnnntgggacccgggggatcaaagggggtccttgacccctatctcnnnnnnnnnnnnnnnnnnnnnnnttgcccctcataccccactcgcccccttannnnnnnnnnnnnnnnnnnnnnnnnnnnnnnnnnnnnnnnnnnnngtctagactgagtccctcaaaggcaaggtttctgggtccca

SEQ ID NO: 8369 - DNA, 707 bp, Macaca Fascicularis
  misc_feature (1)...(707): n = A,T,C or G
tgcattcaattaagtannnngtttagcttctgatttaacgtttaattgattcagtttaaacatgttacttaattaccaaatgtagaggaaccaaaaaaaaaaagtgaaaataatatgttttgattcaaacatatttgcttttaaaacataaagacattttaactttgggttctctttagctggnnnnnnnnnnnnnnnaggcttaaagttagaaattgctattattttagaataggttgggtgggttggnnnnnnnnnnnnnnnnnnnnnnnnnnnnnnnnnntgaaaagcagaaaattgttttatataaaaggaaagccatgaccacctttctacctcagatccatcttcatccattgcattggaaactgcnnnatnnnnnnnnnnnnnnnnnnnnnnnnnnnntttatcaggccatgtcatacccaagaaagcacctatttaaagaaaaaacaattccctgaactctcaactccaagttgtagatttggtgtcttccttgttcttactttaaaaagtcatgtattaattttctttctgcctgcatttgtatgcaaaatgtcctctatctgctattaaggaaaagctacgtaaaacactacattgtaaccttctaagtaataataaatataaagaaatatattgtagtaacaacaatgggaagtaagtatgtagttcttttgaaatatatggtaaagaactaatca

SEQ ID NO: 8370 - DNA, 675 bp, Macaca Fascicularis
  misc_feature (1)...(675): n = A,T,C or G
gtgctgggaaggcctgggagagggctggccgcctctgcaggttggggaagcctaggaggccactctgccaggcctggcatgggtggggctgggagcatgggagtggagttggggggtccaggtggctccaaggtgagcccactcctcccctaaatataagggagggccctgggaccctgtctgctgttccttctgggctcctgctgggtagcacttcatccttcccctgcccctgctcccagccaggagacccagaaaagtacaggggccgcctgctccacctcatgctaggtggccgctgggaggggccacctggcaggccttgagggctaggaggaacagcctgaaactgtctgtcctgtcttcctggaggccctgatggcattgtctccatgctctcctaccttttttttcattttcaaagacatccctggccgggcacgnnnnnnnnnnnnnnnnnnnnnnnnnnnnnnnnnnnnnnnnnnnnnnnnnnnnnnnnnnnnnnnnnnnnttgagaccagcttgactaatgnnnnnnnnnnnnnnnnnnnntaaactacagagatcnnnnnnnnnnnnnnnnnnnnnnnnnnnnnnnnnnnnnnnnnnnnnnnnnnnnnnnnnnnnnnnnnnnnnnnnnnnnnnnnnnnnnnnnnnnnnnnnnnnnncctgcca

SEQ ID NO: 8371 - DNA, 1070 bp, Macaca Fascicularis
  misc_feature (1)...(1070): n = A,T,C or G
gcaaaatacatcagcttgataattaacacatcaaatatttcntgctgnnnnngggagaactnnnttggtgtgtgttggaatggcagagcaaatattaaaattgttaatatgcagccatatatggaaggttcnnntggttttttgtttttttgtgtttttttggtggggaaattatgtgcctcccattcactagaaaatgagaaaatgtttgggttccaaagtattgatattgnnnnnnnnnnnnnnnnnnnnnnnnnnnnnnnnnnnnnnnnnnnnnnnnnnnnnnnnnnnnnnnnnnnnnnnnnnnnnnnnnnnnnnnnnnnnnnnntatttttataacaatataactgagttatattggaattacaaatattttctgtcacttaaatttgccctttatttagcctgaaaacctttgtggcnnnnnnnnnnnnnnctgactaacccctgtcttagagctacagcgagctgcattaccagcttaaaacacttcttaaagattaaatatannnnnnnnnnnnnaaaatcatattttatttaaactgcgttttagtgtaaaattgttaacctcataagatggataatgcgtataagaatgtaggccttaacnnnnnnnnnnnnnnnaaaacaaagcagctttaaaaaaatagttggaagcacaagtgtgtggcactgactgaatgctgttaatatttctaaaagtttctacattcagattatatgcctgattcatagtaaaatacctctaatannnnnnnnnnnatagaaaacctgacttcagtgaatatttttgtattttacacgggccagtttatacactgctatttacactattatttcctatagctacgtgttctttgtaccttttgtagttttatttgtattnnnnnnnnnnnnnnnnnnnnnnnnnnnnntatttggttttgggtgtttttcatgttttagcatttgtgtaaagaaactggtccatgtaaatactttccatgttttcttcctcaaatgtttaaaccactagttgatgtatggtatctttagatatttgcctgtctgttactcaaagtgctctaaac

SEQ ID NO: 8372 - DNA, 736 bp, Macaca Fascicularis
  misc_feature (1)...(736): n = A,T,C or G
aggccagcttnnnnnaaggacggcgctttgatgggtgtggacgtctccgaggtgctcttnnnnnnnnnnnnnnnnnnnnnnnnnnnnnnnnnnnnnnnnnnnnnnnnnnnnnnnnnngagtttggagccctgcagactgtccgcctggagcgttacaaagccttctacgtnnnnnnnnnnnnnnnnnnnnnnnnnnnnnnnnnnnnnnnnnnnnnnnngcataagcttcctctgattttcaacctggaagnnnnnnnnnnnnnnnnnnnnnnnnnnnnnnnnnnnnnngcggagtacnnnnnnnnnnnnnnnnnnnnnnnnnnngnnnnnnnnnnnnnccttcaagacatnnnnnnnnnnnnnnnntccagtgcagattacacccaggacccttcagtaactccctgctgcaatccctaccaaattgcctgccgctgtcaagccccatgacagacaaggaggaatatctgggaattaggcaagtttgtttccaaacttcatttttaccctctttacaannnnnnnnnnnnnnttagtcttggaatttggttttggagttagccttgcatatcccctctgtatcctgtccctcctccacgctggcctgagagcagctgagccgtgctggctctgggcagggagtgtgccctaatgggaagcacacgggctttggagtcaggcacaggtgccggctgcagcttttgaacttgggcaattgtttaacctaacctgcaag

SEQ ID NO: 8373 - DNA, 1988 bp, Macaca Fascicularis
  misc_feature (1)...(1988): n = A,T,C or G
atcatccatggcgcaagatggcgctgctttttgcacgttctttgcgcttgtgccgctggggagccaaacgattgggagttgcctccacagaggcccagagaggtaggattatctctttttactcttttacctccagaatggcttccgtctcttattcccagacccgactccgagaagcaattccaaccctctcgggtcttttccttcccccacaagccttggtctctagattccaaacctttgacaccatttggtttctttaaattccgggacttcctcaatccgagtttttcagctccatgagctatccatactaaagcgaccccccgactctcttgcccgcttggcattctgactcttccctagttgctcgtgtctcatgactgcctgccttagatctgaatatatcaccagccctagggttctagcccctgttattatcccgtctttttgctctgcccgcaggcgtcagtttcaaattggaagaaaaaaccgcccacagcagcctggcactcttcagaggtgatacgggcgtcaaatatggcttggtgggattggagcccaccaaggtggccttgaatgtggagcgcttccgggagtgggcagtggtgctggcagacacagcggtcaccagtggcagacactactgggaagtgacagtgaagcgctcccagcagtcccggataggagtggcagatgtggacatgtcccgggatagctgcattggtgttgatgatcgttcctgggtgttcacctatgcccagcgcaagtggtacaccatgttggccaacgagaaagccccaattgagggtattgggcagccagagaaggtggggctgctgctggagtatggggcccagaagctgagcctggtggatgtgagccaggtctctgtggttcacacgctacagacagatttccggggtccagtggtgcctgcctttgctctctgggatggagagctgctgacccattcagggcttgaggtgcccccgggcctctagtatttccattactggagtccctaatcacgctcttggccagcctccttttgaaaatgtctgaagcctttttactttgcctcaagcaacctctagctcccgcaattcaatgttgggtcctttgtgcaatatcataatcatcttcctcatcccctaccttgtgaaagctaggcatacagccaaaccctccttctcccacccaccaactactgccaatttcctaggctaccatgggtgatatatcttccctgacctgcttccttcagtgcctctgcttccctttgcccagacctttctcagactgtattccatcctggggtcttatcattcagctttgtttgaatttattaatcaccgtgatatttctccctccctttgtccacatgtaacttgtttgttcttggggctctaccagatcgctgaagagtaaatcctttctacctctggctgaaggagtggtgcagtcaatgacttggccctttttctacagcacattcagagtttgggctctggctccctcagtaagtgctttattaactcagtgtgtcaaaatgaaaacagagccctccttccccagtagctcagtgccacagaccttcagccctagacagctgtagctatccttaccctgagtccatctctactttaaaaaaaaaaaaaaagggccgggcgcggtggctcaagcctgtaatcccagcactttgggaggccgagacgggcggatcacgaggtcaggagatcgagaccatcctggctaacgcagtgaaaccccgtctctactaaaaaatacnnnnnnnnnnnnnnnnnnnnnnnnnnnnnnnnnnnnnnnnnnnnnnnnnnnnnnnnnnnnnnnnnnnnnnnnnnnnnnnnnnnnnnnnnnnnnnnnnnnnnnnnnnnnnnnnnnnnnnnnnnnnnnnnnnnnnnnnnnnnnnnnnnnnnnnnnnnnnnnnncaaaaaaaaaaaaaaaaaaaaaaaaaaaaaaaaaaa

SEQ ID NO: 8374 - DNA, 798 bp, Macaca Fascicularis
  misc_feature (1)...(798): n = A,T,C or G
catgaatcagatannaanngagannntnntanaaaggcgttagtgagaagtagttctacttttccttttctaaaatgtggtcatggtagcaacactatnnttgannnnaccatnnnacccagtactgtttacatgtagatacttgnnnnnnnnnnnnnnnnnnnnactttaacagtacactttaatatttaccaccttgatattatacatctttactgtctttataatttttaagttggttgtacttattcaatgaaaaagcaaaaaatacacatacatttttgattcaaagaaatagaattttgtgtctaaccatttaacagttctcccttagtattttagaaagattttaagcccattttagaaatgtgttgtcattagttaagtcctcttaaatagattatttttattttcctatagaaagtgcagaggcctgaggtgaacacaagggtcataggcatccattaagatatataaccatatagatattttaaaactctgtcacattgtttccttaatcccttagacctatttcttcccatgaaaactatcataagctatgcttttgttatggtctatagaattttcaaaggacaaattgttgttttttttttaagatnnnnnnnnnnnnnnnnnnnnnnnnnnnnnnnnnnnnnnnnnnnncaattttttcaaaagatttctctttcaatgctgttgtcccagcatgatagttgacatggcatgtaactacagacagaagtgtgactgtaaatatattcgtgtttctgttagtgtggcataagcttgccttttgtc

SEQ ID NO: 8375 - DNA, 750 bp, Macaca Fascicularis
  misc_feature (1)...(750): n = A,T,C or G
gaggcagggcntggaggagccgaggtgtgcgnnnnnnnnnnnnnnnnnnnnnnnnnnnnnnnnnnnnnnnnnnnnnnnntacctcactgtgccttcctgtgctccagtcatgggagcttccgcccaggggcggctcctggggactccagggcaggcgagactgggacaaaggcccggcccttgagctccagccaaccctgccatgcccccggcatcctggccccggccacctccccggcgccgnnnnnnnnnnnnnnnnnnnnnnnnnnnnnnnnnntaatgtctcaaaatcttttactcaggtaattttaatttcaaagagaaaaactgaagtaaatgtcaaaaaacaccagccttaaatccagggggacagaattcgtgttctggggtctgtccctagtgggcttgtgagcagccaaacatcagctctggctccaggcgcagcctcacctggaagcctgtgtcctgagcccccggagtgagggggtgcccagggtgtctagccctctgtgggcagagaatgtgtgcacctatgtggaaggccaaggacatgggctatggccgggcctgccccgctcaggccccctgcccggcggccgtctgtgtgcggggcctccctcctggctgtccaggacacggcctgtgcagccccagcctggacccaggtcacctctggttgtgtctgtcccgactcagtgttgagtcacatcaggtgtgcatcaggagnnnnnnnnnnnnttcctgccacac

SEQ ID NO: 8376 - DNA, 1518 bp, Macaca Fascicularis
gtgcccgatgtcccagcaggacttcctcaaggcctcacacttctcgctggggcccgacctgcggctgcacgagggtaccatgcacaccacgtcgcaccgggacttcgcctacccgacggccacccgggagccgccgagcctgcagccgccgcccgcgctgcttttcccaacggacccgcgctgggaccgggaagagcgcgtgtcggaggcgcgccgcgcgttcccgccgccgtcgacgccgccgtgggagctgctgcaagcgcaggcgcgggaacgcacgctcgccatgcaggccagcaacttgcacctgcacgaggacgcgcacgccgggatcggcctctccaacgcgcgcgccgcctacgtctggcccgagctgccggcgcgcgcccgagagcggatccgcggcgcgcgcctcatcttcgaccgcgactccctaccgcccggcgaccgcgacaagttgcgcatcccgcccaccacgcaccaggcgctctttccaccccacgacgcgcgcccgcagcctcgcgcgcccagtcgccacctcggaggccccaacaccctcaagtgggactacacgagacaagatgggacttcctaccaaagacagttccaggccctgccaggcccacctgccttgatgtgtaagagggcctcctctacagtggagctgggagactgcaagatcagctacggatcgatgtgttcggagcagaaacaggcctacaggccccagggtctgcctgaagataggtatgacaaggcccaggccgcagcccacatccactatgtaaatatccgtcctggtgacggcctctttcacgacagaaccaccaaggccgggcacttctatgcccgggagccagaaccttttgttcttcaccacgatcagactccggagtcgcacatcctgaaaggaaattggtgccccggccccggcagtctggacaccttcatgcagtacttctacggccagccgccacccgcgacacagccacccagccgccacgtgcctcacgagaaactacagagtcacgtgaccctaggggagccaaagctactcagatgcttcttcaagaccaccatgggctctgactactgcccctccgagtggaggcaggtgcagaaagcgcccaacctccacttgcagccgagcaacctgccgcaggggaccggcgaattcgattttttaaccatgaaccagaagatgctgaagccacacggaacagctccggccctggtgactgaagagatgctacagcggtgcaagtacagtcacatggagcccccactgggtggactgcgcttcttctcaacccaatacaaggacgaatttcctttcaagtatccgggtccagcagccctgagactgaaaaatcctcaggagggcttcgtgcccctgggcacacctcaccagcacggctgcagggagaagatagaccctcgggctccccagccccctatgtacccatgccccagccagtaataaatgccaccttggcaacaaaaaaaaaaaaaaaaaaa

SEQ ID NO: 8377 - DNA, 594 bp, Macaca Fascicularis
  misc_feature (1)...(594): n = A,T,C or G
aaaaggcttaacaagccnnnnntcactgcattggtgacnnnnnnnnnnnnnnnnnnnnnncctttccttggggaaatgccctcagagcnnnnnnnnnnnnnnnnnnnnnnnnnnnnngtggtggnnnnnnnnnnnnnnnnnnnnnnnnnnnnnnnnnnnnnnnnnnnnnnnnnnnnnnnnnnnnnnnnnnnnnnnnnnnnnnnnnnnnnnnnnnnnnnnnnnnnnnnnnnntcaggatgggacgtggagaagggaaactccggagggatccagccagacttgctcatctccctcacnnnnnnnnnnnnnnnnnnnnnnnnnnnnnnnnnnnnnnnnnnnnnnntggggggtcgttttnnnnnnnnnnnnnnnnnnnnnnnnnnccagccgannnnnnnnnnnnnnnnnnncaccgcgtgtgtctatcgtctgcagcgagggaacgtgnnnnnnnnnnnnnnnnnnnnnnnnnnnnnnnnnnnnntctcttccagaattgtggagtccnnnnnnnnnnnnnnnnnnnnnnnnnnnnnnnntggtggannnnnnnnnnnnnnnntggggattggnnnccatctctatgggggtaac

SEQ ID NO: 8378 - DNA, 740 bp, Macaca Fascicularis
  misc_feature (1)...(740): n = A,T,C or G
tcgagccgcannnacgcnnnnaccagccgcccagatcatgccgccgcagctggttgggggcaccatctggacggggatggttccccaggaggagatcctcccctacctccgaggcctgcctgctcccctcaaaagcttcgtgccaacagagaggttcctatttggacccaggagagtagaaaagagattgggactgagtgctgaggttgggaaggcacctgctcccacagaagggggaatgcacggggcgtcccacgacctcatctgcccgcagcgtcactccgatggcctggccttggcttctgattatttgcagctgcgatggaagtttacaggaacccagccagagttcgcctccccgcacttcaccccggagcgcacctgcttcccccacttcaccttcagagaggacacttcaaactgcggacacacgcaaaagcaactcccagctccgtttgatgtgagttgagccttcaggccagctgggtttagcccgaggctggtcttagatgcagcggctgttgcagggagtgactcagaagaaaaagctgaggaagctgtcgggggctgagggtgggattctcgcttcttcatttcaggttactcgttcttcagcaagttggcaaaacagacatcatgctggggagggccccattactcccctggctggaaaggcttttctgacagtatgagtgttgtgcctacttaattctgataaacctgtttaagcaatacttagg

SEQ ID NO: 8379 - DNA, 726 bp, Macaca Fascicularis
  misc_feature (1)...(726): n = A,T,C or G
gtggaaaggatgnnnctgggtcatttgggggtgnnnctgctagtagagactgatggagacagccaggtggaatgccataaatcacactgagaaaatatttctggccaacagctcttctttcagaggggannnnnnnnnnnnnnnnnnnntgannnnnnnnnnnnnnnttgtttgcaagaaaacagcttctccatgcagatattttgaaacactgaagagcaaaaagggctgggacactttgaactcctgcactctccagaagtgactggnnnnnnnnnnnnnnnnnnnnnnnnnnnnnnnnnnnnnnnnnnnnnnnnnnattctggtggtctgtccctttgcaggacatattttctttactgtaaatgaccataaacagtatcaatgnnnnnnnnnnnnnnnnnnnnnggacatttctacctaggcaatcagattcacagaaaaaagttgtttgttgttgtaaaggctcaagatgaaactctcggccgggcgcggtggctcnnnnnnnnnnnnccagcactttgggaggccgagacgggcggatcactaggtcagnnnnnnnnnnnnnnnnnnnnnnnnnnnnnnnnnnnnnnnnnnnnnnnnnnnnnnnnnnnnnnnnnnnnnnnnnnnnnnnnnnnnnnnnnnnnnnnnnnnnnnnnnnnnnnnnnnnnnnnnnnnnnnnnnnnnnnnnnnnnnnnnnnnnnnnnnnnnnntgnnnnccggcca

SEQ ID NO: 8380 - DNA, 745 bp, Macaca Fascicularis
  misc_feature (1)...(745): n = A,T,C or G
tgcacaccatcttgaaagagcagttgcactgtacaggcacacttctgaggtacagtatctctctccagccactccgataccaagtaattcaagctggcattccttctactagggaaattcattttatccaatttgcatttatggaattgatcatttaagacactaaattagtttttagaaccaagtatgggaagaattccagttgttaggaagagatgaggagttggaagaggagggattagaaacaggaggaggcagtcatcctctccnnnnnnnnnnnnnnnnnnctgtccacatggctggtgatgatgggtgagttcccatggtaacacatctctaattttaccagggaagaggagagtactcactttaccatctttgaatatatttcatagaaatctagctctctgtaccctgaaatcttccacttgcctcacttttcaacagagtcatctagaagggagggttggcttcccaaaagcataaccttgaccaaaccaaacaataggcaccagcaatgctgtcattcagttatgcagaagctcatatgtgaaattctgtttctctgatttcttcgcaagtctcttaatggtcatttgtgttagattacatcaaagtgacggataaccattggtattcatctatttcaactctgtgtctttacatatttgtttatgatggccacagcctaaagtacacacggctgtgacttgattcaaaagaaaatgttataagatgcagtaag

SEQ ID NO: 8381 - DNA, 734 bp, Macaca Fascicularis
  misc_feature (1)...(734): n = A,T,C or G
tgggagccggctgcctggcctccttnnnnnnccagaaagagtcattctttggcatttgtgtttgccaggaggaaggcggatggtagggacagagggctggtcggccctcggggctggacccctctgaggggactctagtgcctgaccctggcctgtcctcattcgacagctggagctgtaagcactggcccagtccccccaccccacccagccgtgtactgcctgggttcccctcagaagggaaatttgtatggaaacatcttggcagcaagtggaaaaaggtgtatggcccatgaaccaactgcaaactccaagaaacctgtctgccctctgccagcagcgagtcctaaacagaatcgagaactcgtagctgtcctcagctgtaactactgtttcagaatgttgctgccgtataaatttgtcatgtcagccagccggctccggctccgtgtgcgagtgtgtgtgtgtgtgcgcgcgcacgcgcgcgtctgtgtctgtgtgtgcgcgtgcgtgcgtgtgtgtcaccaccggagcatttagggcttggtacaagatgtttctcaaatggcaaaggtttttcgtgtgtgtttgttttgtttctttggaaaaagaaaaagaaaggaaaattatgcagaatcgaaagcattcagattggacgacctgctcgcattccgatcagtcgcttccactgttagcatcgtacacatgattgtgatttttatcaaaagaagcca

SEQ ID NO: 8382 - DNA, 738 bp, Macaca Fascicularis
ccagagcctctccttgcccttgctccatcatgatggtcaccgttgggtccacgcctccaccgccccgtcttgccccaaacggaaagcgctgtgtctgcagtggcagcccttccccactttggctctgggagggtccagccagtgtcacctgggcccaccccttcctgcagctgccaggcccgtgcggtcagtgggacccggacgcgggcaggccctccctgcaccagccactggagctggggaccctcccaggcagttcccgcagctcttagctcagcccaccagggttgcttccaccctcaggggcctgagtctgaggagacagctgtggctgcagggccgctctggactggggtcccaggccccgaggggtacgtgcctggcttcccttggcacaggtgcgagtcagtttcctttcagcagaaggggggaagaggtgtccgctgtgtgggctgctgactcctctgtgtgtgaggcccttcatctaagtgattttgtattcagtttaattctcattatatttctatactgaaagaagatttttaacgaagggaaaaacaacagcaataacattcatatctctggagcagctaactcgtacccgtaacgtctgcttttcgtacagaactagccagtgtaaaaacagttcacctgtaaatacttgttcctttttcaccgttgtattatacatgtatatgctgggtcctttttcagaaactcttttcttacctgagagtc

SEQ ID NO: 8383 - DNA, 252 bp, Macaca Fascicularis
ccaccccaggccacatccccactcatctggaagtgaaggcccagggactcctcagatgccgctggtgcccaggaagagctagtgccttgggtgggggaaggcagaactcacaactgggagagagaggagggggatatgaccaccgaccaccctgccccatctgcgggagcctgaagatccagctcgagtgccatcctgccagtggctcccagactgtggggttgggacgcctggcctctgtgtcctagaagg

SEQ ID NO: 8384 - DNA, 750 bp, Macaca Fascicularis
  misc_feature (1)...(750): n = A,T,C or G
ataagtaaagtcctatgaacttctgaggagacaggactgagataccttagacgctccactgtnncctgagtgagcagagtggcagaggctgttacccttttaatagcaccttaactgggaagtagacccctgcaggcaagcagtgactcacagacactgtcacgaatgagtcagcgtcccagccaagcaggggctggcagcctcctacttcaaggggtgggaaggcaaggcctaggctnnnnnnnnnnnnnnnnnnttgtcacattaggggcggtagcaaagagcccacagagtggannnnnnnnnnnnnnnnnnnnttggtcttcaaggggagaggattgagctaatgggcatgtgatacagagaaaggctgtaaggtagggtaagggggagctttcatgtggccctgtctgagctgcagtggttgccggagtaattattccctgttactggagtaattccaacacagcctcaccccacctataaagatgttttgggccgggcatggtggctcacacctgtaatcccagcactttgggaggccaaagtgggtggatcatttcgggccaggagtttgagatcagcttggccaagatgatgaaaccccatctctactaaaaatacaaaattagctgggtatcatggcgcacacctgtaatcccaactacttgggaggctgaggcaggagaatcgatgaacccaggaggcggaggctgcagtgagccaagatgacaccactgcaccctacca

SEQ ID NO: 8385 - DNA, 593 bp, Macaca Fascicularis
aggggacctcaaggtgccaaaaaagctggtcctggctccccaagaagaaccgtcaccaggacactcactcaaaaagctcatctataataatacaattactgcacatgagatatattaaaatataataacaaaataacaaaaataacgtggcacatctgcaaacacttcatatatggtaacccttatcattcatccaaccacaagaaataaatactgttaatttccccatttcatagaagaagaaactgacgcaccaagagggaaagtgctggtgagacccacgcacgcaattgaatccaagacgcctggctgcagactctatctgccctcagtggcaccagtggacgcaagatatgacacgagacactgaaatcccatttgtgcactgccctggtgttctcctgtcccagccatgtgttgatccgggtcttgtatgttcacatgctccaatgaaaatggacgcctggatctgaagaccaatcaaaagtggggagggtggggccacacgccatatacaaagtccaccaccatttacagatttctttgttctttctccgctcccactgcagcacacgggagattttctcctcata

SEQ ID NO: 8386 - DNA, 695 bp, Macaca Fascicularis
  misc_feature (1)...(695): n = A,T,C or G
tagtggtgcgattttggctcactgcaacctctgtctnnnnnnnnnnnnnnnnnnnnnnnnnnnnnnnnnnnnnnnnnnnnnnnnnnnnnnnnnnnnnnnnnnnnnnnnnnnnnnnnnnnnnnnnnnnnnnnnnnnnnnnnnnnatcnnnnnnnnnnnnnnngtcttgatctcctgacctcatgatctgcccacctcagccacccaaagcgctggcctgagatacagtattgaaagcataggtgcttctgaaatgtgactccctgtctcctctctgtgtataaccccctggactgggagtccctggagctccctccactctgcccccagagctgggctgcagcccctgggcctctcacagccatnnnnnnnnnnnnnnnnnnnnnnnnnnnnnnttggcatgaggcccatcttccttctgcagggctccgtgccaggatggctccagaacctgcaggccaaggcccgggagagtggggaagtagggcccggtgacgcagagcagtggagggacnnnnnnnnnnnnnnnnnnnnnnnnnnnnctgaagttttgcactcccggtggggatgacagtgggcagcacctccagctctacgatacgtcctcaaggggagcacccaggctgaggccacaaccagcaagaaggcatcgctccaggcctcnnnncagaagtgcaggtacaggatcctgcctgcg

SEQ ID NO: 8387 - DNA, 723 bp, Macaca Fascicularis
  misc_feature (1)...(723): n = A,T,C or G
ggagatatatatatatatatctttagtcagttttgtnnnnatgagaaattatgggttattttgtggcatgctctttgggagctgcacagttacggggaggactcccactgnnnnnnnnnnnnnnnnnnnnnnnnnnnnnngacagcagaggagggtttgcagagactccctctgaaaaacacaaagaatggactctctcctgggatgaggacttgctttctttacctccggttctttccatgtcttagttggatgtccctgacatggacacaggctgtgccattgtgccagaaacatggtgttatcttttatgttgttgttgttgctgttaaactataatatgtgacttctttttttattattattttttgtttgaatgctttaaaaatcttttaagtctgtggatctgctgatgtacagtgcctttgctgctatggatcaaaatcaaaagaaccgtgtagatatactttattgtataagtagaaaattacttaatttcatactagaaatggatggatgctgcaagttgaaatggactgtccattgacgttcctaatgtggtagcagaaaaaaaaatggtgtcttaagtgcttagtgtttgatgtcattaacagtttcgtaaaactctacagtgtagaaagattttgatactaaactgtgcattgtacatagttctaatgcattgtannnnnnnnnnnnnnnttctataatggtagattgttt

SEQ ID NO: 8388 - DNA, 1846 bp, Macaca Fascicularis
tgacttatgtaatttgtaacgaatgtggggagcagtggtaccacagcaagtgggtgtgcttttaactgtaaatgagtgttctcttaacagataacctgagtgattgataccttttatttgtacaacccttctgtgcttttaaaaatcttgtacacactactctctaaaacagaagaaggaggaaagaaagtcgttcctgaagctgacaccaccatccctaaaagttacagtttggggagagggagtggatgactatttgtattgtgccttgtggccatttaataccttactgtagacagagtgtgggtgagaacagcccagcataaactgggagcctgtgggaaatgcatcccaggcctcacaccattgaatccgaatctgcattttagcaggatccccaggtaatcttccaggatgggatagtttgagaagaactgctttagcagtaggtctgtgactctcagcagtggctgcatattagagtcatctgggaagctttgaaaacccactggtgctgagaccccaccctagaacaattcagttggaacctacgagatgggactcaggcatcaacatttcttttttcattcctcaagttattttaagatgaggtcagagttgagaactactcagaaataggctctcatttgatcctttgtacagctctaagacaagagtgttattccaggcacttcatgaatgaggaaacaggtccacagaggtgcggtggcatgcccaagtgacacaaccataaatagtaccaattcagacagatcccggattttcttcctccagactcactgagactgactcaatatcgacttctgagaaatgtattcctggaggttggggatgaaatgaagaatgtgtttagactccaacactgggtgactagatcttcattcttttcccctctcttttcccatttacaggtctcccttcaaccacaaaagtcaccctggaactcatcccacagttagaattttgtttggaaccctcttgcttagttgaaggagttgttttttttttgttgttgttgttgtttttgtttgtttgttttccctgtgaacaggttttcggggatatataaactctaggatgtttagtttctgatgtcaggagtcttcatgttctcaaggacaagtgtccttgagatggacattaatggtcattagtctgtcagaggaagcccatcaccttagcctttgaatgtagaaacaggcaggcatttatctaataaatgaattgaagactaaattacctctttgaggcctttgcaaacagtgtttaaccagtttacataattgtttgaatacaacaagccttctatgtgattatggctgattttttttccttaaaaaactcatagaatgttcattgttttatagttttaaaaagtttactttggcggtctttacaaacctacacacttcactttttcaccaattcttttctcctaactctcttcctttgttggagctctgaaggcctaactatgtacactttacctgcctgacagaattctccaaaacatgcataaaagtaaaatatggtcgtattttcaaataatttggaagagtcggttcagtgccatcaagtgtgaaatctattttgatatactttctccccgtgtcttcccagggctgcattttgtgatgaaacatgtttagttcttaacttgcaaggtcatctaaaacttaaagtttcataaagtgtggtttcatatgacttggaatgatctgaaaaactattcagtggttacgaaagagcacagcacataaaaaccaaatttgattagttcaaaaaaaaaaaaaaaaaaaaaaaaaaaaaaaaaaaaaaggccaca

SEQ ID NO: 8389 - DNA, 676 bp, Macaca Fascicularis
  misc_feature (1)...(676): n = A,T,C or G
aggcccctaaaatnnnactctctactccgtctcannnctgctactaaaaaacagtggaagggatgtgaagtagaaggcaacaacaactaaaaaagtcnnnnnnnnnnnnnnnnnnnttctgagaaggtgannnnnnnnnnnnnnnnnnnnngttattttaactgtctttgatatttttatagtggccacaaggattctccttcctcttattactttatttctacatacaacagactcatatgaattctgagaaaccaggttggtcagcctccaaggacatattttcaaacagccacttccaatgtaactagtgagtataacagacaagaagatattctcagaaggtggatatgggggcatgnnnnnnnnccgaatggagaggagttattagaatacagaatcagacctgatcaaggacctgtcaccacctctcaatggggccttcacaatgtctaccctgagggatttcagaactgctaaatgctgtctcccattcttcccctttctgaatgaaagtattgtttattcctaggtccaacattctatgttagatacgtgtaggggaagcaggtaaaannnnnnnnnnnnnnnnnnnnnnnnnnnnnnnnnnnnnnnnnnnnnnnatgactatgagtttccagatcagtgactccctgtttgccttagtagtgtataa

SEQ ID NO: 8390 - DNA, 1867 bp, Macaca Fascicularis
ccatttctgccccatctgtttaatgaataattgatctgtcaaacagaatactagcttttcattaaatagccatatcatattagatgccaacgtagagtatgccaatgcagcttaattgttttcatcaaatgcattgtctctttaattaaattaagtatccactccagacaactgaaaaagccagacatctttaaaattccgtgattcaatgacttgaaggttcaaccccaaccagtgcaatttcttttgagatggagtcttgctatattgcccagactagtttcaaacttctgggctcaagtgattccccagcctcagcctcctgagtagctgggactacaggcatctgccaccgagtgtgatgttattaacatcccagttttctatacaaaaactttgtttctttttcactttgatggcatactatggaatgcaacccagctccatttgttcagtgcacataatatttcaatgatgctgtattctaacaaccaatttcagccgaaaatgaaatgaaacagaaaaaccttcttctaaaaaaaatcaatcttttttcctactataacataaataaaatgaaagtggaacattcaattctaactctgagttgacaggcgtatatcctacactttgaggcattgttattaaaaaggcaataatatcttcactttaatgggttattggctgttctaaagtctgtctcataactaggaaaaagttaaaccattgagaaaagggaaaacatgcagtttctctaagttcatcttactgagaatgcagtgatcctaatctttatcttaacatgtaatgcttggaggcattggattcttccatggttgatcttgtacccttctgtctctctaactatacctccaggcttgagttggtccaacaaaagcctagtgacattgaagaatgttatcccccacccctccaaaaactgtatggtacgtctgtatagctgttcatgggattacagaatgaagagtgaaagcacctctcgccatgatgaaagggaaaaaacaaacaagcaaacaaaaaaaactcttaaaccaggtgaagagatagagttgatattgggggctatatatttgtcttcatcaatgttaacaaaccaagacgtgacattgttaattccttaattactcactgatacgatttggctgtgtccccacccaaatctcgtcttaaattgtaatctccataatccccatgtatctagggagagacttggtggtaggtgattggatcatggaggtggcttcccccatgctgttcttgagaaagtgagtgagttctcataaggtctgatggttttataaggggctcttctcccttcacttctcttcttctctgtctcacctgctgtcatccaatataaaaacacatgtacacacatgtttattgtggcactgttcacaatagcagggtcttggaaccaacccaaatgcccatcaatgatagactggataaagaaaatgtgtcacatatacaccatggaatactatgcagccataaaaaaggatgagttcatgtcctttgtagggacatggaagaagctggaaaccatcattctcagcaaactaacacaagaacagaaaaccgaacaccacatgttctcactcataagtgggagctgaacaatgagaacacctggacacagggaggagaacatcacacactggggcctatcgggggtgggggactaggggagggatagcattaggagaaatatctaatgcagatgatgagttgatgggtgcagtaaatccccatggcacatgtatacctatacaaacctgcacgttctgcacatgtcttcagagcttaaagtataattaaaaaaaaaaaaaaaaaaaaggccaca

SEQ ID NO: 8391 - DNA, 717 bp, Macaca Fascicularis
  misc_feature (1)...(717): n = A,T,C or G
catgtgtgagagangnntacaactcacgnnnnnnnnnnnnnntnnctggactacagatgttggaacagagctggccatggccttnnnnnnnnnnnnnnnaatctgcctctgcctctacttcctgtttctatgcttcatggtatttcaggtgtttcggaacatcagtgggaagcagtccagcctgccnnnnnnnnnnnnnnnnnnnnnnnnnnnnnnnnnnnnnnnnnnnnnnnnnnnnnnnnnnnnnnnnnnnnnnnnnnnnnnnnnnnnnnnnnnnnnnnnnnncttcttcatcgttagtcaggtaacggaaggccattggaaatggnnnnnnnnnnnnnnnnnnnnnaacagtnnnnnnnnnnnnnnnnnttatgggatgtggaacctgtatgtctttgctctgatgttcttgtatgcaccgtcccataaaaactatggnnnnnnnnnnnnnaatggaatgcaactcccatgtaaatcgagggaagattgtgctttgtttgtttcggaactttatcaagaattnnnnnnnnnnnnnaaatattccttcatcaatgacaacgcagcttctggtatttgagtcaacaaggcaacacacgtttatcagcttttcatttgcagttgtcacagtcacattgattgtacttgtatacgcacacaaatatgctcatttagcctttatctcaaaatgttaaatacaaggaaaaagtgtcaaca

SEQ ID NO: 8392 - DNA, 1925 bp, Macaca Fascicularis
aaatgtcagtaataacttcaatttcttgagcacatatagtgggagaggcattgtgacagtgctttaataatgcaggacaatactttgaaatattaatttaagtcttttctttctctttattttgctccttttaatccccactcctcccaacctccattcagtactgaagacagaatttctgtttgctttcttcaaaaaagtttgggaaaggggcatttattttcagaatttcatacctaccaaggaactaatataccgagaaacatagggaaaagggcatttgtactttatacagactaaatatctggtagaagcccgattctctccatatctgtaacactaaaagcttttatttggcttgagtcaggaacaaaagaagaaagaaaattctatggatcctgagagcagagaaaacctatttcctggttttcagagacaaaggcaacagaactggagaaggggcacctaagagatgatcctctgggaaccacatcaaagattcttcactcaagctttgcaaagaagagaaaattagagagccctgggatctgaaggggctgtgcacaccgatgcagtgaatatctcaggggccatcagtattaacttatgacttcagatcagacttatttctccccaaccaagatctgacagccaaaatcttagcactgtataatatcctcaagtagtacatactgctccccaaaaacagtgggtataaaatttcaggtacaaattacattgagtttttatcttttatccctaacagcctaacagaagaagatttcagtcagaaattacagtgagttaaagaaaatgaacaaagcttgtttgcttccatccctggatacatctggattcatacccaatacatatttgatgcctcaattaattcctacaacagaactacaaaaaaaagaaattcctctactccttattacagatagaaaacctggatagaagaatttaagtagtttcttaagatagcacagctagtttatgatggcgctgggattcagccctaagtcttttcaaatctaaaactatcatatctgttacgccgtagtacccgtatcacaaggttgaatagactgggaaaaatttgttattggctagttataatactgagtctttttaaagttactatgaatctgggaagcattcttgcctcttcgtatgagtacagagacaaagcaggagatctttggtgttcggtctcaaaagtaaaccctactaaataatatatttcataaacacagctgcaattacaatttgaaacaccaaactggactcctcataagcattttatagcctaatttcttcacatagttctgcttagtagtgacagaaaggacaaatcccatgaggaataaagatctatctgtagtcattgagaaattttctgaagattagagacttagctgctacgaagaaaactttggggagccccaggagtcaaaaaggcagctgggaatatttcaaggcaagtcactggggctctacatgcattggaaggaggctggcaccaaatggttgcccaaagagctgccagtggagattggcacttgtgcaccaagactaagggggaaacaagttgcaagacagtggtgccagctggaaaaatcctgcctgtgaaaagaaggagatgagcttttatggaggtagcaaaaaataatttctgaggtatacaaggatggctgaagtgtggacatgggactggaaacagaggcagggcaatgatgcaaataagcaaaatggaaggcaggacaaaagaaaggaaagagaaggggatgaaaggagaaacagccttaattgagaaagccagctaggtaacacatttctgaaacggcagcttggtttagttcatgtcgtatcaattacattgaagtatcaggtacaaaaaaaaaaaaaaaaaaaaaaaaaaaaaa

SEQ ID NO: 8393 - DNA, 707 bp, Macaca Fascicularis
  misc_feature (1)...(707): n = A,T,C or G
cacannnnncgggactgtagggtccagcnnnnnnnnnnnnnnnnggcgttctcccgtgtgcggagacgagagattgtaataaagacaagacagcgataaagagaaagcagctgggcccagggaaccactgccatcaagacacggagaccggtcgtggccccgaacggctgggggcgctgatatttaatggatacaagacaagggggcagggtatcagaagcagagcgaaggcagcacacctcagcgttttcttctctgcacttacaagagagatcaaagactttaagactttcactatgtgttctatcgctgtctactacgcacttcaaagaggaaccaggagtacgggaggagcatgaaggtggacgaggagtgtgaccgttgaagcacagcaccacagggaggggttnnnnnnnnnnnnnnnnnnnnnnnnnnnnnnnnnnnnnnnnnnnnnnnnnnnnnnnnnnnnnngagcagagcgttccctgactcctccaagcaaaggagactccctttcgcggtnnnnnnnnnnnnnnnnnnnnnnnnnnnnnnnnnnnnnnnngcttgaccaaggagccctcaagcggcccttacgtgggcgtgacagagggctcacctcttgtcttcttcgtcacttctnnnnnnnnnnnnnnnnnnnntgaccctacacccacccgttattcctaggttatattagtaatgcaaca

SEQ ID NO: 8394 - DNA, 2105 bp, Macaca Fascicularis
agcgagcgagtgcccagggtgaatcaatggaaaccccctcacgaagccggggaaacacttcagccgcagccaaatagcattgattattttccttcacttccctcaccgccgtgaatttatttatttattttttccatctccgtccccgacgccccggagcgagcgctggagggagggaggaggaggggaaaaaagaggaatcaacacatcggagaagtcccttccaagagccgccccctcccctccccgcctcgcgctgctcggcggccgcggttcgactcccgtccctgcttccagctgaggtggtactggttgtcacgctgacatgagcccccagcactcctccgtctaccatggccacccttaactcagcctctaccactggtaccaccccctcccctgggcacaatggcccatccccgcctttggacacctcctcctccagcatcccctctgatcctgtcaccaaagatccccctgctgccccctccacctctgagaacatgaggtactcagagccagggggacagcccctggagtcaggctgtggcctcatcccaccaaaggagattggggagccccaggaagggcctgactgtggtcacttcccaccaaatgacccaggggtggaaaaggacaaggagcaggaggaggaagaagaagggctccctcccatggacctgagcaaccacttattcttcacagctggaggtgaggcctacctagtggccaagctgtccctaccaggtgacagtgaactcctgttaccaaagggcttcccctggggtgaggtgggcatcaaggaagagcccagtcttcccttccttgcctacccacccccttcacacctcactgcccttcacatccaacatggctttgacccaatccaaggctttagctcttctgaccaaattctgtcccatgatacctcagcaccatctccggctgcctgtgaggaaaggcatggagctttctggagctatcagctggctccaaatccacccggagatcccaaagatggccccatggggaacagcggggtcaaccacgtggcagtcttctggctctgccttctgtgccgcctgggtttcagcaagccccaggcctttatgggtcacacacagtctcatggggtgaagttaacccctgcccaatatcagggcctgtcagatagcccagctgtgctccaggagggggatgaaggctgcaaggccctcataagctttctggaaccaaaactccctgctcgcccctcttccgacataccccttgacaatagcaccacacaccccacctccagcagagtcctgcctcctcccaatccccacagacacacacactgatcctcatcctcagctccttgcagatgtagcccttgcccatcttcacagacacatacacccatcttggcaccctgattattcatacatgtctgcctaccacacacaaaatatatccttggttctatcttccttttcctcactgaattcccagctcctcatccccataaatgcatacacatacatgcacacacacacgttatcccatgatgttccactgagaaaacaccaaaaaattttgaaaaagaagataaaaagaagaaaaagaagaaacgaaaaagaaagcccaaggccaagaagggggaaggaaaacaaacttgccaccccctcttctccttcctaaccctttgtctagagcaccatactgctcacaaactctttccaaatgctcagttggctcccaaagttggagcctgggatgggcagggagcccacaaaactctaaccaaactggaggctggcatgggagaagtgcttctggttcactctccctaccctctccctcctaacccttttcttgcctgacaggggagcccctgcggcctggactctaggggatgctgccaccagaaacccctctgccaatccctacccggcaccctgggaactgcagtaacttattctcaaaggctttaaacacagagatcctctcagcagccgtgggcccgccccttgtcctagccctgccacataagggtccagcctccagggacaggcactgcccaccaacggcaaatccaaagttatttaaaaaaaaaaaaaaaa

SEQ ID NO: 8395 - DNA, 745 bp, Macaca Fascicularis
  misc_feature (1)...(745): n = A,T,C or G
tcccacnnnnnnngtaaccatgtgnnnatnnnnnnnnnnnnnnnnnggaggaagttggtccctaattgtgttcgaggttttgttttttagcttgagcgctcagagatggtctgtgctccgcccctggccctagtcagcctctctctgtagatgagtatgacgttcatgtctttagctannnnnnnnnngtggttttgcaacccgtatgtaattcattagtatgtaaaatgctatctgagccaaaataatatacaagctgtctgaaaagtctggaaacagaggataaacttatttcaaagggtttattagttaacgttttcaaataatatactgactctattnnnnnnnnnnnnnnnnnnncaggtaaagtcactctaaacttaaagcaataggttcactctttagtcagaaaaagtgcaataaatgtatgatatttccctcgtttccagaatgtttagacactgtaatgttctcattgtaattttgttttggattaacaataggattattgctnnnnnnnnnnnnnnnnnnnnnnnnnnnaactaggctgttcaagaaaaacatattgaatatgtatttcttgatgatgtaaataacatgatatttaaaagtaagattttcatgtgttgaaaagtttttgtacatcttgaaattgataagcgctttggaaagtttattttaaattctttgttctggattagttaaaagagaacaagtgctttaaaatttactttcaagtgtctac

SEQ ID NO: 8396 - DNA, 706 bp, Macaca Fascicularis
  misc_feature (1)...(706): n = A,T,C or G
cnnncagccctgaaactgtaactttattattgtcttcgcacagtggtttgtgaattaacttgagctccttgagttcctacttctaagaaactatttaaactttactctttatcttcttagtatacagagcttggtaggagctggaaacccgactcacagatttaggaaacagtgagttcttgtccctgtagacatcagaactgtggggagggagagatagagaaccagaaggcagttggctgtaagtatttggctttatttctgagttctctattctgttcctttggtctattcctttgttcctctattcctttgactatttttataccagtaccatgctgttttggtgactatggccttatagtatagtttgaagtcagataatgtgatgcttccagatttgttgtttttgcttagtcttgctttggctctatgggttcttttttggttccatacgaattttaggatttttttctagttctgtgaagaatgatggtagcattttgatgggaaatgcattgaatttttagattgcttttggcagtatggtcattttcacaatattaattctacctatccatgaacatggtatgtgttcccagtcatttgtgtcatgtatgctttctttcagcagtgttttgtagctttccttgtagaggtctttcacctccttggttaggtatattcctaaacattttattcctcc

SEQ ID NO: 8397 - DNA, 2051 bp, Macaca Fascicularis
tcataacctgatactgtgaacatctgttctttagtaaactctgctacaaatcatcagagtgattattatataacggaagattctctgactgatattctcatactttcctttccacactggaaacatgaggaaattctaggtggtaaaaaccgcaaccgcacaaaaaaacgtaaagtcaacaaacaaggaaaatacatctctgaatataggaatgccaaacctttaacaaagtaaaacacagattttatttcagaaggctatattgttatatgtgtatatcaacgtcaacatgtccagagtagctgcacaaagttacatattttagtctttataagttcccctcctcaccctacccagtaggcactttgtatccagaaacttctgtgtcaacagtttcccctctctctggaatgcatcaggacaggagtgattggtgtggtggaggaaggttgtgctaagagtgaagttacatgaaagtaggatggaggttagcaagtagttaaagtccagaaaggcaaaggattacttcagtaaggtgttaaggaagagcttttccattttacaggtctgagcaagcaggaaatcaactctatgaactttgaaactcagtaaatatgaaaacattctcaataccatttgtcaaataataaatacaaattaaaactatactattttactgcttgcacccagaagttagtcaaagatctagtcttaattattcattgtgtcggtaaagatgtaacaacaacaacaaaaccccaagcagtatgcatatttttggtgaaggtttaaattggcataattctttaaaataagaatttgtcaatatctgccaaaatgaaaaaggtgcatagcttttgacccaacgattccacttctaagactttatcttatgcctaagtgtgttaataggcaagatgatgggtatatctagctattcagtgagtcactgttttgcaagggtcagaaaactgaaaataatgtaaagccccttcacagagaatacatattcagtcacataaaagaagaggagaaattttgatgtactgctatatgaagaactctcagatttgctattaaataataatatagttcagtgtaaatatagatagtattctatcatttgtgtaaaaactggaaaataaaatagtaagattctgaattttaaaacaattgaatgtattaactattcaaagaatagttaacaaaagaatgtattaactattctgcctactgcctaaggcctgggaggagtagaagagaagagagtgtggatatttacagcatagctttcattcaaattttttttaaaaactgaaatctttattgtcactcaaggatggaaagaagtctgactcatactagaaaatagaatggaggtagacggtgtacatagtagaactgtctgaagcagagaaggataatggaattactgagctggttagttaaagaatccattattagtttgcaatgttattaattcccaggatatcttcatacataaatacaaaagaaatccccacacttcaaagctaaatacaaatcattgtttttatacactttaattgtcagcagataaactaaaccatatattataaagtaatgaacatattagctaatatatctgaaagcttttgttaagccctaatgtgatctacaagtgctaattatgtttttatcctaataattaaaatcactattactacagttagtagtttagtaacatttatttagcttttcctttgtattggagccctattctagaaggtaggggtaatagggtagaaatagtcctctgaaaagctcataaaaacactcacatgaatattcatacatatacatatacagacacacacacacacacacacacacacacacacttcgagaaacttactgaccaacatccacaaacagaataagttgcaggctgaaatgcagtaaaagggtgataaatatcagaagacattaagaaaatttttctgtgaggtgttaaggtttgagccacgttttgaagaagggtagacattaaaaaaaaaaaaaaaaaaaaaaaa

SEQ ID NO: 8398 - DNA, 614 bp, Macaca Fascicularis
ccagagtggtgggattacaggcgtgagccaccgcgcccggccaccagtactagtcttaagacgcctctgtggaattccttctccctggcctttgagaatccatgcatgaacccaggaaagtaatggaccagtgaaggtgtggggaagcattacaggattgactgaaggcctgcatggattccatgttcatcagtttggagataatacacaaggctgtaccagtgcaggtcctcactttaatcctctatccagacaacacggtgggccaaaggatgaagagaggcatgttggagacctgggcaatgtgactgctggcaaagatggtgtggccaaggtgtctttcgaagattctgtgatctcgctctcaggagaccattccatcattggccgcacattggtggtccatgaaaaagcagatgacttgggcaaaggtggaaatgaagaaagtaaaaagacaggaaacgctggaggtcgtctggcttgtggtgtaattgggatcgcccaataaacattcccttggatgtagtctgaggcccattaactcatctgttatcctgctagctgtagaaatgtatcttgataaacattaaacactgtaatcttaaaaaaaaaaa

SEQ ID NO: 8399 - DNA, 2106 bp, Macaca Fascicularis
tattggaaccgggcgcagcgtgtgggagacggaggcgtggctgacgcggctgggcgggtccctttagggccggaggcagggtgtggccggccgggtccgtaaatctcctcaccgcgccgcaaggggccgcgttttaccacttcttttagcaaccctaagcggtttggaatccgctttgctcttacaggacctcagcccgtcgtgatcagattctcgcactttttttttctttcctggaatggagcgggcaatctttttccatctctaccgaagttgatgttcatttttaatattttcacccctcacacctttgtaataatgaggactagaatgctgcagggttggcctttggcctaaaccatttctaggtatggacttgccagatgagagccagtgggatgaaaccacctgtggctttgctgtttgtcagcacccacaatgctgggcaactgtccgccgcattgaaaggggccgtcctcgaatccttggctcaacctgcaaaactcccctggatgctgaagataaactcccagtgctcaccgtggtaaacatctcggattcctgctttgcacctcgtcatctaccagaatgtaccgttactaaggcccgttctttattgtctcggagttcaaagttttactccaaatttcatggcaggcctccgaagggtttacctgacaaaagtttgatcaactgtactaatagacttcccaaacttccagtgttgaatttgaatgagacgcaacttccctgccctgaagatgttagaaatatggttgtattgtggatcccagaagaaacagagatacatgggagacagcatgggaagaagaaaagaaagaacttgacagtgaaaagcaagtcatttctgggtctctccggaaatcagtccgcagtaacacgagtagaaactccagggatgactgtgcctcccccaaccccagtgcaattgtctaaacaattcagttcagatttcctacctctctgggctcaatccgaagcattacctcaggatctactgaaggaacttttgccagatagaaagcaaaccatgccctgtctggagatgaagataaaattggccatgatgaaaaagaatcttcccttggaaaggaaccgacctgacagtgcgatttcttctaagatgtttctatctatacaccgcctcaccctggaaagacccgcactgcgatatcctgaacgtttgaagaaattacataacctgaagacagaaggttacaggaaacagcagcagtggcagcagcagcagcaacagaggaaagtgaaaacacctattaagaaacaggaggctaaaaagaaagccaagagtgatccagggagccagagcacttcacataaacatccagttaccactgttcatgaccctctctatggttacagaactctgccaggtcagaacggtgacatgaagcagcagcagcagatggaaaaaggaaccacctcgaaacaggattccacagagagaccaaagatggactactgtgaccatgtggatttccaccacaatgtaaaaggtcctgaactgtatgaaacagaacccactaacaaggacattagtgctccggtggaagctgtgctaaaagcccaggctgccaggcaaaagaagatctcctttaacttttcagaaatcatggttagaacaggctggaactctgagctcaaactactgaggattcttcaggagactgatgatgaggatgaggagaaccagtactctgaggcagagaagcctctggaggaatagactgaaggcatcccccggggcagccgtgttccaaagtgggatggttggtaacctgagggcagcaacgtttcacgtaagggcaagaggagaggggcttctgctctctggagcttttaccagggcctgagatctgagcttagggattcagttttcttcgttcacctctacttgcctctaaaataaatgtaggaggaaaatccccagcccttttaaatttagatgatttctcttgcgttagggtcagtataattttggtgattaaacacaactgcttctcaattaaaagactcattttctgtttctaggaagaagggaaaaaaaaaaaaaaaaaaaaaaaaaaa

SEQ ID NO: 8400 - DNA, 722 bp, Macaca Fascicularis
  misc_feature (1)...(722): n = A,T,C or G
ggaaatgtgcagcccgaccgccacatgtactgagattgagtcgtgacggccacaggctccgagttttggcgtgaggagannnnnnnnnnnnnnnnnnnnnnnnnnnnnnnnnnnnnnnnnnnnnncctgaacggcggcggaaaagccacacttaattggggcagagggttagttttaagagcaaggggcctttactaaaatggcgaagaccttccgtcggcgttgttttaaaacgggcagcctcaaccctgcnnnnnnnnnnnnnnnnnnnnnnnnnnnnnnnngtgcaattcggattaatgaaggggaaaggttttgtgtggnnnnnnnnnnnnnnnnnnnnnnnnnnnncgagaatgcttatcnnnnnnnnnnnnnnnnnnnnnnnnnnnnnnnnnnnnncagagcagatctgaagatgcaaagatacatgaaagaattccagaatatgcgggagaatatttaatnnnnnnnnnnnnnnnnaaacctgnnnnnnnnnnnnnnnnnnnnnnnnnnnnnnnnnnnnnnnnnnnnnnnnnnnnnnnnnnnnntcactgactagcagcttcattttgaatgagggtcgctgtctgcccattnnnnnnnnnnnnnnnnnnnnnnnnnnnnnnnnnnnnnnnnnnnnnnnnnnnnnnnnnnnnnnnnnnnnnttgactgttgtatgaaaagctgataagaaaaccatccagaaaaaaagctcttcg

SEQ ID NO: 8401 - DNA, 2417 bp, Macaca Fascicularis
gtagcaaaactccaggaaaagagagggagcaaagcatctgataaagccactatcctggcctttgatgccctggtgaccttctgtgaagaactggggtgccgccatgctgccattgccaagtacttcggggatgcgccgcctgcctgcgccaaaggctgcgaccactgccagaaccccatggccgtgcggaggcagctggaggccttggagcgcagcagcagttggagcaagacctgcatcgggccctcccaggggaatggctttgaccccgagctgtatgagggaggccgcaagggctacgggggcttcagcaggtacgacgaaggttctggaggcagcggggatgaaggcagagatgaggcccacaagcgggagtggaacctcttctatcagaagcagatgcagctgcgcaagggcaaagaccccaagatagaagaatttgtacccccagatgagaactgtcccctgaaagaggcttgtagcaggagaatccccaggctgactgtgaaggcacgggaacactgcctggggcttctggaggaggcgctgagcagtaaccgccagtccacatgtaccactgatgaagctgacctccgggccaaggccgtggagctggaacatgagacattccggaatgctaaggtggccaacctgtacaaggccagcgtgctgaagaaggtggctgatatccacagagcctccaaggatgggcagccctatgacgtgggaggcagtaccaacagctgcagtgcccaagctgcgccccccgagcccaatgagtatgacatcccaccggcctcccatgtgtactcgctcaaacccaagcgggtaggagctggtttccccaaaggctcccgcccgttccagacggccacggaactgatggagacgactcggatcagggagcaagccccccagcccaagcggggaggcgagcatgagcccccgagccggccctgtggcctcttggatgaggacaggagtgagcccctctctgggcccagaggggaggtccctggaggcagcgctcactgtggggggccctcccctgagaagaaggcaaaaagttcctctgggggcagttcccttgccaagggccgggctagcaagaaacagcagctcctagccgcagcggcccacaaggattctcagagcatcgcccgcttcttctgccgaagggaggaaagcccagctctgctggcctcagccccagaggcagaaggtgcctgcccctcttgtgagggggttcagggaccgctgatggccccagagaaatacacaggggaggaagatggagccgggggacgttcgcctgcccctccccagactgaagagtgcctcagggagaggccaagcacctgcctgcccagagatcagggcacccctgaagtccagcccacccctgcaaaggacacatggaagggcaagcggcctccatcccagcaggagaacccagagagccagcctcagaagaggctgcgcccctcagccaagccctccgtcttagccgaggtcaagggcagcgtcttggccagcgatcagggcaccttgaatcccacagctcaagacccctgtcagctctcagctcctggcatctccttgaaggaggctgcaaatgttgtggtcaagtgcctgacccctttctacaaggagggcaagtttgcttccaaggaggtgtttaaagccttcgcccgccacctctcacacttgctgactcagaagccctctcctggaaggagcgtgaaagaagaggcccagaacctcatcaggcacttcttccatggccgggctcggtgtgagagtgaagctgactggcacggcctgtgtgacccccagagatgaccagctggtggctgggcaaggcccgcgtcctccaccagattctagcacgggccagcccgggcctcgcctgcttttctgagtcctcctcccttccaaccatacttggctttggggatgaccccagacaccccctgaatccaggtcagaggtcagcccacctttctttctgcttgcaaagcctatagacccttctcagagcctccctgcctctcctggccctcatggctgggttttctaggacacatgtccgggacagaaggtggagggtggtggagctgctgccagaagaaggtgaaggaagagtggcccctccccgagttttaagtcaggacagggcccacctgtccaaggtattgggacctattcaggggaacctcaggtcctccacccactccccatccattacgatgccagcttccagccttgcccaggtcagagctgtggcagaggaaaggcagccaggccccgtttctgctcagctcctgctcaggaaggccaggccggacgaggtgtttgggagaggaataaagtcgtgtggtggcgcatgcgctcgtgcacacaaaaaaaaaaaaaaa

SEQ ID NO: 8402 - DNA, 690 bp, Macaca Fascicularis
gcgcttgaagaagctcttgcagccctcgcacgtgaactggccgtagtgcttgccgctagacttgtccccgcacaccacgcactcgacgtgttgctgctgcttgctgcttgtcgctacccgggccgccagggccgccctgtccaccggctgccgtctgggctggcgtgctggctgggcccccttggccgggcgtctgtggcgtgtgcggggcgccgggcggcgggccgggcacgggcggcgcctgcgaggcctggctgccctgtgagccgggcacctcgtcctgggggtcgcgccacgtgctgactaccattgccatatctatgggggccgcgtccggacttcctgctcccctggctgcgggcggcggcggggcggcggcggctccccgggtctcgggctccggcgcgccgccttttgtgtgtgcgagggtgcaagagggcgcgggagggagccccgggtggctcgggggctggttggttgaggttggttagtttttccttttttgtttttgcttttgcaaagttttgtcgattgcttgtctggcccggtgtgtttgttttgtttgtttccctcggctcagctttgttggtttcggggggctttccgccgggaggggaggggaaggggacaggatagcgagtgggagcagaacgtggagaaagagggaggggagggagagctgaagtcgat

SEQ ID NO: 8403 - DNA, 714 bp, Macaca Fascicularis
  misc_feature (1)...(714): n = A,T,C or G
gcagccaccctgggggagagacagctccagggacctgatacctatcttcagatagtttgacgcctctgatgtggaaggaggattagacaggtcctatgtggcccaagaaagtggagttggagcatggatggaagacgatgaccttcagtaggaggcacagaagagctgattcatttgtcaggtggatgacacaggggaattgcctggacttcaaatgatcactctggcagcagtctcccccatcccagaacggacctaaaagagcctccctaggcatttggggaggatagttgtattgagggtctttctaatcaccctccaatcctaagagtccctgattctatcaacccagggcaagctaggacacagaaaattccatttctataatgtggcattagaaatagagaaacccaagactgacaatggctgcaacaaatcaaaacaaacagacctttcctagagggtcatacggaagcagcgacttaatgnnnnnnnnnnnnnnnnncatccggttcacactgggcaccattaacccaactgagcccagtgtgagaacccagtcccaggggaggagaccgatggtaggcgtccactctcctcatggtaagggactttggtatctgggaaactatttgctctgtttattttggactagaaaattgcatcttgtttgtgtgcggtnnnnnnnnnnnnnnnnnnnnnnnnnnnntctaa

SEQ ID NO: 8404 - DNA, 789 bp, Macaca Fascicularis
cagtagaggcagaggtggaagccacatatgacttggtcaccccttagaagcagttgaaccttgagggcagaggcagctggaggcagccacggggtaaaggcaggcttgggagcctgttcagtgctggagcgtagggtcctgggagacaggagtgatggctgggaggctgctgaggcagcaggctgggctgggattttaacaggctggaggaggactcttgggatatgctgagttgagtcaatccatgtctggagttggaggtgagaccctcctggtagcagaagagaggtctcaggctaagaagggactcacagcagggtctgtggccagtgctgagtctgggccaagttgagggtagagagaacagatttctagttgcattgccattccagctgtgactttgtaagtgcaggtgaagaggtagacaagattgggattttaccagagaaggccagtggggcaggagatgaagccccaaggcagagtccaggctgggcttgtgggtctttgtccttttgaggggacacatgatgggcatcactgcccagtgattaatccggactctgctgatttctagtgttgagaccttggcctctgcgcctcagtttgctcattcatagagtgctcgtccctacctccagggttatgggaggatgaggtgcagtctcctgtgtggtgggcttggcttggactcctgctgtcagcttggggtttgggcactgtcagagttgttcccaagctgatgccttgcctggcccaggcgcggttgacctgcccctgctgtaaacc

SEQ ID NO: 8405 - DNA, 500 bp, Macaca Fascicularis
  misc_feature (1)...(500): n = A,T,C or G
atttccgtcnnnnnnnnnnnnncaagggtcgcttnnnnnnnnnncgtannnnnnnnnnnnnnnnnnnnnnnnnnnnatgcaannnnnnnnnnnnnnnnnnnnnnnnnnnnnnnnnnnnnnnnnnnnnnnnnnnnnnnnnnnnnnnnnnnngctaccccgnnnnnnnnnnnnnngtgaatgatnnnnnnnnnnnnnnnttggannnnnnnnnnnnnnnnnnnnnnnnnnnnnnnnnnnnnnntaacctgtgtatggtgactggaggtgctannnnnnnnngaattggtgtgatcaccaacagagagaggcatcctggatcttttgacgtggttcacgnnnnnnnnnnnnnnnnnnnnnnnnnnnnnnnnnnnnnnnnnnnnnnnnnnnnnnnnnnnnnnnnnnncaaaccatggatttctcttccccgaggaaagggtatnnnnnnnnnnnnnnnnnaagagagannnnnnnnnnnnnnnnnnnnnnagagcagtgggtga

SEQ ID NO: 8406 - DNA, 748 bp, Macaca Fascicularis
  misc_feature (1)...(748): n = A,T,C or G
cgtgtnnnnnnnnnnnnnnntaacttacaggaaggcaccgatcctgaaactgaagaccccaaccacctccctccagacagggacgtgcnnnnnnnnnnnnnnnnnnnnnnnnnnnnnnnnnnnnnnnnnnnnnnnnnnnnnaagactttcttnnnntctcttcttccagaaggccccccagccatcgcaaactgatggtgtttgtgctgtagctgctggaggctttgacaggaatggactgcatcacctgactccnnnnnnnnnnnnnnnnnnnnnnnnnnnnnnnnnnnnnttctnnnnnnnnnnnnnnnataatgatatgcttttgtgatcaagcaaaagcagaaacgtgaagccgcgatacaaattggtgaacaaaaaatgcccaaggcttctcatgtctttattctgaagagctttaatatatactgtatgtagtttaataggcactgtaagtagaaggccttaggtgtcgcatgtttatgcttgaggaacttttccaaatgtgtgtgtctgcatgtgtgtttgtacatagaagtcatagatgcagaagtggttctgctggtacgattnnnnnnnnnttggaatgtttaaattacactaagtgtactactttatataatcaatgaaattgctagacatgttttagcaggacttttctaggaaagacttatgtataattgctttttaaaatgcagtgctttactttaaactaaggggaactttgcggaggtgaaaacctttgctg

SEQ ID NO: 8407 - DNA, 1963 bp, Macaca Fascicularis
cttggtttgtgacatttattttcatgactctttacaaatgttaattatagaaataacatctaaaaagatggatatcagtagtttttcacatacttctaaaaaattcaatatctatatattggaaatcagaactaattccaatatattgtgagtggattgtggagagaccttaaatgatacattataggaaattcttgttctgttatcccacaaaacagtctaatgtcacaattttatacagtctttatttttttctccctttgacaggatattttagtaaatctcattcatgtttcagagtaaacatgataattatgccttaaggtatttttgtcataattgaagactgctaagacacagggaaaatcctaaaatactaatttcacaaaaaatgccacatgattgagagttgttgctgagtagctttgaatttcattttataatggagaatattagttatttcatctgatcaaattatcagatagttctaatcaagaaatatgaaaatgaataacattgtatttatacaatttgcatattagactgaaaataaaactaaaaaatagtattaattatatgcttgtattaattatatgcaagatgagctggaagattaataaaataaaatgtagaatatgttagaaatctgaaagttaatttgaacttcccattagcctaataacaccattaacataatatcagttcatcacttttgatgtcagtatattaaattgattttgagtaaattcccaaaacagaaccatctaatcttaaagaacacacacttaatgtagacaattatgcgagcctgaaatatagttcttatgatttccagttgatgcaacagccaagatgaactatcactaattccaaattgaaacataatacttattttcctaatggtaataattaagtaatttgggggcaacaagaaagtaaaacagtttgattatataatggagcaaatctttgtctactgttaccaaaaatccatatcaaagttagactttctcgtcattgtataatgtaggtatgggtcttgcatgcattctgctgaaaatataatatttaaaaaaattaaatatctgatgtagttgtgatattttgaaagttttaaataatttatttgtcataaatattatttataccaaaagttcaattcatgacgtggctgatttttagctgaatttttttcattgaaattgaccaaagccatttaaacagagacaaaatatatggcaatctaaataataatttcagttagaatttaaggatgtgtgtgtgtgtgtatatatatatacacatatatatatgcatatgtttgtgtgtgtatatatatacacatatatatatgcatatgtttgtgtgtatatatatattccacaattatgtaactttttcaagaaggattagaaactcatggacagtagaatataatttgctgaaactagggggtattcatgtacaaagtaccatttaaagaaagatgacggagtcttgggaatgcttttaagtctgggaatactcagagataatattaatgggagcctagattttttttctttaaaaatggggttctatgactttgggcagaaatgatttttatatgtatcatgcttgaaaaaactctcagtacaagatgatgcacttctttatacaggtaacaaataagttgaaatcatatgatttagatatgatggctgataaaacttctgtctttctaaggcttttggcagatatttctttcaatatttgcattaaggtaaacattcttaattttttatgtaattgaatggcatgattatcattgcattgggtgagagaatgtgggttgatatgttttcattcaattcctcaagaaatgatcaacattatttcgtagtctttttgcaaacttgattacatttctccactaagtgtgtccattttcttaaacagaaatgtaacatttaaaaaaaaaaaa

SEQ ID NO: 8408 - DNA, 1740 bp, Macaca Fascicularis
aattgtttttggagacattcaaccttgagttgtaccgtcatgctgtgggcttgtgtcatcctacaaaatggtcctgcagtctcccagttcttggtggggcacatctctggtcccaggtccaggttgtactatggttgttattccttatggtcacatgctgtagctcaggtgctggccccatttgtagacccagcattgctgttccatgtcttcagatccaggtccttacccatgtctggcagagactccacctgagagtgtctcgggtaggctccacaggctgggctcctggtgtcctgctccgtactctttatggacctggcacctcccagaccctgcttctgagctgctgcagagtctgtaagcttgtccttattctcagttctgggttatcaagtggagatacccaacattatctcctttccccctttcaatttccccagtacagaaaaggttcgtcctgcctcttctttcaacagtagggcttgagatggcccagaacacctgacttcagaccaacccaaatgaccctgtctatcttcctttcctgggagtgggacagatctgactttaggaacatagaggcttgattccttcccttcagatggatcttcagcatttctttgcatgtgcttcgtgcagctctacttaaaaattattaacttagtactaagtcttgttccttcagtacacatcttttagatattctttgtgatgaaataggagtatgtgaagagcacttctgctgcatactgaaatatggaggattgcttgaattgtgagctgaactggctgctttttaaaatttctttcgtgaaacaccatgtttacttgaaagaatgacttgcaaactatggttaccatcccaccatttcgtgaccctttgaaaaaagcacaatatgacaaggataatgaaaaaagaactcttcttcagtgtgagactggcaaaatatattcaataaaagaattcaaagaagttgagaaggctcagctgcattccagattcccacaaatttctaattcaaggcactttatgactccaaatgagtggctgaaactgcctacacgatacatagaaagtgaattttgtaaaaggagaaggttaaaagtgaaagtgaattttaacgactgtagttttgatttgaaacccttggcaagagctccttatcttttggaatcccaggaagaagaaaaaacagttatttacaaaaacaaagggtcatcctttctagaaagagaaccgctgtgttatcgagacggaaagaatccaagtgccaaagaggccaactctgaagggtatttttcttccttgagcctcagccaggaaggaggcagaacgggaggaagaccagaatgggtctccctccccccgtttggggctgctgaagccagagctgcaagaaagaagagggaggtttcagcaaccaaggagcacacactctgatccttgattggtgaaaggatacgcaaaatcaggctgcttcagaggaagtcatctgctcgcaggaatcagggtgaaggccaaggaaggcactcaagaattgtcctgtctttagaaaaaagcatctgccacaaacttcctttaatttttgagttcagtgtctgtgataattaagaaatggcaataccatgtattttcccccaaagttaagaaatattgctgaatgaaccaataaaaataattacagctcccttaaaaaaaaaaaaaaaaaaaaaaaaaaaaaaaaaaaaaaaaaaaaa

SEQ ID NO: 8409 - DNA, 701 bp, Macaca Fascicularis
  misc_feature (1)...(701): n = A,T,C or G
caggcatttnntttgannnnnttccccctgcatgtgagaagcagttcagaaaagggtctatttctccacctcctagtgagtnnnnnnnnnnnnnnnnnnnacctctggnnnnnnnnnnnnnnnnnnttcctgccaaggtttgttgtgcattcagaagcaccaggagcaagagaccagaaggatgatctgnnnnnnnnnnnnnnnnttgagggtcctcttggttccaatgagcagcttataagttactnnnnnnnnnnnttctcattggacacacaaagtggctgttcatctgcctttgcgggagactttcactcttctattgagcttcacaaatgatcgttctcacactcatattcgctcatgttggaatttcccatcctgccatgtcctttcctatttctttttggcttttttgcctccacctttcannnnnnnnnnnnnnnntccactactgtgaaagcttgcttaaagaaaatccctcttggctgggcatggtannnnnnnnnnnnnnnnnnnnnnnnnnnnnnnnnnnnnnnnnnnnnnnnnnnnnnnnnnnnnnnnnnnnnnnnnnnnnnnnnnnnnnnnnnnnnnnnnnnnnnnnnnnnnnnnnnnnnnnnnnnnnnnnnnnnnnnnnnnnnnnnnnnnnncagctactcaggaggctgaggcaagagaattgctttaacccgggggcagagcca

SEQ ID NO: 8410 - DNA, 209 bp, Macaca Fascicularis
gtacccccactcccgacctgaccccaaccccacctgagggtgagcaactcctgtactgtaggggaagaagtgggaactgaaatggtattttgtaaaaaaataaaataaaataaaaaaaatttaaaggttttaaagaaagaactatgaggaaaggaaccccgtcattcccagccccggccaactttaaaaacacagacattcacccccaa

SEQ ID NO: 8411 - DNA, 732 bp, Macaca Fascicularis
  misc_feature (1)...(732): n = A,T,C or G
cagnnnnnnacgtcggaggtnnnnncctggctccagtcacacggcnnnnnnnnnnnnnnnnnnnnnnnnnnnnnnnnnnnnnccactgcaaagaacagaacgtgcccgtgcccaaggagnnnnnnnnnnnnnnnnnnnnnnncagctccatcgtggggccctatgatgaggtggtcctcccaccagagagccaggaagtagattgggaagcagagctggccgtggtcattggaaagaaaggcaagcacatcaaggccacagatgccatggcccacgtgnnnnnnnnnnnnnnnnnnnnnnnnnnnnnnnnnnnnnnnnnnnnnnnnnnnnnnnnnnnnnnnnnnnnnnnnnnnnnnnnnnnnnnnnnnnnnnnnnnnnnnnnnngcnnnnnnnnnnnnnnnnnnnnnnnnntagcagatccacnnnnnnnnnnnnnnnnnnnnnnngtgaacgnnnnnnnnnnnnagagcagnnnnnnnnnnnnnnnnnnnnnnnngacggaggacctgatagcctgggtctccnnnnnnnnnnnnnnnnnnnnnnnnngattgaagaactannnnnnnnnnnnnnnaaggtggtgtgatggctcctgcacagnnnnnnnnnntaggatgggggcatctgctcccactcagcctagcccagggaaaggcccagtgacaggtatgggcaggtgccggccctgaagccgcctcttctgggtagaagggaggaggactgagctct

SEQ ID NO: 8412 - DNA, 751 bp, Macaca Fascicularis
attggttttcataatgggtgtttatatgaaactactaaagactttttaaatggcttgatgtagcagtcatagcaagtttgtaaatagcatctatgttacactctcctagagtataaaatgtgaatgtttttgtagctaaattgtaattgaaactggctcattccagtttattgatttcacaataggggttaaattggcaaacattcatatttttacttcatttttaaaacaactgactaatagttctatattttcaaaatatttgaaaataaaaagtattcccaagtgattttaatttaaaaacaaattggctttgtctcattgatcagacaaaaagaaactagtattaagggaagcgcaaacacatttattttgtactgcagaaaaattgcttttttgtatcactttttgtgtaatggttagtaaatgtcatttaagtccttttatgtataaaactgccaaatgcttacctggtattttattagatgcagaaacagattggaaacagctaaattataacctttacatatggctctgtcttattgtttcttcatactgtgtctgtatttaatctttttttatggaacctgttgcgcctatttatgaaataataaatataggtgtttgtaagtaaatttgttagtatttgaaagaaatttctttgatgttttaacttttgctggcaaaaaaaaaaattcacgcttggtgtgaatactttattatttagtttttacagtaacatgaataaagc

SEQ ID NO: 8413 - DNA, 796 bp, Macaca Fascicularis
  misc_feature (1)...(796): n = A,T,C or G
gagagatgagctgagcagannntnnnnnnnnnnnnnnnnnnnnnnnnnnnnnnnnnnnnnnngncnnnagtgaggactgttggctgactggaaaataataaaagaataaattgcaacatcttggcttttnnnnnnnnnnnnnnnnnnngatgagcctcatcagaatactctgttacttaagatttgcttagagttacctaagaattatcaagttttacttgaagtggagcagcaggactttgtagttgtatgcttgatttggggaaagacaaagagctgtccctgagggcctgtaggcagctgccgcctcacctcttcatgctttcagcttgaggggggctcccactgcctcagcaggagcaattctgtatccctaattctgtcaaaaccaatggaggtgactaaattgtctaacatgaagtgttctttctttttcatttatcctttcttttcctaggtcagttgcataggtgtcagtctttggcctaaaaaaagggtttaaatagacgtatgttctataaatagtggctgtcccactactgtggctgcaatttaagtatttgacaaagaatgtttctatttttattttccatatttttttcaaaaacatcactcagaaaaacctgatctgaatgagtttacacttttattctcatttcatatggacataactggctcctnnnnnnnnnnnnnnntagtgaaacaactccatggagaagcaaatgtgaatgttggaatgaacaaatgctaaagagatgttcctctctttccttcttccctactcccccactcctaa

SEQ ID NO: 8414 - DNA, 1742 bp, Macaca Fascicularis
tgcatttatttttaacctgtattctagaaattagctacataaagtagatgttactgtacaggtgaaataattcccgaaattaaatattgctcagttgtaagcttaacagtataaaggaatgatgtgttacccattgtaatattttagaaagtaaaattataaagaaactgaagctttgtttaaaatatttcttgtgctatgatttaaaaaagttgaatgttttctttctatcatgaatttttccaaaagaaaatatttttaaggaggaaaaagtaaataaataaatatttgttttctggatctctaaatgatagatttcaagaaatttatgaattgtaaagttgatctctgttgtttttaatcttctagttatttgtaaatcattaaagtatttggtgcctctttttgtccctcattgtcttttctgcttaatcttatatttaccctaaaagggcaaaatgcaactgcagagagaaattacacttgctgtaaaaatagtgttgagatgtggccttaacttaggcatttttgtagaaacgactgctctctagtattgtttgaatgactgtttaacttccattcatattacaataacataatagtcaaattaaacaaaatgatgctttcttctgcgcctacttgggtattcattctgccactgtagctacttccattcaggcacctaaaagtgaattagcactgctgatcttcaactggctatggccaatgagattcatttatcaagtgataaatgtgcccttgaccaacagacatagtttgctgatacagttactcactcaaatctaacagagatgagaaatgtttgccatcagaataaaataaagatgtaggattatttcctttgtgaagaccacatatagcttgtgcagttttgacatttataagaaataaatctaggaattttgagggttttaaaatcacttttacaaaaattgcttgctgttttcaagcccctcagagtttgaaatgatcagatcatgcagagaaatgatgctgtaagtgaatgaaagacaaccgaaaacccagaagctatgaaatacttctgactaataccacccacaaaatctgtcctttccaaactagtttattacattattttattttattattactatattttagggatactttgatttggtataacaaaactgggagatttacccacagtcacattaaagttttgggaaaggtgaaaaataatgtaactgcgcatacaacatggtatctctaccatgaatatttcttgcctctttaatctctattcttcatagtccattactacctttttgggggacaggggcacatttacagccttttattataaatgtggcaaaggataagcctggacaaatattctttctcatagaaatgccaatagaaagtacaaaaaggctaagtctaatattttatcttgttgctaaactgtgcagtaataaataaaactcagtatgactgtagataaattaagaaaaatatgagaaaaatgaattccttttcatacagacttttttaaacactagaaaactatgttctgctttaaaacatataattccctcttcattccaaaactagtgccaatgccatacagtatttgatacttatggccaaaattctatctacacaccaatacaaagaatttatttttcaagattttcagaggtctgatattgataatgtttctttatgaattcaaagtttaaagaaaaaaaaaaaaaaaaaaa

SEQ ID NO: 8415 - DNA, 437 bp, Macaca Fascicularis
  misc_feature (1)...(437): n = A,T,C or G
ccctcccactctactccctcctgcccctcccctcccctcccctctgannnnnnnnnnnnnnnnnnnnnnntgcctccatcatatcacagaagtacctcctgcttctggtttcaattagagccttccctgattacattttcctctgaattttttcctatctacatttgatctgtcatgtttaaaccccctacttctaagggaccttctctaatctcattctcatccccaaatagtgttttcttcctctgggttcttgtaatgttggtatcaatctcagcatttagtgcttcctgcctggtgtgacagttacctgtgtgcatgtgcaatttctaatttcccacgctagactgtgagcttcctaaggcaagaatcatgccttgttggtttctgtattcctcatggcgccaaacacagtgccttgtacatgcaggcgctaa

SEQ ID NO: 8416 - DNA, 493 bp, Macaca Fascicularis
  misc_feature (1)...(493): n = A,T,C or G
gaatattcttttcaaagcgtcttttgactgaagtaactttcctggtgctgttgttaactcgttccttttcttaatttattcccccaccccaggcagccctcctggttcctactcacccttcccccccacccctaccctccatcccatacgaaccattttgtttcttttctttctgtcagattttggaaaaattctcctctcctccccgcaccctccacaccatcctctccctgatttaaatagtcactgctacaagtaacagnnnnnnnnnnnnnnnnnnnntattaataaaggtgtactgtaattaacacccctgcctctgcctggctgctttcccgccccatccccacacctcacctttcctaccccagatcccagctgcagggggccaggctgggggctcccggaggatctcagatctccatgtgggggccagggccagacctgggtctctgaaatgccccacaggtgtccctgctnnnggctgcctggg

SEQ ID NO: 8417 - DNA, 466 bp, Macaca Fascicularis
  misc_feature (1)...(466): n = A,T,C or G
caccaaagcagaaacgggagnnnnnnnnnnnnnnnctgccattagacttgcgtctccctgccctacgtaccccagcttccaagacaggaagaaatgtgcaaaaggcccctccggagaaaactgtattttgccattcagctgttctttacacagggtnnnnnnnnnnnnnnnnnnnggtcccagaccttctggttcctatttatttttttaacagaccagtctcgaagtacagcacaaaatctcttctctgccttctctcgtgatgttccagagagcatctgtggttgtgatttggaataagtcatatttatttggtttactgtgcctattcagatctctgtatgtcgtgtgtgtttctgtgtcctggaattggatgcgtgggagttgttctnnnnnnnnnnnnnnnnnnntttttttcaatgtggcccacatatcttgtaaatgtttgctgaannnnttgtgtcta

SEQ ID NO: 8418 - DNA, 295 bp, Macaca Fascicularis
  misc_feature (1)...(295): n = A,T,C or G
gcattgtccattnngaaataagaataagtatctaccaagaaacagagaccacccctagcaaattcataaccacccccctccacccccgccctgaggctccccctgcaggtgggggggtacccgcaccgggaatgagcaggctcagcaggggggcagccccacccatagtctgccctcccctctcccccaggctctttctccagccctgtctccatctgccccaacctcagcccaccttgtctcttggacctattttctatgtcgcctggaggagtccggcaccccctccccggcc

SEQ ID NO: 8419 - DNA, 2479 bp, Macaca Fascicularis
taccacatgacagcagatctgcggaagggcagaatgggactccaagcctgcctcctagggctctttgccctcatcctctctggcaaatgcagttacagcccggagcccgaccagcggagaacgctgcccccaggctgggtgtccttgggccgtgcggaccctgaggaagagctgagtctcacctttgccttgagacagcagaacctggaaagactctcggagctggtgcaggctgtgtcggatcccaactctcctcaatacggaaaatacttgaccctagagaatgtggctgatctggtgaggccatccccactgaccctccacatggtgcaaaaatggctcttggcagccggagcccagaagtgccattctgtgatcacacaggactttctgacttgctggctgagcatccggcaagcagagctgctactccctggggctgagtttcatcactatgtgggaggacctacagagacccatgttgtaaggtccccacgtccctaccagcttccacaggccttggccccccatgtggactttgtggggggactgcaccgttttcccccaacatcatccctgaggcaacgtcctgagccgcaggtgacagggactgtaggcctgcatttgggggtgaccccctctgtgatccgtaagcgatataacttgacctcacaagacgtgggctctggcaccagcaataacagccaagcctgtgcccagttcctggagcagtatttccatgactcagacctggctcagttcatgcgcctcttcggtggcaactttgcacatcaggcatcagtaacccgtgtggttggacaacagggccggggccgggccgggattgaggccagtctagatgtgcagtacctgatgagtgctggcgccaacatctccacctgggtctacagtagccctggccggcatgagggacaggagcccttcctgcagtggctcatgctgctcagtaacgagtcagccctgccacatgtgcatactgtgagctatggagatgaggaggactccctcagcagtgcctacatccagcgggtcaacacggagctcatgaaggctgctgctcggggtctcaccctgctcttcgcctcaggtgacagtggggccgggtgttggtctgtctctggaagacaccagttccgccctaccttccctgcctccagcccctatgtcaccacagtgggaggcacatccttccaggaacctttcctcatcacaaatgaaattgttgactatatcagtggtggtggcttcagcaatgtgttcccacggccttcataccaggaggaagttgtagccaagttcctgagctctagcccccaccttccaccatccggttacttcaatgccagtggccgtgcctatccagatgtggctgcactttctgatggctactgggtggtcaacaacagagtgcccattccatgggtgtctggaacctcggcctctactccagtgtttggggggctcctatccttgatcaatgagcacagaatcctcagtggccgcccccctcttggctttctcaacccaaggctctaccagcagcatggagcaggactctttgatgtaacccatggctgccatgcatcctgtctggatgaagaggtggagggccagggtttctgctctggccctggctgggatcctgtaacaggctggggaacacccaacttcccagctttgctgaagactctactcaacccctgacattttcctatcaggagagatggcttgtcccctgccctgaagctggcagttcagtcccttattctgccctattggaagccctgctgaaccctcaactattgactgctgcagacagcttatctgcctaaccctgaaatgctgtgagcttgacttgactcccaaccctaccatgctccattatactcaggtctccctactcctgccttagattcctcaataagatgctataactagcatttttttgaatgcatctccctctgcatctcatctttctcttttcaatcaggcttttccaaagggttgtgtacagactctgcactatttcacttcatattcactgcccaattcactgcaaggagacctctactctcaccttttaccttttcctaccctgacatccagaaacaatggcctgcagtgcatacttctcaatctttgctttacggcctttaaatcatagttgcccactccctctccttacttagcttccatggcttaacttctctgaccactcttgtcttcctccctcatcagcttctgctacttcatggaatgctgaccttcattgctccatttgtaggtttttgctcttctcagtttactcattgtcccctggaacaaatcactgacatctacaaccattaccatctcactaaataagactttctatccaatagtgattgatacctcaaatgtaagatgtgtgatattcgaacatttcatcttccaccttcccaaacccgaaacaagtcca

SEQ ID NO: 8420 - DNA, 614 bp, Macaca Fascicularis
  misc_feature (1)...(614): n = A,T,C or G
ttcaaaatgcaaatggtatagagcacggttnnntttacagtataatgatagctttgtgaattagtttcatgtcatgctgggaactctgtatgaggtggccataagtagcaaccagcccaaacacccacttgcattcnattagtatggaaccatctgcattttttttttaagctttatctttccttgtgcatcctgaccaagaaatatctttgattatgattaatgtattatgtcaaaatgtaggctagttaaacttttgtaaagttgcctggaatgtcatttgttaggttttaaacacaagatctaaatgaagggttttatgtgttgtgtacaaatcttaattattttgaaatggacaaacttgtcattacatttgtaacctcgtacagaggatttttcactatgtgcctagcttggtgtccattcagctaaaattgaaaaaaaaaaaaggtgcatgaagagttaaaaatcaaattaaagtatatgtagagatgactattttatattacatgacccaatcctgtatttatttctaccccctttttgaaagtatttataaaactagttgaggacagcatgtatttttttgttgaactatttagtagaattgtgcc

SEQ ID NO: 8421 - DNA, 509 bp, Macaca Fascicularis
attatgctgtactatcagcatcagatacattcatccataactgtaacttcttcagagatggatttcactttcatacatcaatggagggagtcttcaaatcaacgaaaaaagtttttgttaaagagcaacaaaattatgtaaatattcaagtaacctcttttttaattaaaaaaaaatagtaatcagcgattctagaaggacagcaacttctgtttaacctccgtgaaggaaaaaaaaatggaaggaaattaatgtttgctgaaggagtcctctccaccgagatgagttctgtttcatcgaagtaatgaagtttcagcacgtggccaaagcttggattccactattcgtcctccagctccacttttcttcatgatcccatcaacgaaaaacggcatctatgttacttggcttttttcctccttatcatctacacctcgacgttgtttgctaatgaatgctgtgtgaagttctgggattaggctactcttcatcggagattatgtttaaga

SEQ ID NO: 8422 - DNA, 700 bp, Macaca Fascicularis
  misc_feature (1)...(700): n = A,T,C or G
aatatgatgtatatgcattnnnaaccagcttcttgcatgatnataatatagtcacctagtaccagtaaacagantgctctttgatttttttttagaacaacaggaggtgctttcttggagtagatgattaacccagctaaagcttgatttttactagctagcacgttgttaacatagtatgttataatgtgtgactttaaaatgatgaaaacaaaataaagtggagttgttattcaggttagtggtgtagtacaagtcactaacaatttactatgtaatagacattataagatgtttgccaacaattatactttcaatatataaaatcaattttcagaaaactgtaaagatgatttccttgttcaattaagattattctaattatagaaaagattatattgcacacttttttcaagttacctatgggactgacaatatgtccatgtgtcctgacagtaaagtcagttatttgaatacgttccattttggagtaacagatgtaagtggtaagcaattaaccaccaccaccacattcaagtttagaactggaagatctttcattatattaatagaccctctatgtttagatataacaaaataccaaagataaatgatcacatatgtcgtaatgtacttgagaaatctcgctactaatgctgtgtcactaattttttagtactgtattaagaaaaaaaaaaaa

SEQ ID NO: 8423 - DNA, 386 bp, Macaca Fascicularis
  misc_feature (1)...(386): n = A,T,C or G
gtccaaaatgacaaagaaaagaaggaacaatnnnnnnnnnnnnaagggccgcggccatgtgcagcctattcgctgcacnnnnnnnnnnnnnnnnnnnnnnnnnnnnnnnnnnnnnnagaaatnnnnnnnnnnnnnnnnnnnggaggccgcagcggtcagggacatttctgaagcgagcgtctttgatgcctatgtgcttcccnnnnnnnnngtnnnnnnnnnnnnnnnnnnnnnnnnnnnnnnnnnnnnnnnnnnnnnnnnnnnnnnnnnnnnnnnnnnccgcaaggaccgaacaccccctccccgatttagacctgcgggtgctgccccacgtccccnnnnnnnnnnnnnnnnnnnnnntgagtccttaaagactgagacagact

SEQ ID NO: 8424 - DNA, 729 bp, Macaca Fascicularis
  misc_feature (1)...(729): n = A,T,C or G
catgaccagccttgttgccgtcgagttggagaaagtggtgctgaaatccaccnnnaaccggctgggcggtcnnnnnnnnnnnnnnnnnnnnnnntcactcattgcctaccttaccacggtgaccacctggaccatccgagacaagtttgcccggctctcccagatgnnnnnnnnnnnnnnnnnnnnnnnnnnnnnnnagatcctcnnnnnnnnnnnnnncaactccggcccattgacgtggcgcctcacccctgctgaagtgcgccnnnnnnnnnnnnnnnnnnnnnnnnnnnnnnnnnnnnnnnnnnnnnnnnngcgcctgtagctgcctgggtgaacacacctggctcatnnnnnnnnnnnnnnnnnnnnnnnaggggccccagccaaggagctgnnnnnnnnnnnctgacttgggggagatctgacagcccagacctttnnnnnnnnnnnnnnnnnnnnnnnnnnnntggaccccctccatgctctgccctcaggcctggccaggtgatgctctgggggcnnnnnnnccccaccaagagaagcgggttcctaatgagnnnnnnnnnnnnnnnnnnnnnnnnggcagcccaggccnnnnnnnnnnnnnnnnnnnnnnnnnnnnnnnnnnnnnnnnnnnnnnnnncaaccctgccagccctagacaacttgggtacatctgggnnnnnnnnnnnnnnncttgacttcgaggaaaggnnngtgatgttt

SEQ ID NO: 8425 - DNA, 727 bp, Macaca Fascicularis
  misc_feature (1)...(727): n = A,T,C or G
gagtggtcggcccccagtgaccnnntggacatcctgatctcaggacagaaccaggccagaccctccctctcagtgcatcctggccccannnnnnnnnnnnnnnnnnnnnnnnnnnnnnnnnnnnnntcacagggatggatggacactttccttctgaccaaggagggagcagctgatgccnnnnnnnnnnnnnnnnnnnnnnnnnnnnnnnnnnnnnnnnnnnnnnnnnnnncnnnnnnnnnnnngacctcagcccacgcggggacctacaggtgttacgcctcattcagctccaacccctacctgctgactcaccccagtgagcccctggagctcaaggtctcaggagcagctgagaccctcagcccgtcacaaaaccagacagnnnnnnnnnnnnnncaacacccacaggattacacagtggagaatnnnnnnnnnnnnnnnnntggctggcttggtcctggtggtcctcggnnnnnnnnnnnnnnnnnnnnnnagcnnnnnnnnnnnnnnnnnnnnnnnnnnnnnnnnnnnnnnnnncagcagagatgacaatgcatccttcagagtggtggagcctcagggacagatctgatgatcccaggaagnnnnnnnnnnnnnnnnaggnnnnnnnnnnnnnnnnntctctgcnnnnnnnnnnnnnnnnnnnnnaatccatatttgtgtgcagggaaactgtctggggtgattcctagaagatcataaa

SEQ ID NO: 8426 - DNA, 1743 bp, Macaca Fascicularis
atgcctgggccacagatgtggacaaaatgtttcctccgcggaccctctgataaccctcacagtgcttgaccaggaaggcactcctcagggacaagtaacacagctggcagctctctaaactgctgtatttcctgaagtgctctgaagtgatagcgttggggctgagagcgtgggtcggcaggccttgctgctggggcactgctgctctactgctggctctcaagaaaagcagggagagagcctgcctctgacccctgcaggagcccttcagacttggactcccaggagcccacctaccacaatgtaccagcctgggaagagctgcaaccagtgtacagtaatgtgaatcctagaggagaaaatgtggtttactcagaagtacggatcatccgagagaaaaagaaacatgcagtggcctctaaccccaggcatctcaggaacaagggttcctgtatcatctactctgaagtgaaggtggcatcaaccccagcctccagatgcctgttcttggcttcctcagctcctcacagatgagtccacacgtctctccaacggctgtttcagcccctgcaccccaaagttccccttgggggagaagaagcactgaagtgggaagatttagactgcccaagaccatatctacgggcctttgtttcacacgttctcattctcagactgaccagaatgcagggccctgctggagtttcgcctatttcctagttacagccctgactggcaggttttttaatccagtggcgaggtgctcccaccccaaggcccagcatatctcctggcttccttagtgggcttccgctgtggtggctattctaaatactgttcccatcacacccccacagagggggtcttaccacacaaagggagagtggaccttcaggagatgctgggctggcctaacagctcaggtgctcctaaactccaacacagagttcctgctttgggtggacacatttctcgattgtcatcagcctggtggggctactacagtgtgctgccaaatgggacagcacacagcctgtgcacacggcacatgtaatggatctccccacgggggctgcatttcacactcctccacctgtctcaaactctaaggtcggcacttgacaccaaggcccctctacagcatccatgctgagacatcagccagcctatgctggaatgcctcctgggtcagagagttcagcacctcacctggcctgaaatctccgaagatgaagatgccacggtgctgagatccagttatccaagaccacaggattaatacgaagcaaggtttcaaactcaggaggcccactcttaaccaccatgttatgctaacgtagcacatgttccagcaaatctaaacttaagcaataaaaataaaatccaagaaagaaaatgtcacaagatccatgagaatgtaggactcagatgtgccacaaaaaaatccaagctgatggctacacagcagccccaggaaacaatgcatccaaaaatcagaggactcggtgaagattgtgccacttccaccagagcaagtcacttccactgcagaaactgtagaaataagaacacaaaataaagattctacgcaggtcttggtcgactctaaaaaaaaaaaaaaaaaaaaaaaaaaaaaaaaaaaaaaaaaaaaaaaaaaaaaaaaaaaaaaaaaaaaaaaaaaaaaaaaaaaaaaaaaaaaaaaaaaaaaaaaaaaaaaaaaaaaaaaaaaaaaaaaaaaaaaaa

SEQ ID NO: 8427 - DNA, 756 bp, Macaca Fascicularis
  misc_feature (1)...(756): n = A,T,C or G
ttagccgagcatggtggcacgtgcctgtagtcccagctactcgagaggctgagcagcgcaggagaatcacttgaacccaggaggtggaagttgcagtgacccgagattgcaccactgcactccagcttgggcagcagagtaagactttgtctcaaagaaaaggaaaaaaaaaatgtggaatttagagaaaaatatttgagaatactagcaacagtctagagaatagaacttaaattttatctatcaaaataagcaaacaactattagctgaataatatattactcatttaaagagtatagcctactgaattaaaacttactagataaaataattggaaagaagtacttttgaggattctggtatatttagatgttacccatagaaattagttatgtattatataatggaagaaatgaacagtatcattagaatgaaataacaggtggacatttcaattggtgaatatagtatctcaagttggctcttacaaagtcattatctggccggttgtgnnnnnnnnnnnnnnnnnnnnnnnnnnnnnnnnnnnnnnnnnnnnnnnnnnnnnnnnnnnnnnnnnnnnnnnnnnnnnnnnnnnnnnnnnnnnnnnnnnnnnnnnnnnnnnnnnnnnnnnnnnnnnnnnnnnnnnnnnnnnnnnnnnnnnnnnnnnnnnnnnnnnnnnnnnnnnnnnnnnnnnnnnnnnnnnnnnnnnnnnnnnnnnnnnnnnnnnnnnnnnnnnnnnnnnnnnnnnnnnnnnn

SEQ ID NO: 8428 - DNA, 2095 bp, Macaca Fascicularis
aattgaggtttggggaaaaattaagggtcagacaaagctcagggtgagggtgaggatgaaggtagaatcagggtgagagccaagttcagggtcaggtgcttatttagcatcacgtttagggtcaagctcaagtcatggtcagaatcagtgtgaggttcaggttaagggtcagagttcagtcaggaagagagtgatgtatctagatcaaggtcagggtcaagatcatgatgaaggtcaggtccaggatctgagtgagtatcacggtgaggattaaggtcagattttgaaggagtgtgaggtatatgtccagggtcaacatcaggataaaggtcaacatgagcatcagggtgaggggtggagttaaattgagacagtaagtgtgagggtcagagtcagtgtgagggccacaggggacatggtgaaggtcaggttcaagattaggatcagattcagggtgagtgtagggtcatcctcagagttagagtctgcctatagacaagttcattgtgagggtgagaatcagagtccatgtcgggatcagagtctgggtgagcatagctgagagtcatggtagtgtgagaaacagggtgaaggacaaggtcatgttctgtgtcagagtgaatggcaggctgaggctatggttcaacgggaggctcaaaatcagggtcagggtcagagaaaggattaggttcagggtcagcttcaggctgagggtcaggtcaaggtcagggtgtgggtcagagtctggggaaatgcaaggccaagggtcactaacacttttggggtatttgttgtacagaataaccaaaacacaccctatcccttagaggtgcattatttatatgcaccgaaagccaacagctgcttcattgatcctccacatcccttgctgtccaatctactactttaggtctttggaaagaccgacgtgaagaaccctggctcttaggaagccatctagaacagcaggagtatctgcttttgtgttccaaatgcctcccccgttgcatccttcaggcctattgaactaataccctggggttggtcccagcctcctgaaggcacattttaattctcttttttaggagtagaggattacttgtgggagattccctggtcttttctactaatatccccccattgcaggttgaggtcaatgctgggctcagccaatcctgttataagcattagatcttatgccagtgatttatctttgtgcctcagttgccttatctgtaaaataggggagttgggttttatggccttttcaaactctgtgggaacctttcaagcattgactccttgcaacttttaggccttgcttcttttctgaagactctatgaaatagagttttccagctttttagattcaagtccctaatggccaaaaatacgtggtaatgatctcagctctcacaattcagaggccacctcctgtttcattgggaattgccataactcttacataaccctaaaggtcaaaaagttctggagagctttaatttttgtagtttgtactatgagaataacagcttttgggggccatttttctaaataaaaaaatcgcaatatgaaatctgctttttcaaacacccccccaccactcactccctaggagagcccaacaaacttcctcaggctgtcattttcaggtctcttctcacctcccctttgggaatttctgctctcagatcatttaaagatattgattatctgctccaccacggaccctgttctttttctttttgtcctagatgcctgtgcttcgtgtcagttttcagataagaaaagagagtgctgttaaggctctatttataatacgtccttgaaagtcaagtgccatctttgagctaaaacactggtaggtaaggagaggagacacaaggcaaggtcacccttagggagaatgagagccctcaatgcccaagtgtgggcacacaggcgctcccatgcaggctcgcacacgcacgcacacacaacattccaggtctaaacgaacaagagaaaagacacacaggtccagggaaagaagaggaaatgcctataatgtgatagaaactcaatacatgtttggtaaaaaaaaaaaaaaaaaaaa

SEQ ID NO: 8429 - DNA, 1555 bp, Macaca Fascicularis
aaattagaaatgcagagcctttctttctacaaggcaggatacaattcataaggtcagttgtgctatggtgaatggctgtgtcccctaggtagaagagaagccagagtaaatataatttttatgacttgcaaggggctgcttctccatggacacccgaatactaaagagttacttcttaatcctactctacattgcatcatcccaggatgaatatgcaatgaactattactggaagcctgcttagaaaatcaataaaaacacatccagcatttttactgacagttttcagtttgttctatttctttaatggaaaataccacgttctgaaaaggagagaagagatgagttcacagcaggaactttccaatggtcttcctctgtttgttttggtgtcttgtcccagctgttggttttccagcagagaaggtaccctgcagcacggatgctggtttcacctcagttttttttgttaggtcctatgttaggggaagcaatgagtgcccagggtctcagagagctccagactcagactcaggagatcagagaatcatcctgggggaaaacattcaaagctaaagtctaaagaactgaaaagggtgagagaaaatgttgaggctggagaagaaacatgagtgtgaatatccttctgaatacaatgaggtgaatggatcagggagattggaggcagagaagcaagcttgcacagatgaacagcacattctcaaggtgcttggcaagaaagaccttggctgaatgaaaaaaaagaccagagacatcgttgagttgaaaagtttcatccatgagcttccagagggtctgactctaaacggactctaagagaagttacgactcccacctgccacagtccgtagtatcacctcatactcctcaaagtcacataacgtttaaataattttaccacacttgcttcaagcaagagaatttttctttgtccaggtgttgttgaggtcgttgctaatgcctttggtgtggttaccgttgaatattctcagagcgcttgctaagcatcaagcactctgttaaggactctgtgtgcattatgtcatttcataacaatcttatgaggtagatactgttattatcccattttacaaatgggggaaacaaaacagatggcgcccagctggccagtccatgacatcttcaatatataagtaacaatgctctgttttatcatctttctgccacacatggattcatgcatgttaagttctatttggtgtaattaaaactccaggataaaattgtaactctacctttgaaataatatagttagaagagaagactctcttgaggaaagcccacagtaaaagataagcttcagcatttcctagtttatcatcataaccatgtttttgaaaccactgaaatctatgatgtaaaagatgttatggtgaaaaataaacagtgactcattaaaaaaaaaaaaaaaaaaaaaaaaaaaaaaaaaaaaaaaaaaaaaaaaaaaaaaaaaaaaaaaaaaaaaaaaaaaaaaaaaaaaaaaaaaaaaaaaaaaaaaaaaaaaaaaaaaaaa

SEQ ID NO: 8430 - DNA, 772 bp, Macaca Fascicularis
  misc_feature (1)...(772): n = A,T,C or G
ctaggattacaggagtgaaccactgcgcctnnnnngagctctgnnnnnnnnnnnnnnnnnnnnnnnnnnnnnnnnnnnnnnnnnnnnnnnnnnnnnnnnnnnnnnnnnnnnnnnnnnnnnnnnnnnnnnnnnnnnnnnnnnnnnnnnnnnnnnnnnnnnnnnnnnnnnnnnnnnnnnnnnnnnnnnnnnnnnnnnnnnnnnnnnnnnnnnnnnnnnnnnnnnnnnnnnnnnnnnnnnnnnnnnnnnnnnnnnnnnnnnnnnnnnnnnnnnnnnnnnnnnnnnnnnnnnnnnnnnnnnnnnggcctacatatgaatttaatcataaatgctcttccccattcttccatatagtatttnnnnnnnnnnnnnatttgtaaaatatatacatttgctcgttagtagacgtaggaattctacaaggatttttaaaggacttatattagataattctattgcatactacctttaaaaataggcgttctttgtttaaattcgccctctggtggttagtacatagcagaacattctaggtgctttgtttactcactgacgggtgctgaggacactggttgctccaaattttctacgtagaaagaacttacgnnnnnnnnnnnnntttaaagacatagctacttttggtatgataggcgtgctggtttgttttgggggagcggcattaagacactgaggagacattaaagcactgtcaagccactttttgccgcggtnnnnnnnnnnnnnnnnnnnnnnnnnnnnnnnnagaaacaaatca

SEQ ID NO: 8431 - DNA, 705 bp, Macaca Fascicularis
tcacatggtcctataactacgttcttccactcctcagtatgtattccctttgctttcaggaagcctctgctggttgtggtttttaacctggtggggaaccctcattcccaaaggttctggactattactaatcctgcctagattgggttgttgtgcttttccattgatcttaatcacagcacattccccaagagccctcctataccccagacatgctcttccccagtccattgtgaagcagcagggcagtttctccttggtggtctggaccagccacccccaccagcgcaggaactccttctttacctgttgatccagaggcatgaggagcttggcgctgctgggtggcagcctaaacttccagtgcaatggatcatcgctgtgtctcctggcggcagcattcctccctctggaactaagacctctaggccagcagagcataaggtattggggacgaagagcaaaacttttgctagtaattttgttatttcacaaatgttatatacatggaatcagatagtatgtaccttttaaagattgacttactttttaaaattgataatttatttgagtttcattcaagttgtttcatgtgtcagtagattgttctttgtaatgctgggtagtattctataatatggatgtaccgcaatgtatccaaccattcaccattaaaggacatctgggtagttttctgtttggggt

SEQ ID NO: 8432 - DNA, 760 bp, Macaca Fascicularis
  misc_feature (1)...(760): n = A,T,C or G
gctgaagcgatgtgtnnnnnnnnnnnnnnnnnggcttggaagctggaagcgatggtgtttggtgnnnnnnnnnnngtggctttggaagttggaagcagtggtgttcggtgnnnnnnnnnnnnnnnnncttgggacctgcgagttccgtaccagccactcagaagtgtctgaacagaagcacttggtgacttgtaactgggtctgaggatttaggattgtggcatttttnnnnnnnnnnnnnnnnnnnnnnnnnnnnnnnnnnnnnnngagcccatgtgcctctggtggagggctacctgcttttccacactgcggctgtgaaccagctcattctccaagaaagattaaaagctgagaacatccaaaggtgagactcagacacattgaaagtgactgcatttagggaagtttaacgacttcttactgatcgttccaattcttcctggttaagataatttgccaacaggtttgtttccaagtcctctcccagcaccaggctcctggtatttcaggggctcgttggctgcatagatggcccctcttctgctgcccctgagcacagacaccaaaccagaggtggaggaagaacggtaggaaggctgattgcaaaggcagctgtgtgtcaaaggttattttaactttttattatttgttattgtttctgcnnnnnnnnnnnnnnnnnnnnnnnnnnnacttttgtcacctttgatatctatnnnnnnnnnnnnatctctatttaataaagacggccngcacttaa

SEQ ID NO: 8433 - DNA, 731 bp, Macaca Fascicularis
  misc_feature (1)...(731): n = A,T,C or G
tccaccagnnnnnngcgnnncagcnnngtttcannntcagccatcccaacagagatcctatgattgacaacaaccgctattgcaccttggagtttcccgtggaggtgaacacagtactgcatggctttgcaggctactttgagactgnnnnnnnnnnnnnnnnnnnnnnnnnnnnnnnnccagagactcactctcctgggatgttctcatggtttcccatcctcttccctattaagcagcccannnnnnnnnnnnnnnnncnnnnnnnnnnnnnnnnnnnnnnnnnnnnnnnnnnnnnnnnnnnnnnnnnnnnnnnnnnnnnnntgacagcaccagtctgttctgctattcacaaccccacaggccgcnnnnnnnnnnnnnnnnnnnnnnnnnncgtgcaagtgtccagagccttggnnnnnnnnnnntgttctgctcctgtagtacagaaggtgcagtacatctatgggctgannnnnnnnnnnnnnnnnngaggnnnnnnnnnnnnnnntttcctgccttacnnnnnnnnnnnnnnnnnnnnnnnnnnnnnnnnnnnnnncaagccaccaatctgtgaagacctcaggccagggggtgaggannnnnnnnnnnnnnnnnnnnnnnnnnnnnnnnnnnnnnnnnnnnnnnnnnnnnccctgagaacatggggtttggacagatgttcagcccttctctgttcttgttttgatggtttcgtgtaagaggaa

SEQ ID NO: 8434 - DNA, 2515 bp, Macaca Fascicularis
ttgctggcagaattttacttacatctttctggacattccgagccttgacgttccacaatggaagttgtgtatttttctgctgttttctttcatgcgtatctcctctgtgtgtctgcacaattacattggctcttgtttggaaacaaacttcgtatacatctctgtgccacactggttttcactgttaagtacatgttaaataagggtggtgatgatctcagtggtaattgtggtaaacatcagtcacctttacaacctccaaaaaattacttctccagtgtcaaccttaactcttatgtcttccaatcaggatgtgtgttgtatttaggtaatataaattattattctcaggcgtagatctattttttcttttttaaggctaaataattattagtcacaacgtagtaatatgcaaccaaagggttatttaattcccaaaggttatgaatatcaatattttaatattcagtagtgaacatgcccaataatgaatgccaatcattaattacagttcatctaaccttatgccatttgaagttcagcttaaaattattaaataaaaaatgcacacagccaaacaataatttctgcacataagctgatctgaaccattgtatttttaagcagtgacacaaagtaaatttattttttaatagcttggtttgatgaaaagggatcagagaaatacggcgattctgttttattgcttgaggcaatctcatttgcaaaatcatttcaaatcaaagttcatctatcactatgtaaatgacatggaataattttttcagtattgatatgtttcagttgagaaatcccacttcaaccactggcattgaggccgtaattcctgttgaaaggtcagcttctcatgctttatttcttcttttaacttcttcgcactactagtgtgcatgtattccttttcaataagctatttttcttatcagctgggttttctgatggacagaaacagaaaataaccataatttgaatgctcttttaataattgtaagacaatccaggaactaataaaagcccttcttgctagcatacccattaatataatatttagactaatagtaatgaaacaagcttgaactttttatgaaaagcagctgtaaatattcaagtattatttggaattctggaacatctgggctccagggcttgccatcactttctatggttaggtaaaaggtacctggttaaatatgtagttctgagaagagaactatgtgcctcatggctctaactgacattgcagattattcaatcattaatggacagaggaaatttctcagaagagagtataaaagagtttgagtccacctagattgcctagttgaacctcaactaccctaccacttttgatcattctgaagacttcatgcagccaaatcattgttaattttatgtgaccctcttagacttaaaaaagccagtggtgttgttgacataccaaaacctaaaattgatcgtgaaaaatcattggtaattgccaaactatatttttggggaagaaaatgcttcgtatttacattgaaatatgggtctctctaaggttttagacattcagtgtctaaaatagtgtggtacaggcacgctgcacagtcattctgttttcccacactcctggctgcaaaccaattcatctctcagaataatgtgaaagatcaacaagtttgacccttgtatcaaaactgctaatttgtatttttcctaaagggcagagaaataatagttttgatttaaaagatcttctcttctgattcttgcacatacataggccccatttatgttaacaaaatgcttaattaagccaaaaagatgacaatatcagtaaaaatttgaaaacaatatttgcctttacaaattcaaatagagatgatccccctgacataatcaactgtgtattcttttatatagaatatatacttctttttccacactcagatgtggttaataatatatcctgcttttcttaaaggaaaatatgatcccccagattaagtaataatagtaatgaagtaatagattgttatatttgtaatcagtaattatgcagtcaccaaataagtggctggtatctagggaacaagcaattatatgagtatgattactaaagaagtaattatgatgaaagataaacctctcttagttgtgctattttttgtttctgaagactggcatttacataacagtttctaatccacagagaatatttgtttaggtctgagagaatgtgtatctgtcatgcacagtttagtacaggaaccctcgccattcacagccttgacattctcaatttcagctcttcattagcggtttgaaggacagtgacttcctgtaacttttctatggcatgaatttgaatcacttgttgtagtgtttctgtggaggaatctagactgcctggcaccacactccagtgttacttaggtctgacatgtagagtctcttgtgtagtgggaaaatctctgtttccaggacaaaaaaaaaaaaaaaaaaaaaaaaa

SEQ ID NO: 8435 - DNA, 708 bp, Macaca Fascicularis
  misc_feature (1)...(708): n = A,T,C or G
atgagtgctgnncagatgtgactgagagggatgnnnnnnntcagtggggcagctnnnaagaggccnnnnnnnnnngcatgtcaggggagatgccacactgtattgtggccatgatgcatggtaggtggctgcaatggtctctctgtaaggaaaatcactgacagcagctgccttctggagccagtctggaaggtctagagggggatagaatttttacttcatatccttatgtgatgcttgnnnnnnnnnnnnnnnnttgaccatgtattatgtttataattaaaaacccaaataaccagctcatgtatggaaaggaatcttccactgaaacatttggatacccaacattctccctgggcacttcacccggcnnnnnnnnnnnnnnnntgggaagctgagtgctggcttctagcctttccagttccctcaggctctggcttcagctctgacccctttctgtcttccctgaccccaagtcaggaatgccgtgggcttcctgccctcaccccacacctcaagaccatcccgctgcctgcctgtctgcttgccccctgccatctcaaactcagccctgggtgcctgtgcagcctgaccccattgcctgccaggggttcctgcagcaccccctcctnnnnnnnnnnnnnnnnnnnnnnnnnnnnnnnnnnnnnnnnngtgggacattgatctgtgagctctggaatgtctgct

SEQ ID NO: 8436 - DNA, 705 bp, Macaca Fascicularis
  misc_feature (1)...(705): n = A,T,C or G
tactccaagaactagctttgtatttcttnnnnnnnnnnnnnnnnnnnnnnnnnntttggannnnnnnnnnnnnnnnnntaaaactttttatggcatttctttcgtggacagtgattgatcttttcacaatgtacgtagtctttagaattttgtacatatgtttgctctttttttgtacagaatatttagtttagttgttaacaggggagtttcctaatttggtctttatcctgcgacaagactttcagcagactagcctctccctatctcacagatcacaggcacccctannnnnnnnnnnnnnnnnnnnnnnnnnttatgcaaaaatctatgaagttaaaagatcgtnnnnnnnnnnnnnnnnnnnnnnnnnnnnnnnnnnnnnnnnnnnnnnnnnnnnnnnnnnnnnnnnnnnnnnnnnnnnnnnnnnnnnnnnnnnnnnnnnnnnnnnnnnnnnnnnnnnnnnnnnnnnnnnnnaaggcttcaggtttgaaattaagtcaactgcannnnnnnnnnnnnnnaaatgaatnnnnnnnnnnnnnnnnnnnnnnnnnnnnnnnnnnnnnnnnnnnnnnnnnnnnnnnnnnnngaaaaattactgtttctactctctgtatctgattttaaaagaaaaaaaatattcatacctggcttccaggtaattgactttgaattcttacaagcaaaggtcattnnnttttt

SEQ ID NO: 8437 - DNA, 742 bp, Macaca Fascicularis
  misc_feature (1)...(742): n = A,T,C or G
cacagannnnnnnnnnnnnnnggggtggaggnncgccacttacantctgnccaaggcagaggtcgcattgctgtatcacagtattttattcaggtttctgcaaaaaataaaaagatacttttttaaacaaacatgaatagaattttgcaaatttaacgttttcaagatttattcaaggaaacaaaatgcctatgttcaaccactggtgttaacgaacaaagatactgtgcgtctctggggaagacgcacccaggtggcggccactcccacggccttgtctagggctcagagtccactcggctctgagcttctccaggcgcctcgtctgtgtgcgtctcacaccagacgtggcttctgaaacgtgcattcaacctcaaacttttgcataaaatagaatgaatcgttttgctctgatgaaatgtaggccttacttgtatataagactgttcctgccttcggtctgtggttttcccacctgcctcccctccccaccccccacccaccgcctggggcttcctctgggggtccgagggtatgcccagcaaatgaagacatcaggttgggtcctgccccactgcccctccccccgttcctgcctcaagccgtcaatcagattgttgagcagtacacagtcagatgaaaatactgtaaatgcactcattgggggttttttggttttacttcatatcatgtgcaatgttgtggctttaacattttatgcaactatttatgaagacctctg

SEQ ID NO: 8438 - DNA, 757 bp, Macaca Fascicularis
tagtaacatgggctcaggggactcagccctggacagggagcctccagagagtgaacagtcttccagatctgggccaatcatcctggacagaggccctcaaggcagctttgccctgtccacctgttgggtgggcagagccaccaggagcccagaaacaggaggaatggcctggccctcagaaaccacctccaactctgagccttccagagcctcagcctctcttcatcgtcttaccccactgaaaccaacaggggtcgggccaggctcccagattcctgaggacagggacttcagcatttactaatgggggactactgtggggtaagggggcagcctgcttgcctgatacaggatggggtcaagggacagtgggcaggtcctcactcaggagtggggggtgtaggctggccggcccccagggcttgtccaccagtctcctcctccccccaaggccctcagagcagcatctgtgggtgtcagtattacctgatcctcggccaaagctagcccaaggctggggaaggggaggagactccaggtcagaatgtgaggtctcagtctgtgatttaaggtgttgcatgtggactcttaactgtacatgtagtttctagtggagaaatcaaggctctgatcattttgtttttagtatgaaaatgtgatttcctttctgtttgtaactcatcatagaaacattgtggtgggaggagaggggatagtctacagctaacgagggaaacaccaaagatcacatcataaa

SEQ ID NO: 8439 - DNA, 2011 bp, Macaca Fascicularis
actgcttgctgcgcgccgccctggacggggcgcacagactgcgcgcgcggcttcgggcgaacatcgggagtccagcctcagccgcctctccgcagacgctgcttctccagcagcagcttcgggtttctcccgcaggagcttcgggcttctcttggtagagacgtgggaactttccttcttctggcgaggctgcagaggtgatgggccgctctccgggcgcccgcagggaggcggcacggtcttctgagctatgataattttttggaacggcagaaatgattggtttagctacagatgggaatttggagtcactctgaaatacatcctggaataattgtgtttgactagaaccaaatcttatgaggtccccaaggatgagagcctgtgctaagtcagtgttgctgtcgcactggctctttctagcctacgtgttaatggtgtgctgtaagctgatgtccgcctcaagccagcacctccggggacatgcaggtcaccaccaaatcaagcagggtacctgtgaggtggtcgccgtgcacaggtgctgcaataagaaccgcatagaagagcggtcacaaacggtcaagtgctcttgcttcccgggacaggtggccggcacaactcgggctcaaccttcttgcgttgaagcttccattgtgattcagaaatggtggtgtcacatgaatccatgtttggaaggagaggattgtaaagtgctgccagattactcaggttggtcctgtagcagtggcaataaagtcaaaactacaaaggtaacgcggtagcgaagagagaggtgtgcttcaatcctggaggggcagcaggatgcggagcacttttgcttggattcccatcctggcccctttgcagaaaattgtctaggatttcagcaacttcatatttgtatatgagagctgtgagaggtggcattcacttaactggcccagccctctctgcttcgtgatttttatttcgtcgaattataatcacaagccaccacacatttgacatcctatctggattcccaaggagcatacctccaacatccgagaagagcaaatcagagtcttcaaaatggatcaccactaagggcatgttcattcttcactttctttctgcctttacaaaagaacttagatgtatgtttcaaagggtcctcattctgttcctcttttgaacttttccttttgcccttgtattaaagtggttttagaggggtctaaaaagattttggcaaaacatatttgcagatgtagattaactggtgaagaagagatcaactggttaactggtaatgaacatttattttataatctttgaagaatagaaggacatagttggattattgtgtgtcattgtatttttactttccattgtccagttagcagagagaaaatgagagcgttttaacttcaatgtaccattttactgagtgctaaggaagcatatcaattccaatattttataaccaaagctctatcagaacatatttataaaacttgttggaatttttatggcttttgtgtagtcatgtaggtaaatcatttaaaatataaacaaatctcaatttagatcaagggttatttcttagatcaagtttatgccaattatatgaaaatattttaactcctagacaggagtctttcagtgctgaatttttagactgtaaatgagttcttcttaacttggctgtttccctatttctgtgttatttcttatttctttaaaatctgagtcctgattggcttaatgattttgcaacagacatgtctccacatattctcagatgctgtcacgtggaaacgtatgaaacagatgaagaatgactgacccagattttaaatgtataaggtacatactactgtaaaaatatgggatgaattttatatattaagaaataccaaaaacatagtttgtgcaccaagttaattatccctgtcctttcacatttatggggggaaaataaatcaatactttaatgttgtttatagcataaaaaaaaaaaaaaaaaaaa

SEQ ID NO: 8440 - DNA, 1973 bp, Macaca Fascicularis
ataaccagaccatctgaagcatctcgctggctttaaaactttgcctgatcaatgactgagactctcctttctcaagttgaactgcattgcgagtaatatcagcataaaaaatgaagaaccacttgtccctgaagagaaaatggaaaccaagacggagtccagcggaatagagatggagcccaccgtgcaccgcctgccgcttagcactgagaaggtggtgcaggagaccgtgttggtggaggagcggcatgtggtgcatgcgagtggggatgcttcttactcggtgggagacagcggggatgctgcagcgcacagcaccccggtgcggagggaggtcactgacaaggaacaggagtttgctgccagggctgcgaaacagctcgaatatcagcaattagaagacgataaactttctcagaaatcatctagcagtaaactctctcggtctccattaaagattgccaaaaagcctaaaagcatgcagtgcaaagtgatacttctagatggatcagaatatacctgtgatgtagagaaacgctccagaggacaagtgctgtttgataaagtgtgtgaacacttgaacttgctagagaaagactactttgggcttacgtatcgagatgctgaaaaccagaagaattggttggaccctgctaaggaaataaaaaaacaggttcgaagtggtgcttggcacttttcatttaatgtgaaattttacccaccagaccctgcccagctatctgaagatatcaccaggtactacctctgcttgcagttgcgagatgacatcgtgtccggaaggctgccctgctccttcgttactctggccttgctgggctcctacactgtccagtcagagctcggagactatgacccggatgaatgtgggagcgattatattagtgagttccgctttgcaccaaaccacactaaagaactggaagacaaagtgatcgagctgcacaagagccacagaggaatgacgccagcagaagcagagatgcatttcttggaaaatgccaaaaaattgtccatgtacggggtagatttacatcatgctaaggactcagaaggggtagaaattatgttaggagtttgtgcaagtggtctgttgatatatcgcgaccggctgcgaataaacagatttgcctggcccaaggttctaaagatttcatacaaacggaacaacttttacattaagatccggccaggagagtttgaacaatttgaaagcaccattgggtttaagctgccaaaccatcgagctgccaagcgtttatggaaagtatgtgttgagcatcatacatttttcagactgttgttaccagaagcacctcccaagaaattcttaaccttgggttccaagtttcgttacagtggcaggacacaagcgcaaacgagaagagccagtgcgttgatagatcgcccagcaccttactttgaacgctcctccagcaaacgttataccatgtctcgcagcttggatggagcgtcagtgaatgaaaaccatgaaatatacatgaaggattctgtgtctgctgcagaggttggtactggccagtacgccacaacaaaaggcatctctcagaccaacttgatcaccactgtgactccggagaagaaggccgaggaggagcgggacgaggaagaggaaagacggaggaagggggaggaagtcacgcctgtctcggccatccggcacgagggaaagaccgacagtgagcgcacggacactgcagccgacggggagaccaccgccactgaggagctagaaaaaactcaagatgacctgatgaaacatcaaaccaacattagcgagctaaaaagaaccttcttagaaacctcaacagacactgccataacgaatgaatgggagaagaggctttccacctccccggtgcgactggccgccaggcaggaggatgcccccatgatcgaaccacttgtccctgaagagaaaaaaaaaaaaaaaa

SEQ ID NO: 8441 - DNA, 736 bp, Macaca Fascicularis
  misc_feature (1)...(736): n = A,T,C or G
taacattgcctatggaagctgggcnnnnnnnnnnnnnnnnnnnnnnnnnnnnnnnnnnnnnngattgggatnnnnnnnnnnnnnnnttggatgaatnnnnnnnnntcgcgagttcctcaaaaggaggaagaattggaattgacgaattcgccaagtatttaaagttgcctgtttcagatgtcttgagannnnnnnnnnnnnnnnnnnnnnnnnnnnnnnnnnnnnnnnnnnnnnnnnnnnnnnnnnnnnnnnnnnnnnnngtcttgtgcaaccctgccaatacagaggagatcatccaagtggcatttaagctctttgatgttgatgaggatggctacataacagaggaannnnnnnnnnnnnnnnnnnnnnnnnnnnnnnnnnnnnnnnnnnnnnnngtttctggtctcttcaaagaaatagcccaaggggactcaatttcctatgaggaatttaaaagttttgccttaagnnnnnnnnnnnnnnnnnnnnnnnnnnnnnnnnnnnnnnnnnnnnnnnnnnnnnnnnnnnnnnnnnnnnnnnnnnnnnnnnnnnnnnnnnnnnnnnnnnnnnnnnnnnnnnnnnnnnnnnnnnnnnnnnnagagagtgcctcagacaannnnnnnnnnnnnnnnnnnnnnnnnnnnnnaggaaaacacagtagcttttgcttgaaattgtaaaggcacttattgataatacttttaatgtgttggtaatgatgtttaaaatgaaa

SEQ ID NO: 8442 - DNA, 761 bp, Macaca Fascicularis
  misc_feature (1)...(761): n = A,T,C or G
gtttacagtactggaggaannnacatcgtnnnttnctggattaagctgctagaaatatcacgtaattagaaattcagtgtttatagtaagatgtattaaacattgctaaaaatgtatggctacaatctataacaggttttccattgtcataactgtatggaattttcttggaggatgtcattagcttctgtttgcactgacttgtgagctgtgtgtacacttgtcagatttctgaatactgtagagcactcaccagctctgaccatgtcttgctagggccggcnnnnnnnnnnnnnnnnggggccagctgtcttagggctgatacgtagacgtgtattctgtttacaattagttccccaatgttgtggggaagaacttaagtggttttaaagtgttttatgatatggtgaggcagtgagggtcagggcaggtggtccctgaggaagggtcttcgggacaagagggactgtgctccccagggtgtggtgcctccctaaggggatggtcagtgctcctgggtcagtgctggccaagccagcccttctgcagactgctgtggtgggagttccctgggacaggaagcccctcggccccttccctccagggcaggaactgaaccagcatgggcggggccggccgagcttccaggcgtgttttctgttaaatgtacctctgtctttaagctgtctcattttctaatcgccggcatgtcttgcctagaaaagcattggaattgcttatgttcaattacagaaataaaa

SEQ ID NO: 8443 - DNA, 727 bp, Macaca Fascicularis
  misc_feature (1)...(727): n = A,T,C or G
aaacaaagacaggactnngaggggaagcacaccagccagtgtgccatgactgaggtgtctcgttcatctctcagaagcaccttggggcctcgccagggccatggtcttcaccgaggagtgggtgggcagccgttccccaggctgtgtggggtcctgctttcttctgctgagacagtgacgctttgcagtttctaccctaatcagccactgctggtcacagccccacggccatgggtatttctgtggtctcctcacttcgttgaagcaaagcatgagcctccctagaccaagggcagctggggaggggaagggaccgaaagtttgtgaagttgaacaatccatccatctgcactgagaggctggatcccaagtcccggggcagcaggatcccaggaaccttcctcctccagggcagcacaggactcagccgtgtctggaccggccctgctgaggctgcagtcactccggaagctctgcgcttcatcgggaggcgggactgtggtgggaggggtccttaaagatgggtgtggggagcagcagggcaggaagtgggagccnnnnnnnnnnnnnnntctgctttatttttcaggctacaatacaggtcagagacaatggcttataaaggtttagtgtggtctcaggatgtgacaggcagtccagcctgacctttctgcacactccagacaaacttcccagacaagctcctttgtgcctccacgggagaggg

SEQ ID NO: 8444 - DNA, 606 bp, Macaca Fascicularis
  misc_feature (1)...(606): n = A,T,C or G
agcagatgcgttagggcgctcggcagntnnnnnnnngtgttgtggtcatggctttaagtaacaactcatggggaaaagaatgcgccccagattgggagagcccctgtatcacctgtttccaagctcagttcccgtctattggagggagtctgtccttgaggggccctctggtgcccagggcatagtatcttgtatcctgtcatgagggcgtccgctcacacagccacatgctccctccttcccttgtcagcatggcctccgtgggcctggcgtcaccgtgggcctggcagagagtcccttgtgagctgcctttgtgccatgagctgccgactcacttgtccctcccagtactggaaccttgtggaacaccagcacttagtgatagaaggccctgtgaggctggcactcccctttcccaccccaagaggccctccccatcccgcacaagaggtgccctctaccagggtggccaggtgaatgttttacagaaggccgctctggccaggcagtggttcacacctggaattccagtactttgggagaccaaggggatagatcacttgagcccaggaattcaagatcagtgtgggaaacagaccccctctc

SEQ ID NO: 8445 - DNA, 280 bp, Macaca Fascicularis
cgagcacccaggacacggtaggactgggcgcgcacaggcgggtggcggaccccgacccttccctccatccccgctgctgcctaccgcacgcctcttcccccctgccggccgtgctccctgcgcagagcccccagccgcgggtggggcggctggagaatgcgctcgccttaggccgggactcccggccgcagaccctgggtcttacctcatattacacacctggggacataagaccaggcaaaggaacagcgagagcgccctcctcagacaggcttgaaat

SEQ ID NO: 8446 - DNA, 750 bp, Macaca Fascicularis
  misc_feature (1)...(750): n = A,T,C or G
tgagtgggggaattgcacgnggatgggcggtgtgggttttctctgaggagaatgtcagtgctggaactctcaggggcacggtttgcaggacactctgagacaggcaccgggaggcagcatccccacttgcacctggaaatgtaaaatgcagcctctggatgggcaggggcctgcaaccattgtagatggggatgtcaccacgtggtctgtgagggcagtctctttctactaatgctgcagctgccgtcggttaagactcgccccacatcaggctctacgttagcccttcctgtggggccacttgttacattctcacaacccaagagaggttggcatgatcctcccgtaatagaagccacctggtcagcagcttgcctggccagtgggcagcagagccaccatttggagcagcatccttgtctctgtggacaaagcacactccagccatggtaatgctcagtgcctctgcctctcgtggctgagtctcaccccctccactgccccacagagaccatcatgtaaacaggaatgtattttgagtgtgtccactcatgggcaatgaagatctttattcttgccctgcaattttactgtcagctcttccagtcgtgaaaatcagtgagccaggcatggtggtgcgtgcctatagtcccactacttgggaggccgaagcagggggatcctttgagctcaggagtttaaggctgcagtgagccatgatcacaccactgcacttcagtcagggcaaca

SEQ ID NO: 8447 - DNA, 750 bp, Macaca Fascicularis
tcacgtatcggtagggctgcgatggcccacctgagccgcaaaaccagcaagttttattacagatttcaaaaagggagggggtgcaagaacagggagtaggtcacaaagatcacatgcttcaaagggcaaaaagcagaacaaagatcacatgcttctgaggaaacaggacaaggcaaaacagaactactgataagggtctatgttcagctgtgcacgtattgtcttgataaacatcttaacagaaaacagggtttgagagcagagaaccagtctgacctcaaatttaccagggtggcgtttttccccaccctagtaagcctgagggtactactgcaggagaccagggcgtatctcaatccttatcacaaccacttcagacagacactcccagagcggccgtttatagacctccccccgggaatgcattcctttcccagggtattaatattaatattacctgctaggaaaataatttagcgatacctcttctacttgcacatctgtttataggctctctgcaaggaaataatatggctctttttgcccaatcccgcaggcagaccttatggttttcttctcttgttccctaaaagcgctgttattctgttttttcaaggtgcactgatttcacattgttcaaacacgttttacaatcaatttgtacagttaacacaattatcacagggttctgaagtgacatacattctcagcttatgaagataacaggatcaagagattaagacaggagta

SEQ ID NO: 8448 - DNA, 710 bp, Macaca Fascicularis
  misc_feature (1)...(710): n = A,T,C or G
tacacagtatgcnnnaggcactgctctgaagtactnnngcattactaaaattcataaatccaagaggtaagtactgttaccatttctgtttttcagacgaggcaaccaaggtcaaaaagatgaaataataacttgctccagatcatatagctagtaagcccactctcccaactacaactnnnnnnnnnnnnnnnnnnngttttttaaaaatagcttcctttcacaaatatgaagnnnnnnnnnnnnnnnnnnnnnnnnnnnnnnnnnnnnnnnnnngtgtgccatttgaggatgcaaaaggagggcggtattcaggagagtgtannnnnnnnnnnnnnnnnnnnnnnnnnnnnnnnnnnnnnnnnnnnnnnnnnnnnnnnnnnnnnnnnnnnnnnnnnnttgagaaagaaatacctattcttacatgagctgccctgacatannnnnnnnnnnnnnnnnnnnnnnnnnnnnnnnnnnnnnnagaagaaagtcaaagatcacgcatttttattcctaatccattaaataactaatgctgaagatggtattaagtgtctaaatatctaaagaaaatgtaaataccttttacagacatttggttttctaataggcaatagttatatttcaagctcagaaaattaagagatagtaagcctttggtcttaactgtattcaactttttaccttgagatttcaatatgtgaaaaaaa

SEQ ID NO: 8449 - DNA, 723 bp, Macaca Fascicularis
  misc_feature (1)...(723): n = A,T,C or G
tcagcgagttcaggaggaggaggcagcttttccttggctttgaaatcagtgttagagacaaagaacagacctcagtggaaaaatnnnnnnnnaactgaacatggggaagcgtcggagaagaaaggattttccccttcnnnnnnnnnnnnnnnnnnngtnnnnnnnnnnnnnnnnnnnnnnnnnnnnnnnnnnnnnnnnnctttgagtgacttcatgcgggatgaggaactgtagagctctctagagcggatgccccnnnnnnnnnnnnngctcctcctcacccctctgagaaagccccctaaaannnnnnntagaatcaccagcgtgccgcctcatgtttcagggcggaatcgcacgctcctcacgctggaataagttacaaaacnnnnnnnnnnnnnnnnnnnnnnnnnnnnnnnnnnagaatgctggatggagacctcctcggccctgnnnnnnnnnnnnnnnnngtaggtctgctgtaaggggcgaccacggggactgcgtcacactcctgatgaaaacgtgtttacccacaacctcgcctcgagcatccttgacgttacnnnnnnnnnnnnnnnnnnnnnnnnnataaggatactttacattgctcacatgtgctgctatgaagacaggattaatctttagacaggactcagctccggaggttcccgggtaatgtattttggctcttggaagtgagggtagaattgagaatataacaaa

SEQ ID NO: 8450 - DNA, 706 bp, Macaca Fascicularis
  misc_feature (1)...(706): n = A,T,C or G
aaattttatgactccatggagttccnnncgtccatggctagttaggaagaaaggaggtgggataggggtcaggcccaggtgacctttaannnnnnnnnnnnnnnnnnaagttttttttttaatatccttcttttctgatctatgagtacctgtttgtctccaggccaaacctttgggcttaaatatctttttcctagacatgtttttgctagtgttgaattttcttcctcctctggcctcctgtggccctttccccaagccccagactacttccaaagcaaattctagatggacattgtatttgttggtatgggagtgggctctatggagtggtctgcacccatctgggactcttttccctaaatcnnnnnnnnaatgagtcaggaggcagggtgcacagcattagtttcagtgtggttatgcatcgtaagcttaacatcagaatgaaaatgaaactcgattttgatgtttctttaaaatccttcccctgttcaatccactcgccgcccccaccttgaatagctaaagtctcttacgaaacagagaagagttgttgacgtctaactccttccattaaattaataagtactgacctcctaatatttaagtgtttactatctattgctgtaaagttttgtatattttgtaaacttttttccccaaatagtagatgtctaaaatcattgtacatctgattcttttatat

SEQ ID NO: 8451 - DNA, 501 bp, Macaca Fascicularis
  misc_feature (1)...(501): n = A,T,C or G
atataataacttctatctttgtttcaggtccaggatatatggaagtgttaaaactggactatatttacctgcctaggttaggtacactcatgaatcttttaaaggactgtaccttttcctagagtgtattcgttttggctgtcaaattcgtaaggagtagaaacaaaacaaatttataaaacaaaaatgggactgggcacggtggctcacgcctgtaatcctagcaattcaggaggccgaggagggcggatcacttgaagtcaggagttcaagaccagcctggccaacatggtgaaactccatctctactaaaaatacaagaattagctgggtgggccgggcgtgnnnnnnnnnnnnnnnnnnnnnnnnnnnnnnnnnnnnnnnnnnnnnnnnnnnnnnnnnnnnnnnnnnnnnnnnnnnnnnnnnnnnnnnnnnnnnnnnnnnnnnnnnnnnnnnnnnnnnnnnnnnnnnnnnnnnnnnnnnnnnnnnnnnnnnnnnnnn

SEQ ID NO: 8452 - DNA, 664 bp, Macaca Fascicularis
  misc_feature (1)...(664): n = A,T,C or G
aaggnnnnnnnnnnnnnnnnntccactgtgnnnnnnnnnnnnnnnnnnnnnnnnnnnnnnnnnnnnnnngtctctgggggtgaagctattatatctgggtgcatattggccagccgaccctccaggcagcccttaattcttgcttctcaaacttacttccaaggacggagaaagatgaccactgctctcaccccactaaagaagccccagcacttagcaagcacctatggcccagagcagactgtnnnnnnnnnnnnnnnnnnnnnnnnnnnnnnnnnnnnnnnnnnnnnnnnnnnnnnnnnnnngtgctggaggctgcatattgtggatagcaggactccactcacatctcaaagctcctccctgcccattcccatggtccctccagcccttgggcaatgctaccaataggaaggaaaaatgagctggatttcacttcctttggtgcagatgtgaataaacagaattggcccaaacttgggcagcagaagtgggggaaaagaagaaaggcnnnnnnnnaggcgcannnnnnnnnnnnnnnnnnnnnnnnnnnnnnnnnnnnnnnnnnnnnnnnnnnnnnnnnnnnnnnnnnnnnnnnnnnnnnnnnnnnnnnnnnnnnnnnnnnnnnnnnnnnnnnnnnnnnnnnnnnnnnnnnnnnnnnnat

SEQ ID NO: 8453 - DNA, 744 bp, Macaca Fascicularis
  misc_feature (1)...(744): n = A,T,C or G
gagaaaaggattaggtggnnnccaacgcgcacgctcgggtccgaggctgctcccctggagcggcgcccnnnnnnnnnnnnnnnnnnnnnnnnnnnnnnnnnnnnnnnnnnnnatacgagcttgggaggaagaatccagaggtgaagagggagacggctttgagctgcgttcaaggcggggccctcgggagcccaggtggggagcgaggctgtgtccgggagccagcatccctcggtgccccaggcacccgcggcctcccaggcagtgctcccgcgctggccgtcgggggaggcaggggcgcagcctccgtgtgcatgcgtgtgtggagctatgcgcgccgcgtgtgggctttccacaggggcgtctctgcgtccacgcctgtacatcccggcccacgtgtgggcaccacagaggacacgcgaggggaatggtcaccagtgagccatatttattatttctagagaaatcacgaattgctttctgtaattgnnnnnnnnnnnnnnnttctgagagtctccattgttgtacagaatcttaaattattcaaggaaaatgaggcaggtcaagctgatgctatccactagtttgattttttttctgttttatagtttgtgctgcatggtacttgtaaagcttaaatattttgagtgttctactgtgtctaggaatgttgggattgtacatatggtactctttcataaatgataaangattctgaatgttagtgttttatgttcatatagg

SEQ ID NO: 8454 - DNA, 714 bp, Macaca Fascicularis
  misc_feature (1)...(714): n = A,T,C or G
gccagnnnnnnnnnnnnnnnncccagccctggaggnnnaggagagccagacagagggcccacggtgggtgttgtctcttcagtccacggcccagcggagccccaggagtctgggctgctctnnnnnnnnnnnnnnnnnnnnnnnnnnnnntgcccgtggcccacgtggggtggtgggaggcagctggatcaggacctgctccnnnnnnnnnnnngtgtccaccacgcgcaggtttgggagccccaggaaggcctcggccgcgatgctcgtcatgtgaagcctgttggccctgcacagagaggcggtcgtgaccctcccaggccctcccctgcccacctccacccctccagccaccctcggggcacctgaggaagagggcacgcaggcggggcgtgctgaggaaggcctcggggcccacgtggcnnnnnnnnnnnnnntcaaggtgcagctcctccagggcnnnnnnnnnnnnnnnnggcacaaaggacagctcgttgtggctgaggnnnnnnnnnnnnnnnnnnnnnnnnnnnnnnnnnnnnnnnnnnnnnnnnnnnnnnncactcagctcagccagcccccaacctctctccttgaaagtctcctgcctccttcataccagcctgtcccttctgcccccaccccacatgactgccaaattcctcccctctgcagtgtaaactaagacccttcccaggaaggcacagacagatg

SEQ ID NO: 8455 - DNA, 719 bp, Macaca Fascicularis
  misc_feature (1)...(719): n = A,T,C or G
gacaagggtacaaattggaattagaagttgacanngtcatagacannnnnnnnnnnnnacaaaacatcagatcctaccccggtgaagatttccctatcacttcaagtttnnnnnnnnnnnnnnncaagcataggcgaaaaaacacctcccctcacccttttagccccctacaaggtgccaagttgaggtaaacagttggagatgatgggcaggagtggcctccannnnnnnnnnnnnnnnnnnnnnnnnnttttggggaagatctgagagctcaggcctcctcatgaatggagcctaaagccgcctcttgttgggagatccctacccccagtgacagaggaatgccccaaacgaggctgtgccctggctccgtggcggttccagacctgggcagnnnnnnnnnnnnnnnnnnnnnnnnnnnccnnnnnnnnngggccttcccactgccccgnnnnnnnnnnnnnnnccctgacctgctctctgagtatcctggagagctggctagaggctgtcacaggcaccatcctcagagctcctcagacctgggactttgtttttgctggttcggtgcattttgtgtatttaagagcaaacactagccgggtgtggtggcgtgcgcctgnnnnnnnnnnnncttgggaggctgaggcaggagaattgcttgaaaccgggaggcggaggttgcagtgagccaagatcacgccattgcactccagcct

SEQ ID NO: 8456 - DNA, 774 bp, Macaca Fascicularis
  misc_feature (1)...(774): n = A,T,C or G
actgtgaaatagagtcagttaatatactccgctctatttaaacgtgagcatgcaactcacgggagattgaattttgtatttgatttcaattagcaaggcataaattatgtttaattttctatccccctcctttccctcaaatggatgattcatggctctgggaaggctgctgtgtnnnnnnnnnnnnngggaaaaggagaattcatgctcccaaatagnnnnnnnnnnnnnnntcctgtattcgtctctttnnnnnnnnnnnnnnnnnnnnnnnnnnnntatgaaaaccttgacttagacctacgagctcaaaacacaacaataataatnnnnnnnnnnnnnnnnnnnnnnnnnnnnnnnnnnnnnnnnnnnnnnnnnnnnntttagtaaatatgtgacccttctttgggattccctnnnnnnnnnnnnnnnnnctcggatcagattttaggttcaggatagtgtggcctgctcaatcccttagcactaggagtccagtctgagcctcacttctttaagaccccaactctttccccctctcattcacccacctctttatttcacaaagaaaacttctcattgcctcactatggtcgggaaagaggtcactgggttttatccttgcctctgtctgtgtcttggacaactagatttatcaatatgaatgttagttttcatatnnnnnnnnnnnnnnnnnnnnnnnnnnnntggcctaccacccagagtttttctgatgatcaaaatgagttaatagatgggaaagtattgaaaaga

SEQ ID NO: 8457 - DNA, 735 bp, Macaca Fascicularis
  misc_feature (1)...(735): n = A,T,C or G
gttgataaaacaaagcaagtgtccacnnnncaggaagtgattcgtggagaggggattttacctgatggtggggaatacaaacccccttctgannnnnnnnnnnnnnnnnnnnnnnnnnnnnnnnnnnnnnnnnnnnnnnnnnnnnnnnnnnnnnnnnnnnnnnnnnnnnnnnnnatacttgcttatatcatgtgctgccgacgggaaggcgtggaaaagagaaacatgcaaacaccagacatccaactggttcatcacagtgctattcagannnnnnnnnnnnnnnnnnnnnnnnnnnnnnnagaatagnnnnnnnnnnnnnnncctgtcaacgcttcctgtgttccaccctgtgactgnnnnnnnnnnnnctcctttacacacagacaactatgatagnnnnnnnnnnnnnnnnatgcaaacgcagcagaacttgccacatcagactcagattccccaacagcagactannnnnnnnnnnnnnncctgaagaaagaaaactgactgaagcaatgaatttataatcagacaatannnnnnnnnnnnnnnnnnnnnnnnnnnnnnnnnnnnnnnnnnnnnnnnnnnngcatacgttgtgcatgttggcagtattaagtgtatcaccaaataatacaacataactttcattttactaatgtattttttttgtacttaaagcatttttgacaatttgtaaaacattgatgactttatattaattacaataaaagttta

SEQ ID NO: 8458 - DNA, 659 bp, Macaca Fascicularis
tgccagggcccaagaggtgcagcttcacggaggccaggggcgagaggaggcccagctctccccggctgcccatgtctgacacactgcctcggaagcacctgtggccactgggcggcttctgccctgtggctggttgacctgtgcaacttccgctccacaatgtccttgaatgagtccttcccaggctcctaaccattgggtgtttttttagccatatagaaatgtgaagttcatgaagaaagaaaaatccaaaaaggccagtgatctgcccctcagcctcatctccaaggaggagctggccccgtgtttgtacccctcccgggtgcagcctgccctggcgctggtgatgcctccgggatcttccagaggaaggtgagacaggcaacaggatagagtaatcgcagcctctaaaaaacacgtttcacagcagattaggaaaacatgtggcaggaggagggtcaacagtgcaggaggcgattccttcccactgtgtgcttcccgcctgactttacagcaaggccgcttgtgcacgggggtctccaagcccaccctggtgcctgactgcacgtaggcttagcgctttcttccaaggcagacagcagtaattttctctttttcagtcatgtttttgttatttagaaaacatttttctttcaaca

SEQ ID NO: 8459 - DNA, 744 bp, Macaca Fascicularis
  misc_feature (1)...(744): n = A,T,C or G
agtacgccgggcgcgcgccgagccgctcacgccctgctcacannnnnnnnnnnnnnnnnnnnnnnncnnntctccaacgcccaagagccttcctcccgggagaacgannnnnnnnnnnnnnnnnnnnnnnnnnnnnngaaaacaaggaccgcttttttctgnnnnnnnnnnnnnnnnnnnnnnnnnnnngaatatgtttacatatgcatagcgctgcactcagnnnnnnnnnnnntagccagagaaaaaaaaaatcatcaaggacaaaggccgcgaccttttgcgctgggccgtctgctcctttcgaggcactgtatttaactaannnnnnnnnnnaannnnnnnnnnnnnnnnnnnnnnnnnnnnnnnnnnnnnnnnnnnnnnnnnnnnnnnnnnnnnnnnnnctgtctgcataggatgtgatagctatctctgttcattttacaatgtgggnnnnnnnnnnnnnnnnnnnnnnnnnaactgcnnnnnnnnnnnnnnnnnnnnnnnnnnnnnnnnnnnnnnnnnnnnnncggcgggatttgttcatgggttttacaatgctagcgtgnnnnnnnnnnnnnnnnnnnnnnnnnnnnnnnnntccttgccactgataagcaaaggaaatcctgatttttttgtaaattatgtgagacaagttgtttatggatttttatatgaattacaatttactgtacatcaaatattagtctcagaggagttaatttatgtaaagtgtttaaa

SEQ ID NO: 8460 - DNA, 766 bp, Macaca Fascicularis
  misc_feature (1)...(766): n = A,T,C or G
ataatactttaatnnttnatcatagattgccccctccccnntnntcagaagagtgaatatgctcttaaatgtcaaacacatttttgttttgttttttaaatgatcagtgtctatttgatgtgatgcagatctgcagaaataattaggctagggctcttagtttcattnnnnnnnnnnnnnnnnnnnnnaactatggtattattttaatgttactttaaaaatccataatctgctagttttgcatgtacttgtatgaaaacagtgcagtaagttgaaaacccagtatctatggaattgataaatgttgatctggtggtacattttatctcattttcttatattaaaaatgtctgcatgattacattttatttcctttgtaatttacatttcaaaatgatgtattgctatatgggnnnnnnnnnnnnnnnnnnnnnnnnnnnnnnnntgtagtattagagttttaagcaaatctgtgtggtgatacagccataagaatggggcttatataaactctgtacatgtatgattttgtacagagaatttttcactttatnnnnnnnnnnnnnnnnnnnnnnnnnnttaaaatgtacataaaatactgtatttttttaccttgtgtgtgatagtctagtcattgcatgtaaatataatttattatgtattctgtagtataaatcatacgttgatgacttacatttttactggtaagtcaacatccattggatgttttctgaagtggctcattatttctgcagatctgcatcac

SEQ ID NO: 8461 - DNA, 720 bp, Macaca Fascicularis
  misc_feature (1)...(720): n = A,T,C or G
tcggagggaggcactgcacttagaagnnngatgtgtatcggtgtcatcttctaggcannnnttatatctgtgaacatgtgcatcctttgtatataaagtggaattatgagtttacttatgcacacatacaaatgtacatataaagtaggaattataccacacacagttctctgtgatgtgcttttgttccacttaatgtatcacatggtagagtccttgattgtggacccaggagccagattactgaaggtgcagaccctgcagtttactagttgactttaacctttctgtatcccagtttcctaatctataaatgaaggataacggtagcattaattcagagttattggtaagagtaaatgttaaaatacataaactttctctgctgatgagtatttacactggagtcttaggaagggtccttgcttgttttctattctacagttgggctggacatagtaggccatacgggtgccatcagatgggctcttgtttctctgtggcctgttctgttagacctctttcctccttttttccttgaggttgtctgtcctctagtgaaccagctggtttacaggtggtgcttggctgagagtgtcttgctgttaacagttactatggatgtcatatgccaactggttctgttaaaaaaaagtctgaatccaaagccttgtgaattttgaacattattttctgtctggaattttgaagaactgattc

SEQ ID NO: 8462 - DNA, 745 bp, Macaca Fascicularis
  misc_feature (1)...(745): n = A,T,C or G
atgatccagagttgctatgcaccaaatttgannnnnnnntaaataccttgatgcctgtagcactagaaatgctttcctatttaaaataaacattaaattttaaaatagagctttgtatactatgtaagcatttttatatcagctttgtaaaagctttggtgttaagagtcaatattttttggctttgtagataaagacttaaatttttgtgcaacatnnnnnnnnnnnnnnnnnnnnncattggactatgcaaatcaatttatagtagcagcactgagcaactgggcacgtgctagtatgcaccccctcctactctaactgtgctagctcttgggttgaggaatggaatgagtagccttctgcttactggagatgcacagagaaacatggctgaaaacagctttaaaaggaacatgtcttcgggttcatgtgtgnnnnnnnnnnnnnnnnnnnnnnnnnncccacccagggccagccattatcaccagacctcttctgggcctggctgtgaagccttgtctttggtattcagaatggatctttaaggctcagatgggctcaaattnnnnnnnnnnnntttataaaatggatgtttaaaggaactggttctcagttatgtttacagcacttggaattgtgtgttcttgtacattttgtattttaaaaccttttatgggagtgcggtgctccttacacaaatacaaagggaagaagagccagcagttgaggctcctcagttttagtg

SEQ ID NO: 8463 - DNA, 143 bp, Macaca Fascicularis
tttatcccgcaattgaagaaggtccagcttttggatccccccaaaggggttccggcggttttggttcccccggaaagaatttaaattttttcccagtaccgaaaacgggaagtcattccttttttttaaaaaaaaaagttttt

SEQ ID NO: 8464 - DNA, 706 bp, Macaca Fascicularis
caagtataggttgattcataattcttggtataaaagcaagttttctttagtcttgaggaatttgaagaaaggtagaatgttggattttaggcaaagtaggattgaccagagactgttctgactttgacattcagacctttcagacgttcttcctttagaccagtccaagacactcaccatttccagccaagttgtctttttttttctgccaataaagtattcattagttgacatttgtttgtattttaagtaaagtcaatttttttaaaacattaatttaattcataggtatgcctttcatttctctggccttcagttggtttaaaaaaaaaaaaaagcacttagccagaccattctttctttagtaaacatttttattttcttaatttttcctgcaagatttcctccattttcatggaatgtcataatgacattaccattattttctagctcttttcatcatagaaaaatgtagagcagtgcaccatttaaacatgtctgacatagatttagtggtcctgggttcatgtgatttgggagctttaagttgtcatttagattgatgattcaacctgactcaccatcttttttactacaattctacatgaatgtggtgaaacaggtagaagaaaattaagcatttctctgcttttggagtctaatgttcctgccaagtgactggtttgtaacacccccctcaccccca

SEQ ID NO: 8465 - DNA, 572 bp, Macaca Fascicularis
ataatttcttatttctctttgatcattgggatttgaggacctgtttctaaatcttgacttaatttatagcacaaatatgtgggagcaatgagagttgaaccgttgtttttgtttgagatgcagattgtgtcttgaaaatgatgattatatatgcaaattctgccctaccctcaccctcttccaagtttcccccaaaaaaggtcacacagtgcggcttcctgtgggaaacaggagcaaagctggcctgcagagcccccggggctgtgatgaagctcatgtcttatctctgttctattaacaaaatgggagtttgtgggttttaaaaaaattctgtttctaaatggaggaatagatgactttctttattttggtgggggttgggacttgtggctttaaagaaatcacttttgagtaggatgtatatttttgttggatttttgttgtttatttttttagaatcctccacagcaacatgcgagaccatggagttaaagaaacccagagacctttatcaattaattgtactgtttgtgaatttgtataaataataacaaagatcctcttaaaacgtt

SEQ ID NO: 8466 - DNA, 706 bp, Macaca Fascicularis
  misc_feature (1)...(706): n = A,T,C or G
aacgcnnnagggcgcttgcgcgtgggagacgcgcnnnnnnnnnnnnnnnnttctctcnnnnnnnnnnnnnnnnnnnnnnnnntcgcccaaagaagactacaatctccagggaaacctggggcatctcgcgcatacgtccgtaactgaaagtggctaaggcatcccagccggaggaagtgagctctcccggggcgtggttgttcgtgatccttgcatctgttacttagggtcaaggcttgggtcttgccccgcagacccttgggacgacccggccccagcgcagctatgaacctggagcgagtgtccaatgnnnnnnnnnnnnnnnnnnnnnnnaagtactacctgggtgggtttgctttcctgccttttctctnnnnnnnnnnnnnnnnntggttcttccgagaggccttccttgtcccagcctacacagaacagagccaaatcaaaggctatgtctggcgctcagctgtgggcttcctcttctgggtgatagtgctcacctcctggatcaccatcttcnnnnnnnnnnngccccgctggggtgcccttggggactacctctccttcaccatacctctgggcacccccnnnnnnnnnnnnnncagactggaaccctgctcattctcccaggacaggctccttagagcagaggagcctgtcctgggagccccttctcaaactcctaagacttgttttcatctcccct

SEQ ID NO: 8467 - DNA, 725 bp, Macaca Fascicularis
  misc_feature (1)...(725): n = A,T,C or G
gataggttagggaaggacaaaggcnnncagccataaagggttttgctatttccaaagcttccccttatcgtcccctgtgattatctcccaaccctgtgacaaaggtagagcaaatattgttcttcccattttacaggttcagaaaccaaggctaagagactggtctaaagtctcacaggtagtgtacagtggagccaagacttgaactcagagctttttatgcaaaatcccatgatttttccactgaggcaaatcataggctcctcctgggaggccctcgcagaagccagaacacatggctggacctttccagcccaacccactgtcttgcagtggacagagaacctcggcgagggcagcaaggtagacaggacaaagaacgtggggctggtttctgccctcgaagagcacctggttagtcagagaacagagatcactcacaccaaaccatacaggcagggcagtgtggagacaggtggacagacctccaggtccccaagctgggcacagagaaggttgtgagctgtcccatactcccactttgtgccaaatgacgttgcacctgcaaatggtgcttcaatgttgttttgtatctttaagctgtgatgttgtatatgtacgatgcctcctagctagactgtaagccctttggggacagggctgctttcagttcttagatggcattctcctatctaccttccttcaactgctctgcatataataag

SEQ ID NO: 8468 - DNA, 693 bp, Macaca Fascicularis
  misc_feature (1)...(693): n = A,T,C or G
ttgtcaatgaggcagatcagatnccnannnnacgggcaacnnntcaatgaaacagacacannngcacagttggannnnnnnnnnnnnnnnnnnnnnnnnnnnnnccaacagcagacgggaggtgtctactgaaaagggaacctgcttctttactccagaactctgttctttaaagaccaagattacattctcaattagaaaactgcnnnnnnnnnnnnnnncatcctgactactaccgtatagttttctctattctttcatttcccccttccccattcctttattgtacataaagtaactggtatatgtgcacaagcatattgcattttttttttttttttcaactaaacagccaatggtatgttttaatcgacatcaagtggagacgggatggggaaaaatactgattctgtgaaaataccccctttctccattagtggcatgctcattcagctcttatctttatattccagtaagttattttgctctcactgttttaacaaaaacacacaacataaaaatccttgcataccttgttcaattggagaattttaatgtttttcatttatcattgtaaaaccaaggacaattttataacttttttgtacgtagctgttacatgtagggcaatctgtctttaagtagggataaattactctaaaacaaaaaagaatcttagatagttttccctca

SEQ ID NO: 8469 - DNA, 2831 bp, Macaca Fascicularis
tgatgggcccggagaaaggacaggcctgggatgggagggactgtgtggcctgtcccctctcagccctggtgtggcctcctcatcccctgagccacatggctcaccctaaggctcattaccagggccctcctggaggacaacagggaaataaacagggcctgtaagccaaaacgtggcccctagggtagagcctttggccaccaggttggtgccagcttgtcactccatactggagacataggcctggacagttgtcctctgagaccagacccactaatgccagcccctgagcagctgtctcccgctgtctaaatctcctttcccattcggaggcagcaactcaggttctttctaaaccaaagtatcctcatctgcaaaacactagggttcctgtctcttgggtaacgtgcaggaagcctggcacacagtaggtgctcagtcacttgatgtttctttcatgtccttgaccccagccttatctccaactcactgggccactcacatggttcccagggctcacgatgatgcagagaggatctgtttattcagctcagacggcccctcttgaaggttgcccatccaagtgtctaagaatgcccattttgcaaagggaccaatgaggagggcatccccccaaggcccagggatgccctagcataatagccccttttccgggactttctccaagtgctaaatgctccacagatgttggcttgtctagttctcacaaagtgcctatgaggtggttctggatggagaggctgaggcacagcagagaagtaacgtgacatgctcagatgcacaagtaaggggtcgagccaggtcttcctgaggaagtaatgaccttgagcagcaaaaccaaagttgtgaactcaagaggatcccagaggaggctctgcagaaggcctctagaggagatgaggacgggggtctgaccgggcctgcctgaagggagcccttggggatgctgggctcacagagaagggcgttcaaggtggaagcaaccgcatgtgcaagagccttagagtgggagccaggggcagtgtgggggccggggctaggcttggctggcatggggtgtttactgaggattccaggcaggaccactgaggccgttcccctgcagcagcaggaagcgcctgagatttctgagtgagagaggggcttgggctggggaggcagagctgtccaggaggggctgctgcaagatggagaaaaacagcctccttggaccctcaagggctgaggacagtggcggcacaaactgctggttggtttgcagagaggtccagaacttccccacgcagaccagttcatgtcgtctctgtgctgaacaggcctgagaaggggtgttccatccattcagtcctctctgggggcttcttggggtgatgagaacaggatgccccaagtaggggttctaccacatgcctgacaggcaccaggctgcaccacctcattccccagaggagccaggagcggggctgcccggtgtccagcgcggtctctcccctccaggaacacgacatcgagacgccctacggccttctgcacgtggtgatccggggctcccccaaggggaaccgcccagccatcctcacctaccacgatgtgggcctcaaccgtaagtgcagcccagcctcagtcagccctcctctgcctcccatcagcagtgaggcccgcgccctccccacagggccctgtcaatcccactcgcacttagctctgttgccttcgccctctgggcctccatttccccgatggacctgaggctgacacttctgccttgtgagccctctgggggcctggtctcccttccagtcccccggcccctctgctcagccatagtggaggtgtgtctttgcagacaaactatgcttcaacaccttcttcaacttcgaggacatgcaggagatcaccaagcactttgtggtgtgtcacgtggatgcccctggacaacaggtgggggcgtcgcagtttcctcaggggtaggtacccggagccccctccgcctgtctccagctctgcaccccaggccacacctgggccctgacctcctgctctgcctgcaggtaccagttcccctccatggagcagctggctgccatgctccctagcgtggtgcagcatttcgggtgagtgctaggggccaggggtgcctaccccgactgcagagccacccggcttcagctgagggcttcaggctatgggcagggcctgctctgggtgacatgtatgggaaatggcacccctagccctagagtgaccagcctgttctgcaccaggttcaagtacgtgattggcattggagtgggtgccggagcctatgtgctggccaagtttgcagtgagtgtccccatgcccccattaccccaaacacccgggcaagccagggatctccctgtggtggggaccggggaacccttcagccttgaggaactgtctctgctcttgcttctcctcctcccacctcttctttatgtagaaaacctcttttttcttttttcctccagggaaattaactttttttaaaaagaggttcctctccatatggttttctcaagagactacaaactataacttgcttaaactattatccaaagccagaatttctagtagcaacaaactatacaactgctgctctagccactaaataaggatcgtccttcactaattgccatggtatttcaacatgaataattttttcagcaaaaattttattgtggttgggaggtttaaagaagcacatttcaaaaacatcattattggatagaaattcacaagcttttaatctctaaaaacaagccaaaaaaaaaaaaaaaaaaaaaaaa

SEQ ID NO: 8470 - DNA, 702 bp, Macaca Fascicularis
  misc_feature (1)...(702): n = A,T,C or G
agaaaccctgnnnctggggcttggggcttctcaggatnnnngaatggcggagactgccctcagatgttccttgtccagggtgggtgcccacagtgactcagaggacagggctaggcaggagacttgctgcttctcattgggggggtctcttgggggacagannnnnnnnnnnnnnnnnnnnnacatacctgnnnnnnnnnnnnnnnnnnnnnnnnnnnnnnnnnnnnnnnnnnnnnnnnnnnnnnnnaccttannnnnnnnnnnnnnnnnnnnnnnnnnnnnnnnnnnnnnnnnnnnnnnnnnnnnngagccaggggaccctgtggctctgatcccccattttatnnnnnnnnnnnnnnnnnnnnnnnnngtgagtaaccataccttataaatgacttttgtgcctttctgctccagactcaacatnnnnnnnnnnnnnnnnttctttccatttttccaacgaaaggaaaacggaagcaggnnnnnnnnnnnnnnnntccaggacccagcnnnnnnnnnnnnnnaagaccccctgtgcccagcctctnnnnnnnnnnnnnnnnnnnnnctccctaattctcccttccttccctacnnnnnnnnnnnnnnnnnnnnnnnnnnnnnnnnnnnnnnntgccatttttctgatgcatttatttaaaatttgtactttttgatagaannnnttgtaagggctttgtt

SEQ ID NO: 8471 - DNA, 724 bp, Macaca Fascicularis
  misc_feature (1)...(724): n = A,T,C or G
ccttttttttttttttttacagcatttagaaatagaaggtaactttatagaagtaacaccaatatcctagtctgcttgtcccgaatacaattaatagtattaggatgtaagtgatattaagatggtttttattatttttttgtacactgtacttttactttttatttaaactacagctaaaagctgacnnnnnnnnnnnnnnnnnnnnnnntttatcttaatgcccagttattgaccaaatcgtactcagaagatgttattatgtcccagtctaaggaatcctttaatttggtgattaatttgacttccacatgccatttcagtgtaaattgccttattctgtctattacattattcttgtcaagtctaagctttctcatgtctgaattcttttaacactgaatctgtgatgtaaaaatgtatgatgtgctacaaattttattcataataaactaagttatagcctgttgtaatctgtaaaacatttcttgtaaattacctaatttattttttcattcatgtacagtttcttatgtaaatttgaaaaatgtttgccatggcacattctgtaaacattcccgtattcttttccttaatgcttatttgcatgaaggtaacttgggttttgcttgtttgtgttggataaccattaagccaacttcagtatctctgccttttttcttgtagtttaaccgtttctaattttgttcatattnnaaataga

SEQ ID NO: 8472 - DNA, 719 bp, Macaca Fascicularis
  misc_feature (1)...(719): n = A,T,C or G
tcaagagttgatgttgcctttttccttgtccttgtatacnnntctacatgtgtgcaaccaatcagtactcaaatgaagactagagggagaactctgcagtttttcagagtcctctctgtgtactactttctcttctctggtactttaccctgtaaactctagacacttcagcttccttatannnnnnnnnnnnnnnnnnnnnnnnnnnnnnnccaccaggctcaatctggatccctcccactagcaatacaacctggaaattctctcaaagcagttagctgagataattgcaggattcacctcatttgttttctatctctcaggagttattgccttctgttgtctgatatttaacattttaaaaatcattgtgtcatatgtttcatctagttttttagtttctgcagaagagttaacatagtttctgttatcccttcttggttggaagccacaatctcttctggacgatttttatacatgcacgttcctagggcttacttcatacataaattgtggactaatcattcttgagaatctgcatattttcaaaactctccactgaatttattaataattccagcttgtgaagtatagatttatccactatcttatatctaacaaaatctgtggtctgtggggtgagttttaggacatgacaaggatcatagacccaggttctatgaccctgtagccacaacattttccactctctcccgtgt

SEQ ID NO: 8473 - DNA, 2046 bp, Macaca Fascicularis
  misc_feature (1)...(2046): n = A,T,C or G
attttaaagaaagaatctaaatatgaacatggttatcttaaggcattaatcataaatcagagctttaagtttggaaatcaaaaagcagcagctatcaaagatagtattgaattaacaaaggaaagggaaaaaggtgcagaaattccaaagactattaaaaaactgaggtggtttgatgaaactagcagtatagaaaacaatgctgaagacagtcattcactgaagaataaaacaggaataactcaacagcattctcaaaaattctgcattcaaagtggtgctggaagcaacataattagtgtttctgcttgtgctgtaaattctgctgctagaaagaagtccagggaggattctatctctgaaaatgttacgactggagcagaccatacgcctttgaactgttttataccttcaggttataattttgctaaacatgcctggccagcctcaaaaaaagaggaaagtaaaatccctgtacatgatgattctaaaactaagcaaggtaagccacaaagaggtggagcaaaaataattagaaaaccaggatctgcaaaagtccaatcaggctttatatgtacaaacagaaaaggcactgtcattaaaccacaatctgcaagcaaagtcaacatatttacacaagctcagggaaaattaattatacctcgtcctcctccccaatctacatcaaatattagaagtggtaaaaatatacaggtgtctcagtgtcaatcagtaactcctgaaaagcctcaaaacattattacacataacggttttaattcaaaacatgtgcttccaacagaacacaatttgaatcagtggaatcaggaaagtagttctccactgtcaaatgcttgttctgatctagtcactgtgataccatcactgccatcatattgttcttcagactgccaaacttttgcaaaaataaatcattcaaatggcactcaagcagttgcccagcaagatgggacattatattgcaccaaaagaagtcctgtttgtgaagaaagttatccatctgtgactccaagaactgctgaagaagaatcggttcccttgtggaaaagagggcataatgtcctgcatcaaaataagagggctacggggtctactgttacgagaagaaaacgaattgttgaaactaagcgaagaaatattttagagcagaaaagacaaaaccctggatctgtaggacagaaggacagtgagcaaattaataattgtggacaaagtgcccagctaagttcaagtgagccaaaacaaactacaaggggtacttcttatgttgaagaagtttcagatagtacttctgagtttttgatggctgaaaacttagtgaaagcatcagtgccggaggatgagattctgactgtcttgaatagcaaacagatacagaaatcaaatctacctttaagtaaaactcaacaattcaacatctgcacactatcagctgaagaacagaagatcctagagtcccttaatgatctcaatgaaagactacattatatacaagaatccatttgcaaaaactcatccatcaaaaaaaatactttacaaataataccacttctggtaagtatttgaagaagctctttttttctttttctaggaaacttctgattttatgtacatatcaatacaggtaagaaccctgtattaatattaatatttcttgggattggtttatagaggttttctcctcaatcagctttttattataagactgtttgttagaattatgcaaatatcctctcattttaaaaaaatgtgggccgggcgcggtggctcaagcctgtaatcccagcactttgggaggccgagacgggcggatcacgaggtcagnnnnnnnnnnnnnnnnnnnnnnnnnnnnnnnnnnnnnnnnnnnnnnnnnnnnnnnnnnnnnnnnnnnnnnnnnnnnnnnnnnnnnnnnnnnnnnnnnnnnnnnnnnnnnnnnnnnnnnnnnnnnnnnnnnnnnnnnnnnnnnnnnnnnnnnnnnnnnnnnnnnnnnnnnnnnnnnnnnnnnnnnnnnnnnnnnnnnnnnnn

SEQ ID NO: 8474 - DNA, 291 bp, Macaca Fascicularis
agatgacataaagaggaagaataacccgcgtggcgctctcggcataaagcgcccgggttcagggatgcaggtgcgtcctgctgtctgctcattcgaagagcaaaggaagcagggatggtttagggcctctgaggtgacccggaatcaggaggaacggcgccgcgagaaagacgtttctcattttgtgagcagggagcccactgtccaggaagcgcatctgagccacaaagctaatcacagatcaccgagccagcgccggctcccgatttgtctgcgtggctccaggtggca

SEQ ID NO: 8475 - DNA, 731 bp, Macaca Fascicularis
attgaagtctagagtctttcagaggagttaaaactttaatatagatttcaaaagattctggatctttgaaattagacttcatatattacatatatcataatatatatcacatattatataattagagtctaagtcagatttttaatcagaagatccagaattagaagggtgagaattctgattaggattgaacagataaagaaggtgtattagtctgttttcacactcttataaagaaccacctaagactgggcaatttatgaaggaaagagatttaattgactcacatttccacatggctgtggaggcctcacgaaacttacaatcatggtggaaggcaaaagggaagcaggcaccttcttcacagggaggcaggaaagagagaaaaggaggggaaagtgccacactttttaaaccacagatctcatgagaactcactattacgagaatatcatggggaaaaccattcccatgatccagtcacctcccatcagatccctccctcaacatgtggggattataattcaagatgagatttggttggggagacagccaaaccatatcagatgtggtatctgggaatcaataagagaagaaataagcaggacatgaaactgtgttttactagaagaatttcagtaataatattataatacccttaatgttctaaaaaatagctcttgggaccttgactacaaaaaagacaagtacctggaaagtgcatcatcccc

SEQ ID NO: 8476 - DNA, 765 bp, Macaca Fascicularis
  misc_feature (1)...(765): n = A,T,C or G
tgcagagggagcactgtggcgcaatcccagttcctcgtcaaagccagacagacacgcgcgactcaaatcctacagtatggagggtggcgttgcgttgaaattccgggcctgagtttgatagtggattttaatgtagttgttaaaggtatgaattcatgttttgtaactgtagaggcaagtttttatttttaaaaaagttttgagagaataatttataagtttctgtgcagcaaagtggctaattactcattaaatacaggaaaagaatgtagtatctaaatccagctttttcttacctctggtacacttcagattacttacctaatacatattgaggggttttaacccttagttttatcaatttttctagttttattttatttttataaaataattgaaaaagaaccaaaaatgaattcaaaagttccatagatggatttttgccccttcttaattttcccccacaatgaaaacattttagaagacattttgaatcaaaatgtattacgaccattgaaagttcactattttctaagaagctgagcagctccaagggcctcgtttcaggtggtactttctatgtattgtctatgagcgtgtttctacctgtacagtggaaccatgtgaccatgtcttgtgcttgcaatatagaaaccatgcagtgctgttttgtaaattgacagtttctgtataaactcttatttacatacattggcctctctgtatgattttccannnncacctatgannnntttgaattcattt

SEQ ID NO: 8477 - DNA, 2204 bp, Macaca Fascicularis
aaaaacgacggccaaacgcggtcttgacactctaaatcacctgggtctggagtcgactcccttcgcgcaccctcactcccaatcccggacccctcccgcccctctcccgctccccacaccaacgtgtgcctccgtcacctctcagacagtggatgcgttcctgctgaaaccacccaacctacctcagggtcctcgcaagcgcagccactgcgctccgcccgccgacgtacctgtgctgcgcctgcgcctcctccgcgctctcaaggtcagcaccgcccccagcccataacctggcacccacggaagttgctttagaggacgtcctgcgtatcttcacctctgcgtggcgtggggtcgacggcgctctggagaagggaggaacttcctgtcccgcgcgcgcacaacttccggcagagcgggaagaccctctctttcgctgtttgagaggctcccggctcaaggaccgggaggtgagaggtttgggactgtcccggggactccggggtgtctggtccacgacctatcctaggcgccatgggtgtgataggtatacagctggttgttaccatggtgatggccagtgtcatgcagaagattatacctcactattctcttgctcgatggctactctgtaatggcagtttgaggtggtatcaacatcctacagaagaagaattaagaattcttgcagggaaacagcaaaaagggaaaagcaaaaaagataggaaatataatggtcacattgaaagtaagccattaaccattccaaaggatattgaccttcatctagaaacaaaatcagttacagaagtggatactttaggaggccttctaaaaaatgatgttgatgttttggactacactctggtagaagtaaaccagaatacctatgccaactgagatgcaaaggcattgcattactttccagaataccagtggctggtggatttcacagtggctgctacagttgtgtatctagtaactgaagtctactacaattttatgaaacctacacaggaaatgaatatcagcttagtctggtgcctgcttgttttgtcttttgcaatcaaagttctattttcattaactacacactattttaaagtagaagatggtggtgaaagatctgtttgtgtcacctttggattttttttctttgtcaaagcaatggcagtattgactgtaacagaaaattatctggaatttggacttgaaacagggtttacaaatttttcagacagtgcgatgcagtttcttgaaaagcaaggtttagaatctcagagtcctgtttcaaaacttactttcaaatttttcctggctattttctgttcactcattggggcttttttgacatttcctggattacggctggctcaaatgcatctggatgccctgaatttggcaacagaaaaaattacacaaacattacttcatatcaacttcctggcacctttatttatggttctgctctgggtaaaaccaatcaccaaagactacattatgaacccaccactgggtaaagaaagtatccctttaatgacagaagccacatttgatactctgcgactctggttaataatcctgctgtgtgctttgcggttggccatgatgcgtagtcacctgcaagcttatttaaatttagcccaaaaatgtgtggatcagatgaagaaagaagcagggcgaataagtacggttgagctacagaaaatggtggctcgagtcttttattatctttgtgtcattgcactgcagtatgtggcgcctctggtaatgctgcttcacacaactctgcttttgaaaacactaggtaatcattcctggggaatttatccagaatctatctctaccttaccagcggataatagtctactttccaattctgtttactctgaattaccatcagctgaagggaagatgaaggtaactgttacgcaaataacagtggcgctgagcagcttaaaaaatatttttactcctcttctttttcgaggacttctgtcttttctgacctggtggattgctgcttgcctcttttctacaagcctttttgggcttttctatcaccagtatctgactgtggcatgaatctcagttaacaaaaaagcatatccaaatcacactttaaattcaaatatttgtgcccttaaagggctgatgaaaaccagaagaaagcaaatacaatggaaaaaaaaaaaaaaaaaaaa

SEQ ID NO: 8478 - DNA, 728 bp, Macaca Fascicularis
  misc_feature (1)...(728): n = A,T,C or G
gctgtagggaccgcannnngacgtttgctgtttattnctgagcatgaaagtaatccatgttgattgtgaaaaatggaagaaagaataaagacggtaaaatcaccagtaattctaccacctacagagaactaccgttaacattttggtgttcccaaaaatttttccacacacgcgtatatatagatatattatttttacatattgagaacatctatatatacatagttttatatcctattttattcacttaacattacaagcatttccctgtgtcaactaaaatgattttgtaaggatttttatggcggtataatattggattatattattactcatcctttgggtctcagctaaaatgggttctccttaggggggccttccctgagccccaccccacctggaccaggttagtttcctctgttaggcacttgggttgaatctccttctccttccaagtccatcactcatcacctgggttgctttctatttaatgtcactctttctgggcttggtaagttcccaaaggccaggacgacatctgcttacatacccccatttccccatgcctggcacagagcaggcatgccggaaaccttttttgaataaatgaatatttgaatatcatattttatttatgcattcttatatcactggctaattcaattgtttctgattatttattgttatgaaaaacgctgtactgtgtaataaacctgaacatgtactcc

SEQ ID NO: 8479 - DNA, 728 bp, Macaca Fascicularis
  misc_feature (1)...(728): n = A,T,C or G
attataggtgcatnnnnnnnnnnnnnnnnnnnnnnnnnnnnnnnnnnnnnnnnnnnnnnnnnnnnnnnnnnnnnnnnnnnnnncaaacttctgacctcgtgatctaccctcctcggcctcctgaagnnnnnnnnnnnnnngcgtgagccactgnnnnnnnnnnnnnnnnnnnnnnnnnnnnaatgcttagggagactgatttgagtagtaataaaactctggtctcccacacagccggctctgtgtgaattactctnnnnnnnnnnnnnnnnccgtcttgatagattgactctgtctaggcagagggcaaggtgaacccactgggcggttataaaagtatggaggtttattgcaaagagaaaannnnnnnnnnnnnnnnnnnnnntgtgaacatactcgagagtcacacagcccgatctgaagtttttatctnnnnnnnnnnnnnnnnnnaaggaatggaatattcataaagaannnnnnnaaaatgtagagatttctcagaactgtggtgccattttttaaccaaatatgggactgtcatggcactggtgggtgtgtgatttagtatgttaataagtgtataatcaggtcctaggtgaaacctaggtcaaatccagtnnnnnnnnnnnnnnnnnnnnnnnnngtgagtttggcccacaccctggtttttagagtcttatcagcctctaccttatgcaaatattttaacagtttttttccttgttatg

SEQ ID NO: 8480 - DNA, 1115 bp, Macaca Fascicularis
  misc_feature (1)...(1115): n = A,T,C or G
gaaaaagagaagtcgagggaacagatgagctcccaacctaagtcggcttgtggaaactgctacctgnnnnnnnnnnnnnnnngtgccagctgcccctaccttgggatgccagccttcaaacctggggaaaaggtgcttctgagtgatagcaatcttcatgatgcctaggagggacctgacatgggacccatctgctcctccagccaactcctgtccctcacatcccaccacggtggctcctcccacctcctctggatttgttcactctgagatccatttgcagagtgggtgcttagatagagtgaagctggctggggggcgcagtggtgtgtagtgctgctgtgtatcaaaagaccaaggtattatggggcccggttactcagaatgggatgggtttcttcacctcatgttaagagaagggagtgtgtcctgaagaagcccttcttctgatgttaaaaatgctgaccagaacactcttgagcccaggcatcnnnnnnnnnnnnnnnnnnnnnacgagctccagacccctgccctgagtctcatctcagcaatgctgccacctgcttgtctttcagagttgttagtttactccattctttgtgacatgagttaagtgtctcacaacctcctcagggcaccagaggactcactcactggttgctgtgatgatatccagtgttcctctgcccccttccacccccaaccacattttactgtagcattgtatctgtgtcctgttgtcatttctgttaaccttcaggtattaaacttgctgcatatcttgagatatcttgagattctgcatgtcttgtaaagagaggggatgtgcatttgtgtgtgatgttggatagtcatccacgcttagtttggaccattggaggaacttagtgtcacacacaaatggggctagtcctatgcttagaataaggcctgtctgcccactctagaagagcccaggttggtgagcatttagagggaagcagggcagaactctgaacaacaataagtctctatgagcagagacccctttattcttgttacccacccgtacggacttgggatcaatcttgccaaatatttggagagattgtgtggatttaagagacctggatttt

SEQ ID NO: 8481 - DNA, 705 bp, Macaca Fascicularis
gcagaggagacagtggcagcacctgtgtggtccggccactgtggcaatccatctgccctctttggccctccctcaccttctgctgatacctcttctctccctctcccaggaaggccagaactatcccgacctccacctgccctgctcggagctggagtgctggatccctggcacctgcctggccccttaacatagacccacgcctgctaacctgtaggctccactgggacctgctgtcctgtcctgcctgaccctgggccctggagcagcaccagccccagggtgtgggcctgggacttgggccagaactgagccctcctgcaggcatttggctgccctgggggggcccactgcctagggaagaggacaggtggggcccagcaccttgtgccacctcccactccacacaccgtccttccccctcactttgcaaagagtatttttctagcgcctgggctggacggttgtttctaaaactattttggtacctggtcctgggccagtccccagcctgtcatgagtgtgtgtgtcttgagtgtggatgtgactgggagctctgctgggcatccacagctggggcctagtcaggtgtgtgtgttgtgggggggtggggggcccaagatgagtttccctgtagattgtaccttggggtttttttccgttattttgttaaaattagtgccattttaatattaaaaatactga

SEQ ID NO: 8482 - DNA, 757 bp, Macaca Fascicularis
  misc_feature (1)...(757): n = A,T,C or G
gaaatgtgaaagnnnnnnnnnnnnnnnnnnnnnnnnnnnnnnnnnnnnnnnnnnnnnnnnnnnnnnnnnnnnnnnnnnnnnnnnnnnnnnnnnnnnnnnnnnnnnnnnnnnnnnnnnnnaacatgactgtggatattctctnnnnnnnnnnnnnnnnnnnnnnnnnnnnnnnnnnnnnnnnnnnnnnnnnnnnnnnnnnnnnnnnnnnnnnnnnnnnnnnnnnnnnnnnnnnnnnnnnnnnnnnnnnnnnnnnnnnnnnnnnnnnnnnnnnnnnnnnnnnnnnnnnnnnnnnnnnnnnnnnnnnnnnnnnnnnnnnnnnnnnnnnnnnnnnnnnnnnnnnnnnnnnnctatgcattagagttgatgtgttttgtannnnnnnnnnnnnnnaaaatcatattacaagtacttannnnnnnnnngtctcttgatagaattatcatagctctatattgaatgaaagccactgtgcttatgttttgattggaaattcctttagtgtcannnnnnnnnnnnnnnnnnnnnnnnnnnnnnnnnnnnnncatagaagtgtannnnnnnnnnnnnnnnnnnnnnnnnnnnnnnnnnnnnnnnnnnnnnnnnnnnnnnnnnnnnnnnnnnnnnnnnnnnnnnnnnnnnnnnnnnnnttgactttttaagggctgtgnnnnnnnnnnntctcccttnnnnnnnnnnnnnaattannnnnnnnnnnnnnnnnnnnnnnnnnnnnnnnnnnnnnnnnnnnnnnnnnntt

SEQ ID NO: 8483 - DNA, 1794 bp, Macaca Fascicularis
  misc_feature (1)...(1794): n = A,T,C or G
gagaaccttttccacagcaagaggcagagtgctgcaggcagaagagtcccagccttggaagcagagatctcgggttcaagtcttgatgccactaatcacacagaatattgtgtgcaaagctcacagctgggaggcgcagtgatgatgttcgtcatctgaccttcacaagccattgccagcctccatgtcccacgatgcagacgaggcacctgagatcagagggtgagtcacctgccccaggtcctgcctcccaaaccatcagacctcagacttgaactaggcctctttgaggctcagctcaaaggtcctctgatctcatgtttctggaataaacccaaaggcagctttctgggtggagacacccacaggaagacctgtgcactcccgctctgacttcctgagcaggtgaggaggaagcacacacaggaaggggggcgaccgtatgactgggctgcatttctggcaggtgcaaaccactcctagggtattggaaggaggcagggagtaaggaccagggcacaggagtcgcgggctctggactctggtccaaattccactcgccttccggctggtcttggttttctcatcaaggtaattggtagggtgccttcagggtcaatgatctgatggccacaagctctgagaggtctgcgagggctggaggggcagcaaggcctccctgggagccggccttggaggacagtagggatgggaagggaaggcaaccctgtccccagggctctagtgacactgtaacaaatgagtacagaccccctggatttcagcactgaggaccctccggcttgttccctaactcccaggacctctggataagaagtgggctttcattgcactctgtctggctcaaatccctgcaaccttctcaccagactcagggcctgacttctactggtcatgtatgaggactcgggtgtgttgaggtgtgggaagaggctggaggggaagggaagtcacatgttcccccacaacgtttctcagagacctcctcctgtcctgaggccattgggtgtgtcagtgttgctggaaatgctccccaacccccaattccgagcatttagtctaggtaggccttgtcgtggagccagcttgtgggcctgggccagggggcgtgtgcttattttcatggcagccttatataaaaagcacaagggtataaaagattgatgctagaatcagagaccagcaagaggaagatgggcttgggacctggggagggaagtcttaactctcagattcagctacatttggatcaccagaaatcagatggtgacaggtatctctccaatattatttttgagtgggcaaaatctttaacctttctccacctcagtttcctcgtcccgtacaggagataataacagtgcctccctcaaagggctgttgcgcggtaaatgaattaatacctgtgcagcactcagaatagtgcctggcacataagaaattctcaatcatcgggctggatgcagtggctcacgcctgtaatcccagcagtttgggaggctgaggtgggcagatcacttgaggtcacnnnnnnnnnnnnnnnnnnnnnnnnnnnnnnnnnnnnnnnnnnnnnnnnnnnnnnnnnnnnnnnnnnnnnnnnnnnnnnnnnnnnnnnnnnnnnnnnnnnnnnnnnnnnnnnnnnnnnnnnnnnnnnnnnnnnnnnnnnnnnnnnnnnnnnnnnnnnnnnnnnnnnnnnnnnnnnnnnnnnnnnnnnnnnnnnnnnnnnnnnnnnnnnnnnnnnnnnnnnnnnnaaagaaaaaaaaaaaaaaaaaa

SEQ ID NO: 8484 - DNA, 712 bp, Macaca Fascicularis
  misc_feature (1)...(712): n = A,T,C or G
gcnnnncatcagcttntnntacttcattctcctcatagtctttatcatgagggattctgtatcctgtctctcatctatactttcttgccttcctggctgtgatttatttgtacagcctacacaaaaaccatagggtcaagatccatgtcttactccaacactggctgctaacatgatcttcttacataccatatatttgcatttttattcttcttatgcaccaagaaatgttttcttccatgttttcttcaagtgtaaaaaatcacagctaaatgacctcactcatgtatgaataagcaagtgcctttttagtgttgcatttggctgcatagctacaatgatggcattttaacttattcatgattagagatgatgatatggtttggatatttgttgtgcccaaatttcatactgaaatgtaatccccagtgttggagatgaggcctgatgcgagatgtttgggtcatgggggtgaaccctcatggcttgatactgtcctcatgagagtatgatagtgagtgagttctcaagagatatgactgtttaaaagtgtatggcacctcctccctgccctcacactctttcttgcctcctctctagccatgtgaggtgcctcctcgccgttcacctgctgccatgattgtaaacttcatgaggcctccccagaagccaagcagatgcaagcatcatgcttcgtaaagcctgcaggacc

SEQ ID NO: 8485 - DNA, 708 bp, Macaca Fascicularis
  misc_feature (1)...(708): n = A,T,C or G
ctgtnnnaggggaggaagctgntctccccacnnnnnnnnnnnnnnnnnnnnnnnnnnnnnttaggccctgcactccatccggggacggcccctcatcaccnnnnnnnnnnnnnnntgttgactggaccgtcacttcccacactgctaattattatgaaagctgtctctggtcttnnnnnnnnnnctnnnnnnnnnnnnnnnnntcacctttacaggatnnnnnnnnnnnnnnnnnnnnntgcatggaactcacaagctctgtcagctgtgcaggacaaggaatgcctgctctggggggcacagaccaactatnnnnnnnnnnnnnnnnnnnnnnnnnnnnnnnnnnnnnnnnnnnnnnncttcatttaaagcaaacnnnnnnnnnnnnnnnnnnnnnnnnnnnnnnnnnnnnnnnnnnnnnnnnnnnnnnnnnnnnnnnnnnnnnggagcccaatgnnnnnnnnnnnnnnnnnnnnnnagtagaacannnnnnnnnnnnnnnnnntctggggccagcttcccttaactctgtagcctggcagtctgacccaaagttgccctcacccgaatgttctggctcttccctccctcacttttactttcnnnnnnnnnnnnnnnnngaggataaaatgggtatcaatgctaatatttccagggagaacatgaaaccagaggtttctttctttctctgtaatctgctatgaaaga

SEQ ID NO: 8486 - DNA, 716 bp, Macaca Fascicularis
  misc_feature (1)...(716): n = A,T,C or G
gtcttggtgtatgtgtgtacacaaagaaggaaagaagtctctagagcaaaaggaaggagatccgggctgggctgannnnnnnnnnnnnnnnnnnnnnnnnnnnnnnnnnacacaccaagcccattccggaccttgctcttcctgaccatggcgggcaggagtggaggaggagtggagagctgaagaaaggagtattcgtcaggttccttattgtgctgccactagatgccaggtatatgctaggctcgggggctgcaaggagaggaagacagcggccctgccctctgccagcaggcagaaccaaattctggccacactgaagaannnnnnnnnnnnnnnnnnnnngctggttaagttcagagggagggaaagagagaggagaatggatttcacggnnnnnnnnnnnnnnnnnnnnnnnnnnnnnnnnaataaaggggagagctccagggacagagaaacagttgactgtgaaaaaaaaaggagcattttttaaagaacatggcggttgggtttgactggctcaaaggacttggggaggatgtggtgagctgggttgnnnnnnnnnnnnnnnnnnagactgagagactttagatacataacagccaactgcaatgtttcgtccttcattgaatggttgaacaaaccagctgtgaaagacattttgggacatacgaatatggactgagaattagacatgagaaaattattttgttaac

SEQ ID NO: 8487 - DNA, 2015 bp, Macaca Fascicularis
atcaacaaaaagaaaccataaatgtgatccagagaaagagacaattgaagtgtctgtaaaatccgatgataaacatatgcatgaccataatcaccgcctacgtcatcaccatcgtttgcatcatcatcttgatcataacaatactcaccattttcataacgattccattactcccagtgagcgtggggagcctagcaatgaaccttcaacagagaccaataaaacccaggaacaatctgatgttaaactaccgaaaggaaagaggaagaaaaaagggaggaaaagtaatgaaaattctgaggttattacaccaggttttccccctaaccatgatcagggtgaacagtatgagcataatcgggtccacaaacctgatcgtgtacataacccaggtcattctcatgtacatcttccagaacgtaatggtcatgatcctggtcatggacaccaagatcttgatcctgataatgaaggtgaacttcgacatactagaaagagagaagcaccacatgttaaaaataatgcaataatctctttgagaaaagatcttaatgaagatgaccatcatcatgaatgtttgaatgtcactcagttattaaaatactatggtcatggtgccaactctcccatctcaactgatttatttacatacctttgccctgcgttgttatatcaaatcgacagcagactttgtattgagcattttgacaaacttttagttgaagatataaataaggataaaaacctggttcctgaagatgaggcaaatataggggcatcagcctggatttgtggtatcatttctatcactgtcattagcctgctttccttgctaggcgttatcttggttcctatcattaaccaaggatgcttcaaatttcttcttacattccttgttgcgttagctgtaggaacaatgagtggagacgcccttcttcatctactgccccattctcagggtggacatgatcacagtcaccaacacgcacatgggcatggacattctcatggacatgaatcgaagaagtttttggaagaatatgatgctgtattgaaaggacttgttgctctaggaggcatttacttgctatttatcattgaacactgcattagaatgtttaagcactacaaacaacaaagaggaaaacagaaatggtttatgaaacagaacacagaagaatcagctattggaagaaaactttcagatcacaagttaaacaatacaccagattctgactggcttcaactcaagcctcttgccggaactgatgactcagttgtttctgaagatcgactgaatgaaactgaactgacagatttagaaggccaacaagaatcccctcctaaaaattacctttgtatagaagaggagaaaatcatagaccattctcacagtgatggattacataccattcatgagcatgatctccatgctgctgcacataaccaccacggcgagaacaaaactgtactgaggaagcataatcaccagtggcaccacaagcattctcatcattcccatggtccctgtcattctggatccgatctgaaagaaacaggaatagctaatatagcctggatggtgatcatgggggacggcatccacaacttcagtgatgggctcgcaattggtaagtggactggaaaccactgtctgttctaatcttatggattataatatgtatgattaaatttggctggagcttaacaaatatactgttatgtatcactctggtaagttgattttcccaaaggctacagttttgtgttcagttgttacatttggaggtgtgagggtataatttagtggggtttttttgaacatgtaaacaaatgtctgtagtatatttgtttaataacttgatttctcaaagtacagttaccatattgaaaaagctgcttaacattatattttcaaatgcatttacatgtccctgaaagagaacagtttaatttcaatcttaggtttaataaattttccgtatctttgaaaaggcaaaaaaaaaaaaaaaaaa

SEQ ID NO: 8488 - DNA, 742 bp, Macaca Fascicularis
  misc_feature (1)...(742): n = A,T,C or G
aggcggccacagggggcatcgtggacnnnnnnnnnnnnnnnnnnnnnnntgtgcacaaggccatnnnnnnnnnnnnnnnnnnnnnnacctccacacagaggctgcnnnnnnnnnnnnnnnnnnnnnnnnnnnnnnnnnnnnnnnnnnnnnnnnnnnnnnnnnnnnnnnnnnnnnnnnnnnnnnnnnnnnnnnnnnnnnnnnnnnnnnnnnnnnnnnnnnnnnannnnnnnnnnnnnnnnngggggctcatcgaccccaagaggacaggccgcatccccatccagcaggccctcctctccgggatgatcagcgagnnnnnnnnnnnnnnnnnnnnnnnnnngtccagctacgagaaggatttgacagaccccatctccaaggaacggctgagctacaaggaggccatgggccgctgccgcaaagaccccctgagtggcctgatgctcctgccannnnnnnnnnnnnnnnnnnnnnnnnnnnnnnnnnnnnnnnnnnnnntcccgcgctcccnnnnnnnnnnnnnnccaaacagccagtagggaagtgtgtgtgttggggcaggtaggatacgtacacctcttgccccagagcagcctcatcccaggcagtgggtcttccccctgtccgaccactgttttattattnnnnnnnnnnnnnnnnnnnnnnnctcccctaaccttggtgcctgatccatccccagaccaggacagcggccactcagttcttcctccacctccagcca

SEQ ID NO: 8489 - DNA, 690 bp, Macaca Fascicularis
  misc_feature (1)...(690): n = A,T,C or G
gattccatgtgtatttagnnnnnnnnnnnnnnnnnnnnnnnnnnnnttcatccatttccaaactaaggttttaaatacggtgactgtccttggatttgcaagaatgtacaaccaaagcaagtccccttttgcagtaaaagggcattatacttgaagggccatactcgttttttcctcaggtcagaggcagagggaagagttaacagtgatcaaatagagaccttcacgagtctgttttttgtttttgttttaaagttcatttaaggctgatgatggagaaagaagggagtaaaactgatgcatgcataaagaaatttttcctattgctcgccagattcattctttttaggctacccttactccagtccttacctacatcctgaagaactgtatttagctagcaagagaggcattctcaggatatgtgagcttccannnnnnnnnnnnnnnnnggtttcaaatcaatagtatattctaacagaaaagcattacttaattgtaattctccattatgtgataaaataatctatagaaataggtatcactttggccagttctgtgcatgtagctaaaacataatgtgacacatttctgttgtatgatttgctatgattttggtttcctgagacatttgttcactacagtctcgaatatgaaatggntgtgtaaataatataaatatgcattttt

SEQ ID NO: 8490 - DNA, 1793 bp, Macaca Fascicularis
aaaaaagaagtataaatggttccaggtttcctatcgtgtttggatatctgtttgcttttattttgtctcctctcaacctgctaaatatcttcaggattctagaaaatacaagtctggaaagaaataacagacaggccagtggtccaatcccctgtccaggtgattttgctggttctaatgtatttggattgccatgtgcataacgtcctattatggcacagtgcctgtgaatgccctacctgaaaacagtgatgttatctccatgaatccatcttttcctttcaaaactgtgaataagatggatgattttagagttctacccaaatcagacagactcaatacaatgactttggataaaatcagaaagcagaagaggaacagtaacactgactgagaaacttctattgtttgcatcaggaggcccaaggacactatgtccatttccaacatcacagtctacatgccctctgtgttgacactaatagggatcccaggcctagaatctgtgcagtgctggattgggattccattctgtgccatttatctcattgctatgattggaaattccctgcttctgatcatcatcaaatctgaaggcagtctccatgagcccttgtacattttcttaggcatgctaggagctacagatattgcacttgctagcagcattatgcccaagatgcttggaatattctggtttaatatgcctgaaatctattttgattcctgcttgcttcaaatgtggttcatccacacatttcagtgcatagagtcaggcatcctgatggccatggccctggatcgttatgtggccatctgttatccactaagacatgccatcatcttcacccaccggcttgtcattcagataggaactgtggtcgtactcagggctgctattcttgtagccccatgcctagtactgataaagtgccggtttcaattgtaccacacaacagtcatcctccactcctactgtgagcatatggccattgtgaaactagctgcagcaaatgttcaagtcaacaaaatctatggtttgtttgtggccttcactgttgcaggatttgacctcacattcatcacattgtcctacatccagatatttatcacagtgtttcgtttgccccagaaggaggctaggtttaaagcattcaatacctgcgttgctcacatctgtgtcttcctccagttctacctccttgccttcttctccttcttcacacataggtttgggtctcacatccccccttatatccatattctcttttctagcatttacttgttggtccctccatttctcaatccacttgtctatggtgcaaagaccacgcagattcgcattcatgtggtaaaaatgttctgttcataaaatccaccttaattaatgcccgcatgcttccttcttttgcaatagtaaccatatcaaaacaaaacaacaatacgtattatttgagatgcttggtttgtgaaatctgccagcataatagctggttttagatcatcatagcatatcaatcaatggggttgtaaattctacctgactaatgaaattgggaagtgtgaagagtaaagtagtgaatacatactgtttgttttttctcctttattctttagcccctggttgagttattcctctaagaatatttctcaagaaggatttataaattatgcctttgtcactgaatttaaatgcacctaagtctcgttctgaaacgtccaggtactcaatgaaaacaagttgttgactttcattttctccattatccttgccttaaaaaaaaaaaaaaaaa

SEQ ID NO: 8491 - DNA, 2543 bp, Macaca Fascicularis
atcagactataaatatgtggggagaaattacctccatcaaacagttgcatatttactgtaaaagtattcccagtatgtgtgcagcatgaagaaagtattagtgcttctcagtgttctcaatgagtgtaaattctgtttatatacagcttattcatactactttccttatattttatatagttccatgacttgaaacatcaaggagttaaaaaaaaatcttagtatttcatgattaactctaaatactcttaatagcttgcaaaatattagcaattttcccattatggactattctctctaaagcaagggagactatcattcccagacgttattctaggttctttaagctcattttgggtctgctaaagtttggggggaaatgttaagcaaagtgatactgtgtatattgccattttgctttattcttctgttgaagcaaaattatggggttttattctgtgtgtgcttttcctagatgtcccatttagcttgctgagatatacctgtactatttatggtttaagttttcatttttaggtattttctccagctctgacatcattttccaaagacacactaaactgcattgcacagttcaaaaattgattacttaagggatcaatctaggcagtattcttggtcttaatagcaaacacagtacatgtctattatcactatattaattttcaaaggtttttcttttacatttaaaactgtgacaacagatacatttgattatagaaacagtctattaataattttattataaaatttcataaaccatgtttttcagaataagtttatatcaaatccaacttcccagaaacactaatagttaagtatgtcaatgtctaaataaatcattcacttgcacccatggggaagagttagtgttactgcccttcacagtgaaaaaagaagaaaactttcatttttaaaattaggagatgttacataacttgacactttagtagggtatacactagcattagtttatacaacacttttgccactggggaattcaagttgaaatgtccctcagtcatataggtctggagtacatctttctttcataatttctgctcagataattgaatagtttaccatctaggtcattttcatttatactataaaacaaaaacaaactagtccagttaaactttttatatttagaatattgcacattttctatatatgagtcattcagattagtatctgtaggttcagtcagatccaaccatggattcgagttattatgctatataaccctacaaaatacatagaaatattatttgcctttataatagaacccaagagtctgtttcaatttatgaattcagcatttgtgcagagattttgattcccaacgtttgggaaaaagtgacaaaacaatgagggaagaaggaaccaggccttagtgccacatatttttctcttggggttgtaaggtagtctcctgctttccagaacactgtattatatttcacttatagacctcattttctgtgtcaaagtataattcccatgctgaaactgtagcctaaaaaggcaaaagaaagttgtcttcattgtacaaacatattcatcactttaacaaggtaataagggaacaaaatttagtattcaagctgagtgacaataccatttcaatgagcatgtccctaagataaaccagaattggcagttaatttggatgtctagaaaatctgttcccaccagtaaaattatcctgagtggctaatgcaccttgagaaaaatctggcgtactgagtaacactcatgtgggagccaagagctgggtaagccttaccttgagactactctgtgactacagaaatacagccagcacttttcgaactaatacgccttcacttgtatcataaagagtattgcccaactgaactttgctcccactggttcaggagttatttttgcctgagcactcaccttccgattttacccaagcatataggatagaaaaaaatgcattatatttgggagctacttcacccaaattacaaaatgagtcagtgtttttagtttcaagtgacagtaaaaggatttgttcccttcagtgacttgagtgttttagttatgcattctagcaaaggaagggtagaaaggaattgaaaactaatttacactagttgctacttgggaataaagggctttttgagggaggtatggatattaaatgttttcattatgtacttatccctatgaaaacaggcagttgtttctttgaatatgcctaaataacagtattcctaaaatctgacaagtaatatgtcaattacttgatattccttgtctccagtacgacaggccactcctgacatcccatgcttgcctggataaagttcctcatttcaaacagtgtacatatttctttgcagttcattataggaaggcttgacctgtcaacagtatcttgatggcccacctatagataaaattcagcattctatttttaataatttgtatgccaccaatttgtattgtctcaataaatacttagtcatcaaaaaaaaaaaaaaaaaaaa

SEQ ID NO: 8492 - DNA, 745 bp, Macaca Fascicularis
  misc_feature (1)...(745): n = A,T,C or G
atgctgtgtgtttctgtgtgagttctgtggaagggaagcaaatgaggaggttatttacatattgtagannnnnnnnnnnnnnnnnnnnnnncagttagctttcttgctagggcttgtctgaataagtatgggctattttaaacccctgaaataagactatctaggttgaagttatttnnnnnnnnnnnnnnnnnnnnnnnnnnnagaaatgggtctattagagggaaagatgaattcagaggttgggtaaatatgaagcaggcacccatcttggaaagtatgtttttgccccaaaggggtgtgtggtatttagatattaccagggcaaggagggaaaatggtaattgagcccttacatagtataaagggatatgaatttttcttttggagggagagggtgccactttttccattacccaacaggatttggaggagagttgcttagagaaggagattagtacaaagttactataagtcatttagccaaaataataagtccaaaatttttaaaannnnnnnnnnnnnnnnnnnnnnnnnnnnnnnnnnnnnnnnnnnnnnnnnngctgcaataaagacagcatgaggacgactggatctgtctcctttttcttcccnnnnnnnnnnnnnnnnnntataaaaggcaaacgaaaattctttcagtttttgtttatatcacaatgaaaatcttgtttaaaagagaaagccaaattacatctttgtactagtgttctattaatgtaaatcc

SEQ ID NO: 8493 - DNA, 751 bp, Macaca Fascicularis
  misc_feature (1)...(751): n = A,T,C or G
agtgaggaaaaatgtgcnnntggccatgtnncaaggacaggaccaacttcagattccctaagaagccagctacagagnnnctggaacattatggtcttatgagcagtactaatagcaacctccagcctcttcaataccaagggtatccctactggttgagaaccacatgatagtttttaatgggacttttatcagcaaatggagttacaggaattctctgtaatgattctgaagaggtacttgtctggaataattgtctacctgaagaaaaaaattttatatatacatatgtgtatgtacacacacacacaaacacccctatacctggaagattgtcagagtgtaaatcaggaacaactttattgacaatcccataataaaactcaggaaccaaggcaaaatgaattggcttctaggggtctgaaccttactgcccatacaagtgttgattcattttaatgctttttatgatttctgcattggcagaaatgttcatattttatatttttttaatgactcagttttttattactaaaaatagcacatttgagtacatttgaaaaatatagaaattagaaattaactttattgaataagcaagaagtgcatcctaatcctttcttgattattaatgaggttgaatatttgtgtattatggatagctgtgtttctttgatcaaatattcctgtccttttgcccttctgttacctgttggagttgctttgtttttcgtatcaagttataggatct

SEQ ID NO: 8494 - DNA, 896 bp, Macaca Fascicularis
tcttcagccatcttcattctcaagtgtctgaagtagccatggcagaagtacctgaactcgccagtgaaatgatggcttactacagcggcaacgaggatgacttgttctttgacgtcgatggccctaaacagatgaagtgctccttccaggatctagacctctgccctctggatggcggcatccagctacaaatctcccacgagcactacaacgagggcttccggcaggccgtgtcggttgttgtagccatggagaagctaaggaagatgctggttccctgcccacagatcttccaggacaatgacctgagcaccttgattcccttcatctttgaagaagaacctgtcttcctcgacacacgcaataacgacgcttgtgtgcatgatgcacctgtacgatcactgcactgcacactccgggatgcacagctcaaaagcttggtgatgtctggtccatatgaactgaaagctctccacctccagggacaggatctggagcaacaagtggtgttctccatgtcctttgtacaaggagaagaaagtaatgacaaaatacctgtggccttgggcctcaaggcaaagaatctgtacctgtcctgtgtgttgaaagatgataagcccacgctacagctggagagtgtagatcccaaaaactacccaaagaagaagatggaaaagcgatttgtcttcaacaagatagaaatcaataacaagctggaattcgagtctgcccaattccccaactggtacatcagcacctctcaagcggaaagcatgcccgtcttcctgggagggaccagaggtggccaggatataactgacttcaccatgcaatttgtgtcttgagggctgtacccagaaggtcctgtgctgaatgtcgactcaatccctagggct

SEQ ID NO: 8495 - DNA, 1145 bp, Macaca Fascicularis
cccaacaggaatacctagacagtatgaagaaaaataaagtgcacagagacccgcccccagacaagagttgatggagacccagggattggacaccatctcccaaccccagtactcctgctctccggtgccacctcaccttctttggcttcttccctcttgcctccttctgttctttctgctctccccccttttccctccttctcacttctctctggctagcccacccctgcgctccctctcattgccgctgccactatcacctgtctctctgccagctgacgtgccctgttgccccccaaccccacacagaaccatccctgcattccacaggggactcgggcaagggtgccgaagatagacgagaggcacacagagacagaccaactggcagccaggcagccccagaggagagagacattcagacagaggaaagtctccctgcccctcattccttccaagatgagaaaaacttgccctccccccccacccacactcatgccagggaggtgggaggaagaagtgggaaatttcccttcccagtaccccaagaacgtctgagccttcaatgttgaattttttctttattaaaatgtacttttatcttataaaatcaactaatcaaaaatgatatagacgacagcagtggctctgtgaaggtggcatctctctgggcaggcaggccatggggcgtggaggagggcacaaagatgtgggttgctgtcttctggcctccagctgcatggaggccggtccagggtctagggtgtgcactgggcaagggcagggcagggcggcaggtgtcaggccggcttggacaatgaaaccctgaccttgctgcattccttttgcttccaccaccactagcctctttggaatcttggggtggggggcatctttggggattatggctgccacccgggatttgagttataaggagtgtgggagcagctttggcagatggggcacccgtgccctgcaggtgtgacaagatccaccatctgtaatgtccttggcacaataaaaccaaatgtcagtttccctgagcagctctgttctgtgtggggcaggggttgggcgggcctctgggcagaggaggcaatggcacggaccttggcttgacctcagaggtgtgagtgctctccagc

SEQ ID NO: 8496 - DNA, 2676 bp, Macaca Fascicularis
acactgagaatttggcttggcttactttatccatgtgagataaaggaatcttgtgaactgaatacagattgattattttccagtctggttttttggagaaggaattttaataagtgatgcataatatttattttctttcattgttacaattaaaacagaacttggtatcatatttgccaacactgatttgatttctggggaataaatttttctaagtgcgttttagttgaatgaaagtatatctgagatataaacatttagaatcaattttaataatgcttcagaatggaggtttataagagtttggaaacacaaatactatttaagttattacaacagtatatttttatgcattttttccaattttgagctgtgaaaaaaggttgaaattcaacttgggtacattattttcattacgatacattagcgacacatgtctgccgaaatgtccttgatttctccaaaagtaactatataaaattaaaagtaacaatgtattttacattttatgaactagtatagcggtagaagaaggtgtgtgttgaggggggtggtatgtgtggtgtgtgtgtgtgcagtaaggtatgctatagcagacaaaacacttattttagaagccatatttcctttaaatacacaatttgttctgctttaaattgtacttaattatttttatctatctacatcacattttacaaactagagtttagcttaatatgttatttattcagagaaatgtaccgggcagaaaatttagagtaaaatgcattgtgttgggttatatatgaaatgttaacaagtattaaagtggtctcaataccacaatctggtgaggaagcaagatctataggataagaagctaagaagaaaagtaattgaaaggaagcaatccaagaggaaatgcaaagacatacaccatcacataccaaatgagtgatacagttagagtgtccctccacggcaaagagggtgagctctccatgggttgctgaggtggctctggtggacaggttgctagctagagctagactttaacaataccaaccgagacttgattgaccatcaaatatttgatatgagcgaattatattggagctacctgcttccttatatacttaaataagttgtagttgggcagtcatcaaaatatagtagttttgatgaaactttattgtttatcaaaatattataatcccatttaaatgtgaactcacttggaaggttagtacttttaagaatagttccacttaggccaggcgcggcggctgacgcctataatcccagcagtctgggaggccgaggagggtggatcacttgaggtcaggagttcgagaccactctggccaacaaggtaaaaccccatgtctactaaaaatacagaaaaaattagctgggcatggtggtgtgtgcctgtaattccagctgcttgggaagctgagacaggagaatcacttgaaccccggagacagaggttgtagtgagccaagatactgccactgcactcacgcctgggggacagagtgagacttcatctcttattgtaaaaataaattatcaagaaaataatggttctgcattagcctcaggagatatgtcttcatttagtgtaaatcattgttaggtgtccaaaatagcaaatgggttatattagtacagctgcttgcacatggcaggtttttaggtgtaagtaaagagagttagtcctaaagaatctagatttgactaaaggaagatcactatgctcctgataattttggcccattatacgttaatatacataaatactatcttgggaagtatctaaaaatcatcatcatgtcagggtttcagtcagctgtttcgttattggatatttcttgaaaaaataatgggtcatttaaagacctaataacttgagttttgtttggcggatttaatgttcatatgttgttgatgtgatcatttagcctatacttcaattaccgggggcctctatgaactgttttgtaaatttggagatagtcgctttgatgcagctgtagaataaaacaagaacacctaactaaatagcctttcatctttccttcaaagcgagaaataaaaataatcattgcaaagtaatgcttttttgtgtttcttagattttgactttcctgatcacctggaagttaccaacattagtttgtcttgcaaaggcaacacctgcagaacctcttctatggaagagagattgaactaaatgaaattcatttttcaagtaaactttttgggagctttcattatactactttggttctcatagtatttaactctagatttttgcttttatctttgtataccacgtaattttagaagacctttttaaactatagcatcttaaccaccaaatatttattaaacctccacatccctgcattatgccaaagaccaaaaagtgaaactctaagtcaagtcatcaaaagtgtcaggtttacttctcttttttcttaagtgtcaacattataattcttgaccctaaggagacattttagaattggttcctgggttttagtgggacttctagagatgcttcagttaaaaactatcatgcgttaagcaaatccatgctgtgaagtcactaaaaggtatatataggttcgactagagcattcgtttgtttttcttttgcactgtaaaaaaaaaaaaaaaaaaaaaaaa

SEQ ID NO: 8497 - DNA, 769 bp, Macaca Fascicularis
  misc_feature (1)...(769): n = A,T,C or G
gctagtatnnnnctgnctctagtgctgtgtgaattgagacaggtctggctgcacatggaatcnnnngagaagcttaaaaatactcatgcgtggatcccacccccagagacttnnnnnnnnnnnnnnnnnnnnnnnnnnnntttaaaagagnnnnnnnnnnnnnnnnnnnnnnnnnnnnnnnnnnccactacattagaagactgaatggtttaatttaagtcctatgttatgaattggtctaagggataagatttggggtctaaccnnnnnnnnnnnnnnnnnnnnnnnnnnnnnnnnnnnnnnnnnnnnnnnnnnnnnnnnnnnnnnnnnnnnnnnnnnnnnnnnnnnnnnnnnnnnnnnnnnnnnnnnnnnnnnnnnnnnnnnnnnnnnnnnnnnnnnnnnnnnnnnaaagctttcagtcttgttttcaaatacacttttgtgtgtgtgtttttattttattttatttttttaaactctggctatttagatgtctttggctgtgtctttggtnnnnnnnnnnnnnnntcaggatttttaaggaaatagtttcttatatttagattagtccttaaaaaaaaatcctagaagcattctatattttttgtctgttggtctcctttactggaagggaggagtgggatgcctgcagtttccttccttttgaggaaagcacacagcagatcttaaaatatttttgactcttacaggttgagattgctagagatggaatagtactnnnnnnnnnnnnnnctgcactccagcagcc

SEQ ID NO: 8498 - DNA, 649 bp, Macaca Fascicularis
  misc_feature (1)...(649): n = A,T,C or G
tgcacagcagggcacannnngcagccccccccagcctgggcagctgttgggagcgagcaggagcaggaggcgggaccagcctgggccttgactggtctggggcctccagccgcgtcctctgcggcccctgcctggctcccagggcccaaagcctgtcccaggagcaagatgctggctgactggcctgagtgggaagcatgctggtcccagcagcttctggggaagctctggcacagccaggagtcaagactacagcgtccctgagagcagggaggggccttttcctcactccgcatnnnnnnnnnnnnnnngcggtgtgtcagtaactcttgtctgtgagagaacctgaggtgtagccacatgtccagctgccttccgcgcacacctgacctccctccaggctaccccctctgtaggtgcacatggttctgctgttggttctaagcggggcctccactctgatggttccactcgggaaagctggctttatcctgcaaaaccagctgacctcagtccctccacctccaagaagcctctgtagatcttcgttctgagttcttgtccactaacaatacccaccatgggctgggcannnnnnnnntgcctgtaatcacagcacttcgggaggctgaggcaggaagatcgcttg

SEQ ID NO: 8499 - DNA, 762 bp, Macaca Fascicularis
  misc_feature (1)...(762): n = A,T,C or G
acgacaacgaaggtgatggtgatgaagagggaaaagaggaggaggaggaggaagatgcagaggctggttcagaaaaggaggaagaggcccggctnnnnnnnnnggaggagcagaggatggaggggaagaagcccagggtgatggcaggcaccttgaaactggaggannnnnnnnnnnnnnnnnnnnaggaggagagtgannnnnnnnnnnnnnnnnnnnnnnnnnnnaagaagcgggagaagtacctgtacnnnnnnnnnnnnnnnnnnaagaggcgaaaaatccgagaggcnnnnnnnnnnnnnnnnnngcggaaagcccacgatgaggcgatgaggtctgagaagaaggccaagaaagcaaggccggagtgagtgcctgcggcccctcacagggctgagaccagcccctagcagctggatgtggcagaggcaggccagaggacctaagtgtgatggaccagagtcgcttctcttctcctcctcctttctccagccagccctgacccctcatgctctctggctaggctggtgggcagccctggcctcccttggatggagctgccctgctggtgcctaggcagagaagagnnnnnnnnnnnnnnnnnnnnnnnnngcttccaggagccagtgacatgaggtgcaggggcccacccagccccctgcctactgcccccactcatcctggctttccacagccccctcccacacagttggacccgtgattctcagggtgctgtgatggggtgagggtgggggggca

SEQ ID NO: 8500 - DNA, 748 bp, Macaca Fascicularis
  misc_feature (1)...(748): n = A,T,C or G
acatgatctagtaaatgtagagagagaaaaagaggaagtgttcactttntaatacactgatttagaaatttgatgtcttatatcagtagttctgaggtattgatagctttctttatttctgcctttacgttgacagtgttgaagcagggtgaattaactagggcatatatttttgttttgaagtaagttgtttcatgatgttttctttggaatttctggataagttcaggaaaacattctgcatgttgtatctagtctgatgtacttatccatctcattacaaacaaaaacacagactgcattttgtagctctgtaatccttgaatacagaagtaaattttcttctttcctgactttgacattgtagctatactgtttccatttttatttttacaaatcctttgggtctaattctgtgagcctacctatagcactggattaaaatgtctgcatcatttctttagttatccagttaactttaaaactgttgtaaaagtgtaaaccagcccatgacagttttttgtacatgttaaagaacttcattgttcagttttcatgattattgtataaggaagactgatatagatgttctatgctgtcctggaccatgttaattacacttatgatgtattttggttccacatcacaatgatttgtccccagtgacccttttatcctttctaggcacatttttgttgttgttgttgttgcagttcccctttgcattgtattgctttgacaactgtaa

SEQ ID NO: 8501 - DNA, 711 bp, Macaca Fascicularis
gtcgctatgacataatttgcctattctaggtaactaactcatgtaagtggaattatataatatttgtctttttaagtttggcttatttcccttagcatgttttcaaggttcacccttatagaatgtatcagaatttcattccttctatggctgaataatatcccactgcatgacctcaccacgttttgatcatccactcgtctgctgatgggtccttgtgttgtttctatccatctctgtcagctcgggctgctgtgacaaaataccgtagcctgagtggtttaaacaacacacattcatttctcacagttctagatgctgagaacccaaaaccaaggtgctggcagatttgagttctggtgagggctctcctcctagctgtggccaccttctggctatcttcttacatagtgaggagagaaaggaaggctttggtctgttttcctcttcctaacaggacactaattccactatgggggctccaccctcatgacttcatagaaatctgattacctcccaaatgccttactcccctaataccattgccttgggggccagggatttaacatatgaacttggggcatgatgatcaggcacacattcagcctgtaacaccatttagattaccatctttggacctaaataaatattttaaagttgtatttttttctgattatataagtaacggatgctagtaaacaaacttcaaaa

SEQ ID NO: 8502 - DNA, 775 bp, Macaca Fascicularis
  misc_feature (1)...(775): n = A,T,C or G
annnnnnnnnnnnnnnnnnnnctccacatgtatgacagagacaaggttccggatgannnnnnnnnnnnnnnnnnnnctacctggaggggctgcagggccgggcccgcgagctgacggtccagaagnnnnnnnnnnngatgcgggagctggacgaggaggaccccgatcccctcnnnnnggnnnnnnnnnnnnnnnnnnnnnnnnnnctgcagctgctctcctagcggnnnnnnnnnaggacggggccactgcccnnnnnnnnnnnnnnnnnnnnnnnnnnnnnnnnnnnnnnnnnnnnnnnnnnnnnnnnnnnnnnnnnnnncagagcctcacaagggccccttctgtcctccagaccctnnnnnnnnnnnnnnnnnnnnnncagtgacgnnnnnnnnnnnnnnntcagcacagagcgtggacgctctggaatcacccagatacctggccttggaggggccctggagccctgggaatctgcttgggagggaaatgtctatttttccagcaggaatattttagagattgggccacgctgnnnnnnnnnnnnnnnnnnnnacctgtaccttccgcctgattccccatccccctgcgtgggctgcattcctggtcccctgcccgcgtccatccaggggcctggctgttgcctgttttcctttgaccccacacagccnnnnnnntggtcatggggagtccctgctgggggcttgtggagtcagatcacatacctgtgcagaaaccgtctctggccgcattgaaataaaacacgacccac

SEQ ID NO: 8503 - DNA, 759 bp, Macaca Fascicularis
  misc_feature (1)...(759): n = A,T,C or G
gcagtgtgcagnntgctccnnnncagntnnntgcatcagtgtgcagagctgtgctttgaccagaatgctttggtaaacgtatcaaagagatggatctgtctgtagaaactctgttcagcttcatgcaggagcgccagaaaagatacgccaagtacgcnnnnnnnnnnnnnnnnnnnnnnnnnnnnnnnnnnnnnnnnnnnnnnnnnnnnnnnnnnnnnnnnnnnnnnnnnnnnnnnnnnnnnnnnnnnnnnnnnnnnnnnnnnnnnnnnnnnnnnnnnnnnnncttcagcatgaagcccgaccgcgnnnnnnnnnnnnnnnnnnnnnnnnnnctgcctggggccgggagccccnnnnnnnnnnnnnnnnnnnnnnnnnnnnnnnnacatcgtatnnnnnnnnnnnnnctggaggccagcaggaggctctggnnnnnnnnnnnnnnnnnnnnnnnnnnnnnnnnnggcgtgaaaatctgactttgcccaactcttttccttgatgcagtttccctatgtgaaaggaaccannnnnnnnnnnnnnnnnnnnnnnnnnnnnnnnnnnnnnnnnnnnnnnnnnnnnnnnnnnnnnnnnnnnnnnnnnnnnnnnnttatttagttgttttttttgtttgtttgtttgtttgtttaattgagagtatgtagcgtagtccaggtactggaatgagaatatggagacaaggggnnnnnnnnnnnnnnnnnnnnnnnnnnnnnnnnnnnnnnnnacattttcagtggg

SEQ ID NO: 8504 - DNA, 754 bp, Macaca Fascicularis
  misc_feature (1)...(754): n = A,T,C or G
gctgacataataaataaanacaannnatnnnaaattgtgtatgcagagggtggcagacnngaaggctgagaagagaacaagttctggaaggctgaagacaagggcagagatttcagaagagccagggcattcagacccagttacagtggagtgatgtggtgaatacactgtgattcccactaagaccctgggaaggccatgcactagcaatgatgaccacgtgctggggctccctaagagggagggcgaagctgaaatagaccctaacaagtcctacatttaaccctcccagaataaaacccaacactctttccaagagataacataatccagagcctcaagtgtatatcgtccgcaatgctttacataaaccctttctttcatggaggatatttagaagtctcctaatccttcagaccaccccaaaatctatctcctttctgatccatactactttcagtgttcctgtaccaaaatatcagtttcatcacgttgtttcacttggagtaggaccagtggctcaccactacctagggatttgtttccaaagtcctttgcatgtctcccaatatcccctgtcatcaagctatcacttgctgttgaggagagttcaagaagacgttcatcagaattaggagagactctcgctggtcacccttcttgaagaaaaagagtctacaaggcacaaggctgcctccaccggcttctcctcaacactttccagtttacctattgccatggaatttcatgcctc

SEQ ID NO: 8505 - DNA, 1575 bp, Macaca Fascicularis
atttttggctccatactctttgatcatttcatacaagaacaatttttctaatatcttctatagagagaataggaagataatacagtcttcccttcgacaatattgattgagcttttttttttgttattgttagtttagaaaattttagcttttattcataatgccatgtgcattttttaggattgctgtcaaatttggaaaattatcaagtttctttcactgtaagtatctttctgtaacatttggaacacttttccatagattagtttttggctctgaacacttatttcaggccttgttttctcctttcttacctcatcccttcttggtgctgaataacataggccacatttatttcacaatctttggcccgtcatctttgggccacaacacaaggggaattgggacagtaaatggtaggagcatcctccaccaggacccagagcaataacttaccttacgtagggcacataaacatatcccagtcattcccaattaaatgtactcccagctctgctggctcccaaaatgcctatgcacactaccatactccttggcaagggtgtgtgtgtgtgtgtatgtgtgtgtgtgtggtgtgtgtttatgtgtgtgtatgtgaaggaagaaaagttggagtggaagggagcaatcttaatggttgtggtaatagatttcattttctcaggatttagaaaaacataagtctgtatgaaaatattgctagggctcctcctatgttcttggaagaggcccttacaagtgcgggtcccaaggcttaagcttcattatctttacagtaaatttgtctttgctaacatgtattgaggattcatcaaattctccagagaaagggtgtggcactttccctcaccagcaactccatctctcaggctcacattcacatgtcataagttaagcataagcttttaaatcctctgttttcaattggtgctgtctcaattctcccattagcaccatcatccccctcactacaaaagcctttcattttttttttaagtgagcatatgcaaatattaggctgactctggacataaggaagagttaacatccatttcctctcataatatttcagatggtccatttcaataaacagcactattgtattttctatccacattagctttgctggtgagttttattttatactcaacacagagcatgcatagctgtcagttgttctgctattacaagtcctgtctgctaaatgctttctcacagtagtggcattgccaggctgagtgagtgtcagattcattttgtgtagaaatagcctgtcaagtacactctacctgttttcatttcattggagaaattattaagatcttggtgggtgaacgtatatatgtgtttatgtcagtctggactgttgatttgcacctttcctttagactaatgagtggtggactccagagagttttgatgatttatcttagcaaatgggaattggcaaaatttcaggaattatggaaaaattagcattaattttaaaaatattgtttatataatttcacacttcgctagcaaagaaaaaaaaaaaaaaaaaaaaaaaaaaaa

SEQ ID NO: 8506 - DNA, 735 bp, Macaca Fascicularis
tcatcaagtaaacactacatgtctaatcatctcagagttgtggctgttatctcttcaggaattggtccacagggtaaatttcaacaattcatatgttttccattgtcatttctgaagacctttgagatgagagaaaggaaatctagtggaacaggaaagagagttacaccttgtgggtgtgagtttgggacctgttggccaaagggaatgtcactccctggaaacaggttcagcatgtttgcacttgttattttgtagctttaatgatttttgttttctaatgtctctaagcttggtgtttagagctgcttcatattttaaactagttccattccacagtactagttcaaaccagttcttttacagcctcctgggtgggtcatcttgacctaaactcttgtgttgtcacattttgagatgttttcatagcagaatgtaccaaaaagtgcacaaggtaaaggtaatttacagcaagaaacaaatacacatttgttttatttcttgactttccctaagcagataagcagaaacttgtttaactcattactttgatgtgtcttgcatatttttgactaaaagttataggaagttattcctctgggggaatcttttacaggtggaggaatggggatagcagtatagcctcagattcaaactggcatcaccctaaaccctgtaggccagggtggaatgaagtcagctcctttttatagttgaaatacaaatttttattca

SEQ ID NO: 8507 - DNA, 758 bp, Macaca Fascicularis
  misc_feature (1)...(758): n = A,T,C or G
caggcctccaannnnagggatttatttgggggcatatactaggggcaatatggtttagcactgaattcaatttgtctttaggtctatgagtgcagtctttccttgtgaaaggttttgggcattgtacaacccactctgcctagaaggtgtggaggactcagcacgggcagggtcgccctggcccgcagcacgtgagcctgcactcactgtggcctttgtaacaaaaccagttgtggtcctcagcatttgaagcagctgcatacttcagagtaaactatttttcaatatttagttttgtcacaagaaatcgatcattgtactactctcacttatagcagttaaacagcatagaactaaaaacctgtctgcatttccattttttctttctgtatggttgtgggttttaggacatagagtgttagaagggtttcttgatcatgtcatgaattctcctttgtcctctttctcctgtttcatttcttctccgcctgctgtatattacctgagctggtgtcgtatcttnnnnnnnnnnnnnnnnnnnnnnnnnnnnnnnnttcccactcttgttggctcttctgatttatgcacagatggttcccagcatgtgtccagtgcttcgtggatgggaccatcccagcaactaatcagacttcctgccagtgtcctgacccccagggcaccctgttcaaccatatttaaagattggaatttgtataaagttgcttccaagttttataatgcatcattttacatctttc

SEQ ID NO: 8508 - DNA, 732 bp, Macaca Fascicularis
  misc_feature (1)...(732): n = A,T,C or G
gtggtaggattgtttgaggccagcctggacatcacagggagaccccatctcaaatttagccaggcaccgtggcttatgcctgtaaccccaggactttgggaggctgaagagggaggatcacttgaggtcaggagtttgagaccagcctgggcaacatagcaagacctaaaaaaattaattgggcatctgtagtcccagctactcaggggnnnnnnnnnnnnnnnnnnnnnnnnnnnnnnnntgtgatcatacactacactccagtctgggcgacagcgagacgctatctcaaaaataaaagtttaaaatttttttaagaaaagaaggaactgcccctgaggtaaaaaccaagggagggcctcccagaggtcaggtggaaaaagttttaggaaggaggaagcagtcaacagggttacctgttgcaaagtacttaagtaatatgaggactgatggtaaacttgactaccgttggacttcactagtggggaagaaagcctaattaaaatgcactcgagactaacagtcgcgggcatgaaatataatacaggtatatggtttttattatgtgtgcatctgcttcagtgataggagtgaattactcatttggatcattaggagtttcaaaatctagttaagtcactagatttgtgttgatgtaaattcattctgaannnnnnnnnctgtcagtaacttactgcaaactaaactggtgatgataattatggtaaaatg

SEQ ID NO: 8509 - DNA, 2086 bp, Macaca Fascicularis
aatcgagcatgctaggcttggctactcgcactccacacagtttatccagagatctaaaccccgaatgaacccgaatagttatttgctacaatgtctttctcaaatctcacatgttcccaaaataagggtgcccatgcagtagagacggatccgggcaggatcattagataaaatacgaaggctttaaacgtccttctcccaacgagcagcctgggaccggcgtcggggcggcagcctcaccaggattcggagcgacatcctcgccagaattcgaaacacctaggagacccgcgcccgcctgactcccttcgcccctgggaccccgtgaagacgcaaacctccggacgcctcccgcagaaccacctgtcagagccaagcagcagtccccacctcggagcctccgacgtcctgctcgacggcgccgacagcaggagaccccgctccctcagggttctcgtggccataggcgccgcagtccaccgcactccggctaaggaggtccctggccatcacctgcccgcctatcgaccacgcccgaccctccgctgaactgagtctctcgccggatcaaccggcccgcggcgaacccagctctcgcctccggccgctccttcttatccgccctgtcccgccgcgtcgccgccgtccgagccggcagcctgctacttacctcctgacaactgcatcgagtaaaccacaccgccttgttcaacgccgtcgccgccgccgccgtcttcgtcaccgtcgcagtcgccgccgccatctttgttgtgtctccgactcccttcccgcccccctgccttgctcaagtctcgcgtgaacaggatggagggcgaaaacgaggaggggcctgtttgtctctctcggggttccgtaggcagcagtgggcagggattaagggggggtgtgtgcggggcgggtactgagtgggcggggcctagctcgcgtagctcccacaggctgactagttacccagaggcgctgaaccgagaggcctgcggcgacgatggaaagcctggcagtgcggctgctgcgcggcagcaggctggtgagtgcgttcgaggctggcgtcctgggggcccagggcgaccttggcccctggcatcacagctggcagagccttctaacgggcctcggggcgccagcctgagcccctctccacgtcgtgggcccatctccccagacccttgacccgcgggcagcccacgaccccgacccccttcaggcctctgggggcggcagctagtggcaagggggtcggggctgtctagaagctgctttggcggagcaagcgccttcagtggagtcggagggtcgcgtcaacaagatgtcctttgcaggccgttgcgtcctgagagcaactgagtcttgatctctggatctctggatacattttgcacaggtgttacctccctgatgccctaacccaccttttccccagtgattacatttcacaccccctccccccaaaaaagattgttaaaatataggcccagtctcattctgagcagggtgtctccctgttcttccttccgcggccccgctcaaaggtagtaagggacttcggagttgttcgggcttcccggccagggatagagttccctctgccccttatcttatgtctggagcctgggtttcttccgtggatagactcaccgcggcccaggggagcctgtgccggtccctcttccatgaacttaagctgaaaccagccttttgtgcttaattctgatctctgcacctacacaaactgttggttctttaacagcccctgtgttaaacatcctatgctcttcaccccttggacctattatatagcatgctttccagaacatacacatttggatacacttgtgtttgtcagtacacttcactaggaattttcccactgcttacgtgtgcttttcgtgtttcctttgcatttgctttaatgagttgggctttccaactgctgctccagtcttatgcccagaggcagaactcttacctttttactcattagagataattaatgttatttgttttacaggcctgaaatacaataaaaaaatagtaagtgattattgtttaaaaaaaaaaaaaaaaa

SEQ ID NO: 8510 - DNA, 754 bp, Macaca Fascicularis
  misc_feature (1)...(754): n = A,T,C or G
atgtcatgttgggatgtngtcattcaggagtcaatgcagttttgcaagttatggatttttgttttgttttagagatagggtctcactctgtcacccaggatggggtacagtggtacaatcatagcccactgtaacctcgaacttnnnnnnnnnnnnnnnnnnnnngcctcagcctcctgagtagctgtgagactacaggtatgcaccatcacgcctggctaatttttaaatttttttgtagagatgggggtctcactgtgtggcccaggctggtcccaaactcctggcctcaagtgatcctcgtgtctcagcctcccaaaatgctgggattacaggtgtaaggcactgtgtccgaccacaagttatgtgtttcttctttttaacctgatgtccttgagccatagcaagttatggttttgagtgcagtgccctggtagtcttcagctggtgggctctaacccattttgtagcttcccaagtacttccacccatatcttggagccccttggggaggccgtgtgggatggtgagagacaggtaccagcagacacaggtatggcgcttggctgtgctgtgtactgtgtggggcttggcaggtcaactgctcagagccttgtttttcttgcctgtatggtgggataatatccataatgaccttttaaggcctgttgtaggattttaaaaaataataatgatgtaaaatacatattctggagacccatacacagggcctgctctttaaatattgccagat

SEQ ID NO: 8511 - DNA, 728 bp, Macaca Fascicularis
  misc_feature (1)...(728): n = A,T,C or G
cggcattccctctgtccacagnnnccccagannnnngctgggccggggtcagggcttcccactagggctcccgaggctacgagccaagaacccacgcaaatgaaggtacggtggggtgcaggggcagaaagaacagggaaaatgggtcgnnnnnnnnnnnnnnnnnnnnnnnnnnnnngtcatcgcagccaagtgtcttcacctcgcagggcccgagtcctcctcggtgccccaacctggcgtctgtcacgctgtcgggctgcggccacgtcaccnnnnnnnnnnnnnnnnngttgctgcgctgctgcccacgcctgcgcgcactgcgcctagagaactgcgcgcgcgtcaccaaccgcacgctggcggccgtggcggcggacgggcgcgcgctgcagacactgcacgtggacttctgccgcaacgtgagcgcggccggcctgcgccacctgcgcgccgcgtgcccgcgcctagccctgcgggcagagcacagcgccgccatgctgcccgaccagcccccgcgcccgcgcgcgcctgccgcggccctcggaaagcttctgccgcgctagacgccgccccgctgcggcccccggggaaggagcgcnnnnnnnnnnnnnnnnnnnnnnnnacccagctcttcnnnnnnnnnnnccaccaccgcatcttctgagcctcattttccctgtcagcacagtgggaataagaaagcctacctcacgttaagattt

SEQ ID NO: 8512 - DNA, 610 bp, Macaca Fascicularis
  misc_feature (1)...(610): n = A,T,C or G
caaggtcagcagatcannnnnnnnnnnnnnnnnnnnnnnnnnnnnnnnnnnnnnnnnnnnnnnnnnnnnnnnnnnnnnnnnnnnnnnnnnnnnnnnnnnnnnnnnnnnnnnnnnnnnnnnnnnnnnnnnnnnnnnnnnnnnnnnnnnnnnnnnnnnnnnnnnnnnnnnnnnnnnnnnnnnnnnnnnnnnnnnnnnnnnnnnnnnnnnnnnnnnnnnnnnnnnnnnnnncaaaaaaaaaaaaaaaattaccagtcaagcaaactatgacccatcataaggagaaaaatcaattgaaaccaccacagctgacacctatgtgagaactggacaaggacattaaaagaattattataactgtattccatatgtactaagtagagactaggaatatatttttaaatacccactttgaattttagagacgaaaactaaaatgtctgagatgatggggtgggtggggtaggcagaaagaagaggatgggaagaagtaccaaggggaaggaggaatgatttgggtatgacggatgggtgtgtttattattttaattgtggtgatggtttcacaggtatatgtaatttctaaagttatcaaattgtacacttaaaatat

SEQ ID NO: 8513 - DNA, 773 bp, Macaca Fascicularis
  misc_feature (1)...(773): n = A,T,C or G
cagcagtcaggagaggtagaggctgannnnnagcaaggnatgngcctttgaagattggtgctgggnnnnnnnnnnnnnnnnnnnnnnnnnnnnnnnnnnnnnnnnnnnnntcnnnnnnnnnnnnnnnnnnnnnnnnnnnnnnnnnnnnnnnnnnnnnnnnnnnnnnnnagctattcgaatcctggctgcagctctgacacaacatgtgagaggcccctgggtgggaatgggggacaggaattgacagtggaaggggttctcttatctatgcttaaggagagttcctgcctctgtgnnnnnnnnnnnnnnngattacatagtcctttttattgtgaactgctttcttcattccccatccaccccttcttctccgtatctataatctctgatttttatccccctgtggtcacagaatnnnnnnnnnnnnnnnnnnnnnnnnnnggccgagcagtatgtcnnnnnnnnnnnnnnnnnnnccaaggactccaacactatcctactgccctccaatcnnnnnnnnnnnnnnnnnnnnnnnnnnnnnnnnnngggtgtctatggagccctcaccaaacccccagtgnnnnnnnnnnnnnnnnnnnnnnnnnnnnnnnnnnnnnnnnnnnnnnnnnnnnnnnnnnnnnnnnttgatgaggaacttgannnnnnnnnnnnnnnnnnnnnnnnnnnnnnnnngccagggagtctggggataaggaagnnnnnnnnnnnnnntctggctctagcttccctgccaagattttgttttttatttt

SEQ ID NO: 8514 - DNA, 111 bp, Macaca Fascicularis
atatttgtatatggtgttccctctctggggtttaggacatctctgccagaggaggtgcgcggggtctcgttacaaatctggagccccgtagagagacccctctctttgtac

SEQ ID NO: 8515 - DNA, 3512 bp, Macaca Fascicularis
gtaaacacgcactcacatccgccagtacagggcacacgcagccactcgtccccggcgcctgggtgcgtgcgctcgcccttgggtgcttctgtctgtgtgtgcccccggcttccaatcgttcctttgggagggggaggagtggctgcgaggagtgagagactggcgggcaggctgaggagaagggagggagagcagagggaggggggaacccggccgggggaggaggagagaggcaaggaggcggctctggcagcgcgcggcggcggcggcggtagcggcagcagcagcagcggcggtgcggagagcttggactgggagcccaaagctcggctgggcagcgggagaggaggagccgcaggagctgcagctctgccagctcgggccgagcctagagacaccggcctggctggtccacgccagccgcagaccgtggctgagcatggagctgtccccccgcagtcctccagagatgctggaggagtcggattgcccgtcacccctggagctgaagtcagctcccagcaagaagatgtggattaagcttcggtctctgctgcgctacatggtgaagcagttggagaatggggaggtaaacatcgaggagctgaagaaaaatctggagtacacagcttctcttctggaagccgtctacatagatgagacacggcaaatcttggacacggaggacgagctgcaggagctgcggtcagatgccgtgccttcggaggtgcgggactggctggcctccaccttcacccagcaggcccgggccaaaggccgccgagcagaggagaagcccaagttccgaagcattgtgcacgctgtgcaggctgggatcttcgtggaacggatgttccggagaacatacacctctgtgggccccacttattctactgcggtcctcaactgtttcaagaacctggatctctggtgctttgatgtcttttccttgaaccgggcagcagatgaccatgccctgaggaccattgtttttgaattgctgactcggcataacctcatcagccgcttcaagattcccactgtgtttttgatgagtttcctggatgccttggagacaggctatgggaagtacaagaatccttaccacaaccagatccatgcagctgatgttacccagacagtccattgcttcttgctccgcacagggatggtgcactgcttgtcagagattgaggtcctggccatcatctttgctgcagctatccatgattatgagcacacgggcactaccaacagctttcacatccagaccaagtcagaatgtgccatcctgtacaatgatcgttcagtgctggagaatcaccacatcagctctgtcttccgactgatgcaggatgatgagctgaacattttcatcaacctcaccaaggatgagtttgtagagctccgagccctggtcatcgagatggtgttggccacagacatgtcctgccatttccagcaagtgaagaccatgaagacagccttgcaacagctggagaggattgacaagcccaaggccctatcgctactgctccatgctgctgacatcagccacccaaccaagcagtggtcggtccacagccgctggaccaaggccctcatggaggaattcttccgccagggtgacaaggaggcagagttgggcctgcccttttctcctctctgtgaccgcacttccacgctggtggcacagtctcagatagggttcatcgacttcattgtggagcccacattctctgtgctgactgatgtggcagagaagagtgttcagcccctggcggatgaggactccaagtctaaaaaccagcccagctttcagtggcgccagccttctctggatgtggaagtgggagaccccaaccctgatgtggtcagctttcgttccacctggatcaagcacattcaggagaacaagcagaaatggaaggaacgggcagcaagtggcatcaccaaccagatgtccattgacgagttgtccccctgtgacgaagaggcacccccatcccctgctgaagatgaacacaatcaaaatgggaatctggactagccctggggctggcccaggtcttcattgagtccaaagtgtttgatgtcatcagcaccatccatcaggactggctcccccatctgctccaagggagcgtggttgtggaagaaacaacccacccgaaggccaaatgccagagatttggggttggggaaagggcccctccccacctgacacccattggggcgtactttaatgtcccggcagcaagaatggggaacttcaggctcccaatggtcactgtgcccatcccttagcctctggattctcttaatggccaggtggctgccagggagcggggagctttctggaggcttcccagggccttgggggagggtcagagaagccagccccctgggacctcccccatcctttttgcctccaagtttctaagcaatacattttgggggttccctcagccccccaccccagatcttagctggcaggtctgggtcccccttttcctcccctgggaagggctggaataggatagaaatctgggggttttcagagccctatgtgtgggaaggggagtgggttccttcagggcatggtacctttctaggacctgggaatggggtgggtaggacatcctcttcaccccagaattgcactgcttcagccccatctccagcctgatcctctgcaatcttccttctctccttttctgatacagtgactgggaaaaaaggagccattgtgaccaggggctgcgggaggcctgccctgggaccttccttgggactggtctgggaccctggggcttgtcacctgccctggctgagtcctgagccctttgcccccttcctctcgcctggggctgggaggctcccatccgactaatgtctgtaatgtgctttgagatctccccagcaaagcaccttcaggatgtatcgacaccagctgggttagggtcaagggtgcctggggagggtgaggtataatccagtaatcctgcgttgctaaaagagagggtctgtcccctcctttccacttcccagaactggcccagctgcaggcactaagaagctcctcccctgagacaagtgaggggtggtgggtgaaaggcagatggaggaggggctcagggctgctgccttcctgtcctctggagagaacccagccaggcgcggtgccccttcctctcctcaggctcctccttgcccccaccttgccccgggaaaggccaaagtccaggtgactgccctccttctttcctgtaaataccaaccatgcatttgtacagtgggccctgttcatgcaaaatccatatccatggtctcctagacctgctaccctgatacttccaccctaccccacccagagtagggcagagatgcatgtgactcacccctgcccttggtctcccagacccctgctatagccagagaacaataaagaagggagaccaagaaaaaaaaaaaaaaaaaaaaaaaaaaaaaaaaaaaaaaaaaaaaaaaaa

SEQ ID NO: 8516 - DNA, 732 bp, Macaca Fascicularis
  misc_feature (1)...(732): n = A,T,C or G
tgagaatggtggctgtgagngggnnncttggattctggtcatgcctaaagcacgtggttcacctgactgttggagcttactgtataattaagcctccttgtcttgtctctgcttatctcacagcactggtatgtggtttgttgtgactgttacagtcaggaaaagaacctcccacatcagtgtcagcacgattcccttctgatgtgcatctgtcactcgcgtaagtttccggaaaaggcagtcttgagaagttaattaagcatccatctctttcactccgtctagaaaaggctcagaaaaggcgcaaaacaaatttcctctttgggtcttactagaccttgttgnnnnnnnnnnnttctttaaatgttgagtttccaagacatttcccttctggctctagattgtttagactggaacactttttccatctctctaaggtttcagtcacaggatctgctatcctgagtcacaatagacaatggaaaaaggcacaataggagacttttaaattctgtgaatggacccacattctgcaaaatggctgttgaggggaagccaaaattaagcttagttttcttcattctggagaaaagagacattaaatgtaannnnnnnnnnnnnnnaagaggtagatttaatctcagtgaattcccaaattcacactgaaaaatacagtccatttctgattcctgaaacaaatatctataatacctcaggcatttgtaaggggtg

SEQ ID NO: 8517 - DNA, 775 bp, Macaca Fascicularis
  misc_feature (1)...(775): n = A,T,C or G
gttagcacgaatgttcacctcatatnnnnnagaagtgcaaaaatctcaatttatgtctgtttacagctctctgtcctcactgctcacagcaagggtttctgtatcagtggattttattttgtagctgctgagatgttaaggcaagcttcagcatctgcccccattgggtccacnnnnnnnnnnnnnnnnnnnnnnnnnnnnnnagagaagacacagagtccaagtggcaggacttgaggctggcttccagtctgccttagaagttaattttccaaagtacattacagatctctgaggccattaggggaaaaggaaggggtgtggtttgtctttgaaattacggttaatacttttagacagtaaatccgactggttgcaaggctatttgccccaacaatatcagcctgtaacatttcttctctttcctttgtgccactgagtcattccctggccagaggacataaatggtgctgataggaggttatcagagtaaggaaggtaggagatataggtacagggtgcttgtcattcactgtgttatttggtttaaatcaaagtgattctggggaagctatgttctttcagtgggtaataaaattggtaactctattgtaaaacaatggtgtgtgaagaaaatcaaccaatccgtaggtgttgctaactagacagtactgtgtatgttatgtgcctgcgtggatgtggatcatgccagagttcatagatcctgtttgggggtttgcacatggatcatatgttaagctttttcttttcaata

SEQ ID NO: 8518 - DNA, 441 bp, Macaca Fascicularis
  misc_feature (1)...(441): n = A,T,C or G
tggacgttttcccacattgtttacacctgaaaggactcacacttggtagcggcataaccaacggatttaccacatagtttacattcgtgcggtttctctccagtgtgagttctttcatgggtaagatataaatgtagattatcaaaagccttcccacaaaacttacatttataaggttcctcttcagcgtgaattaccaggtttcttcgaaaggtttgaacagggccnnnnnnnnnnnnnnnnnnnnnnnnnnnnnnnnnnnnnnnnnnnnnnnnnnnnnnnnnnnnnnnnnnnnnnnnnnnnnnnnnnnnnnnnnnnnnnnnnnnnnnnnnnnnnnnnnnnnnnnnnnnnnnnnnnnnnnnnnnnnnnnnnnnnnnnnnnnnnnnnnnnnnnnnnnnnnnnnnnnnnnnnnnnnnnnnnnnnnnnnnnnnnnnnnnnnnn

SEQ ID NO: 8519 - DNA, 738 bp, Macaca Fascicularis
  misc_feature (1)...(738): n = A,T,C or G
agcaatacagcaaagnnncagctccagaagcagacccagaatggcatnntnnnnngagacccagactccagcctttcttcatggaagaccagagcaaaggaggaagtaggttagggaatggtaaggctccatgtgatgggactaatgtggagaggcctggggcctttccctgaggactggatggctggagtttgggagcctgagttgacagaggaggctaagccctggcagctactttgttccagaaatctaaggtccctggagagaggctcagcttggggagggggaagggaactaacattgcagagcaccaactgtgagccaggtacaatggcagagcctttccacacctgtactcacaactagcgggtgaggagtcagagcaaataggtgtctcatgagctccccatatctcagcagccgactaccttctccattgattttgtgatgtcactgccagttctcctactgctctgaccggtctttctctgtgtccttcgcaaactcattctcaactccttagattcagtcaagtcccccagttatacacttcgatggtactatatattgttccttcagagcagttaacacagttatttcctatgtatttgtccagtcatttgaataatgatcctggtttcattggatggaaagttccacaaggtcagtgaccatttctatctgtattcaccaatgtattcccggtgcccagaaacaatgcctagcataagcagctgt

SEQ ID NO: 8520 - DNA, 715 bp, Macaca Fascicularis
  misc_feature (1)...(715): n = A,T,C or G
taatccagtctgtcactgatggacatntgggttgattccaagtctntgctattgtgaatagtgccgcagtaaacatacgtgtgcatgtgtctttatagcagcatgatttataatcctttgggtatatacccagtaatgggatggctgggtcatattaacatatgttaatattaacaaatgttcaaataggatacaaggacatccatacaatgccagtatttttcataatagtaaataattgtggaaaaatctaatctgaaactaagaggtagatacatatttgcacaagagtcaaatcttttctctaaaaaaaaattgaaaagtcttagagatcctccaggctggagtgaatggcatggtcctagctccactgtaacattgagctcctgtgttcaagcagtccccctgccttaccctcccaagcagctaggattnnnnnnnnnnnnnnnnnnnnnnnnnnnnnnnnnnnnnnnnnnnnnnnnnnnnnnnnnnnnnnnnnnnnnnnnnnnnnnnnnnnnnnnnnnnnnnnnnnnnnnnnnnnnnnnnnnnnnnnnnnnnnnnnnnnnnnnnnnnnnnnnnncttgcccagcctaagatatattcttacggaaaaaaataaaattataaaataatgtgtggtcccatacattatgtagacataaacaggttgacatatttatacgtgtaaatataaatgattatgtaaatttgtgta

SEQ ID NO: 8521 - DNA, 779 bp, Macaca Fascicularis
  misc_feature (1)...(779): n = A,T,C or G
ggacgatgaaggtagaccctgtnnctgaggtgctggagggcagagggttgnnnnntctattcccatcttagttgggttgttttnnnnnnnnnnnnnnnnnnnnaaccttaaaccttatttgaataccaacaatagctattttgggaatttcaatcttaaaaagtgacaaaatgcatttcccatttttcttcatttttaagcttaattttagtaacttatttatgatgttttaattttatcatggcctcctctttggaggctgaccttcccatgggtctnnnnnnnnnnnnnnnnngtagtggatcactgcctcnnnnnnnnnnnnnnncacaagcactcagcagccactgttgatgccttctagggaaacctaatttccgttggtaaaggtaggggcctcagaactgttctggatctgctgtagaacttcaccatgtggaatggtgacatccacacaccgttgaccagtttggaagaggttgcgttcaataaaactcttannnnnnnnnnnnnnnnnnnnnnnnnaagattttggcattgtaagaattaggagatgatcatagaaatatatgtaaagtattcaattttcaatcattttcaaattactgttataaattgtttttgctgagttgtaatacttttgagatacaatgtattccttgtactgaaagaatgaaaaaggactttttcagcatttgaggtaagttctttaacgtttcattaaaaacattttttacaannnattttgtacatgcacttgcagtattgaggttaatcat

SEQ ID NO: 8522 - DNA, 2587 bp, Macaca Fascicularis
  misc_feature (1)...(2587): n = A,T,C or G
catttttaccaatccacactccttcaagaccatcccagccccctcccagaataacaactttttcggtctgctgtttatgcttccagaaatttctatgtcatgtatatggaaagagtgtgtgagagacagacagagacatagggagaaagagtctatgttgtgtacatttctactgtgtatatatattataaaatacataatttatggagaaatcacactgatacatattgttccaaaacttgctttttttcactgtataatatgttcaaacatatagatgtagcttttttaaaagttgcttagtatggatgtactgtattcattttgccattcctcaagtgacgtttaagctgtttctaatctgtgaccattgcaaattccaccacactgcatgtacatccttacacacatatgcaaatatttctttaggatggataccaagaagtagaaccgcagggtcagggatatgttcattttaaattttattagatatcaccaaattgcttccaatctaatccttttgtatttactcatagcctagaaataaaaggctttggattattcagctcaacagctgttcaagcacctactgtgtgtacagccaagtatgttccagggtctgaactttgtcaatgtagatttaacaatcccaagaaggaaaagagcgcctcttctacatctgcaaaggaagctgctgctgttaaaactggattgaggaacttcagtactttctgattcaaactgctgaaagggcctactcgaaagcctcttctgcaaaaatatatttcttaaatgggtcacccttaaccctgagatttcattgttgttggtatcatggaagaatgattgcagtgtgccagctcttctgctgtggttttggatggactgcccctgattctgaacactaataaataccaattaaattaaatactaattaaatgctaatacatatgaattggagcaggagccagggctttttttagcccattcttaaaacttttctaaaaaacgttactcagcagtgcctggcaggtttgccagagctgtctcattgccacatccatacctcctccccagtcctgggcagccaggagcaatgggcagaattccacttccaccccctcaccccaaattacatactctcctgatcagctcaaaggtctgtgtgatttggaggagagaagcatgtgcaggaagccccatgtactcaagaaaaaccaggccagacggtggtccttggactgtgcctctctagaagagcatgcgagttcaagatcagaatctgtttatagcacagatgataccatccactggtgtttggctatgccaagcaaagaaacatgaactgtgcacatcagaagattccttccccctcagcagccatcttctcatgttgtttataaaatgcctatagccatatgaggtcatggacaactacacagtatcctttgatgtgcccagctgttgcagtcattctgtatgctgtccatgagtgggcagtggaaggagattctccctgcttgggagcagcaatgcattccagagctcctcacacaggataaggtggccagatctgctccttgggcctccacaggaccttgattccttctgagaagaatactcctcctcgggagaactgttccaatcacaagatcctgtggggctgccacttaaagcagccctttggccactagggattagtccagtatctaatcagtatcttgatctgaagttttctatcttgaaggaaagttctccctttgctgttgaatcatgagttgaaaaggtatatcacaactaccacctgttctgtccctcatctcatggaggaacctgagagaatgccgatgacatccagagaaaaaaggagagaatcccgggggcctgtccctgaggtccacagatctatgcatcccctgaagctctcctatagttctgggaacaccctggcatacgcctctagtatgtcctctccctccttttctctacagttactttccttatcttataccaaaacttatggcttttaagtcagacaagagacgcccttttgtagaccagagtgagcaccctatctggtgctgagttgcaaaccagagagtaaccatccctaaccccaaaggagatgctttgggaaaattcttaagaatacataaaaacagttggcaatctgtgatccatgttaacctaggtttgtgaaggagtttttgctatctgaatcagatttaaaataaaactcaaaccaaaaatatatcccaatgttatgtaattaaatagtaaacattctaggccaggcannnnnnnnnnnnnnnnnnnnnnnnnnnnnnnnnnnnnnnnnnnnnnnnnnnnnnnnnnnnnnnnnnnnnnnnnnnnnnnnnnnnnnnnnnnnnnnnnnnnnnnnnnnnnnnnnnnnnnnnnnnnnnnnnnnnnnnnnnnnnnnnnnnnnnnnnnnnnnnnnnnnnnnnnnnnnnnnnnnnnnnnnnnnnnnnnnnnnnnnnnnnnnnnnnnnnnnnnnnnnnnnnnnnnnnnnnnnnnnnnnnnnnnnnnnnnnnagagcaaaactctgtatcaaaaaaaaaaaaaaaaa

SEQ ID NO: 8523 - DNA, 1980 bp, Macaca Fascicularis
gctgttgtctggtgtcttcagtcaaatcatcatgctttttattaacaaacaacttctttaaaaatgtatactatttctgattactgtttcagagttaaaggggaacagtacagcttgaggttgcacatcagggtagggtagttatgacattctttattatgttattttaaactaaacatattggtgcgtgtcctgaaactgacaactttgtcactttttaaaaagcattagaaaccagtattactaacatgaaagattgatttgggcatgtacagcgatttttaatgttgggttgagattaaagtattgtttccctttaacgggtacgctttccttttggtccttctggtatggcttccagttttgattgaaggaactgaactcctaaaaccttactaagtgttacattctttacattgtacatgagaaaatgtacattgaattaaactgttactttagaaatgtccttagtaatgaaaaactaatactgtacacattgttttaatgttgatttttaaaatgtgtaatgattactaattataacctgcatgttcaagtgtgtgtcttacccctttttacacataacccctcctcccttggcttaccttctgtgtggctgcctaccaacacggtcactgaatttcaagctagtggaggttccactcttctgaaccttgatttctttgggcccgtggatgacagtagctctagcagcagcaccacaatcccaggtgtggatccggagttgtatgagttaacaacttctaagctggaaatctccacctcaagcctcaaagtgactgatgcatttgcgagactcatgtctacagtagagaagacaagcacatctaccaggaaaccgaaaagagaagagcacctgagtgaagaagctatcaaggtgatcgctggccttcctgacttaacgttcatgcatgccaaggtgttgatgttcccagccacgttaacaccttccacaagctctcaagaaaaagcagactgataactgatgtgaattggacggttactattgcttttcctttttcccatcccttccctaccatcaaaagcatacctgctctaattaaaaacaaaaaattcaagttcagctgatttgttggtaagccgcactagaaaggtatacatagtaatgtatatttatttacatactgaagtcctaaatttatattagaaaaatgtaaataatcgggggtaaacatttttgaagatttattctttttgtgttgctggggtgtatacatttatgtctttgtgaaatacactggtggtgtccttcttacaaaacttttgaaataaaaaaaaaaacctcaaatcttcactgtctgaaatccccttcagtcttttcagattgcattgactgtcctcttgatttttcatattacatgtggaattacttttgctatcataaataagctccaaagtcccccatttaattggtttttaattttgtgtatgatgggtttcagatctggcttttgttaacattttggggcttttttaatcttttcaatctggcgtagtgctgtttggccttttgcaaggtacttaatcaattgctcttttgttatagggtatggatcactgtcagaacttgattggaggggtttaaagagattgtgtctgtttaaaatcagtttgattcggagaaggaccaaattatatgaatgtcttacaatggaatttacttgttactgatttttttgttctattgtaccactattttttgaggattttgcacagtgtaaaatgacataatcatagattgctatggtttaggctgtatatacagtgaaaactatgggttttaaatgtttggggaaattcctatggaaaaaagagagacatgtagaagaacctctaacaaggttaatgtgcatgcccaaggtcttttgaaatttcagtgtgtaaatttccttttagcttacacaaaaataaaataatttaaaaaaaaaaaaaaaaaaa

SEQ ID NO: 8524 - DNA, 716 bp, Macaca Fascicularis
  misc_feature (1)...(716): n = A,T,C or G
tcaatttgaggctgtaactagcattaaaaagcttttttgaaatatcagatatccaagtacatttcctatgggaagcataacccttttttggtgaaatatctagttattcacatgcagtgtatttggggtattgtgatggcgtgactgtttcttacagtgggttttggtaaagatgtgtcaaaccctagggctgagtgcagtgggtcccaacctgtaggaaggcggggcctatgctggatatgtgtacacttggggtcttttcctgggcctgtggcttttgtcagaacctggtggtctgtgactcgccatagatcgagaaccactgacctaaaagcagaggagactttcagtggtgtgggccagtgggagtggagctgggggcatgaggagcaggtacaaagccctgggcctgctcctgctgtggcgtattgtccatggcattaagccatctgggccagatcctcctgatgaggaggcctctgcacggccaccctgaaagacagcggagatggtggcagggagtgtgttgatcacctgaggtcagnnnnnnnnnnnnnnnnnnnnnnnnnnnnnnnnnnnnnnnnnnnnnnnnnnnnnnnnnnnnnnnnnnnnnnnnnnnnnnnnnnnnnnnnnnnnnnnnnnnnnnnnnnnnnnnnnnnnnnnnnnnnnnnnnnnnnnnnnnnnnnnnnnnnnnnnnnnnnnnnnncacaccactc

SEQ ID NO: 8525 - DNA, 732 bp, Macaca Fascicularis
  misc_feature (1)...(732): n = A,T,C or G
agnnnacaggaatgaaagagtataggtatagatattcatcaagcagtacaaccacatgcagtgggggagacaaaggcaagaatcagaatcaagtctgtcaggaggtatcagaatatacagtgaggatgtgagcaataaacagacaagaggctctgaggccagtggttaccacagaaaggaaagaacaggctctggttccttctgtgtagatagcaacaccccactttatgagtatgtccaagaacaaaggagttattactttgaataagaagccaacacaaactagcccaagataagaactaacccagagaagaaatgagacacatacatgaaattaaggtatttaacatgatctcttgttttggtagttggggtatatgtctgttctttcattttaactatagttctgtactatattacttttgtttggtgccaggtgtttttgtaaggctccacattcattgaactccttggttaaaaaacagtgaatggggccaggcgcannnnnnnnnnnnnnnnnnnnnnnnnnnnnnnnnnnnnnnnnnnnnnnnnnnnnnnnnnnnnnnnnnnnnnnnnnnnnnnnnnnnnnnnnnnnnnnnnnnnnnnnnnnnnnnnnnnnnnnnnnnnnnnnnnnnnnnnnnnnnnnnnnnnnnnnnnnnnnnnnnnnnnnnnnnnnncaggagaattnnngaatccaggaggcagaggttgccgaaatcgcaccactgcact

SEQ ID NO: 8526 - DNA, 681 bp, Macaca Fascicularis
  misc_feature (1)...(681): n = A,T,C or G
tgcaccccctgnnnccaccgtcactggagatgagaaacattnctgatagtgaaatagaacagtatttgcgtacccctcaggaagttagggactttcagagagcccaggctgctagacaggctgccacgagtgtccctaaccctccctgatggatatccattgggagcacnnnnnnnnnnnnnnnnnnnnnnnnnnnngtcctgtcataaccaaggacggaagtgtacacaagtccgtaggtattgcctttcttgtttgaaggaactaannnnnnnnnnnnnnnnnnnnnnnnnnnnnnnnnnnnnnnnnnnncaggagtgcagggnnnnnnnnnnnnnnnnnnnnnnnnnnnnnnnnnnnnnnnnnnnnnnnnnnnnnnnnnnnnnnnnnnnnnnnnnnnnntttcctcatggatggatgggaaaatgtcaggctctctgctgctggtttgaattggccannnnnnnnnnnnncctcctgcaggcctgagggggtgtccctctgcttgtggagcagttggcattcccagcagtatcagccctcagaggagtgggaacnnnnnnnnnnnnnnnnntacgtnnnnnnnnnnnnnnnggtgggtttgtgtgtgtggtgtcatgagatcctctgcctcataacaaaaggacagcgggtagactaaggcagtagctcaaagggctt

SEQ ID NO: 8527 - DNA, 1826 bp, Macaca Fascicularis
atttaaaacctctgcggccggcggttaacggcaggctcggcgcgtggggggaagtgcgcctgcgccagctacgcgaacgctaaccgaatctgcggtgctctgccggcggctggcaggacgcggtgtagagagagtggacttcggcgacgcgggtaagccaggcgaaggccggaagcggcgggacgcggggacctagtgactgccggcccactgccacgggagctctcgctccttttcccaccgtcgggatggtgcagagtggcagcttccctccctggtttccaggtcctgcctggcgagcagtcccgaacctctgcgttcctgaggaaggcggcccgggcagcgtgagctacaggcgctgtgcgcggcgggccgcggcccctggaggtagcggtgtgcgctggccgccgccgccgtctttgtcctggtggtctcccttagcttctgggccgcgcccctgggaccaggcggaggcccgccacggccccgggactggagcggagtcccgaaggccgctggcgatccgggtcctagccacgcccgcggccaggcggggcgactgcgagctttgccattgaaaggcggagcgtgtcttatcgccctctagctgcagcttttgtgaattgccgcatggaaccgtccaaggtgtttgcccaccccgaaatggaagtaaatcttttctattctaaacagtctacaatctcactaagcatgcaaaggaaaacattaagatatctttttagattggtaagatttttcagtacccaatgctggtgagaaagtggagaaataaaagcaagcacttttatgccctgtgtgttgggaataatccgttttttctagagggcagtttggcattacaaatcagaaatcaggccggccgcggtggctcacgcctgttatcccagcactttgggaggccgaggcgggcggatcacttgagattgggagtttgaaaccagctggcaaacatggtgaaaccacgcctaacctttttttctttttctttgagagatgggggtcttgctgtgttgcacaggttggtctttaactacttcccagccccaagcgatcctcccacctcagcctccaaagtgctggaattacaggcatgaaccactgcgcccagcctgtttattagttattatttctttggtaaagcatctgttttttctcccttatcttactgatacgtgtaccctttaatagctttctaagaggaattcaaattactgatatttaaacctgttacaagtatttctcccagtttgttgtctcttttgccttcattatggtattgtttgcctttgtggtaggatgttttgttttaatactatgattccttaagctgcttgcttacctccccagaggtagagaaatttgttataactgcaatagcctccctgtaacagtctactgacccagtccctttatctcaatttaaagtcttcgccccttctacccttgaaatccttttgattgtaactagctaaacctaggatgctgagtcactgagatttttggagagaagatatcattaggtattttggtcaatgttgtctgtgtttacaaaatacaagttgctctagcttttatgtgaaagtctccctgtaaagagaaaggattgttctatcttttatattacaaagagaaggaactgacagttacctatggaccttattaaagtttgtattttatttgtttgcaaacaccatcttcatatgttcaaggaaaaaaataggagtgtgacacagttgaaatgcagaggaaataacacattaatcactgtatagtaggacacatgccattaaaaaaaaaaaaaaaaa

SEQ ID NO: 8528 - DNA, 2331 bp, Macaca Fascicularis
agagattctagactcttgcggaggagctcctagccttcctgccggatcccagagccactccagctccccagccacgtgcaaatgcagccagctcaggagtgtgcatgctccagctcaaagcctgagctcagactcgggccgtggcgcggactccactctgctcacctacgcaaagggcacgctccaagttatctcctgtgatccagccttagccaaactcctacccaccaccccacaggtgagtgggccaccccgccctccacccagctccagctacccctgtatgaaccacactgcagatctgtctgtgaacctcctgtgggaagcctgttgaggggtcatttttccaatgttctcaatgcccagcaccaagctagggccagagcagcatctgctgcaagggcctcttcttctggcctcctgctgggtcttctctcggaagcctcgctgagctccccttcatggaagggagaagggaagaaatgcacctcctaccgggaggtcctggaaaggcagatgagctggcaccctcacagggatgtcctggatgcaacagcagacctctgcagcgcgaaggtccacatgggtgtgtatctgggggcaatggcaggggcagggctggtcagactcaaagggaggcatggggagagccttccaaagagaaactgcttcccctcgggctcccaggccactgcccccagtctccagctattccccaccagtgagtgggctgtcattcaccgatggacagctttgccctgtgggcactggtttggggccacttctagctcccaacctcaagactgccatgtttttcactccagggaagcctgttcccctcctgctggagcagctcggcacacagtcaaacacaggggctgatcaactgctggcctccaatgaaactcaggcatacggcctcaggggtggcagaaagaaaggtctggcgtctgtggtgggaggtggacttcctaactcctttgaaggccatttggctgccctgtttcgtctctagaaatgttagtagtggtttattaagccacatggagctgacatgcacatggccgcccaggaagtccaggctggaagctcttacccacccactgagcaggtaagggaagtgaggcccgagaggagacagtgagctgtcattcagctggctggcgccagagcgagagccacagctgggatctgcctgtggcaaggaagcagcctgccccacccccactcctttgttgatgcctcagggattgtcgtccagcctgtttctgtcactgtgagggttaagtgggagaatacacgggacacatgcctgctgcacagtggtgcctggaggagataacaatgttatcacctatgggccaaggggccccgggaagcatgtccgtgagccgcgcagtaaaaaggacatggggggcacgtgtgccccgtcccaggacgctctggtctagtgccgctgatcacacactaccatccactcttcacatgcaagagctggcagggtgctgaagcctggctggagaccgccacagtgtcggagggaacgctgcttcaacgagagaatcctccttgggcaaatgtgtgtctacatttctacaatgcatgtgaagatattttttacagtaggcatttttcttgtcgctttgctttgttttcgaataggataacttgatcctaaaaattcatacagaaaaacacacaggaatagccagaaaaagtcctgcaaaaccatgacgtggggaaacgagaccaccaggattcaacacagtttcgtaagatgatcattggccagtgaagcccagaggaaatggcagaattagaacgaaaggcagtgataactgcataggatggagagacatttccaacccctagggcagggagcagtcaatataagggaggagaccacccctcatattatcttatgcccaatttctgcctccaaagaaagaagaagtaaagactaaaaggcagaaatgaaatccacaagcagagagcccggcgccacaccctgggcctggtagttaaagttcgacccctgacctaatcagttatgttatctatagattacagacattgtatagaaaagcactgtgaaaatccctgtcctattctgttccattctaattaccggtgcatgcagtccccagtcacacacccactgcttgctcaactgatcacgactctctcacatgcacccccttagagctgtgagcccttgaaagggacaggaattactcggggagctcggctgttggagacgtgagtcttgccaaagctcccggccgaataaagcccttccttctttaaaaaaaaaaaaaaaaaaaaaaaaaa

SEQ ID NO: 8529 - DNA, 674 bp, Macaca Fascicularis
  misc_feature (1)...(674): n = A,T,C or G
tgctctnnnnnnnnnnnnnnnnnnnnnnnnnnnnnnnnngtgggnnnnnnnnnnnnnnnnnnnaacacaggttctaaatttaaaacgaataataattggaacaaataaaggtttttgtnnnnnnnnnnnnnnnacatgggaaaaacaaaccaacttttttnnnnnnnnnnnnnnnnnngaagaagggattcagaaatacgatgttgtagaacatgnnnnnnnnnnnnnnnntgttttctctcctgtgtatgctaagaggaaatcagtttaaaatgcctgctaatcaaannnnnnntcagctaaccatatgtccaggttgctgcagagtttctttcaaannnnnnnnnnnnnnnnnnnnnnnngaggggagtttggagaaatcttagacagcagctctgtatttttnnnnnnnnnnnnnnnnnntaatagcagaattagccaatcctaaaaccttctaaagnnnnnnnnnnnnnnnnnnnntgggattatttaatttttctttttgacgtgtgtttttagtttagaagtgctgtattccacaaggtttaagtcagtgaggttggaagataccctctttttttattcaaaaagcacaatcaatcttttctttgaaaatctatataaagtacaacttgcttttagcatgattattttnnnnnaccaaccgcccnnnc

SEQ ID NO: 8530 - DNA, 240 bp, Macaca Fascicularis
ggatgagaagtaactgtaaaccatatattctcattttcatcccagatgtgagagagtatacacctcagaattatagggcgtggcgtgagctgtttaattcaaaagatactattcaatttaaagatatttttcctcagagtttttgttttatatatattgcgcataaattaagttttatactcattaagagtgacatctccccactccatccccagtgaaatttggggaagaaaatttagt

SEQ ID NO: 8531 - DNA, 752 bp, Macaca Fascicularis
aagacgctctaggactgagaaaagggagtgcccgctgtgtgtcaggacttgtgctaggcactaaacctcaggcaggaaagcatgggcaatgagccagaggctgctgtggcagcacagactgctgtacctcgaggctactaagggacaaagcgcgggaagccgggatagaggctcctcacactgaaaccagtaggaggaggtgcgagacccatcacctccatttctagaggtggtgtgaccttggctcggcctcccctctctgagcctcagtttcctctccagagtgaactggggttgcaccccccttctcccagagtgggtgacaaaaaaacgaatagcacaccgcttagattccctgtgtgtgcgcaaacgtatgagaagacgccgccgataccgcaccggggccagacacgcagagaggccaagggcgagctggcttcggagtcgccagcaaaagctccgccagccacagcgctctgagtccaaggaccgaaagctctacagtatcctcgttgcccctccttcaggagtgtctactgggtccatgggtcatgtgttggggcaccattctgcctatggctgaggtctttgtctagggtccctctttggtttcatctccctttttcatagactcctcttccttcgtttacttccatcaacatgttttttcctgccttttggatttggtaagattgaagcttaaaacttggcaaaaaaaaaaaaaaaaaaaaaaaaaaaaaaaaaaaaaaaaa

SEQ ID NO: 8532 - DNA, 2354 bp, Macaca Fascicularis
tttttacatcacaaaatttccaagagcttatacttgataatcacataaaatcaattatattctataattctggaataagaggactttaaatggaacatggatttttcaaccacttctctgtttcaccctttacatatagtaaaatatgagcttattttctttttcactctgtgcctttttagaatgtggttgttctccaacttcaaaacacagccattttatgtaattattggatatacggatgagaaaattttcctgtaatagtaaataattgtcctgtaatatatttatacaaacctattttgttataatagttctataacataccaattttgttataatagttttataggcatacctattttgttataatagggccttgtgctctattataacaaaacaggtttgtataaatatattcatatttatagccttgggccctgcaaaggtatttggatagtgatagaacctccccatacaactgtgttttaaatgatacctaaaagcctgagatacagtttatcataatgagaataagtagtaaagcattcctgaaaacaaggatgataaatagtagcgatggcaatatattctattcaccaaaaaaaatagcttgtctccaagtctggttgacctcttcataagtgaatgattccctgatgaatgctgttccactttaaagagatggttattttgcgatttataaacttaaatgagtatactattttcaggatgctacaaagtacataggcaagttattaccgtcattcctataggacatggaatgatttaaacaatatggcatgtttacaattttaggagatttatttcaaatcctgaattatgtgtacttcaaattatgagcaatctctattatctttcaagactatttaaaaaatctccatacctcctctttcagcttaggtttttatatttgttgattttactatgtcactttgcttctatggccctcatttgcaccatttataatgttaagctgtttgaatgagatatctctccgttatatctttatctttttagaacatgtgccataaaacccatgtggttattttgttcatatgtactacaactagcaaacttttattatatgttcacctaccttaaaaattacttatactgtaccatgggaaagaaacatggtccttatagaattgaatgctgagctattttgagtcctgaaaagaatggccaaaaatttaaggaactgtgattgctgcatgcaccaaattgtagcccatttctataactgtattcaatatggttattgtcaaggaaaactaggatagaaatttccttttaaagatttgctgttgtacttaggtaagtatatctgcttttaccactcaaaaacaattactttcttaagcaatttcaattttttcctttttaacaaccctgcacttgcacaaccctgcctctcttgcctcacactaatcctgaccctgctttcaattcaggctttgacagggaccaatggagattttaaggttttttaatgagagaagccttgctgacattccccccgtcccaccttgaaaattgcttaaagatgatcttaaaagaacctacagataatgctctgaatttgtttccaaggtccttgatgtggagagaatgagttatattaaatgctggagaaagacttatcatttagtgaaaaattaaacatgcttttctaaaatgtggatgtttaacagagcacagctgattgggaacacgggcagttcagtgcagctggagtgtctcacagggtgaagaggaacccagatcaagtggggaatagggatttcaaaaaccttctgaaggcttttaacatcagggcaaaagttttacagtgttatactttatattcttaatttaaacttatcagcgggaaggattcacaatgaaatgtctgttttgctcatgtaacaaggaataaaataatttattttattatttaaaataataagagcaaaaactggcggctatttgcaatctcaccctgccttgtgaggatgctgggtcttaaggaaggtcctaggattgctaaatagagtaatgggaataggaaactgaaagtttacttgctttgcataagagaaggaattatattgcagcagggaaggggcacaagaagataagagctagaagaacctgtgagaagggaaagaagtgacaaactaattttgggctaaaataaagcaatttctcaggtcaggcgtggtggctcatgcctgtaatcccaacgctttgggaggccaaagtgggaggaatgcttgaggccagtaattggagaccaaccagagcagtaggtcaagacctggtctctacaaaaaaaaaaaaaaaaaaaa

SEQ ID NO: 8533 - DNA, 741 bp, Macaca Fascicularis
  misc_feature (1)...(741): n = A,T,C or G
agagatcctggacccgggcgagacaacccctcccggaggagaggaactcttgagggggnnnnnnnnnnnnncagagtgtagaggagccggactttgcagccaggtacctctgtgcaagtctcagctgtgcctctgaagtagctagcggttacccagcgctgtgctaaggtcttgtcatcactgtgtcattgaaggctcacagccaccctttaaggaaaacgatcttgtggtcattattttataagaaatggaagctcagtgccacccctaccccacggacacattgccagagagcggtggcgtgtctggcctggaacttaatgatttctgtcggacagnnnnnnnnnnnnnnnaccattaagcctcccatacaaagatacttcgtgcggggacatgagatagagcctcatagcactgaaaccnnnnnnnnnnnnnnnnnnnnnnnnnnnnnnnnnnnnnnnnnnnnnnnaatattactcccatcttgcaaggctttggggaagatgagagagaannnnnnnnnnnnnnngggagaggtccttgtgggtgaaggtgtggggggagtccccagcccctccgcggacactcagagggatgtgggaggactgtggagcctatgcttattgatgctgtttcttttcaatcaaacctctgtcagaaannnnnnnnnnnnnnnaaatggaggagatgtcgagtttgaacggtgaggtcatagattttgtttttatttttatatttcaa

SEQ ID NO: 8534 - DNA, 2261 bp, Macaca Fascicularis
aagaaaggtaagggccctgggcgaagaacgcgcggcgccttccgagtttggtgttttgccgcgagaggaaatctcgctcttcgaaagccctccagggcgagagcggaaagggctcgggtactgtggtggggtcgcacagccggccgagacagtgccgggacggggagccaggcttccgagcgcgcctgctcactgactcctccgcgtcttcctcgtgcgcctgcagcccttggttcttggaaacgccgacgccttgctcagggctggtggggctggggcgcaaggtgcagctgacggtgcccgagaggagcctcagcctctggtggggttcggtcgggtgtgggggtagtcagggaaagaagcaaaggggtaagttaagatagggagttaggaattcgcggggcccttaacgctatttgggtgcgcagttgtttatttgtattaatagttgcagctgtcgtctggcgagcgctttccacgttgtaggccccgaacaaaacgccttctgcaaaattatgcatttaatcctcacaacaactttcaaaggcttgtcatctgtttctatggcttattttcaggttctaacttgaaagctccccagaggcaggattgtttaccttgtccctttcatccttgcctccctgagcccaggaggtgcgcaggtggtgcttgaagcgtgttttggttgggagaaggtgaaatttgctgggtgggaggtttttaaaccacgtttgtttggcatctagtccaggaaggttggaaaattaaatggagccacctcccacttttttgtttgttgttctgatagacatttaccagcacctaagaggtgttagcttgtgtgctcaagggaagaataagaaacagaccttgcttttaatagaaagtaagaatacgcagttctggagtcaggtgtgcgcaggttggggaaaggagaagtaacgatttctcaggggtgctccaggcccttctgagtcacattccctatctgtacaatggaaataaaaatagtctttacctcagggggctattgggattaagtgagtttgaacagaccgtgctgttaacaggtggttggctacgtgttaaaatcacctgggggttattttgggggattaattgccgtattctgggtcaatgtgatttacattgctcacacaaactgttcttattacttttagtttattgctttataaatacttgatttcttcccacagacccctaagttttctgagcctaggtacagatgtactcacattttgaatcaaggtagttactgattgtctgtttctttctctttgttgtctactctttaaaggatacctcctcagaaaaatggcagaagcagttttccatgccccgaagaggaaaagaagagtgtatgagacttacgagtctccattgccaatcccttttggtcaggaccatagtcctcagaaagaattcaagatattccgtgctgaaatgattaacaacaatgtaattgtgaggaatgcagaggacattgagcagagtttctgttaatgtctctaaggaacttatgctgtgctatttgattaaaccctcaactatgactgataaggaaatggagtcaccagaatgtatgaaaagaattaaagttcaggaggtgattctgagtcgatgggtttcttcacgagagaggagtgaccaagacgatctttaacaattcaacctcaaatttctaatttcaccaacaactatttattgagggctaggtaaaaagttatttttgttgtaatcatccattaatttataaattttaaaggacatggtgctcccagcaccagaaaagtatcagtgtttttaaagataaattacacaggggaggagaaagatccctgtgctaggaatgcagattctgtccttgcgttggcctctaactctccaatcccgagcctcgtgcctctggcctcagtctgtgccctcatccagtcactgcggaggttggactagatgagtcctgagaggacacttccaacaacagagacatttattctctgattttacctgaaaatggtagtagtttacatttatacagtacagtttatgaagcactttcatacacaggcatctcttgttacctacatctaagctgttcccaaaagagtgttacagaacacaacaatattgtacaatattagataagcatatcttcactgaacttgttataaaaatgagtggtgaaataatgtttggagacataatgaaagcaattaacatttaaaaaaaaaaaaaaaaaa

SEQ ID NO: 8535 - DNA, 2011 bp, Macaca Fascicularis
  misc_feature (1)...(2011): n = A,T,C or G
atatgaatcgctatatgtgttagtgtattatgtgtgtaacagcagcttttttatcttaataggaaaagcagagaaaatacatgaagtttggtcctgttctaaattggataaggcaatttagataatggaagggggtatcatttgtttagtcagagaacataagcaagagtaaaacaagtgagattatgattactggaatgactgaagtgtgaattactacattaaatttaacaactaggagttttgttgttaatttgggggaataaatattttccaaattgtgatgttattcaccaaaaaatatatatccccttcatatatgtgctgaaagataaatgtgggaagcaatatagtcatgtttttatgatttgtgatttcagcttcagaagttgcttaccatggacccaataaagcgaattacctcagaacaggctatgcaggatccctatttcttagaagacccacttcctacatcagacgtttttgccggttgtcaaatcccttacccaaaacgagaatttttaacggaagaagaacctgatgacaaaggagacaaaaaccagcagcagcagcagggcaataaccacacgaatggaactggccacccagggaatcaagacagcagtcacacacagggacccccattgaagaaagtgagagttgttcctcctaccactacctcaggtggacttatcatgacctcagactatcagcgttccaatccacatgctgcctatcccaaccctggaccaagcacatcacagccgcagagcagcatgggatactcagctacctcccagcagcctccacagtactcacatcagacacatcggtactgagctgcatcggaatcttgtccatgcactgttgcgaatgctgcagggctgactgtgcagctctccgcgggaacctggtatgggccatgagaatgtactgtacaaccacatcttcaaaatgtccagtagccaagttccaccacttttcacacagattggggtagtggcttccaagttgtacctgttttggagttagacttgaaaagaaagtgctagcacagtttgtgttgtggatttgctacttccatagtttacttgacatggttcagactgaccaatgcatttttttcagtgacagtctgtagcagttgaagctgtgaatgtgctaggggcaagcatttgtctttgtatgtggtgaattttttcagtgtaacaacattatctgaccaatagtacacacacagacacaaagtttaactggtacttgaaacatacagtatatgttaacgaaataaccaagactcaaaatgagattattttggtacacctttctttttagtgtcttatcagtgggctgattcattttctacattaatcagtgttttctgaccaagaacattgcttggatttttttgaaagtacaaaaagccacatagtttttccagaaaggtttcaaaactcccaaagattaacttccaacttctaagtttgttttcattttcaatctatgacttgactggtattaaagctgctatttgatagtaattaaatatgttgtcattgatataaacctgtttggttcagcaaacaaactaaaatgattgtcatagacagtgttttatttttcctgttggtgttgctgatttgtgagcatgctttaagatgaaaaaagcatgaatgataacttccttaaaaaggtgcggcatccaattcaaatatttttgtcctgattttaaagctggttggtgtagtgctattaaaattttgttcagttcattttccttttgaaaactngttcgcacgttgtttagggtgcccttacttcagcaaaggagaaggagtaggagagccttagaatttttgaggaaaaaaaaaacctataacatacaatgtactgtatcaaactattttacatgaatgacacaagtattctgaataaaaaataattgaacattgttaaaaacaaggtgttatgtaataaatttatttttcatcaaatcaaaaaaaaaaaaaaa

SEQ ID NO: 8536 - DNA, 182 bp, Macaca Fascicularis
ttttaaaagtaaaaatgaagatctggcaccgaaacatgctaattgtttactgtaccttgtgaggttttcaatcataaattttaaccactgtatttttttagagatggtttgtgtatatatatagtgattatggatactaattcaatgtaatttataattttctatgtcaatataaaaataca

SEQ ID NO: 8537 - DNA, 746 bp, Macaca Fascicularis
  misc_feature (1)...(746): n = A,T,C or G
tgagtagagcaannagtacggnnnnngacacacggcaggtgctcagtaaatatttgctgaactgtacttgtagcttttagaaaactagaatctacaatgattctattcaatagtatgaatttctaatnnnnnngatttcaaagaagtcagtgtggagaataatctttaacactgtaataatgaagaataagggaacaataaaggcaactcagttgtttttaggcaacaggtcaaattaaggatctatgatgatagttcgttagattcaaatgtaagattaggaactggtggggactaagaataattgactaactgggttgtacttataattctcaatgttttctacaaagtcttaatatggatggataaagcaattaactaaatgaaataactaagataaaagagaagctttagaagctgtgagaagcttctaaaacttactcttaaaaagggtaatataatattattatggaaatggagaaaagcaaaattaaaagttcttaaatcaggctgggtgcagtggctcacgctggtaatcctagcactttgggaggctgaggcgggtggatcacctgaggtcaggagttcgagaccagcctgaccaacatagagaaaccctgtcttcactaaaagcacaaaattagcnnnnnnnnnnnnnnnnnnnnnnnnnnnnnnnnnnnnnnnnnnnnnnnnnnnnnnnnnnnnnnnnnacctgggaggcggaggttgcggtgagctgagatcgc

SEQ ID NO: 8538 - DNA, 704 bp, Macaca Fascicularis
  misc_feature (1)...(704): n = A,T,C or G
gcattggtgagggtgggcacttataaatgcctgctattgttaagccattccaacctcttcctctgaatagaccagatgccctttcacnnnnnnnnnnnnnngtctttttgccttcccaaccctgctgttaggcctgctgttnnnnnnnnnnnnnnnnnnnnnnnnnnnnnngagatgagctcccattnnnnnnnnnnnnnnnnnnnnnnnnnnnntccccatatgtatatatgccatatgtgaatatgccatatatatgtgccaacaaatctatatatgttgttcttttcaaattagcacgcagataggaattttgagtttcttcttcttttagtaactagtataacaagcactggtatttttgtacaaaaaagaaaaacaaaacaagattgactattgtggtctgcatgacataaacaaacaaatggtgatatcaaagcaatgtataccccagtgtgtgttgccataannnnnnnnnnnnnnnnnnagcgcannnnnnnnnnnnnnnnattttgatatgatttaagctctatgtacaaagttttgcacgtatttatatggttcttaggaaaaaaaaaatgctataaactgtcaaatctaaaattcaaatgtgttgttccactgagaccagaagaagaaggggagttttaaaagggataattttttggaannnnatannngctttttgctgatgaacagaaacc

SEQ ID NO: 8539 - DNA, 2303 bp, Macaca Fascicularis
tttcatttatttcctgttacttattatattttcgaatcacatatgtggttaaatttccttaatgacaacatgtcagagatgtggtttgttttaaccttgagccatgtagtctttatgtattaatatgaactgggtcttttctgagcccatttcttccctgggtaagggagaatagttcttgaatgagcattagctattattgactgtgtcaacctcagtataacagaattacctctctcagctgctcgcataatttatgaaatttctccatatactgcaggagtttttttttaagaggacttacccttcaacctatgtataaacactcagaggtgacctagcaagactacacccttacatgctgcctgaggttcgcaagcaggggcagtagtatcaaatagcacaaatcttttaacgagtcactccaatcagaaatgcatcccttacaagaattgtcttagccttgggaaaatggtatgggcttttatctggcaaggtgagaaaagcccaaaagcagaaagcagagtgagataagcaggctgatgggacatggtgaacgagagcacctgtgcacgcatgcattcccctcacgtggagtactaacgatgatcgagtgactgctagagacacaggctccatcagcaaccgggagcttattagaagctttctaaaagcctgctgttcaatacagcacttctgctgcagagaaaataggagatgacaccacatgaatctgatcaataagaaaaagggattctggaactgcagctctttgggtgatgttaattgcagttttgagcatgatcactagtctggcaaggccaaaacccatggagcaatgaatgcatacctcttaaaaaatagtgctttagcctgtcgaaatatgaaatactcagtcattttgttgttgaccaattcaatttatgtgacttttccaccagtcagccactcaactgatgggtttttttattattattctatcttatttttggtcatttgctgtaatactttttgaaatttatttactttttaaaaaacctgtcatatctctctagaccatactttttcccctaaagttttgtgtttaggcaatcaagttgggtcttcctaaagacttgaattagcaattaaaattcttgcgagcaagcagccagttatacctccttccaacctggagctccattcctacagttctttcccaaggggtttctcccaagaagcttactgtagcttggttaatgcttgcctaaccagtccgtttcccactaaaatggaaaagtccaccttcagtctttctttcttacctaccaaaagaaagaagaatgcagttgagagaaaatcaccaggacacatttatgttcttagaaacccctctacttcaagtttaactgagctaccactagagtgatttggaattctagccctaggccagaaaccttaagttcctggtggctgcagtaattcacaggagttttgccttcttgaggtctgcttaccagatgtttggaagtgctttgcttaacttggaaaaccaatgcttaaaattaaattgagatcaatttaatgtccattttacctgtcaaatttgttggcagatatttaaaataaaacgctagaatggtgtttaattgattgttttcaatttgaaacaatatttaaaatacctgtcttggaatacagaggttttgcaaatattgtgagtattgtttgctattattctgttataagcaatactctggcatcaaattattttaaatgaatatgcaagaaacaaaattgagttcagcatgaactgaatgtaatgatagaaatacatctgaatgatgggtttcctatcatgttgaagacatagcttctccagcctgtaattctaaactggactcattagcccaaaagttctgaaacactcctccatttccatacccctaataaataaatgttgcattcacatttgtataattataccgtaatgggcatagtgattttaaattctcaaagtactttgacatctgttatctcattttagcacaaacaaggtgtccaacacactattcatgtgcatacagcacctggcagatcagcttttaattctgagttatatggaaatgagatagtaaatggaaaatatatccaaaggaggaaaatattttcagtatttaagacctaattgcaatcttcagaagttttcttgaatgatatttagaagtctaagtacgcttaaaatgaacaataagagagtgatggaattaataaggttaagtccacattctccaaactcaggcaaaaaaaaaaaaaaaaaaaaa

SEQ ID NO: 8540 - DNA, 736 bp, Macaca Fascicularis
  misc_feature (1)...(736): n = A,T,C or G
ttatgnnnnnnctgtnnngcataataatgacataatctgcttagcannnnnnnnnnnnnnnnnnnnnnnnaaggtnnnnnnnnnnnnnnnnnnnnnnnnnnnnnnnnnnnnnnnnnnnnntttacgtgagattgctaaatgcatgggggaaaacagtggtcctagcatccatcttgtattcagcttatcattattgcagggaaaatgcttttaatttaaattaatttttaattattttggcaagttgatggcaaggacttgattgtgtcgttaagcaaaagaatgtattggaagttgatgnnnnnnnnnnnnnnnnnnnnnnnnnnnnnnnnnnattgctaaagagtttataaggaggtgagaagtaatttttttaaaggagaaaatttttttggctttagatttaaagtaaattgaaatgttttaaagaaaaaaagtattnnnnnnnnnnnnnnnnattaataatataagagctgaaatgtaagtgatttcttcagtccttctcctctgtcggaatcttttttcttttaccgtaaattcacctgacgagnnnnnnnnnnnnnnnnnnnnnnnnnnnnnnnnnnnnncaccatcannnnnnnnnnnnnnnnnnnnttgcctgcagcttttacttaaccctgtagtttctggacgtttgtgcagtattgaaaagacaggagaaaagaaaacaaaaaccnnnnnnnnnnnnnnnnctaaaactaaaaacaaggaaatg

SEQ ID NO: 8541 - DNA, 627 bp, Macaca Fascicularis
  misc_feature (1)...(627): n = A,T,C or G
ctgcacagnnnnnggtgtccggggaccttgtgggaccagtcccacaccnnnggtccctgccctcccctgcttccaggctgagnnnnnnnnnnnnnnnaacagggccaaaggnnnnnnnnnnnnnnnnnnnnnnnnnagggcagagccctccaggcctgcaggggcaaggggctggctgtagtctcagagcacagaggtaggagagctggagttcgagcccaggcttcctgggtcctgcctggtcctccctcccaaggggccattctgtgtgactctgggtggaagtgctcagcccttgcccctactggcgctgtggcctcccttccatgccccaggatcacnnnnnnnnnnnnnnnnnnnnnnnnnnnnnnnnnnnnnnnnnnnnnnnnnnnnnnnnnnnntcctttcaggccaaggctatgaagggacggctgctgggacccacctccccctcccccaccacgtgccgcatccctgccccgacccctgccccgacccgggtctggtgctgaggannnnnnnnnnnnnnntgtctgaacaatctccaaaattgaaatgtatatttttgctaggagccccagcttcctgtgtttttaatataaatagtgtacacagactgacgaaact

SEQ ID NO: 8542 - DNA, 716 bp, Macaca Fascicularis
ggatgagatgtgctacaaatggatagatttgataaaatttaactcaacatcttgatttggagcatcgggtttggggaaggtgttgaggaatctatagaagtccaaattatagatggtattcttccatcttcatcgtcttacctctgaaggaatagagcctgaccacatcattatgaaacatcatggcgggttatgtaatttagggaggactggtctgtaatttctgaatgatatatagaataatatttatgtttacaacgtaacttttcaaaacttacaaatcaggatgatatacataagaattccactaagaaatgtcaaggttcttaaatttgccagcgttaaagtagaaaataatatttcagaagagcacaatatgcacaaaacatctttcaaaattgaaatattttcctgggcatcaaaaacctctactattggctacaaatttattgtacctgatgaaaaaatattttctggacttaaatgttattacaaatatcttaattttcagcaactgttttgcactttcaaagatggtaaatagttcattcaatcaatggtatagagttatttatttgctacataatagatattgtgccaaataattactttttatttattttatttagtatgtaattatgaagtacattttttttcctgttttcacaactagactacatctaatgtgtaggaatagtatgtatgtatatcttctg

SEQ ID NO: 8543 - DNA, 109 bp, Macaca Fascicularis
tgtgtgcgggggtataccccaggagagcacagagtggagttatgtgtctccccagtaggggatagccccgtgttatatctccccaagaggtgtgagagggggttttggg

SEQ ID NO: 8544 - DNA, 711 bp, Macaca Fascicularis
  misc_feature (1)...(711): n = A,T,C or G
atctagatgtacaattagagtttaggttggaaattactttaaaatgtgttttttggggatnnnnnnnnnntctgtgtaaatacccacatgcttatgcattgtaaaccaagtgtgtattcctatgtatgaatttnnnnnnnnnatttctgcttcaagagnnnnnnnacctttaattttataaggtcccctccacctgtaaccctatatatgtctgtaaataaaacactaaaatttgtagtgataggatcaatttgggaatatctgctgagagaccaaaaagttcatttttttaagtaccttggttaaagagtaaagattattcctcttattttttaaagaagaatgcactttaacaaacatagagctgcatgggcaattcnnnnnnnnnnnnnnnnnnnnnnnnncagaaatcacacttcctgaaaaccgttcaaaagcagagtccagacgggnnnnnnnnnnnnnnnnnnnnnnnnnnnnnntcagattctgatcaattttgagaggagcagggctgcttcaaaagagcaatgtgaatacagtcagaagctnnnnnnnnnnnnnnnnnnnnnnnnnnncctgtatttaccactaactagcaaaactgacagaaaaactcacagagaaaaaatttaagaatccttcctgctggtgtgcactccttacaatagacttttgcaaatggaattttacagtctatattaaaaaaaa

SEQ ID NO: 8545 - DNA, 582 bp, Macaca Fascicularis
cacagcagctgagtcctgcccacccacctgggcctggtcctggccctgcctcggctgttgtgagcccgggctcctgctcagccttgtgccagccagacacgtatgaggccccccctgctctgggccccttccccaccgcccaggagcccccaccctgagctccaagcatgtctaggccaggcagaggcgctccgaatccatgacaccactgttctaaatggtcccgggggctgggctggagaggccgatgcaccacctcccaagcctgggagccagcgccccagcctaatcacggatccgctgtctcccagctgtcttgactgaaggtcaccgcccctgcaggagcttggtcctcatctggggaccatgcacagtcctgtcccactctgcatgtgggaagggagcaggagggcctggctaggtgagcggaggccgacctgggaaggcgtgcggtgcaggcctgtactcacagtggcaccagcacccctgggcctccctctctgctgctccccagcaccctggggccctcctgctctccacatgtgtccctccttaccccatgtagctcagtctgaagcagga

SEQ ID NO: 8546 - DNA, 731 bp, Macaca Fascicularis
  misc_feature (1)...(731): n = A,T,C or G
cagaaaggaatgaaannnngannnacccagcactcaaactgtctccacttgcctttgctctttgtttacctcttctccttctgnnnnnnnnnnnnnnnnnnnnnatttaaatttggttatgttnnnnnnnnnnnnnnnnnnnnnnnnnnnnntcatgtgacttgattttttcatccattttagagaagctgcacccaccctggtttcaggacacggaactaaatttattagaaaagaagccacttcaagtcatgaaggagaaatacaaagattcttggatttcgttgtaagaactagagggggtttctatctcagtactgtctcagaataaaaactgtcgatatcacatgcgttgcttgagaggtaccttttatgacaactgaaatcactcagtttcaagaggagttggggactggaaccaaactaacttactccaaagcccaaaatctttnnnnnnnnnnnnnnnngtctgtaaggctacactannnnnnnnnnnnnnnttannnnnnnnnnnnnnnnnnnnnnnnnnttttaggaacaggtgttctgcgtattcctggttcctttttatttggaactaaggagnnnnnnnnnnnnnnnnnnnnnnnnnnnnnnnnnnnnnnnnnnnnnnnnnnnnnattaaactggggggtagcaagactcttattcctagattgttagacagccacagcttttccacatctcattttagtcatgaaaagacatgccca

SEQ ID NO: 8547 - DNA, 696 bp, Macaca Fascicularis
  misc_feature (1)...(696): n = A,T,C or G
acacagccccacccacacagggttcaacggaccccacagtnnngacnnnngaaggcatctggctatttgatacttccatnctatgtgttgggaaagagggatgggatggggtaagacctttttccaatgctgggggaggcggnnnnnnnnnnnnnnnnnnnnnnnnngctttgggaagggcaagcagcaagaaagccagaaaaagcagaaaaaggaagtagacggaggatgcgaggtcaaggaataaaagacaggaatacaggggtctgagggcataggagggagaagcccagcagtcctggctatagggaccctnnnnnnnnnnnnnnnnnnggctggagaccagagataaagaggagagctgaggacagcaagggtcccagagtctctgccttggaaaacagcccagaagggtggagctggctcagggacaaggccagctccagactcgggcctcctctccacctccaggggccttagctctttcagaataaaagtcctaggggggcaagtgtcagagagaagagggctcaatgtgagggtgggaacagagcccgggggaagggttgagggagttggaaagtccctggccctcatcagatgaagactcttgccccatcttcctaccatggctgannnnnnnnnnnnnnnnnnnnnnnnnctagggctctggcnnnnnnnnnnnnnnnnnntact

SEQ ID NO: 8548 - DNA, 743 bp, Macaca Fascicularis
tgtacggtagtatgtatattttgtaatagttacaatgtaaaaaaaatcaaaatatataaaaagtgatttgtacagaactttattttagctcttttttaaaaatgatttgcatggttagaaaacggcgaggacagccaggggagggaagggcctctagggaactttgcactttctatacctttgtactatgcactgccctattgattctacacccaataatgatattacttgaacccatctgtaagaaactgcttcggaaattcatttgtgtgtatgtaaataacacaacatagaaacaggaagggaaaaaagtctgcagtaatgcacgtattttttcttctttcctgtttattttcggttttgctttgtttaagtccttccttttgtttttaattccctttttgtttttctttttgggttttggttccttttgggtttatgggtgccctgatactccagcagagatcagaaggctacagatccattctatccatccgttatgtggctttgccatcccagcttggagtgtctttacaaagataataacagttgtgttctttgctctcgttttggatgcatagactgaaaaatttaaaaaaataacttgtaaaatggcttgttaaaaaaatacaattacctctaattagtagtacgcgtaaatgttttacagaatgaaaggcgtgctttttattttcttacttcgttacattggtggcgaaagaagtctgtatgaaaatcagttc

SEQ ID NO: 8549 - DNA, 711 bp, Macaca Fascicularis
  misc_feature (1)...(711): n = A,T,C or G
ccgggnnnnnnnnnnnnnnnnnnnngagcgcatcacttagtcatgaggcatccgacagaggcagagtatggatcgctggcacccgaagacagcagtcagcccttctttctcctcctgtgnnnnnnnnnnnnnnnnnnnnnnnnnnnnnnnnnnnnnnnnnnnnnnnnnnaacccagttctgagtcctggnnnnnnnnnnnnnnnnnnnnnnnnnnnnnnnnnnnngttgcctctctgcgctgaactttgtctgtactgtgggcttctgaggactaagtggtatcatgtggtcacagagaaaagctttgtaaaatgtaaaaccaatatannnnnnnnnnnnnnnnnnnnnnnnnnnnnnnnnnnccaacctttttgcnnnnnnnnnnnnnnnnnnnnnnnnnnnnnnnnnnnnnnnnnnngggtggggtgggggtgtgccnnnnnnnnnnnnnnnnnnnnnnnnnnnnnnnnncatgaggcactagatggactccacaacctggatccctcacatgcannnnnnnnnntagggttcaagctcctatgagaatctaatnnnnnnnnnnnnnnnnnnggcagannnnnnnnnnnnnnncttggtcagcacctgttcatctcctnnnnnnnnnnnnngttcctagcaggccatggactggtatccactctgcagcccaagggttagggacccctggtgtatgacatgtttctttc

SEQ ID NO: 8550 - DNA, 729 bp, Macaca Fascicularis
  misc_feature (1)...(729): n = A,T,C or G
acacattttaccaatggcttgccgaaaaaaacagaggaaaggtcagtgaattgccaaggacaggaagctctgagcgtttgcaagtgcccatgtggagaacagggaactgtacaagnnngagctgtgtgggacaatagggaaatggaacaaaggggcattttacctttgtgttcaaaataattagacaaggacagcatggaagagacatggctttagtaatagcgtatgtggaaaagaatggggctggggcatttattacaacaactgacatttgtgcagcatttataaggcatcttcattactcctcatgacacattagaagtggtaacagggaaaccaaggctgggagtatcttgtgtaattaagcggcagtgctgtagtgtgaattgtgtttctgtaaccctggggttacttctcttcttttgttccccatctttaatcaagctgcatgctctgctcgttcttttttgtgaatgtctctcacctccaatccagtcatccatcccgttaaaggaatggattatccatgtctttctgagactattgtacaacctcctcatttaatctcatttctctctcttcccattaattttatatatgccacatgagcccgattaccagatttagcaaaaagcaaaaannnnnnnnnnnnnnnnnnnnnnnnnnnnnnnnnnnnnnnnnnnnnnnnnnaataatttttattgtatgggacatacttatataaaaata

SEQ ID NO: 8551 - DNA, 681 bp, Macaca Fascicularis
  misc_feature (1)...(681): n = A,T,C or G
catcaatatgggtatnaatgtggannnnnnnnnnnnnnnnntgtatgtgtctgtgtatctgtgtgtcagtgtgtcactaagactgtgttctgggattgtcagattctccgnnnnnnnnnnnnnnnnnnnaaaccggcttgaaccactttgtcnnnnnnnnnnnnnnnnnnnnnnnnnnnnnnctgggtcaatgtctgtgcttctgtgctctggggaagaaaagccaacactttggagtttgcaaccctccctagctcagagactaaggatggagaatgccagtccgcttggtacgattccaaagggagtcaggccnnnnnnnnnnnnnnctcnnnnnnnnnnnnnnnnnnnnnnnnnnnnnnnnnnnnnnnnnnnnnnnnnnnnnnnnnnnnnnnnnccacctgagcgaannnnnnnnnnnnnnnnagaggatacatgtgtacacgtgaagannnnnnnnnnnnnnncannnnnnnnnnnnnttacccaactaatcaaagccccttgctccttcattcatgcacgtgggggcaaaggtaccacagagccaggctcagctgcctcctcctcccagatcacagccaaagccttccccagcagacacatcttccatcttcccgccatgaaaatcaannnnnnnnnnnnnnnnnnnnnnnnnnnnaatctcaagcttctctccta

SEQ ID NO: 8552 - DNA, 3807 bp, Macaca Fascicularis
ttcgggcagctctctgtgtcctgggatagtggatggacgacttggtgcaataaaaatgagaaaataacaccagcactcagaattgtcataggacttcagggagtgtcctttattctatactaatctgaccttgggcttagtataaactcagtgctcaccacacatgggaaaaggctaaatcacattctggttagctctgggagatatgtatggatgaggtctttttatttgtttgtttactttaaaaaaaaacatattcactttcattactgtgctcacttcagaatggcattgaatcagtttgacttctctgggctggcaacacagataggagaaaagctaaggctttgaaatcggccaacactggatttgacttctggctttgacagcagctctcagtgtgatcttggggagctcaagttagcctctccaaatctcagtttcttcttctgtacactggaaggtggtgggggggcggacaatacctatcccttggaatagttgtgggaatcacacaaaatatcataaatgaaaggatcttgttctttgtagactcacatgcactcagcaaatgcctgccatatgctaaggattgttctagggactggggacaattcagtggataagatggatacaattcctgcacttatgtggagcttacattctagtgggagagacggacaatctaggagtcacacatattttaaatggtaacagtataagagacaggtacatggtgccttgagagcaaacagcagggggatctgacctagtcagggaggccagagaaagcttccccgaggaagcaacaactgggctgagatctgaagggtgtgtaggagttagcaaggcagaggtgggtaggaaaagctttcccaacagggggaataggccgcgtgatgcgagggatcatgggactgacaaaagactgtcctggctgccacagagaaagcaaggggagcatgttgtgagaggatgttggaaaagtaggaagggccagaccctgcaggtcttgttggacaagtgaaggcattttatcctgagaacatcaataaaccaatgaagagttttaagcagagaagtgacatgatgagatttgcattttcaagtgaccatttggattggagcggggtaagaacggaagcagggagaccagttaggagaagacgtgcaggcatgcaggcaggagatagtgttctcaggaacagttggattcattagcagtgctttctgctgcaaatactacaggaaatctggccaacagtggtttaaataaagagcgcattccttatcacatgtagacctggagtaaagcaactgttcacgttggttccatggcccgatgatgtcagaactgacatctctgcagttctctaggcctcttgtggtggcaagatagcggccctagctctggccatcatggttgtagtcaagctaaaaataaggggaggaaagatggcactagcaattcctgcccctttggtcacaaaggcaaagtctttcccagaaaccctcattatgcttccatgtatatatcattaaccaaaatggaataatgtggcctctagttacaaaggaggccgagataaggacaaggaggctgggaatgagttttagcgagtcagccaacagtgatatggtgaatatggaataaatgggcacatctgtttttttttttttttttttttttttaggaagcaaaatccatagggcatggtgatggactgaattattagtctcttcctcacttgtttttccctcccattgattttgtttagtaatggagtgaaggcgagtgatgtggggggaggaatgtgatcataaagcataatatataggaggaagccagttgttaattaaatattttctttagaaaatccataaattggatatctcctgctcccagtaatttggattttggttatactgtttactatttggacactggggattttgtaaatccaaagaaaggcttctcatgagggattacactgtattaatcttttagagtttgtaagagtgattttattatttgatactcattgaaatcctgggagataggtgagcaggtatcctgaggcttagagagggtgggccgcctctggtacgtcaggtgtcacatacgttctggtctcaggacctgtgctttttcactatacagggctgccctgtagcatctgggtaaaggagttgagaggtgatctgtctggagagcagcaattatagggctcatcttctccaagacaagagcaaggagaatgtggattgatgccagagggcctgaagtttcataggatcttgatgaaagctgaacagcttggcagcagcacctgtgtgaagcaggagacagaggggcacctgggaatgtccacccctgggaagttccacacacagagcaaatgggacgatctgggcttctgccaaagtggccttttgtgccgtgagtctcagatacaggtcttgcctggggcaggaagaggaaagagaatgacatggatgaaggaccaggctgtctttctgtcttctttccaaggcagagagatgcttccaagtgctttttcaacaactacttgagaggccatcttgacctgaaattccctctgtttccccaaagaagggcaatggaggagaattgtcatccagagccaggcagctggtatccgtgaggtcaccccagtctccctttaggcagtgtaaccaacagcttctacagtccaggctccagggtgggccaggggctgggcatgtctcaccctgtcctctatggaagattcttaggaaaccacagtcttcttcattgtctcatatccttcagggtcaggaagttcttcctgatgtctgactgtgcctcttccactactattaatcatgcttgcaaagctagctcttcttcctgatgtccctgtgtctaataatggcatcattagtcttccagtcacggctgctgcaaacttcagggtcttcttactttctgaatttctctctcctattcccactatttgccattccctgtctgccagaaccctctgagcctaccccttagaattccctatttgcacacctcttctccctgtgcttgttgtttcctccactgggtaggttctcttccccatcacctatgtgtatgggacacacagacatcttgtactccatcacaaacaccctctcctctgagaagtcttccttgactgccctctattgaatctggtcccatcctcatctgacgtagcctaacattttggtacctctttacagcacagtcatttgttcgtctacttagtgaatgtttattaaggactggctctgggcaaagccctgagttaggtgctggagatgcagagatgaataggacttagttcctatcctgaagaagaccacattctaagtggggagacagaaaccaaaacagacattttcaatgcagtgtgaaggctgctttcatggggacacccagggtgttataaaagcccgataaagagcataacctagaataagagcacagaaagtctttaagggaaggtggggcttaatatgagtaagtgttagccatggggagggctttgaggtggatgaaaggaaattctaggaggagggtacagtttgtgcagaaataaagtggcctgaaataactctgtcacgtgagaggttgttcccctgtgagactataaacccctcgaggacagggaccactcttaaatcacctctatacacttcccactctcttgcttatggtagctgttcaacaaatgtttgtggaatggaatcatatttgagggcaatggaaaaaaaaaaaaaaaaaaaaaaaaa

SEQ ID NO: 8553 - DNA, 648 bp, Macaca Fascicularis
  misc_feature (1)...(648): n = A,T,C or G
ttgggccccgccgtgcgtcccnnnnaggagagatgagtcacactctggaactgtccaagaacgaacctgccatcacatctcactgccagatgtataaagcacctgcatgctcagacttattatggcgccacctccacgtctgtcttgtacatgacattcctccacgcggtttccagtgtccacaccgctgcccgtgcagtgggaccagattccaggtccaaagtcaccatgaggccaccctggaatcagaactgcacaatcaagagggaacccgtgggactctctgctacattcagttcttgtgtcgtttgtgaaggttcttaacctgcccacaaacccccttttccccaagctggcccatggggctttggcgcctaaggtgacctgtgccaacctccctcccgccccagagcctgtgacggcggcacagcagccagcgggcggggggctcgtgttcacccatggtggccatgtcgttcttctctccctgtgacacagcttgtacagtctgattctttttatctgggatagggggacttttatgtttgtccgatggagatttgttttgttttgcttcgttttatgcttttttttttttttagttttgatgttctgaggtttggtttggtttctccattttctttggcg

SEQ ID NO: 8554 - DNA, 1546 bp, Macaca Fascicularis
attggctacggccggggactccttcccgcagcagactccccattggctgaagccggggaccgcgagacccttcgtggtaatggaaccggggaccctgatcagctcctcgccccccccaactccccgatccgacggcgccggcgggatgcgccccgcctcccctgtaggccggggctgcgagccctgactaggccccgagagccgagcgcggcccctcggtgctccggtggccgcctggggatcctttccctccgacctgttcggacctgagggggccctcccccagcttcacggggactccccacccagccggtgcccctcacggtgccgggttggggtctgccccgccggaaccgagccgccgcctccaggtggccgcaggtccctcgcccggagcccaccctcctcacctggcgctgccgatggcggcggcccctggcctctcctggtgctgctgcggcggcggcggcggcggctgcggcgccaagatgccttcggctccccggcggagcccgctcccggtagttgccacaggccctaggcagggggagacggccgctggaggcccgggaggagccgcggaggtggccagcggccccgggaggccgccgttgggagggctggtgcccccggggagccggcgggccacggcctgttgcgtggggggcggctgctggggctgggagggctgttgtggcggctgaggcttcaacatgatggcagcgtccggaaggggaattagagggaagggagggagagagggcgccggggctggggccccgctggagagcgcgggaagcgagggggatcgggcagcaggggcccgccgttggcgggcgggggagccccgcggtgtcgggggtggagagagaagaccgcggcgcgaggaagcgccgcgaggcggaaggggagggggtctcgcgggctggaaagcgagagggcgcgagccgggctggcgcgcgtgcgcgtcgccggggcgcggagagggaggagcgcgcgggcgggagctcccggggggaggggcggcaggagcgagcagtggcgcgcgaggtgccgcgcacaccggcgcggttagctcccggcgggagacggggagagaatcaagtcggtgaacctcgcacccctagccctgggagtgggtaaggagcggcgcgggcgctcacgcgcgccaaggatttagggtctcaaggtctcaaaccgccttagaagccggcggccgctgtcgtttcacaatgagcgtgtgaggcgctgggggaggagccgaagacgccagaggaagggccggccgctccgcccacgccggcgctgcgtcgcgatgcctccgcgggagtgtgaggcggcacgtcgtgcgtgaggctcttccgccacctgggggcccgtgggcggagccttaagtgccaaaatatctccgggactgcaccactcgagcgactgcgcttttagacaggtggtaggtttcgcaaggagctacgccctaccctgtttaagtaacagactgatgagcattaaagtgattcgtttgagcgtgaaaaaaaaaaaaaaaaaa

SEQ ID NO: 8555 - DNA, 2853 bp, Macaca Fascicularis
  misc_feature (1)...(2853): n = A,T,C or G
aaaaaaaaaaaaaaaaaaaaaaaaacgtaatgggccactcgcgcatcgggtcgcgcagaggtggacccagtcggcctcccctgcagcgcaggcggcgcctggtcccaggaaagctcccggagggtctggggtgcgggtctggggtgcgggctggggccaggcgggctctggggcagagcagggtgaggcctcttgcaggcccggtcgaggtcctggggatcgtcggggtcctcctcaggagacagcgccacttccgagaggtcctaagacaaagggggccagtaggggcctctgggtgggaggcaggctgcgcttctccacagcccacttccctcacaccctaccccagggtcaccccctgccaggtccctgtcctggtgaccccacctgggcccccaaccaccccacctgcttctgccttggacagagaggcctgagccctcccgcgtgcctgcccaccacgttctcattccaaggacatctgctcagcgccctgtgggttttctccttccctgcccagtccccacagccatgccttccaagtcccttaccagcctgggcaaggctggcacctgtggactgtgaataggtattggggtggcagcgagggagttccactgtagcccagccatctgcaattcagagttggatattggggctgactgtcgtaagtcccctcctcacggacacctctgtcctcagacccccgtcatctccttgctggggccgctcaccctcccatccttcaagaaagcagctcctttctttgtcacagccctccttcagtcacctgtgcccggagtgggtggtgggtggtcagtttatccttcacgcccagacgcccaggagaccacctcccggtagaaagcaccctctcgcagaatgcggcagcacagaggtcacagtggctcccaggcagcccttccctcctgcaaagtcaggtccgtgtgtcaacctgcggatcctacaaaaacagccactagttgggaggatggtagccgggactggatagatggggctgcttctggctcattatttttagtagcctggactctaatttttaacacagcagcgcttgcctcaaaacaaatgcaactcccgcagcaaaatccatccaggaaaaaggctgtccgccacactgaactacagcaacccacaaaccacagggcgcaccccaaatgtgggcttggtggtgatacagtttggacatctgtcctgcccaaatctcctgttgaattgtaagccccagtgttggagttggaggtggggtctggtgggaggcgatggcagcatgatggaggatccctcatgaatggcttgggccacccccttggtgatgagtgagctccccaacttcctgttctggtcatttaaagctgtgtgatccctctccccctaactctccctaactctttccctctccctctctccgcctctccttctctctccctctcagtctcttcccctctacctctctctctctccgtccccctctctgtccctctgtccctctcccctctctcttcctgtctctcccatcctcactatgtgacatgcctgctctccctttgccttctgccatgatcagaagctccctgaggcctccccagaagcagatgccaccatgcttctggtacagcctacagaaccgtgagccaattaagcctcttttcttacaaattacccagccttgggtatttctttatagccatgtgagaatggcctaacacacgtggtgagagaagtctgtgtgggcgtgtcgggaggctaggaagagtggcaccaccagatggctcagggtcaggtgcgtcctgggaggtcctgagccatctatggagtcagtgatggaagccacggaggaaaggaaaggtcagagtgagcccgcagagggagagcctcttcatgacggtccgtgaggtgattcggacgcacaggggtgggacacgggattctcttcagtgaaaactactttgtgaggccttaacaccatttctctggtccagatggaggtctaaggaaccaagtgctccacctgaacgaggatgacctggagaggtctgtcgcctgaatgagagtcactgagtttacactgcaggagagctgctcccaagaccaaggccctgcgattcccagaggccgtcggaccgcggcatcccttggtgtgcacagtgggcgtggagaaggacccagagtctggagcctacatcctggaggactgtgtatcttgggaggggccggggcttgtttatactttcattgtttgacttgctgcatgcttaatggtagtttcctgaacaaggtcctgtttcaccccaagggccctgaactttaggacgctgactgtgtcaaagcaaggttaaacacaaacaagccgcaagaaaaggaaagtcaaaaccagaggcactggagggatcacaacaaaaagcaccttgagaagcacagcgcctacaagacagcagcgcagcgtggccggctccctgcctcaagcaccagacacactaacccaggttccgagagggggcaggtcaaccctggataaaataaactccaggaggccgggcacannnnnnnnnnnnnnnnnnnnnnnnnnnnnnnnnnnnnnnnnnnnnnnnnnnnnnnnnnnnnnnnnnnnnnnnnnnnnnnnnnnnnnnnnnnnnnnnnnnnnnnnnnnnnnnnnnnnnnnnnnnnnnnnnnnnnnnnnnnnnnnnnnnnnnnnnnnnnnnnnnnnnnnnnnnnnnnnnnnnnnnnnnnnnnnacccaggaggcagaggttgcagtgagctgagattgtaccactacactccagcctaggtgacagagcaagactccatctcaaaaaaaaaaaaaaaaaaa

SEQ ID NO: 8556 - DNA, 679 bp, Macaca Fascicularis
  misc_feature (1)...(679): n = A,T,C or G
agggnaaggaattgtagcagaaacagatgtatttttcttgtgatttttattttgaatcaaatattgtaaattgtgtataaatgaagatgctgaatagttctgtttccacttggcatttcaagtctgatatcaggtgtctgtacagggttttgatctcttccccttgtataactacacagcaatcctacagtgtaacatatggaatcattttgagtagacttgtgtgttgctataagctttcagcaggtcctctgtctctagaataagcatgttgtttattttcagataatcggaaataagtgtgctgacaagctggacacaatctgggtgtgcccagcttacctttctttctgatgtttaaattgaaggctgcagccaatggaatatgttcagttggttttccttggcttcctagattaaaaaaataattataaaacaaagcatagttctttattaactttaggatattgttcgtaaaataaataaaggcccctgcactaacatgacaacatgcctcatggtcaccctctgtattatccattactcaccacttcctcattaaagtgtattttatttccttatgtggaaagcacttttataacatcacccttttgaaaagaagtgggcacagagaaccccagtcttgttctcttcctctagcgccattgtccatcatcaa

SEQ ID NO: 8557 - DNA, 1262 bp, Macaca Fascicularis
  misc_feature (1)...(1262): n = A,T,C or G
gtcatcatgagggtattggatacgttgtatctctattttaactcattatctgttaatgaaattgttgtaaatgggaaccaaatttgtagaacttaatttctactttttacagtgcttaatttcatttttgccttactagtcaaagacttatacaacatttttaacaagttagaactttttttgtcattcagtcatataaaatagcagaaaactaacatcaagtgacgacaatgcactaaatactttttttgtattttactgctatcaaatcagaatgaaatatactttaccatagatatttttcttctatttttggttttccaaagctatattaaagacaaatttttaaaggtacagcattcaaaaagtgcttaatgaactccaacagctgcctcaaaaatctgtatatgagtacattttccctaagcagtgatacattatccaaagatgaagagtgctcctatttttaannnnnnnnnnnnnnnnnnnnnnnnnnnngcagagctttaatggagaagaaatggactttatttttgaaaggtgaaatgaacaggcatttatattattagagaatggtagttttattttggttgaacgtaatgtaacaaccttgaatttcagaggactctgagtgcttctatgtccactacctattgttctattcttcagtaatgaaaaagaattcaacgagccgaccgtgattccctctattacaaatattatgtcttgtaagttagcatttttagcacacaggagaaattttatgtaataaaattactgtatctcttggatttaacaaatttgtatttgaacacattctatgtctgataattcttaatggcacttttactaatttatttggggatcttgggtacattcttaatttgtgttatttattcttcacacttgacttggaagtgggatattcccctgtcacaagtgtccgacagtgatagacttcctgtgttgtgactggacagttttccagatcttttttgggagattttcctacagtttggttgtatgtcttgagataacaccactaaacagctctcaaattcttttttgattgatcagtagctatgatgattctcctccatgacactaaggattagtttatatatttaagagaaataattgctaaaattaaaatgcctctatcaaggaatgctattataaattattgttaacattctcaagtattaattttttaatctcattggtgnnnnnnnnnnnnnnnccagccactcattttacatggc

SEQ ID NO: 8558 - DNA, 778 bp, Macaca Fascicularis
  misc_feature (1)...(778): n = A,T,C or G
aactttttatttccccccaatnnnnnagttcggtagatttcaaactggaatagctagcatgtgcttgctaaataattttatgccagccttatcctgtatcctagctgttcttaatagcaggtannnnnnnnnnnnnnnnnnngcaaggttgaaattgggaatgtccnnnnnnnnnnnnnnaaaataggccnnnnnnnnnnnnnnnnnnacaaatgggcattctatgaaatggtactggccccaggaggatttcctcaaccactctcctactcttggccttgaacctacctctgggttggatcttactattgtagctgctcactataccctcctgcatgcttagaataatgctttggggggagcactggtaaaacacagtatttatttttttacctcctttaagaggacttggaggtaagttgcattcattcactcaagtttcactcttgctgtctaatagaagcttacgtnnnnnnnnnnnnnnnnnnnnnnnnnnnnnnnnnnnnnnnnnnnnnnnnnnnnnnnnatcatttcctggcccatcatcaaactaatacagcttaaccttgcagctgccaacttttgtgtcannnnnnnnnnnnnnntttgatatctaaggtgcaagaccaacaatatattaagagatctatagacatgaaggcaaagctcttgtattttttttcatccaaacacctcaatttattttataaatttgttcatttttcctgttatgttttatataatatatggactaaacaaaataaaataacagtacaaa

SEQ ID NO: 8559 - DNA, 753 bp, Macaca Fascicularis
  misc_feature (1)...(753): n = A,T,C or G
aatgacagattacctgccattngggaaataccttgttgtggcctttgtagcagctacaggaagatggaagaattcttctgtacagacaggtctccagcctctttggtgtggacactgtgaaggggtacatctggtgagaaggagtgcttagggaaggaactgggaaggtccacaaaggctgatgatgacaaagaatccaagggctatgatgaattcttaagcttagatctcagagtcataaagtaaatttattaggctagagagatttccttttttatttttgatctaactttattttttcagatttataagttcacatgcagttgtacaaaatcatacagaaatctttgaacactacccagtttctcctaatagtaacttcttgcaatatactgtatagtacagcatcacaacctggatattgacattgatgcagtcaagatagagagcatttctataaccaggaggatccctcattactgcccttttatagccacccctacttccagaccatctcactcctcccttaaccctggcaaccactagcctgttctccatttctataaatttgtctttataggaatgttatataattgcaattaaagtgtgtaaccttttgggggttgactcaaacccagcatcattttctggagattcagcttatatgtgtcaatagtttgttccctttttttcagttcaataatattctatggtatgcatgtaccacatcactcatcaattagaacttctggg

SEQ ID NO: 8560 - DNA, 732 bp, Macaca Fascicularis
  misc_feature (1)...(732): n = A,T,C or G
cgccnnnaagtcacgcaacagggaagcctgnnnnntttgtgagggaactagaagnnnnnnnnnnnnnnnntcaggtgggtacacagagacttattcacacnnnnnnnncgacatctctcaatgcgtgagaaagctattactttgggtcttgaatttttttagtcttctcaaaaccctcaacttaaacacaaatggccacgagagacaaaacgcctgaggtatgggaaggtatgcacattgagaacaatcccggcaaagcaaacaggaaaaagatatagaatgatccgggggaggaaaaatgtggaggacaaaagaaaacgaacagcttcctgcattccaccctnnnnnnnnnnnnnnnnnnnnnnnnnnaccacacagctgtacggccttacccagtgcttctaatcttaggtttgcctgtctaggccacaggttagcaactgcagcttgctgcctgttcttgtacagcccacaagctaagaatgtttttttgtgacatttcagggttaaaaatggaagaatatttcagagatatgaaaattatatgaattcaaaatttggtgatcataaacaaagttttattgcaacatggtcatcatttacatnnnnnnnnnnnnnnnnnnnnnnnnagaacagcagagctggacagttgtgacagagaccttatgacccacaaagcctaaaatatttactgcctcatttgccaacacttgttctaaaaggtctgttcag

SEQ ID NO: 8561 - DNA, 694 bp, Macaca Fascicularis
  misc_feature (1)...(694): n = A,T,C or G
tcccaaagtgctaagattacaggcatgagcctctgcacccgaccttcattctttttgtatcacttggaatatgacatgctgaaccaggcatggtggctcatgcttgtaaacctgatgctttgggagaatgaggtggttcacgcgaggccaggagttgagagatcagcccgggcaacatagccagaccttctctgcataaagaatcacatgctatgaaaacttactgtatatcatttatctgttgaagtgtatttcagttgcttgtttttgtctgttataaatgcaactgctacatttgaatgcagttgtttatataggtatccttcactatgttaatacagtggtgtgtagtgcctgagtcacatgatagattaaagtacaactcttttgtgagacagannnnnnnnnnnnnnnnnnnnnnnnnnnnnnnnnnnnnnnnnnnnnnnnnnnnnnnnnnnnnnnnnnnnnnnnnnnnnnnnnnnnnnnnnnnnnnnnnnnnnnnnnnnnnnnnnnnnnnnnnnnnnnnnnnnnnnnnnnnnnnnnnnnnnnnnnnnnnnnnnnnnnnnnnnnnnnnnnnnnnnnnnnnnntacaaactcctgacctcaagtgatatgcctgcctcggcttcttgggcgtgagctaccacgcttggcctaatgtacaactttttaagcaacccccaaactattatat

SEQ ID NO: 8562 - DNA, 2319 bp, Macaca Fascicularis
attagcagagaagggggtggcagagtgctggcgctaaaggtcacgatgcacgggtaactgtcgcggtgtaggggcggggaagagggaggagacactgaccaccccggagctcgctggctttggacgtcgtcgttcccacagcgcccagggaaccccagtggctctcttcctgtcttcccccattaccacgcaggctttgtcaccgcattaaggcattcccgctctccgcggaaccgctctgccatctcggcggtgaaagggtgagagggccagtgtttgggtcaactttgactcctcccacacgcctggatccttaagggcctcctcgttcccccggatcgttaagggcctcctcgtcctccagggctccggtcgctgcggggtctgtgtgcaggtccgcgaccgccctcgttctgccatgggcgcctccagttcctccgcgctggcccgcctcggcctcccagcccaggcccggcccaggtggctcggggtcgcggtgctgggactggccgcggtggcgctgggggctgtcgcctggcgccgagcatggcccaggcggcgccggcggctgcagcaggtgggcaccgtggcgaagctctggatctatccggtgaaatcctgcaagggggtgccggtgagcgaggcggagtgcacggccatggggctgcgcagtggcaacctgcgggacaggtttttgctggtgattaaggaagatggacacatggtcactgcccggcaggagcctcgcctggtgctggtctccatcacttatgagaacaactgcctgatcttcaaggctccagatatggaccagctggttttgcctagcaagcagccttcctcaaacaaactccacaactgcaggatatttggccttgacattaaaggcagagactgtggcaatgaggcagctcagtggttcaccaacttcttgaaaacagaagtgtatagattggttcaatttgagacaaacatgaagggaagaacctcaagaaaacttctccctactcttgatcagaattaccaggtggcctacccagactgcagcccgctcctgatcatgacagatgcctccctggtagatctgaataccaggatagagaagaaaatgaaaatggagaatttcaggccaaatatcgtggtgaccggctgtgatgcttttgaggaggatacctgggatgaactcctaattggcagtgtagaagtgaaaaagataatggcatgccccaggtgtattttggccacggtggacccagacactggagtcatagacaggaaagagccactggacaccctgaagagctaccgcctgtgcgatccttctgagagggaattatacaagttgtctccgctttttgggatctattattcagtggaaaaaattgggagcctgagagttggtgaccccgtgtatcggatggtgtagtggcggatccactagggtgatatggtaaaaggcttcagcacccaggagggattgactgagatcttaacaacagcggcagcaatacctcagcaaatccttattatccagccttcaactatttttaccctggaaaacaatctcgatttttgacttttcaaagttgtgtatgctccaggttaatgcaaggaaagtattaaaggtgggaatatgaaggtatatgtataaattttaggtactgaaggctttaaaaataattaacatcatcaaaaatgctattttgaatgttatcatggctattatgcttttacttcctgactttttgatgaataaagtaagtttaatggatcaactaaaaagctgcaaaaatgtttttaaaatgtgttccttttgttacctatcaggattacctgatgtgcaggacacatgataccacactcacaaatgtctaatattggtctttacgtggccattgagtcctgttgacttttcactcatgtgctctagcattatgggatctgggctgtacttgagtatggaagttctcttatagacttagttttaatattctattacgcctttgttaagccatataaaagtaatctgtttgtgtgtaactgccagatacaccacctggaattccaagtaagataaagaagaggacctttaaaagaggatggaattttgagggtaggatcgcaaagaagacagcatgaacgtatttttttcaatgcaaataatttttttgtaacaaaaaaacgaactactttggtatgatcttaagcaaaaatattcactgaaatagtatatggatgaattcacctacttacaattttatggtttctttgtaactaataaacgtgaatctcaatcctgctttaaaaaaaaaaaaaaaa

SEQ ID NO: 8563 - DNA, 769 bp, Macaca Fascicularis
  misc_feature (1)...(769): n = A,T,C or G
agcacaggactaatgtgaaagtagaccccagagattaaaaggctgtcaggagacagggggctggtgtcaacctggatatctactgtcttatgcaacatagaagattaccttttagtgtagtgctcctacctcagtttgtagaatctggtgtttctatgcagtgagtgatagcctcaactccgacctttcatattcacattagagacagatgcaattccatatcctagtatgttccttgtgtctagagttctaacagtacagtagtctatgccatttctaacagctaaattttgctctctaaacagaaactttagggttgtttnnnnnnnnnnntcatcccagaaaatatggatagaaaagtttccttcagtttgcttttcaaatagtgcttgaataataaacctcctttggtgattagtcttttttggtatatctccaccattaaaaattgttcaagtttttaacctggttatactgtgttctaacatgtctcattttctctcaaaattattttatctcattgtagaaaaagcactggttttcatagcttcatctatcagaggaaataaaactcttactaaagaatagtgtactgcatctttaagcagtagagggtaaactacctgcaaatgtgaatttcttagtttcatttaaaatatatatagtnnnnnnnnnnnnnnntgccaaaaactcttaagttacattttccttcaaagcaatgtacttttttctacatatgcagtatgtagttagcataaaatcattggtg

SEQ ID NO: 8564 - DNA, 733 bp, Macaca Fascicularis
atgtacagacatctttttcacctccaccaccgtgcccaaggccctggtgaacatccagacccagagcacgtccatttcctatgcagggtgcttggcacagctctacttcttcttgacttttggggacatggacatctttctcctggctgtaatggcctatgaccgctatgtggccatttgccacccactccactatatgatgatcatgagcctccgccgctgtgccgtcctggtggccgcctgctggactctcacgagtcttgtcgccatgactcacaccttcctcatatcccagctttccttctgctctaagatcattcctgacttcttctgtgatttgggaccgctgatgaaggtgtcttgctttgacacccaggtcaatgagcttgtgctcctgttcctagggggaacagtcattttaatcccttttatgctcgtcctggtctcttatatccaaattgtttcagccatcctcagggcgccctctgcccagggaaggcgcaaggccttctctacctgcggctctcacctcgttgttgttgctctgttcttcgggacggtgatcagggcgtatctgtgcccctcatcctcttcctccagctcagtagaggaggatacagcggctgctgtcatgtacacagtggtgactcccctgctgaacccctttatttatagcctgcggaatcaaggacatgaaggctgcagtggttagacttctcaagggcagagtgtc

SEQ ID NO: 8565 - DNA, 1179 bp, Macaca Fascicularis
  misc_feature (1)...(1179): n = A,T,C or G
ttttccagcattcagtccagaccagctccagtttccccatggggctgcgggacagaggaccattacaactagatcaaggagcccagaannnnnnnnnnnnnnnaaacaggttttcaccatagcctacttcaacccatttttgagccaagcttcaaccctgagccttgaaaaacaagtctttttttaatttaatttttgttttttgcctcctccnnnnnnnnnnnnnnnnnaatccaaagaaaaagggctgcctggccgggtgcggtggctcacgcctgnnnnnncagcactnnngcaggccgagacaggtggatcacctgaggtcagtagtttgnnnnnnnnnnnnnnnnnnnnnnnnnnnnnnnnnnnnnnnnnnnnnnnnnnnnnnnnnnnnnnnnnnnnnnnnnnnnnnnnnnnnnnnnnnnnnnnnnnnnnnnnnnnnnnnnnnnnnnnnnnnnnnnnnnnnnnnnnnnnnnnnnnnnnnnnnnnnnnnnnnnnnnnnnnnnnnnnnnnnnnnnnnnnnnntgtatctcaaaaaacaaaaaaaagagggctgtccatgtactcacacacccctcaaaagccactggtttctcagaatccaaagatcacatattctagtgtaacactgcaagaagtcttgagaaaaagattattgtagtgttcaaaatatttttgcattgttaatacatcatcatagaaaaacttttttaaacatgagaataaagatactttttacnnnnnnnnnnnnnnnnnnnnnnnnnnnnaggaataagttgttnnnnnnnnnnnncacaatattatttccttttcttctccacagttaggaaacttggagtttgttccctatggtgcatatgttcccaaacctccagcctgcagaaaccagggattacacttgtcatctcccctaaaggggtgtgggccctgcctgcctcacccctgagagctaggcctatactcctaagctttgctctcttagcccccaatccccccannnnnnnnnnnnnnnnnnnnnnnnnnnnnnnnctgctccccagtgctcatataaaatagatcagttggtaactgcnnnnnnnnnnnnnnnnaaagagaatccaacctgaaggccgggtgtggtggctcaagcctgtaatcccagcactttgggaggccgagactggcagatcacgaggtcag

SEQ ID NO: 8566 - DNA, 696 bp, Macaca Fascicularis
  misc_feature (1)...(696): n = A,T,C or G
cactaggagnnnnnnnnnnnnnnnnnnaacagatttgttggatggattnnngctcgaaactgggccaatcaaaaatcagctttgggaagnnnnnnnnnnnnnnnnnnnnnnnnnnnnnntatcagtatcttatatgttagcttgacctatgcagatcttattccagttccgcttacttatatgatcatttcaagagatgtaatgttgattgctgctgttttttatgtcagannnnnnnnnnnnnnnnnnncacgaacacttgccaagtatttnnnnnnnnnnnnnnnnnnnnnnnnnnnannnnnnnnnnnnnnnnnnnnnnnnnatacagcagtccagtnnnnnnnnnnnnnnnnnnntnnnnnnnnnnnnnnnnnnnnnnnnnnnnnnnnnnnnnnnnnncagatactgtnnnnnnnnnnnnnnnnnnnnnnnnnnnnnnnnnnnnnnnnnnnnnnnnnnnnnnnnnnnnnnnnnnnnnnnnnnnnaaaagactgatgaaagccatctatcnnnnnnnnnnnnnnnnnnnnnnnnnnnnnnnnnnnnnnnnnnnnnnnnnnnnnnnnnnnnnnnnnnnnttttggtgttcagcttgnnnnnnnnnnnnnnnnnnnnnnnnnnnnnnnnnnnnnnnnnnnaatgtgcattgaaaataaggttgatcatgggaatatgcagaatttccaatgtatt

SEQ ID NO: 8567 - DNA, 1083 bp, Macaca Fascicularis
gggaagggttaaaggcccccggctccctgccccctgccctggggaacccctggccctgcggggacatgaactgtgtttgccgcctggtcctggtcgtgctgagcctgtggccagatacagctgttgcccctgggccaccacctggctcccctcgagcttccccagaccctcgggccgagctggacagcaccgtgctcctgacccgctctctcctggaggacacgcggcagctgactatacagctgaaggacaaattcccagctgacggggaccacaacctggattccctgcccaccctggccatgagcgcgggggcactgggagctctacagctcccgagtgtgctgacaaggctgcgagcggacctactgtcctacctgcggcatgtgcagtggctgcgtcgggcaatgggctcttccctgaagaccctggagcctgagctgggcaccctgcagacccggctggaccggctgctgcgccggctgcagctcctgatgtcccgcctggccctgccccagctgcccccagacccgccggcgcccccgctggcgcccccctcctcaacctgggggggcatcagggccgcccacgccatcctgggggggctgcacctgacacttgactgggccgtgagggggctactgctgctgaagactcggctgtgacccgaggcccagagccaccaccgtccttccaaagccacatcttatttatttatttatttcggtactgggggcgaaacagccaggtgatccccctgcctttagctccccctagttagagacagtccttccgtgaggctggggggcatctgtgccttatttatacttatttatttcaggagcgggggtgggctcctgggtccccgaggaggagggagctggggtcccggattcttgtgtccacagacttctgccctggctcctccccctcgaggcctgggcaggaatacatactatttatttaagcaattacttttcatgttggggtggggagggaggggaaagggaagcctgggtttttgtacaaaaatgtgagaaacctttgtgagacggagaacaaggaattaaatgtgtcatacat

SEQ ID NO: 8568 - DNA, 733 bp, Macaca Fascicularis
  misc_feature (1)...(733): n = A,T,C or G
ggatccgtgtccttcctcagcaggtgctcagtcctctcctagggagaagcacagaaagattcctcaaggnnncagccccatgtccaaggcatacctaggttagaaatgtcctttacttgtttctcagtaactatttctcctcttcctctgtccccctgccttctcttggctgtcatttagctctgtggcccacagaaatacttcatccaaggagttggtcctcagtcagcctgatgaggannnnnnnnnnnnnnnnnnnnnnnnnnnnnnnnnnnnnnnnnnnnnngtcacatagtcacgtcaacagttcacccaaagagaagaggtggacctggcttctcccacagggcacagcgtaactatggagacccagggctccttcctgctgcactaggcctgtactctctttagtagtgtgttcctcacagagcccttttttccttctgcccagttccatcccaccagagtttctacccccgctgaggcatctcctaggcatagactccccacactctaagccgtctcacctggagagttaggatcctgcccacctggagttggcacgctggtcactcactttgctttggtctgcacacctggtgtgtgcatgtgtacactgcttgtgccatctgtgtacccctctccctggagtacacttgtggcacactacagtggggacatcaagaatgcaatatttatggattgctgcatgattcnnnaaaatgaataaaac

SEQ ID NO: 8569 - DNA, 753 bp, Macaca Fascicularis
  misc_feature (1)...(753): n = A,T,C or G
acnnnnnntctnnngcatgatttgnttgnntttcaaccctggtaannnnnnnnnnncaggcatccagggcattgtggatgcctaccgccaagccctgccccaagttcgtctctatggccccaccaactttgcacccatcatcaaccacgtggccaggtttgcagcccaggctgcacatcaggggactgcctcgcaatacttcgtgctgttgctgctgactgatggnnnnnnnnccgatgtggaagccacacgtgaggctgtggtgcgcgcctcaaacctgcccatgtcagtgatcattgtgggtgtgggtggtgctgactttgaggccatggagcagctggatgctgatggtggacccatacatacacgttctgggcaggccgctgcccgcgacattgnnnnnnnnnnnnnnnnnnnnnnnnnnnnnnnnnnccctcgggaggcattggcacagactgtactcgcagaagtgcccacacaactggtctcgtacttcagggcccagggttgggccccactcaagccacttccaccctcagccaagggtcctgcacaggtcccccaggcctaggtccccttggannnnnnnnnnnnnnntgaatcctgtgtcccagaggtccctcggggccacaacccaacccagcccttcacactctcctcagtgctagcactttgtattttttgatacttttatactcgtttctgcttttgctgctcttgatcccacctgcttgctcctgacaacctcatcaa

SEQ ID NO: 8570 - DNA, 2630 bp, Macaca Fascicularis
ttaaaatttttcccttgagaggccttgtatacaagcatggtattgaaacaattcaattttttcaagtttgccaatactttgcagtttctaaaataaatgggcctggttcagattaccaatttagattatactagccttcttaagtcatccttcaaaaaggttaaacaacaagaagtaatcactgacagtgcattttgtattgggtgcctgatgtgatggaccaagtcctggattaaaagggaagacccaaggtctgatatcatctcctgggttcatccagcaaacactggttaggtatctactatatgccgggcaccatgctgggaacacaaaggaattaaataagagattgtcatgtcactcaaaagctcatagttcagtagaaaataagacatataaaaaataaaggaaaagctgtggaaggatgcaatgacgaagatagataaagggagactgtgaacacaaagaaaaagtagtgtcatgtctagctgatgtggtcaggaagggttcacagaggaatatttcagcgttgggtaggatctttagagtattagaccttggatttcctcctagacaaacaggaaaaatgaatccgtgccattcacttcaccaagttgtgagatccagaaagagaaagtatgtgaattagctttgtgaatttcagtcttgtttaaactgcaaggaattagggattatccatagcttttacctaaacgtctccactataccctttcattttagctttcaatgatgcttacttattttaactcctctttaccagacacttttttttccattttcacctactaaccccaaagactttggggtatcctcatcagtcaagttgggcaaaagaaaaatgagacaaagaaaatcagctatgttgaaatgttttcttctttcaatatgctaacatctaactcgcaatgaaaataatgttgtgtttattcagattatctcattaatttgacccctcctaattcacagctggtgcatgaacaatggtaagattttagtaaagcatattgttccatcaaattctgtgtcaggactcttatgtaaatgacgttagttaaatctgatatttcaaaggaaataacagcacatgagtgttcgctgtcaatttctccacatttctcaataaattacatccattcatttagtaaatatttatttgtacctactctatgtggcacactggaaatagagccattaacagacaagacacacatcctagctcgtgtgcatctgcagattagcaaagaatagagagaactgtatagctgggagcacaatacattgagtgttgaaatgtgagacatgcaaggtgtgatgtgtgcacaactggaagacaaaacccagtacaaggagaaggcaaggctttccagaaaaagaagttataaactgagacgggaaggaaaagagaggtcagtaagtgaaggatgacaattattgctctccttagatcaaattaatttatgtgtatgttggatgaagttggtagaaggggaagtgaggtgaactctatttagtagggaaaataggagaacacacttggggttcatagaatccagtaaagctggaggcacttgagtcggccagcagtgccattgagcacgttctcgcaactgattttaagtatttctcttccttgtgcctaacagccaataatgaaggtagatagggtcattttcatctattaaaactatttacagagctccaggtgtccaacttagagagagggtggaactgaaaagtgtgcagtctccagctaaagagatttctctctttctataaatcaagtggaattttggaaatgtgcttgcaggttatacttgttccctttttatgaatgccaaaatactaataaaacaattcacgagaagtccccactgctcctggatttgaccacttgtgtttatttcaaagtttgtgctcaagtaacctaagttataatgacacaacacatctatgtctaatgattcatgtattgtttggttgtctcaaaattctgttttgcaaaatagatttttttctatctctatacatagatttagtaaaggaaatattacttcattcattcattccacaaatatgggtcttctgctattggccgagtgatgagctaagttctcttatctgtttgcaagtggtgaacaactccagacaataatttttagacatttgtaaaacctatgaaaacagtaaaaggaagggtgtgttcttttgtttaagggtttgaaaaataaaaataatcacattaacacgtacctgaaataggaagactgcatgaaaaatgtccttcctgttaacaaaggcttgaatacatgcttccggtttccatggcagcccaactaaacagaaaaataagtcatagaagtggccttttatatcaatgacttgcttcctaaacaataggaccaggagcaatcagtggaaaaataatgactagtgctgtcctacttacgaaaactgttttacaacttatcagattatttaaaccagagggaacattgtttgaaaaaaaatgacacaaaattggaatttatgttttcattttgactctgtctgtctctacggtaattacttttaaaaaaaagattcaagttaaaaaaaaaaaaaaaaaaaaa

SEQ ID NO: 8571 - DNA, 708 bp, Macaca Fascicularis
  misc_feature (1)...(708): n = A,T,C or G
taaatannnnnataaaataacangcgaacagagtgcaagcactaagccaaaaagtaatcccttttaaagaaacatgtaagtatcattcataatctttctgattattccatcacaatgattcttaatccattcgctttcctcttgtacatttcttttgtacagggtctacagagatgaccccttatcttctgtggccgcctctctctggtgtcaagtttcctgacttgtatacagttcctcatccccaagactgtccttgatgcaaaaatcccctcggcttcctctgcagcnnnnnnnnnnnnnnnnnnnnnnnntctttcttcccgacccaannnnnnnnnnnnnnnnnnnnnnaaaatgccccagcctcttcctgctcctagccttcctgctctgtatccacacagctgaagccacaaaacaagcaagcaacaaacaaaaacagaataggccgcaccctgacagcatgaaaatatatgattatcttttcccaaagagaagagannnnnnnnnnnnnnnnnnnttaaaagagaaaactttccatctccagccacagctgttggcttggtgtttcttaaaatttgaatacnnnnnnnnnnnnnnnnnccagtccctagaaaccttcgaatgttaacaannnnnnnnnnnnnnnnnnnnnnnnnnnttcagaaaacctagtactaaggaagtatttctgtaagtgcttgc

SEQ ID NO: 8572 - DNA, 714 bp, Macaca Fascicularis
gaaaatagtggctaggctagtgtgatttttaagtatgtctggcaactcaaaatgtaatggaatcatcaagctatttgggatttttaacataaaatacactgctgcttgattaatgtgttcagttttcccctggatatttgctattaggctgatagccattcagttggattcttctggagagtaattgattctctaaggtaatggggtgctgcagtgggtgtggcattcacccaggtcactagagtcctacctgtttcatcacatagaaggccctggccatggggaagagtgaatgcagcttctccggatgccttattcccacagacatgctgatatgctggaacaatctggctccaggagtattaatatacttttttgagactgtctacaaaatactattttgtaaaaactatgcctttacatagacattgataggttatatttcttttataacaattgtgtacctaatgttcgattgtgattaattttgggatttatgtatatttataagcctgtctcatgtaaatttttactctaagatgtgtagcacattactaataaagacatggatttctatttatgtaaagtaattgtagcaatattcctagatgctacctaaatgattgttctgtccgtttgccatcataaatacttttatctttggatgattatgttagtcagaatatgttaactaggtttaaactttaaaataag

SEQ ID NO: 8573 - DNA, 697 bp, Macaca Fascicularis
  misc_feature (1)...(697): n = A,T,C or G
tacagagaggtctttaaaaatannngaaaataaatgtgtgctagaagaaaggatggagaaggcacacactaaagatgctttagaagaaagcacagannnnnnnnnnnnnnnnnnnnnnnnnnnnnnnnnnnnnnnnnnnnnnnnnnnnnnnnnnnnnnnnnnnnnnnnnnnnnnnnnnnnnnnnnnnnnnnnnnnnnnnnnnnnnnnnnnnnnnnnnnnnnnnnnnnnnnnnnnnnnnnnnnnnnnnnnnnnnnnnnnnnnnnnnnnnnnnnnnnnnnnnnnnnnnnnnnnnnnnnnnnnnnnnnnnnnnnnnnnnnnnnnnnnnnnnnnnnnnnnnnnnnnnnnnnnnnnnnnnnnnnnnnnnnnnnnnnnnnnnnnnnnnnnncccggccacaggcagcattcttggagaaaaaattttaacttgtctgagagggtggttgaaannnnnnnnnnnnnnnnnnnnnnnnnnnnnnnnnnnnnnnnnnnnnnnnnnnnnnnnnnnnntccaggcaaggccactaacccctcacctacccaaatataatggnnnnnnnnnnnnnnntaccaggaacctccttaagcatatatattttaattctctataatttctttttggatgactacgaagtagattgagtagactgaatctcactgtatacttggctgaaggtatcccactgtgtttccttcactg

SEQ ID NO: 8574 - DNA, 743 bp, Macaca Fascicularis
  misc_feature (1)...(743): n = A,T,C or G
taggagtgtatcagtgcttgtcttatnacaagccccttttgtgaattnnnnnnnnnnnnnnnnnnnnnnnnnnnnnnaggtattaagaatcagtctgtgggctactgagtgggtccttaggnnnnnnnnnnnnnnnnnnnnnnnnnnnnnnnnnnnncannnnnnnnnnnnnnnnnnnnnnngtagtggccttcctgagtccaatcccacctcctggtgtannnnnnnnnnnnnnnnnnnnnnnnnnnnnnnnnnnnnnnnnnnnnnnnnnnnnnnnnnnnnnnnnnnnnnnnnnnnnnnnnagcaaacaccaacatatttacaccctcccagtaggttcctcagtctgannnnnnnnnnnnnnnnnnnnnnnnnnnnnnnnnnnnnnnnnnnnnnnnnnnnnnnnnnnnnnnnnnnnnnnnnnnnnnnnnnnnnnnnntattgtgaaaagggtgtaacaaggagatagggtagacattgtgctcagtgggccttggggcctagcccagctctgagcagnnnnnnnnnnnnnnnnnnnnnnnnnnnnnnnnnnncttctcggataacacatgggccttctcttctggatttcatcagagattacagccagatgggggctgaagaccagcctcttgaccacagaggtgtgactatgggaattcctcccaatttattgtttcccnnnaaaatcttccttccttttatttatagaatgcatgtcttttnnntaagaaaccaaagaa

SEQ ID NO: 8575 - DNA, 545 bp, Macaca Fascicularis
  misc_feature (1)...(545): n = A,T,C or G
agcactggcctgagacagtatgcgagaannnncannnnnnnnnnagagaccctccggattactggacaatacatggactatnnnnnnnnnnnnnnnnaggatgtaatagatcgtggcccttcaatttagaagagattaaggaagcatgagtgggaaaagcatgggacctgtgccgcccaggtggacgcgctcaactcccagaagaagtacnnnnnnnnnnnnnnnnnnnnnnnnagggagctggacctcaacagtgtgctcctaaaannnnnnnnnnnnnnntccatcaattactaccaagttgcagatttnnnnnnnnnnnnnnnnagagtatatggagtgatacccaaaatccagtgccttccgccaagccaggatgaagaagtacnnnnnnnnnnnnnnnnngaactgtgcctcactaagcaagaccagcagctgcannnnnnnnnnnnnnnnnnnnnnnnnnnnnnnnnnnnnnnnnnnnnnnnnnnnnnnnnnnnnnnnnnnnnnnnnnnnnnnnctgagggtctgtgaagatggcccga

SEQ ID NO: 8576 - DNA, 2468 bp, Macaca Fascicularis
  misc_feature (1)...(2468): n = A,T,C or G
gatggacttggaacagaagcctccaaaacgtagtcattgggcattggtagaatgcctttcctttgactagggaaataatgtaaaatctttttgcaatgtctctccctgcagcatgtaaactgagctatgcaaaaagcagtggctccaggctagttattcttagggcagttttaaggataaaataacctttattgctactgtttagtggagtactataataaaataccctggttgcctttgtcccctggtctctgcttccaaatgcaggactgcttctaccaagtaaagcttatgttacttaacatgggagaaattgaccagcaaaagattaaaataattcctgtttgattttgtaatagaaatctctactaagacctcttatgaagtttgcctgttatctgtcttaagcaatactaccttttccataaacaacgttcattccttagaagagtataaaagaagaagctataatttgtctaagatagcagatatcagagacaatgtcatgtttgtgataacatgtttactttaaattaagaaagcattcacagaacatgttttataggcaatccagaactttaatagcatgataagaattctatattatgttcagattgtagcttgcctctccccacttcttcattctatttgatccttcagacaggctataggtctggctcattttggctgggcctgctgtgggccaaaagactatcattttatggcaattttcaagctaggtaaaaataatattccccttccacattatttttgatggccatatttttcgtatttaagacagtttgggatatgactaaaaattgtagtggtgattctttctcaaaacaagttgatttcttgaatgctgcagatttttgtatctttccaatacagtctaatttgtcttagctactttttgatctgttttgcacatagccttggatattcttgattttagtatatgtttcctttttatagaatggtctttgctaggaaggaataaatcctgatgtatggtttttagtgaaccaacatacatgaaattttacacaaacaaaaaaagccaacatgttggttaggtgttcttaagataaatttaattaattaattttatttttaaaattttttgagacnnnnnnnnnnnnnnnnnnnnnnnnnnnnnnnnnnnnnnnnnnnnnnnnnnnnnnnnnnnnnnnnnnnnnnnnnnnnnnnnnnnnnnnnnnnnnnnnnnnnnnnnnnnnnnnnnnnnnnnnnnnnnnnnnnnnnnnnnnnnnnnnnnnnnnnnnnnnnnnnnnnnnnnnnnnnnnnnnnnnggtcacactggttttgaactcctgaccttgggtgatttgcctgcctaatttacattcctaccagaagtgtataagtattcccttttttctgcaacctccccagcatctgttttttgtttgtttgtttttttcgagatggagttttgctcttgttactcaggctagagtgcaatggcatgatctcggctctctgcaacctctgcttcccaggttcaagtgattctgttgcctcagcctcctgagtagctgggattacaggcacccgccaccatgcccggctaatttttgtatttttagtagagacagagtttcaccatgttgtccaggctggtctcgaactcctgacctcagcctcccaaagtgtttacaggcgtggttacaggcgtgagccaccgcacctggccataaattaaaaagattgtatctgtagtttggccaccttgattcaaagtcaaattaatctttttggtcttctaagaagccaaggcatttgaaccacccttatgcttaccagttttttattgtcagtagtcactggtattctactaaaaccattctgctaattagttttttccaacatcactgctaggcacaaagagagaatgtgagtcaatcagaaagagaacttgtgctgctacaggaggtgtctccaaatcaagggggctattttagacatgtcttactgctatagaataaatttttatgttcccccaaaattcatgttgaaacctaatttccagtgtgatgatgtttttgcaactgggggcttccatagatgattgggtcatgagggcggagccctcatgaatgggattagtgtccttataaaaagagaccccagagagctccctagccccttgctctttgaggacacagagagaaggtgattgtttaggaaccatgaaatgggccctcacccgacactgaatcttcctgtgaattgatcttggacttctcagccttcagaactgtgagaaaaaaatgtctgttttatataagccagtcagctcatggtattctgatatatcagctcaaacagactaagacaattactcttccctaaaaagagaaaaaagactgaatgtacaagtctgttatgtattagaaatggctaggcattccaaaataaaaccaataaaaaaaaaaaaaaaaaaa

SEQ ID NO: 8577 - DNA, 775 bp, Macaca Fascicularis
  misc_feature (1)...(775): n = A,T,C or G
gaannnnntaagatnnnnnnntctttatgattctgctcaaaacaccacgtgccgnnncagagctttttctagagcctcggtcctcnnnnnnnnnnnnnncgtgttgatgcctcagcccagcgaagccccctcacctgtgccccgggcgacagctcttcagtgtgcagtgcaggcctggggtggactgccaggccttcgctctgtaccagcaacgccgttcttgttgctcctccctgaacaggggtacaagccctggcccctcctcgacactaagccccccacagactcagcctccaaggaaccgctgagcaccctcgaagcatgtcattgtcggtgatccctttttattctatggaactctaacctattcgtgtcatattgaccttttgctgcatgagtcataaattatgaaatcagtcttacggtttttgaaatgtagccagcatttgtaaggctaaacctttttcatgaactgaatttaagtgaatacccaagccacagttcctcttcaaatggagagtgatgatcgacgtttgaatctctgtgccctttccaacggctatggcatcaggttctaaaataagctcgtaatttttcctgttattttaataatatggaaatattagcatagtgtttcttttgatagtgatagactataatccatatttaaattttatagagaagaaattttattgtactgtgatgtagatatttattatccaggtaaggatttgcccggtgtgtattttttacaattgagacattttactttaat

SEQ ID NO: 8578 - DNA, 718 bp, Macaca Fascicularis
  misc_feature (1)...(718): n = A,T,C or G
ttaatccctaaataacttagataatcattcattnnagaacaagtaaaaggatatcattccttttggagaaaaacattgagtgtctagaattttttctattaatgctttgtatattagttttttaaataagatctatagatatgtatttatgtgtgtcttatatatgaaacagttctctgggtttgactcctatgttttgtatttttaaaaactacgacatnnnnnnnnnnnnnnnnnnnnnnnnnnnnnnnnnnnnnnnnntgaagcatgaccaaatagctaaaaatattactagatctttacaaatctatagtctttattgttgttgtactgtggagtacaaggatactaaatattggctattgataaaatactaacttgcatttcatggcaaatagatgttatatcgcttgattagtctagaacatttctaatattttgtgctttcatatatcaaaggagattatgtgaaactattttgaaatactgtaaagtgacatatagttataagatatatttctgtacagtagagaaagagtttataacatgagtttataattgtaccattatacattttcatgctcgatctcatgagaaattcaaaagattaatgatagagttgaaaatatgtttactttctctaaatcaagtctggttgtcaactcaaaaattatgttgtatagttttatcttgaatttaggttttgggactacttttt

SEQ ID NO: 8579 - DNA, 750 bp, Macaca Fascicularis
  misc_feature (1)...(750): n = A,T,C or G
cagtgcannnnnnnnnnnnnnnnnnnnnnnnnnnnngtgaccccagaannnntgccagtaccggnnnnnncagtacagccgccaggagggcctggacggtggccttcccgnnnnnnnnnnnnnnnnnnnnnnnnnnnnnnnnnccccttcagggaagagcacgaagccaggtgccgcccctacggaacacaaagccttggtgtcccacaatggcannnnnnnnnnnnnnnnnnnnnnnntgcagcgcgcggagcagcaggacagcggccggctctacctagagaacaagatccacacnnnnnnnnnnnnnnnngaggagagccataaccgtttctcagccactgaagtaacgaataagnnnnnnnnnnnnnnnnnnnnnnnnnnnnnnnnnnnnnnnnnnnnnnnnnaggagaccgctcggatggcggagcgacagaagagccagctccagcggctgctgcaggagctccgcaggcgcctgaccccccnnnnnnnnnnnnnnnnnnnnnnnnnnnnnnnnnnnnnnnnnnnnnnnnnnnnnnnnnnnnnnnnnnnnnnnnnnnnnnnnnnnnnnnnnnnnnnnnnnnnnnnnnnnnnnnnnnnnnnnnnnnnnnnnnnnnnnnnnnnnnnnnnnnnnnnnnnnnnnnnngagcgagacctgggagccagggcaggggtggctgaccccatgctcagcctctaggggannnnnnnnnnnnnnnnnnngggctgtgctatgtgggatggatg

SEQ ID NO: 8580 - DNA, 530 bp, Macaca Fascicularis
tgaagcgattggcttcgtcatggtaccctttgaatataggggtgaacagcataaaacctgtatgctcaatgctacgtcaaaattcatggagttctaccaagatgtaaaggactggtggctctttgggttctatttctgtatgcccttggtgtgcactgcgatcttctacaccctcatgacttgtgagatgttgaacagaaggaatggcagcttgagaattgccctcagtgaacatcttaagcagcgtcgagaagtggcaaaaacagttttctgcttggtcgtaatttttgctctgtgctggttccctcttcatttaagccgtatattgaagaaaaccgtgtataacgagatggacaagaaccgatgtgaattacttagtttcttgctactcatggattacatcggtattaacttggcaaccatgaattcatgtataaaccccatagctctgtattttgtgagcaagaaatttaaaaattgtttccagtcatgcctctgctgctgctgttaccagtccaaaagtctgatga

SEQ ID NO: 8581 - DNA, 731 bp, Macaca Fascicularis
  misc_feature (1)...(731): n = A,T,C or G
cagaaatacttngatctnnnaagatataagaggcagcagcaaacgtgcctattgacgtctgtttcatagttatcgcttacgcgagtagacaaaaccctccttttcagaaaataggtgtcaagtccactttataagaacctttttttctaaaataannnnnnnnnnnnnnnnnnnnnnnnnnnnnnnnnnnnnnnnnnnnnnnnnnnnnnntaactttaggagtatcccttcctgtgattgtagacttttgttgatattctttctggaagaatgtaattcttttcttgaagggttggtttactggaatattccaaatcaatcannnnnnnnnnnnnnnttttgagtctaaaggttttctaaatattaacctcacatcccttctgttagggtctttcagaatatcttttataaacagaagcatttgaagtcattgcttttgctacatgattcttgtgtgtgaaggacataccacgtttcaatcattaattgaaaaacatcacataagaccccaactttgtttggaggaagagacagaggttgaggtttttccttctgtataagcacctgctgacaaaatgtagaggccattcaaccgtcaaacaccatttggttatatagcagaggagatggatgtataaattactgcattgctttttttcagtttgtataacctctaatctccgtttgcatgatacgctttgttagaaacattaattgtagttggaagcaag

SEQ ID NO: 8582 - DNA, 1855 bp, Macaca Fascicularis
  misc_feature (1)...(1855): n = A,T,C or G
agaacacagatggtggcggcgttaggggtgagattgaggtttggggtgaattgccctctaaaaaggttatcccggtctgtgcgcctctaaaaaaattgaggtaggggtgaattgccctctaaaaaggttatcccagtctgtgcgcctgtagatcccagtctgctcatcctgagggatggcagaggtagccagatgaagaaataggagcttatatgttatatatgccaagtgattttctgtaggctaaaaagttgcagtttccaggcaagttttgtcggcattgcaggccctgcgagccaaccagcagcgtacatagtgtccacctggtctgtggagtgctccaacaagcggcccaaaacagaacagtgcccaccgtggggccctcagccccagacatcaggtgggagataggttctccggctgctgttctgtgctgggtacatgggttacttcacttaaatcttacagcgattctgaaaagcacataacaccatttctgtgtttagatgagtgagattaatgaggagaactaacgtgatttatccaaattcccattgctctcgtgtggctccagggttcagagccctgcagggattctccacgtccccccgaaacgcccccattctagcttgccaggcccaagcctctctcccactcagtcatgccttctccagccttttgtggcctcaagtctcccatgcgagcgaaatctccccctgcacagcattctgttcaccagccagttagagctggaaggtacctctgcctgaatcaggacagtgctgactctccgtgggtgaggagggtgagcgagttacattcacatgtagtgagtgtcaagatggaaatcccaggcctgtggttcccaaccttgtttgctcatctctagcccacattggtgatggtagggaatgggccaccatccagagctgtttctagaactctgtgaacacagatgaatgaactgtatttccctgccctgcatccattcatccgtccagcattccttgagggcctgttagtgcctcatcctagggcacgtgcctgggattgccatgaactaggtaagtctctgacctgggactttatgatccggtagaaaaatggtagcttggagagagaaccttatatcctggtggtattaaaagcttcagattttgtcgggcacgtgcctgtagtcccagctacttgggaggcagaggtgggaggattgcttgaacccaggagttcaaatccagcctgggcaacatagtgagaccccccatctcgctaaaaaaataaatatatacatttaaaaagcttcagatgtcatcttagatgcccaggctcattggtttgactttacttttctagatttcatctttaaaaattattcatacaaaagttatacatacttcttaagacataaatatattaatagaagaggccaagattatagaaactttaaagtgcagaggttgtatcaccctcctctctgccttgctccaagctattcccttccttaaaagtagaactactatgaacagtttggttctatcttgctgaacttaaaaaatttgggctgggcacannnnnnnnnnnnnnnnnnnnnnnnnnnnnnnnnnnnnnnnnnnnnnnnnnnnnnnnnnnnnnnnnnnnnnnnnnnnnnnnnnnnnnnnnnnnnnnnnnnnnnnnnnnnnnnnnnnnnnnnnnnnnnnnnnnnnnnnnnnnnnnnnnnnnnnnnnnnnnnnnnnnnnnnnnnnnnnnnnnnnnnnnnnnnnnnnnnnnnnnnnnnnnnnnnnnnnnnnnnnnnnnnnnnnnnnnnnnnnnnnnnnnnnnnnnnnnnnnnnnnnnnnnncaaaaaaaaaaaaaaaaa

SEQ ID NO: 8583 - DNA, 1184 bp, Macaca Fascicularis
  misc_feature (1)...(1184): n = A,T,C or G
aaaaagtatgactctcagaagcgatgggtaagtaacttgccaaggggcggcttacgataacctcctggcgggcactagaggtcactcgcaggcctccggggggctccacgcctgtcagacctgcccctccagggagctgtgggtgttggggatgaacacagcttcggtggacgcggaggggctggtggttgcttccaaagtgccttcctctgtagggtggaggttacagtgcttcatgaattccatggaatctgatgacttcagaggaacaaagtccatttttagaagcgagagatgtgcatgtggtcattgcttgttcatctaattggacaggattctgtaagtggcagaaatactggtgcagacttgagaaatgaaaattctgtttccacaaagataaaattcagtgcatgaataagacaccacatgcatgtggtctcaggtgacacccgttgtttccttttgaaaaatagtttgaactactcacatgattcctccagacaagacactgacttggcggcttgacacagtcccagagagcaggagaggcatggctaccacatggccccatgctcccttcctctcgctgcccagcaccctctgcaccccctggctgcctggggtcggtggggctgccccaaacctggggcacttttccttgagcactgagggtctcatgacacaagagggactcccagtgagagggtcctgatctgggaggactgttccttgtctttcagggcatgccgtgctcccttcctgtcgccagggatgactgtgttaaatgaacctcttctctgggttagggatagggnnnnnnnnnnnnnnnnnnnnnnnnnnnnnnnnnnnnnnnnnnnnnnnnnnnnnnnnnnnnnnnnnnnnnnnnnnnnnnnnnnnnnnnnnnnnnnnnntgcttcagttgttgagcacacagcagcagcgttggtgtctggccgtgcctgctgtgtccacaggctcctgctccggctgtgggtggcagttttacctcctggggagtggcgttggtgcacaactgtcctggaggctgagagcttctgtctgagcatcggggatacagaataaatttcaagttgtcttgttatgtaatttccactaggatcttctgtttacttcnccttcnaccaaaaaaaaaaaaaaaaaaaaaaaaaaaaaaaaaggccaca

SEQ ID NO: 8584 - DNA, 739 bp, Macaca Fascicularis
tcaaccgctttttcccgggggcctttggaagatttggtggaaggacaagagggcctgtccctgtccccaggaggcaccgacagtccctgtactggttagacacacggagcgctgcacaccgaaagtccaaattgggagctctgcctgccagcagttttgctgagggggtgatcgctgcttctggggggtaaggaaacaagttacagcaattactgcgttctgtgtgaaggggctggggggtgtggtgtcgttggcagagggtcattttagttaggagagctgcctcagcccctcgaacccctggcttggggtgtcattccgcctggcggccaggcctccagcctgccctggcccgggcctggggctgtcacttgccctgagctgaacacttccagattccagcttctacatgggacagacggggacgcacaggccaccttccttctggcagggactcttatttattcccattgctctagggctttcggtttccccttcttccggtaggccgcgtagaggcatgcaccacgcaccgggtaggcttctgcggtgaccccgcggcggcctaagggacgctgcctgccccatcccggctgttgggttgggccgctttgcctctgcttcgccctgtgctgtgttctccagctttgtagcagcggccttgacaaacccaggcgcaccgtaccaaggcaatgtaacttttgattttcggtcaatttaagttctttgtcaccaaaaa

SEQ ID NO: 8585 - DNA, 679 bp, Macaca Fascicularis
  misc_feature (1)...(679): n = A,T,C or G
tcaccactgtactccagnncaagcagacagagaccctgtctcaaaaataaatcagtaaataaataaataaataaataaaataaaacccaggtcagtacctggagaatttgaatgatagagtaataccctaattattagttaaaacctacaggcnnnnnnnnnnnnnnnnnnnnnnnnnnnnnnnnnnnnnnnnnnnnnnnnnnnnnnnnnnnnnnnnnnnnnnnnnnnnnnnnnnnnnnnnnnnnnnnnnnnnnnnnnnnnnnnnnnnnnnnnnnnnnnnnnnnnnnnnnnnnnnnnnnnnnnnnnnnnnnnnnnnnnnnnnnnnnnnnnnnnnnnnnnnnnnnnnnnnnnnnnnnnnnnnnnnnnnnnnnnnnnnnnnnnnnnnnnnnnnnnnnnnnnnnnnnnnnnnnnnnnnnnagtgannnctctgtctcagaaatctcaaaaaaacaaaaaacaaacctacagctgttcaaggaccagctgacagctcaagtgtggtgttttctggtctttgaacacatcatagaaagtgacaaatgatgcaaagcctatgaagaacatgaactataaactggggtagaccaccacccagcttagacacttatctaagccacaaaacatctgaatttgacacatttatatattgcannnngggaagtatgannatcaaaacagg

SEQ ID NO: 8586 - DNA, 770 bp, Macaca Fascicularis
  misc_feature (1)...(770): n = A,T,C or G
cccacagcccatcnngnccgcactgtgtnnntagagtcaatgacagggaggcagccctnctattgtgtatatagagtgggctgatttgggctcaggaaaacctagtcgcttgttgctcttgtctgtgacatttttgtacactggtttgctactcatggcaagaaacagacaaaaccccatgaaaaacaaaacaaaacaaaagtcatttcaaacaaagctgttgttttcaaaactctttcttttggtgtccattttgtgttctattttaaagaatctttcatttatattggtattactgtagtgaagagaatatgataggctgatctgtaatggtttctgccaggagcttagcaaatgcctctgcccctcttcccctacccctgtccttcctcaattcccagctgggattgctatgcactgggcagacctctcactgtctcccctgaacccccacacagtggctgcccttagaaccagtctttatactctccctaaacagcagcggctgaggatttttgtcaggctggctcttgagtgctctgtgcccccaccagtttgctcacctcttggggcattttgtaatatgttttctctgtcttgtaaaaccttttgattgtaccgaaatggtttctgcagtcgcctttggaaataaatagtcattaatttgtgtacttagcattctgaattttagtctcaggtgtttctgttgttgaagatccttgaatgaaaaggaaccctcaccatggggctgactgttttaatgttcttaa

SEQ ID NO: 8587 - DNA, 769 bp, Macaca Fascicularis
  misc_feature (1)...(769): n = A,T,C or G
gaatgaatgnnngagagacagagaggaggaaaagagatgaggattacatacatgttctaaaccctttgtcagaatgcagtttcctagagagtattggggtgctaggtaaaaagttaggaaaggtcctgagaactggtattgacaattggagtcctaataggaaagagagactaggtaccaaacgtcatgagatcatagacatagaaaactgtatagtaaccaaaaaccaaacagtaatatttccagaactttttagtattgttgtaaaacttcatgaaacaaaagaccatttaaatagtgaattattaaaaatctttattatgggaaagtagacctacattttcgctaaaattttccccaaagataataaatatcttcttagggaatgtaagaaaaatgtataataaaaatgtggtgcttaattaaccatgactatgtatatattgcaaatattagtaatcagtattctttgtgcatgtgatttttttgcatgattaatgttgaattgaaagctctcaggataattaatcctaaatgttgttgcatgttgacgtattttaaaagatgaataggcctagagcagtgatttcaagctattttcttgaaatgcttcagggattccataaacatttaactcagcttaaacaatgttctaagatacatatacttagaacgttgaggtatatactacaagtgctaagaatgtagtatcttgtatttttgttgatttttatcatgttataaataggaatttataaaatgtgtatga

SEQ ID NO: 8588 - DNA, 1392 bp, Macaca Fascicularis
gatgacagcattttagaagaaagaacaggaattctaggtgtttaggcacgttgaagagaaacttgctagaggtgatgaagcggaaagaaaaagacgattcactatagggatgatcattattgcagttctgcaaattaaggtaagtgtcatttaaaaatctgtctgttgttgcgtcttaatgcacttcatgaactatggatattagccacagacaatggatatgatctgaggtccgatcttcatgtaacttttcaatatgctttgcttatatatctgaagaaatgtagaaatcaccctcagttatgacatcttcagttttttacaataaatattttaaaacgttgtttcttgacaatgtctctatgaactgtcttcagtttcattattatcaggggtttagacagtataaataatttcattgatgatcacctttaaaaatatatttttgacatttgtctgcttgtctgcccttttcaaattgctgattaataatccacttacaatttctttgatcaataatagtttagaatacctttaataaataggccttcaaacagaaatggacaattgtataaaagttacatataaaatttaaattttgcataaaattaagcgaagataaaaaaattttaatacaggttttttctcttgaacattgatttttcagacaatggagaatcttctagaaccacaaaaaacagcactgaatagtttccagtgatagaaagtgttcatagtagttatgtagatctaaattattatttccaaacattcgttcattctgttttgagtgccttgaaaaatgtcactgggtttggaaatggtaaggtcgaaaggaaatggattaaatccaggaacagttgatgctgcccacaaaaacttggaaagcttctagggacattccaaattcttttaacattctttgccattaaacaagcatatttgtttaaatgatgcaccatatttgcatccgctgctgataataaccacatttgtgtcttggagtaacttgattaatgttaccacaatgacttaacaaaggaatacggttctggtggattattgaaaaggaagaacagaaggaaatgtgtggctgttatttcgccctatccctgtttgagattgggatgtttagaatttgtcccaagaagatagcaaagctggaagccagaaaagcagagccagccagaaccggcacaggaggccagaactcggctctggctcagtgcggatcccactggccatcttctttcctgggagaatgtaagggttattttttactgattagaaaattataattccatggaaactgttagaaagtataatatgtttgaatagaaagagcatgatttcttagttgaacttaagtggtaaaaaaaaaaaaaaaaaaaa

SEQ ID NO: 8589 - DNA, 190 bp, Macaca Fascicularis
ccaccaccacaaccaccatcatcaccataaaatggacttaaaagcttatgaacaggtgatgcactactctggttacgggtcccccatgactggcagcctggcaatgagcacagtaacaaacaaaagtggcttagagtgttcacatatttctcagcgcatcttccacctagtacgtcatgccatgagaccc

SEQ ID NO: 8590 - DNA, 748 bp, Macaca Fascicularis
  misc_feature (1)...(748): n = A,T,C or G
ttttcacacnctagggtaaccactaatctactctccatctctatagatttgcccatgctagacatttcatataaatagaatcatacatgtggtctttttcactgagtataatgttttcaaggtacatcccagctgtggcatgaatcagcatctcattcctttttattgccaaataatattctatcatatggatatgtcacattttatgtatccattcatcagctgatggacatttgggttgattctactttttggctactatgaataatgctactgtgaacttttgtgtacaaatcttacgtggacatgttttcatttctcttggatgtatattcctaggagaatggctggatcataggtaactctttcctcataactttgcatatcaaaattatatccaactttttagaagccaaattcagtgttatttccaaagtgtttaaacatctactcaaaatgaatcttctccctagtactcccattgtttagtacctaattgttcttaccagtttgtcttagagctcagtgattcatacatagcacttttcttcattatactgctaatttcattatattggaagaatggggacaagctgtcactcttgtataccacaaagcagtgagtgcactgctatgaagaaagcaggaactcaaagttaagaattttgaatgcttgagcctgtaaaatgtgtcaaataataatgttcattttcaaatttcaacaattaaatgttaacaaatacactga

SEQ ID NO: 8591 - DNA, 668 bp, Macaca Fascicularis
  misc_feature (1)...(668): n = A,T,C or G
accgcttcctgcaaccnnnanncactgcacaaagacacatacattcaccactcccccccaacgcgcacactcgtcctccccttccgggaacttcattcaactatttacccgggacacacacacccaccccacacacacagacacacacacacacgagccaggatggtggatttttgattgggtgggttgtttgagggggttttcttttgaatgcacgcattttcactttccccaaaacaaaggtacatttttaaaaatgtcatatattgcaacatattgatgcatttgtcatacgtttctacttaaattattaagcacttacgatttagatgtaataattgtatgtaagggcaaaatttattttagatataaagtaaaggaggagggcgagatgctttctgcatttcttgatgatagtttgtgttcttacaaaaataaacaaaatgaataaaaaggggtcgccattcaatttgagtttccagggggaagtgcatgtataatgaaatnnnnnnnnnnnnnnnngaagaatgtcatcaattatgtaaatatgtatctccttttaatacaaagtgtaattttgtgccagtgaaatggagtctgaatagttatgtgtttcttttatccctggaaatatttattaaactttatagtttatcggagtatgttgg

SEQ ID NO: 8592 - DNA, 634 bp, Macaca Fascicularis
  misc_feature (1)...(634): n = A,T,C or G
taaaatggggcaacagtggcactcatnnnnaagggttggataataaaataatgcatgtaatgccctcagcatagtgcntggcacagaatttctgctcaaatgtgagctgtcatattaatattgtcagtttcacacactgaggtacatatccggttgaccaggctcaatctttaagcattctccatactgaaaccagttccataatccctagggctgtactatagggattgagactgaaaggatcacttacgccatgtttctctaaaagcatcattggtggaagactnnngataagtctggtgtnnnnnnnnnnnnnnnnnnnnnnnttttatgtagagtttagaaatgaagtagttgaatcaatttagtatctcctannnnnngtgtctcctttggatctcagccaaccccccacgtgcaggtaaactccagnnnnnnnnnnnnnttccccccactccagcccccctccacatcccgcttcgcctccctccaggactccgccccggccccgggaggccacctgggcgtcagatcccaccggggcaaccttgctgaggacgacccggggtacttccttgggagtctcaagtccatgtgtaaatcagatctcccctctcacccctcccacccataa

SEQ ID NO: 8593 - DNA, 770 bp, Macaca Fascicularis
  misc_feature (1)...(770): n = A,T,C or G
gagcaatgttgttttanngcagatcattcaggaatagttaaagattctatggcaaaactgagagaaagattagacaagagaaaaaaagagagagaatctcagcaaaattggtttaaaaattggtacaaccaatccccttggcttagcaccctaatctccaccatcttaggacccctcatcctgctcacgctcatcctgactttcgggccatgcatactcaaccgcttactcacccttattaaaaatagattaaacatagtacatgctatggttctgacccaacaataccagaccctcaggaatgaagaagaggctcaagattgagcctctgacacaaaaagaggagggaatgaaactaggcctcataaaacttagaaactaggcctcacataggaaaaaattaacaccaggtggctctggatagggtcccaccctgcctcgatagggtcccaccctgatagggtcccaccctgccaattccgggaaacaacctcatggggtcccaccctgccaattccgggggtcccaccctgcctcgaagttcccggaatcagcaactccaagaaaaaacctcataaggtcctgctctaaccaattagaacaagacaccttgctcaggccatagacagacccnnnnnnnnnnnnnnnnnnnnnctttgtttgaatttcgcgccctaagctgtgtttgaacttgtatttgcctatataaacaacctgtaacaagcactcggggtcccagggccaacttagagcttggaccctagcgcgct

SEQ ID NO: 8594 - DNA, 685 bp, Macaca Fascicularis
  misc_feature (1)...(685): n = A,T,C or G
caaagcagccaatcaaagtnnnnnnnnnnnnnnnnnnnnnncccgccccttctatgaacagccaatcaaagcgacttagctcggtttctattccatttcttagtcccaccttcaccataaacatccaagtgtggtttgaccgaggagctgggggtgtctgccaatcacagctgctcagctctggcttctgtaaaccgccaggtagagtgaaagctgcgccctcccgagactatatatcattgtcttttttagcccgctccaggcaaactgcccatcatgtgcaccaaggccgtttagccctgcctcctggcaaacagccagtgacagctgctgggttccannnnnnnnnnnnnnnnnnnnnnnnnnnnnnnnnnnnnnnnnnnnnnnnnnnnnnnnnnnnnnnnnnnnnnnnnnnnnnnnnnnnnnnnnnnnnnnnnnnnnnnnnnnnnnnnnnnnnnnnnnnnnnnnnnnnnnnnnnnnnnnnnnnnnnnnnnnnnnnnnnnnnnnnnncagaaaccacccttgccaccaagactcgctcccaacctggctcccggcaatctcaggtgccttcctcgcccaggtccttcaccctttcnnnnnnnnnnnnnnnnnnctggatctccccaccaccagcagcctgtgcaatatttattagtctatcaacttctccccggtctcctgt

SEQ ID NO: 8595 - DNA, 3016 bp, Macaca Fascicularis
gcttttcagggcaaagcgagggaagaaggtggcagctcccactcggttctccctcgggtcgggtccgagctgccgggccgcatgccgctccccgacggggcgcgtagcccagggggcgtctaccgggaggcgcgcgacgggggctacaccaaccggacctttgagttcgacgacggccgatgcgccaccagggtccaggtggagttctacgtcaatgagaacaccttcaaggagcggctcgagctgttcttcatcaaaaaccaaagatcgagcctaaggatccggctgttcaacttctccctgaagctcctcacctgcctgctctacatcgtgcgcgtcctgcttgacgacccggccctgggcatcggatgctggggctgcccaaagcagaactactccttcaatgactcgtcctccgagatcaactgggctcccattctatgggtggagagaaagatgacactgtgggcaatccaggtcatcgtggccataataagcttcctggagacaatgcttctcatctacctcagctacaaaggcaacatctgggagcaaatcttccgcgtgtccttcgtcctggagatgatcaacactctgcccttcatcatcacgatcttctggccgccgctgcggaacctgttcatccctgtctttctgaactgctggctggccaagcacgcgctggaaaacatgattaacgacttccaccgtgccatcctgcggacgcagtcggccatgttcaaccaggtcctcatcctcttctgcaccctgctgtgcctcgttttcacggggacctgtggcatccagcacctggagcgggcaggcgagaacctgtccctcctgacctccttctacttctgcatcgtcaccttctccaccgtgggctacggcgatgtcacgcccaagatctggccgtcgcagctgctggtggtcatcatgatctgcgtggccctcgtggtgctcccactgcagttcgaggagctcgtctacctctggatggagcggcagaagtcggggggcaactacagccgccaccgcgcgcagacggagaagcacgtggtcctgtgcgtcagctccctcaagatcgacctcctcatggacttcctgaacgagttctacgcccacccccggctccaggactattacgtggtcatcctgtgccccacggagatggatgtccaggtacgcagagtcctgcagatccctctgtggtcccagcgggtcatctacctccagggctctgcgctcaaagaccaggacctcatgcgagccaagatggacaatggggaggcctgcttcattctcagcagcaggaacgaggtggaccgcacggccgcggaccaccagaccatcctgcgtgcctgggccgtgaaggacttcgcccccaactgccccctctacgtccagatcctcaaacctgaaaacaagtttcatgtcaagtttgctgaccacgtggtgtgtgaggaggagtgcaagtatgccatgctggcgctgaactgcatctgcccggccacctccaccctcatcaccctgctggtgcacacgtcccgcggccagtgagtgccccgtgccccgcgggaccgacctccgtggcccggccggcgcagggagacaagggagggacaggagtccccggagcagtggcagcgcatgtacggacgctgctcgggcaatgaggtgtaccacatccgcatgggtgacagcaagttcttccgcgagtacgagggcaagagcttcacctacgcggccttccacgcccacaagaagtacggcgtgtgcctcatcgggctgaagcgagaggacaacaagagcatcctgctgaatccggggccccggcacatcctggccgcctcggacacctgcttctacatcaacatcaccaaggaggagaactcggccttcatcttcaagcaggaggagaagcggaagaagagggccttctcggggcaggggctgcacgagggtccagcccgcctgcctgtgcatagcatcatcgcctccatggggacagtggccatggacctgcagggcacagagcaccggcccacgcaaagcggtggggggggcgggggcaacaagctggcactgcccacggagaacggctcgggcagccggcggcccagcatcgcgcctgtcctggagctggctgacagctcggccctgctgccctgcgacctgctgagcgaccagtcagaggacgaggtgacgccgtcgggtgacgaggggctctccgtggtagagtacgtgaagggctaccctcccaactcgccctacatcggcagctccccaaccctgtgccacctcctgcctgtgaaggcccccttctgctgcctgcggctggacaagggctgcaagcacaacagctatgaagatgccaaggcctacgggttcaagaacaagctgatcatcgtctcggcagagacggccggcaacgggctgtacaacttcatcgtgccgctgcgggcctactacagatcccgcaaggagttaaaccccattgtgctgctgctggacaacaagccggaccaccacttcctggaagctatctgctgcttccccatggtctactacatggagggctccgtggacaacctggacagcctgctgcagtgcggaatcatctatgcggacaacctcgtggtggtggacaaggagagcaccatgagcgctgaggaggactacatggcggatgccaagaccatcgtcaacgtgcagaccatgttccggctcttccccagcctcagcatcaccacggagctcacccacccttccaacatgcgcttcatgcagttccgcgccaaggacagctactctctggctctttccaaactagaaaagagggagcgagagaacggctccaacctggccttcatgttccgcctgtgaatcctcccgtgggcaaggctgggagccaggggctggaaccaggcaggtccatgactgtgagatgccagctgccagcccaataaaagctgcctgaagcatctggaaccttcaaaaaaaaaaaaaaaaaaaa

SEQ ID NO: 8596 - DNA, 2285 bp, Macaca Fascicularis
aattggtagggaaacttagcagctttgtcatctaactctgccagacaagaaagtggagttgacaactacaacatgttaatggaagcaaggcacctgttgaagggaaaaaagatccaaccatctagaaatagttgaaggcagctgagaaaacgtgaagccattatgagttgccagaaagctgcacttgagttaaacacagggtcacagcctgggccaaagagccctgagagaacagaagatgtaactgcatttgaagactatggcacaggcctgcttgaaaaccaactcagcgtgtgtgactttgtaaaaatacagaaggcctttgaggctgaaatataggcatggcatacatttttacttcccatttacaaataaggagatgaaggactaaaaatattcaactgaattcccccatgggcagagccagaactcagaggcagattgccaactttggagtccatatatggcatgacttccactggccacaagtccccagagccaaggaaaatcatttgtatgtccagagaagactttacacagaagatgacagagattgttggttggggcgcgaaggaagaatatggggagctatttgacaaagtggatgtggcccaagatggcttcattaattgggacaagctgacttcctttatactgctagagcttaacaagcaagatgaacgagcaaaggcaactgtggtgccccagtggaaggacctggaattcctcccagtaaaacacaaggacaacattcaaaaagtaattttcttaaaaagttcaagtcattatctgacgattagtaaagaaggtttattagcaatctggggagataatttaaagctgcaagaaacattccccatcacttcagatgccaccaagctcaaacacctgtgggtgacaagcctggtttctctggaaaatgtaaacaagatagcaatggcttttacaagtaaagagatttgtttctatgatctgctgtccaaagaagaatttgcttgccagtacaaactccaaggcctgaaaggaacaccaatttgcatggattattggtatgatcctcttgatgccaatgaatcaattctttctttcggggatataactggaaaggttcaagcgattgctttcacagcagccttgatttccctgtttgaacggcctgctagtgcatgtgaagatggagaagccaccatgaccattaactgggcagagctgctctctggatgtcacaaatgttgccacatattagagcataaacttcatcaaggagactgggtcaggcaagttacttacaatgcatctttagatgctatcatttccagtacaaccagcaatacaaagagtgtggtgctagcttggagagagaaatcaaaaaagcatcttcatatgacatccttcaacattgcccagggcattcatgcttttgattatcactctcggctcaatttaattgcaactgctggcattaacaataaagtttgcctttggaatccctatgttgtctctaaaccagtgggtgtcctttggggccactcagccagtgtaatagccgtccaattctttgtggaaagaaaacaacttttcagcttctcccaggataaagttttgagactctgggatattcaacaccagctgtccatccagaggatagcttgttctttccccgaaagtcaggacttcagatgtctcttccactttgatgaagcccatggacgacttttcatctcatttaataaccggctagcattgttggcaatgaaaagtgatgccagcaagagggtgaaaagccatgagaaagcagtcacttgtgttctttacaattctctcctgaagcaggtaatcagctctgatacagggtctactgtttccttctagaccctgagaaatactttaggaaagagccagacgaggagcatccccaaattccagaggccccgtcactttttgaaactttgaaagctgtatttgatgagaaaaacctgtttcccaaggaaattctggatcatgaacgaaaagccaagcaattatgccaagaaaaaagttgtgaagtgaagaaaaataagaagtaattataataggaaaaacttcatcgtcacgtaaagtacatatataaaatgcagaaaaagcatcaagaattctgccttttattttatatttgaacttcaggaagttttgtcttcatgggataatttagtactgctcttatccatcatctttcaatttctctgtattcttaataaaataaatattgaactaaaaaaaaaaaaaaaaaaaaaaaaaaaaaaaaa

SEQ ID NO: 8597 - DNA, 728 bp, Macaca Fascicularis
  misc_feature (1)...(728): n = A,T,C or G
tccatacaccgggcctagagcactagagaacgacccggaggggcctggnnnnnnnnnnnnnagctctacagctaataagcattcttactcctacctggtaatttaagattccagagagtggctcctccctgtgcccaagaatagatgctgattgtattcctcccaggtgccccttccccctccaatcccaccaaccctcagagccacccctaaagagatacgttnnnnnnnnnnnnnnnnnnnnnnnttgggctgccctggtgctgccacacttcagactcttctccctccacaaccttctgtggctcacagcacccttggagccaatggagactgtctcaagagggcactggtggcccgacagcctggcatagggcagtgggatggggcatggccaggtggccactccagagccctggcttttcactgctggctgccttagaacctttcttacattagcagtttgctttgtatgcactttgtttttttctttgggtcttgtttttttttccacttagaaattgcatttcctgacagaaggactcaggttgtccgaagtcaccgcacagtgcatctcagcccacatagtgatcgttcccctgttcactctatttagcatgtccctaccgagtctcttcctccactggatggaggaaaaccaagccgtggcttcctgctcagccctccccacccctcccttcaaccgttccccatgggaaatgtcnnaa

SEQ ID NO: 8598 - DNA, 761 bp, Macaca Fascicularis
  misc_feature (1)...(761): n = A,T,C or G
caaggctgtagtgtaacgctgnnnnnnnnnnnnnnnnnnnnnnnnnnngacacgaagagaaatgcccagtgtgtaaagctgnnnnnnnnnnnnnnnnnnnnnnnnnnnnnnnnnnnnnnnnnnnnnnnncctctaccactacctctgctttgcctccttcnnnnnnnnnnnnnnnnnnnnnnnnnnnnnnnnngaaaaaaaagactggcacaaagccaagtaccgaaccacagagtgaannnnnnnnnnnnnnnnnnnnnnnnnnnnnnnnnnnnnnnnnnnnnnnnnnnnnnnnnnnnnnnnnnnnnnnnnnnnnnnnnnnnnnnnnnnnnnnnacatctaaaagagcacatataaannnnnnnnnnnnnnnnactnnnnnnnnnnnnnnnnnnnnggaaacacagaggttggagttaatctgaagagcaccacttctcctctctctcctgaaaaaatttgccactgatatttttactggataaaattcaaaaatgttnnnnnnnnnnnnnnntaattgttgaactgctgtcctagaagaaactgtctacaggagccgaggtgaaagtctnnnnnnnnnnnnnnnnnnnnnnnnnnnnnnnnnnnnnnnnnnnnnnnnnnnnnnnnnnnnnnnnnnnnnnnngcctacaagtatttttttttttccagaaagaaaaaaagcctacattggcataaagttctgtatcaatccatcttacattgccgtnnnnnnnnnnnnnnnntgtagaatcttgaataat

SEQ ID NO: 8599 - DNA, 672 bp, Macaca Fascicularis
agttacactggaaagtaggaatttggttagtgaagtgggaagactgtatatttataatttgcgtactacttgcaattttttgtttttcatcacttgtaataatggaatggaaatgtaagctgtaaagactctcaaatataaaatatttgctacagtgtatatatggtacataatttcttgttgcttttaaagttgcttttgttgttctgcttcccactgatttcataccagctcatgaatggatcattacagtctcttcagaggcttagaatgattcggaatgttcaatgcatagttctcaatgacaggagggagaatttttaatgggtatttcttttcagatatatgattggtctctaggtttttgataataatatggtcttaaattcataattaatagcagagattgataatttggaaacaatggtagtgaatgaaactgaagttgaaaaacagctgctacttatgtcactaatcagaccatatgaatagcagaagttgagcaatttcaaagtaaaactgatatttttttccaaaagaatttggacatttgaaaataattgacgtacattaagttttaattctataatttcttataacatatatggatgaagaatttttgagtttaagcttttaatccctagaaattttatacattaaatctcctgcaat

SEQ ID NO: 8600 - DNA, 756 bp, Macaca Fascicularis
  misc_feature (1)...(756): n = A,T,C or G
taaattaaaaggtatttcttaacctgagtgctgggctgtttgtctnnnnnnnnnnnnnnnnnnnnnnnnnnnnnnnnnnnnnnnnnnnnnnnnnnnnnnnnnnnnnnnnnnnnnnnnnnnnnnnnnnnnnnnnnnnnnnnnnnnnnnnnnnnnnnnnnnnnnnnnnnnnnnnnnnnnnnnctggaagttaaagggaagagccgagtcgggaacaacggcgtcctggagcagcgtccctgcaaccacgatcctgtcgtannnnnnnnnnnnnnnnnnnnnnnnnnnnnnnncggtgtcnnnnnnnnnnnnnnnnaaggtggggctcgtccgcaggcggatggatgacnnnnnnnnnnnnnnnncatagctgcagcnnnnnnnnnnnnnnnnnnnnnnnnnnnnatcctctaaaccccatttctcttggacatccaggtagacgtcatagagagcatcgatctcagctactgcgtcctccggggccgcatgcagggggacaatggcaaactccctgacctctgtgcagcggccactnnnnnnnnnnnnnnnggagaacctgacgatggctggctctcggctgaaggtgtcgttcccacagnnnnnnnnnnnnnnnnnnnnnnnnnnnnnnnngtccaccacagacacctggtcaggcctgtacacgaacaggtagcgctccttataccacatagtgataggtgtctggtgcatcacatagtgatggttgtctggtgcatcctgatgnnnnntntcagc

SEQ ID NO: 8601 - DNA, 833 bp, Macaca Fascicularis
  misc_feature (1)...(833): n = A,T,C or G
ccccacaacggtgttccagcccctcctctcttccgccccctagtctcccaccctcccctccccgtagtgaccaattcctatctcttccctctccgcaggctcaatgaatcgaatgaatgtgaacttcttcatctgtgaaaaatctttatttttttttccattttgttctgtttgggggcttctgttttgtttggcgagagagcgatggctgccgtggggagtatcggggagccctcgcggcaagcggtgggagggggcttgggggcttgctgggccctcactctctcgcctgttctgtgtctcacatgctttttctttcaaaattgggatnnnnnnnnnnnnnnnnnccagagaagatagcgagatctcgnnnnnnnnnnnnnnnnnnnnnnncattaaaacacaaagagcaaagcagaacttagaaaattatatatatatatattaaaaagtctctattcttcaccccccagccttcctgaacctgcctctctgaggataaagcaattcattttctcccaccctcggccctcttcttgtttttaaaataaacttttaaaaaggaaaaaaaaaagtcactcttgctatttcttttttttagttagaggtggaacattccttggnnnnnnnnnnnnattgcaggaccccttcccccagcagccaagccccctcttctcctctcctcccgccctggctcagctcctgcggccccgcccgtcccccctcccaggactggtctgttgtcttttcatctgttcaagaggagattgaaactgaaaacaaaatgagaacaacaaaaaaaattgtatggcagtttttactttttatcgctc

SEQ ID NO: 8602 - DNA, 1802 bp, Macaca Fascicularis
agttgcaaaacctccctatataaagccggctgagggggtcaggagacaggctattaccaggctcttctgtgtctgcgtgccctgctgcttggtgctcagcttagagaaggggaaggggaagaggaagacacctgctggatgctggagacttgagtctgtgacagcgtggctggctttgctgtggtttgtggtggccgtggagactgcagccgcgagagcctgggaaggcagcccacagcgggagtgtggccagagtggtagaaaaggcagcagggtcctggaggtgtggctgagctacctgcagccgtggcgatgtgctgctgaccaagctggggaagctgcaccagccctaatggcattggacgtgggaggccactccaggtgggaacacggttatctttgggctcctggttgggacctggagctgctgcccctctggggctatgagattaccagcttggttcgagcacccttccggctgtcatctgccatcaaacagatttgcagaccagatggcggctctgtgttcctgagatgactcccttggcagcttctgtcgctaccgcctcacagagcccacgctggccagcggccccaggctcagcctgtgctttctgggcagctacctgacactgccctggctgctgctggctttcttcgtggcttctctgttctgcgtcgggcccctcacctgtgcactgctgtttactctgggctacgtcctctactcctcagccaggacgccgctgaccaagctggggaagctgcaccagccctggtgtgcctgagaaacgggtgccctttgtccaggagaacctgctgatgtacaccaagctgttcgtgggcttcctgaaccacgtgctccacacagacctggtcagccccaagcacgtgctcatggtgttctgaatggccagagtgtttgcccagtccaacctagccaagatgatccagaacgtttgagcagctgttcctggagccggagctcgtcatcccccactgccagcaccgactcttcacagcctgcacattcgccagcggcttcctgtcatcgtggccaccagtggtcactgatacctccttcaaggtgaagagccacgtctacagcctggagggccaggactgcaagtacaccctgatgttcaggcctgaggcccacaccctggtcctgcacctcactcagctcatcacgcaggccaagcacatggccaagtccatctcagacccgtgtgtggagagtccggccggctgctccttcctattgtggccgggctttggccccacggacaccaacggctcctcttcagccaatgacctggacgagatggggcaggacagcgtccggaagacagacgagtgcctggaggaggccctggagtatctgtgccagatattccagctcagtgaagcgcagctcacacagttcacacttgccttggacaccatccaggatgagaatggaaagcagcagctccgactgcattgcagatcaacaggctgcaaaggtttgaaattgagtatcggggggacctggagctgctgcccctctggggctatgagattaccagcttggttcgagcacccttcctgcagtcgtggaggcatctgggggaaacgggactgagaagggagggaaggtagcttcaataaaatcaagtgctcaaagacaaaaaaaaaaaaaaaaaaaaaaaaaaaaaaaaaaaaaaaaaaaaaaaaaaaaaaaaaaaaaaaaaaaaaaaaaaaaaaaaaaaaaaaaaaaaaaaaaaaaaaaaaaaaaaaaaaaaaaaaaaaaaaaaaaaaaa

SEQ ID NO: 8603 - DNA, 749 bp, Macaca Fascicularis
  misc_feature (1)...(749): n = A,T,C or G
ggaggccgctccaaatagcgactggnncagcnnggaggaaaggagagcagaggaggatccagaagtgctcagacagaactagggacaacagaggggnnnccgtggtggcgagtgggtcagcagagcatggagcaggcagaggaagcctatctgggaggctgggtgcatttctctgagactaaggggatgtaggtgtttggggtttctgcaaagagggcgcaggccctgcagtgacggttcagatattgataacccatcccccttggagggtcggggcttaggcatccatattggattcagaaaagaacaagaacgatgtttcttgcaacaaaacaaaagtgattatgtcacgagaggagaggctggagggccataggagttcccagctggctcactcatccgtccaggaggtggggtctcatggtttcattttgctctggacctacttagagttttgataaatgcagagttatataacgaacccgacaatgaagatacagaatagttctgtcaccccccagcattctcctgtggccctctagtccacccccctgccccaccccatcccctggcaaccactgatctgctttcacaataactgtatgggtttttttatctttccttttttgtgagcattgtttaattcctttgctctaatatgtaatattagaacatattacaaagtagcaagaaaaatacgacactggtgtaaaacnannntacacctcacgnnnnnntncagagccaga

SEQ ID NO: 8604 - DNA, 745 bp, Macaca Fascicularis
  misc_feature (1)...(745): n = A,T,C or G
gggannnnnnnnnnnnnnnnnnatccatcaccactgccacagggcaaagccagcaggtgtggtcttgtgaggggctctacggaggggatgtggcaggagaacagagccctgcctggaccacctgacccctcgggactccacccctgtcatcgtgttggtgttcctgtataggagaaatttgggttaaataaaaaaaagaggccactcccaggcataatcagagccaacctggtgggctgggtctatcacaagacatcactgatgctgaacatgaacaaagacaaaaactgtttggggggtttttaagttgtttttcttacttnnnnnnnnnnnnnnnnnnnnnntaaactctaaagataaaatctatgttagattgtctatcaactgtgtttttgaacagcataattgtgtagcagcacattgcaaaaaacgcattcatccaaagcgacacgtatgtggcagcgaagaccacaccagtgaaataagccccttcgtgatcacccgactccagttctccgtgnnnnnnnnnnnnnnnnnnnnnnnnnnnnnnnnnnnnnnnnnnnnnnatgctctccgcaggggggcgctcacaaagattccaggggtgtttcttgtgtttatttttttaattactaaactcagtagctaagaaagggtccttgaagcctcctaacctgggttggacctttgaaaacatatatttgtagcacatattatagatggaaagaagaagatatttatttat

SEQ ID NO: 8605 - DNA, 2123 bp, Macaca Fascicularis
  misc_feature (1)...(2123): n = A,T,C or G
ctaatgaatttttattgagtcttttattgaagggttcaaagtaagaaatactatgccataatgttttccatctctagtgaagacagaaccagagggaatgaggatcttatttttaaagacagcatggaaagtttaagatgtaggaccttcttgaggaggaatcttcataatatcttctattcaaaatcttttttttatttttaagggaatacaaattttaaaaattaagagatatacagatgagtttttaagggtccttctttccagcacatttttaaaaaaactcaggttagaacaaaaatgtcagaaagggcactaaaaataacatttgggtttcactccgtatctagatgaatatagctcacaaaacaatttttgtgtgttttgagtaactgatgcctaagtgcaatgaataatttacctgcttcactgttatttttaattttacctggcaaattaagtgagacttgaacaaacttttgttcatcttgaagaatgtatagtggcttaggttatttgagttttttgttttgaatatgtatgttgttatttggatgtagaaactttggaagatggagaggttctgagagattggatacttggaatgtctttctgtaggaaatagacctcccatttcttaagcaagttgcttctggaattgatgcaacaaggttattagctggagtttaatggataaattgttctatgaactgctgctatcagtatttttttttcacattttccattgatatttgtgatgcttgaaaaatccaaactccacttggatacatttaattttttgcctttttctcgctacctccctcttttcctaggcacccttgcacattttgttactgtaaaggactgttgccctgttacctcactgataagaaatctcaactgtattcatttagaatgctttaaacttagtcataaactacatttgtctatggacttttggttattttgttaatgttgtcattatatttaatacttattgtgggaagtaatttttaatctatttcataacctgttttggtctgtcttgatactgctatctgttaatttattatggccttttacaattcacttgtcatctgagattgctctagaaattgaggaggaaaaagttgtactaaccaaaatgtatgggcaattgacctaacattctatttcaggtttccttgtacttcgagagccaaagcacaagatctgaggaaatcttattcacatttgtccctcagagcatcttaccctaagccacagaagtataaatagtaagatacgaattgctcattgtctgactccttgcacagcatgactttaattctagttggaaacaaagttagtgttgactattggttaccttcaagtattcaccatactatacattcattaggccatctttcctctgtttactcaagactatgtacttacaaaagagaacctataagaatgtgtagagtgaccaaatagggacaaagtgacatacctagagtttggtgctcaaatttttccaccagggtaaccctaaagcagaggggcatgatggagggggaaggggttctgagagcaaaatcagaagcagcctaccactgacatgaagtgtgttctatctttaaaatgtaagtgaattttgcattctctataataaaacttttaatataaaaatgatatatttaatctttactgaaacttatgctgccacgaaggagcaccatgttcatcacgtggctgctcagttttctcccccagtgccctcacccccaatggctgcatatccttgaggtacacacactggctgtagtgcaagatatataaacgtaggctgggctcgnnnnnnnnnnnnnnnnnnnnnnnnnnnnnnnnnnnnnnnnnnnnnnnnnnnnnnnnnnnnnnnnnnnnnnnnnnnnnnnnnnnnnnnnnnnnnnnnnnnnnnnnnnnnnnnnnnnnnnnnnnnnnnnnnnnnnnnnnnnnnnnnnnnnnnnnnncagccactcaggaggctgaggcaggagaatcgcttgaacccaggaggtggaggttgtggtaagccgagatggtgccattgctctccagcctgggcaacaagagtgaaactcatccaaaaaaaaaaaaaaaaa

SEQ ID NO: 8606 - DNA, 723 bp, Macaca Fascicularis
  misc_feature (1)...(723): n = A,T,C or G
ggggatcaggtgaagaacnnnnatctgtgctggagagttggatactcctttaaatagcccccaccatagtcataacaataatgataatgctggattatttgnnnnnnnnaggttgtctgcctcatatccatcatgctgtttgcaatattcttgctttcaatcaatttatactgagtgtaactttaggatttctgctattaaatgcatgctctctgttctgcttcagtttctggctttgctttgtctgtttcannnnnnnnnnnnnnnnnnnnnnnnnnacaaaaaaactcattctcacttttactaaatatactgtaagagtcatcattgatgttatttttctcttatgtatctgtaaagatttttggcatatgaatgtaatattaaagtcaatgatgctatannnnnnnnnnnnnnnnnnnngtcaaccttttttaaggagtgaaaaagccctactatgtttttaaagaatagcaagtgtaagctcagtactagagtggatatacacactgcatgttttcatatgtggcacttttatgtattgtgttgggttattgttctagattggactgttaaatactatgtttgagactgggttgtcatttttataactgtcttggtgttttatggccattatttattacttttggtatacagaatgagctgcatgcatttttagagcaataagaggatgtatttaatgtgccttgcttttaactgaat

SEQ ID NO: 8607 - DNA, 715 bp, Macaca Fascicularis
  misc_feature (1)...(715): n = A,T,C or G
aacaatgaaatcaatatgtaatactnnnctgagtcataagatggaactaatttcaggataagtttaatgcatggaagctcctagaataatgcctccagtgcataggaggctnnnnnnnnnnnnnnnnnnnnnnntctaggttctctttnnaaagaagtctagatgcaagctgcntttcccttcagagaggcctggtagttttgatggtaagagcgcaagccacatgcttacttgtggagccatctcctgccgtatctaagtcacgaaggacacaggatcacaaagctcttatctatacgcagtgtcatgtcgctaggggtttaaaaaactgtattttaaaaatgctagccataatagaaattcattaacaataatttggaaaatagaacaatgttactggaagcccactgcctgctaatcttctgatgtgtgtgcttcctgtccgcaggcattttttaaaagcctgctcttaacacagttataaccattatgaataagtttgtatcctgcttttttcacgtagtgtcatgatacaagcattnnnnnnnnnnnnnnnnttttataacattctttcaatacagcaatgttcgttcagctggatgattttcttcatttcttaactggtgtaactcaagctgtgataaacatctgtctgctaaaactttttctgtgtttatgatgatttccttaagatctgttttcaggtgtggaatta

SEQ ID NO: 8608 - DNA, 2351 bp, Macaca Fascicularis
  misc_feature (1)...(2351): n = A,T,C or G
caaggctgcagtgagccaagattacaccattgcaccccagcctgggcaaaagaatgagagcccgcctcttgaaaaaaaaagaaaaaattcgatgacaactctttcaagggaacctgaaaaagaaagccggatataagttccggtttctgcacgatgtcatggtggctgtttctaatgtcacctgccttcatactttccttcctgcagttgtaggggcaggtcaagctttccttagagccgaggacaagcctgacttgttggtcagagtgaacatgtgtataggaccttgttaggcttgacccaatcagcagggctgggggtggtatcaggtgacccagccactttgagtttggatctgctgccaaggaaaaaccatgtattttatgaggagttctgaaattctctgccagcatctcatcttccctctgctgcacagcccacctgaagattgtccctgaggctgtggctctcctgtcctgttatcagtcctgcttctttgggttcagccctatgctgtaaaatctcaccttccttaggccttttgcagacacatcacatcctctggctttgtatctgttcttggtgctttggataccacctccatcccaatgtctttgtttttctctgttaaactccaggccctctttcttcatttattcatctgcctctgcatttctgtaactttctgagtagtgggtgctcaggttgttcacgtatcttcatcaagaggtctgtctgggataaagcaggagttgcaatgattgccttctgaatcacccctcagctgacagagcaagactccatctcaaaaaaaaaaactgcagctgggcacagtggctcatacctgtaactccagcactttaggaggctgaggcgggtgaatcacctgaggtcaggagttcgagaccagcctggccaacatggtgaaaccccatctctactaaaaatacaaannnnnnnnnnnnnnnnnnnnnnnnnnnnnnnnnnnnnnnnnnnnnnnnnnnnnnnnnnnnnnnnnnnnnnnnnnnnnnnnnnnnnnnnnnnnnnnnnnnnnnnnnnnnnnnnnnnnnnnnnnnnnnnnnnnnnnnnnnnnnnnnnnagagtgaaactccatctcaaaaaacaaaaaaaaaaaaaggccaggcgcagtggctcacacccataatctcagcactttgggaggccgaggcgggtggatcacctgaggccaggaattcgagactagcctggcctacatagtgaaaccccatnnnnnnnnnnnnnnnnnnnnnnnnnnnnnnnnnnnnnnnnnnnnnnnnnnnnnnnnnnnnnnnnnnnnnnnnnnnnnnnnnnnnnnnnnnnnnnnnnnnnnnnnnnnnnnnnnnnnnnnnnnnnnnnnnnnnnnnnnnnnnnnnncaaaaaaaaaaaaaaagcagtctcctctccactcctcactatgtgcttatgctaggcccagatgagctgggacctttgggctctttctgtcccagttacaaggtggaaatggaaagcaaatgagaaaactgctagatgccaggagttgctgctgccttcagcaacacccccctctcatcctccctgcctcatagacgctaggaaatggggaaagggagatgtctcagaggtaggccagccttgtttccatgctgtgtggtggttaagagcatagactcgagccgagcagctgaggtttgaatccttgagctgctatgctggcgtcctctcatccccatttgccatgcctgtcagtggcacccctctttctttgtctggtatccttagcactctgagtggcctttcagctgcaacctcttgcccaccctacccaacaaggtacagtagtcccttcttctcctcagctttgcttttcacagcttcatttactgtggtcaaccaaggtccaaatacactaaatggtgctgggctcacaccaataatcccagcactttgagaggccaaggtgggcgggtcacccgaggtcagaagtttgnnnnnnnnnnnnnnnnnnnnnnnnnnnnnnnnnnnnnnnnnnnnnnnnnnnnnnnnnnnnnnnnnnnnnnnnnnnnnnnnnnnnnnnnnnnnnnnnnnnnnnnnnnnnnnnnnnnnnnnnnnnnnnnnnnnnnnnnnnnnnnnnnnnnnnnnnnnnnnnnnnnnnnnnnnnnnnnnnnnnnnnnnnnnnnnnnnnnnnnncaaaaaaaaaaactgcagctgggcacagtggctcatacctgtaactccagcactttaggaggctgaggcgggtgaatcacctgaggtcaggagttcgagaccagcctggccaacatggtgaaaccccatctctactaaaaatacaaaaaaaaaaaaaaaaa

SEQ ID NO: 8609 - DNA, 726 bp, Macaca Fascicularis
  misc_feature (1)...(726): n = A,T,C or G
tgcaggcctctnnnnngaggctcactgcatgtagcccctggcatacaacactagtgccccannnnnnnnnnngcttctagcccntctgcactgcacctaggctcagggttccaacggccagcccgaaacgcctgcctnnnnnnnnnnnnnnnnnnnnnnnnnnnnnnnnnnnnnnnnnnnnnnnnnnnnntgaactagtccccaaaccaaaggcaagccctctcgggcctggggggatggggccggccacacccctgactccgtcctggctctgccccatacccctgccgtggggccgacccgggggatgcagnnnnnnnnnnccgtattcctgcctttcggggccaggatgcaaaaacagtttttgcgtaaaagatgtcacactgatctgctcgagtggggtggacacatgagttaagttttatcatgaacnnnnnnnnnnnnnnnnttcagggannnnnnnnnnnnnnnnnnnnnnnnnnngggaaatagaatgacaggaacgctnnnnnnnnnnnnnnnnnnnnnnnnnnnnnnnnnnnnnnnnnnnnnnnnnnnnnnnnnnnnnnnnnnnnnncaaacatcattgagttgtcttannnnnnnnnnnnnnnnnntgacaatnnnnnnnnnnnnnnnnntccatttcttaactttttgttgcacaagtatttggacagaagtnnnnnnntgaatgagatactgnnnnnnnnnaaattgtataaa

SEQ ID NO: 8610 - DNA, 756 bp, Macaca Fascicularis
  misc_feature (1)...(756): n = A,T,C or G
aatgggtttaattgcgaatttggatttagacccattgtttttgaagcacatcagctgaataaagttgaggtttattttacttagaaaatcacattttgtaatggaatttgatactcatttttataactaatggcccccttttttatgtttctagactagagattctcaaacactactccatggccaggggctgggctggctgcttcagaagcagtggggaaactttttaaaattacatattcctggggcctaccccagatctgaattagaaccttttttaagtctctaaggtgattttacttattattattattttttgnnnnnnnnnnnnnnnnnnnnnnnnnnnnnnnnnnnnnnnnnnnnnnnnnnnnnnnnnnnnnnnnnnnnnnnnnnnnnnnnnnnnnnnnnnnnnnnnnnnnnnnnnnnnnnnnnnnnnnnnnnnnnnnnnnnnnnnnnnnnnnnnnnnnnnnngtgtgtgtgtgtgtgtgtatttttagtagagacggggttttactgtgtttaccagattggtcttaaactcctggcctcgagtgatctgcccacttcgacctcccagagttctgaggttacaggtattagccactgtacccggcctctaaggtgattctgatgtgtgtcttttggaaccactgtctcctagacggaaagcttctgtcttaaagatgatcacattgaaaaaacacgctgaactggctcannnnnnnnnnnnnnnnnnnnaaaactgtcaagtccaaa

SEQ ID NO: 8611 - DNA, 774 bp, Macaca Fascicularis
  misc_feature (1)...(774): n = A,T,C or G
caaggcataggtaattgttannatnttcctctagcctttttggggnnnnnnnnnacagtagactttgagtgaccatccnnnnnnnnnnnnnnnnctctgggttagtggtgtggtgctggaaggaaggttatttttggagccactctctctccttaannnnnnnnnccaagggtctgcttcaattcttcaatgaaaaaatagatgtgaaaaattatttnnnnnnnnnnnnnnnnnaaaactccaattcaggagcccttgcgagtatatctgnnnnnnnnnnnnnnnnnnnnnnnnnnaattgatagtgctgtgctgtctgaactaatgtctttgatgctgannnnnnnnnnnnccagcttttatagcgacaggcaaagagggattnnnnnnnnnnnnnnnnnnnnncatttgttattgtaagaagtgttgcctttgattgttactaaccannnnnnnnnnnnnnnnnnnnnnnnnnnnnnnntttggtaggacaaaatctttttagagctttgagaattgtcatcctgttggtcaacttnnnnnnnnnnnnnnnnnncctggtaattagcagggaannnnnnnnnnnnnnnnnnnnnnnnnnnnnnnnngatctggcttttaattgatgaatcaacttctacagaaacttttgcannnnnnnnnnnnnnnnnnnnnnnnnnnnnnnnnnnnnnnnnnnnnnnnnccaggtccctgcatgtacagtgcttttctaaagaatatgcattcttgaactacttttttaaaaatcaaaat

SEQ ID NO: 8612 - DNA, 2095 bp, Macaca Fascicularis
attggattcctgatctgattgaagcccagaagtgacagagtcactggccacagggcagtttcagaaattaaaccaaaatttaagctgaatcctctaacaaaggtacccatctcccacagtaaaagggatagagacttaccaggatctcttcaatgccaattacaacacaaagaaaagaagctaagtgcttcacaaatggcagctttccaagatgcctacaacttcttcaacaaggacaaaactggctgtattgatttccatggactgatgtgcactgtagctaagctgggaatgaatctaaccaagcatgatgtctataatgaattgaaatgtgctgatattgatcgagatgggaaggtgaacttctcagactttatcaaggtgctaacagataagaatctcttcctcaaggcagtggttccagaaaaggagacctgtttagatttagctggcaaccccggaatcctattgtttgaaatcctatcaaagcttctagagacttcagccctacccaaaaagtctatactagaaatagtaagctatttccaaagaaaattccagcatactggcccagcctcaccctccatacacgcccatctctagtgtgagtaagcatgcacaaagctatgttaatctgagctgtcttcactacctgtaactagtcatttgggagtgacatcatggtaactgagtaatccttttgaaacttaaatagtagagccaagatattaaaatggtcctggggctacccggatgaaagtaggtacaaagtgtgcattaaattgtctactaaaagtaagagtctctatcagtaggaacttgttttttgtgataatgtggctcattttgtaactagatagatctcaaaagttcatacatttgttaatacttgtagttctggtactcttcttatttccaggcagacagaagaaaagaaaaggaaaaattccactaggaacttggttgtaatttctgaaaatgttgaccttaaaccttattaatagaataaaaggacctgtgggaattttagctacatgaatgtctattggacatgcctatttgagaaggtaatcatactaatatcacaagtgacatatcatatggttttattttaaagaaaaaagaccatagcagagaaatgtgtgagagtgtaaaaactagatttcaaaagaaattcattaaaaataaaacatgagaattatggagcatatgctgcatggggagacatggactattcactgctattgtgtgtgtgagagagagtgtttctgtgtgtgtgttcttcactcaaggcagtggtgcgagtagtatattcaaaaatacccatctttccattgttccctaatgtggatggggtggtgatgggaaagccattcaaagacatgcagaaattagagatgctaagaagaaaggagcctttgaatttctttgaggattattttttccataaaagagactggaaaacacaggcagcaaatataaagtctatggaccctgcctcaggttattcaaataacatcaccattgatcaaatactcaagaaaaagcagacttgtacagtggctgatgaaactgctattaaacaacacgtgaagagagctactgatacctataattttggaattgcccttgaacaccggaaagaaatgctaaacctctggcagaagatccgaggggatttgattgggatagactctagaaatgagtccttttatgacaccttttctacttatacatggtcctggaatgtttgccaagaactactttctcctaaggacttaaggttatatgatgcctatgtgaatagaaattcctcccataactccagatccttttcctcatcagataccagtgaatgtgacacagactcaggaagaaaaagaaaacggaaaggtttaaagggatttcagtaatgaaatttctacattttctaaacagctcatcacaaactactttttcatagttatcaaaattatggtttcttgcttttgtctaagtacattcttagaagctggaaattttgacatcttttggattctgaccagtaaaaacgtttaagtcataaaaaaaaaaaaaaaaaaaaaaaaaaaaaaca

SEQ ID NO: 8613 - DNA, 709 bp, Macaca Fascicularis
  misc_feature (1)...(709): n = A,T,C or G
catgctccccccgacttcctacccaacactcagaagagtccagttagagctgagttcaatctcaccacctatagcagtaagcgcctcatgaagaggcacgtggatgagtcagttaaacaactaaatggagatgcttttattggtnnnnnnnnnnnntggactctggacaatgtctttttaactgcacccaatctgagaagaaacaaagtcatatttgtgatatctgctggggaaaccagccacttagatggggaaatcttaaagaaggaatctttgcgagccaaatgtcaagggtatgccctatttgtgttttcccttggccctacttgggatgacaaggaactggnnnnnnnnnnnnnnnnccctttggatcaccacctggtccagcttggccgaattcataaacctgaccacagttatggtgtgaagtttgtgaagnnnnnnnnnnnnnnnnnnnnnngtgcaatcaacagatacccaccaataaacttaaaaataaagtgcaatagacttaaccctgcagatccaaggcagcccccgcgacatttccgaagctttgttcctggaccatataaagctaccctcaaagaagatatattacagaaggcaaaattctttcaagataaaaaatatctttcaagagtagcaagaagtggcagagatgatgctattcaaaattttatcagaaacacctcccatacctttaaga

SEQ ID NO: 8614 - DNA, 1035 bp, Macaca Fascicularis
  misc_feature (1)...(1035): n = A,T,C or G
tttatcatgnnnnnntggacatgagatttttagatcttcctcccttcccgcaattgctagacgtctcgctcaaagacatttgtgggagtcacatttgcatcacagatnnnnnnnnnnnnnnnnnnnnnnnnaattggattgagaatgccttttnnnnnnnnnnnnnnnnnnnnnnnnnnnaaagaagaatagttttttgtcccnnnnnnnnnnnnnnnnnnnnnnnnnatcctaccagaaggaaagcactaagaaagacttgttttttgcttttaaaggcaacagacttaaagttgtcctcagccaaggaaaaatgatactgcaactttaaaatttaaagtatcttgcactgataaatatatttaaaaattatatgtttataaagttattannnnnnnnnnnnnnnnnnncaaaatgttcagtttatattgttttagattgttttgtaatttttaaaggtgtaaaataacatattttttctttatggaaatctataaaactttctgtagtaaaatgttttcattttactggtatattattgcttcatgttttgtaccatcataagattttgtgcagattttttttacagaaattattattttctnnnnnnnnnnnnnnnnnnnnnnnnnttgtttcaannnnnnnnnnnnnnnnttaactttaaatgacatttgtattctcagacactgagtagcataaaaaccacatagaactgaactgtaacttaaattccaaactatgactactacattccaaagaaacagttgaattaaacattttcataaaatnnnnnnnnnnnnnnnnnntttattatattagcactgttctagttaaagaagttggtgacatgccaccatccaataactttcaagattttttaaagttctcttttttaaaatattctgataaggagagaagattaagaagacattttccgaaagtagaatctcaactcaaattggaccctgtcatgataaggagtacagaatttgacgttaggaatggaaatgtttaaatcctaaattgtgtgtcaaa

SEQ ID NO: 8615 - DNA, 703 bp, Macaca Fascicularis
  misc_feature (1)...(703): n = A,T,C or G
aagcaaaagatgcctgggtgcatcttactgcaactgaggtgggggtgagctnnncagaagaccctcaggggagctcagtttgggaggaagaaacaatatttgtccccttgcagccttgttacagcctagctctgtgctcaagtcccaaaccagaaatagccaagactccataggcagccatctgggagtctggggtagccaaagaaatatgaaggcaaagttggagaggtagagaagtcaggatgaggacagcattcagcacagcctgagtaaaggctggaaagctaaaaggaatgaggcctgagaggagaccagagacccacacaggagagccaaaatgtgtttgtaaaaccttgcaaaggcttccatggccagacacattgtacacaccataaaataggtactgttagcaattttcaaaaaatattattaggactccaagtccaaagagttccataattcatacttggtttgtggtaaatgatcatcccattatcactggtccatgtagggcccttctgatgttttcccctctcccaatccacatgttccccacactccttttccctctttaccatgaacatctaaccctatgtgctgatatatgtccctggacctaaactacacagtgctttgtgtgtgtgtttgcataaatggtatatataagaatttcattctattgcttcttttattctgtaatttt

SEQ ID NO: 8616 - DNA, 2161 bp, Macaca Fascicularis
  misc_feature (1)...(2161): n = A,T,C or G
tttttacacaaagcatgttcatggttaataaaattactgtgtacacacatatcagtcttgtctgcaagatcctaattctctaatatggttgaaccacctctggcattaatggggcagattgaatgtggagttgtgattaccgacacctcattatataagtgctattcggggctgtgtggttctatcccatctgtcagaaatccagcaggctggtaattaggaaaggaatgggcattgcaacggctgctcaaagccacatggcgtttttctttcaacatgcaagggattctatctttttttcccccttgttggaaatcagcatgtgattttaattcaagatcattgggcagacaaatgagagaaaaatggggtacttgtaacagtagggagaattgggatgagccttagatatgccagtagagtaatcatggtgggaataataaatgacttttctctttactgttcctacagtcatttgccctgtgtggctggctacctgtccttacaaggctgcctctgttgtgggcaaaataaaggccacggttggtgaagccaccgtgagatctgtggcctctaacacaagcaccgtcgcttatttacaaatgtaccctcctaatttctggtggtgggatttttggggagcaaattatccagtccacgaatccacaggccttaaagtgctggcacttcagtgccaagatggtttagtttctgggactaatctgcttagttcacctttcaggtgctctcttagcagctgacttctctcaaatgaagggaagcaaattcaaacgcattccttctctgcgatgaattcagccagtgtgttttgtgctgttttctttcctcttgagggaaatcagatagtgggcagtgccagtctctccctcttgtggaaaacaagcccctagttggtctggcagtaattgcgcctgggcagacaaaggctgtcacagtgactgtcctgttcttagacttctgggtgctctagagccatcagtggagcttataaagtctcctgagtctaagcccaccccctctagaaattctcggatctaggatagggcagtataacaggtgcctcagggcatgcttcagagaaacagtcagaaggagatgagaaacaggatggtgagtgtctagagtggaagctttgagccatgtgggcagacagtccacagctcagcttggcaaccttacatgtttctgataccctttgaacttgggcttcctcgactgcttaaatatctgtcttctcaaacaggtatgaggagtgatgggagatagtgtcgacagagtgtctccccagtgcctgcctcctaggcagggttgtgcaggtgcagctctgtatctgacatgtccctgtggtggcctttctgtgaattcaccattgctccttcaaaacccttcctgttagctggcagtccacatgttacccgatttggttctgttggctttgtgggttggccccagttgatggccttgggactcttatccctggtaccaccaagtcaaagccacaccctaagatgacttagagcagagtttcccaaaattagcatggttgatgttttggatcagataattctttgttgtcaggaggctctcctgtgcattgcagcatccctgacctctactcaccagaggccagtagcacccctgcccagattatgacaatggaaaatgcctctagacattgctaaatgaccccttgttctctagggtgcaaaactgcccctggttgagagccactgacatagagccatgtctaagccttagaaaaaacgttcccggccgggcatggtggctgacgcctgtaatcacagcacttggggaggccaaggtgggcggatcacgaggtcaannnnnnnnnnnnnnnnnnnnnnnnnnnnnnnnnnnnnnnnnnnnnnnnnnnnnnnnnnnnnnnnnnnnnnnnnnnnnnnnnnnnnnnnnnnnnnnnnnnnnnnnnnnnnnnnnnnnnnnnnnnnnnnnnnnnnnnnnnnnnnnnnnnnnnnnnnnnnnnnnnnnnnnnnnnnnnnnnnnnnnnnnnnnnnnnnnnnnnnnngcctctcaaaaaaaaaaaaaaaaaaaaaaaaaaaaaaaaaaaaaaaaaaaaaaaaaaaaaaaaaaaaaaaaaaaaaaaaaaaaaaaaaaaaaaaaa

SEQ ID NO: 8617 - DNA, 1994 bp, Macaca Fascicularis
gatgttgtggttccgcagcgccctgggattttgggtttggttggctgcagcccgccagccgtgtaaaaactccaacgccgggcgccgcgggcagcacccacggagacccgcggggagctgcgtgcagcgcctgaccatgaggaacacgagcaaggaacttcagggcgccacgcaccgctacgctccctgcgattggtattaccatcttccagtgaagcgctctgagaaggccgtggatgccccaccggcgtcccagatcccaggtctcagcaatttgggagactcacacggcagggacctgcctgggactcggagatactggataaaagaaacagattcggaatacgtgaagctcgcgaaacaaggcggcaggcctgatttgttgaagcactttgcccctgggaccaggaaaggctccccgatggcctactccctgccagactggtacatccaccacagcaagccaccgacagccaaccagcaagaagtgcgggctgtctccatgccggattacatggttcatgaagaatttaaccccgatcaggccaacggtagctatgcatccagaagagggcccttcgacttcgacatgaaaacagtttggcaaagagaggctgaggaacttgaaaaggagaaaaaaaagctgaggctaccggccattgactcaaagtacctaagcaaagcagacacccaacttggccctaaggaccctacaggaagtagactctccttcccccccatcaatggttgtaaggatgagtggttgcagcagcagcgagctgactcaggcaagaggaccccgaagatctccagggcgtcagtgtcatctcagtccccacgagacccggaaggtccccaggatgcagcgaggctccaggacgcagaggctcctgaaggtcctgaggatgccccagagtcttctcacagcccagaagaatctgtatctgcatcaacaccagcagagctcaaataaatcctgatgcaatatatatttaggataattttaaaatggctaaatatgacatgactatattatagctatatttctgaggctctttttgtattttattaatatagactctcattggataatttaacttgtagcagatttgacattgctgcatagaaggggcaggtgttggtttttgtttcttgcgtttctctgggatgtgaaacacatggctaacaaacacaactatggcctctggtaccctctgccctgctggcctgttgatgtcccagtatctcagaaccaatcacttgcccctgtcatcaactaacataacctcctactgtgtgaaccactcttagcgggcattgctactggattcttgactagaggaaccttacagaacaggtgttaaaccttttccaatatttggtattgcaatctttacagaaatcattttctagttacaaaaaaatttaattccagaatatggtgatacagtttatgttaagaaaaatattttaatttattatgccatgaatttattaacatttaatataaaatattgtaacatttgctgtttttaaatgtttgctattttttcataaactgagattcaaaatattaaacatttattattttgtataaacctttaagtaaaaatatgctgagttttaatatttaatttagtagaattaacaaaaactcccaagctgaattactttgttttataaatgttaaattgtttatatttaagtaattagctgaaatatagttctatgttttgtatattaattgattaataacaataattttatgtgggaatgtttttaaaaagccaagtaaagccacagatattttagcttctttcccagaataaacttatcatgcatttgcttacctaaaatttaagtttcaaattagttctctatatgagacacttaattgagcatatatatctatattcattgatcaaactgatatgctacaggagaatgtatgcaatatgtaaaaaaaaaaaaaaaaaaaaaaaaaaaaaaaaaaa

SEQ ID NO: 8618 - DNA, 723 bp, Macaca Fascicularis
  misc_feature (1)...(723): n = A,T,C or G
gaactccagtactgcagcccgtatggagaaaacgggctgaccctgtnntctgtttacccannnnnnnnnnnnnncttgaacagaggcattggctagaccaacgcacaaaaggcctctttgtggagtttgtggtcttcaatgctaatgtgaacctattctgtgttgtgatcctgatgttggagtccagtgatgtgggtacgaaggcctctctctcctctccactctctatgatcttgtgctttgggttggatgtttgtcccctgtaaacctcatgttgnnnnnnnnnnnnnnnnnnnnnaagtggagcctgatgggaggtgtttgcgtcctgggaggcagatccttcatggatagattgatgccctccctcaggagtaagtgagttctcattctattagttcccaagaaagctggttgtttaaaaagagcctggaatctcccccacccctctcttgcttcctctcgttccatgtgatctctgcacaggctgtctccctttcaccttnnnnnnnnntggcagcagcctcaggccctcaccagatgcacacgcccaattttgannnnnnnnnnnnnnnnnnnngtgagccaaagaaaccttttttctttataaattactcaaggcttggatactcctttatagcaatacaaaatggactaagacacctgagtagctcaggagaagtcccagtttctttctctgtcttatacctattaatttaaata

SEQ ID NO: 8619 - DNA, 735 bp, Macaca Fascicularis
  misc_feature (1)...(735): n = A,T,C or G
attttccaaatctcaatttggggcaagaacgacatagtcacaactatgggcctgctttcaaaagcggggctccatttctactgtcagatcagtgtggtgctgtgaccatgtttttatccctacttccaagaatctccttgtatgaagcctgtctttgtccatcagaaggtgtgtgaaatcacttccttctggttttatgaatttgtagactatgcagcttttcattaaactgcaagtatatacaagacagatctaaaattaggcctgagtgttccaatccaccactgtactagtaaataaaaatccacctaccttttatgtggaaaattatgtgctattgagtaacttttagctctttttaaaaagtgggtgaaatttaagtgtctttttttatgagaatgacacatgaagagatctgagagcaatctcatgtagccttccatgaacctgcaattgttgtttagtacgcgtcagcattttccagtttccaggttggatctagagctgctgttgatcactcaggcatactaatggattcatttagatgggtccnnnnnnnnnnnnnnnngcaataacagactaccccatatactgcagtttactcagtgcttagtaaatgagatttgtggaactaagttattggttacctgaggcttcttaagaaagtcttcttttttgaccagttgatgtgaaagagggagcatgtgacacagccagtatggtggagtgctaggg

SEQ ID NO: 8620 - DNA, 738 bp, Macaca Fascicularis
  misc_feature (1)...(738): n = A,T,C or G
tttttaatgatgcnanatgtagatgagtgcattaaggtttgtaagatcttcatcattttatgtcattcattgaaaattgaaatgttcagtctttttaatgttttcctgtttccttttgcctagcatttgactttggtgttttannnnnnnnnnnnnnnngacatcattgtttgctgttgtgttacagagagagaaagaacctcacctgtggctcagctcatcccacatccgtttctcattacgtgtaaataaactgtcagagctgatgttacagcttttacagtttaaagcattcccctcctctctacttccttttttcttgtttacatgttttgggcactttccctcattcaccaccttccagggtttcgtagaaaataacttgttacaaaatcagtttaattctaatgtggacatagtggcatgttgataattagacacnnnnnnnnnnnnnnnnnnnnnaaatcgttgattctaaactctatacattgaaaaaattcagcccaggccccctcaaagcctgagaaaatttaatttgctcttaatctaatgttccagaaactcactcttgcaaaannnnnnnnnnnnnnnnnnnnnnngggtcacgtgtgggggctatctccgtgacactcaggattccagtcagaacctaatcctcgtatctattgcctacaaaaatagaccaagaatgttgctgctattttataatcctttaaatatttaacattcaagtttctt

SEQ ID NO: 8621 - DNA, 1847 bp, Macaca Fascicularis
  misc_feature (1)...(1847): n = A,T,C or G
gattatttggtgtgcctcgcgactgatatttttgggtcccagcttggcaactatttttcagattaccgtaataataccaaacatctgttaatcctgaaaagctattgtttcttccccaggtgattttgatctctttgaaaaactggcaaattgctgagggttaacactctggcccttttatgggctctgtttccagccctttatggcttgttagttatagagagttactaatagtcacctgaaatatacatacatattttgttgttgctagttgttccatgaagtcagagagggaaaggctgtgtagcaggagcaggagaaggtatctggctagtagttgtcttgagtagacagtatttttatatgtgaaataaacaagattatttggcaagtcagtgacttgtcagcccatcaggatgaatcagcagaagtcctaggtgaggtgagaatgtcagcacagtgagccccttgccctgagtttatcaggcatctcattaaggtagctgtcatagcttctattttagagaagagtagaagtcattgttcaagatttagctgactttaaaaacgatttcggagggggaagatcactttttgtataatgacaccattggaagtgacatgtggctgtttttcagattataatcattttggtgtgcccaagtgttaacagttgttaggatctttaaaacttgtcttcaggtgactagaggctattctgcttctccaagtaagttttattaattgtcttgggtcctagacaagttaactgtagtttctgatttatctattgcccaaacctgtgataatttgataggaataggaactaagaggtggcattttattgcaaaagatggatgttggctgctaaatacagctgattagaaggctaggacaaagtgtctgtttttctggtgacagggtcattattaaagctattttattttattttatttagtttagtttggtttagtttttgnnnnnnnnnnnnnnnnnnnnnnnnnnnnnnnnnnnnnnnnnnnnnnnnnnnnnnnnnnnnnnnnnnnnnnnnnnnnnnnnnnnnnnnnnnnnnnnnnnnnnnnnnnnnnnnnnnnnnnnnnnnnnnnnnnnnnnnnnnnnnnnnnnnnnnnnnnnnnnnnnnnnnnnnnnnnnnnnnnnnnnnnnnnnnnnnnnnnnnnncaaactcctgactttgtgatccgcccacctcggcctcccaaagtgctgggattacaagtgtgagccaccatgcctggcctaaaggtttatagaacgcttccgtagtcagatggctgagttcagctcctttccactcctgtgaagttatctttaagacatttggaatccttcatagaagtcttatcagcagtgattctcttatagatgtttgctacttgggtcaatttagtctaaatggttctaaactgtgaagtgctcctcagtgctatgctggtagtcagagctttgacaattgctgctgcctcagaagattggatttgggccccacggaggcagagaacagttaactgccagatatgactgccatcttattttccaagtgtaaattttaccttcagagaaaggaagagagggctgcaggcggatcacttgaggtcgggagtttgagaccagcctgaccgacatggtgaagctccgtcgctactaaaaatacaggaattgnnnnnnnnnnnnnnnnnnnnnnnnnnnnnnnnnnnnnnnnnnnnnnnnnnnnnnnnnnnnnnnnnnnnnnnnnnnnnnnnnnnnnnnnnnnnnnnnnnnnnnnnnnnnnnnnnnnnnnnnnncatgacggagtaagactccatctcaaaaaaaaaaaaaaaaaaaaa

SEQ ID NO: 8622 - DNA, 158 bp, Macaca Fascicularis
tcccctcctccagctgttcggaaaaaagtgatcacagggggatgatagtagctgactagttgtgactattttgtgggctgtgggcaccggaggagagatttttgaaaacagcagatttcatcatgccgcctgtggtggaggaattattaataatatcc

SEQ ID NO: 8623 - DNA, 744 bp, Macaca Fascicularis
  misc_feature (1)...(744): n = A,T,C or G
agaggaagccagagacagaaataggctaagnnngcagcagggnnncagctgcgagggccccacaggatggagctgggtcgaggaccagggagtcctgatcccggaggctgccactggggagcagcaccgctcctccatccagaacctaagggctgaagcaaaggctgccaggaccctcgaagatgcttttggctcacctcatttcaccccacgctctgctggctggcagagcagaaggcagtcgtttcctctctgaagagtattaattttttttcgattgccctctggttagggtgcacatataaatcagagttaatatatgaacgcgtgtgcatgcacgagcgtgtgtgtgcctgtgtgctgtgtgtggctgtgtgtgtgtgtgtgtgtgtgtgtgtgtgtgtgtgtctggctgtgcgttccagagcgtgcgacgatgctgacttagctgtgtggccttgggcttgctgcttcattactcgcctggatggggatgagggatgagaagggtgtgggtttggccccatgtcactggccggaaggatgtgtctcagccctgccctgtggggtgcccccgatgggaggctgtcccatctcccagtccccatctctgttccccactctgtccctggacaagccctgcccagagctgaaccctgtagctgcccccttgccctgtgtgggannnncagtnnnnnnnnnnnnnnnnnnnnnnnnnnnnncatctcctcaccccatctccca

SEQ ID NO: 8624 - DNA, 762 bp, Macaca Fascicularis
  misc_feature (1)...(762): n = A,T,C or G
taatgatcagggaaattcattantnctacatgtggannnttttgcttcaaatattgtatctttttaaatctaaatgttcatatttttcctgaagaaaccactgtgtaaaaatcaaattttaattttgaatggaataattttaaagaattatgaagatgatttgaagctctaatttatatagtcacctgtaaaatgttctttatatgtgttcacaagtaaattttatattgattaagttaaacttttgaattgatttgaggagcagtaaaatgaaagctatatctattctaaaccttatttagacattggtaccagttacccaggtgaaaatatggagtaactttattttgtgtggtaaggtttaggaatggtggatgaagggtatctctatataaataaagtgctcaacaatgtgcaatgattgtaaatttagtaagacattacagccatttcgtgaatgctttaccattcaacatagtatctattacaaaacacctttcttgtatccatatacttcaggtgttgctgttaacatttactatgatatttattttaaccaaaatgttattcacattaaatgtttattctttaaaatgaatgtattatgtttttaacccacaaatgcatacttaccctatgcctcatatttcaatagtactgtaatatggacatattttgtgaaatacttttattttgttatgctttaaatatacataccaaaagaatttctgtcattagctttgaaaattgtacaatatncta

SEQ ID NO: 8625 - DNA, 690 bp, Macaca Fascicularis
  misc_feature (1)...(690): n = A,T,C or G
cacttttttcaataantatttgggtacggactgtataatggaaaaatgtcagtaaatatcttcacaagtgtacatatgaaaaatgcatttttgtataatttacttctggtgtgactgaaacaactagagagtatatagccacttgacaactgttgacgtttaaaaattgctattgtttctcctattaaaaacacattaagtgcttgcttgtcatcccagctactccagaggctgaggcaggagagaatctcttaagccctggagtttgagaacagaatgggcaacatggtgagaccctgtctcaaaaaataaacaatacaataattaagcaaacttttttaaattgaagagtttggcactctgcctatattcatcatcccagagttaaaatttttcaacatttgacacatcttaaagactactaaactgatgttttaaaagtgggctttggctgggttcagtggctcacgcctgtaatctcagcactttgagaggctgaggcaggcggataacctgaggttaggagttcaagatcagcctggccaacgtgatgaagccccgtctctactaaaaatacaaaaattagctgggtgtggcggcgggtgcctgtaatcccagctacttgggaggctgaggcaggagaatcctttgaaccctggaggcagaggttgcagtgagctgagattgtgc

SEQ ID NO: 8626 - DNA, 2232 bp, Macaca Fascicularis
attgagcattgctaagtgttttacatgtgtcatgttatcatgatactatttaataagcactaactatgctgcggtcccttcctggcacttagggaagatggtgctgccgtcttcctgggcttgatctatgggctaaggggagaggggcaggtaactgtcagtttctgcctgaggtgatggagaaagaggaagctaatggtatagtctaatgtttcagaaggattaagcggggaagggtggtgagtgtaagagtagaagtccaagaggggtgagtgacagtgggagttggccagtctccatccacctggtctacttacaggagcttctttgggttgctaaggtcatgggcagaaaaggtgatgactgcaggaacaaggcaggagcaacttcgctgggacccctctctcttgagccatactttctccaggagcagcctacccctgagtcttgtcctggcccataagcagcttaggacagctgcttctgagagggtgccacactcagatgcctacagcacaggagccaagtgagggtgggcgacagcactgaaggcccaaggcacacccaaaagggctgttagctggtgggcaccatgtagagatgaggtcccagcccagttaaatctttcaagaaaagctggaagtactttttaagtgaaatcttgaatgtaaattttaatattggttattaattcaaatgaaaagagccaagcccagcatgtccaggggtcccatgcagctcactggctgccagtttgtgatccctgacatcctttcctcctctctgacccaaaagctgagcgagataagaatctgaaacccagaatagtgcccagaggaatgggtgtctggaagccctttcatatttcaaaactctcaaccataagaaaatgaaggcatcaagagacttggaacagaaattgctgctgcctaaagtctctcttcctaaattttctgttgcaggtaataatagcttgtcttcactgaccacttactatgtgcgtgggaaagttctaagtgcttttcctatgttacctcattttgcagatgagactgaagctcaaagaagttaagtaacttgccaaaagactcccagctaaaagtgtcagggcaaggactcaaaccaaggcaatcttctggtttcagagcctgaagtcttaaccaggtgagaataaaacttccagcatgcttatgtgtttgcttatctgtaaatgaccccagagctgactgcagatgttgagagaagaggtaattttgaccaaatgcagtcatgacctcaagtgtgggcgagtccttgctccctgcccggacttggctaggcctgcaggtcatacaggaagaatagtccctctgaaggtgaccataatccacaaggcagggtgtggaaagtgacagaggtgaatatattaaatgacttggtcaagtccccacagctggtcactggcagaagtagcagaaacaaataggcattatctattctcccagtcaacaaacagcctttgagcccagctatgcctggcactgtctctggagtcaagccccagacttacaatactgattttaagtccaactatcattagctggactacatgttaaatatatgtactagggagacaggagagacttcatagtctttgatatgcccaggtgttcagtgcttctgcaggaggcagagagctaaaagaagagggaagtttgatgggaggaaataatttcctggttgcaaaagataagaaaaggaattcacttaggaactgaagaccacaaggtagacacacacagtctctgctcaagttttgccaagctctgtacagaagaaaccatgttcttttgttttctcaagttccttttaagtgggataaaagagtggattacaggcatgagccactgcgcctggccccccaaatgctcttgaaccagaaacccagggctgggaggtgctcactgagctgctgcttttctgtgtgctggtgctgtgtgtgtttgtaagtctgtggcagctgtactcttgcgactataagggaattctggccaccctgggtggggcgtggtcggggtgagaaccgaagcgttggaactgtagacccgtcctgtcgactgtgtgcccctgggcatgtgtgagcctcagtttcctcatctgtaagagggggcgatgataacctacctcacaggggtgttatgaggattaaatgtgaggaggatagtgccaaaaaaaaaaaaaaaaaaaaaaaaa

SEQ ID NO: 8627 - DNA, 757 bp, Macaca Fascicularis
  misc_feature (1)...(757): n = A,T,C or G
agggagcagataaggnnnnnnnnnnnnnnnnnnnnnnnnnnnnnnnnnnnnnnnnnnnnaggactggcccctcannnnnnnnnnnnnnnnnnnnnnnnnnctcnnnnnnnnnnnnnnnnctgggatatattctggatgatcacaaaatccaacacctaaggttgcaggggcaaatgccggccttaatgagggcaggaatcttccagtccttccagaagagctcccgagacatacttctctgcacagacatagcctctcggggcctggacagcaccggtgtggagctggttgtcaattatgatttccccccaacgctgcaagattacatccannnnnnnnnnnnnnnnnnnnnnnnnnnnnnnnnnnnnnnnnnnnnnnnnnnnnnnnnnnnnnnnnnnnnnnnnnatgtgagcctggttcagaagattgagctggcggctcgccgaaggagaagtcttccaggactagtatcctcggnnnnnnnnnnnnnnccgcagcaacctgattttgacaaatctgattaaaatgtgatgctagaacaggnnnnnnnnnnnnnnnnttgggtgggtgatcacacttgtaagtnnnnnnnnnnnnnnnnnnnnnnnnnccttgagggtaggatgaannnnnnnnnnnnnnnnnnnnnnnagatgctagccagcattggagaagaagctgctgagcatggctttctgtagtctttcacaagacacaagtggattttgactttgtnnnnnnnnnnnnnttctaataa

SEQ ID NO: 8628 - DNA, 741 bp, Macaca Fascicularis
  misc_feature (1)...(741): n = A,T,C or G
actgtactgtattaaggagcctttgtacagctaggtcagatnnccacgatatgaagtatttgagttttaaaatatactgttattaaaaggaaaaannnnnnnnnnnnnnnnnnnnnnnttaaatgataatttccttattcagtttcagaagaaaaagaatgaaattgagtaactgtcattgcgttagctctatgttgaattgggaaattgtggcataaagcttaaattcgtgtttatcaaatgtgaagcatagtagtataatgctgctttgtatataatgtaagtgctacaaatagtnnnnnnnnnnnnnnnnnnnnnntacctcttaaatgaatgcaacttttgatgtaggtgttttgatatgcctcagaaaatatctgagtgtctaagaatttgttaatnnnnnnnnnnnnnnnnatacttcctgtggttttgtttcatattttcatgtttaaaatttaagttttacatttttactactgttaatttaagtaaaatttgttctgtggttaaaatgaggttggcagtgaagaaaattaaaaacagcctcattcatgtaactggttaagtaaaaatacattttcactatgtgttcataaacttttaatgaagctgtttgtctttcagttcaaatataagtgatgtttaggctttatttctgttaataaggctttttaccattgattaaatgaaggaatgtatcttttgaagagatttatattctgtaaataaaaattggtg

SEQ ID NO: 8629 - DNA, 744 bp, Macaca Fascicularis
  misc_feature (1)...(744): n = A,T,C or G
tatgcaaggcactcagtggccgctggttnnnggcagggctnnnnagctggggcctgggctgtggccgacctaactacttcggcgtctacacccgcatcacaggtgtgatcggctggatccagcaagtggtgacctgaggaactgcccccctgcagagcaggtcccacctcttggactcagagagcccagggcaattgccaagcagggggacaagtattctggggggaggggggcgcgagcaggccctgtggtggcaggaggtggcatcttgtcttgtccctgatgtctgctccagtgatggcaggaggatggaggnnnnnnnnnnnnnnngggtcaagacgtcccctggggacccaggcccacacccagcccttctgcctcccgattctctctcctccgtccccttcctccactgctgcctattgcaaggaagtggctcagcagcaagaatgctggctctacgtccccaggagtgtctgagctgtgccccgctctgtacagaggctgcttgggcagccttgcctctagagagcagatgccagcttcggaagcccctggtctaacttgggatctgggaatggaaggtgcccccataggaggggaccctcacagccctggggactgccaggtgggccggctgccaccgtaagccaaaaaaggtggggaagccctgactccaaggtccttgccccacccctgcctgccacctggcccctcacagcccagaccctcaccggcaggtga

SEQ ID NO: 8630 - DNA, 746 bp, Macaca Fascicularis
  misc_feature (1)...(746): n = A,T,C or G
ggtttagaataggtggtctcttgccagtacagtcccaggcgttttatgtgtttagannnnnnnnnnnnnnnnnnnnntcagaggattaagctccttaaagctgtttttctccattgtcatagtgcnnnnnnnnnnnaacgaatgtacaagtatcctattttctaacagatgtaactagggtttttttaaaagcactttttcatagtttttcttttaaaaagtaaaattcagcactgtgacttcaatccccaaatctttcacatacaggtgaaacattaagccacaaataaaaataatgaacaagaaggaagacaagatcctaatttnnnnnnnnnnnnnnnnnnnnnncccatatcagaagctttgcaaaacagatctagggacagaagggttttttgaaagacatttttctttggagaggaattttgtgtgccaggactaaagtttaaatatagtgtttttatgagcaagggaaggtagcattgattcccaaagctttctaattagatacatgctgtcatggatgtaagccttaaaggagttaatactaatnnnnnnnnnnnataaattttcctcaggtttcttttttatttaaaaaaatgatttgttaaaagtactttctgctagacccttgcctttgagtggctttgaaatttaatatagtttttaaaaagtgcaatgagatgagattatgctattagtatattaaaannnatgtttctgttttactnnnnatttgtaagatc

SEQ ID NO: 8631 - DNA, 757 bp, Macaca Fascicularis
  misc_feature (1)...(757): n = A,T,C or G
aggataatgaaaattgcttttacttaaaaagttgagtcaaagaagacgacggtgtagttagtttttaaagggagaaagaaagggacgagataaaataactaaaaattggacataagagagacagtgtccaggaaagtacatttgcattaaaaagtgcaattgacagaaagattagcgacacattcagtaaagtgtacataaaacaaggcaagcggcagggatcctatcaaggaacaaacagagaaccaaagcagttcagcacagtatgctggaaagaagaaatnnnnnnnnnnnnnnnnnagtgaatggagaagagaaggaggtgcttgacagcaagattttagtgaatgcagaggagtgacacacagtggatgggtggataacaatgtgnnnnnnnnnnnnnnnnnnnnnaaaacaacnnnnnnnnnnnnnnnnnnnnnnnnnnnnnnccttaggatgggaaaagtcatgcgaggataacatactaaannnnnnnnnnnnnnnnnataatcgtatcatatggaataaggaagaaaacacctgatggacactaaaaagagcactgcatggatttggcaacatttcagagtaacttaagtaaacacagggcaaatccacttcacaataaggagacccagaaacaatgaggtcagaagaacannnnnnnnnnnnnnnnnnnnnnnnnagattaaagatggaccaaagatacagaagggaaaaagggtgaggtagaaaagaagcaagtcagaagacaact

SEQ ID NO: 8632 - DNA, 776 bp, Macaca Fascicularis
  misc_feature (1)...(776): n = A,T,C or G
caggtttggtacaagtggcannnngcttccatggccgtggagaagcatggcgccctggcttcnctgaggaagctgggcttcatgacaacggcagatgtaaagttgtttcctccttgtgaagtcaggttgaggctgggagacagccattgtagatgctctactttgttctgctgttctctagaaagaatatttggttttcctgtataggaatgagattaattcctttccaggtattttgtaattctgggaagcaaaacccatgcctccccctagccatttttactgttatcctatttagatggccatgaagaggatgctgtgaaattcccaacgaacattgatgctgacagtcatgcagtctgggagtggggaagtgatcttttgttcctatcctcctcttttagcagtaaaatagctgagggaaaagggagggaaaaggaagttatgggaatacttgtggtggttttacagtcactaaaaagtgatccctaggccttgggaactcttggaggcctctgtatcagtggatttcccatcccccgtgggaaactagtaggctcatttactattttagatctaacctatgtggattttttcctaacatacctaagcaaacccactgtcaggatggtaattcttattctttcattcagttaagttttttccttcatctgggcactgaagggatatgtgaaacaatgttaacatttttggtagtcttcaannnngggaattgtatctgtttaacttcttataggaaagcttgagtaaaataa

SEQ ID NO: 8633 - DNA, 2173 bp, Macaca Fascicularis
acttaaagaacatgtgattgagaaggaagaactaaaacttcacctgcaagcttccaaagatgcccaacgacagctgacaatggagctgcacgagttacaagacaggaatatggagtgtctaggaatgttacatgaatctcaagaagaaataaaggaacttcgtagtagatctggccctgctgctcatctctacttctcccaatcatatggagcttttactggggaatccttggcagctgaaattgaggggactatgcgtaaaaagctgagtttggatgaggaatcttctctctttaaacaaaaagcccaacagaagcgggtgtttgataccgtcaggattgccaatgacacacggggccgctctatctcgttcccagctctgttacccattccaggctccaaccattcaagtgtcatcatgacagcaaaaccttttgagtctggtcttcagcaaacagaggacaaatcactcctgaaccaggggagcagctcagaggaagttgcagggagctcccagaagatgggccaaccaggaccctctggagacagtgatttggctacagcactgcatcgccttaacttgcgtcgacagaactatttaagtgagaagcagttcttcgctgaagaatggcagcggaagatccaggttctggctgaccagaaggaaggggttagtggctgtgtcaccccgacagagagccttgtctccctctgcaccaaccagtcagagatcacagacctcagcagtgccagttgccttcgaggttttatgccagaaaaattacaaattgtcaagccccttgaaggatcacaaactctgtatcactggcagcagcttgctcagccaaacttgggaaccatccttgatccacgaccaggtgtcattactaaaggctttacccagttgcccagggataccatttatcacatctcagatttagaagagggtgaagaggagggtattacttttcaggttcagcaacctcttcaagtggaagagaaactgtcaacatccaagccagtaacggggatcttcctaccacccattacttcagcaggtggaccagttacagttgcaaccgccaatccaggaaagtgcctgtcatgcacaaactcaacattcactttcaccacctgtagaatattacatccctctgacatcactcaggttacccccagctctgggttcccttcattatcctgtggaagtagtggtagcagttcatccaacacggctgtgaattctcctgccttgtcctatagactcagcattggtgagtccatcaccaaccgacgagattccactacaaccttcagtagcaccatgagcttggccaaacttctacaagaacgaggcatctctgccaaagtgtaccacagcccaatttcagagaaccccctccagcctctccctaaatccctggctatcccttccacaccaccaaattcaccatctcactcaccttgcccttctcctttgccctttgagcctcgagtgcatctctctgaaaattttttggcctctcgaccagctgagacatttctccaggagatgtatggcttgagaccctcccggaaccctcctgatgttggccagttgaagatgaatttagtggacaggctggagagactggggatagccagagtggtcaagaaccctggtgcccaagagaatggaagatgccaggaggcagaaattggtcttcaaaaaccagattctgctgtttatttaaattcaggtagcagtttattaggtggactaaggaggaatcagagtcttccagtcataatgggtagctttgctgccccagtttgcacatcctcacccaaaatgggtgtcctgaaggaggactgaggttcaccagttaactgacctcttatacaaattagcacatgagggatagatacgcactgaaacatgtagtctggtctgacttgagagaaaaggaatgttgcacaagggttgtgaatgtgaaagggggaatggaggaatggaaataaaattgggatgagccctaatggaggaagtcgggcaaattgaaagtataaatgaatgggccatgagtgttcggaggcaggaaagaaaggtttaatatactccttcaggagtttaatatactccttcaagactgagttttcttgtcttgaaaataaaaaaaaaaaaaaaaaaaaa

SEQ ID NO: 8634 - DNA, 614 bp, Macaca Fascicularis
  misc_feature (1)...(614): n = A,T,C or G
agcgtgccccgtnnnnnnnnnnnnnnnnnnnnnnnnnnnnnnnnnnnnnntccagcagcagattccacaccctgccgccacaaccagtttcctttctcccaagacagcagggaaatgtcagaggctccgtgtgagctcagagcgtgataaagaaagtgcaagggcaagtagccatcggggccaagagctttttgagttaccaaaggcctagtcagcatagtcaatgctacccccggacacatttctttaaaatatttcattaatgctacaaacattatttatcattttactttagaccttgaaccagcatattttttactttccccacccagcaagataagctgttgtatttaatataaatggtctctgtcccagcgtttcatgtctggctgtgtggcagatggctacaggtattaggcaaataacagnnnnnnctggggatctcaaggcagtgggggtgtgcatgaaannnaggtagaaatgccccgtggattgagacacatattcagtcaccacaaattagagaacagagagancttaggatgtatacatgtgtacaatgagccaggcctacagcccagagaagacactttttcttcatttacagtagctta

SEQ ID NO: 8635 - DNA, 770 bp, Macaca Fascicularis
acgcagcaggaaaagcctacatgggaaactgcctcccacaagctgtggtgtgagaagagccctggctggcagcaggagctgtgaaatttcatcccagccgggtgcatttagtgactgcctgaccatcttcctcccaggccctcaatttcttcatctgtagaatgagcagataggggccacggcaggggttttcacacatccaaggaggcagctctgctctacttgatgtgaggatgaggggggcctagaccccctgctgcccaggcccttgaggcaacactgggttcctggcttgacagctctgggctggctgcccttgccagctcagccggctggagagttttcagctcccccaaggaacgggcatagggtttgtgtggggtcaatgccaagaacctgggggaaactggctgcattttatcctaagaagttcatccctcctgctcttcttcctctttctggccctggaggagaatgagggaggagaggcttttctatgactgtgttagcttttattattcgcaagagggctccttttgtaatttgtgcatgaaattcatgtcatttcctgggagaggagagggccaactggagagggtggggggcacactggggaagcaggcagaggtttccttcccttgtaggggggtggggagagtaggggagagggggtgctacccagttcgcctgatgagggctctcgaaccagccgttttgggttgtgttaaaggtgagaccttcctccattaatgtacaatctcgaactaact

SEQ ID NO: 8636 - DNA, 1587 bp, Macaca Fascicularis
tttaaactatgaatcaattcactatactcacacattgagagatttctcatggactcctggcttcctgggctatggaggccactctgtggtcattgcagaccccaccaccagcccgtccttccacaccccccatacccttggctcctttatgttgcttcctgccccacaggcatctgcatttagtactcatggaaatacttactctgaattatacttctgtaggctaacgtggctggggaatccggggcgtcaatgaagaaggactggcctttgtcacaattcttaccttaaaagaaacaaatggaagacaattcagtccaagaggaaaacagagtggccacaagatcttggggctccttctgtgctggtgacaatgggaatattttgagtccccttcacttgtaatgaagaacaatgtagaaaaggccactggggtctctgggaccttccttccagcatttcagggtccccagccagcatttcagcgtggctaaatcatcaggtggcgtacagaaaatgcaggttccagggccctacagagaactgattcagcagcttccaggtgggcccaggagtctgcattttaagagattagcttttgagcaaaaggatcatgaatgcacatgattaaaaaaagtacagaatacaaaaggatatggcatgaaaggccaagtccaaagagggctactagtgttctaggtgtctttccagaaagattatgcgcatataaatgtgcacattcacaagtgtgcacacacacatacacacactcatatacctaaaatacgagtgggagcacatgacacacacattctgcccactgctttgtctgtgtataattttatcttctaggtcatctgtgctggtgtctatccgtctgctagtctttccctgccatgtggccactgttccagtcccctcctatgcacacccaggtttctctaggaccatgttatcccagagccaggaggacaggacacaggggccttggagtcattgggggtgttctcgcccccagtctgccctgctagcccccggttgtgggtggacctgccatcagcttgctctccccactctccaggccctgagctgccagagaaacagggccaagtgactgcactgcccatgtccggtcaccagcctcaggtgaaccccaggaggagttcctaccttgcacctaccatttcttcaacttcactactgtgctgccgtgtgggacagggaagtccaagtcggggaagaagcctgtggggagagggtggtgggagatggggagcccagatggcccagtgaggcaggaaaatagggtctggaggcagggaacataaggccaattcgcacttgagccataacaggaaatgtcctctccacaggacatatgccataaatgactctgtaactttacttcatcctcttcgtttatataggacgtaccccaagtagaggatatttaaacccaaaaactctgtaatggggcctttgagcccctattctcaggcccattcccttcccacactgtggagtttactttcattttcaataaatcctttcattccttcctcaaaaaaaaaaaaaaaaaaggccaca

SEQ ID NO: 8637 - DNA, 726 bp, Macaca Fascicularis
  misc_feature (1)...(726): n = A,T,C or G
gacatatacacacacacacacacacacacacgaagtgttcctgtacnnnnngagcctgaatggtcagcaaggagccaaccattattttgaatacctgtggcatccttgaaagaattttgttgctatttcttctggatcacctcgggaaaatcagttttgaggacatgttaagtcaggagaaaggttaccattactaggacccttcccgtctatgaagaaccttaatcatcaccatctctctttcgtttttgtttttaaccacctgacatttgtatatgtgtaaaggaaggccatctgtaaagttttccagttaaagtaaacaaaagatttaatacacaagtacaaacctgtgcagtgccctttataagtctttcaaagaagtactacaccttgccacatcaaatgttgatgatctgcttgcttagcgggggaacatttgcttactttttctctagttacttctactctgatcttgctgtctcagttctcctaccagcattgatnnnnnnnnnnnnnnnnnnnnnnnnnnnnnnnnnnnnnnnnnnnnnnnnnnnnnnnnnnnnnnnnnnnnnngaaactatttttcctcnnnnnnnnnnnnnnngattgggatgatctgttaaagtttcgagaaactcaaataggccctatttgccaatataggacaggaaacccacagattaagtattggataatctcaaagttcattttggccaattggtgcca

SEQ ID NO: 8638 - DNA, 689 bp, Macaca Fascicularis
  misc_feature (1)...(689): n = A,T,C or G
tggagcccatccagnnngagggtggagacaaccatgcgtccgatgacttctttcggaagctgagagacattgccaggaagcatggctgcgcctnnnnnnnnnnnnnnnnnnnnnnnnnnnnnnnnnnnnnnnnnnnnnnnnnnnnnnnnnnnnnnnnnnnnnnnnnnnacccagcagnnnnnnnnnnnnnnnnnnnnnagatgatgattgggggcttcttccacaaggaggagttcaggcccaatgctccttaccggatcttcaacacctggctgggggacccgtccaagaacctactgctggctgaggtcatcaacatcatcaagcgggaggacctgctaaataacgcagcccatgccgggnnnnnnnnnnnnnnnnnnnnnnnnnnnnnnnnnnnnnnnnnccnnnnnnnnnnnnnnngggtgagaggacgaggcaccttttgctccttcgatactcccgatgattccgtacggaataagctcattttaactgccagaaacaaaggtgtggtgttggggnnnnnnnnnnnnnnntctattcgtttccgtcccacgctggtcttcagggatcaccacgctcacctgttcctcaatattttcannnnnnnnnnnnnnnnnnnnnnnnnnnnnnnnnnnnnnnnnnnnnnnnagaaagccccgatctcaacagttgtcaaangattagtt

SEQ ID NO: 8639 - DNA, 712 bp, Macaca Fascicularis
  misc_feature (1)...(712): n = A,T,C or G
tttgtaatgtgcttttaatatagaaattctcttttttgttcttaaatctataaatgctctgtntccaagcttatacttactactgcatattagtggtcctggcacagattttcttaccctggcctcgtactatccaccatgactttagaaaaagtttgaacaacaataggcagagaaaggaaatccccaaatgggattatttccccctgggacataagaagtttagttgcaggtttcttgaattcgtttttgtccagaggaatcttctttttatctgatatggtcgataaccaaaaatgaagcagggcagccgaaggcatagccggaagggaacagaagacctttttctgccgagtgctcatcaccgggttcattggcagtgccggccagagatggaaggggagaaacacgttagtttcctctcatctcacgaaaaagatgatctggagttaaaaaatgaaggtcacggccgggcgcggtggctcacgcctgtaatcccagcactttgggaggccaaggcgggcggatcacaaggtcaggagatcgagaccacnnnnnnnnnnnnnnnnnnnnnnnnnnnnnnnnnnnnnnnnnnnnnnnnnnnnnnnnnnnnnnnnnnnnnnnnnnnnnnnnnnnnnnnnnnnnnnnnnnnnnnnnnnnnnnnnnnnnnnnnnnnnnnnnnnnnnnnnnnnnnnnnnnnnnnnnnnnnnnn

SEQ ID NO: 8640 - DNA, 226 bp, Macaca Fascicularis
gtgagtgaccccggcccggggcgcagatcacgacccccccctccatgccctacggacgaccggggtactcccgagtctccaggtctgagatccaccccgaggccgcgggactcgcccagaccctctacctgggagaagcccactgcgcctttaccaaaatccctgcgggttggtccgggagtgggcgaggttcggtgggcggggcttaccgagggggcggggccag

SEQ ID NO: 8641 - DNA, 1834 bp, Macaca Fascicularis
actgggctcccgggccagcgagggctgcgcaagaagttgtagagaatacagtgttcaaggcacccttttggaagcagagacctcaccagacactgaacctgactgaaccttaatcttggatttcccagcctccaggtgtgaatatgaagaaaaacagatagtactatgcccattaaaagatgatgagatttgggaggccaagcctggttaagaatcattgctgaggaacaactacagtcatatagagcatgcacaccacagaatcaaaagatgaacatttggaggatgaaaacttccaaacatctacaactcctcagagtctcattgatcctaacagtactgcacatgaagaaactaaaactgtcatatcagatacagaagaaataaaaccacagacaaaaaagaggacatacatttcttgtcctctaagaggagcattgaatagaattattacaaatggagttatactctttgtgatatggtgtacgacctggtcagtcttaggctctgaagctctccctggtggaaatttatttggattgttaattattttttatagtgccattattgggggaaagattttacaactcattagaatacctttagtgcctccacttccacctcttcttgggatgttactggctggttttacaattaggaatgttccattcatcagtaaacatgtccatgttcataacacgtggtcttcaattttaagaagcactgcccttaccgttattctaatacgagctgggcttggactcgatccacaggctttgagacacttgaaggtggtttgtttcagattggctgtaggtccatgccttatggaagctagtgcagctgctgttttttcccacttcattatgaaatttccctgggaatgggcatttctattaggttttgttctaggtgctgtctctcctgctattgttgtcccttccatgatggtgttacaagaaaatggatatggtgttgaggaaggcattccatccttactaatggctgctagcagtatggatgatgttctggctatcactggattcaatacatgcttgagcatagtcttctcctcgggtggtatagttaataacgccatagcccctataaagagcgtatctattagtctgctggcaggaattgttttgggattttttgttcgatattttccaagtgaagaccagaaaaaacttgcattgaagagaggattccttattttgactatgtgtgtttctgctgtcttaggcagccaacgtataggtttacatggaactggaggattattcaccctagtgttgagtttcattgcagggacaaaatggtcccaagaaaagatgaaagtccaaaagattattacaaatgtatgggatatttttcaaccacttctttttggtttagttggagcagaagtatctgtttcattgcttgaatcaaatactattggcatatttgttgccactctgagtttggcattatgtgttcgaattttagtcacatatatattgatgtgctttgctggttttagttttaaggagaaaatatttattgctttagcatggatgcccaaagctacagtacaggctgtgttaggtcctctggttctagaaacagcaagagtctccgcaccccacttggaaccatattcgaaggatgtgatgacagtagcatttttagccatcttgatcacagctccaaatggagctctacttatgggcattctggggcctaaattgcttagacgccattatgatccaagcaaaataaaactgcaattgtcaacataaacatatagagcatcattaaaaagtttacctgtcatcaaaaaaaaaaaaaa

SEQ ID NO: 8642 - DNA, 748 bp, Macaca Fascicularis
  misc_feature (1)...(748): n = A,T,C or G
caaaaattctgcattagaacttgggagaggggttaaannnactcaaatttaactctaaagagctcctattctaagaaaagcattgcggtattttgataatgaaaagatcaaaaaaattctaatagttttttaaaatatggctttacttttgcctaatgttgcattgggttcattcattacaataaaacttactggccnnnnnnnnnnnnnnnnnnnnnnnnnnnnnnnnnnnnnnnnnnnnnnnnnnnnnnnnnnnnnnnnnnnnnnnnnnnnnnnnnnnnnnnnnnnnnnnnnnnnnnnnnnnnnnnnnnnnnnnnnnnnnnnnnnnnnnnnnnnnnnnnnnnnnnnnnnnnnnnattccagctactcgtgaggctgaggcaggagaatcgcttgaacccaggaggcggaggttgcactccaacctgggcaacaagagcgaaactccatctcaaaaaaaaaaaacttactgagcgcttaccacgtattaggcactgtgattgatgctaccatccaacatagtgcttataagtaacaatactgtaatatatacttaaaattttgcgagaaagataaatcttacatgtaagtttttaaatcacaaaacaatagaggctgagaggaaacttttggacatgatagatatgtttatggcattgtgatgggttaatgggtgtatgcttatctccaaactcatcaagttgtatactttagatatgtacagctttttgtatgtcaatcatacctc

SEQ ID NO: 8643 - DNA, 692 bp, Macaca Fascicularis
  misc_feature (1)...(692): n = A,T,C or G
gaggattaatagatnnnnnnattcnnntccagnnnngagagatgaagggaaagagattcttgctttaaagcggctcgaagacaatctttatgactttagcaactcttcaacatagtagcaccaataatggagagattatattaacttcctagtggtgagaataccatgggatgggagaagggccagtgagtgggacggggatgagcttnnnnnnnnnnnnnnntcagactctgcagggtgcaccggttctagcctcaaataacaacattgcaaggaggtggactacagggtccacaccctctgtccttnnnnnnnnnnnnnnnnnnnnnnnnctctttgttttgctcctagaggatgagcatgtaatatgagatcaggagggaaattgggtgctctgcctcaggctgttaaaatgttgctacctgcattctaaaacgtgcaagtcatgccccacaagacacctccttagggtagcatccactgtggtgtgccagcctgacacccctgcagtcacggtgtttgaatggcagctgatgctggcccacccagagtatcggtgcatctctcctaaagccacagttcagcactgcatgttgaccaggcggatatcctgtaatatagatgctcgtttggatccaaaaggaaaaccattaaaaataaaagaaagatgaaaaactttaatgttttggggg

SEQ ID NO: 8644 - DNA, 639 bp, Macaca Fascicularis
  misc_feature (1)...(639): n = A,T,C or G
ccccatttataattcacttatttacatcagtttggagttatggatttctattttactaaattgtttataattgatcaccatccttatttattttaatgctcaaattgtcccaaattatggccaaagaaagctccttcnnnnnnnnnnnnnnntcctttgaacatggcccatcattctttaaacacattttacatctggcacaataacgtgctccatacccatcctgtatttttcctgccccatctttgaaatcagtaatttctgaaggagttccttcttaatctggctgttgttgtgttggaactcctggtaccaccttagaaccttaaggagacaagcgaaccaagccaataagctttccatgatgctgcttagagttaaacagagcctaggcactgagttatgtcatggagacagtgaactaacctctagactgcttgctacatgagacaattgattttcttgttttctatgtagggcagtacatttcctcattttgaaatatatttcttcaacatatagcttttctttagtgtcaattataaccaaaaacaatgtgacagatacctgagatgttttacattgtagcttgggtgaattaaacatttctgaaaccattacacttcctagtttattgga

SEQ ID NO: 8645 - DNA, 674 bp, Macaca Fascicularis
ttgcaaactcctgggctcagcggtccttccatcttggtctcccaaagtgctggtatagcaggcctgagccaccatgccaggccagcagcaggattcttgaagaatgtgtaggcactccgcaattttccatattgctcctttattgcagtttaatccttcacttcctctcctttcgtctcgaaacaattttcttcaatttcaccataatacatgtgtttgtggtttcagggatcagtgacattcagggatgtggccattgacttctctcaggaggagtgggagtgcctgcagcctgatcagaggaccttgtacagggacgtgatgttggagaactacagccacctgatctcactgggtaaggtcatctgccccagttaatttagcatctgttctctggaatatcagctttcttcaccatgaattttagggctgtgtttcaagaggtagttggattccttcttcttattcccaaaggaatggattgagatttgttgggttgaaaataggcacctccctggagcccctgcatcttgcctactccacagtggcctcctccatgatgctggtcgtctctgtaatcccctctctcgcttcatgaccatggggctgaatttgaaatcttgtatattcgttgaatgatattgttcaataaccgggtttcatattatgtttga

SEQ ID NO: 8646 - DNA, 731 bp, Macaca Fascicularis
  misc_feature (1)...(731): n = A,T,C or G
gcagtcaagtctgttgtattcggtgtccattcagtnnnnnnnnnnnnnnnnnattttgggtgccatattgtgccagctttgctccaagcattctaaatgtgtcccaccatgctttccactgacccaaaattcaccagagcatttctatctttatatttctgtctcaaaaatgaagggaggggggttatgggttaagttgctgccttttaactacttagtagctgtatttaannnnnnnnnnnnnnnnnnnnnnnnnnnnnnnnnnnnnactcctggcatagtcctnnnnnnnnnnnnnnnnnnnnnnnnnnnnnnnnnnnnnnngtggtgtgcctcnnnnnnnnnnnnnnnnnnnnnnnnnnnnnnnnnnnnnnnnnnnnnnnnnnnnnnnnnnnnnnnnnnnnnnnnnnnnnnnnnnnnnnnnctccttatttattgtagtgtgctgcatggaacgtatttnnnnnnnnnnnnnnnnnnnnnnnnnnnnnnnnnnnnnnnnnnnnnnnnnnnnnnnattctctctgctgctgttgaggttacattaagttccaaataacaattacagtatgccagttccactgaagacatgaaatctttagaggtttgttgcagtgaacgaaatgaattttaatgcctattatttctaggtactttaacaatatttnnnnnnnnnnnnnnnnnnnnnnnnnnnnnnnnnnnnnnnnnnnnnntgacaaaagtctatggtt

SEQ ID NO: 8647 - DNA, 698 bp, Macaca Fascicularis
atcacacagaattaaggcagtaatttcctgcttcagtagatcaagggtagggctaaggcatcccttggtaattctgattcacagctagatttgggaaacacaaagttagggaatggctatatgtggtttgctagttggagcagtcaatgtcttagctatcaagagttgtgaatctgaatcatggcactaggtcaggggtgctgtggattgaaatgaccttagttctcaaggagtgatttgtcctcatttgtcaaatgaggaatgagacacttagcgtcatctcgggttgtttcataaagacctaagtacaaatacaatttgttaaaaacgtatagagggcctatttgaatgccttaagatgtagggcaagtaatgtatttttctcttagtgtagagagttagagaaaaagagctggtcccgtaaattttttcaatctcagtgtaaaatctgtatcgcattgtaggcttctggtcaatacctgtgcataacaacttaatgtgatccaaccaactcaactgatagaaagctgaattgttcccagtggacaagtggtatttgatgtttagcaggtttttttgttatttttttttggtaaactctgtggtaaaatctaaaataatgttaaaaccttaaaagtaactattgaatattctgtaatcttagacatgtatttttcaagctaaccctctgaagaaat

SEQ ID NO: 8648 - DNA, 747 bp, Macaca Fascicularis
  misc_feature (1)...(747): n = A,T,C or G
gcaggaccagcccagtcagccatnnncaggacccctcggnnnntcccccagcctctagctaccccttatcgaggcaagggaaggccagtaaagtttgccaaggctgatcctgcagcctgatggggctggctggggtgttcttttaccaagctctgttttaccgccagccccttgtccaccccgatcccacgtctccctcccttcagctggaccgtgagcccctttgggacggggaagacaagccccactagggccaagggcagcagggccctgccgagtgagaggctgtgtggcagcggctctgtcctgtgccttaccagccctgggaggggggcatttggctggaagacaggaatttaattgccatcgtctttgattttgtgacatttctgcttggcagcgtgaacccctcttcctgccccttagcatgcgtgcagctctctcttgtcttgggtgttacccttgggcactccagctcggggactgctggcgtgtgagtgtgcagattcccctgtgtggtcgaacctaagaactgtggcttggaagtgatgctccacgtgacgacggctttcctttctttcctcttagtgaggaggtgattcgtagaccccaactgcctatgtaatgtaaataatgtacatttaatttattgctatggtagcacattgtatttgttaatgtacaaaacaaattctaaaaggttgacaaatgtatattttgttgcttaaatgtgtcttgcagaaatga

SEQ ID NO: 8649 - DNA, 2027 bp, Macaca Fascicularis
gaaggtatcagcagaaagccagcactggcagggactctttggcacaatgcccagcatgcatgctgtgccaggggctgacaagggtgctgtccttggcttccccgttttggggtggtcacttgcctctactccagctccagaagcagaaactaactgagaggatgggtggaggagagagccagggttcaggctgggaatcttgaggcttcttgccagttctcagattctgtgatgctcaaagggtgagctccgggggcacaggacacatggtagatgaatcttagtcattctggtagccagttgggagccaagcacagaacacacatcagtgtttatcaaatgactgaggaaatgaatgaatgaatgtctccatctcaaccctcagcctggtccctccttcctttttccctgtagttggtacagatggcattgtcccagtctgttcccttcttggccacagagcttctcctggcctctgccatcttctgcctggtattctgggtgctcaggggttcgaggcctcgggtccccaaaggcctgaaaagtccaccagagccatggggctggcccctgctcgggcatgtgctgaccctggggaagaacccgcacctggcactgtcaaggatgagccagctctacggagacgtgctgcagatccgcattggctccacacccgtgctggtgctgagcggcctggataccatccggcaggccctggtgcggcagggcgacgatttcaagggccggcctgacctctacagcttcaccttcatcactgatggccagagcatgtccttcagcccagactctggaccggtgtgggctgcccgccggcgcctggcccagaacgccctcaacaccttctccatcgcctctgacccagcctcctcatcctcctgctacctggaggagcatgtgagcaaggaggctgaggccctgatcagcaggttgcaggagctgatggcagggcctgggcacttcgacccttacaatcaagtggtggtgtcggtggccaacgtcatcggtgccatgtgcttcggacagcacttccccgagagcagtgatgagatgctcagccttgtgaagaacagtcatgagttcgtggagagtgcctcctccgggaaccccgtggacttcttccctatccttcgctacctgcccaaccctgccctgcagaggttcaaggccttcaaccagaggttccggcggttcctgcagaaaacagtccaggaacactatcaggactttgacaagaacagtgtccaggacatcacgggtgccctgttcaagcacagcaagaaggggcctagagccagcggcaacctcatcccccaggagaagattgtcaaccttgtcaatgacatcttcggagcaggatttgacacaattgcaacagccatctcctggagcctcatgtaccttgtgaccaagcccgagatacagaggaagatccagaaggagctggatgctgtgattggcagggggcggcgaccccggctctctgacagaccccagctgccctacttggaggccttcatcctggagaccttccgacactcctctttcgtccccttcaccatcccccatagcacaacaagggacacaacactgaacggcttctacatccccagggaatgctgtgtcttcataaaccagtggcaggtcaaccacgacccgcagctgtggggggacccctctgagttccggccggagcggttcctcaccgccgaaggcaccaccattaacaagcccttgagtgagaagataatgctgtttggcctgggcaagcgccggtgcatcggggaggtcctgggcaagtgggaggtcttcctcttcctggccatcctgctacagcaactggagttcagcgtgccgccgggcgtgaaagtcgacctgactcccatctacgggctgaccatgaagcacgcccgctgtgaacacttccaggcgcggctgcgcttctccatcaagtgaagaagacgccaccatgctgaggccagggagcgagtgggggccaaccacgggga

SEQ ID NO: 8650 - DNA, 639 bp, Macaca Fascicularis
acggttgcagtgagccaaaatcataccattgtactcatcctgggtgacagagcaaaactccacctcagaaaaaaaaaaaagattgtacttttaggaattcagacctagatagatttgcatttggataacagaaccctacctatatctttgtagaagcagcttctcactgaattttaactgtaacaattactgaaggtgaaaatagaagttgggtcatctttgaacacctaccttttatcaatgaatatttttaggccctgttcttaagtatctgagtcacaaggtggcatcttgggtctaccttcagtgagacttgcgtttcaggggaggggtgtatgtgcatccttggtctcagttatgtaaactctgatctataaaatagtggtaacacatgccacatgggatagttggtggagatgatagatggagttaagcacagggcccagcctctcagcagtagcttctaattactgttgcccatttcccctgcaactgaggtgagaggttttcctgagtttgaagctgactggcccacagttaaacataacagaccagtctttcagggtgtcaaccaacctctgttagtgttcttaagtacagttcctcttttaaaagttcagattattccttgaaaatttg

SEQ ID NO: 8651 - DNA, 716 bp, Macaca Fascicularis
  misc_feature (1)...(716): n = A,T,C or G
gaggaggatgaagccatgaagtggaagccaaggaannnnnnnnnnnnnnnnnnnnnnnnatgtaaaccgtggagaaacaggaatatatctgtcaaagcagcgagtattactcttctaaaggaatttcaaaaaatgtttgaagacaactcaggaagtctttaagatccaaagccgcagctgtgcatagcactttctaactgtaaaggtcacgcttgggggtgggtgatcctccggcaagaaggggaatttaggttctctcctaaaatccccactgaaatgactcatagaatatatagactgggggggaaaagtccacattcaagctggaaatgttgggtactcttcaaataacaaaaatatgggagattttgagattnnnnnnnnnnnnnnnnnnnnnnnnnnnnnnnnnnnnnnataacagtgactcatggatgagatcatgaagtgatattcctttattgcccaataggtcattaaatttgcttcatgggcttnnnnnnnnnnnnnnnnnnnnnnnnnnnnnnntcccatgacttttttttttttctttttttgaaacagggtcttactctgtcannnnnnnnnnnnnnnnnnnnnnnnnnnnnnnnnnnnnnnnnctcacactcctgggctcaggtgatctcccgcctccgcctcccnngtagctggaactannngcatgcgctatcatgcccagcttggtcccatgaccttta

SEQ ID NO: 8652 - DNA, 724 bp, Macaca Fascicularis
  misc_feature (1)...(724): n = A,T,C or G
gtatcataactatnnnngattcaaaatatgggttaaaacatttaacagaagagaaacccgatggccttatcaatgaagccactaggcaagttgctttggcagatatcattctcatcaataaaacagannnnnnnnnnnnnnnnnnnnnaaagaaattaagaatgacaattagatccataaatggactaggacaaatcttagaaacacaaagatcaagagttgatctctctaatgtattagatcttcatgcctttgatagtctctctggaataagtttgcagaaaaaacttcagcatgtgccaggaacacaacctcaccttgatcagagtattgttacannnnnnnnnnaagtaccaggaaatgcaaaggaagaacatcttaatatatttattcagaatctcctgtgggaaaagaatgtgagaaacaaggacaatcactgcatggaggtcataannnnnnnnnnnnnnnnnnnnnnnnaagacaaaccacaannnnnnnnnntccagggtgtccatgagctctatgatctggaggagactccagtgagctggaaggatgacactgagagaacaaatcgattggtcctcattggcaggaatttagataaggatatccttaaacagctatttatagctactgtgacagaaacagaaaagcggtggacaacacatttcaaagaagatcaagtttgtacataacactagaagcatttnnnncaaaagga

SEQ ID NO: 8653 - DNA, 740 bp, Macaca Fascicularis
gcttgctttcacgttctttactgggaatttaaggccttttttcagccttaacttgtataccaacctcaaggattttgtttgatatagaaaaggacagggctgggcccttctgccaaggactgatcacctgccttccaaaaggaagagggaatgacagccttttgtctttctaggccccttacagtacctcaaaatctgaaggccttaaagggaaaaaaaagcatatctgttctttctccttatctcctacccttctctttaagcatactgaagatggacttttttccaaatgtttatttgtaggaagaggtgatgggtgcaggccagcagctgagaacttacagctttgatgcaccaggagctgtactcaagctgagggcacaagcctcctagggagggagccaggtccaccaaggccagagacaggcaggcgagactggaaagccagggagatgctgtctggtaagtgcttagctggcctattgggcaagtcctctggggttctagagctgataggaagaaggagttcattttgatagtcctgcctggagacttggacctgtctgatgataaggtattttataaagctacagtggatgtttttcttaagagaactgaaagttggaaaaggtgcaaatatatataagaatttagtaaaatgataatggtggtctttcaaatcaaagagtgatctttaaattgttcttgggaacacagggtttctggcatgtctgcagctg

SEQ ID NO: 8654 - DNA, 630 bp, Macaca Fascicularis
atctgctgtgccgatgggtcacccctcagcaggccttcgtgggccttcccctcctcccagggccttctccccgtccttcccctcctgtactgtgaactttctgtttcctcccattccagccttctctgccctccaggcttggggatccttgttattgggatccttgttattgggacccctgacagcccagccagggtcgacccacaggatggggcttaggaggggtctgaggagtgagtgaacagacacagcaccggactgcacagtcggctggctttgcgatctacaccggccactgaaatatcactggaatgtattgtaaacggtgtgcctatgactcccacctgagcacgcagcaccctcgagtggccatttttagaaaccgcttcttacttgctctcccaattgattacttttgcacattgcacagaacccaacctggaggcctgctccctgccagttgcctgaaatcagccctaaaattctgaaaccaaagaggtgcttcctgggaacaagtgatttactttagatttgaaaatgtatatccttttatgggcctttccaaatctgatttgaaaaaccacaaaaggaaacagaagagaaaataagagccacagaaagtacaatatg

SEQ ID NO: 8655 - DNA, 2452 bp, Macaca Fascicularis
  misc_feature (1)...(2452): n = A,T,C or G
gaatataagatgttgaagtccttttgagagtctttaaactatttttataaatttatactttggaaatcaattttaattacaaatgtaatttgtgagtaaatttaaatgaccataatttttctttttaaaacagttgaagggtatagaggagaaaattcttatatattggtagaagctctgattatagctaaagtaaaaaatatttattatgcataggcaagctaccattatctgtgcaaaatatttcctttatttgggcactattcagaagactttactatttaacctcctaaaagggatgtaaagattattcacaataagatctatttaggggttttgtcttccatatttgttttccagatcctcacatgcagactaggttcagtaaataacaaatatttattgaatatctgaatatagagtttttaattaaatgagtaatgactactgctttatattatgaagtgtcaacttaagggaaattacgggttttagaactagaagagaccattgaaatactctagttttcatttactaaatgaggagtctaagtgtcccaaagaggttaaagtaatttaagatcactcagctagtgagttgacaaggagttgaacctagttcttctggttttctgattagcaatttccactaattagatgtttcccaatcttacattcctttacacacttaggaaacagtgttgatatggcacattggagtaatctggaaaccacttaacacaagcccatgcactctggttgcactgaggccccacttttctttctcatgagctgaggggactctttcagcattctttgtacacaagttgagaggctttgccttggtacacattaactttgtcatgtgaatactttcttcattattttttaaaatatttttgcaacttctcttcaggagttaccttcgcaggttatagcacagtctttttatgattgttagaatattgttaagagtttatgagattatatctaaaagcactaaaagaaaaacccaaatccttttccacaagaatgggaatagtaacatgttatttttagtcatcaagctgttctgatcatcatggcatttaaaaacctgtccatttcggctgggtgcagtggctcatgcctgtaatcccagcacttcgggaggccaaggtgggtggatcacctgaggtcagaagttcgnnnnnnnnnnnnnnnnnnnnnnnnnnnnnnnnnnnnnnnnnnnnnnnnnnnnnnnnnnnnnnnnnnnnnnnnnnnnnnnnnnnnnnnnnnnnnnnnnnnnnnnnnnnnnnnnnntgtttggtgtttagtgtatccttatctagatcttctggataacttgcagcttcattttgtacttttatgttatggagatggcttatttccttaaacctcatgagccaacctctgctagcttcccactgggagagaaactgcagtttttctcagccttcatagaactgaagagagttagggcccgctctggattaggctttggcttaagggaatgttgtaactggtttgatcttttatccagaccacttaaacttattgcatatctgctgtaaagctgttttgctttcttactcctgtgttcactggagtagtacttttagtttcttttaagaactttttcttcgcattcacaatttggctgtttggcacaagaggcctagcttttagtttgcctcagctttcaacatgctgtcctcaggaagcttaatcatttctaacttttgttgtaaagtgagagacgtacaactcttcctttcacttgaacacttagaggtcattttatggccagtaattggttttattccagtgttgttgtttcacgaaataggaaggcctgaggagagagaaaaggaaacagcagatgtgtggagcagtcagaacatacacatgtatccattaagttcgctatattatatgggcatagttcgtggtgcctccaaaacaatagtaacatcaaagatcactgattgagatcactataacacaaataacaattatgaaaaagttcagaatattgggagaattaccagaatgtgacagtatacatgaagtgagcataggctgttgggaaaaatggagttgatacacttgctaggtgtgggattgctacaagccttcgatttgtaaaaagtgcaatgtatatgaagtatagtacaatgaagtacaataaaacagtgtgtgcctatagtattatctgacagtggatatttactatctacagaaacatctgaattgtaccatttgatctttgctttaaattaagttgatatcttaaccacttaggtccaattgccttcctctctatacaaatcggccctctctgtctgtgggttcagcatctgtgggttcaaccaattgtgaatcacaaatatatagaaaaaaataaaatgtatggttgcaactgtaaaaaaaaaaaaaaaaaaaaaaaaaaa

SEQ ID NO: 8656 - DNA, 697 bp, Macaca Fascicularis
  misc_feature (1)...(697): n = A,T,C or G
gtaacagtcataaaatgtactactgggggggggataattatncnnncagaaccnatataaaggctgtgtatttcccatagacgtttacagcaactatgttaaaaacacacacacacacccctaagtagaatacattattttgcatgaaaggaatggcatttctgagctttttacacctaaaattaggctgaaatagctgagataattaatttggaacctatcaatttgagtggactttttctttagtagtataccattttggtggttgtttcaaagtctttctgaagcagatatattgaagcggggtggggaaaagtgtcactccttttagaggaaaaggggaggagcatggagaaaaacaaaaattaagggacttttaagaaagactgcctatacagtgttgagtgttgaggatattaaacatgttatttttcgaacgtaatatataattaaatttataaagcaaatttatgtgatcttgcctgagcaaattatattttaataaaaaaactttgtattaatagttcacagaagagaaaacactttnnnnnnnnnnnnnnnnnnnnnnnnnnnnnnnnnnnnnnnnnnnnnnnnaagtggaacaaccttcaatttgaaattctagtctttaaaatgagtttgtaaataattagctattatgttctattaagttgttttatattttaattttctggaa

SEQ ID NO: 8657 - DNA, 708 bp, Macaca Fascicularis
  misc_feature (1)...(708): n = A,T,C or G
gtcttgatcagcagnatttaaaanngctgccacctgtgcagtcatgcatactgnatattcatgtaaacattctcctaatttgttggacctttcaatcgtctggttttccccatccccaccagggcaggagtaaaaaactttgtaaagaaaattttgtctgtttttcnnnnnnnnnnnnnnnntttcctcaagaatgtattccaggaggagacctgctattcttcgaggtggtggatcctgtttgctgatggtcgacactctggccctactacctnnnnnnnnnnnnnggagtgtgaaggacgggtgccttaaacccacacttccaggggcccttcagcacaggtcctgcctgttcccatggtgcttctcaccccgaaccctcagagccacagccagggacagagcagatgagcagtgagctggtttccaccctctgggggcaggaggggcttgggcttcccttggaccctcttccttcctttcccagatcttcaatatttgttgtgatgtaacagccataagagctgtaagaggaactgtgggctttgggagctttcttgggttgaaagaggggtggggggaggggaagcatgcaggggtatgaaggcagcccaaggtctcccagaggctcgggaggaaacttgtttggaatacatgtgttattgttgcattactgtgttgtgaagataagaagctgctctgtatgct

SEQ ID NO: 8658 - DNA, 573 bp, Macaca Fascicularis
  misc_feature (1)...(573): n = A,T,C or G
ccacagcttcccacacccannnnnnnnnnnnnnnnnnnnnnnnnnnnnnnnnnnnnnnnagcacaaccccaatggacccccacccccttnnnnnnnnnnnnnaccaccaccgatgaaccagggcccccaccctcctgggcaccatggccctcctccaatggatnnnnnnnnnnnnnnnnnnnnnnnnnnnnnnnnnnnnnnnnnnnnnnnnnnnnnnnnnnnnnnnnnnnnnnnnnnnnnnnnnnnnnnnnnnnnnnnnnnnnnnnnnnnncccagtgggcagcccccaccccctccctctggtcctcttcccccatggcaacagcagcagcagcagcctccgccaccccctccgcccagcnnnnnnnnnnnnnnnnnnaccccctnnnnnnnnnnnnnnnnatccctccccgcggcggcgatggcccgagccatgagagtgaggactttccgcgcccattggtgacccttccaggcagacagcctcagcaacgcccctggtggnnnnnnnnnnnnnnnnnnnnnnnnnnnnnnnnntttgtggacggaatnnnnnnnnnnnnnnnccatatc

SEQ ID NO: 8659 - DNA, 770 bp, Macaca Fascicularis
  misc_feature (1)...(770): n = A,T,C or G
cagtgtacnnnnnnnnnnnnnnnnnnnnnnnnnnnnnnnnnnnnnnnnnnnnnnnnnnnnnnnnnnnnnnnnnnnacannnnnnnnnnnnnnnnagtacactcacgtggaagccgagtgtcctttcctgacctnnnnnnnnnnnnnnnnnnnnnnnnnnnnnnnnnnnnnnnnnnnnnnnnnnnnnnnnnnnnnnnctcnnnnnnnnnnnnnnnnnnnnnnnnnnnnnnnnnnnnnnnagccccccaaacggcctttcaaannnnnnnnnnnnncagatgctatcatttggctaaaagaacatgatataaagaaagaagatggaactttctatgaatttggagaagatatccnnnnnnnnnnnnnnnnnnnnnnnnnnnnnnnnnnnnntgaaccaatcttgctgtgtcgatttcccgtggagatcaagtccttctacatgcagcgatgtcctgaggattcctgtcttactgaatctgtcgacgtgttgatgcccaatnnnnnnnnnnnnnnnnnnnnnnnnnnnnnnnnnnnnnnnnnnnnnnnnnnnnnnnnnnnnnnnnaaaggnnnnnnnnnnnnnnnnnnccctattactggtatannnnnnnnnnnnnnnnnnnnnnnnnnnnnnnnnnnnnnnnnggcttgggcttggaacgattcttaacatggattctgaataggtatcacatccgagacgtgtgcttataccctcgatttgtccagcgctgcacgccataaccaatttctccagaagtgtggaggaaagg

SEQ ID NO: 8660 - DNA, 746 bp, Macaca Fascicularis
agcttagaatgtatgttcatttccttttcaaattttgtatcataggagtttacaacacagagaaaagctgaaaaaatgcaaagaaccaccacatactttccatctaccctcttttgttaacaggttgtttatcatataatgatttgttttgtcatatttgctttcactattatctgtttaagtctcatacctctgtatttttagtttgctgaagacttgaaagtgaatcgcatacaccatgacacttcttggagtgtcattaatgggcaggcttttctgttgacgagtgggttccatatgatcttcatagagagagtttttcagattcttcattgggatattaaaatattagccaaatttctctctgttttatatatgtctgattatttcagtttgtggtttctgcaaatttgtaactgcctctgttttaggaatgtaagtattacttccttgtggtctattgtgaagtgaaaagtagacccttgcatatactattcttgtttgtgctcatcttaatgtttttgtacacttaaatcaaatgtaagttggtttcatcaacgtaatgaatactagttaaatttgaattccttggaatttatgtattgtattcactgagattgcgaaggaacgaatgttaatcttttgtttccagaaaaagctaggctttcccaagcagttctattacccggttcagaattgcttcatccaaaaatcatctgatggtgtagatggttcctagtcctttc

SEQ ID NO: 8661 - DNA, 679 bp, Macaca Fascicularis
ttaacgcagtaattgatacagtgtagtttggtacaaagaaccctaaatccaaatccaggactcagcactttgaagctagtattttaaactttataaatgggtaaagtagctaacatttctggccttatttttctcatctacaatgtaggaatgataataatttcctcacagagttatcgatggaatttgaataatcttgatatatagtcaatgccttacatatagtatataaatacacaagaaaacatggtggttatatttataattaatttatttaaaagaatggatcacgttatatgaaaagtacttttgtttttctcagtcccttaatgatttaggagatacaaatgtagagctatgaatgaatttcttttcatatgatcattggagggtatttttttctccagaatgagagaggctgagatcgattgctaagagaactcttaggacgagaaattgtagtatttgattttggttttcaactctctaagaagggatatattccctccttacagcccataagtgtttattcaaggtatttcatatgcaacagatgttaatgcatgtttactttggggaggagaagaaagttcaaggagaaaaaaattttaaatgcagactgggaatcagcacaggaagtcggaaacagtgatgatcatgaaaatgtgagcacagagga

SEQ ID NO: 8662 - DNA, 715 bp, Macaca Fascicularis
  misc_feature (1)...(715): n = A,T,C or G
cagacactccaaacagggttcnnnnnganctgggggtcacagctcttctcttggcggagaagagggagggagaatgagnnnangtcgggggtctctaggcagcccaccatggccctacaactccaagaaaactcaccagtccctggtcactcggatgctcttggaggcacttggatttactgcagggaccccaagagttggccacagcagagccccttctgccagccctctgaggcctcggggaggggaggggaggggacattgcagcagaagggaaagtggtgtccacccgcagcttctcggtttatcattttagactttatgcattggcttcctgctacatgttgttacgttttaactctgttaccaccacatttcttccccctgtcctctcaatgtcatgatttttcttttggaaatnnnnnnnnnnnnnnnnnnnnnnnnnnnnnnnnnnnnnnnnnnnnnnnnnnnnnnnnnnnnnnnnnnnnnnnnnnnnnnnnnnnnnnnnnnnnnnnnnnnnnnnnnnnnnnnnnnnnnnnnnnnnnnnnnnnnnnnnnnnnnnnnnnnnnnnnnnnnnnnnnnnnnnnnnnnnnnnnnnnnnnnnnnnnnnnnnnnnnnnnnnnctgtcctcaagtgatccgcccatctcggcctcccaaagtgccgggattacaggtgtgagccccatgccctgccgcgatgtcatggcttttac

SEQ ID NO: 8663 - DNA, 670 bp, Macaca Fascicularis
  misc_feature (1)...(670): n = A,T,C or G
gcttataactatataattatgacttgttactgcatttgcagacatatgcatggcctttcagggttcaaaacaaccatagggaatctttggtctaatcttttcactttgctagtaaggaaacaaannnnnnnnnnnnnnnnnnnnnnnnnnnnnctannnnnnnnnnnnnnnnnnnnngaatagaannnnnnnnnnnnnnnnnnnnnnnnnnnnnnnnnnnnnnntttcttacaacacaggtaaatttttccctttaaatttgatataagataaaatataaaagagtatttcttcacatttggtaagtgttaatacgaggtaccacttttcttttgtttcatgataagtctcctggctttcctactcatttataaatttagtttcagatannnnnnnnnccaatatgagccctcaaaaccttatctgccattaatnnnnnnnnnnnnnnnnnnnnnnnnnnnnnnnnnnnnnnttctcatttacaatttgaaacaacaaaaaaaaagtcagttgcttaggttcttaataaatttttcttgtatattaaagacttttctttaccagctgcttggtaatttttgtttctgcnnnnnnnnnnnnnnnnnnnttagctctgtctatgttcctacttttaataaaaggctggtgggttgtccagtagcttctgtgg

SEQ ID NO: 8664 - DNA, 730 bp, Macaca Fascicularis
  misc_feature (1)...(730): n = A,T,C or G
ggagtctgtgactcnnnnntctgggtgctgcctataatctnnnaggaatcatttctcctcctcaaaaactgattcagaaactgacttggggaaggaatttaatactttgaagtcatgagatgcaccatcaaggctacccccaagaaggggcagaagagaaattgatgagaggggattagaggtcctcccttcaggaggcctgtgaaagcctcatcagtggagttaaaagcacgaacaatgcctgtggacaagatgtcattcattcactcagcaannnnnnnnnnnnnnnnggctaccaaagtaccaggcaccatgctaggttttggggaagagagactgaagtcacaaacaacccctgactgctccnnnnnnnnnnnnnnnnnnnnnnnnnnnnnnnnnnnnnttggaggcaattctgagaagacaacacagaattataaaccttcccttttgacccttttggattttatcaggtgtaaaaaagaaaagtagctgaacagttacttcaaagatatgtgtgtatattcagttttttattgttaagctgatattttaaagatgtctgagctagcaggcatgtgggaatgaaggctctgtcttcaactctttgatcctnnnnnnnnnncatagaggggggaaaaggtggtattttcactttgatgaggttggtaaatgtttttagatcttctggtatgcattatgtttgttaataccatatttattagagtga

SEQ ID NO: 8665 - DNA, 385 bp, Macaca Fascicularis
ggggtggcagagacagaggaaaattcccatgtaaatggacattcttcacactgtcaaaaaatggagaaaaaccacagctgacatgtggagttcatagcaccataaaggtgggaactgcatggagcaaagtcaactctccaagggggtgatatgttttgctttctgtcaggaagctggactgagagcagcagttcacaggctcctctatccaccaaattaggataggataatcgctgtacttaaaaaaacaaatctgagccattcctcactctttatacaaaaataaagtccaaatggatcattggtttttcacaaacatccaaaaccataaaaactctagaagacatgggagaaaatctgagtgatcttggtctagggaaagata

SEQ ID NO: 8666 - DNA, 749 bp, Macaca Fascicularis
  misc_feature (1)...(749): n = A,T,C or G
cannnnnnnnnnnnnnnnnnnnnnnnnnnnnnnnnnnnnnnnnnnnnnnnnnnnnnnnnnnnnnnnnnnnnnnnnnnnnnnnnnnnnnnnnnnnnnnnnnnnnnnnnnnnnnnnnnnnnnnnnnnnnnnnnnnnnnnnnnnnnnnnnnnnnnnnnnnnnnnnctgacctcgtgatccgcccgtctcggcctcccaaagtgctgggattacaggcttgagccaccgcgcccggcctagatgtttaagagagaaacaatttatacagtttcaatcctctgaaggcttacttttgaaaaaacattacatttgtgaaaagtttaaaatatactacttaacagtggaataaagtgaaaccaaaacatgttcaacttaaaaggcaacaggaacctcaaagcaaattaacatggcataaatctatctttgaaagtacttgaaattatatatagctccaaaacttctaatatggtatgccaagcatttggttaaagatatgttccatcattattttcaagaagtatgttaatacacattatgtaaaccctgaaagctcagcttggctgtaatttttaggctttacaaatcatatgctgaggtcttcatgagccaatcagtacacacacagatctggaaacttcatctcatagactgggacagattggtattgggcatgcccagaagtaatggtcagtgttcctgatgggctgggaggaggacatatggtgagttccaatattttgagcagtctatca

SEQ ID NO: 8667 - DNA, 713 bp, Macaca Fascicularis
  misc_feature (1)...(713): n = A,T,C or G
atggcctccgagacnnnnnctccctggtctgctgaggccaggccaggtctcccacggggctgggcagctccccaccccaccgcctggcacagttaggtctcagatctcccatgtggtgtttgatgtcggcttttgttcctaccttgggagtttggattgttttctctggtgtctttgtttaccttcctcactgttctacctcctggccaggtctcagcttagcttccctggtgtggggtgtttttcaagccttccagccacagctgtctccccannnnnnnnnnnnnnnaggggtgacagggcttcaccctctgactgcagacccctggtgggcacatctcacaggcttccgtcttgctgagttgagtacagaggcagaagtgaggtgtggaggaaagtcagagggaaatctgcttcagaaaggaagggtctttagacacgaagcctggagggcccttccccgcctgcacgggagctgccatcgtggggctcatgcacgtcaagaccttcccacatccaaactgaccttccagcagggattttgactttggatgacaaggctttatttgtaaatatgctcttaatatgcaactttgagaataaaatagaaacatcatgtattttaaaatataagatgaagtgtgatgcactgtatacaatttaatatatatttttaggattttgttatttaagaaaatggaatgtaatggtac

SEQ ID NO: 8668 - DNA, 746 bp, Macaca Fascicularis
  misc_feature (1)...(746): n = A,T,C or G
gcagagctggctaaaggtgtgtnntttnnnnngctctgtttctaattcatgttaagtagttggtcatcactttggtcagagctgctgctgtagctctcttaactgtgagtcactggatgtcggcagtgagttggctgtgagattgtaggtgctcaagtgtttatgcaccggactgagtgtaaatctgtaaaaggggaaaatcctcgcaagaggtctatgagaaggatgagggcccaagtctagggtctaaacaaagctaggagtggtttggtatattactgagtgcaataattgcatgcaattcctgcactcaatatattgtgtaaaatcctcaggtagaatgagataaacccacagctggtcctacttggcctcttgaaaactattccatcattgtgccaatctctatccggaaaaggaaaaaaaaaaggaaaaacattcaattatctcttgccttggaggttggggtatgctcctagtcagggctttgcagcgaccatatgatgcaatagtgaagatctggggcctggcacaacactttgggaggctgaggcgcgtggatcgcttgacctcaggagttggagaccagcctgggcagcacagcaaaaccccacctctacaaaaatcacgaaaattagccgggtgtggcaagtgcctgtagtcccaggtgctcaggaggctaaagtgggagggtggcttgagactgggaggctgtggttgcggtgagctgcgatcctgccactgca

SEQ ID NO: 8669 - DNA, 756 bp, Macaca Fascicularis
  misc_feature (1)...(756): n = A,T,C or G
attttcccatatgagaaaagaagagaacactggcatctgtgaaattnnnnnnnnnntgagattataattacagtattttttttaaaattgcactgaagtnnnnnnnnnnnnnnnnnnnnnnnnnnnnnnnnnnnnnnnnnnnnnnnnnnnnnnnnnnnaacataaaattccacgttagataagcatatattacctacattactaaatatttcttgaaaagcagattttaatagtttaattttatgtagatgtatgttaaattattcaacagtaccctattgttaagcatttggttttaaattttttatgctaatataaagcttaagtaatttaaaattttgagagnnnnnnnnnnnnnnnaaatttctgagtaaattcattggatcagttggacttttcatgcttttgaaatagccttgctaaaatgctccccctacaaagttaagttgtaggaaatgggaagaggagtaaactagaggcaagggagttgagagagctggaaggtgtggtgactaagggctacagttatggggttaaatttgagnnnnnnnnnnnnnnnnnnnnnnnnnnnnnnnnnnnnnntgcttatgcaagatactcatcccaaagcctcnnnnnnnnnnnnnnnntcacccaaataactgcgtttccacaatattatttatatagttgttgatctgtctctgcagtccttgaaggtgacgttgatgttactaggctgtgttttgggggctcagcagtggcctgaagtgagtg

SEQ ID NO: 8670 - DNA, 773 bp, Macaca Fascicularis
  misc_feature (1)...(773): n = A,T,C or G
gatttgagtgtgtanngagagaaagctcgcctgtgggtnnngagttgtggtgtaatggtgaacnnnnnnnnnnnnnnnnnnnnnnnnnnnnnntgttctgattcttcagtcttctcgcaaattcagagaaatgtcttttaatcatttcgtttacatatcccagatccttggaannnnnnnnnnnnnnnnnnnnnnnnnnnnnnnnnnnnnnnnnnnnnnnnnnnnnnnnnnnnnnnnnnnnngggcccttcgttctttggactgttggctacttctgcagttctggcttccttctctctaggaggagtagtgtactcaagcttttaagttaaatgcataaaaatgagttttatttctcttctgacttggtttttaattttatgaaatgggagatgtttttccatttttctattcattttgaagtgggagtttgaggtgtttgtaatgtcacgttattgtttggaaagattgacagtaaaaaagacaagtaatatatgtatgtagtatgcatattagttttgtccnnnnnnnnnnnnnnnnnnnnngcaaacatttttaaaacatctgttctagttgcacaactactctagcttcattatnnnnnnnnnnnnnnnnnnnnnnnnnnnnnnngccataatttcaatattctagccttgccgagtgtgaatatattttactcagagactgtataaatacactaaagtggtgatggtgatcaatattgtaaagaatttattctgataaatgagaaactggannnatgtcaaaatagc

SEQ ID NO: 8671 - DNA, 1998 bp, Macaca Fascicularis
aagtgcttgcatcctggggccctcacacgcacgcgcaggaggccaggcgtgctgctgataagagcctgcgggtttgcagagaagcgcagcagcgcaggtcctcaccggagttctggtggccacctctgtcctgccatgctgctcactgacagtgtccggggcccacatcaccaagaggctcgggccacaaagtaaagggtcgcggagcctcgccggctgccatgtggggctgcggctggttcaacggcacagggctggtggaggagctgcctgcctgccaggacctgcagctggggctgtcactgctgtcgctgctgggcctggtggtaggcgtgccagtgggcctgtgctacaacgccctgctggtgctggccaacctacacagcaaggccagcatgaccatgccagatgtgtactttgtcaacatggcagtggcgggcctggtgctcagcgccctggcccctgtgcacctgctcggccccccgagctcccagtgggcactgtggagcgcaggcggtgaggtccacgtggcactgcagatccccttcaatgtgtcctcactggtggccatgtactccactgccctgctgagcctcgaccattacatcgagcgtgcactgccgcggacctacatggccagcgtgtacaacacgcggcacgtgtgcggctttgtgtggggcggtgcgctgctgaccagcttttcctcgctgctcttctacatctgcagccatgtgtccacccgcgcgctggagtgcgccaagatgcagaacgcagaagccgctgacgccacgctggtgttcattggttatgtggtgcctgcactggctgccctctatgcgctggtgctactctcccgcgtccgcagggaggacacacccctggaccgggacacaggccggctggagccctcggcacacaggctgctggtggccaccgtgtgcacccagtttgggctctggacgccacactatctggtcctgctggggcacacagtgctcatctcgcgagggcagcccgtggacgcgcactacctggggctgctgcactttgtgaaggatttgtctaaactcctagctttctccagcagcttcgtgacaccgcttctctaccgctacatgaaccagagcttccccggcaagctccggcggctgatgaagaagctgccctgtggggaccggcactgctcgccagaccacataggggtgcagcaggtgctggcgtaggcggcccagccctcccagagagacgtgactctggtggacgcagaacagttagttactctggatgcctctgcgtccttccagaaggaagagaagtaggagcggtgtttttcttgaagttttctttttcccacaaatgccactcttgggccaaggccatggtcccagtggctggcgtctggcgtctggcgtgagcttccctgaggcctgtgcgtctcctgaacacacagctcaaggtccacatctgcaaaagcctccttgccttcagctttctcagtattcagtttgtcaacgaagtgatggacgcctaaagccagtatatatactttgtggttaaaatacttgattccccctcctttgttttataaaaacagatgttttctagaaaaatgacaagtattaaaatgaaggaaaccctatgaaagaatggcaacagccggggtggctgggccctggcagtgggcggcggctgctggccgggcctgctgggtgtgccacagtcaccatagggttctgagaacatttcacagaagtgcctgagacacggagacacggctggtgttaaacggagtcatttagtagcagtgacgcgctctcagccaccaaatgtccctgacaccctccccagcccccagagataacatcagctgaggcttctttcactttgaacctgttctaaatcaactcctcaaagtgtgcacaaaactaaagaatataaataaacaaaagaaagtaaaaaaaaaaaaaaaaaaaaaaaaaaaaaaaaaaaaaaaaaaaa

SEQ ID NO: 8672 - DNA, 1996 bp, Macaca Fascicularis
gcgcaaatggcttgtcccgctctcggtctggaagctcttcagcctatgctgacacccaagccttactcccagcccaaaaattctcaagaaattctgaagacctttaaggtagatgggaaagtcagcgtgaatggagagacggttcatagagaggaggagaaggaaagagagtgtctcacggtggcacctgcccactccttaaccaaatcccagatgtttgaaggtgtggccagagtgcacgggtctcccctggagctgaaacaagacaacactagcattgaaatcaacataaagaagccaaactctgttccccaagagctcacagcaaccactgagaaaacggaaccaaatagtcaagaggacgaaaatgacggtggaaaaccaagaaaagggaatatagaacttgcctcatcagaaccacagcattttacaacaactgtgactcgatgcagcccgactgtggcctttgtggaatttccccccagcccccagctgaagaacgatgtgccagaagcagctgcagctgataaataaccagctgagggaagaggacgacaaatggcaagatgacctggctcgttggaagagtcgtagaagaagtgtttctcaggacttaatcaagaaagaggaagaaaggaaaaaaatggagaagttactggctggagaagatgggacaagtgaacgaaggaagagcatcaaaacctacagagaaattgttcaagaaaaagagcggagagagagagagttgcatgaagcatataagaacgctcggtcccaggaggaggcagaggggatccttcaacagtacattgagaggttcaccatcagtgaggctgttcttgaacgcttggagatgccaaaaattctggaaagaagccattcaacagagccaaatttatcctccttcctgaacgaccccaaccccatgaaatacctgcggcaacagtcactgcctccgcccaaattcactgccactgttgaaaccaccattactcgtgccagtgttctggataccagcatgtcagcaggcagtgggtctccaagcaaaactgccactcccaaagcagtgcctatgccgacacccaagccttactcccagcccaaaaattctcaactttttgacccgagtgacctccaggatacatccaacagagtaacagtcaagagccttgattatagtaggaagctgaaaaatgtattagttaccatttactggctgggaaaagcagcaaatagctgcacatcctacagcggaacgacactgaacctgaaggagtttgaaggattgttgactcagatgcgaaaggagactgatgacattgagagtcctaaacgcagtatccgagacagtggctacatcgactgctgggattccgagcgcagcgactccctctctcctcctcgccacggcagagatgattccttcgacagcctggattcctttggctcccgctctcggcagacgccttcaccagatgtagtcctcaggggaagcagcgatgggagaggaagtgactctgaatccgacttgcctcatcggaagctgccagatgtgaagaaggatgacatgtctgcacggcggacttcccatggtgagccgaaatcagtagtgccttttaaccagtacctcccgaacaaaagcaatcagacggcctacgtccccgcgcctctgagaaagaagaaagcagagcgcgaggaataccgcaagagctggagtaccgctacctcccctctgggtggggagaggcccttcagatacggtccgagaactcctgtgtctgatgacgcagagagcacgagcatgtttgacatgcggtgtgaggaggaggccacggtgcagccgcacagcagggcccgccaggagcagctgcagctgataaataaccagctgagggaagaggacgacaaatggcaagatgacctggctcgttggaagagtcgtagaagaagtgtttctcaggacttaatcaagaaagaggaaaaaaaaaaaaaaaaa

SEQ ID NO: 8673 - DNA, 708 bp, Macaca Fascicularis
  misc_feature (1)...(708): n = A,T,C or G
ggcctctgtggnnnnnnnnnnnnnnnnnnnnnnnnnnnnnnnnnccgcctctctctatgtcctgggcactgccacccgctggcccctgnnnnnnnnnnnnnnnnnnnnnnnnnngcttgggctgttgaccatccccgtcattatccaccccattnnnnnnnnnntggatttcctcctggactccagcctgcgcaagctctacccgtcagtcaggaagcccagctcctcctgatcacacgctggtacnnnnnnnnnnnnnnnnnctcctgcttcatgtcaacctcccactcctgccaggggatgtggacacctggttccctggggtccaaagaccctggcacctgannnnnnnnnnnnnnnncagaagcttagagacaaaggcttcaagaagcagtggctgcagagtcacagatgggcgggcccnnnnnnnnnnnnnnnnnnnnnnnnnnnnnnnnnnnnnnnnnnnnnnnnnnntgggtgggcccagccctgtctttttcaggnnnnnnnnnnnnnnnnnnnnnnnnnnnnnnnnnnaggctcagggagggcaaggaataggcccnnnnnnnnnnnnnnngctgggaacccaggactcccaggtgcnnnnnnnnnnnnnnnnnnnnnnnnnnnnnngaacaaggagcggcagacaactcagggagaaactcaggagtgcagtaccagggacacctcaggacagattct

SEQ ID NO: 8674 - DNA, 711 bp, Macaca Fascicularis
  misc_feature (1)...(711): n = A,T,C or G
cagatnnnaaacggattaacannnnntccctcacaccctgccaggctgctgggagcttgggccaggtctaaggtaatgaggtgctcctcttcnnnnnnnnnnnnncgggccaactcagaaccacaaaggcaggtgctgccagcctggcgccttcctctctgcttaggctgggcgagcttgtccaggcctgtgcctcaccccttctctcttctaggctcnnnnnnnnnnnnnnnnnnnnnnnnnnnnnnnnnnnnnnnnnnnnnnnnnnnnnnnnnnnnnnnnnnnnncttctactgataaacagaggccccagaagactatttgacttacctgagctcccagctgggacttaaannnnnnnnnnnnnnnnnnncaactgtttggggatgccgtggtgagctggggctgagctcttgtattcccactcccccacccgacccccacttccaccatatcagggctggtctctgtggactcagcccagggctgcctcctctttgtcaccccaaagtggggcagccagggatagccagggtgtgttcagaatgggttcttcctgcagggcacgaagggcaaagagttagaggggctgcagcccagaccaccctagtccctcctccggcactgactcagacccacactgtgccgtgcaccnnnnnnnnnnnnnnnnnnnnnnnnnnnnnnnnnnnncacttccgggggggcctttca

SEQ ID NO: 8675 - DNA, 680 bp, Macaca Fascicularis
  misc_feature (1)...(680): n = A,T,C or G
gtggctactccataggcagagcagccctgagggattctggttgctcatttttatggtgatttcttcattatatgggaaacaggggtggattattcatgcctccccatttttagaccatatatgatgacttcctgatgttgccatggcatttgtaaactgtcatggtgctggtgggagtgtaccagtgaggacaaccggaggtcattctcattgccatcttggtcttggtgtgtattggctgacttctttactgcatcctgtttttatcagcaaggtctttatgacttgtattttgtgctgacttcctatctcatcctgtgactaataatgtcttaacttattgggaatgcagcccaccaggtctcagcctcattttactcagcttgtattgaagatggagttactctggttcaaacacctctgacctttgggaggcagaggtgggcgtcacttgatgtcataagttcgagaccagcctgtccaacatgcannnnnnnnnnnnnnnnnnnnnnnnnnnnnnnnnnnnnnnnnnnnnnnnnnnnnnnnnnnnnnnnnnnnnnnnnnnnnnnnnnnnnnnnnnnnnnnnnnnnnnnnnnnnnnnnnnnnnnnnnnnnnnnnnnnnnnnnnnnnnnnnnnnnnnnnntatgacagagttgagactccatcgcaaaaaaaaaaaa

SEQ ID NO: 8676 - DNA, 792 bp, Macaca Fascicularis
  misc_feature (1)...(792): n = A,T,C or G
aaagatgctaannnnnnnnaccatcagaaactaaatggtgctgcctcttggacggagatcactgagggtgaatgagacaactgtgattaaaagactgaaagacgttttcccatgtgcttttgtgccatcttgagtgtcagagacagatccctgcaaggccctttctaccttgcactaagaaatcagcacggagtgtcacctaactggatggaggacatttagtgcttcttannnnnnnnnnnnnnnnnnnnnnnnnnnnnnnnnnnnnntcttgaatatttggaaatacttctctccaactctgtgcctgtagcaactggcattgttttgcttgtaatgtttctgcatgtggccagcattatagaatgctccaggccagagaatgggattgttcccatgatgccagggtctggtcagggaagtgatgggacttgttccctttgaggcagagctacagaggaagcagggctgcttcttgtcatgnnnnnnnnattcattctnnnnnnnnnnnnnnnnggannnnnnnnnnnnnnnnnntaggtgcgatggcacatgcctgtaatcccaacactttgggaggccaaggattgctggaacccaagagttcaagataagtatggtcaatatagggagaccctgtctttacaaaaaggaaaaaaattagcctggtgtggtgacacatgcctgtggtctcagctacctgggaggctaagttgagaggattgctaaagcccaggaggttgaggctgcagtgaactgtgatcacaccattgcactccaacctgaggacag

SEQ ID NO: 8677 - DNA, 1754 bp, Macaca Fascicularis
acctgtagcaacagattttgaatttaagctagaagctctcatgtgtacaaaccctgaaattaaacaagaagaccccacgaatgtggggcctgaaataaagcaacaagtaaccatggtttcagacacagaaatcttaaagattgctagaacacatcacgtccaagcagagagctacctggtgtacaacatcatgagcagtggagagattgaatgcagcaacaccctggaagatgagcttgaccaggccttacccagccaggccttcatttaccgtcccatccgacagcgggtctactcactcttactggaggactgtcaagatgttgccagcacctgcccggctgtcaaggagtggtttgtatatcctgggaatccactgaggcacccggacctcgtcaggccactgcagatgactgttccagggggaacgcctagtttgaaaatattatggctgaatcaagagccagaaatgcaggttcggcgcttggacacactcctcgcctgtttcaacctttcctcctcaagagaagaactgcaggctgtcgaaagcccgtttcaagctttgtgctgcctcttgatctacctctttgtgcaggtggacactctttgcctggaggatttgcatgcgtttattgcgcaggccttgtgcctacaaggaaaatccacctcgcagcttgtaaatctacagcctgattacatcaaccccagagccgtgcagctgggctcccttctcgtccgcggcctcaccactctggttttagtcaacagcgcgtgtggcttcccctggaagatgagtgatttcatgccctggaatatatttgatgggaagctttttcatcagaagtacttgcagtctgaaaagggttatgctgtggaggtgcttttagaacaaaatagatctcggctcaccaaattccacaacctgaaggcagtggtctgcaaggcctgcatgaaggagaacagacgcatcaccggccgagcccactggggctcacaccatgcagggaggtggggaagacagggctccggctaccacaggacgggctctgggtatagccgttccagtcaggggcagccgtggagagaccagggaccaggaagcagacagtatgagcatgaccagtggagaaggtactagccgtcctccagaaagagcgtggagagaaaaagaggcgcacctggacgcagagccctgctagcgccctcctctgctgtcgcagctgcaaggagaccatgcctgtgggagccgggcctcgcttgcatgaagaaggaaaggtgccttttcagtggtgcctccgcccatcatgcagaagagcttttgttggcttctctcccgagcttgtgcctgattctgtggcccaaaacaatcattgttaatatcttcgtgtatttcattctgatctttcattcatatatatgatgcctagctaatttcattttaaaataaatggggatctgttgtattctgattttttattaacaacactagattatgagggattgtctcctgttattagaaagtcagaaaacactatatagtagtcctcccttatctgtgggagagacatcccaagaccctcagtggatgcctgagaccgtggatagtatgtgtggaaccctacatatatgtatacacgtggctttttcctctacgtacatactgtggcaaagcttaacaaggaacagtaagagattaacagcagtcaataaccaataaaagttacgtggaatgtgtttttctaaaaaaaaaaaaa

SEQ ID NO: 8678 - DNA, 490 bp, Macaca Fascicularis
  misc_feature (1)...(490): n = A,T,C or G
tctttgtttttttctctcttttgtatgtggaaaaatgtatttttgtaccatatctcatacctggagagaaaccttttttatatcttcagggctgtagaatatattagtgcaacacttcactgaatgtgatgtaaaagcattctcatgaaaactggttctgttataattaagactcagtgtttaaaagatcttaatcagtgnnnnnnnnnnnnnnnnnnnnnnttaatnnnnnnnnnnnnnnntatcataataaacacttgttttactgagaacagaaaataattcagaaaaggaaaaggacnnnnnnnnnnnnnnnngctggaattgtatgggcgtgttggggttggttcagtgatctcttccttgacaccctagcaaagatgattttgtggagtgtaaacctttcataaatatactttccaggcnnnnnnnnnnnnnnnnnnnntannnnnnnnnnnnnnnggaggccaaggcggtggatcacttgtgg

SEQ ID NO: 8679 - DNA, 2793 bp, Macaca Fascicularis
aaactgcaccgccaaggcgcgctcctgctgtgtctggagctctggcgtcccctctgcctcccggctcagcgcctcccaccctccttccctcctcctcttcccagctcccccgccctctgctgctcgcagccttgccagtgagaatctactgtaagtgtgagttgcttcgacgaagtcacacacccacggagagaagtaatctggaggctgccgtggcggtgtggctacagcaaagcaaaacaagatccggaagaggaaaagatgcattttcataatgggcacattaaactaccaggagtaagaacttatattgatccacatacctatgaggatcccaatcaagctgtccatgaatttgccaaggagatagaagcatcatgtatcaccattgagagagttattggagcaggtgaatttggtgaagtttgtagtggacgtttgaaactaccaggaaaaagagaattacctgtggctatcaaaacccttaaagtaggttacactgaaaagcaacgcagagatttcctaggtgaagcaagtatcatgggacagtttgatcatcctaacatcatccatttagaaggtgtggtgaccaaaagtaaaccagtgatgatagtgacagagtatatggagaatggctctttagatacatttttaaagaaaaatgatgggcagttcactgtgattcagcttgttggcatgctgagaggtattgctgcaggaatgaagtacctttctgacatgggttatgtgcatagagaccttgctgctagaaacatcttaatcaacagtaaccttgtgtgcaaagtgtctgactttggactttcccgggtactggaagatgatcccgaggcagcctacaccacgaggggaggaaaaattccaatcagatggactgccccagaagcaatagctttccgaaagtttacttctgccagtgatgtctggagttatggaatagtaatgtgggaagttgtgtcttatggagagagaccctactgggagatgaccaatcaagatgtgattaaagcagtagaggaaggctatcgtctgccaagccccatggattgtcctgctgctctctaccaattaatgctggattgctggcagaaagaccgaaatagcaggcccaagtttgatgaaatagtcaacatgttggacaagctgatacgtaacccaagtagtttgaagacactggttaatgcatcatgcagagtatctaatttattggcagaacatagcccactaggatctggggcctacagatcagtaggtgaatggctagaggcaatcaagatgggccggtatacagagattttcatggaaaatggatacagttcaatggacgctgtggctcaggtgaccttggagtgagtaatttttctgataatttttacataattgttgggtcaagaaaagttgttcaaaaaccaatttggatgaggtcaagggaaatcagttaacctttgtggatgtgtggcagctctcaaagaagcctcatcatctttagcctgtattgttaacaactgcatggttaatgctacgtgtgaccggtatctttgcttgtttgcttcaaacaaataacattggcatacttgaataattgaaataacagctccttggcaaaatactggtgttttgtgttgtggaaaagatgttttcttgacaagtttttttatactggtatctatgttatatgaatgtaaataccaaacaaaattaactgtaagcacaattggtgtggctagtcctacataaggaccaaacatatttgtatatttcggctctctacgatgaataccaaggtaacaacagcttaaacaaagcttccctggcaggatctcatttaatttctaagtggttcaccttacattcttgcaatctaaggatgtatcagatcctgcctctgatttgttatttggtacaatctcagtggaaccaattgtgccgttttctgtttgcacgtttaagataaaatttatcaaatcttattaaataaaagtcactaaagttaaatattaaattctttaaggttgtaagttgtttgtattttattatatactctgtacatgtggttgttttagcctaattgttatttgtgaataactgtctttatggtggttccatctagattacattaacattaatgttttagcctgtgaatacaatgataacttacttcaaattacctgccaattcaaaggttaaaatattgtaaggtttagaaaatggtagaatatcgtgaagcactaaaccatagttgttatttcatttcgacacatgatatgaacattgagcagttctcattcaccatctctattattctggcattctttgattcattgaattcactgctcctccccacaaaaggtaacagggtaccaccatttatcaccaattaatttctcattctcagcattctctttcttcataccgataactaaaaggacctgaaaccagccactcagcttgctttcttaatttactgaatctcattctcatggtccgccaaatcatatctacttgatgacacatatgctttgtccattatttctttggacactcaaggaactcatttgtgctatatttaaagtagtatactgaaaaatttgctgataatttaaaactatttttacatgattgctatttaattttttagtaaaaatggtcattttaatttattaaagtcatttgtcattttatattaaaatgatattgtaggtatttcttctacccaatgtcagattacttgtaaatatataataaaatgatttgcattaaaaaaaaaaaaaaaaa

SEQ ID NO: 8680 - DNA, 2451 bp, Macaca Fascicularis
  misc_feature (1)...(2451): n = A,T,C or G
tataattgtgctgcattttcctatataggtatttaatggttagagaattggaaaggagaataagggtcatggaagataactaagagggaagttgtttctgtaactttcccttgtaatgctttttcatcctcttatccgataagtacaacttcatcaactggaaaatagcttaaaatatgggactctgtcctgcatttcaaaaccatttactgtttgtcactaaatagactgccttcaggcatttctttctttcagtaaaatacaggaatggcaaaattttcttcctccagatgatgtgtgcttatgcttcacttaaaaacacacctcagaaatggtgagaatcagagacgaaaaataatctttgttagcacaggacacatgccccagcaagcaagcagataacccagtcttaaaattccatagagctggattacaactggaaaggtcaggagacagtagcttagacatttcacctccaaagtaaattggaagtttccaggattctaagacagtgcaagaagagcagtgtccctccagggctgttcacatgtctccgcccagagattgagtcaacttcttcaggacaaccagggattttttgttatcaaatctacctttcaggactcagctcactcagcgagacttccaggtctcaataaatgatggtggtttttagcttttaaagaactaaatgtaagagaccgatgttcagttgtttttgtgtttgtgagacatcattagatgagagagagactgagcatcaagcatgcagcttcaccagtaagactccaccaccacagggcccagcttacgattgccgatgcaaaaggtcttgctagaaaggaacatgagaagtctggccaggtttcaagccaggcatgtttgtatctgtccatttaccattcccctcccaggggctcggtgtagctcttctgttgtgttactttttcctgtgtcttcacttgcagtgtttcttttgcccagcctttttttttttttctttaataggacgtttcactcccacttattcagaacctgctgattatccttgatcgccactctttgatttgataaatttctttgctcactattagcagctgcaacagaggtgcagaaggagcaaagctcaaacacattgctcttcactgcagtaccagttaaagtacatgaagggtgggccagcagatggcataactaagtgactgtgttttatctatctttaatttccttggccaaatgagagttagtgatatgttcctttatagaccaaattatggtgaaatggtggatgttggttatttttaaatgacatttgagttccatttgctgcaaatttacttagttagattgaccattttctttcatttttccgttgcgcttgctttgccatcacctagatttcttggctcttacactagctatgactacttgaaaaggaacgtcaagtggtaagactggcaattaatgtgaggctgttccgtaaggtgtccctcactgtgtcactggcattatgtgcactttcagaatttaatgtcatcatcaagggcttagtctaaattcatgaaaacaagataaagaagccaatcatgagacttcttcaatgaaaatgtatgaaaatgaccgggatattccaaatgcgtatgttgttgtgggtgcacataaagctagtgcggctttggcattcagcagtaaggtttagatggcaatgttgcaattatgggtcttctaaaaagatttgtgtgaattttgtgttacatattaacaattggcaatctgaaaaaataagcatacatggcacaatttgacttaaatgaaccttgtaagataaagcagtatctgctgctccagcagtcatttaaccaaaaaatggacctggtaactcaaggggaaattttaaagtaaaagctccagtttttttagttttactgaaacacagatatgcccgttgtgtgtggctgctttgaggctataaccgcatagtttgaatagttgtgacaaagactgtatggaccaaaagaccagaaacatttactttctggtgtttcagtgaagaagtttgccaacccctagtctacgacatctgtttttgtggtgctctgagtatgccagatgccagatacaaaatcagaagtgggtctagggctgggcgccatggctcctgcctgtaattccagcactttaagaagccgaggcgggcagatcacttgaggtcaggagtttgnnnnnnnnnnnnnnnnnnnnnnnnnnnnnnnnnnnnnnnnnnnnnnnnnnnnnnnnnnnnnnnnnnnnnnnnnnnnnnnnnnnnnnnnnnnnnnnnnnnnnnnnnnnnnnnnnnnnnnnnnnnnnnnnnnnnnnnnnnnnnnnnnnnnnnnnnnnnnnnnnnnnnnnnnnnnnnnnnnnnnnnnnnnnactgagaccctggctcaaaaaaaaaaaaaaaaaaaaaaaaaa

SEQ ID NO: 8681 - DNA, 690 bp, Macaca Fascicularis
  misc_feature (1)...(690): n = A,T,C or G
cagtattaggagatgcnnnagggagtaagaaagcatggggttcagtnnnnnnnnnnnnnnnnnnnnnnnnnnnnnntctccctctttaagactaaaagctctgcataagcaatggttcagaacatgtcttaggtacagacctgttgaatctgacagaaaccagaaacnnnnnnnngagaaaaagacatttgtaattcactcagttttccatacacatttnnnnnnnnnnnnnnntatctgtggaatccctaaactgccttgaaagaaagggagttacccggatctaaaatggtcattatatatttgtgtcaagaggcaagggtcactaaatattttaaggattaaggtaccagaggtatcagtgtataagcatatagtctggtctttaattatgacaagggtattgattacattctactctctgggtttcaaaaagatctgacatgctgacaaatccagctcctcacaaatcttgtttgaaggacttgtgggaagtggtattccttactattagatcacgcctcttaataactacatgttaacgtccagccttttatctgtttgagtaattgtagggatagaaagtgaagcccccagagttaggtgcaagtgtagcacccagctgaaaggcatcatggagtctaaggaccttctacannnnnnnnnnnnnnntgggttgtttctggtgta

SEQ ID NO: 8682 - DNA, 2623 bp, Macaca Fascicularis
aaaagaattttaaaaacagggaactctgtgactgtgaaatactctccaggatttaaaaggctgtggagctccagataaagaatcatttatctttcttctgaagaaattcctttggttacaagtttaccccgtacacggcaacatacttatctccatccaagacagactcaaggtggaggaagcgtggaaatgtgcttccagacaaagctttcaatatcctgggtgccattgtttcttctactcagccgtgttttttctactgagacagacaaaccctcagcccaggacagcagaggccgtgggagttcaggccaactggcagacctgctacaggttctctctgctggtgaccacccaccccacaaccactcaagaagcctcatcaaaacattgttggagaaaactgggtgcccacggaggagaaacggaatgcaaggagattgccatctgtgctttgaaccagatgcactattactaatagctggaggaaattttgaagatcagcttagagaagaagtagtccagagagtttctcttctccttctctattacattattcatcaggaagagatctgttcttcaaagctcaacatgagtaataaagagtataaattttacctacacagcctactgagcctcaggcaggatgaagactcctctttcctttcacagaatgagacagaagatatcttggctttcaccaggcagtactttgacacttctcaaagccagtgtatggaaaccaaaacactgcagaaaaaatctggaatagtgagcagtgaaggtgctaatgaaaatacacttcctcagttggcagccacgatcattactttgtcccttcagggtgtttgtctgggacaaggaaacttgccttccccagactactttacagagtatattttcagttccttgaatcgtacgcataccctccgcctatcagaactcgaccaactcctcaacactctctggaccagaagtacttgtatcaaaaaggataaaatccatcaacttcaaaggaaacaaaacagcataataacccctgatcaggactattctaatttctcttcatccatggacgaagagtctgaggatggcccaatttcctgggatcagacttgcttctctgctaggcagctggtggagatatttctacagaagagcctctcacccatttctaaggaggactttaagcaaatgagtccagggatcatccagcaactcctcagctgctcctgccacttgcccaaggaccaacaagcaaagctgccacccaccactctggagaaatatggctacagcacggtggctgtcacccttctcacactgggctccatgctggggacagcgctggtccttttccacagctgtgaggagaactacagacttatcttacagctgtttgtgggcttggccgtcgggacactgtctggggatgctctgctccaccttatccctcaggttcttggtttacataagcaggaagccccagaatttgggcatttccatgaaagcaaaggtcatatttggaaactgttgggattaattggaggcatccatggatttttcttgatagaaaaatgttttattcttcttgtatcaccaaatgacaagaaaagcccagaagattcacaggcagctgaaatgcctataggcagtatgacagcccccaaccgaaaatgtaaagttattagcttgttagcaatcatgattctggttggggacagcctgcataattttgcagatggcctagccataggagcagccttctcctcatcatccgagtcaggagtgaccaccacgattgctatcttgtgtcatgaaatcccacacgaaatgggagactttgctgtgctcttaagctccggactttctatgaagactgccatcctgatgaattttataagttccctaactgccttcataggattatacattggcctttccgtgtcagctgatccatgcgttcaagactggatcttcacagtcactgctgggatgttcttatatttatcgttggttgaaatgcctcctgagatgactcatgttcaaacacaacgaccctggatgatgtttctcctgcaaaattttggattgatcctaggttggctttctctcctactcttggctatatatgagcaaaatattaaaaaataagttgggatcatcaacgtctttcaaaaatgcatttatatagtctttgtttctttcattgcactctatagtgatttttaaattaagaattttttgtcttaggcaaagtgtgtatctttcaattcattaacttattaattttataatgcagttttatttttggaaacatataagtatcagactgtccttaattgaaattttgtctttggtttccaacaccgtgatgaaactcttgctttttaaaaagtagttggtaaattctgcatgaattctagtaaatttttaaaaaatagactgtttccctaagaaagaatgtttgtttgtagcatttaaaggggacagatgcctgttgggataaaatcaactgctacttctttgatgttaattttttttccctgtgcaattataaactgtaagcaagttaagtgacaagcaaatgtaataaagactagttttaaaaaaaaaaaaaaaa

SEQ ID NO: 8683 - DNA, 1732 bp, Macaca Fascicularis
aaaaactaatttgaatttaatgcaacttaacttctcttccttcaaaacttagtgactcctaactaatgtattagcttgatatcatatttcttaagccatatgaagaaaaaaaataggaaaactgtcaatcatagttgaaatacagaagatccatcctgttaagaatatcacaaaaagatttctaaaaattattttgttgattttttaacagcataggtcttctatattttaagatttaaaaaaaaattcctacctctagctttataatgaaaatatattttgcatgccataatattataatcatctctatttggttaataaccctggaagtacaaaacacaaaataatatattatgtgcagtttgaatacagttgatattaagggttagagaagggatataggtttacctttcagaggcaccagctctggaggttgattaggcagttaaaattaagtgccttagatttgcattcctggcacaagattttattagcacaaccagagtggttactacaaccacttcacttcttatgaagtgagtagatattggtccattatgaagctacagaaaatttagcataatacagtagtcaaaagaattaatttacacttggagactatatatgtgatggaatgtttgagtgctagctccaggagagttctggaaggaaattactaatcagatgttccttggtaaatggaattgataaaagaaataaaatggtttagattcacctacaccttgggaaaaccacattcttgggaaagctttgggagaagatacctcttcaaaatggttcatagttccagatttctttttcttttctgtttgaatgtcagtttgacagtttagcctctttatatcttatttacctacttttctaaatagatcatttcttctattaattcattcttcttttttagatatgtccacaccacttactacgctgtaaataatttacattagagatttgggtctaaaagacatctgtctcttccaagggcagtaaatttattaatcaaattcttagccctctaggtgtaacttaaattcctactctagatctggaaattataataattgtacaaattccagtatttagttgactaaatattgtcacatattccttatacttccctgggatttgtaagcaaatgcatctgtgagttgtaagtgtagagatacagcatggatgaggccaaagctgtttttggcatcacctgcactgcatgctgctatattctttctcaacacactgagtctataccatagatgatgggagggaactaagagggaaaaataagatgtgagttctttgcttctgatccttcttactttcaagctgaccacacatggttatcatcctttagaaagatttaggaggaaaacaaaaaccaaacccctttgtttatatgtagattttctttcactgttgccattattttgtgatctctacctcagtttttacatttttttccaaaaagaatatttagtttttcttcctaagatatcccttttaagatcttctacttgtctttccaatgatagctcatgggccatctcttgttttcaaagtagctggagatctgttactagagaatctcttttggtacagattccagtaacctggaaaaatatggctttttactatatatttttcattttgaaaataatggacaagttactgatttgtttattctcatttttagtaaaaaaaaaaaaaaaaaaaa

SEQ ID NO: 8684 - DNA, 712 bp, Macaca Fascicularis
  misc_feature (1)...(712): n = A,T,C or G
tnnnnnnnnnnnnnnnnnnnnnnnnnnnnnnnnnnnnnnnnnnnnnnnnnnnnnnnnnnnnnnnnaattttttgtatttttagtagagatggggtttcactgcgttagccaggatggtctcgatctcctgacttcgtgatctgccctctttggcctcccaaagtgctgggattacaggcgtgaaccaccgcgcccagccccttcctcaatttttgagacttggccaaagtagcacctcctccaagaagcctttcctgattccccatcactacttccactgaactagatcagaggcatctctcactgtacacagggactatactacacagtacctgtgtactggactgtaagtatctggttacttgtctgccttcccagccaggttgagatctccatgaaggtgaggcctaggctagtttagcccaggcttgtgttgagagaatgaaggaccaagcccaggcccctgcccatcttccccagacctagctagagccccacttacctacacacttgaggtggtgcagggcccagcccttcttgcattgcaaacagtttgattcctcaggtcctgagcatcgggcacaggggccaaaacaagccgaacataccagatggctggcgttgcgttctgcctcgaagtagccaaggccacactggccacaggccctcaccccgtagccggcttggcagtcacactgcccgctgccccctc

SEQ ID NO: 8685 - DNA, 744 bp, Macaca Fascicularis
  misc_feature (1)...(744): n = A,T,C or G
ctaccnnnnnnnnnnnnnnnnnnnnnngnnnnnnnnnnnnnnnnnnnnnnnnnnnnnnnnnnnnntnnnccccgtnttccacagccttgccacccgaaactgccctttcacttctgccatatgctcggctccaggccactcctacctgtttctccaggtcttccatctaccactcccaggtgtcttcacttcattcccaacccaggaacatcactgtccatgatggcannnnnnnnnnnnnnnnnnnnnnnnntcccaacactggcgtttnnnnnnnnnnnnnnncccgtatccaaactcggtgatcccctgcaactgctgtacctccggtttctcctcacacactacccacaacagcctcaaacaataacattttgcaccattatagagtcctcctattggagtggattagaggggaaggaaaaataagtgattttgtcgtaaggattacaaatacacctacatgataaattgggggttggggagggtggtcctaatgtggtgacttgggtcaaactttccagtgagtcagacatgtatttgagaagcgctgcacctcagacagcttagaggcaagtgaaggagatacactttgagccatggactctagnnnnnnnnnnnnnnnnnnnnnnnnnnnnnnnnnnnnngagtggataaaattgttacttgaaatgtgagaatgggaaaaaagcaatattttgtattaatgtattatatatataatgttattttaaatatgcatgt

SEQ ID NO: 8686 - DNA, 703 bp, Macaca Fascicularis
  misc_feature (1)...(703): n = A,T,C or G
gaccggtcaaaagggctgacattgagcgagccaagacacgtttcgacccgccgctcccctcnctggggaagcaggacttccgcgtctttgaaaatactgtcaagtgcgaatggtgcgaggcaagtcgtctcaccagcgttccaaatgaaaatgctccaagtccaaatatttcctgagtattcacgcccatgtgcacgctttctgtaagtgaccccagacttggaaatatgtggtgggctgttttgttgttgagatacttttttctccagttggtagcttttgttttaaacactgggaagagcttccttggctgtgagctgcctctgacttgaaagccaaccctgagttggtggaatgtgagctgtcgctgatggcactcataccagctcctgttcagcagctctgcccagtctgggaacgggtgaggccattggagccatggtgagccaggaaagagggtgtgcacaagtgtgtgggcaggggcaaccttccccaagctaggcccagagactaaggaaagaggaaagagagaggagaggagggagaagagagggaaggggaggtctgcccggctaacacaagacagttttcatttgtagcggccctcaccgcaggctctctatcaatttgtctcaatgcaaacattcaaaatattccctttggctgctcgtgaaaacaatgtgagctgccaggatcaaaccat

SEQ ID NO: 8687 - DNA, 754 bp, Macaca Fascicularis
  misc_feature (1)...(754): n = A,T,C or G
agctgggcannnttggacagttaagtgccaagatcaaggtctccgattatctctccttgaaaggtaagcagagaactagggctatcccataaattaagtgggagactggaaaggggtgcagacttctgtactggggagaaagtcttggatgagctggggtaaagaactgccagacagagtacccggggagacgttattagcgggagaaagaccaagttcagatgcagacttgggaaagtaggtaatttgacaggaagaagcgaaattagactacccaactggattgtgaatgcagtttatgaaatggatcaggacaggagccaaaatagattttctagaaacggcagactcctgtgattggagcagtgtacaaagtacagcgacatcagacacgatctcacctgaggtgctgggtgagaaatattagggaccagatagaagagggcctgtgtataaagagattaggaaggagatttgggtnnnnnnnnnnnnnngtctccagagaaagttggaactggttggcttagcaaccaagagatactgggttgaannnnnnnnnnnnnnnnntcggtgcctagtgacggagcaccagcccagcccatttctctacattgccatggggtaaacccagtgtgctataaactcttcaattcctttggttatggattttgtatctttcctgtgtttcttaataaagttctttgaaaaaatgggaaactttctcagatgggaattttgtatcttcctctgttct

SEQ ID NO: 8688 - DNA, 757 bp, Macaca Fascicularis
  misc_feature (1)...(757): n = A,T,C or G
tcccgggcctnnnnnnnnnatcacagccagtccagaggccagttgcctgccctcccggacccctccccgggttggctccccctggagacctctccannnnnnnnnnnnnnnnnnnnnnnnnnnnnatggctccactgaagagacagacgaatcggagacttgaggagtccgaagggtccagcccacagcgccctatacctgctcccacccagcccttggcgtgcccacccagcctcctctccagcacctnnnnnnnnnnnnnnnnnnnnnnnnnnnnnnnnnnnnnnnnnnnnnnnnnnnnnnnnnnnnnnnnnnnnnnnnnnnnnnnnnnnnnncccggaagggaatggcctgctctccctggtcctgtcagcnnnnnnnnnnnnnnnaggccccaannnnnnnnnnnnnnntgaagccaccgtatcactaggaaggggacttggccatagcctgttagtcctcctaacctcttaagaagagcggtctcttctgaaccagcctctgctggtcccctgataaggttcatctcctcacagcaattccattaagggggagaacccgaatagccacgcagggccttgcaccatcaagggtgacacctgcgacgcaagtaccaggaggacataaccgctgtggccttctgttggagaacagccagtagccttggtaggatggagaagggtnnnnnnnnnnnngatttcacttgcaaaaactgcttcaagtcttgacccctttgtgtctaatagctaaatat

SEQ ID NO: 8689 - DNA, 689 bp, Macaca Fascicularis
  misc_feature (1)...(689): n = A,T,C or G
tgtccaaatgagnnnnnntgcatcaaattttatctcctctcntnnnagaagaaagagaattagccctttacagagataatagttgcctaagccagctcttttctcctctttttgatgttcttctctttttctctcactttggaaattgtaggttatttgattttttcaaatatctgttgttacatatacattctagttatattctagtccaaacaatctagcaaaataaaagaaaaatgctgttcactgtactttttatttttaaaatgtgagttcatttaaataatagcttgtgttacttatgagctaaaagttttgaagtatgatttaaagagtctttaacattacaattctggactacaaagtgtaaaaattatattttaaaaggttcatgtactgtttctgataaacagatgaatctttgatcactggaatgtgttaatactaatttaaaggcagctatatattttctgattttataagaaattaaccaatacaatatattttatatacattgggtaaactcttcaaaatttaagatttcttaatttctaaattaagtgacataatgacatgtcttaaaataggtttgatcttataaaatttttgtaataacacaaatataaggacttattattttccagattctcacatctgaatccaaacatgtaaatacaattgtattaaat

SEQ ID NO: 8690 - DNA, 746 bp, Macaca Fascicularis
  misc_feature (1)...(746): n = A,T,C or G
tcagagagtggtgaaacagggctatatcactccttggtccccacctcattttggtggggccagggtgagccccttcctgtcacagtcaccccaactgaaattgcctttctcttcggccagtgttagcctctgagcagaggactctggaccannnnnnnnnnnnnnnnnnnnnnnnnnnnnnnnnnnnnnnnccccacagnnnnnnnnnnnnngccagacggggcagctcactgaacctgggggttctctccattttcgctgcattctcctnnnnnnnnnnnnnnnnnnngggagccagggggtgactcgctctgggtttcgggctggcccgagctcaggtgggcatgtagcaaagcggccacctcatcctgctcagcctccaaggcgatggccagggcactggtgccctcattgtccaggatggcaggatcgcagcctggctgggcgagcagcagccgcacggtgtccaggcgcccatactcgctggcgcacatcagcgccgtggccccatctgcatcctgcgcattcacgtcagctccacacgccnnnagggatgnaaccatgtcctgtcgnnnnnnnnnnnnnnnnnnnnnnnnnnnnnnnnnnnccgtctgactggccttggcattgacgtcgcccatgcagaagagtctctggaccacggccatgtcctcctcctcccgccccacagaggtaagnnnnnnnnnnnngagggctgagtagccagctcggttctggcggttgac

SEQ ID NO: 8691 - DNA, 1769 bp, Macaca Fascicularis
cagtaactgctaattgatatttactgagcagctgttgtgtcctcacgactgtaaggctattagagaaagatagcccgcctgcctaactgggaacacaaggcacacatatattggaaaggtcacgttgcacaaaacaggtgttcaataaataattttttaataaatgtgaacactcaataacaaataaatgttacagattgtaatagttgtagaagattggttgggattgtagtgactggatatggggcaatggctgtgggtctagagtatattcattgtgcagtgaacacacacctaatctgtcctcaaggacagaaccatgtggaggaataggaaaacaagagaagcaggcaggaaggggaggccgtgagtatgacagctaagaaatgttatattgggttcatccagagcaggaaaagctgagagctgtccatgagagaaggccccataggcaagacgagtgggacaggggtgtgaagaagtgggctacaacaggccctgcagatgtggaagccagatccacagaggcacttagaaagtgaggatcctggatgaattattttagggagaaagtataggtttagatcagctggcagagatgtgtttgtaagctaaagtcatgtttttcaggactaaaaaggagcaaaataagtagaccttcttgggacaggagatctagggtactccggaaccaggaaaataagaaataagaggggaattttaagaaagagaggacagatcatctatgaggctggagatgaaaggtgttggagatggtgatgcagaagtcaaaggactcactcgaaggactcactctgcttatttgtccatattcccagagcttgtcatgagatctggcccgggtgggcagtcactcagccactatgtgtcactgtggctgctatggtggatggaggctggacaggtagtgtggcgattggcagtctttctggaggactcaggagggaggggtttcaaggtgggcatcacctttcacgttcctgtccatgtctgtactgttcttcttccctccctgaacagcacacaccctgcacccttagtttcaggggtctgaaaacaaatgctacaaccacactgctttggtggcttttctgaacaggcagtgtgagaagagatgttctggccaggtgaaagtggactttatctttaggtaggtttttcagtttagaaaggtttcctttgcttatcccttgaggacttctgtgctgctgcttctcctccgtcttgctagttaacagaacaggggcagaagtgacaccagtgctcttggccttgcctgctttgggaagcactactgggccccactgtttagaatgttagatggaaatgtacacaaggcactggcacacgcctgccagagtgacccagtgcttctctcccatgggactcagggtcagcatgggaaggctgctggcagggacaggagccccacccacaaggtggaccgagcctcacttccacacaaaaccagaatcccatctgccccagagcactcgctctcctccccttccttccgctcaatacggtctgacatgcctttgaccagaactgcaaaatttcaaacataaacccagatctgttgggaaatcctaattaaaaacgttccattcccaggtggcacaatcacatcctgcctaaaacttctggcccacatcccaccacccagatgttgaaaagaaaccttcctctgcgtaacaccaaaacttgcacttcaaggttttctttaggggacaaaaaaaaaaaaaaaa

SEQ ID NO: 8692 - DNA, 352 bp, Macaca Fascicularis
ctccccctcccccaccatgtgccaaacgggaggccccggccccccgcccccaagccccccagatggctcccctgacccccctgaccccctaggagacaaatgaggcaggaatccccccacccctccatagagagccgcctttctcggaactgaacatgaactattttgggccggagcccctagacacagcggaggtccctcctcacccactcctggctccagacaggggctgcaggcttcggggacctggaccccccatttagcgtctcccctttccctccccagcccggcccctggaggggtctctggttcaaaccttcgcgtggcattttcacattattaaaaaagacaa

SEQ ID NO: 8693 - DNA, 1273 bp, Macaca Fascicularis
  misc_feature (1)...(1273): n = A,T,C or G
nnnnnnnnnnnnnnnnnnnnnnnnnnnnnnnnnnnnnnnnnnnnnnnnnnnnnncctcgagcactgtggggatagggcaagaaacttgaccctggcaaaggttcccctcccataccccaagatacaaagttataggacaggaacaccgaaaaagttacattcctgaggcccaggctcaaagaccttgcccaagatgaggctggaccaagatatctgagaatcctctacatccaccattaacctagtgtgtagtaacaagcaacagttgtcctactagagaagggacaagagtgtggagagagactccctgctgaaaactgagggtggagcaggaacactgaggaaaaccctttggcatctgaggctgcacgttaaacaaaaggtaatagtggcccactattggaggtttgaaacctgtggtgctgtgattgccatagcaacaagaatcctcaaacccagctccattgctaactagacttactattcaaccccctgtacttaacagcttagcagaggaggaatgttcatttctgagcataaatactattacctctattgtcactgaatatccagcattcaacatttcaaaatcaaaaatttctgggcacacaaaataaggaaacttaccaaaacataaaacaacaacaggtctagtgtcagagaagacccagatattggaaatattagggaatttaaagtactgtgatttatatggtaaaatatccactgaaaaaacaacatgcctggatgtatagggcgtttcaacagagagaggatctataaaataatcaagtgaaaatgctagaaataggcaggtgtgnnnnnnnnnnnnnnnnnnnnnnnnnnnnnnnnnnnnnnnnnnnnnnnnnnnnnnnnnnnnnnnnnnnnnnnnnnnnnnnnnnnnnnnnnnnnnnnnnnnnnnnnnnnnnnnnnnnnnnnnnnnnnnnnnnnnnnnnnnnnnnnnnnnnnnnnnnnnnnnnnnnnnnnnnnnnnnnnnnnnnnnnnnnnnnnnnnnnnnnnnnnnnnnnnnnnnnnnnnnnnnnnnnnnnnnnnnnnnnnnnnnnnnnnnnnnnnnnnnnnnnnnnnnnnncaaaaaaaaaaaaaaaaaaaagaaaagaaaagaaaaagaagaaaatgctagaaataaaaatgatatctaagatgaagcatttcttcaatggacttatcagcagtttgaacatgtctggtgaaagaatccatgaacttgaaaatagaaattatccaaactgaaacatagagatagaaaaaaaaa

SEQ ID NO: 8694 - DNA, 2388 bp, Macaca Fascicularis
gtgtatatctgggggtgagggcacacgccttcagtgtgttgcaaatgaagccttcgttgtgcgagctgcaaagctctggacccctgcaggaaactctgctacccccagtgttcccagcccctctcatggacccaccaggcctggggttgtaggattacttgagtcctccttgcccccaccaatccccagagatgctccggcaacaacatgcccggaagcctgagcccaaacactgccttccatttgcaggtgacccctcgggaccccagcttcctccaaactcacaccctgaaaccatccctaggtccctggcggtgggtaggggaggctctggggagaggtcctgaggcctgactcctctctctgttcccatccgcagccctgcatcctcatgaacaacactcaacagctacgagttcagctggagaagatgttcgaagccatgggaggaaaggagctggatgccgaagccagtgacatcttgaaggagcttcaggtgaaactcaataacgtcttggatgagctcagccgggtgtttgctaccagcttccagccgcacattgaagagtgtgttaaacagatgggtgacatccttagccaggttaagggcacaggcaatgtgccagccagtgcctgcagcagcgtggcccaggacgctgacaatgtgttgcagcccatcatggacctgctggacagcaagtgagccgggccaggtggactgggctggccagggaggtgctggggcagggccatagagacccagggactggctggagagggtgtgcagggaatgtttgccgcgtagtcactggatagttggatggctgagtagagggtggaatgaaggggatggaaagttgggtgggcaaataattggaaggatcggtgagtaaatacttttgtggatgaatgaatggtggatgaataggtgacatgaggggtggataggtgggtggatgcatggattaaaagataaatgtttagaaggctagatggaggatagatgttttaaaaagatggatgagtggatagttggataaatataaaatgctgctcaaaaaaatcacagacaacacatacaaatggaaaaactattcatgtacatggataggaagaattcttattattaaaattgctgtactacccaaaacaatctacctattcaatgctattcctatcaatctattacttttttatggaattagaaaaaacctttctaaaattcatatggaaccaaaaaagagaccaaatagtcatagctattctaatcctaagaaaaaagaacaaagctggaggcatcacattaccctacttcaaactatactacaaggctacagtaaccaaaacagcatggtacagaaacagttatctagactaatgcaacaggttagagaacccagaaataaagcctcacacctatggccatctgagcttcgacaaagtcaacaaaaacaagtgatggagaaaggactccctattcaatcaatgatgcaggaataactggttagtcatatgcagaagattgaaactggaccccctctgtattagtctcttctcaggctgctaataaacacatgttcgagactgggtaatttataaaggaaagaggtttaatggactcacagttccacatggctggtgaggcctcacaatcatggtggaaggagaatgaggagcaaacttatgccttacatggcagcaggcaagagcaagtttgtgcacaggaactcccatttataaaaccatcagatctcctgagacttattcagtaccatgagaacagtatggtgaaacggtccccatgattagattatctccacctggctccgtctttgacacatgggaattattacacgttaaggtgagattttggtggggacacagccaaaccatatcttttcacccctggccattcccaaatcttgtatcctcacatgtcaaaaccaatcatgccttccctagagtcccccaaatcttaactcattttagcattaactcaaacgatcacagtccaaagtctcagctgagacaaggcaagtctcttccgcctatgagcatgaaaatcaaaagcaaattagtggccaggcttggtggtcatgcctgtaatcccagcattttggatggcaaaggcgggcagattacctgaggtcaggagttcaggaccagcctggccagcatggtgaaaacccatctctactaaaaatgcaaaaaattagccaggcatggtgatgggcacctgtagtcccacctgcttaggaagctgaggcgggagaatcacttgaacccagcaggcagaagttgcagtgagctgagatcacgccattgcactccagcttgggcaacaagaatgaaactctgtctcaaaaaaaaaaaaaaaaaaaaaaaaaa

SEQ ID NO: 8695 - DNA, 700 bp, Macaca Fascicularis
agaagcctagttttcaggttattctagtccttggcaggctcaagatgtcaacaacacggtgggaaacaacccctcagagatcacatagcccgcgctcagcttttttgatcgtccaaggcggcgacccctgagaggttacatagcgagcactcagctttatagatcgcccaaggcagcgattagaatcagcaactcggagaggaaaaaaagctcttagcgaaatggaggctgaccattatctgtaataaagaatcggaagtacagtacaaaaataaattaccgaagcgcaacatgcgtgaatttcacacaaaaaataacattaagggaaagaagccagacacagaagagttcatattgtgtggttcaatttaaatgaagtctaaaaactagcccatggtgttaatgagcgtagtgggaaggacaatgacgtggaagagccaccagggggcttttgaggttccggtaatgttacttgatttagacactgatttataaataggtgggttcactttagaaattaagttgtaaacgtatttttatgtacgtagtttcttctatagattatatttaaggccctgcgggggtgggggggaatttgccaaggtaatagaaatattacacccatacatacaattgtcaaagttcgtgggatgaactcctaagagctgtgtattttatcgtattttttttaagtggccaa

SEQ ID NO: 8696 - DNA, 706 bp, Macaca Fascicularis
  misc_feature (1)...(706): n = A,T,C or G
gtgcatgtcgttctgtgcgcntaaaatactctaggtagctctggccacactgcattctgactctgtgcgctgcctgtccccagactgtgagcgcgctgttgacagggatcctgcttgtcttgccctccattggatccttgcacctgaacagtgcaaggatgtacgtgtgcaatactttgctgaatgaaattaaagccctgggcagggtgactcaaaaaaagaacccaacctggccgatcgcggtggctcacgcctgtaatcccaccaatttgggaggccgaggcgggcggatcacctgaggtcgggagtttgnnnnnnnnnnnnnnnnnnnnnnnnnnnnnnnnnnnnnnnnnnnnnnnnnnnnnnnnnnnnnnnnnnnnnnnnnnnnnnnnnnnnnnnnnnnnnnnnnnnnnnnnnnnnnnnnnnnnnnnnnnnnnnnnnnnnnnnnnnnnnnnnnnnnnnnnnnnnnnnnnnnnnnnnnnnnnnnnnnnnnnnnnnnnnnnnnnnnnnnnnnnnnnnnnnnnnaccccaacctttaaggagcttacagtttatggagtatatgttgttgttgtttttagcatttatagaggcagttttgtggtggttaaaggcacaagcatggaatctgaataacccgatttaaatcccagctcagcctctcggggacaatgtccctgagcttatttcaactgtaaaataaaat

SEQ ID NO: 8697 - DNA, 700 bp, Macaca Fascicularis
  misc_feature (1)...(700): n = A,T,C or G
gtaaagtccagatgagaactgatgtgccgctggcttgaccgcgcatgtcagaatcaccagccagagatgaggataagccacatgccttcaggacagggcggagatggaggaggagaggagtgtggtgaccctcagaacatcaacagacaggctgtttatgatgggaacacactgcagctgggaaggagggtggccgagatatgaaatacccttcaaggtggacgcatacccaggggcatatcattcggtggcaggggccagcacggacatgcagcattgaagcctgtgctacagcctaatgcgtcagcccaggcacagacttgtttggagcacacacaacagctctgagttaagtnnnnnnnnnnnnnnnnnnnnnnnnnnnnnntgaatgaaccctaatctcgtgatgatcaagtgatgacatcatattctctctccgaggagacgccgtcatgcgcagaaggcagtagaggaaggttgcttcgagattgcgtgccgccccaggnnnnnnnnnnnnnnnnnnnnnnnnnnnnnnnnnctgatgttcaacttcacatcttgtcgcacgggaatcttctctgtttagtgtcataaagttggctttatggaatgtaattcatttttatctttagcacaaatttgtctgtttcttttaaggccaccagaaagcgcaacatagactccccacagaaatctcact

SEQ ID NO: 8698 - DNA, 543 bp, Macaca Fascicularis
gaggtgacgtgggcattttcatcatatcgtgagagtacatgctagtgacacgacttatcactgatgatgttgacctcaatcttatggttgaagttttatttatcaagtttctccattgtaaagttacattccccctccatttccatactgtactctttggaagtactcactgtgcacagcccattcgtaaggagtagggagttatgtttcacctacttgagggtgggatgtctacataaatttgaaatttttatgcctgtgagagttgtttgttctttctcttttatttactgagtcaaccacctatttatgtctgtgtggattcatgaatatttattttatactttgagttataatccattactgcattatttatttgttgttcctcttggtccgaatttggccattgggagatctttcagttggcacctgtgtccctgtaaccaatccccaccattgtgtgtgttttgtttgcttagtattgtcttactttccggcattacaagatgatctaggctccctttgcggattccctaccctagt

SEQ ID NO: 8699 - DNA, 677 bp, Macaca Fascicularis
  misc_feature (1)...(677): n = A,T,C or G
atggtattttgttacagcagtacanacagatgaagacactacattctgaatttaaacaagtttctgctgtgtcaaaattgagacgagtatgcactgactagctgataaaatcgattctatttaattggaatgatatttctcactacaaaataataaggtagtaatatgactgataaatctttcacatgcacttagatttgtaaatcaactggttaacccagaaaaccaataaaattagatttctgaactctgcacagatgaagatgagacttcgaagtagaagggaaataggaaactcaagtaactagcaaccttacccaatcctacaggaataatgcatatttagagtagctggtctagtatggtgatacagacctaaccataatctaattaccaggcttagagttgagtctgctgctgcccatgaaatatagttaaaataactagtccttagaggatttcaggattgttagtactgtgctaagaaatggatgtccctcaggttctaaggaaacagggctctgcagaattgtaactactggatacaaccacagggttttaacatttaaagataacactggtcagtctgatctaccatccaggcagcccattagccatgggaaaaccggaagtgattttcttaaatacattttctaacaaagcttaaacgtgataga

SEQ ID NO: 8700 - DNA, 866 bp, Macaca Fascicularis
  misc_feature (1)...(866): n = A,T,C or G
cagtcagggcccagagttgggannnnnggnnnnnggtgtgtaggcttgtagtagcnnnnnnnnnnnnnnnnnnnnnnnnnnnnnnnnttgagtttatggccacctggnnnnnnnnnnnnntctcaagatacagtgggaggngggcagaacagacatatgacagtttggtttttaaaatttccaaccaagtttgaaaaggcaagttggtcttatagaaagcacnnnnnnnnnnnnnnnnnnnnnnnnnnnnnnnnnnccatgtaatctctctaggtccattttcctaaaccacaagatgaagatgttacattgtcaaagcttgctgtaggattcggggtgnnnnnnnnnnnnnnnnnnnnnnnnnnnnnnnnnnnnnnnnnnnntactgtgcctttttttctttcctaagacatcacatccctctcctctgtgctcctgtccctccctccccctagcaaggtccaggcaaagctggagatgaggctgagatccagattttcttagaaggcaacttagaatggctaggaaagggaaacctgactgcttggtcaggagggtgcatgatctcttgctgggaannnnnnnnnnnnnnnnnnngcctagaatgtgtgtgtctatttgcacaagttgtcttttcctattttggagtggtcagnnnnnnnnnnnnnnnnnnnnnnnnnnggagttttagacaaatttacaaaactgtgcttttattaagtgactttttgaataaacttctttggtattctggagcaaatgtatttatttattggtatgtnnnnnnnnnnnnnnnnnattttcccatgttgacattacgtatgttgtagaatttagtgtttgtctaagtacagacatatatcaac

SEQ ID NO: 8701 - DNA, 3534 bp, Macaca Fascicularis
  misc_feature (1)...(3534): n = A,T,C or G
gtgttttgtttttttttttacagattgttgaactgtgatacaaatttttgtaattcccactgatcagaatcaatgtatttggaatgaattttcttcctttcctgaatatgtggaagatatgagggtatatctatgtaggcaagcatataaagggtgtgtgatatacccttatctttaaattgtgaatcttgggatctctggcaaccttgtaagcagttgtgatgagtttcaaaagtgaattggcacagtatatcaggacagttctccttgtctactctatttttgttgttttttgtgacaagttgttttttgtgccgtgttgtttattgtgacaaggcctttcttcgcgttcagtatttcttttaacttttcaggttactggccaagattccctttcttagcattaaattagtccagtgttcactcctaggaccttctgttattggagtgctctcaccaagtttaatggccataaacatcatctgtttattaatgataatttgtatttgttctcagcctgttctcaacttgtatatatacttttctaattgagtctttacttacattatcttactttacttgctttatctctacatctgcccacagacttcagctgtaagttgaccattttacttaatgcctacctcatgctttgctcaggccaaaaatcttagcattaccttttcttcctacatggaatcaatcagcaaaattcattgttgcattttacagtttaaaaaaaatgtgcatttattgttcaacaaattgctgtacgtagtgatgcgtacctgcagctccagctacttaagaggctgaggcaggaggatcccttgagcccaggagttctggactgtagtgccttatgattgtgattgcacctgggaatagccactgtattccagcctgggcaacatagtgagattcccatctcttttttaaaggggggaggattggtggacttactaaacagttttaatcaaaacttaatttttaaaaaagacacattagagcagttaaaactttgtgttgatcatcttaacatttttaagggtagtgtaattattcttagtccatatttgtgtactctagtttcctagccctgtctctcaatgctgttttgctgatatctctaatagtcttattttaatcttgtcaaaaggagcacttttgaggttaataaggtttaaattagtaacccccattgactctagtctacaatactataattttttaaatggcaaaataccctatgggaactaaggtgtcttaaaagcttagagcaaatcctgttaaatgggactaagtctcagttcttttttaacaagacaaaaacactttatgtagtctcttttctttttcagtgtttctcaaaatttcaattttattccattctggtacagaatacaaacttacccaataaaaatagctccgttgaaagagctttcccacaaattgaaatatttaaagcacagatacaggcttgtgtgctgttggagcatacattgattgatttgttcagttcctcagtgttgtagggaaagatgtcagcattatctgattttcaagctatgtattcagtgattctaattttctaaaagcctcgaaagctgagctgttttttgttctgacccctcagtttgttgagagcctagtttaaagatttccaatagatataacaaaatgaacaaaatttagaggactcatttatttcccccaagcaagtcagtgccacagtgggaccctaacataaatttatcaaagtgtttaaattccatgtagtgaatgaaagtaaatcatctgaaactggtataaaataggcattaaacattgtccaagctagagtgcagtggctatccaccagcatgatcatttaacacacagaagcctgaaacacctgggcttaatcctgcctcggccttctgagtagctgggactacaggcacatgccactatgccttgttaaattaaggtgtttagctcttcttcccattccctgcacccttctgagagagcttatactgaaaactctgcattttgtgtccttgactttgcacggggaggcaaaagatcacagttgaaagaaagtgcatgtacccactttggaaatctttttccatttttaaattcctgcagttatggatgccttgatattgtggtagacagttgatagtggccagattgttctgtattgtaattttttttttctttttatggagaatggggactccctatgttatccaagctggtctcgaactcctgcgctcaagctatcctctcacatctgcttctctatcatatcttttttatttaggcatcttttcttctgctttctagtacttggtcttttgtttatgagtacattcagcttttctgggtttttttgttgttgttactgtttttgagacaaggtctcgctctttcccctaggctggagtagtgcagtggtgcgatctgcagcctctannnnnnnnnnnnnnnnnnnnnnnnnnnnnnnnnnnnnnnnnnnnnnnnnnnnnnnnnnnnnnnnnnnnnnnnnnnnnnnnnnnnnnnnnnnnnnnnnnnnnnnnnnnnnnnnnnnnnnnnnnacactggtcttgaacccctgaccttaggtgatccgccctcctcagcctcccaaagtgcactgcgcccagccttgatctcttgggctcaagtgatcctcccacctcagtcttctgagtagctaggaccccagaagtgcaccactatgcctagctaacgtttttgaagagaggggggtctctctttgttgttctctcttgtgtcaaacttctgggctcaagtgatccctgtctttgcctcccaaggtattaggattacaggcatgagtcatgtacctagtggttttctgctgttcagatggaatcctaaaccttacccttcattgttatttccatgtttatatgagaaagatatagtagtccctagacttaaggggtagcccttactgacttatgccatagactaaagagaaactgttagtttgaaaatgttgaaggcagtagtgtattaacattggttctatttattgtctttttttaacttttgattattagacattggctatatcattggtaagatggagctgtaccatcttaaaaatattctaataaactatattttcatagtagataattcatattgttatgcacaagtcatggaatggtgaactacatacttgttggaaataaatcgttcatgtggaattgtgcagactgtatgttaagagcaaacatctttctacttacagaagtatgctcttagggtcagaatttcaatcatgaggtcaggagattgnnnnnnnnnnnnnnnnnnnnnnnnnnnnnnnnnnnnnnnnnnnnnnnnnnnnnnnnnnnnnnnnnnnnnnnnnnnnnnnnnnnnnnnnnnnnnnnnnnnnnnnnnnnnnnnnnnnnnnnnnnnnnnnnnnnnnnnnnnnnnnnnnnnnnnnnnnnnnnnnnnnnnnnnnnnnnnnnnnnnnnnnnnnnnnnnnnnnnnnnnnnnnnnnaaaaaaaa

SEQ ID NO: 8702 - DNA, 744 bp, Macaca Fascicularis
  misc_feature (1)...(744): n = A,T,C or G
ggatgaagcaacgtnnnngnnnattttgggggaaaagnnnnnttcagagagttattatatatatatatatacacacacacacacacacatatacacacatataatggaagcaataagtcattctaagagcttgtatggttatggaaaaaaagctgacattgacgcagatatattgtactctttctaaaaattaataataataatgctaacagaaagaagagaacagctcatttgcagtctacaactagtagagactttgaggaagaattcaacagcgtgtcttcagcagtgttgagagtcaagaaagaagttgaagttgcctagaccagaggacataagtaacatgtctcctttaactggcatgcccctgaagtggagaagggtgcagcaggctcgaagacataagtcattccaatcagccaactaagttgtccttttctggtttcatgttcaccgtggaacattttgattatagttaatccttctatcttgaattttctagagagttgatgaccaacaaacgtatgtttcccttcgtgaattaataaactggtgttctggttcataccttggctttttgtgaatcccattgatgtgattcagccaccctgtatttgatgatgcataggactactgacaaaatcacttcgaccccgccaagctgctgccttctcttgccccccctcatccccagccaggcctcactcttgctaattcctttagttcttttagtcaatatatttt

SEQ ID NO: 8703 - DNA, 699 bp, Macaca Fascicularis
  misc_feature (1)...(699): n = A,T,C or G
ctgccgccagggccccagtgtggtttctgcttgggcacgtgcggtatgcgggtcccacgactgtgctggtcgcccggctcacnttgtccaggagagaccgtgtcgctgagctgtgcgcggtctctagagtatgggctgccaccacaaagcaccacaaaccaggtggcttagaactgactgcaggaatgtctctggtctggaagccagaagtgcaaaatcaaggtatgggcagggccgtctccctccaaagaccctccctgtccccggtggctcctcgtcggcttctttggcctgtggctgcctcacccgacctcagcctctgtcatcacaggacactgtgcccacgtgtctgtctccacgcagcattttcccagtcacactggcttagaaaccaccccgagggcctcagcttaacttgattagatctgcaaagactgtatttccaggctggtgccatggctcacacctgtaatcccaacattgtgggaggctgaagcgtgtggatcattggaggtcaagagtttgagaccagcctgaccaacaacgtgaaaccgcatctctactaaaaatacaaaaattaatggggtgtggtggtgggtgcctgtaatcccagctactcaggaggctgaggcaggagaatcccttgaacccaggaggcagagattgcagtaagctgagattgcatcattgcacaccagc

SEQ ID NO: 8704 - DNA, 741 bp, Macaca Fascicularis
  misc_feature (1)...(741): n = A,T,C or G
atcgaagactaacaaagcaaaaacccttgctacatgggcaacaaaagaactgaggaaactgaagaaccaagcttgatctgttaccattgggatgataacctgaggacccccactggaaatctccaatcttttgaaaaannnnnnnnnnnnnnntgnnnnnnnnnnnnnnnnnnttgggaatgagaggatgagtgagtgaggcttnnnnnnnnnnnnnnnnnnnnnnnnnnnnnnnnnnnnnnnnnnnnnnnnnnnnnnnnnnnnnnnnnnnnagctaagtaagcannnnnnnnnnnnnnnaccgtaacatcggccatcttggaaaagagaaaaacaatggagttacttattaaaaaagaaagannnnnnnnnnnnnnnnnncaggagaggctagaagtagcttttctgtcttttggccggtgccgagtggaatgcctggtttgggggaggaggagggactgggttcagctgtggtgctttgttgtnnnnnnnnnnnnnnnnnnnnnnnnnnnnnnnnnnnnnnnnnnnnnnnnctcaagcccaccttcgctgtacctttgccacatggtactctatgcttgccggctagaaggagggtgagggattttttacagtctgagaatgagtgtgtgtgagtgagnnnnnnnnnnnnntctcaacttnnnnnnnnnnnagtttctttttcccagaaaacaaggggttagatgttgcatttcataaaactaaccgaagttctgtcta

SEQ ID NO: 8705 - DNA, 625 bp, Macaca Fascicularis
  misc_feature (1)...(625): n = A,T,C or G
gcaggcannnnnnnnnnnnnnnnnnnnnnnnnnnntgagttggagttttgctctnnnnnnnnnnnnnnnnnnnnnnnnnnnnnnnnnnnnnnnnnnnnnnnnnnnnnnnnnnnnnnnnnnnnnnnnnnnnnnnnnnnnnnnnnnnnnnnnnnnnnnnnnnnntgcccaccaccacacccgtctaatgttttgtagagacagagttttgccatgttggccaaactggtctcaaactcctggcctcaggtgatctccctgcctcggcctcccaaggtnnngagattataggcgtgagccactgtgtctggtcaccatgagtttttatggagctcctgttgtgtcgcaaggaattgtgtgcaacttagacagatgggagataagtaaagagggttctttctagccttaaggaaatttgaagcaaggagaggacagacaggaatcagaggttcacggaagaactgataaagatttgtgtatgccacatttggcttctgtaggaagaagcctctgtatgtatcatttagtaaatagctaggcgcgnnnnnnnnnnnnnnnnnnnnnnnnnnnnnnnnnnnnnnnnnnnnnnnnnnnnnnnnnnnnnnnnnnnntgagatcagcctgggca

SEQ ID NO: 8706 - DNA, 778 bp, Macaca Fascicularis
tctgacaccagctgtctgtcccttgagctgtaaaccagagagctgctgggtattctggcctagttccttccacaccctcacccattgctctcaacccaggagcatccacctccttctctgtctcacgtgtgctcttcttctttctatagtattatatattttactgatatctaaatactgatttctgccttccttgctaatgcaccattagaagatattagtcttggggcaggatcattttggcctcattcctttaccacccccacacttggaaagcatatactatattacaaaatgacattttgccaaaaatattaatataagaagctttcagtattagtgatgtcatctgtcactataggtcatacaattcattcttaaagtacttgttatttgtttttattattcctgtttgtcttctccccagggttcagtcctcaaggggccatcctgtcccaccatgcaatgcccctagcttagagcctccttcaattcccctgtccaccacccccgactctgtgcctgaccttgaggagtcttgtgtgcattgctgtgaattattgacactcacttggtgatatgtcctatattggctaaattcaaacctggaattgtagggcaatctattaatagctgccttagagtcagtaacttacccttagggaggctggggagaaaggttagattttgtattcaggggttttttgtgtactttttgggttttttaaaaattgtttttggaggggtttatgctcaatccatgttctattcaggccaa

SEQ ID NO: 8707 - DNA, 2768 bp, Macaca Fascicularis
  misc_feature (1)...(2768): n = A,T,C or G
attttctactcgtcaggaacaatggaaaggtgaaaaggaacgaggactacaagcaagatggcggaagagggacctacacctgactagtagtcgatcttacgaggtgcgatgggattagtagttttctagccttccagtgttccttcagaatggcggaaccaggaggacgaggagactaccataaagatggcaggccacctagcctctcccggtctccgcttttcaccaccttgggcacctcgcccgcctgtggtctcgaaatccccccaaccagtggcgcacggcctgacgggagttgcagtctcccggctcacgtctaccatctccagtcgagacaatggaaggggatggggcggggccaccggcaaagatggcggctgcagggctggggcgacggtgacacgggatgtgtagtccaggcgcctagcctcttccctgcggaaataagggagaggactacggtaaagatggcgaccttgcccctcgacctctgcgccggtgcttgctgggaaatgtagttccctgccgagtgcaacagagaaagtacgtcgctgttgaaatgtgaatccctgcggacacgccaaattgcgagccgacggatacggaaagactcttttctcttctccccaccgcccacctctgaacagcctggcgggaaatgtagtcccaagctttcactcgcgagtggagggggaggatttatttcaccggtggggatcagtgaggctaggggagaaagacgtcgggcgatccaggaataaagaatgtccgcctccccataggtgaggacttcgcgtttcaggggagggcccttaaaggaaggcagcaggaatccatcagtcttgtcgaccaggggggcgtggttctcgtcgagagtgcatttacactcttgtaccctagaaagcctgggcgcctcccactcgattcctgctcctcagacctccgggaaccagtgtcttacaaggcgtgcgggctccagggaaaaggacctggagtcacagcgaatccccgccccgccccgggaagccaccaaaccttgctttttctcatctgcaaaatggggacagtagggataatgatccccacctcgaagcacagttgggagtgttaaacaagccaatattcttgtcaccaaagtgcccaactctggcatggggcacgcggtggtagatccctttctaaggtcccttcctgcccagccgttctgggagcccaggaatccatgatgccggacggagttagcttctgtgagaagaaaactgacgggcaggctcctcccagcttgaaccgaccccagcccctcctcatcggggtcctccagcgtctgttaccgagcactgctgccagggggcgctcaatctccattcgactggggtactacaaacacgatttccgcaacgtggagttgcaggcgctgcacgctgtccagcctcatcccctgcctgatttccagtcagccttggaggcctagacacttcaactgcctatgcaaatggaacggcttctcatctctctgccgttttttgtttttttgtgtgttttaaggtcttgctgtgtcgcttgggttggagtgtagtagcaggaccagtttgctgcggcctcgacctcctggacttaagcgatcctcctgcctcagccttttgaatacctgggacttcaggcgcgcaccaccacannnnnnnnnnnnnnnnnnnnnnnnnnnnnnnnnnnnnnnnnnnnnnnnnnnnnnnnnnnnnnnnnnnnnnnnnnnnnnnnnnnnnnnnnnnnnnnnnnnnnnnnnnnnnnnnnnnnnnnnnnnnnnnnnnnnnnnnnnnnnnnnnnnnnnnnnnnnnnnnnnnnnnnnnnnnnnnnnnnnnnnnnnnnnaatcttatgaggttgaattccattttagagacgaggaaactgggaccctcaactgtgcagaacggatgagtggtactgccagaattcaaacccccgactcccgaactcatgctcagaactactacaacgttcacaaatggagcaaatccagtcttgtgtgcatttagtttggcatagcaacaacaccacatttctcaggcaaaatggatttccagcttctcttgaaaaatcctgaaatctagtccaggaccgtggacagtatttaaaaaaagaaaatgaagaaaaggccgggcatggtggctcacacctgtaatcccaacactttgggaggccaaggtgagtggatcacttgaggccaggagttcaagaccagcctggccaacatggtgaaaccccgtctctactaaaaatacaaaaattagccgagcgtggtggcgggcatctgtagtcccagctactcaggaggctgaggcacgagaattccttgaacctgggaggcagagactgcagtgagtggagacaatgccactacactccagcctggacaacagagcgagactcggtctcgactcggtctcaaaaaaaaaaaaaaaagggccnnnnnnnnnnnnnnnnnnnnnnnnnnnnnnnnnnnnnnnnnnnnnnnnnnnnnnnnnnnnnnnnnnnnnnnnnnnnnnnnnnnnnnnnnnnnnnnnnnnnnnnnnnnnnnnnnnnnnnnnnnnnnnnnnnnnnnnnnnnnnnnnnnnnnnnnnnnnnnnnncagctactcaggaagctgaggcaggaggatcacttgacctgggaaggcagagattgcagtgagccaaaatcgcgccactgcgctccggcctgggcaacaagagtgaaactccgtctcaaaaaaaacaaaaaaaaaaaaaaaaaa

SEQ ID NO: 8708 - DNA, 763 bp, Macaca Fascicularis
  misc_feature (1)...(763): n = A,T,C or G
ggtgcannnnnnntccagctggcgggagtannnnnnnnnnnnnnngcggcggcacctgcagaggagccagagccgggcccctcacctgtggggccagtccgtcacccnnnnnnnnnnnnnnngccaggccagctccccagctgtggtccttcagcatatttctgtacaaaagatcaacacaccttgctgatggaggtgcccnnnnnnnnnnnnagtctgggggcttggaaatcagctttgatgtttaccaggctgacgctgtggccacnnnnnnnnnnnnnnnnnnnnnnnnnnnnnnnncccggatgtgtattagtggatttgatgagcctgtcccagacctctgcagcctcaagcggttgtcttaccnnnnnnnnnnnnnnnnnnnnnnnnnnnnnnnnnnnnnnnnnnnnnnnnnnnnnnnnnnnnnnnnnnnngacttcacgttnnnnnnnnnnnnnnnnnnnnnnnnnnnnnnctctgcaggggatagagctcgctccaggggaccgggactgtctgttctcagggaccatctcggctgcctcctgtaccgactaacctgtagcttcaggggccagtatgggccttggccctgagtgtctgatactcccagagtaaaactgtgaccctctccccttccctgctgccttgcagtgacccctctggaactcaggactcgattttaaggacccaggaggtggggcagaagagaggactctgtgcctttaaagagagggtgcctgcttcgtgccataaagcc

SEQ ID NO: 8709 - DNA, 1175 bp, Macaca Fascicularis
gattgtgaagtaagacatcattggaagtgcaccaaaaatgaaaaatgcagggactgaacagagaagctgagtggaagagaagccaggcacgaccagacaccaaaaccatcacagaggaagcttgaaaagaaagacttcatgaagactgtcggtcaagacacaaccggggaacagaaacatctcagcagaatattcagacagtgctgatcaataaggggaactacggggtcgatagctgtcgagacccactccgtgtgcagctcacgtgcttctcacaactccaggaagcggatgttgctcttattcgtcacttacagaaagctgaggatgagaagggtgaggagcttccccggtcacaggaccagcctcctgctgcagccaccgctctctgaaccaccccattcaaacctacctggctgggtccccagaattcccccgggagcctgctacacacagatgccaaatcagtatcgccgaggtaagggacatctatctggggaccccaccacttcatctgttctcccatgcacggatgtccactttcccctcctaagcacacacgttagggttgcagcactggcctccggccacccccaggcttcacaagcttcttctcatggggaaggaagggtgactcacctggcgggtcagcctggtgttccctgggccaggagttccaccttaacacacagccaggggcatccacggtcggaggatgtgggagcgtctgtccctgcagctggctggtgaggtcagggccgtacaggtcaagatctaggttccccagcaacaaaggggattctggactttgatcctcatggttcctcgaatctgtgttctgtggttttctttcccagaggagaggtgatgtgactaattcaaaattcctaagcaccatccttacataagctctggcagaagagatgggactcgaacctaggtctttgtttgttctgtttgcccacattgcctccctctccttccagaattcacgactctcatttttttaagacatgatattttagaaaattggcccattttctaagaaagaatgcagacattggccaaacaaaaattaaaattctaataaagcatttatgagtccattttaaaaaaaaaaaaaaaaaaaaaaaaaaaaaaaaaaaaaaaaaaaaaaaaaaaaaaaaaaaaaaaaa

SEQ ID NO: 8710 - DNA, 726 bp, Macaca Fascicularis
  misc_feature (1)...(726): n = A,T,C or G
gactacaggtctcactgnnntagaatcaaggctgnnnnnnnnnnnnnnnnnnnnnnnnnnnnnggggagactctgtctcctgctnnnnnnnnnnnnnnnnnnnnnccacatcctttnnnnnnnnnnnnnnnggtccctactttcttgctggctgtaaactaaggccacttnnnnnnnnnnnnnnnnnnnnnnattccttggctcttggcctcctcctccatcttcaaagctagcagtttcagtctgtatcacgaaacatttctctgnnnnnnnnnnnnnnnnnaaggttgtccctaaggactcatgagattaggttgggnnnnnnnnnnnnnnnnnnnnnnnnnnnnnnnnnnnnnnnnnnnnnnnnnnnnnnnnnnnnnnnnnnacattttgccatgtaaactaacnnnnnnnnnnnnnnnnnnttaaggaaggaaactcttttgttggggaagnnnnnnnnnnnnnnnnnnnnnnnaccccaaccaaaagccaaaaaccaaagcaagacttactaatgcatatcaaataaattaaatgtgcaaaatagtgaatctcagttatcttaaatattccaatactatttacaaaattattctaatgctcacaccttccaactcaaaattagtaatctaaaataatctccatatcctagatggaaaccctcatnnnnnnnnnnnnnnnnnnnnnnnnncctaaatggtttcagtggcaaacacataacat

SEQ ID NO: 8711 - DNA, 722 bp, Macaca Fascicularis
ctgggggcagatgaggggaatacttcatgcaaggaaaaaagtaacagatgcaaaagctccccgtccagctttgacagccagctgtggtgtcagcccctcggcagggtgggcctgatgacagccctgtccctccctgccttggccttgctcagggccactgaaggtgtccgcagaggcctgccttccggattccaggcgggcacgtgctgcaaaccctgcccgggcctcccttggtctgcccagcctggatcagtagatacttgaacgagtccccagtctgcgggaggcagcggtggggccatggacccacgcggggggttccagggtcacacaccacgtaacagacaaaaatacacacatgtgtgtttttctttgcaatacttgaaatattgccactgtgcttggacttagaagaagaaaatccccgtgatttcttcctcatcaccttgatggctttattctcaccttgtggggcatgttagtatttattgcttcatggccgactggaatcttgagtcttgggaagctggcactatggggatcttgcctggcgtcctggtcctcttgcttccgtcgtggccgcgtgtgcgtgtgtccaagcaggtcctgggcgcctcaactgccgcccctggttgaatgttctgttgatagtgctggaccctttgtctattttaaagcaaattttgtgtgatttcctgccctttgcgttatattgtgtaata

SEQ ID NO: 8712 - DNA, 709 bp, Macaca Fascicularis
  misc_feature (1)...(709): n = A,T,C or G
gcaggaaaatcagtctagttctgttatctgttgacttcccatcanctgacagtaactttcatgacataggattctgctgccaaatttatatcattaacaatgtgtgcctttttgcaagacttgtaatttacttattatgtttgaactaaaatgattgaattttacagtatttctaagaatggaatcgtggtatttttttctgtattgattttaacagaaaatttcaatttatagagattaggaattcccaactacagaaaatgtttgtttttagtgtcaaatttttagctgtatttgtagcaatcatcacgtttgctagaaatataacttttaatacagtagactgtaaataaaacactcttccctatgatattcaacattttacaactgcagtattcacctaaagtagaagtaatctgttacttattgtaaatactgccctagtgtctccatggaccaaatttatatttataattgtagattttatattttactactgagtcagttttctagttctgtgtaattgtttagtttaatgatgtagttcattatctggtcttactctaccagttttctgacagtgtattgtgttatctaagtcattaactttgtttcagcatgtaattttaacttttgtggaaaatagaaatacctttgttttgaaagaagtttttatgagaataacaccttaccaaacattgttcaaatg

SEQ ID NO: 8713 - DNA, 2203 bp, Macaca Fascicularis
  misc_feature (1)...(2203): n = A,T,C or G
cttcatacagtgaatacttgaatgtgcataaaaatcatctggaaatgtttaaatggtgtttcccaggacctgtctctggagattctgattcggttagttggtctggggccaatgaatttgcatttttgacaaggtgctgccgaggctgcttgcctaaggactacactttcagggacactacctcagcttattcagaggtaccatgtagtgtgattggatggctcctatacgtagttaaggtgctttcactaaactattatgttaggcacatcatctactctctcagatacgttttcattagtgattaatctctttatcaaaataggctttattttcttaaaagacgcctgttagcacacctgttgatatttaatctcctacttgtctttgaactaagatatcctaagatctagtcaggtctcctgttaaaccttttgaacttagacttttcctctctcctttttttctacatgtattactaatttgtgactttttagtcgaatatgtatatcattgttcttcattttatttatacctaaatgcatcttgtcttcacacatagaaaattttgtgattggtttttttcactttagttaagaagaaataaaattgcttataagaaattgttggccaggcgtannnnnnnnnnnnnnnnnnnnnnnnnnnnnnnnnnnnnnnnnnnnnnnnnnnnnnnnnnnnnnnnnnnnnnnnnnnnnnnnnnnnnnnnnnnnnnnnnnnnnnnnnnnnnnnnnnnnnnnnnnnnnnnnnnnnnnnnnnnnnnnnnnnnnnnnnnnnnnnnnnnnnnnnnnnnnnnnnnnnnnnnnnnnnnnnnnnnnnnnnnnnnnnnnnnnnnnnnnnnnnnnnnnnnnnnnnnnnnnnnnnnnnnnntgacagagcaagatcctgcctccaaaaaataaaatgaaataaaataggccagatgtgnnnnnnnnnnnnnnnnnnnnnnnnnnnnnnnnnnnnnnnnnnnnnnnnnnnnnnnnnnnnnnnnnnnnnnnnnnnnnnnnnnnnnnnnnnnnnnnnnnnnnnnnnnnnnnnnnnnnnnnnnnnnnnnnnnnnnnnnnnnnnnnnnnnnnnnnnnnnnnnnnnnnnnnnnnnnnnnnnnnnnnnnnnnnnnnnnnnnnnnnnnnnnnnnnnnnnnnnnnnnnnnnnnnnnnnnnnnnnnnnnnnnnnnnnnnnnnnnnnnnnnnnnnnnnnncaaaaaataaaaaattaaagttaaataaaataagaaattgtttatctgtaggcagctttggatctttaactgtattgtatattttatctgcattcagtctgtatgttgtgattatattaaattattcaaacagtagtgatcttaaggtgactgagtgaagaagtgtcactgtatttaaaatcttaagccattttcagtagaactttgaaatagtatagttttgcatgttttatgtttattttagcggaaacctatgatatggaacatttatatctttctttctattttaggtgcgcatagcagcaaaattcatcattcatgcccctcctggagaatttaatgaggtttttaatggtgagtgtttgatttataacactaggcttgatgtatcaagccctctttttaaaataataccaaaataatcaaagtaagctaaggagagtatgcagaaaaatctgttttctgaattacaatgaaaatatgttagcctggattttataatggctagaatataatgtatttatatatgataattctgttagcaaattaacccttttaaagactaaaataaattttattcatatcactgactagaatatatcctcattctgggaaaggagagtctttttggtaaattgttttatttaagtaaaactataagcacatgtagtagatatttcttaggccgggcgtgnnnnnnnnnnnnnnnnnnnnnnnnnnnnnnnnnnnnnnnnnnnnnnnnnnnnnnnnnnnnnnnnnnnnnnnnnnnnnnnnnnnnnnnnnnnnnnnnnnnnnnnnnnnnnnnnnnnnnnnnnnnnnnnnnnnnnnnnnnnnnnnnnnnnnnnnnnnnnnnnnnnnnnnnnnnnnnnnnnnnnnnnnnnnnnnnnnnnnnnnnnnnnnnnnnnnnnnnnnnnnnnnnnnnnnnnnnnnnnnnnnnnnnnnnnnnnnnnnnnnnnnnnnnnnncaaaaaaaaaaaaaaaaaaaaaa

SEQ ID NO: 8714 - DNA, 657 bp, Macaca Fascicularis
  misc_feature (1)...(657): n = A,T,C or G
cagcattgagggtaaaataggatggagtgctctgttgatcatttgggagatgtaggctnnnngatttgtgccttgggatnnnnnnnnnnnnnnnngtccatattgcaattatgattttagaaggaactnnnnnnnnnnnnnnnnnnncaagtaattattttctttaccttgaagtcatatttgagttgtaaccccagagttaatttctcattgtnnnnnnnnnnnnnnnntatgtaacattacttctcacgcgaacccctcgctatctgttgtggttctgagcagaggatgtcttttgattgcagtatgtaaggcaacccctgtggaaggaggtgaaacaaggagaaagagaacaaagcctgccggaccagaggcgaagaggtggatattttactcacacccacagcagcaagaannnnnnnnnnnnnnnnnnnnnnnnnctgtaatagcactttggannnnnnnnnnnnnnnaaaaggctagtgtttccatttatttcacgttggtgaatgggnnnnnnnnnnnnnattcacggaggcataactnnnnnnnngaattttgagagggtgtagaagatgactttagagatgagtggttttgtttatgtgtctaatgatannnnnnnnnnnnnnntgcaatttaaaagttataataaag

SEQ ID NO: 8715 - DNA, 752 bp, Macaca Fascicularis
  misc_feature (1)...(752): n = A,T,C or G
cacaaagctgattgatagttcagatttggggcccccannntaggcccactgaatcagaatnnctgagaggaggctcaaaactctnnnnnnnnnnnnnnnnnnnnnnnnnnnntgtgctcctaacattgagaattgttgccttcataatggtgtttgtcactacacaagtgttgtaaacctctcnnnnnnnnnnnnnnnnnnnnnnnnnnnnnnnnnncaaaatatgcatgcatgcagtattcaatttgcattttccagaaactctaggtaatttccatgctcctaacattgagaattgttgccttcataatggtgtttgtcactacacaagtgttgtaaacctctctaaatggtttcttcnnnnnnnnnnnnnnnnnnnnnnnnnnnnnnnnnnnnnnagtattcaattactgtttagcactatatcctcttgagaggagatcctggggcatggtgtcaccccttccaacttcccctcctttgcttctccatttcccttcacactttatttttagagtccatccaagtaagaaatgtatccatatatatttttattattgtgaaaaacttgaaagttcatacctaaccattataatgcacattcttattgataaagaaagtaaaataatgtttgatgtggtttatattatgtattttgttctttgtaaaggaactaaagtgannnnnnnnnnnnnnnnnagtaaaagaaatgttttcagatgnnnnnnnnnnnnnnntcaccatgttgaaag

SEQ ID NO: 8716 - DNA, 1594 bp, Macaca Fascicularis
cattaaatgaacttgaaattctgagaaatagtgctgttagtcaagaaagaaagctacaaaattccatgctgaaacacgccaacaatgttaccatcagagagagcatgcaaaacgatgtgcgcaaaattgcatcaaaacttcaggaaatgaaagaaaagaaggaagcccagttaaataacattgacagacttgccaatatgatcacaatgatcgaagaggagatggtgcagcttcgcaaaagatatgaaaaagctgttcagcatcgaaatgaaagtggcgttcagctgatagagcgggaagaagaagtatgcattttttatgaaaaaataaatatccaagagaagatgaaactaaacggagaaattgaaatacatctactggaagaaaagatccgattcctgaaactgaagattgctgagaagcaaagacaaatttgtgttacccagaaattactgccagccaagaggtccctggatgccgacctagctgtgctccaaattcagttttcacagtgtacagacagaattaaagacctggagaaacagttcataaagcctgacggtgagaacagagctcgcttccttccagggaaagatctgaccgaaaaggaaatgatcaaaaaattagacaagctggaactacaactggccaagaaggaggagaagctgctggagaaggatttcatctatgaacaggtctcccggctcacagacaggctctgcagcaaaactcaggactgcaagcaggacacgctgctcttagccaagaagatgaatggctatcaaagaaggataaaaaatgcaactgagaaaatgatggctgttgttgctgagctgtccatgaaacaagccctaaccattgaactccaaaaggaagtcagggagaaagaagacttcatcttcacttgcaattccaggatagaaaaaggtctgccactcaataaggaaattgagaaagaatggttgaaggtccttcgagatgaagaaatgcatgccttggccctcgctgaaaagcctcaggagttcttggaagcagataatcgccagatgcccaatggtgtttacacgactgcagagcagcgtccaaatgcctacatcccagaagcagaggccactcttcctttgccaaaaccttatggtgctttggctccttttaaacccagtgaacctggagccaatatgaggcacataaggaaacctattataaagccaattgaaatctgagtaggtgaacaaatccaggcctctcaaggagaggacttcaaccaggcttccttgtacccacaggtgaaaaatgtgagcataatacttccaattttattgataagtaaggtaaccacaattagtcaacaacagagtacaacatggtttctttttacctaccaactactatacctttcatgacattgaataggacacagaactgtcctacatttatatgtcaaagtatatatttgaattgcttatattttctttttcactctttatgttgagtacattccagaaatttgtagttggcaaggtgctataaaaatgcactaaaaataaatctcttttcaatgaagtacaaaaaaaaaaaaaaaaaaaaggccaca

SEQ ID NO: 8717 - DNA, 691 bp, Macaca Fascicularis
  misc_feature (1)...(691): n = A,T,C or G
gtgtatgactgcacacctgtgtatcactgcacacctgtgtatgcccaggcacacctgtgtatcactgcacacctgtgtatgactgcacacctgtgtatgactgcacacctgtgtatgactgcacacctgtgtatcactgcacacctgtgtatcactgcacacctgtnnnnnnnnnnnnnnnnnnnnnnnnnnnnnnnnnnnnnnnnnnnnnnnnnnnnnnnnnnnactgcacacctgtgtatcacnnnnnnnntgtgtatgcccaggcacacctgtgtatgactgcacacctgtgtatgactgcacacctgtgtatgcccatgcacacctgtgnnnnnnnnnnnacctgtgtatgactgcacacctgtgtatcactgcacacctgtgtatgactgcacacctgtgtatgcccatgcacacctgtgtatgactgcacacctgtgtatgactgcacacctgtgtatcactgcacacctgtgtatcactgcacacctgtgtatcactgcacacctgtgtatgactgcacacctgtgtatcactgcacacctgtgtnnnnnnnnnnnnnnnnnnnnnnnnnnnnnnnnnnnnnnnnnnnnnnnnnnnnnnnnnnntgannnnnnnnnnnnnnnnnnnnngnnnnnnnnnnnnnnnnnnnnnnnnnnncacccccatnnnaactccnnngcacaca

SEQ ID NO: 8718 - DNA, 726 bp, Macaca Fascicularis
  misc_feature (1)...(726): n = A,T,C or G
agtacaaggtatgcagcncaggaagtgacccgcctgatgtgtgctataacacattagaactacttgatccccatggaaaacaggagagtatgtaactctaggaatcaaggaactggtctggcaggaagacctgggtcgtgatgatgagcgtgagaactctcactagtgagtgaggttctcaaaggggggaatgaggagagaggccatttctcttaccgtctcttgtctctgaagagaaggggaagtaaaagttgaaaaacaggaatgaagtcagtggcaaggccagctggtgccactgatgaccaggcctgaggttaaaaattaacccccactttaaccacatgtgttctcaatctatcacgaccctttcacgtggaacccctttagagctgtaaggccttaaaagggccaggaactctggtttcagggagctcagttcttgagatgtgagcctgccaaagctcccagccaaataaagccaaatccttccttaacccagtgtctgaggggttttgtcagcagcttgtcctgctacaatgatattacaaatagacatgttattgtgaataatcttcttaaccagcaacatttataatgggactactctctgccagacactgtgttaagtgctccatgcacactatctgccccctgccaaggcctctcaatagccttccaatgtgggaagtaggtacctttatttcgtcactgattgtcacacgcatc

SEQ ID NO: 8719 - DNA, 751 bp, Macaca Fascicularis
  misc_feature (1)...(751): n = A,T,C or G
gaaagcaagcagagaaatgcacnatcnttaagattttattttatagggtcttatctatgcaaagactaaactaagttgtgcctacatnnnnnnnnnnnnnnnnnnnnnnnnnnnttattattctattgatttaaagaaaactaaccttgacattttagtgtgagagtacaccgaagcctaactattattatcttgaaagcacgtgttgttatgggtattaagacatctgggccttctgctgttgtaggtgtgcgtccttgtgggttttcctcaactataaacatctttggaccctgggttgcaactggcaaggagcgtgccttgctagttctaagatggagctgaacttaaaatggctttactctggctgtccnnnnnnnnnncttccctaacaattccacttatgtggtacttagaatagctaaattcatagagatgtaaagtgaaacggtggttgccagggactggggagaaggcggaatggggagttgttgtttaatgggtagagtgttgcagttttacaagatagaaagagttctggagatggatggtggtggtggtggtcgcacaacatggtgagtgtatttaataccactgaactgtatgcctaaaaatgactaacatgtaaacattatgtgtattttaccacaatgagaaaaagannnnnnnnnnnnnnnnnngtatgatagccagtagttaatatccctaatatataaaacactgtgataaatctacgagaaaaatataaaca

SEQ ID NO: 8720 - DNA, 749 bp, Macaca Fascicularis
  misc_feature (1)...(749): n = A,T,C or G
acagtggannnnnnnnnnnnnnnnnnnnnnnnnntcccncnnncagttccannnnnctggacaaggcctggnnnnnnnnnnnnnnnnnnnnnnnnnnnncacccactgccctctcagtatcaccagtctcaaagacagnnnnnnnnnntgtaacccaacctctcggttgactgatagcagaacagctctttttggtctgagaaggcaggataagtgaccacgtatttatgccactacctccaccagggagagtccttctccacaggcttgataaattcannnnnnnnnnnnnnnnnnnnncctgactctgctactcccgttcttcctgctttcctgctccctatctcagtctgcactgaccccaggnnnnnnnnnnnnnnnnnnnnngagcccagcccatgggctttataaacacccaagaaccgtttcagatcttctgtntnnngatgcaggtagttttaaatttttctcagttccagtgatagaaaacccacacaatacatcctctgccagtcttaatagaataccagaggtcagaggggcctcagagaagttctgacccagtgctgctggggaagggaagtgactcaccctgggtcagcctgccatttggggaaagagctgaggttcttaccctcgttgcatgctgccacctctccttagtcagtgctcttgtacatccacacagcaccctcaggacccatagtcaccaccaaagactcaaccctaaggcccttcaagatctcaaa

SEQ ID NO: 8721 - DNA, 2082 bp, Macaca Fascicularis
tgatgttcttaccctgtggactgaggcacacctggggctgtgcaccccaagatccagctgggcattcttatcctgtcacctgtggcacatctgtggccaggagtttttatcctgtggacagcagcacagctgtggctgcacactagggacccagtcgggcgttcttacttcgtagactgtggcagggcggtggcggggcacccatgatgcaggcgagtgtattaccctgcgaatggcaacacaggctgcgcagccaggactcaggcgggagtccttactctgggggagtgcttaccccacggactggggcacagctatggctggcacaagaatccaggtgggtgttcttaccctgcagacagtggcagggcttctcatggagggctcgggtgagcggtctcctcctgtgggccgtgttactgttgcgtctgtgcactcaggacctggtggttgggggtgttcctcttctgctgattgtgacacagtgccagctgcacggaggaccagggcggatgtcttcactttgtcaactacagcactgctgcagcagtgcaggagaaccagacctggagccggatagaggaggtcccttcccttctgactgcaacacagctccacctgcaccttgaagacctgggtgagcatctttgccctgccctgtgccattgttctggccatacaccaacccggacaggttttcacacctctgtgctggatgggctggctcagctgattgtgcactgtgaggtgctgcaggaggggcttcgaggacacattcttcttgacttctcagcataggagtgtctcacattcagtccacgtccctgtcctagtcctcctctctgctccttccacactcctcacggtggtctcctgcacgctcgtggctgtcagtaccagatgagggcaacttctgcattttctcaatttcaagcactcctctccacttacctacctagtatctctacggggtgtcttcccgtcatcctgcactcaacgtgactgatggtttactcccaacctgctctgcagtttccctgactttgatgatggcaacttcatccttccagttgcttaagccagataccgtggagtcattctttaccattctgttcaacttcatacctattcctcaagaattctgttttctctatctctgaaatgtgtttcgaagcagctacttcttaccttctttcgcggattcgggtcaccattcacactcacttggattattgcagtaatttcctcactgggttccatgtttccagcttttctgtctgcagtctgttctgttttcaacatgtggccggagggatcctgttaacatctaagtgaaatgtatcatttctctgcagtggctccctagctgctcagagtaaaatctaaagtttttacaatggcttgaaaggctctccgtaaccttgtcccctcccacttacctccctgtctcctctcctccctctgacgctcagcccctgtgtattttagctattgaaggaatatgtggacacactgctaatttattgtctttgcagaggcttgggttgtgcattcattatttcaaacatttatgggtggagtctggtaatcacccgtcatatttgtgagtccccctccaagtgggtaaatgtactaggtggagtatatgtcctccctcacgtggtatgctcttgatacagagccaaccaggtagtaccgttggtcctgctttgtcggcgagggaatgtagacccaaaaatgaagaaagttgtccagagttacatgctgggaagtggtggagctagaattcaaacccagagtgcaggctttgtctgcacctcagagagacacccctcttcctgaagtgctccttgctggttatctatgaggctgaagccctcccctctttcaggtctttgctgaattagaaccttctcagtaaggcaaggctgatgctgagcaccccatttaacattgtccactctcccaagaccctcttctcagtcactcatttcaggtgtctagcacatcatgccctgtaataaatttttctagtatttctcaatgaaaaaaaaaaaaaaaaaaaaaaaaaaaaaaaaaaaa

SEQ ID NO: 8722 - DNA, 2925 bp, Macaca Fascicularis
  misc_feature (1)...(2925): n = A,T,C or G
agcagaatccagcccggtgcctgcaacaaagggccagaccatggagaaggaagatccagcaccaatggcaacaaggaagctctgaatggaacagttgaggaaacaggatgatatcatatggaagacaaaacccagcaagactctcggaaaccaaggctgtctgagaaaggcgcctgtatggaccaccctgaccaacctctacgcaggagacagaggcccaggaaaagccagggcttcccaagcctgtactgcaaagccacggcaaggcccagacagaaacctggttccctgaggccctcagcagagcttgtccctcacaggctcttcccagttaatttaacaagttcagtactgattggacacaaactccacaccaggctgtacgccatgccagcttctgcccagggagctccatctggcagtggttgagaaccatatatagtgaccagaggcatcaagagaaggaggggcatctccctcccctgtgataatctggcaaggcttcctggagccagtggcatgtggctagactctgaagagtgaagcctctcccgaggaagagggaccggcagagcagaggtacccagggagagggcacagtgagtgtgtgaggcgccacgccagttgggtgacacactgcagaacagtgtgaatagacatgttctgtgtggctcccaggtcaagccaggcctgataaggaggctactgggtggcagatttcagacaacatgaggaagaactttccaacagccctggtgcaggctgccctggaaggtagtgagctgcccatcccttcaggcttgtggataggagctgggtatcagtgattcctccccagatggaggccgaactagagacccgtgaggatgtctattccgagaacctgaagcagaaatggccagactttgacaggcctggcacttcagtaggcgacctccacctccacaccttgtccatcttcctgggctctgcaggcccctggtggctggagtgtgggagagggaggtgacaaggcagacagaagaatgactgctttttcagttattcttctatgtatctatggcttccacccaacccggcagggtggggcgcttaaatcaggctcagaagttgtccaaagcccacttaaaaaaaattagggactgagggctgggcatgnnnnnnnnnnnnnnnnnnnnnnnnnnnnnnnnnnnnnnnnnnnnnnnnnnnnnnnnnnnnnnnnnnnnnnnnnnnnnnnnnnnnnnnnnnnnnnnnnnnnnnnnnnnnnnnnnnnnnnnnnnnnnnnnnnnnnnnnnnnnnnnnnnnnnnnnnnncagctgcttgggaggctgaagtggaaggatggctcgagcccgggaaggtgaggctgcggtgagctgtgatcataccactgcatttcagcgtgggtgacagagtgagaccctgtcttttaaaaaacaaatagggactgaggcccagagaggggcttttccaatagcccacagtccaagaggcaggttggggcttgcaggctgtgcagtcctttctaggcagcttattgagggcagactgaaggtaaacctgaaggaggtgagcctttcagacgtctcgcgggccccacctccacaggggctgtgcaggctgaggagacggggcggcgggggagggcgggggggagcgggggaggcccgggctgatgagcacctgcccttatctccccttcacctctcccttgtcatcaagcttcctcctcagccccctgtcgtgcagcttccacctcagctaacccagattcttcctgaagcactggggctcctgtgtcctgaagttctcttcaggagaatcctaaggtgaaaaagaatgtgttccctcccacctggctgcccagcacatgctgtgcagaggccaggggatgggcagggtgacctgggaaggacccaggcctgcaggtctatcgtcctgctcggtgagaccaacacagagcagcttgtgcacacactcacacccacgtgcacccacacacacccacacaggctctttccaagaacagctcttcaagcctggctgccaagataaaggagccacggggcggtcaaccccaggaggaaatatcacttctgcaacctttgttgttcagagggctttgtgaaatctccagactcttcttggaaaggatcccgggctgaggtggcagtttcccacagcgggagacatgggtgagggccacgcagcctccctggcctgggaggggaggccaggcttagagtcattagtggtggcaacagaagcttaatccttcacttccattattacctcactcaattcccacaagcctgggggtagacagaggtctccccattttacagatgatgaaacagaggttcccagaagcctagcagcttatcaaatggtccacagtgagtcagtgctagaaatgaaactgactgacttggcaccagtcacaggctgagccagcccttccccaaactgagtcctgccatggcccattctgagctccagctctgacctctatttgagctgtgtcttaccctagattgatcctgaacctagcctcagattgcctctcctgttagccatgagcccttcgaggtcagagacatgtgcacttctcatttacccctgttcctttacgtggatatacgtgtgattatttgagtaatctccattttatccactagactatatatagggccgggaactgagtctatttttgtttagcggcacttatcataatgtaataagagcaataataacaagcaagtattggccgggcgtcgtggctcatgcctgtaatcccggcactttgggaggccaaggcgggtgactcacttgagctcaggagctagagaccagcttgggcaacacagtgagacctcgtctcaaataataaaaataaaaacaaatttaaaaaaaaaaaaaaaaaaa

SEQ ID NO: 8723 - DNA, 1744 bp, Macaca Fascicularis
cttcattctgggtgcctactcttcatattattccaccagctgaatacataaacatatttttagcacaacatgaacctgttctgtgtgtgtttaaaagcctccagcagcaacttttttctctcccactgtccaaagtgggtttttccccatcccttaaaagacaaaacaaaaaagcctttcttcactcccaaattgtccccctggtgtgtgcttttggtctgtctcattacttcttgcatcttgctacatgttctgcatttgctcagagccactgggagctgaggaatttggcctgctgctcctctgggaaagtttggtaagctggtacaaggaggtgatgaacaaggccataaaccataggataaatgaaaatgagactcagctggagaaccagatggagtggacatctagctatctgtccccaagctgcaactttcctgattctctttgctttcatcgatgaatggcaccaccattgtcctaatgcaggaatatggatacctatttctgaagattcatcctttgttattcctcccaaatatggctagaccttttcacttctggttacagtatcatatttcagggtgcattcagattcaatttccaacctgtcctgaataacatattaacattactgtactacagagtagtacagaaggcctacaacctccatatgcatctcaactcctctttctgccactgcaatgcagtgcccatggcctatagttacctatgtgggctgagtactatgctaagtgttttatatgggtcttttcatttgatgcaaatagctatgctaagaggtaggcactctttttgtaccagtttccaggtactttgctcatggtcacatagctagaggaactgggatttgaatcatagtatttgcatttatcattccaattcttcaccccttcctgtgtccttacctttgccatgtgactttgtggttcccctaagaagaggtggaatccattttcccaccccttgattctaagctcagccatgtgacttgctttggtcaatgggatattaatggatatgctataaacagaagctttaaaggaatgcttgcgtatttctgtttgcactcttgtcctctcccatgaccatgaagaaaaacatgtccaggccagcccactggaggatgaaagactcattcatcagatctaagtcattccagttgtcccagccttggttatctatggtcggcttacaaccagccaaccttcagacttgtgagaccaagcaagacagcagagctgcccagctgcctagcctccaaaatccattacataataattttcaattatgtcatctttctgctaaaatccaacctatcaatcagttaatcaatctacccatcttttaataattgcatgttgcctaaagatgaagtacagacttttgggttcctgtctggcatttaaagaccttagaagtagctgctccaccctaaaaacaagtaaaaatctgaccaagctgaaaaatcaacaattctttttagatctgtcaggaagtgaggttacagggtaaaccattgccctttaaaccagggaaacagacagacagatacaaagaatgacaacttaccaaagtagaaacccacaagcagaaacctttatagaaaccaatgctgggatatgaaaagctgaactgtaattgattatacaaaagctcagtgtggacaaatctgtgaattaaaaactccaagaagctcaaaaaaaaaaaaaaaaaggccaca

SEQ ID NO: 8724 - DNA, 813 bp, Macaca Fascicularis
  misc_feature (1)...(813): n = A,T,C or G
acacttgatgggatgaggttcccaccccttcacagtgttgattgcnnntagcatgataatgaacncntaatggtatccattagctgggacttaaatgactcacttagaacaaagtacctggcattgaagcctcccagacccagcccctattcctccattgatgtgcggggagctcctcccgccacgagttaatttctgttggctgaggagggtggactctgcggcgtttccagaacccgaggtttggagccctccctggctgcacttggctgggtttgcagtcagatacacagatttcacctgggagaacctctttttctccctcgactttcttacgtaaactcccacccctgacttaccctggaggaggggtgaccgcgacctgatgggattgcacggttagggtattattaatgaccaggcaaatgccttaagtaaacaaacaagaaatgtcttaattatacaccccaagtaaatacgggtttcttacattagaggatgtatttatataattatttgttaaattgtaaaaaaaaaaaaaaaatgtaaaatatgtatatatccaaagatatacagtgtgtacatgattttgtaaaaagtttagaggcttacccctgtaagaacagatataagtattatattttgtcaataaaatgacttttgataaatgatttaaccattgccctctcccccgcctcttctgagctnnnnnnnnnnnnnnnnnnnnnnnggacgcatggggaaaatggacattttctggcttgtcattctgtacactgannnnnnnnnnnnnnnnnnnnnnttgttaaactc

SEQ ID NO: 8725 - DNA, 1370 bp, Macaca Fascicularis
aaaaacgtgcctgtaaagtcccccggcgcctcccgcctcccagcctccctgcctgccagcaccactctgcagcaccgattccaaatccggaaggggctggggggagaggagaatgaactcaggtccaagggaggtgcggagggtgcagggtggaggcgggtcgccacggcccgcaagaccctgagctgcaggtggatatgtgtgagtgtgtctacagagcgaggagccctccttccctctcctcggagcggttccacaacccccgtcttctcatccccctcttcagtctaaggggtgtcgtttccggaaactcacccacccggtggggggctttattgttttaagcgagggtccccggcttgcgcgcgctcacccatcccgcaaccctaccggcaagcggctgtttattcctgtgtcgtcttagtaaagtttcaagtctactgtgttagaaaatgactggcttgcctagctcggtggagcttcggacccctctaaggaagaaaaggaggttttgatgctcaacattgagagtgatgtgggctggactgggattgtctcaatgtggtttgttgtttgttgttgtttccctccagtttgcggggggcggtgagacctcaaattctgtttaagaagcgggaagattcactagaacttaagctctgtagcttgtgtgacaccatttccccttttcactgagttcttcagagcaggtcagcatctctattccatcacagtctgttttttgtcttgttaaaccagccttggagtcaccaaaagaatgtcttcttggggggtggcgggggaagacgaagtgggggacaattggagggaaggtgaagagagggaagaagaaagtgcaactgggaggcctttgaaaaataaataaataaaagaaaagccccttcaggtaacaatagtgagccagattctttcagaaccaggcttttcagatttgaatattgttcccacccatccataaaaatccatctatgacgaagatatagaaatgagcgagtgagtgttgtggaaatatatatatatatatatatatgtgtgtgtgtgtggtttatatataatggtgtgtataaagcttttcggggttggctatagtgtaaaaagtaatgactttattacctctgaaaggttctgtggttcacatttaacagtcttctgaattacaattcattacacaattgtgtgcgctctaacgacggcaccctatcagggccgctatctgtggttatttccaataaataactggcaacatttaaaaaaaaaaaaaaaaaaaaaaaaaaaaaaaaaaaaaaaaaaaaaaaaaaaaaaaaaaaaaaaaaaaaaaaaaaaaaaaaaaaaaaaaaaaaaaaaaaaaa

SEQ ID NO: 8726 - DNA, 767 bp, Macaca Fascicularis
  misc_feature (1)...(767): n = A,T,C or G
cagtacnnnnnnnnnnnnnnnnnnnnnnnnnnnnnnnnnnncacaagcannnnngccatgttcnnnnntccaagaggagatacaatgacaattgtcttttggcacaactgaactctagagactccatttttgtttttccagaggtctgagccacaagtaacagaatttagtgcagctgggaccaggagccctagtaaggatgggtggtcctggtggccagcagtgctcactgttaccgcccagggagagagggccagtcctgggaagagactagannnnnnnnnnnnnnnnnnnnggtaaaattctggctgctgcattttctacatttgtgttctagggcaagtcatatcatctatatgagcagacatttcctcatctttaaagtggagtttccaaacctagaagagttcatgtgggaggcaatgagctgccagagtgcaggtacaggcacccagtgcgtgccccacnnnnnnnnnnnnnnnnnnnnnnnnnnnnnnnnnnnnnnnnnnnttctttttggaagcagtcgcttttaacctaagttggaaatatttactctggggataatttgaaactcacccaagtgttaaggtatcagctatgttttaaatgaatggaccccttggaagaaatcatctctcatctaccatgattaaattcccacagtttagcagtgaacaggcaggtggcctaattaannnnnnnnnnnnnnnntccatcactggttttattgttttgaatatgcaaannnngatctctaaaaataa

SEQ ID NO: 8727 - DNA, 773 bp, Macaca Fascicularis
  misc_feature (1)...(773): n = A,T,C or G
gaggagggataatacctggtcaaatcaactcagttttttatagttactgtaaaaagactgtgtaaggcagctcannnnnnnnnnnnnnnnnnnnnnnnnnnnnnnnnnnnnnnnnnnnnnnnnnnnnnnnnnnnnnnnnnnnnntatgttacacaattcaatagcaagtaagtttgagacaannnnnnnnnnnnnnnnnnnnnnnnnnnnnnaaaagtggaataattannnnnnnnnnnnnnnnnnncaannnnnnnnnnnnnctannnnnnnnnnnnnnnnnnnnnncactgcaagtctctcttcactctagctctcaagctttgggtgaatnnnnnnnnnnnnnnnatcttcaannnnnnnnnnnatactccaataaaaaaactccttttactgagtttgcagtactgtatttgcactgtttgtattcctctgggcacttattgctacttttgatttcctttgttacacagattttgtgttgcactttttctccagaggggtgttgtagagccttggttgtatgaataatagcagtggtagtgtccacagctcaaatccaagcccgtttggcatcactcctctcctctctctgagaggctttcttgtgcacagagtatgaagcagttgtggagcactgtgccnnnnnnnnnnnnnnnnnnnnnnnnnnnnnnnnnnnctttgctgttttttcttcaaaatgttagtaagctctgtcatgcttctagcaaattgtaagacgaattacttatttccacctcataacctgtgca

SEQ ID NO: 8728 - DNA, 614 bp, Macaca Fascicularis
  misc_feature (1)...(614): n = A,T,C or G
aattcttgagccaggaccgattgattagcagcagtttagagatcttatctgtcaaccgcatccgtagaaggaggtcgttattgccataattggagtaacggtgacggtgtgacaagaggttttacttatggttaaactgaatgtaaagtgtgagaccggatcgttgggtttgatgtataaagtaccgtctaccctttgtgaagagcgcctttgccagtttttcctctaggaaatatacagctggcgtttttaagtaccttctttcgtaagttttctactacagactataaaaaaattaaagacatctttttctgacgttaaagtagtaactggctacttactgtatccagaaatccaaatgtgaaaacctggtaaaatatgttccggccnnnnnnnnnnnnnnnnnnnnnnnnnnnnnnnnnnnnnnnnnnnnnnnnnnnnnnnnnnnnnnnnnnnnnnnnnnnnnnnnnnnnnnnnnnnnnnnnnnnnnnnnnnnnnnnnnnnnnnnnnnnnnnnnnnnnnnnnnnnnnnnnnnnnnnnnnnnnnnnnnnnnnnnnnnnnnnnnnnnnnnnnnnnnnnnnnnnnnnnnnnnnnnnnnnnnnnnnnnnnnnnnn

SEQ ID NO: 8729 - DNA, 751 bp, Macaca Fascicularis
  misc_feature (1)...(751): n = A,T,C or G
gccannnnngcctcannatgccatgcttnnnnnaatgcactctgggtccagnnnnnnnnnnnnnnnnnnnnnnnnnnnnnnnnnnnnnnnnnnnnnnccagtttcttagggcctgtctggagaggaaactagcatttactgagtttttacaatgtgtcacacaccatgtaaagccctttacctacattatttcttatacctcaaacagagagcaaacaagtatccccattttttagtcacatagagttccagagttgccacggttacatagcagagtcaggatttgaatccattgcagaccacaaacaccatggttttctctccgaggcagagcagctccggaggtggaggtaactggaatgtcttagactcagtgggaccaggagcaggggctgccagcagaggctctcatctcccccagggtcttgtcagtcagagccccaaacccttcaattaactattcctctaatcccagcnnnnnnnnnnnnnnnnnntcccaccaagaatctgtgtggaatctggccctatttagggattaggtgatggagataaatttccatggcaaatggccatcgtccccgttcatttgcagagcacaacaatccagattaaggtacagagtttgagttttatttggagattagttggtattacagatgacggtgataccaannnnnnnnnnnnnnnnnnnnnnctcatcccagatctgtcaggttgtctctgcggcctcacgtcagagggcagccaatct

SEQ ID NO: 8730 - DNA, 519 bp, Macaca Fascicularis
  misc_feature (1)...(519): n = A,T,C or G
cagcaatgtgtccctctccatccagaatctcctcttgaaccagaagaaagagttcgtggtccagatagcaggtcagtggttgtcagctcacacccgtcttcctagtcctcacgtctacatacacattggcccaaaggcagtctataaagacacaatggtattgcgcctgtctgcgtatagggtgtgttggccttgacannnnnnnnnnnnnnnnnnnnnnnnnnaggaacacactaagaacactgctgagaccccaaacagtcaatgagggaggccccagagagcccacctttctgtgcctaaggccatacactaaaacccaaaactctactcatcagaggccatcatgggagccaatagattcgtcatgctatctcccaaacagtatttattgagtttccgcaatgtgaccccagtccctgccctcaggtccccatgccagtgggagatacagacaataagcaaaagaagtgcatcctgtcacatcacgttagaaggtggtaggtgcagccgagcgca

SEQ ID NO: 8731 - DNA, 762 bp, Macaca Fascicularis
  misc_feature (1)...(762): n = A,T,C or G
caggggcaaggcaaggcccagctnnnnnacggntgaaagccacaagtgaatacagttcttgtcaccaggggtgccctgccctcactcggcagggagttctgacaccccagggcccnnnnnnnnnnnnnnnnngcccctctgtttctggggcaccttcgaggaggcgctgtgnnnnnnnnnnnnnnnnnnnnattcacacccccctcaggggcaaacaggcnnnnnnnnnnnnnnnnnnnnnnnnnnnnnnnnnnnnnnnntgacagcagtggggtcctcacagtgagctccagcnnnnnnnnnnnnnnnaagggctgagtggagggacccccccccccagccagctctgccccaccagccctacaagttgaggcggggcggggaaagggctgggtgtcacactatnnnnnnnnnnnnnnnnnnnnnnnnnnnnnnnnnnnnnnnnnnnnnnnnnnnnnnnnnnnnnnnnngggcacagcttttggatccacatctctgcacaagtgtgaatacctctgcacacacgggcatgtctgtgtgtgctcatgtatatggggtagggaacatgagacttcctgtgaccagtccaccctggctcnnnnnnnnnnnnnncctcctgccccgccctggcgagtgcctaccctggcagaacccagggaggagtggaggctgcctctgcctgggcctccacacagcatcctgtacatatgccacctgggctgggggtggggannnnnnnnnnnnnnnnnngattaaannncc

SEQ ID NO: 8732 - DNA, 710 bp, Macaca Fascicularis
  misc_feature (1)...(710): n = A,T,C or G
gagactgaaaaggctagcannnnnnnnnnnnnatgttgaattgatttgttgttgcaggggtttaggggtatagaggtaggtatatgaaaagtagaatttgtttctgattgtgcctattttccaattattgaggaatctaggatacatgagaatagggacagatcatttggaagcttgagtgcagtaaaggtttaatgttgcctctatgagaatctaaaggagtaagttaaggatgagtagaaggcttattatgctatgttggatgccaggttgcagttggatggcaggcacaaggaagtgggttggattgactaggtttgggaattggttaagtaggtgctaggtaaagcccagtgtgtgaagcagttaagggttctgctgaaagtgtcgtttgagtgattggctgaggcattgaggataagagaagggagcagaagcttatggactagaccactcttttcagggctttgctttatcagccatgacaaagtatagagaatctggtctcaatgtaggtctctcactctaggagttttgcccacatttttcatggctgttagagaatcagggctgaaggcaagccttgagttccacttatttggtaaaaaattgtgtcagattgctcactgtagccaagacagagttctttgtggcttctgtaacttgccatccaagtaaaaaattttcttaaaagttgaaatgacctttgt

SEQ ID NO: 8733 - DNA, 769 bp, Macaca Fascicularis
  misc_feature (1)...(769): n = A,T,C or G
tcaacatagcattcattttnnnnnagtgcttctcntnntgtgacattatgaaagtgaaaggaaataataagacaaagataatacgaaaaatttagttcttttaggagcaatgtgatttcagaactaatcattttggcatttctaagatactagttctaacaaggagatgtgagcagtttgagatgatcagaaaatcatggtttaannnnnnnnnnnnnnnnnnnnnnnnnnnnnnnnnnnnnnnnnnnnnnnnnnnnnnnnnnnnnnnnnnnnnnnnnnnnnnnnnnnnnnnnngggataggactacaccttgtccatttgaatagcctttctgttaagtagtaaattaaactatcctctcctctgtctttaccccagtctacctaccctttcttcctttctcctatacttcctagagttttagctctgaacttttattattttggatattatcatctttctaataggtagaattttagtgaaagtaatcagggccttttcaaaatacacttctgaataaatttcatcctgtnnnnnnnnnnnnnnnnnccaaagaggctatacatccagcaagtcactggttagtgaataggaagtcttggcttgtaatgctatttcttgtagctaaaggaagacatgtaataagtgattgagctgttctgtgcttcagttgactcttataaggacagtcattccctttaagcatcttaagacaaaaatatttatctgtttaattggaatttactaacagagggatcccagctgcact

SEQ ID NO: 8734 - DNA, 1813 bp, Macaca Fascicularis
ttatttttattattatcatcatcagcatttcttctccccaggcttagagaattaattagcagggttgcctttaggtggtggccagcctaagagtaagaaatattagtaatgttcctggcttctatttaactccctcagtagcctgaagtgttgccagaagtttcaccacttatcactcttcctgtaggctaggaaaacacaaataatctgaaagaagttaacattgcgtcaatgctagcaacttagggtaagtgattttatgaaatccttcatactagctgggaacagttctacacgcaagtcattgttttgattggtaagaggtgtggtgggaacaccatactgagagtcaggaggtgcctgtcttagaccagcatcttgtggaactggagccttaccccaagtgagccctttattgtaagggccggagacaaagtgaaggaccctgtaagatcttagaaataaggccacagaatttctctctaaatgtctaatattagatcagtccatatcaaagtagaaatgtacacctgaaagaaacaacaagggtgttgggcctattgcattcataaccagtggtgtgctggtaaatgttgaaccaccagctttctgtgtttgcggggagagcaccctgatttgtaatgtttgccagtttctgtagtgtcaatatttccatcatggctgatgtcaagctgccaatgtgacatcactgaaagcagcattgggaaggtaggtacacagcctgtgctcctgagctgatgcaagtcactgggaatgtcatcattggtaccacccataccactacttcatcatccaattgagtgcataagatacacagaaggaatatttccaacagaaaaggagttgaacagctatagtatggcagaggaaggaaaatcactgagactgcccttttgagtactatccaggagagaggaaggcttgacaatctgaactttacatattttgaaatccaaaggctacctccccaaccctgtaaaataaatttataaggttattttagctcagtgccattaaagaataacttatctaatgcctcattttccatcctgttccagtcaaacaagcttctgctcatggcctggcttgcttgcttgctttcttgcttattacactttaagttctagggtacatgtgcacaacatgcaggtttgatacataggtatacatgtgtcatgttggtttgcttcacccatcaactcgtcatttacttcaggtatttctcccaatgctatccctcccccagccccccactcccccaacaggccccagggtgtgatgttccctgccgtctatccaagtgttctcattgttcaattcccacctatgagtgagaacatgtggtgtttggttttttgtccttgtgatagtttgctgagaatgatggtttccagcttcatccatgtccctgcaaaggacatgaactcatccttttttatgactgcatagtattccgtggtgtatatgtgccacattttcttaatccagcctgtcatcgatggacatttgggttggttccaagtctttgctgttgtgactagcactcatgacctggctttctatgttagtttgcctctatggaccaagtacactgaacatacggatttcaaactctcttgacaatgctatactaaagcaacttgaacaagtggtttttgattatgttttggcttcctgtgtagcttaagaacataatgtacataagatgataatgggagtgctgcagtctatatatcagctctatttttaatatagattaataaaatgccattgtagtgttgtcctaaaaaag

SEQ ID NO: 8735 - DNA, 709 bp, Macaca Fascicularis
  misc_feature (1)...(709): n = A,T,C or G
gactttaggatcaacctcccgacaaaacatcnnnnnnnncctcgnnnnnnnnnnnnnnnnnnnnnnngcagtatgatgaagtccaggagaaggcccccgacacccggccgcccgattgaatggccccacttgagccacgctccctcctgtctctcacacctttcgcccccaagactctaacaaagccacgtgagccacggttgagaagcggaggggccagctgtgnnnnnnnnnnnnnnnnnggtgggggggattctctgtatcannnnnnnnnnnnnnnnnnnnnnnnnnnnnnnnnnnnnnnnnnnnnnnnnnnnnnnnnnnnnnnnnnnnnnnnnnnnnnnnnnnnnnnnnnnnnnnnnnnnnnnnnnnnnnnnnnnnnnnnnnnnnnnnnnnnnnnncaggnnnnnnnnnnctccnnnnnnnnnaggaaagggttcctcgcggctggtttagattgtggttgtttgttttgcttctaataggactgttttgtttcaaaaaggaaacaagttttgnnnnnnnnnnnnnnnnnnnnnnnnnnnnnnnnnnnnnnnnnnnnnnnnnnnnnnnnnnnnaaaggacacagggctgttttgtgaacnnnnnnnnnnnnnnnnnnnnnntgctctcgcagnnnnnnnnnnnnnnncgttctttgagggcttaaggcctgatgannnnnnnnnnnnnnnnnnnnatantctta

SEQ ID NO: 8736 - DNA, 726 bp, Macaca Fascicularis
  misc_feature (1)...(726): n = A,T,C or G
tagtactgaagttagtactatgtttacatgcaaaagattaaggaaaaaacccttaaagtggacaggtgtccgnnnnnnnnnnnnnnnnnnnnnnnnnnnnnnnnnnnnnnnnnnnnnaactttgcctggacttttcttattttaaaacagnnnnnnnnnnnnnnnnnnnnnnnnnnnnnnnnnnnnnnnnnnnnnnnnnnnnnnnnnnnnnnnnnnnnnnnnnnnnnnnnnnnnnnnnnnnnnnnnnnnnnnnnaaaatgtgacaattgtcaaaaagtgcactaaaatgtaaatggagattgaacaagttcactttccagcttatnnnnnnnnnnnnnnnnnnnnnnnnattttctccagttgtttagtaaaagtgaaagagaaagggnnnnnnnnnnnnnnnnnnnnaacttttttttatataannnnnnnnnnnnnnnnnnnnnnnnnnnnnnnnnnnnnnnaatagtatgtaccttttatgaagaaaaatgtaatttacaatgttcagtgagaatgttactgctgattttcttttccaaggtgtagaatattctttgatttatagaattcatttttgacccagatgatggttcttttacagnnnnnnnnnnnnnnnnnnnnnnnnnnnnnnnnnnnnnnnnnnnnnnnnnnnnnnnnnnnnnnnnnnnnnnnnnnnnnnnnnnnnnnnnnnnnttgctttaaaattcaatgcagagaagttgt

SEQ ID NO: 8737 - DNA, 666 bp, Macaca Fascicularis
tgggagcacttcacagtaaatcactttcatacaaatcttcatgacaaggtctgtttctagggaattcactcaaggcaagatccttctagctgtgatccaatttcaacatgcaaacaacaaatgaataaaatactctcttcatcatccagatatttcattctcatagtgtcagcagcagaatatggaggtcacatatgtgttgaacattatataggtacaaatattgaaagattaaatttggcatgtgtattagggtcctctagagagacagaaccaatagtgtgtgtgtatatatatgtgtatacacacatatatactattggtatatatatatatatttcattttgcactatatatatagtgcatatatatgcatatgcttatatgtatatcggtttgcactatatatagtgcatatatgcatatgcactatagtgcaaactgaaatatacatgtaccaatagtatatatgtgtgtatgcatatatatgcatatatatatatgcatgcaacactggatatatatacatatgcatatatatatatatagatatatgagtgcaaaactggaacccagaaagattgacattgtctctctttcatagaaattttcattgttgattactgatttgtttcatttatgttgacgttttaaaggcatatgtat

SEQ ID NO: 8738 - DNA, 721 bp, Macaca Fascicularis
  misc_feature (1)...(721): n = A,T,C or G
ggaaattaactctaaatttttgaatgcttgttggcaaatcaatactgaaaggatgcatntcggcttttaaccagttggttctgatcattgcaacctctgtgctcttataattcaaagaacagggatggctttctttggtatcttttgatctaagaacactgaattttgacttaaaatattgtgactaaattgcacaatctctggctattagcactgttcactacattgacatgcaagagagagagaagcctggttacatttcctgctatttaacaaacggtccaattaggtcagcaagcctgttagggccttggctgctatgcccctggtcccccaacagagagcaagacaattgtccggagaatgtaggtatgagttaagagctgccagatttattttatttaaaggcatgtagagaatctcataatctatgtgaaagtcacttgccaaaaaggttctggtcatgaaatataaagtaaatgttacatatttaatattaagtgaacctccttgtgccttttaaaaactatcgacattatgaaatttaaaagcttaaatgtatttgcctagttgataaagaagctgtggaacagctgaaggagaactttcagaccctaaaacagttatactgcctagatggtaaaattttctagtggactgtgcaattgctgggttgtctccccaaacatattttaatatgttatttaaaatgatttaccca

SEQ ID NO: 8739 - DNA, 760 bp, Macaca Fascicularis
  misc_feature (1)...(760): n = A,T,C or G
agggtcacagattgattacagaagaagaagcggcgagcgccagctcctcctccaccacnnnnnnnnnnnnnnnnncccctgatccccaaccgcactgaggataaggaggagaacaggaagagcacaatggtttattgctgtgcatcattccctactcaggccaagcgcttctgatggacgggcctcttcctgacctcggacctttcccagtgtctcttctgccctggctctgattttcctgttgttcttcctcctttcaggatgaaagggctcattgtacacccacaattttcttcctttgggatttacatataaatgcataataacagagatttgtttgactgaggtttatatttttttgaaggaggtgaagacttttatatgcaaattttaggttgataatattcccctgtctggaattcactgatacttggaaatgttcctgtgaagaactctgctttattttaattcattattaactcgtatttttcttattggatattcaattccagattttattgcccatttttcttaaaactagattgtgtccataaattgaccagtatagtcaatttggatagaactgaaactttctgtctacctgataaaactaagtgcctaaaaacatgaactataaatatagttagtaggaactcacaacttatatatactattcattcaatgatacataggacccaatgtttttgtgtttttgaagttttcnnnnttannngtgtacttcgnnnnttttacatagtca

SEQ ID NO: 8740 - DNA, 737 bp, Macaca Fascicularis
  misc_feature (1)...(737): n = A,T,C or G
tatagtatgtgnnnnnnaggttttatgttatatctgcatacaagtgaatgtgatcatcattcattttgcagatttacattttgctgtgtgggagagttatattcacttcaacctacagacccttttgtannnnnnnnnnnnnnnnnnnnnnnnnnnngaatgctctattgggggaagacaaatnnnnnnnnnnnnnnnnnnnnnnnnnnaatcaaaagtttgagcagtgccttttggggtccaatcttttcggattggattctatatcatcttttgatgtgacctttcaatagtttacagaaaaaggttggtgtcaacaaaannnnnnnnnnnnnnnnnnnnnnnnntttgttggttgtttttaactttttttctgattctttttggaaaatcatagtttacagatggtataactgtattatataatgaaatttcctttagatttgggaannnnnnnnnnnnnnnaaaattatcagcttcnnnnnnnnnnnnnnnnnnnnnnnnnnnnnnnnnnnnnnnnnnnnnnnnnnnnnnnnnnngaatatatcttttccttattgtattctgtaatataggatcatctggaaacgagaactggtggaatattattttcaactttagtctttctatattgtggactaatccaaccctgttatcgataatctaaaataaccaataatccaaaaaagttcattttattttgaatttgtattttcatttgaatatctatctgatat

SEQ ID NO: 8741 - DNA, 734 bp, Macaca Fascicularis
  misc_feature (1)...(734): n = A,T,C or G
ggtgagattggagtnnnnnnnnnnnnnnnngaccagaaatttantnnnnngagnnnnnnnnnnnnnnnnnagaatgaagagggccatttgcatctccttaaattattcagttatctgctttattgctccatgtggaaaacttaaaattgttaagttgtgcattactgtattttaacttgttgcttagtttctacatgtttattttcagtaatggctgaaagtgttaactgttnnnnnnnnnnnnnnnnnnnnnntgcataaggttacctgtgtacagagttttactttagtttaactaaatattgcctgggttcagtttttatttccattctgaaatgcttcctttttattgtttgaaactgaaaataaacaattgttgaaccattttgattttacctcattttaaaactcagttttaatttattatttggcttgttcttaatattagnnnnnnnnnnnnnnnnnnnnnnnnnnnnnnnnnnnnnnnnnnnnncattttatatagtacatgtacaacattaaacgtgtttaaaaaagaaaaaggtaccagcgctcacttgtcccttgccattttttcttgtaattatgttagacaaatcttggcggcggggggatcaaaacataattgttttaattctacagctataggagctttgtattgctaaactttcgtctggaaaagtttcacagtgacatttttaaaagagaatttttttatctaccgaattctacca

SEQ ID NO: 8742 - DNA, 750 bp, Macaca Fascicularis
  misc_feature (1)...(750): n = A,T,C or G
tggtagggtgcagtggtgtcatcttggctcactgcagcctccgcctcctgggttcatcgattctcctgcctcagcctcccaagtagttgggattacaggtgtgcgccatgatacccagctaattttgtatttttagtagagatggggtttcatcatcttggccaagctgatctcaaactcctggcccgaaatgatccacccactttggcctcccaaagtgctgggattacaggtgtgagccaccatgcccggcccaaaacatctttataggtggggtgaggctgtgttggaattactccagtaacagggaataattactccggcaaccactgcagctcagacagggccacatgaaagctcccccttaccctaccttacagcctttctctgtatcacatgcccattagctcaatcctctccccttgaagaccaannnnnnnnnnnnnnnnnnnntccactctgtgggctctttgctaccgcccctaatgtgacaannnnnnnnnnnnnnnnnnagcctaggccttgccttcccaccccttgaagtaggaggctgccagcccctgcttggctgggacgctgactcattcgtgacagtgtctgtgagtcactgcttgcctgcaggggtctacttcccagttaaggtgctattaaaagggtaacagcctctgccactctgctcactcaggnnacagtggagcgtctaaggtatctcagtcctgtctcctcagaagttcataggactttacttat

SEQ ID NO: 8743 - DNA, 1772 bp, Macaca Fascicularis
aagacagccacaatcccctccggtcatcgctcgttaccccccaggcccttgggcttgggtttaggcccagtcgttcgtctgcaacaaatccaatggaaccgcgccctcgctgaatcccacgtctaggaagagggggaggagctcctcttgcttgggtgaaggggctcccgactccgagccccgagccccattcctctcccgcgccagctcttccggactcggcctcccagcggacgcctttggaccttgcaagtccgctaggtggggtcgggacgaatcgtcgcgggtggatccacccggccgagaaacgacccgcccgggcgcgaggaccacgggctgtcgtgcgggaggcgtcgaagggcagtaaactccgttcgtgatcaaacggagacgatttgaaacttgctgctcacactggatcaccgtctggaaggtgcgacggggaaaaaatgcacattataccccagcaggattgaacgctttcaccctgtcccgcgcctggcgtaacgcgtggccccagaccacacgctgcaatccgggatgagagggagtgaggtggggactttgtcccggacctagagcaccggcctcgcccgcgccggcagcgttcactgtggggagtgctcactcagcctagggcggcccgggaggactgccgggaggagaaagtcggccttgaattgaggcctcagccttgaatagggtggggaaacaagcctggccgagagtttagcactagcaaaggcctggaggcaccagggtctgtcctaagaactgcagtctctactgtggctgggatttaacgcattacgtctctgctgtttataggtgtcgtgtttggtcttacgactttgtattctctagtttttatttattcctgttttctgaattttcccacatttgcttttattttctatcgtgattttcaaggcagaaagtgtttttaattcttctcgcgactgcctttaatcaaatgaaaatagtttacatttcacaaattagtaaagtcagtgacaaataattcgtttttatattcccctttatgtcataagaaatgtaatgtgcttttctgcctcctacctgccgccctcactacttgtatttgtccacttaatcaggacaacagacctagcttttgtttacacttttttttttaagccacattctttttcaatccttgtttttggcttttgccaactctatttaattggtttcaatgtcactgccggttttttgtattctaatttttctattcctcatttggacctatctctcacacgactggcgatttcaggggggactctggaatgttgtatttcctaagcctttgccctaggtgagaatgcctttacagtgatttcctgtttataggattcttgagtctcaagctttccccctcaaaactcttgtctttatttcattgtcttctggcactgaaaatgcaaagctgggtttgtctgtttaaggtcagcagtttgcttggtgcttgcaagggtttttctttaccctcagaagtcaaacattttgccagtataaatcaatatgggccttatctattaattttccagaaacaaaagaggtcttctttgcagcttagaaaagttttcttcctgtccattctgtgaaaagatttgggttttttctttcctgtcctctaaaactatcacattggatcaccaatgtcaaataaatctgttttctctggaaaaaaaaaaaaaaaaaaaaaaaaaaaaaaaaaaaaaaaaaaaaaaaaaaaaaaaaaaaaaaaaaaa

SEQ ID NO: 8744 - DNA, 300 bp, Macaca Fascicularis
cccagccccttgccttcctccatcccggcctgggcatcctcacgggccgagccccgcccccaactcagccctctcccacgctccgtctcttatagcatttgtcacgctccgtctcccatagcatttgtcgccagcaacagtttggagtctgaggttggatccctttttcttctggagctgccgtgcctcccctgccttttcctggcccttgtcatcctccttcacggccagccagatacctgtcttgcctgtggggcccattttcttccctgtcgtccccaccccacaagaaccaggtct

SEQ ID NO: 8745 - DNA, 2103 bp, Macaca Fascicularis
attcccacagggcaagcttcactgctgagttgcttggaggagcttggagaaaccagaagtgagatctaggagaagcaaggccctggagtgccaggaacccttctcctaaagatggagaagtaaatgaagaaatacaggaaaataagcattgggtgttattgcaatggctacacaaactagtcacgtcttccatggccaagaaaatatgtttctggaaaaccattgcattaggagaaacactggcagagattcaaagaagtcactaaagcagaagaatgtgaatggacttggtcagaattcagacaatggattactggttacacacgttaaccagacacaggacttactgaggctgcaggcgagcgagacccagtcttcagattgggaggactctgaagactggctttcggctcacagtttaaagtgtcagaagcttaccttggctgacctgataagccagggcacagaagtgctggaggaggacaccaatgttgtgcagaaaatacgtttctccacccagatcatccgccactttgagtcaaagctttctgacctccaggaacttaagctctgggtaaagacactgcagcctgatggaggcagcaacctgctacaagctctgaagagacctcatcatccacttcatcacctacagctgcgatgatcagatgccccctgctgtcctgaagaaccttgcagaagctgttaggggctactaccactgctacagcccaaagatggagctctacaccagccgggatatggatgagctcctggcagaaattcagaaggcccagagcctcctcagccacatgcaagccctgaggcacagcagcccctgtgaggcgctcacctgtaccatggaggagatttccacagagattgcaaatgggctactcataagcctcttgcctaaacccccaaagcatgacgctcctctcaccattgagtttccaaacttggacaagacttctgcagagtggcttaaggtcaatggtctgaaagccaagaaattaagtctgtatcaggtcctggcacccaacgcattctctcctgtggaggaatttgtacctattctccagaaaacagtatcatcgactatccatgagaaggcaatgatacaatttgaatggcacgatgggacagtgaagaacattcatgtggacccacccttcctctatgagtaccagaaacagctcaacagagctatgcggatgtatgagaggcgaatcgagtggctctccctggccagcagaagaatttggggcactgtctgtgaaaaaagggtggttgtactgctcgatatctctgcgaccaattccatgtacattattcatatccagcactccctgcggctgctgctggaggagcagttatccaacaaggactacttcaacctcatcgcgtttggaagcacaagtgaaagctggaggcctgagatggttcccatgagccacgacaatttacaaagtgcctggcggtgggccctgaacctgcggtgttggggcagcaggaatgttctcagcgccctgcggaaggctgtggaagtggacttcaaggacaaagacaaacaccaatcgcagggaatctacctcttcactgggggcatccctgaccaggacatgcctacaatcagcgcctacatggccgaggcctgtagtggctgcgacctccagctgaacgtgtgtctcttctacgtgggcgagccaaagatggacaccacaccccctgcctgctatgccagtcgcactgacacggccgctgcctacaaggaagtcacccgggctgcaggtggccgcttccactggtttggagacacaggcatttatgagagcgatgacatcagttccatcatgtctgagatggaaaaggctctcaactactcccaaaagtgtgccttcctcatggcctccctgaagaaccattcaagaaaagtactgggaagtgcagacctcctgaaagaaaaaccaaagacacttcagctaagaagtcagcccaagaagctctgccctcccaggcccaccgcccccgtgggggccagaatggtttgactcccctcctaataacacgcggaagatttggtttaaaaaaaaaaaaaaaaaa

SEQ ID NO: 8746 - DNA, 564 bp, Macaca Fascicularis
  misc_feature (1)...(564): n = A,T,C or G
accccctccctatgtaacaggggggcagtgacaaaagcaagaatgcacgaagccannnnnnnnnnnnnnnnnnnnnccctccgccatttatcgccctgattgaattttgtttttatctgtccctgttgcttgtgttgggttgagggtggagcctcctggggggcactggccactgagcccccttggagaagtcagaggggagtggagaaggtcactgtccgacctggcttctggggacagtggctggtccccagaggtcctgagggcggaggggggagtgggcagggtctcctcaggtgtcaggagggtgctcggaggccacaggagggggcttccggctggcccaaggctggccagaggggaaggggttgcaggtgtgtaaacagaggattccatcaggctggtgcagggtggccgccttccgcacacttgaggagccctccgctctccctcggtggcatcttgcccgcccctcagcaccctgccttgtctccaggaggtccgaagctctgtaggacctcctgggggcaaggtggggtgaggtcggagagtagggaggtnnng

SEQ ID NO: 8747 - DNA, 685 bp, Macaca Fascicularis
  misc_feature (1)...(685): n = A,T,C or G
tagtgttaagtgagacatcataaagttatgagccatgcattatggagattggtgtcaggtcagaatactggagttatacatctatttctgagttgaatactcagctcccacgagaaggaaagtagttttaaggtccagcttcttagtctacttgaagcaaaagtttttttcttttctatttctgagtataaatatactcttatatgggctaaaaggaccccatgaataaatagcaggttcagtagttgaggggtagaatttagtaggtttgttttcagcgtaaatcagataacatatgtggaggtnnnnnnnnnnnnnnnnntgagtgtccccaagtgagctttgtttataaactttagacatgttggaagtggacaggtttgttaaatcttgtnnnnnnnnnnnnnnnnnttcctttgttccttttccctctctgnnnnnnnnnnnnnnnnagccagtcctttatactagatagagttcagataaagcaatgtttggcaaaaacatactgtttgacctcctccccctctgcttatgaaggggtagcatgattctgtgttttaaagcnnnnnnnnnnnnnnnnnnnnnnnnnnnnnnnnnnnnnnnnnngctgagtgcatggaaactgttacgcttctcattttatgtgatctccnnnattggtatgtagngnaaacttttcata

SEQ ID NO: 8748 - DNA, 666 bp, Macaca Fascicularis
  misc_feature (1)...(666): n = A,T,C or G
taagaggttaaaatataattcaaaatttccgtctaactctgcacctatggaaccatgtgatagaggtgtattaaaattgttagtgaagaatatatagcatatggtaaacaacagtttgcatatggaaaatgtctttgataatttaaccagaactgcattatattcaataatggattttctttataacaaacaacaggagaaaatggagttggcacacagtggatcactttgatatttttaatagtccaagtctggattttatttnnnnnnnnnnnnnnnnnnnnnnnnagcatattttccatgtttctgactgtaacaaaacattttcctcattgttccattgtaaatattcctcttgttggaaccctttttaatcctgagatttcaacctgtacctttcaattgtctgtgacctttcaatttcactttcaatagttgaagaacttggctttgtaaatctctcagaagcttgaaaatatcttgtctctaccccctcagcccatttcatttgccaataattattttgtaagtagggttgaaatgaactcagctggccttgtgaaatgtttaaactcgcacaaacaactannnnnnnnnnnnnnnnnnnnnnntttactcagccaaaatcactttggacattgccattacaaatactgttaaacttca

SEQ ID NO: 8749 - DNA, 1050 bp, Macaca Fascicularis
atgagaaaaatgtcagaggaagaggagttttatctgttcaaaaatctctcttcagtgaagccgtgggatgggcctcagtaccacattgcccctgtctgggccttctacctccaggcagctttcatgggcactgtcttccttgcagggtttccactcaatgccatggtgctggtggccacagtgcgctacaaaaagttgcggcagcccctcaattacattctggtcaacgtgtcctttggaggcttcctcctctgcatcttctctgtcttccctgtctttgtcaacagctgtaaaggatacttcgtctttggtcgccatgtttgtgctttcgaggccttcctgggcactgtagcaggtctggtgacaggctggtcactggccttcctggcctttgagcgctacattgtcatctgtaagcccttcggcaacttccgcttcagctccaagcatgcactgacggtggtcctggctacctggaccattggtattggcgtctccatcccacccttctttggctggagccggttcatccctgagggcttgcagtgttcctgtggccctgactggtacaccgtgggcaccaaataccgcagcgagtcctatacgtggttcctcttcatcttctgcttcattgtgcctctctccctcatctgcttctcctacacccagctgctgagggccctgaaagctgttgcagctcagcagcaggagtcagctacgacccagaaggctgaacgggaggtgagccgcatggtggttgtgatggtaggatccttctgtgtctgctacgtgccctatgcagcctttgccatgtacatggtcaacaaccgtaaccatgggctggacttacggcttgtcaccattcctgcattcttctccaagagtgcttgcatctacaatcccatcatctactgcttcatgaataagcagttccaagctcacatcatgaagatggtgtgtgggaaggccatgacagacgaatccgacataagcagctcccagaaaacagaagtttctactgtctcgtctagccaagttggccccaactga

SEQ ID NO: 8750 - DNA, 726 bp, Macaca Fascicularis
  misc_feature (1)...(726): n = A,T,C or G
gatttgtactnnnnnnnnnnnnnnnnnnatcattagattatctgtggaatagcgttactatattaggaccagcagaatttgggttggtaaaaataatgtttattactggattacaaacatttcagcattttaagattggttttaaatcactaaaaatatttattcagatttgaaggatttaagtgctaaaaatcaatccatttcttgctcttcaagaattgtccatgcctgccttttgttgtttacatgctcttctgcccagactgttagtaatctagggaccctctttggaactgatgaatacagttcagccttttcttctcaaatatctaatgactttaacattcctaagaatataggtatttctgaatgatttaaatttgagggattttaatacataaaatacagtgtacaaactttctgcccactcagatctcttctccatcatgtgcttacatatcccattaacctacacactgatttttatgctactccttgtagaaacaaaattctagtttgactcagtttttgtgtttataaacttttggaatgtatacccccgtgtatgtgaacaattaggacctatcagtcatagctaaatagtgaacctcaaaagtgttaactttggactattcatgtgaggtttggtatcttgcatttatgtacatggctgtaaattatgtgcatttactctgtatttatgttacctagctgacttttacttga

SEQ ID NO: 8751 - DNA, 703 bp, Macaca Fascicularis
  misc_feature (1)...(703): n = A,T,C or G
cagtgggctnnnncgtatccaggccagtgcgaacgtctggagccctccttgaaccaggactgtgnnnnnnnnnnnnnnnnnnnnnnnnnnnnnnnnnnnnnnnngtgccagcggggtgcccattctgccggggaaattgggnnnnnnnnnnnnnnnnnnnnnnnnnnnnnnnnnnnnnnnnnnnnnnnnnnnnnnnnnnnnnnnnnnnnnnttggctagacgnnnnnnnnnnnnnnnnnagcttcgtctcctcacagagacctggggagggttcggggcccggtgctaggctccacaatgccttcnnnnnnnnnnnnnnnnnnnnnnnnnnnnnnnnnnnnnnnnnnnnnnnnnnnnnnnnnnnnnnnnnnnnnnnnnnnnnnnnnnnnnnnnnnnnnnnnnnnnnnnnnnnnnnnnnnnnnnnnnnnnnnnnnnnnnnnnnnnnnnnnnnnnnnnnnnnnnnnnnnnnnnnnnnnnnnnnnnnnnnnncaccgcacgaggacgacgcggacggggagggggagtgggactgagcgtccgnnnnnnnnnnnnnnnnnnnnnntgatgttgctgatttctgtgctggtcagaatcggtnnnnnnnnnnnnnnnnnnnnnnnnnnnnnntcgctgacctggtcgctgtttctcctataaatgtaaatgggcgagnnnnnnnnnnnnnnnnnnnnnnnnnnnntgt

SEQ ID NO: 8752 - DNA, 273 bp, Macaca Fascicularis
gcgcaaggtgccacccgccaaccaagtgacctcgcctgtaaaggggaagagaagaagtgtcttaacttcacaggcacagttaaagacaccatattattatggggtagggggtgcgcaagagaaagtgcgcgcaacgagaaggatggggaggcgaaaaatcacataaaaatccgcacatactgagaaggcagcagtaagggaagccctcaggagatgtccatcatctcatcaattgagagtgctctctttgtggagaaagtcgagatgagatct

SEQ ID NO: 8753 - DNA, 725 bp, Macaca Fascicularis
  misc_feature (1)...(725): n = A,T,C or G
agtgcctgtctggccccaggtgcggtgaattaaatgtttagtgtttctaaaccaggaaaacgtgtgggctttggaatcaaatatgagttctggatttgattactgcatgacctaagcccgtcgtttctttgagcctcatttattaaagtgccgggagctgtgtgatgaacaaaacagaggatcgctgcacctgagcactgactttagtcccaattcatacttttaagcctcgctcttgtaatgtaggcataaaatctgcgtctcccaattcgtgaattgggaaagcatttaagacaagtttctccaggcctttaagagaaggagaaccccactgactaaaaaaaaatacagttacgtagaagaaacaagtacggtaatctatccaaacacaaggggaaaagacagcaataaaatgacagctcttctaagtatttcagtaacactctcttaatctttataacaatcccatgagactcttagtctcccacttttttcagataaatactctgcttttcatttattaaaaaaattttttttgcagtttggccagcatggcnnnnnnnnnnnnnnnnnnnnnnnnnnnnnnnnnnnnnnnnnnnnnnnnnnnnnnnnnnnnnnnnnnnnnnnnnnnnnnnnnnnnnnnnnnnnnnnnnnnnnnnnnnnnnnnnnnnnnnnnnnnnnnnnnnnnnnnnnnnnnnnnnnnnnnnnnnnnnnnaggtatagaa

SEQ ID NO: 8754 - DNA, 763 bp, Macaca Fascicularis
  misc_feature (1)...(763): n = A,T,C or G
caaatccattnnnangagaagcagactgacttttgaaagggaggcgctggggtttgaacctccccgctgctaatctcccctgggcccctccccggggaatnnnctgccaatcctgcgagggtctaggcccctttaggaagcctccgctctcttcttccccaatagacctgtcttcacacttgggctttgagagccagacaaagcagctgcccctctccctgccaaagaggagtcatcccccaaaaagacagagggggagccccaagcccaagtctttcctcccaacagcgtttcccccaactccttaattttattctccgnnagatnnnnnnntccagtcttccctcagctgaataggaagggcatccctgcaaaagggaacagaagaggccaagtcccccaacgccatggcccggggttcaaggctagagctgctggggaggggctgcctgttttactcacccaccagcttccgcctcccccatcctgggcgcccctcctccagcttagctgtcagctgtccatcacctctcccccactgtctcatttgtgcttttttctctcgtaatagaaaagtggggagccgctggggagccaccctattcatccccatatttccccctctcataacttctctccatcccaggaggagttatcaggcatggggtggggccccgggtgggtgcgggggcgattcaacctgtgtgctgcgaaggacgagacttcctcttgaacagtgtgcnngtgtaaacatattgaaaac

SEQ ID NO: 8755 - DNA, 748 bp, Macaca Fascicularis
  misc_feature (1)...(748): n = A,T,C or G
gtgannnacannnnntccactctttatagtgtgcctgtgacccaaagtgactttataattgcagcagtcaaaaatgagatgttaggaatctaatnnnnnnnnnnnnnnnnnnnnnnnnnnatgtgtgtgtttgcatgttaaatgttttctagggtctgaacttgtctccaaggattttgtggtcactttgcaggtggtatcaatgaccacttagtcaaacccnnnnnnnnnnnnnnnnnnntaaccctctccccactgcccacatcaacatattccaactgtcagagttatctgctatctcttcactttgtatatggtgccaccctcacagaatgctatccttctgttttcccaaacacaagaagatacatgttattttctgtcttctctgttcaatagtattgacaaatgtgggcccatttttaatggaacaatagaaagtgaaatggagactggggaggaactatggtgagcaggactcagcaattctcagaagtggcccagcaggnnnnnnnnnnnnnnnnnnnnnnnnnnnnnnnnnnnnnnnnnnnnnnnnnnnnnnnnnnnnnnnnnnnnnnnnnnnnnnnnnnnnnnnnnnnnnnnnnnnnnnnnnnnnnnnnnnnnnnnnnnnnnnnnnnnnnnnnnnnnnnnnnnnnnnnnncagctacttgggaggctaaggcaggagnnnnnnnnnnnnnnnnnnnnnnnnggttgcagtgagctgagatagtgccactgcgctacc

SEQ ID NO: 8756 - DNA, 564 bp, Macaca Fascicularis
  misc_feature (1)...(564): n = A,T,C or G
cnnnacctccctactctccgacctcaccccaccttgcccccaggaggtcctacagagcttcggacctcctggagacaaggcagggtgctgaggggcgggcaagatgccaccgagggagagcggagggctcctcaagtgtgcggaaggcggccaccctgcaccagcctgatggaatcctctgtttacacacctgcaaccccttcccctctggccagccttgggccagccggaagccccctcctgtggcctccgagcaccctcctgacacctgaggagaccctgcccactcccccctccgccctcaggacctctggggaccagccactgtccccagaagccaggtcggacagtgaccttctccactcccctctgacttctccaagggggctcagtggccagtgccccccaggaggctccaccctcaacccaacacaagcaacagggacagataaaaacaaaattcaatcagggcgataaatggcggagggnnnnnnnnnnnnnnnnnnnnntggcttcgtgcattcttgcttttgtcactgcccccctgttacatagggagggggt

SEQ ID NO: 8757 - DNA, 500 bp, Macaca Fascicularis
atgtacaggatgcaactcctgtcttgcattgcactaagtcttgcacttgtcacaaacagtgcacctacttcaagttctacaaagaaaacacagctacaactggagcatttactgctggatttacagatgattttgaatggaattaataattacaagaatcccaaactcaccaggatgctcacatttaagttttacatgcccaagaaggccacagaattgagacatcttcagtgtctagaagaagaactcaaacctctggaggaagtgctaaatttagctcaaagcaaaagctttcacttaagagataccaaggacttaatcagcaatatcaacgtaatagttctggaactaaagggatctgaaacaacactgatgtgtgaatatgctgatgagacagcaaccattgtagaatttctgaacagatggattaccttttgtcaaagcatcatctcaacactgacctgataattaagtgcttcccacttaaaacatatcaggcc

SEQ ID NO: 8758 - DNA, 645 bp, Macaca Fascicularis
  misc_feature (1)...(645): n = A,T,C or G
ctatggggcagaggcccatcaccttcctgcgccaggtcctggctctctgtgtcaaccccgatcttctgaccagccccagcttccctgacgatgccaagaagagggcggagcgcatcctgcaggcgtgtgggggccacagcctgggggcctacagcgtcagctccggcatccagctgatccgggaggacgtggcgcagtacatcgagaggcgcgacggaggtatccctgcggaccccaacaatgtcttcctgtccacaggggccagcgacgccatcgtgacggtgctgaagctgctggtggccggcgagggccacacacgcacaggtgtgctcattcctatcccccagtacccactctactcggccacactggcagagctgggcgcagtgcaggtggattactacctggacgaggaacgcgcctgggcgttggacgtgtccgagcttcaccgtgcactgtgtcaggcgcgtggccactgccaccctcgtgcgctgtgtgtcatcaaccctggcaaccccaccgggcaggtgcagacccgcgagtgcatcgaggctgtgatccgcttcgccttcaaagagcggctctttctgctggcggacgaggtgtaccaggacaacgtgtacgccgcgngttcccagttccact

SEQ ID NO: 8759 - DNA, 758 bp, Macaca Fascicularis
  misc_feature (1)...(758): n = A,T,C or G
ataagtatgtatctagtctacaannnnnnnnnnnnnnngtccaaagtcaagtccttaggggataattttgttttggctcacatgttccctgcttcctctctttttttttttttttgnnnnnnnnnnnnnnnnnnnnnnnnnnnnnnnnnnnnnnnnnnnnnnnnnnnnnnnnnnnnnnnnnnnnnnnnnnnnnnnnnnnnnnnnnnnnnnnnnnnnnnnnnnnnnnnnnnnnnnnnnnnnnnnnnnnnnnnnnnnnnnnnnnnnnnnnnnnnnnnnnnnnnnnnnnnnnnnnnnnnnnnnnnnnnnnnnnnnnnnnnnnnnnnnnnnnnnnnnnnnnnnnnnnnnnnnnnnnnnnnnnnnnnnnnnnnnnnnnnnnnnnnnnnnncgtgcctggccttccctgcttcctctctagaatccagttagggatgtttgttactacttgtgttgattaaaacagttaaactaactttttttttcttttaaaaatgtgagatcagtgaactctgactttaagataatctgaaacaaggtccttgggagtaatgtaattnnnnnnnnnnnnnnnnnnnnnnnnnnnnnnggaatcaacttatcttaaattataactccgggcctaactatatgagatggctgaaaaaataccacatcatctgttttcactagatgatgccaaaatattttgctttctgtatattacagttctttttaaaaggctggaagactcatgttaaactctaattngaaggcagaatctc

SEQ ID NO: 8760 - DNA, 121 bp, Macaca Fascicularis
cctgaaccagagctcacccttctacttctggataaacagcgaccgcatacactccctgctggagaacgaccggcagcaaacacacatgatggatgtcatgcacgaccgcttcaaccgcgca

SEQ ID NO: 8761 - DNA, 774 bp, Macaca Fascicularis
  misc_feature (1)...(774): n = A,T,C or G
gacgtagactttggaaagcttctcgccanncagggcctctgtggctcacctacaacatggacagtgnnnnnnnnnnnnnnnnnnnnnnnnnttttacctgttgaccaccttgggtctctctggcctttattttgagccttgtacatctggagagttgcctaatgggacttggttccttgtccgtatgttcttagcacctaaaacacatttccaagatgaagcccttcactctgcctcccacaagttgtcttttgctttgttttccctgcctttgttgggcagcctgccatcctacaccannnnnnnnnnnnnnnnnnnnnnncctgcatttttcctcgccnnnnnnnnnnnnnnnggtcataagcccaatttatgtctccttccagtatccccgagctacactccctgttctccatctgtgcctcccgagtccagatccccatcgtccatcatctgcgctatggccactgcttcccggctgtcctccttgccccactgccaggctttccagcccattcctccacaggggtctttctgatagatgtgttctgtcattannnnnnnnnnnnnnncgaggcaagcagatcacttgaggtcaggagtttgagaccagcnnnnnnnnnnnnnnnaaaccttgtctctactgaaaatacaaaacttagctgggcatggtgccgcattcctgtaatcctagctacttgcnnnnnnnnnnnnnnnnnnnnnnnnnnnnnnnnnnnnnnnnnnnntggctgcagtgagccagnnnnnnnnact

SEQ ID NO: 8762 - DNA, 498 bp, Macaca Fascicularis
gaggggccccggagtcagtggactccaaggggactgagacaagccctgccctggggtgggggtggggggcaaggtacagtcaatactagatttggatagggagttggggagggtgggaaggtagaggtgggacagggagggggtttgtaatttattaattgtgtattttctaagagttttcatcttactttggcttcacacacagctccaggcccctcatttgagacccactatccccaaccccatctagattgaatcttggggagaacccagatctgaccaattggggtaggagacagcaggctctccagaacatgggcagatttatttttttataaaacaaaaagataaaaagagttgaaacacgtggaagtggtgagagagggggaagcagaatcaggaagtggcagaaaagagaggaggtagactggtgcagtggctcatgtttataatctcagcactttgggaagccaaggtaggtggatcgtttgaagtcag

SEQ ID NO: 8763 - DNA, 747 bp, Macaca Fascicularis
  misc_feature (1)...(747): n = A,T,C or G
tagctcatnnnnncttgggaaaaatttgttgaatatatataattaagagatanttnntgataaacgccaaattttgaaacctgaactcgctatataatctgcagtgttttgaaggcctccatccattagcactgtattatattcacactgcctttttaagtgacccagcacccatcttctgattgacagacttatcttaagataaaaggttgtataacatgcccacaaggcataaaaatgttaataatgcaagtaagttctacgagtttaatgaccaagcaaaattctacnnnnnnnnnnnnnnnnnnnnnnnnnnnnnnnnnnnnnnnnnnnnnnttcctggctcttaatgcttttgtattggtatggaaaagggctggcagctatagaacaggagatatgccgtagcattttgaacggaagtatctggaatctcactgactcgtgtgtcatcaaagctataccaggcctgggtgaatgannnnnnnnnnnnnnnnnnnnnnnngccaccatccagatcaccaaagtggttctatgggagaaaggaatgtcaaacttagtattcacatacaaacactaactnnnnnnnnnnnnnnnnnngggccaagaaatgctttttaaattgtcccttatactaaattaaaagtggtaattttgtcgttaaatcatgcatatagcccaactgctatattgcttctcatttcattgtaactgcttatatattgtgcccnnngattatctggaaaa

SEQ ID NO: 8764 - DNA, 792 bp, Macaca Fascicularis
  misc_feature (1)...(792): n = A,T,C or G
acagtacatgcccatannnnnnnnnnacagcagcaaaggaccagnnaagnnnnnnnnnnnnnnnnnnnnnnnnnnnnnnnnnnnnnnnnnnnnnnnnnnnnnnnnnnntaatcctggagaggggcttcattgggtctagacacctnnnnnnnnnnnnnnnnnnnntccctagcttccaataaatacctgttcgacgtccggagtacagatnnnnnnnnnnnnnnnnnnnnnnnnnnnnnnnnnnnnnnnnnnngctcccattcctcacgagccttgaattctagctcttctggcctttgagcccatgccagtaaatgtcccgatggacgttgcccactatctccagggcagctgcctttgttctcctaatagctttattggaatacagttcacttaccatacaatccacaattgaccctgcacaatttgataccgtttcannnnnnnnnnnnnnnnnnnnnnnnnnnnnnnnnnatcttagagtttattacccccaaaagaaacccagcccccttagtcaccaccccagcctccccatccctaggctactttgatctctgtagacttgcctcttctggacatgacatacagaaaggagtcataaattctccagggcgtctatttcttctttaatgtcattccctgtttctcctttacattccctccccgtttcctgggcctagtctcacactggtccttgcttaccctaaatgctattaattccatcactctgagtatggtatctgctctcagccgaatgcnnnnnnnnnnnnnnnnnnnnnnnnnnnnngc

SEQ ID NO: 8765 - DNA, 1319 bp, Macaca Fascicularis
taacataaatccactggcaacacagtttagccaatgtacagagattggagacagcaaggaaattaggcaggaggcaccaagtatagccatagtgcaggcatttaatttcaagatacctaagacctgggacagtgagtttgggggaagggctccagtcgaaatcccagtgtctctctattatatatcctgtcaccatcacccatttcctactcacagactcagtttctggccatttcatctacttcctgtgtttgcacacttttcattaattgagaaccattcctgctgactctgcagtcactatggcctagtagtaagatcataggtgttggagtcacagcttaggctagaattgtaattctgtcactttctatccatagtttgaaatatgtgacttaagcctcctctgtctcagtttcttttatataccagcagagttggggtattcaggataatgtattgttgacagtttggtttactgacatagtagtttatcgtacagttcagccagattgcttgggtttgaatcttgggaatctaggtctatagttttgtaagtcttttaatttgcctcttccttggtttctccacctatggtggtgtccactctgtaagattgttaggaaaatttaattaaaacgtgttacacacttagaggtatgcctaagtaaactctagcttaattagtatcattactaggaatactttacagggttgtcataataaaaacatgatgaattgtatgtgaaattctttagttggtttagttttgttttatttttagagacagggtgttgctgtgtcatccaggcttctggtagcattatcatagctcactgcagcctcaaactcctgggctcaggtgatcctcccacctcagcctccagaatagctgggactgtggctgtgtgccatgtagaaattctttaatacagtgtacaaatagcccctgacttatgatgtttcagcttacaaatgatgtgaaagcattatgcttcggtaaaaactgtactttgaatattttttattgtttttattttttatttatatatatgtatattaaataatttttttttttttttgagacggagtctcactctgttgctcagctgtaatacagtggcacaacttggctcactgcaacctctgcctccctggtggtgcactcctacagtctcagcttcctggggggctgaggtaggaggattgcttgagcccaggaggttgaggctgcagtgagccatgattgcaccactgtactccagcctgggtgacagatcctaagaaaccctgtttccaaaaaaaaaaaaaaaaaaaaa

SEQ ID NO: 8766 - DNA, 771 bp, Macaca Fascicularis
  misc_feature (1)...(771): n = A,T,C or G
gtaaacaagaacttgacaaagctgcagagttatcagtcctttgacagggacaggtggggcagagagcaaggcaggtaggctggaagaannnnnnnnnnnnnnnntgcagagccatgaacgtcatggcatgtccaaggaattaaatgggagttcatctggcctggggtggaggccaggatcagaccatggtgggccttctagataaggagcttcctgggtgaaaggggagatgtgaacgttccctggaggaaagtttcatgattgcatctataatacattgcctgttttgtgaatattgacatatgtccatacccaaaacacccctgcccacgaccagcttcctggctggtacccatgataataattgagctgaaccttggggcccctcgttggggaacaggtgagttctatttgagacttctagccccagaaaactgcctcagtctggaaatggctctcataccaggagctcggccccctttttgtagctgtgactgtcaccctctcaggctttgtctcatccttcattctgagggagatggcagtgttcttctctggggcctgatccacctttacaccagcccaggaagccccatctgtgcatgcnnnnnnnnnnnnnnnnnnnnnnnccctttggtccccttccagtctcttccccctttctatcccaatcaccaacagaaatgctaacatccctgcctggtagccagactagcccactaaagctccctgtaaatgggggctccattagttctgcgcagagactaataa

SEQ ID NO: 8767 - DNA, 231 bp, Macaca Fascicularis
gagtaggagcacgagggtttgaggggggaagtctcccctcattatggaccctggcccaggagtggaatccccgaggacacgtgggaaccccattccctacatggcacgatctctgagtgtcctctctggagggaatatgtgagagggccacctggccgccctctacacagatccaccccgccacggcgctggggcccctgctctctgagttttcaggacacaggtcacggg

SEQ ID NO: 8768 - DNA, 2928 bp, Macaca Fascicularis
gaatgtgtcatccagtgagaggatgacatcgcatgtctgggcatggaagattttatgcacctctgtaatgtaagattgccaaggatatttaaatgaactaagattaaacgaccagcacagatcttaatcattactcaaagaatcattgccatataaacattgtaatttatgaaagcatggctggagatgtaatgagatttgaggcaaaatcaagatcatcagcagaaaattaatagcttcactatttcttaaatggaaaaatgagaaagggtgatgaaagaagagtcaatccccaaaatcaggcatgagtggaagattgaaaaagaagctgtgatttgggaaaaccacctagtactgggagtcaggagaacatgaatgagttccagttctgccactttctagctattcttgaatcaatgacttccccttgccagaacttcttaataaaatgaaaggatttaaatatgctctactagaatatactatggaccattctagatcaaagacgatgatgctgccagtgagaatgaagatcaggaaatatgccatgaatttcaggcatttatgaaaaatggaaaactgttctgtccccaggataagaaattttttctaagtcttgatggaataatgttcatcaataaatgtgccacatgcaaaatgatactggaaaaagaagcaaaatcacagaagagggtcaggcatttagcaagagctaccaaggctactgctccaacagagctgaattgtgatgattttaaaaatggagaaagagatggggattttatttgtcccgatttttatgaagctgtttgtggcacagatgggaaaacatatggcaacagatgtgaactgtgtgctgagaatgcgaaaaccgggtcccaaattggtgtaaagagtgaaggggaatgtaagagcggtaatccagagcaggatgtatgcagtgcttttcggccctttgttaaagatggaagacttggatgcacaagggaaaatgatcctgttcttggtcctgatgggaagacacatggcaataaatgtgcgatgtgtgctgagctgtttttaaaagaaactgaaaatgccaagcgacagggtgaaactagaattcgacgaaatgctgaaaaggatttttgcaaggaatatgaaaaacaagtgagaaatggaagacttttttgtacacgggaaagtgatccagtccgtggccctgatggcaggatgcatggcaacaaatgcgccctgtgtgctgaaattttcaagcggcgtttttcagaggaaaacagtaaaacagataaaaattcgggaaaagctgaaggaaaaactgaagttaaaagagaaattttgaaactctgcagtgaatatcaaaatcaggcgaagaatggaatacttttctgtaccagagaaaatgaccctattcgtggtccagatgggaaaatgcatggcaacttgtgttccatgtgtcaagtctacttccaagcagaaaatgaagaaaagaaaaaggctgaagcacaagctagaaataaaagagaatctggaaaagcaacctcatatgcagagctttgcagcgaatatcgaaagcttgtgaggaatggaaaacttgcttgcaccagagagaatgatcctatccagggcccagatgggaaagtgcatggcaacacctgctccatgtgtgaagtcttcttccaagcagaagaagaagaaaagaaaaagaaggaaggcaaatcaagaaacaaaagagaatctaagagtacagcttcctttgaggagttgtgtagtgaataccgcaaatccaggaacaacggaccactttttttgcaccagagagaatgaccccatccagggcccagatgggaaaatgcatggcaacacctgctccatgtgtgaggtcttctttcaacaagaagaaagagcaaaagcaaaggctaaaagagaagctgcaaaggaaatctgcagtgaatttcgggaccaagtgaggaatggaacacttacatgcaccagggagcataatcctgtccgtgacccagatggcaaaatgcatggcaacaagtgtgccatgtgtgccagcgtgttcaaacttgaagaagaagagaagaaaaataataaagaagaaaaagggaaagttgaggctgaaaaagttaagagagaagcagtacaggagctgtgcagtgaatatcgtcattatatgaggaatggacgactcccctgtaccagagagaatgatcctattgagggtctagatgggaaaatccatggcaacacctgttccatgtgtgaagccttcttccagcaagaagcaaaagaaaaaggagctgaacccagagcaaaagtcaaaagagaagctgaaaaggagacatgcgatgaatttcggagtcttttgcaaaatggaaaacttttctgcacaagagaaaatgatcctgtgcgcggcccagatggcaagacccatggcaacaagtgtgccatgtgtaaggcagtcttccagaaagaagatgaggaaagaaagaggaaagaagaggaagatcagagaaatgctgcaggacatggttccagtgatggtggaggaggaaacactcaggataaatgtgctgagtttcgggaacaaatgaaaaatggaagactcagctgtactcgggagagtgatcctgtacgtgatgctgatggcaaatcgtacaacaataagtgtacgatgtgtaaagcaaaattggaaagagaagcagagagaaaaaatgatgattctcactccagctcaaatgggactggatcagaatcagggaaggatacatgtgatgagtttagaaaccaaatgaaaaatggaaaacttatctgcactcgagaaagtgaccctgtccggggtccagatggcaagacacatggcaataagtgtgctatgtgtaaggaaaaactggaaaaggaagcagctgaaaaaaaaaaaaaaaa

SEQ ID NO: 8769 - DNA, 784 bp, Macaca Fascicularis
  misc_feature (1)...(784): n = A,T,C or G
gaggaggaagagtttgccagcccgggatggaggcttcancnnnggaacacagatctgcatgctgagacgaacccggatcctctcatcaccacagactatggcagctggcagatggtaacgggctgtggcagtattcaggagcgggctgtcctgcacacagactcctctcaggagttggacccagctcccctggaggtccccaannnnnnnnttgcagccctgagtgatcgagagactcggctgcaggaggtgcgctcagccttcttggctgcgtacagcagcacggtggggcttcgggcagtagcccccagtccctctggtgccnnnnnnnnnnnnnnnnnnnnnnnnnnnnnnnnnnnnnnnnnnnnnggcatcagcagcaatgccttgtgaagaagccagccnnnnnnnnnnnnnnnctcctctctcagctgagccnnnnnnnnnnnnnnnnnnnnnnnnnnnnnnnnnnnnnnnnncaggtcaggggaaatttcactcccccatctccatcatgtacatggcagccccaaagctgagcaannnnnnnnnnnnnnnnnnncaatccccagcctcttgactggtgaccaccaccccttcttgtcactgtctcccacccaccccgtctttgctgggattcccatcaactctcagaactgtgtggggtttccctggggccttgtggaagccatgacttcacaaagaccctacctctcaattcttgtttcctggggaggagggatcacctnnnnnnnnnnnnnnnnagtnnnnnnnnnnnnnaaaa

SEQ ID NO: 8770 - DNA, 754 bp, Macaca Fascicularis
  misc_feature (1)...(754): n = A,T,C or G
ttttcattcttcacattgagttttgagttgaactcagtctaaaattaataaactttaaaaagcaaagctcaaaacattaaaagtaaaattctgctgtccactaaattctccctagaatattttacttattgctgccgctacgtggctcttgtccagttacacacaaacatcccctgttatttgtaatggctgtagtgcgcaaggctgtttttgttcatcattcatactttcaatttcaaggcagtgtaacagataaaacaggctctttcaaggtgaggtgaatgtctgggctcctgtgcccgacaccattgtgggtaggtctgctgcctaggcctgggggcaggcgcgctggagattcggccagctccctgcaggccctccacggtggccagaggcccctcccacaccagccagccctctgaaggagttccagctctactagaaaatggtttggaagaactggttttaagccaactttttacagagctgtgatgtaaaagagactgctttctcttttacagagattttcaggtgttttcattggctgagattttttgtttgttttgagacagggtctcagtgtgannnnnnnnnnnnnnnnnnnnnnnnnnnnnnnnnnnnnnnnnnnnnnnnnnnnnnnnnnnnnnnnnnnnnnnnnnnnnnnnnnnnnnnnnnnnnnnnnnnnnnnntgtgcacaccatgcctggctattttttgtagtttagtaggacagcgttttgcatgattgcccagc

SEQ ID NO: 8771 - DNA, 749 bp, Macaca Fascicularis
  misc_feature (1)...(749): n = A,T,C or G
actcaaccaaaagacggtagagaagnnnnnnnnnnnnnnnnnnnnnnnnnnnnnnnnnnnnngagaatggagtnnnctgcaagcctcgttgatgaaattgtctactgtaannnnnnnnnnnnnnnnnnnnnnnnnnnnnnnnnnnnnnnnnnnnnnnnnnnnnnnnnnnnnnnnnnnnnnnnnnnnnnnnnncctccccaagaccttactagggccgacaaactnnnnnnnnnnnnnnncagtatcacttccctgtttataaaacctctaaccttgnnnnnnnnnnnnnnnnnnnnnnnnnnnnnnnnnnnnnnnnnnnnnnnnnnnnnnnnnnnttcttttatctcaaatgaaaatttaatttcagggattcatttctatgttttatttgactttcccatatgtagtattattatttccttatatgtgtaaggtgaaatttatggtatttcagtgtgcaagaaaatatatttttaaagctttcatttctcccccagtgaatgatttggaatttttatgtaaatgtacagattggttttttcttattttnnnnnnnnnnnnnnnnnnnnnnnnnnnnnnnggtttgttttgcaacgttttaaacagagctttaatattgctgttaaaagaagttcctttgcttttaaagaaacgtgnnnnnnnnnnnnnnnnnnnnnnnggatgtggaaagtaatatttacagatatggggggatgtaataaaacaacattaacttggtttcttgtttt

SEQ ID NO: 8772 - DNA, 763 bp, Macaca Fascicularis
  misc_feature (1)...(763): n = A,T,C or G
caagatgaagacagaggtaatttaagaaacattcacagcagnnnnnnnnnnnnnnnnnnnnnnnngtatctcagagatgttaactgtcctttcaagattcaagannnacaagaagctattgactggnnnnnnnnnnnnnnnnnnnnnnnnnnnnnnnnnnnnnnnnnnnnaaaatacaaggatttagtacctgataattcaaaaactgctgacaatgcaactaaaaatgcagaaccattgatcaatttggatgtaaataatcctgattttaannnnnnnnnnnnnnnnnnnnnnnnnnnnnnnnnnnnnnnnnnnnnnnnnnnnnnnnnnnnnnnnnnnaaggcaattcgaattttggttcaggannnnnnnnnnnnnnnnnnnnnnnnnnnggcaaatcaaacaaaagagggcttgcctgtnnnnnnnnnnnnnnntattcttggnnnnnnnnnnnnnnnnnnnnnnnnnnnnnnnnnnnnnnnnnnnnnnnnattgctgcacatagaagnnnnnnnnnnnnnnnnnnnnnnnnnnnnnnnnnnnnnnnnnnnnnnnnnnnnnnnnnnnnnnnnnnnnnnnnnnnnnnnnnnnnnnnnnnnnnnnnnnnnnnnnnnnnnnnnnnnnnnnagcttctcacctgcttagtacaattgggaaccatacacttccggcatgtttggaaatcaaaatgtcacattctcgggggaggaagnnnnnnnnnnnnnnnntgttctagagatttaccannnnttgctttttt

SEQ ID NO: 8773 - DNA, 111 bp, Macaca Fascicularis
  misc_feature (1)...(111): n = A,T,C or G
gaaagtccaagccataggacccagttttattagcnnnnnnnnnnnnnnnnnacaccgtgggctgttacttgccttgagttggaagcggtttgcatttacacctgtaaatgt

SEQ ID NO: 8774 - DNA, 607 bp, Macaca Fascicularis
tcctccctgtctgcatctgtaggagacagagtcaccatcacttgccgggcaagtcagggcattagcaattatttaagttggtatcagcagaaaccagggaaagcccctaagctcctgatctatgctgcatccagtttgcaaagtggggtcccatcaaggttcagcggcagtggatctgggacagaattcactctcaccatcagcagcctgcagcctgaagattttgcaacttattactgtcaacaggataatagttaccctctcactttcggccaagggaccaaggtggagatcaaacgagctgtggctgcaccatctgtcttcatcttcccgccatctgaggatcaggtgaaatctggaactgtctctgttgtgtgcctgctgaataacttctatcccagagaggccagcgtaaagtggaaggtggatggtgccctcaaaacggataactcccaggagagtgtcacagagcaggacagcaaggacaacacctacagcctgagcagcaccctgacgctgagcagcacagactaccagagtcacaatgtctatgcctgcgaagtcacccatcagggcctgagctcgcccgtcaccaagagcttcaaca

SEQ ID NO: 8775 - DNA, 748 bp, Macaca Fascicularis
  misc_feature (1)...(748): n = A,T,C or G
gacnnnnnnnntgnnaggcagtnctgtnnnnncntttaagaggcccgggggtggggttcaatggggagcagcattnnncggccgtgcccagggctctggaatctgtgaaattatatgtcttgtttcacnnnnnnnnnnnnnnnnngggcttcctctagccaggctcagccccatgacagccctgtgacagcgaagggaccgttctgtccccgcccctgtccctgtgccgggcccacgtgctcacccacctactggtaaggatcctctgaggcctggcttttccaaaatttgccacnnnnnnnnnnnnnnnaagaggctgagcctcggctgtgctctttttgtcccttccaggtgcccggcgcccctgggcacccagagccccccagataggcccatggaggaggtggaggaggtggaggagctgccccaaaactactggcctgtggtctggactccagggccccatttcnnnnnnnnnnnnnnnnnnnnnagcccatcggggccaggcctgaggaagtgtttcttgggaggatgggatgaccccctgttcccaagagatagcagcacagtggagggcatggtggaaaaggccctgccatgggatcctagggaagtagccagccacctgagggccaggacagcctgaaggagggatggcggtcactgcccacaaggggcctggtgggaacgggtcccaggacagactcacggccagaccccgtcagcggcctctgnnnnnnnnactcat

SEQ ID NO: 8776 - DNA, 751 bp, Macaca Fascicularis
  misc_feature (1)...(751): n = A,T,C or G
gcattgtataaacagnnntaagtatagnnnaagaagagaattccttttnnttctttagtccttctgccattttttattttcagttatatgtgctgaaataattactggtaaaatttcagggttgtggattatcttccacacatgaattttctctctcctggcacgaatataaagcacatctcttaactgcatggtgccagnnnnnnnnnnnnnnnnnnnnnnnnnnnnnnnnnnnnnnnnnnnnnnnnnnnnnnnnnnnnnnnnnnggaggttaacactgaagttgtggttgttaggttcacaccctgttttataaacaacatcaaaatggcagaacnnnnnnnnnnnnnnnnnnnnnnnnnnnaatgtgctttaacaattcccagtactatcagtattgcgnnnnnnnnnnnnnnnnnnnnnnnnntcactggcttctatgcgcttcttttctctcatcatgttcttttaccccagtttccttacatttttaaaaattgtgtcagagttgttttttctttagatcatnnnnnnnnnnnnnnnnnaaaattaattcatccaatacccctttactagaagttttactagaaaatgtattacattttattttttcttaatccagttctgtaaaaatgacctataattttattcatgtacaattttgattacttgaattcttaaagaaaacattgtttttgactatgggagtcaactcaacatggcaaaaccatttgagatgatgatataacag

SEQ ID NO: 8777 - DNA, 885 bp, Macaca Fascicularis
  misc_feature (1)...(885): n = A,T,C or G
gtgctgtgtggaaccacctgacgacatggttaacgaggaagatgatgtgttgaccggctgccgnnngaggactttggtcacccagactagacaccttctgtgctcatgtttggaaagctgaaagggaaggacagctgtgccctcctgggagctcacgtgtccctggcactgtgctagctttcctttacagctgtttacagacaaggcaggcctgaggaggatggccactgctcttgtgatgtttgctcagaggaatatgaacattttatttttgaaaagggatgatgtggttttgtgccaggtgtttataatttaatcctttaatattatggttattaacctcttaaacgtgaaagaattcttgattgttttaacacagtacctaagactaatgctttctgtggacaccactgagctctgcctcaactccaccctctgggaccggagaactatgcccctggaaactgctgtcggtgtggacactgtgctggttctattttctaaaggagtagaaagacaggtctctgagacaggatcgttgtccctgcaggaggaacagtggccttgcttcttagacggtcttcactgtgtgttttaaaacaaaaacaacaacaacacnnnnnnnnnnnnnnnacctgtaatttaaagatcataaacttcaggcaataatattttctgtgtaagcttttaaaattatttttggggatcatagcttgttttattttgtgctataaaattaacagtattaaatgacttatattcttagaacacatcgagtgtcttttcttaacagattagtgcctttttatttttgtattccgttttacgttactggtcccagcatcaaaacccttgtttccatggcctgtttgtatattgtctcaa

SEQ ID NO: 8778 - DNA, 186 bp, Macaca Fascicularis
accgcactcacaccgggggcagcctggagccgggatcgcagggcggggccaggccactgccctcctcctccctcatggctggcttgcccccttgcctgcctgcatgcaggcttccagcagagccagcttcttcagagccaggtggatcctgtcttggtcctgcgtaggtgtgtgaccctgggcgaa

SEQ ID NO: 8779 - DNA, 681 bp, Macaca Fascicularis
  misc_feature (1)...(681): n = A,T,C or G
gaaaaagaaaagaattttaaannnnnnnnnnnnnnnnnnnnnnncgtttgagcagtggtattttccagtggaaagtcatgtcttaagggttaatgccccttaactgttgtccctatttgaaaaccaagctaaaaacaagagacacaaacatgtatgacggtgtggtgtggatgctgtgtttattttnnnnnnnnnnnnnnnnnnnnncgtccttgannnnnnnnnnnnnnnnnnnnnnnnnnnnnnnnnnnnnnnnnnnnnnnnnnnnnnnnnnnnnnnnnnnnnnnnnnnnnnnnnnnnnnnnnnnnnnnnnnnnnnnnnnnnnnnnnnnnttcagaaaacagtagtacctctggttagactagaatcagtcctctcctgagggcagtgaaataggatattttctgactgctaattaaaaatacctatgatagccggacgtggtggctcacgcctgtaatcccagcagtttgggaggccgaaggggcggatcacgaggtcatnnnnnnnnnnnnnnnnnnnnnnnnnnnnnnnnnnnnnnnnnnnnnnnnnnnnnnnnnnnnnnnnnnnnnnnnnnnnnnnnnnnnnnnnnnnnnnnnnnnnnnnnnnnnnnnnnnnnnnnnnnnnnnnnnnnnnnnnnnnnnnnnnnnnnnnnnnnnnnnnnnnnnnnatgccnnnnnt

SEQ ID NO: 8780 - DNA, 722 bp, Macaca Fascicularis
  misc_feature (1)...(722): n = A,T,C or G
gcggttccttggagtaaaatcatttgcggtcataattgctgcttatggtttagtatacacaccatctgctgctctaagttcacatcctctcaaaagtacgcaagtgcttgaaatttaaatatttcccagatctagaacaacttgtgactacctaagacatgcttgaaccaaataagaaacagcactgtggaataaaatatgccattgtgaacatacctgatgctgcagtgaaatgtaaagttccttactttgctgatttttcatcataactccttgactcataaaagcggtgtctaaactgggaacagctgctaatagggtaaaagtattatatgtgaaataaaagttcattacaatatttgtactcataagtcaaaatctgacctggctcgctttgtgcctctgtcagtctacttacagtgataaatgtacacatgagtccagtgttcccaagcagctttgtttatagaaagaagcttggtcccctgagttctatgctgttctgtggcctgattggtacatgccatcatgaatgcaagatgactttggtttgagataatttgtcactccacattccacagagaaaactgtttcattttgatggttggaaaaacatgaccagagaagtgtgtgactcagataacgttccccgaaagttgcagagcagtctgtggtgtctgtcatagccaaactagtcctnnnnnnnnnnnnnnnnnntgtac

SEQ ID NO: 8781 - DNA, 769 bp, Macaca Fascicularis
  misc_feature (1)...(769): n = A,T,C or G
taggtgtgataaagaatggacagcnnngaagaacagtgatggaaaaaaagatctaatgggaatagactcagcttggggacctagcaaggcctgtctgttcagattctttttggtctctgtgcagcattccttcctcctggatacagggcagggcctgtatggaatggggatcttataacctactatcaaacaaggtaggtcagagaatttatttatggccagctcttacataggtgagggaagattagagtactatctttatgatgtaagtctggcattgtggaaaagtggttccggtttctatgacctaccttggggaagaggaattcaagtttctatatcttgctttcggggtgaatgaggctgaaacaggagggcaggataacgttagagaaaactttgcttctgaggctttcacttcgggttttctgagccccaacatctgctagagttataaaaattagggacgaagcgaggggaggaaagaatccatctcttcattctgatgctgggagactatttccttgagatgcaattgattttgcctctgctaagaggctctgctggctagccacacgctagccagtgtcctgcatgggtgctaccctgaattatttgtaattgtgcttaggtgatttgtaactcaagtataggatatttaaatagtgggcaccctttttgcgactttttttttttttatctagttcttgtatactacagataatatttgaacttgtcatctcactgtacaacttttgttcattctcat

SEQ ID NO: 8782 - DNA, 749 bp, Macaca Fascicularis
  misc_feature (1)...(749): n = A,T,C or G
acgaaaaacttttaaaagttctagtggtacggtaggagcnnnnnaggaagtttgcaaaannnnnnnnnnnnnnnntttagagcnnnnnnnnnnnnnnngaaaaaatgttttaatatttgcaagcaacttttgtannnnnnnnnnnnnnnnnnnnnnnnnnnnnnnaatgtccattgtttataagctgagaatttgccaatatttttcaaggagaggcttcttgctgaattttgattctgcagctgaaatttaggaaagttgcaaacgtggaaagaagaaaattattcagatttggacattttaattgtttaaaaattgtacaaaaggaaaaaaattagannnnnnnnnnnnnnnnnnnnnnngtggtcttgtttaaaagggcaaaagttttagattgtactaaattttataactcaactgttaaaagcaaaaatggtcatgcaggttgacatcgttggtaatttataatagcttttgttcaatcccaactttccattttgttcagataaaaaaaagaacatgaaattactgtgtttgaaatattttcttatggtttgtaatatttctgtaaatttattgtgatattttaaggtttttccccctttattttccgtagttgtattttaaaagattcggctctgtattatttgaatcagtctgccgagaatccatgtatatatttgaactaatatcatccttataacaggtacattttcaacttaagtttttactccannngcacagttgag

SEQ ID NO: 8783 - DNA, 762 bp, Macaca Fascicularis
  misc_feature (1)...(762): n = A,T,C or G
ctcaatcatatgacatgtttatggcttactggaatctgatagcatctgaagttgttataataacagagagcatttaaatatacactaagtgcacaaattgtagagtaaagacatcaagctctgtttttgaggtctaagtcacaaagcatttgttttaacctgtaacagcaccatgtttaatggtggttgtttctgtttaaactacatctttcctttagaaattcttggtttctttttaatttttttaccttagaaatcaacgatatacagtcaaaaatatttgatatgctcatacgttgtatctgcagcaatttcagataagtagctaaaatggccaaagtcccaaactaaggttccttttctggccctctatatgactttaaacttgannnnnnnnnnnnnnngttggcacatctgtgatacagcaatgctaagtnnnnnnnnnnnnnnnnnnnnnnnnnnnnnnnnnnnnnnnnnnnnnnnnnnnnnnnnnnnnnnnnnnnnnnnnnnnnnnnnnnnnnnnnnnnnnnnnnnnttgttaaatttgttcttcatactggagccatgaagctcagagcattagctgatccttgaactnnnnnnnnnnnnnnnnnnnnnnntataacagacttaggtannnnnnnnnnnnnnnnnnnnnnnnnnnnnnnnnnntctggggcttatgggaatgaaagggtgtgaaattgactaacagacaaatcatacatctcagtttctcagatactaacgtaagatcatata

SEQ ID NO: 8784 - DNA, 767 bp, Macaca Fascicularis
  misc_feature (1)...(767): n = A,T,C or G
tattcatagtcacttcaaagatttggttgctattgtgaaaaggaattatgttacctttcactttgacactaatggagtaaagaaaaacaaaaatannnnnnnnnnnnnnnnaatttatctaaatttatcccttaatgttggaacaatcttttcaaatcttatgaaaaatgtaaattcagaagtccaagaagttnnnnnnnnnnnnnnnnnnataaaaatgaagagcacaaccagacaccaaatttcaagacataaatcaaaactagtttaataaagaatatcttaaaagtagccaaagaacaaagacatgatatagagtgtattcatctcctagggctgccctaacacagtacctcagactggatgttctagaacaacagatctatctcatagttctggaggccagaagtcaggttggggtggtgttggcagggctatactctcttctgaaggatctgttccaggcctctccccnnnnnnnnnnnnnnnnnnnnnnnnnnnnnnncataacttcacatggtgttctaagtgtgcctatttgtgtccaaatttcccctttttataaggatactagtcatgggattaagggcctgtcctactccagtatgactnnnnnnnnnnnnnntannnnnnnnnnnnnnnnnnttccaaataaggtactcaggggtaggacttcaacacacattttgggaagacaattcaacccgtaacaggttaatgtattatttattgttgtgtaacaaattatccgcaaaattagcaactaa

SEQ ID NO: 8785 - DNA, 725 bp, Macaca Fascicularis
  misc_feature (1)...(725): n = A,T,C or G
tttnnnnnnnnnnnnnnnnnggaaattagagattttttaaaatctcnnnnnnnnnnnnnnnnnnnnnnnnnnnnnnnnnnnttctcctcaacaacgtgaaatgatcctgtgcctctatccgacaactgtaaaacaaagcactgcatccttcnnnnnnnnnnnnnttcatggctgttcacgggcatctcttggcctatgacgacgatgttggagagttcctaccccgtgataactgagttctaagtgcaagcagtcnnnnnnnnnnnnnnnnnnnnnnnnnnnnnnnnnnnnntaaaatgaactatattctatacttcgtaacacnnnnnnnnnnnnnnnnnnnnnctgcaagtaaacnnnnnnnnnnnnnnnnnnnnnnnnnnnnnnnnnnnnntttaaagcagccannnnnnnnnnnnnnnnnnnnncannnnnnnnnnnnnnnnnnnnnnannnnnnnnnnnnnnnnnnnnnnnnnnnnnngtttgcagctttggtagttgactgaattgtaaaccattagttaaactacatttcagttgtgctttgtaagaaaaacacttttctatgccttgaatgttctataactaaggagcttggtaatctgctaaaaatcacactgaagtctcnnnnnnnnnnnnnnnnnnnnnnnnnnnnnnnttggcaaatatttgttttcggttataaaacactttttttctgactagtacattgttaatgttctt

SEQ ID NO: 8786 - DNA, 661 bp, Macaca Fascicularis
tccctagcctcatagcatagtttccgcctgatcgttacatggatgatgaagaatgattcacaatggagacagcccttggtgaatgggcacaggaagggctttagacagttggtgagaaggatgtagatcattcaaagaggaagagggtggtcaagatgggatggagcctcctttgtggactcctcttctccatcattgctgagtgcatagataaagtgtatcctgacaaatgcataagaagcttcataaaaggaaatccttgtccatgaagcatgaatttgggaatctgttatttaaatccttggcattgagggcataaaaatatgaaggtcactcatggttgtccaataaggaagtgatcatttattagtaatgtaatttattattcctctcttgtcatctctttctatccctctactaagagagttagcctgaaattctccctggtggtctgagcacattcactgacttgaacaagcaccatcattggtcttttctccagagtttgcatttgtaatagatagtttttccaactactggtagtcaagtgaaacaaatgttgattttggtttacataagaaatagttttaatctattcactgcaataaattttgtacttaaatttttcttttgctatttttttttgcatccgaaaaaaaaa

SEQ ID NO: 8787 - DNA, 2564 bp, Macaca Fascicularis
  misc_feature (1)...(2564): n = A,T,C or G
caaaagaaaacagactaattatatcataggtggtatcagtaggtccgcttataagtaccgtcctatgtagacatttactttttggtttttacaagcatagtttgtacttttagatgtctgtcaggcgaaaaatagaagttggcagccctgagcaagcacctgtgacgcagggatttttatttttgttttaaagtatgatacagagaatgaggtttttggtttgattcggtttggttgtgttttttagttctttattttttatttgggggttctcttagtgatggcatatttcaggtttcagtgacatagatcaagtaattttaaactgatttggttattctacctaagatgagggacatggctattaaggtcaagccaaactatgctaaaagtagtatagggcagcagttaaaattatcttttgaaaatcaagtactgcctggtttcttctgtcacaatagaatagccggttacctagtcagtcacggttgccctcgccttcccttgttagtccctggaagtacttgagtggaacagaaggtagaattagcaacagctcaatcactttaggtagcatttctcctgaattctgctgccaaatccccagggtctatggattggttgaaatagtaaaatcatacattgtgatttcttgcacagcatagaggcatttaattttagtggatagtgaacaaagaaggaaaactgggtcatataaaatttaaccttaaaacacagattataaatgtctttgaatgttaagccctaggcagacaggtactctcattcttaactctggtatgcaagctggccttgctgacagtggcacagttacattaactgttttctaagttgcatgttgtgacgtgaatgttttttgtagaagttgccaagttaatcgagtcctacataagtagcaaaatggtaattgacacccactgtagtcattactttatattatttgctttcaaacactaaagcctcggctgctaattcagcacttaggtgtgcagcgtctccttctcttgactcctagccatgatgggaacttgaggttcttcagcatcatcagagatttcttccaggccacatattttttatgctaatatttctatagttgcattcagtctacaaggagaaagtgtacattgatgcatgttttacaaactcagacaccgatagctaaaaccgtaattagtttttctatacccaagagctttgaattaaaagcagacgctttatttttcccaagagcagacaattctacattctaacatgacattaggaattggtgataggagaagcagaattcagaacgatttagtgagactcagggaaaaaatgcattttcccctggctgtttgaaaatttatttatttgtagataagtctagatttagtcttgaagatcaaagttttttatacgttaaaaacatattcctttatattgatcaaaacatggcatatgttagacttctgtcatgtttatgtactttggaattaagttgtttgcattcactttcaaaatctgcccatttctgtttatgtgcacttaccacagatgtgtggggactttgcctcaggggagaggtactttagcacctgtgtcactgaggagatggagtggttgacaagtactgttgcgctgtgtaacttggggtttggctctgtagacaatatattagcagaatgataccacatgaaagtattacaggattaaggcatgtaacttctatggtagtccttatgtatcagcatatacccaagttcagaaaccacaggtgcatttttagacctttacttagagaactaaaggcagttccaaccatcagcccatatggggggattaatgcatgaaaaccctaaaagaggctgttgggacatcccacttccctgtcctcacccagtggaactctggtgtgtgacttgagataaggaagtagatggaaacttagcctgtcattgagtattcttaatattttggccttccctctggaattatgagaagtttaacaaagtctcaggaaccttcagagtccattacccacactgctagaaaaactgtaggaggcacatggggaattcctgtagttcttaggtaagccgaagacatggcacagggatccccagccacataaaggggagtctggatgctgcacaccgcaattctgaggaatccctgactgaacgtggaattatgacagtaaagttttggccctttagttttctagagcagctcacagaaattttaaaaggtaaaacaaggccaggcgcagtggctcaatgcctgtaatcccagcactttgggacgctgaggcgggcagatcacgaggtgaggagatagnnnnnnnnnnnnnnnnnnnnnnnnnnnnnnnnnnnnnnnnnnnnnnnnnnnnnnnnnnnnnnnnnnnnnnnnnnnnnnnnnnnnnnnnnnnnnnnnnnnnnnnnnnnnnnnnnnnnnnnnnnnnnnnnnnnnnnnnnnnnnnnnnnnnnnnnnnnnncacatcactgcannnnnnnnnnnnnnnnnnnnnnnnnnnnnnnnncaaaaaaaaaaaaaaaaaa

SEQ ID NO: 8788 - DNA, 700 bp, Macaca Fascicularis
ctgcaagtaactaccaagatacatgttcaccatccaaaaatgttctccatttttctctttgttaggagattcagcccaatttttttctatagaggaacatctttcttccagtaacagagaattgtcaattaccctcaaaattttccttaaattacttttattcatgctaggcctaaactctcaaaagctcagaaataagcttgctttctttcctttgacttcttcctgaggcttcttttctttatggcagtagcagccaagatgtagtttgaacagtggaagggcaattgtgtgaaaaaggacattttaccttttctttctctcccacttctgtctcctcaccagaaagaaaatatggttcaatctacttgcaatggaatccccactaaattctattttctaccaaaaacttcctttgcccatggaagcattgcccatggaagcagtccccaaaactttgcccacttttccaaaaggaactctattcctctagcctctataaaagaaattatagaaacaaaattagtgatttgtttcctttgttggatagttaactttactttgtgaaacccatgtgagaaatgagctattcttaggatagacaatactgcatacacagtatcacatagatctttgagtagcatagatctcagttcaaatcctggctctaccacttattaggtttgtgacttagaattgt

SEQ ID NO: 8789 - DNA, 698 bp, Macaca Fascicularis
  misc_feature (1)...(698): n = A,T,C or G
tgcataaaaaaggaaaatannntnnnnnnctaccagcatccagtatgaagttttaaagtggggattaggcacatgacagtatagcacccatttgaatttaaataaaagtgaaccatatgtatctggttatataaaattaaaagtggggatgggctaggaagaatgatgtaaccttttgtcnnnnnnnnnnnnnnnnnnnnnnnnnnnnnnnnnnnnnnnnnnnnnnnnnnnnnnnnnnnnntactctttaaggacacacagccnnnnnnnnnctgagtcagaataggcccctacaggtatattttaaaactcttcgtaattctgatgtgtactgctgctatagttgaactactgacctggatcttagtcctagcctttnnnnnnnnnnnnnnnnnnnntcttcatctctaaactagggaaacactgggattctttcttagctgtgggagaaggtatttggttagatgactttgaannnnnnnnnnnnnnnnnnnnnnnnnnnnnnnnnnnnnnnnnnnnnnnnnnnnnnnnnnnnnnggtggatgcgnnnnnnnnnnnnnnnnnnnnnnnnnnnnnnnnnnnnnnnnnnnnnnaaaaagacagtttttctaggtaccatgaaggaccctgttggtatgcctgtgggggtgggatgtgagtgggactgataaactgatatttttggtttcgtatgtaca

SEQ ID NO: 8790 - DNA, 134 bp, Macaca Fascicularis
aatgggatattacaaacatatttttaaatttaatatcaaagcctgttaattctcatgagactcttaaaattattttctcttgacatttaaagagcaagcacaccaaatatactgaagtatgtaaaatacaaatt

SEQ ID NO: 8791 - DNA, 765 bp, Macaca Fascicularis
  misc_feature (1)...(765): n = A,T,C or G
gcaaattcccatccttcccagacatagaacatatgtctatgtcctttnnnaagggaggcaaccannnacatccaacttaaaattccaggatctttaagcatagctcaacccttttgattgcgtccaaatgtggctctttatagtctagtgaaccatgacggtaagatgcccaatagccaatagtggagcaagaacaacgtaacttccatcaagcccccactggaaaaaaggaggaatggaaaacacagcaatcactttcacagaaatgattgaatcctgataggcatgaattggaaatgcgccctgctctcagagtggaaaattttcatggttagtccggctgcctccggtatgttaataactccctggcccgctggaaataactcctcagtctacagtcgtctgaggcactagctttgccctcaggaagtactatggtttaaatgtttgtcccctccaaatctcatgttgaaatatgattcccaatgttggaggtggggcctggtgggaggtatttgggtcatgggggcagatccctcatggatgtcttggtgccgtcctcacaacaataatgagttttcattctaagttcaggcaagatccggtcatttaaaagattatggtacctgcccccctctctctcttgctctcacttttgccatgtgatgcacctgcctcccttcgccttcttccatgattgtgagcttcctgaggccctcaacagaagcagatgccagcaccatgtttcctgtacagcctgcagaa

SEQ ID NO: 8792 - DNA, 572 bp, Macaca Fascicularis
  misc_feature (1)...(572): n = A,T,C or G
aaggcttggannnannnnnagannnnnnnnnnncacaccacacacaccacacacaccacacacaccacacacatgctcactgtggagaaccttgtgcctggctcagagccagccttttcggtgagggtaaccccaacactccaaagctcctgtccctgttctgttccacccagctccttgctacccagaaacccatctaaacacctgccctgacatgcacacctccccctgcccccaccacggccactggccacccccacccccagtggcttgtgtccctcctgggatctgcttgtcatcatttttccttcccttctacatctctctggtcccctacccctgatctgacatccccagtcacaaatactatgcccagtttctgcctctgggggagagcccagaaaaggacagaaatgaagtaggaaagggcccggtcctggcctggcttcccctctggaagtgaggcattgcacagggaggcgtacataacagcagccccttgactccaaggactccgggtttgagacggacacactggtnnnnnnnnnnnnnnnatggagacagagctcaca

SEQ ID NO: 8793 - DNA, 758 bp, Macaca Fascicularis
  misc_feature (1)...(758): n = A,T,C or G
gacaaagaagagatgcgtgcnnnaaccccagaatgacaataacccccagaaggtcaaatggacacaccacagttntgctctgtggatcatcccatggaagtttccnnnnnnnnnnnnnnnnnnnnnnnnnnnnnnnnnnnnnnnnnnnnnnnnnnnnnnnnnnnnnnccctaagaagagtgaatttcctttaacaccacctgaaacatgcaccactgcaaatatcaaaaggagacacccccaaatcccactctgaattccaaagtcaagagccacgatttcaggatctgtcaggacctgccaatgtcctctcagcacagagaatcaagcggtggcctttgggcagtagatttactgtctcaggtatgttgaactcaaactatgagannnnnnnnnnnnnnnnnnnnnnnnnnngcaggtgatgtcaggcaaatgcctagaacaaagggcaaaaggatatgnnnnnnnnnnnnnnnnnnnnnnnnnnnnnnnnnngatatcatttgctcaatggaatcagtcccgccgccacccaaccccttctgtacatagccgccccttcctgttccccctccctttagctcctcttgctttaggtctgatatgnnnnnnnnnnnnnnnnnnnnnnnctgacttggaggccctgggctcaggagctcatagacagaggagttgtgggctgactccacctcccaaaagtccctcttgccaagccctgtcccactggggctnnnngggcctctgcctgagcgtctgggc

SEQ ID NO: 8794 - DNA, 760 bp, Macaca Fascicularis
  misc_feature (1)...(760): n = A,T,C or G
aaaatagcnnnnnnnnnnnnnnnnnnnnnnnnnnnnnnnnnnnnnagtagactgagaccggaaaattgcttgaacccaggaggctgaggttgcggtgagccgggatcgtgccaccacacnnnnnnnnnnnnnnnagagactctgtctcaaaaaataaatgaataaataaaaaataacctcaaccaaatgcctattttttaatgcttaattttggtttgaaattcttcttaaactggagctttcttacgttaatacattcaaataacctgaaggaaactttcattatgggccaatattagctcttctggaaactgatttatatcttttttatgacctttcaaaagtaaaatactatgcataatctagagagatttgtcagataggaaattttataatgcattagccattagtcaaacttgctttttaacatgccagagaaaaagttgtaatgccttggaagtttttctcttttctatagattgtgttcaaatgatttgtatacttgcaataaggtttatgttaaagtggctttaacaatttgttgctattttccttctttagtcaatgtgactttgatgccattaactcctatgtgttattttctaagagaaattttatctttttttaaaaccttattaaaagtctttgaaagcacagctctttcatgacaaaatgaattgcattgttatccacttagatagatagatatttgacagtacatgtttaatatcacaaaagatacatacagaaaaacttcact

SEQ ID NO: 8795 - DNA, 737 bp, Macaca Fascicularis
  misc_feature (1)...(737): n = A,T,C or G
cactgagnnnnnnnnnnnnnnnnnnngnnnnnnnnnnnnnnnnnnnnnnnnnnnnnnnnntgttcttctaagtggtttttagtgcatcccctggnnnnnnnnnnnnnnnnnnggcttttagggaaaggcagaatgtgctagaagtcgaagtcatnnnnnnnnnnnnnnnnnnnnnnnnnnngaaccggataatctcagttctttgttcagtctttcccaaagaccttacaaaggagatgtgtaaatagatagattttgagactaataagtcacagaaatggaaaattttagagcagtttgtgtcacttaggtgagaactgattactttaaattaccaacatgtgcgaattctacttagtattcattattagannnnnnnnnnnnnnnnntgagaaacccaaggagaactattgaattaccacataattgtaatattatgctttcattttaattttgtatgggcagtgttctatcagactaagcttctagcctttgaaatgatttacatgaggagagagcctgtatatctgacttgagaaacattaagcagaccctattttcaccgtcgcggtaataactatttatttgctatcctagaggtgctgggaatgagcctccgggtgactttgatgagatatattcacatttggtattggaacgaccacatagcaacgtgttgggttttttttattgtaacactctgtgtaaatgttggcaccttattaaatattaaatgt

SEQ ID NO: 8796 - DNA, 658 bp, Macaca Fascicularis
  misc_feature (1)...(658): n = A,T,C or G
aaggaaccagcacataccatgaaggagaactgggcacctgtagttcnnnnngcnnnnnnnnnnnnnnnnnnnnnnnnnnnnnactgggtcccctttctatgtgacctgtgtatctctcatctgagtggtaccccccagccccctcnnnnnnnnnnnnnnnnnnnnnnnnnnnnnnnnnnnnnnnnnnnnnnnnnnnnnnnnnnnnnnnnnnnnnnnnnnnnnnnnagaggaagctggtctgggcctgggagtctgtnnnnnnnnnnnnnnnnnactttacttttaattgcctatgaaaatgaggtctctcatttattttcctcttcctgctttctnnnnnnnnnnnnnnnnnnnnnnnnnnnnnnnnnnngcaaggggtcctgtctgccaccatcctcnnnnnnnnnnnnnnnnnnnnnnnnnnnctgtatnnnnnnnnnnnnnnnnnnnnnnnnnnnnnnnccatggtcaagaggaaggatttctgaaggcagccctggaagtggaattaggagcttctaacccgttgtgatttcaatatacattcttcttttgccagtnnnnnnnnnnnnnnnctctcacctctctacatcccaatagatacccactatgtgcatgcacgcctgcacactcacggctgaaatctccctaacccagg

SEQ ID NO: 8797 - DNA, 711 bp, Macaca Fascicularis
  misc_feature (1)...(711): n = A,T,C or G
tggatgnnngagcgagaacccgcgcccgcgaacaaagacagcgaaccaaagcgatgcttcgaatttttaaaacggaatctctgcatccaannnnnnnnnnggtgacttaaggagctgcnnnnnnnnnnnnnnnnnnctgctctcgacctgccccccacccccagctcaggggaccttttgtctgaacgccagagctactgaaggggtcgggggaccgtggtggggagtggaagtgccggtcctgctgtccgccctcccagccccagttgcgaggctcaattgttggagagacaaaagcgatttcttcctactcnnnnnnnnnnnnnnnttcaggctgccccgcccccactgggggatcgcacctgtgagttacctgaggtatgcatttcccagaaccctgggcgtacccacctggggggcatgttggctctggggggaccatctctccttgcattcaggggccgtgaagctgagtaattttcggtcgcagggcnnnnnnnnnnnnnnnnnnnntttgtcctgctctgggnnnnnnnnnnnnnnnnnnnngggtcatcagaggactgcctgggatggtgcagcgggcacggagcgctgtgctggcctggctggggatggccgcggagatgcccttttcctggtgctttgtggtggctgcagaagaccagtnnnnnnnnnnnnnnnnnnnnnnnnnnnnnncagacatcttcc

SEQ ID NO: 8798 - DNA, 771 bp, Macaca Fascicularis
  misc_feature (1)...(771): n = A,T,C or G
ctgccagtgccggccggcttgggngacccacctgtgagacagcccagtccccctgtgacaccaaagagtgtcaaaatggtggccagtgccaggtggagaacggctctgcggtgtgtgtgtgccaggctggatacactggagcagcttgcgagacggatgtggacgactgcagccctgacccctgcctgaatggaggctcttgtgttgacctagtggggaattacacctgcttgtgtgcagagcccttcaagggacttcactgtgagacaggtaactggccaagtgcctggagcccgccatggctgatggtggccttgtgccgtgaataccaccatagccactttctccttcctgcctcgccgtctgactcacctcacacctgcctctggggtggggggatgcctttgcccccttcccactccccagcgcttcctgctcagcctggatcctcagccaccaactgcaggaaaaataggaagcaaaagatggatgctgcctccaatgtgctgtgtgaggctgagcaaccccttcccctctctgggccttggtttccatctgtgaagtgccgggagggatgacaaagttcccaaggctcctcttccagcctgggtgactcttgactttttaacatcttcctttcctactctagaaccctcagcacacaagggaaagtaacgggaatcagaaagaaaactgacctttcactattttctattctattttgtattgtttaactgctagttgtgacttgttagaggaataaaaagccaa

SEQ ID NO: 8799 - DNA, 217 bp, Macaca Fascicularis
cgcgccccgaaccccggccgggcccccgccccgcccccgccccgcgcgccgccccggcgccccgcacccccgccaggcgcatgtctgcacctccgcttgccagaggccctcggtcagcgactggatgctcgccatcaaggtccagtggaagttcttcaagaggaaaggcgcccccgccccaggcttccgcgcccagcgctcgccacgctcagtgccc

SEQ ID NO: 8800 - DNA, 515 bp, Macaca Fascicularis
agtggcttcttagtggggtctgattctcttcaccagttatgattccaggaagaagctatttctccaaggactaaccaaaaacaatgactttggagaaaaattagactcagaaagtctgtccaggcattgggttgttgaactgtcatctgttgggtggggaggagggttgccgtgattgtagcagtcattagacctgggacatgagctgtctgtcaaagcacagtagtaaatgactgtattttgtatatggcccccaatatgttgtgtgtaaatagaagctcagctggggattgatcacggccaggatgattggagcttggcagctctcatatccagaataagccactaagatggagctcatcaatcaccatcttcccatttacctcattagcatcccattttctatcattcagtattagttgacgatttctgatattaagtgatgagaaagtcagcagactagtcataaaagaactctttatataacaatgtacatgattagatataatattaac

SEQ ID NO: 8801 - DNA, 758 bp, Macaca Fascicularis
  misc_feature (1)...(758): n = A,T,C or G
gcccatattaaaaattatttttaaatnnnnntttaaatatatataacaaaannnactattttttaatatcaaaatgtatatatactgtgaacagtacatttacattgttgtacaaccaacactatttgcccattttaaattgtccttttaaacttgtcttttattgttgaattctcacattctggatgtgagttctttatatgatgtacgctttgaaaatatttgttcttattctatgggctgtcctttcactttcttgatggtgtcctaataacctttaataaattccttttactttcagactaactagagtaatgtctgttgtcagaagctaagaacactcacagatgcactgtnnnnnnnnnnnnnnnatccttttctataacaacctgcctctcattatatcttnnnnnnnnnnnnnnnnnngaactttgatttttattttctcctaaagcttttctcattctaactgaatcccgcctacgtcttatannnnnnnnnnnnnnnnnnnnnnnnnnnnnnnnnnccactaacacaattatgagcagttaccagtggccttcctatttattttccacttccacccaattctggcccagaannnnnnnnnnnnnnnnnatgacctccccatctcttgactccttttacactgttcctccctttcctcaattacannnnnnnnnnnnnnnnggatcttatgagatcaacatcctgtttaatctttggataatccttagtgcccaggacaaggcgtgcaa

SEQ ID NO: 8802 - DNA, 758 bp, Macaca Fascicularis
  misc_feature (1)...(758): n = A,T,C or G
acaagacacgcaaagancnnnnnnnnnnnnnnnntcacattcttatcattcccactcaaatcaaaggtccagggaggcacagacacggtctgtcttatgaccactgaatccccagaacagtgccttggcacagnnnnnnnnnnnnnnnnnnnnnnnnnnnnnnnnnnnnnnnnnnnnnnnnnnnnnnnntttgcttccctgaggacttccactacagagctcttcctgcctacnnnnnnnnnnnnnnnnnnnnnnnctcagaatgtcactatgtccccttggacagggcagtctggacagccagcctcctgtggctgagctggtttcctaatcctgggcctgcttatcctgactgcccttccttcctgttccaacccccagcaccctgcaaactcaccaggtgaccatcccactgggatctgtctcagtgggtcacgagagcacctgatctacatcataggagctgaccaggtagtcagtgttaaccaggccagcttttctctannnnnnnnnnnnnnnnnnnnnnnnnnngcattgttcagcgtccctggcccacggnnnnnnnnnnnnnnnnnnnntcacctaagacctccagcaccaactagctatcatacctggannnnnnnnnnnnnnnnnnnnnnnnnnnnnnnnnnntaaggacatatttttgcctctttcaactgtcatagaagcaagacgtgtacctgctgtgataagtaattaagtttctttcagaaaaagaagaacatttgttaact

SEQ ID NO: 8803 - DNA, 851 bp, Macaca Fascicularis
aattaaaaggatcattgccacatttcatatttatatttctacaatttgtttagaaaacatctcctgaccatatcagtagctggtgttatctttttatcaactgcttcccagagtcctaaaacaatacaaaatttggattgaaaagttcagcataaggagtttgagtgagtaaaggatgggataaagaagtcaagaagattcaatgaaaagtatcacaaaaaagagtttgatcaacaagagaaataaaaaagcccaagaggaaatgggaggggaaggaatttaagaacagcaataagtaaaactcttaagtaactccagaaagaaaatggtacattttgccaaagaccacttatacttgagaacatggaagaatttgcctgatcctctctttggggaagagagtctctcctcttttcctcaaaccccgttaccctcagcctctccaccccaccttctcctgactttgtcctcacttgcttctgcagtacattggaacctgaattgaaataaagtcttcccttgaataattggagtttgtcttgagaggcaaatgtagccccaagaatcacaagattcaaggaccatgtaggtcttttacacatagcccaactccataaatcagtctcgctttctttttgtatttatcgtttcatattaaaccctctatatcaaatgttcatcatgattttgtatgatttttataactattttattcattttattagatttattctaaaatttttaaatggtaaattcttaaactgtggaaaccactaaaggtgcttattaactgttctcccagatttgtacaagtattggaagattccttgagtttacagctgtacaaatag

SEQ ID NO: 8804 - DNA, 896 bp, Macaca Fascicularis
  misc_feature (1)...(896): n = A,T,C or G
catccctccctttccctccccctactgggcatcttccactcccagtcatttatcacaggctgaaggaaacacattattcaaaagaaaagggagaggcggggaggaagacctaggacttctcaaacccctttccttccaagagctccaggctcgatgctatgatcactatgnnnnnnnnnnnnnnngattgacacattcagctagagagaaaccaagcaacacagaggttcactgacgggcgtccgccccccacccccgccccagcaaaccgggggatgagtttaatttgctttccattaaagctcctgctgcttactaaagatttcacaacgtgttggctcagtctaagcaaaatggaagccccatgcatgactcagcccaccttttcatgactcaggatctggaagaaattggagaatgtatgatcaaatctcacccgtggcacatccagtacgaagatgtttcccaatgccctgatttttgtgtctgtgtattcggtgatttcatcactccaccaataaagcctaacagtatcaacaacagcaaaagaatggcagctgactcttatggagccttatccatcccaggcattaatagacacttacacctgtttcctcctctggccctcacgctgaactcaagaggaaacctaggctcagagaggcaacgtgactgtgcagatcgcacagggtgagagccacggccaaactcggggcccagtttcctaactgtttgactgcaaccagattttggggccatatttgatgcaaactcaggtagaggttaagatgggccaaagagcccaaaagtccttggagactgtcttggccacatactttagggtgagtcactttgccttcctgagcctcacctgtaagatgggggaaataataccg

SEQ ID NO: 8805 - DNA, 738 bp, Macaca Fascicularis
  misc_feature (1)...(738): n = A,T,C or G
atttgagttgacttgaaggctagcatgtcannnnnnntaaaaccatcnnnnnctatgggtggtagagagtggtggttatggaagacctaaactagaaagaagggtcaatatctttaggtcaaaaggtttcttaggcttctgcccccttggcaggagggactccttcctgcctaggagattttccaagggacagagctggggaaaatccttattgatacacacccataattcattcaacaaatgctcgagaatcatattgtatgttcaagacactgttctagaaaccaagggtaaatcattgagcaaactatattaagatctcttctctcaaaaagtggttaaataattaaccatatattctatcagatggtgatgaatatctgtaggaaacattaagcaaggaaggaaaagagaggtaggggcatgagacagatatgtacccccaacaaatgtgataagtgatcgtggagccagagccagccttcctatagtcaaggtttccaggtagaacaaatactctgtgatataagaaatttgaatgaaggaagctggaagaattacagggatatttttaatccctctatggattcagtttgctggaaaggggtctatccacccctgttcattagtggatgttaaacccatattcctttcaactgatgcctgcttgggaaaactactactcattatcatcactattgttgctcaccnnntgtatcccctnttcttggcatgtgc

SEQ ID NO: 8806 - DNA, 747 bp, Macaca Fascicularis
  misc_feature (1)...(747): n = A,T,C or G
aggagctgctctacaattctcaatttgcttttcttgcctctctttagtcacctgtcacaggaggttccnnnnnnnnnnnnntattgtgagttaggataataacttttttttttgtgcttcagatttagaagaaaagatcctgtttccattnnnnnnnnnnnntaagcttttatcttttaaccaactgaacaatacaccaaaagcagcctagggatgagcatttctttgaaagcaattaggttattcacctggtattaaaactatttactgttaaaaaatctgtgacttcatgaannnnnnnnnnnnnnnnnnnnncaaaaactgaaaaggaagggaaaaaataannnnnnnnnnnnnnnnnnnnnnnnnnnnnnnnnnnnnnnnnnnnnngagaagnnnnnnnnnnnnnnngcnnnnnnnnnnnnnnnnnnnnnnnnnnnnnnnnnnnnnnnnttttcctnnnnnnnnnnnngcccctctttccagcactggaaagaagtggtcttgagccnnnnnnnnnnnnnnnnnncactcctctctcttgttctgaatggtgtttgtgtcagtctnnnnnnnnnnnnnnnnnnatgtcttataatcctgcatcacttctatcctatccagtcatatctaatgtagaaannnnnnnnnnnnnnnnagtaatatgtagtgcttttatgatatttgtgtgcaatatcccnnnnnnnnnnnnnnnnnnttgatgtaaaggaaaaaaaaactcagtcc

SEQ ID NO: 8807 - DNA, 738 bp, Macaca Fascicularis
  misc_feature (1)...(738): n = A,T,C or G
gcagtccagnnngggcnacagagcaagnnnnnnnnncaaaaaagaaaaaaaaaagtcttttgcagtctttgattaataaattcgagagaaacagacagataactgagagagaaagagagagagagcataaactgacaataaaatatcccctcagtctaaacaaactcaatattgatacagaacttttgattttggccaagtgttgaccaatctctcacatctttttctaccctttcaataatgtatttaaatcaatttagattttaataaggaaaagatgaaaaataacattttaaattatataaataaacaaacaatagactgggcatggtggttcatgcctgtaatctcagttttaggagcccaaggtgggaggatagcttgagcccaggagttcaagaccactctgggcaacatagtgagacccagtatctacatttttttttttaattagctgggtgtggtagcacatcnnnnnnnnnnnnnnnnnnnnnnnnnnnnnnnnnnnnnnnnnnnnnnnnnnnnnnnnnnnnnnnnnnnnnnnnnnnnnnnnnnnnnnnnnnnnnnnnnnnnnnnnnaaacagagcaagaccctatctcaaaagaaattaaaaatacataaataaataaaattccaaagaacaaattgaactaataagaatcttgggctttgaatacaggaaactaaaaataattcatgtaagttctatttcccaatgatttgtgctagaggcatct

SEQ ID NO: 8808 - DNA, 734 bp, Macaca Fascicularis
  misc_feature (1)...(734): n = A,T,C or G
taattnnnntgcaaaagagtcaggaatgtggatccttggtcntnntgatgatcaaaatctttattcactgacactgtacctagcaagaaaacattatctaacaatctgtcccctcctctggctcagcttttcaccctgctctgccctccgcctgcatctgatatctctgtagagggactccattccctcacaatccatatccacgcaatgggaaaacccacaggagcaggataaggggacagattgcggtcctgccacagttcttctccctctagatgacagaggctcatcacatgccgatctgtggtcgcattccattctggtgacacatttgaaaggacgtgttcttttaggcacaataaaattgaatctcatctccacatgtggagctaagtaggaaaattaccttaattaaacgcagcagaattcagatttattgcccaccacatggagtgctcttagtctctgaggaccgaacctgatattccagaaaagccatttcccactggcactgtgcacttgtccacctatggccttcagatgcacggactcaagaagaagaaatgtgttccacaattttcaatgtggtaaagagatttacagtttaataaaaaccataaggccaacgcaagtagttgaaaagtgaatgcaaagtcaaattgctgtttgggccgcatgtcctaagcaagtgggttgactgtttggcctcctccctgacctcactggaatcagag

SEQ ID NO: 8809 - DNA, 779 bp, Macaca Fascicularis
  misc_feature (1)...(779): n = A,T,C or G
gacaannnnnnnnnnnnnnnnnctccaggcccctcatcatccaatctctcactatttctctggtctcatttctatcctataaaaaagagcatttccctctttagccacactggcctcttggctattcctcagctctgtcaagcatgctcctgcctcagagtctgcgtaggctgttccctctgtgtggacttctccccttcccatcccattctctcacttccttcaggtctctgctcaaatctcacctccttggtgagccttccccgattattctnnnnnnnnnnnnnnnnnnnnnnttgtcaatttatactctcttttcttcatcgtatttcttccaccatccatattatatatttgcttctttgctattttctgtcttttcttcctacaatgttaactccatgaaaataggaatgtttatctgtatgtgaagcacataagacaatgacaggtgcataatagataatcaataaatacatgttgagtcaatgaatggctattaactcacataataatctcaataggtatgattatttttccagtttttcagaggaagaaacccaggcaaaactacaacttaccttaaccagcaatttgcctaagactacatagcaagaaagtgagaagatgggattggcagacaaaactggaaaatgggtaccaatgctaagaatccatgtgccacacctacctctttcctttccttttctctgctatggtgttttataggggaatccnnnnnnnnnnnnnnnnnnnnnnnctggaattctgccctgccc

SEQ ID NO: 8810 - DNA, 745 bp, Macaca Fascicularis
  misc_feature (1)...(745): n = A,T,C or G
tcgctgaggtggtgcagtgacgaggctgcagctgctgaacggctttgtggcttgcccgcccagctgctctgtgccaggaggaggaggagacgcctggagcctgagacaccacggcttgcctcgctgagggcttttgtggctttgcccgcccagctgctctgtgccaggaggaggaggagacacctggagcctgtgacaccacggcttgcctcgctgagggtgggtggcagtgacggagannnnnnnnnnnnnnnnnngtaggagagtgaccacgctaggaggcttttgtggctttgcccgcccagctgctctgtgccaggaggaggaggagacacctggagcctgtgacaccacggcttgcctcgctgaggatccatcttgggaggttttgtaatatcattctacagctgcaaaattttactttactgatattctctacagaatatttgttttctatctcaatgctttctcatttaaattttttttcctgctgtttttctttaaacttgaacttctcatcttatttctgacttttaagctgacattattgatattcaagcctcacttacttctaacataggcacttaaagccacaaatttctgtcacctgtttctttacttaaaataaagatattattaagtgcatacaaaatttgattatattatcttgttgaaannnnnnnnttatagttactgaaatagttctctttaatgtttgtcacatttacttatatgaaggaccgct

SEQ ID NO: 8811 - DNA, 758 bp, Macaca Fascicularis
  misc_feature (1)...(758): n = A,T,C or G
attgctatacatatacttactctgtnnngtttataagtgantccaaaagtaattgtggtttttctcattacttttaatgatcaaaaccgcaattacttttgcaccaacctatatttgcagttcttatgagttttatttatttgttacagaataaaatgtatgtagttctacatatagacacacaaattactatatagatgttttatgtttggaaacaccagtctttatataatgattatacataatacaatgctttgtgtaaaattatattcagtaaagtaattgtcaaagatatattcagatagtttttacacatgtaaacaatcaactaaattgtagctatttgaagtacatgcgagtgtgatcaccagctcactgagtgtttggctatccaaaagatgctgacacaatgcctacctatacagcattcacactgtgctatcaaaaagcactaaataacaaactctttcaggtcctacttaaaagtatgtaattgttttctaaatcacatgcaaatgatttactgataattgtctgtgttttctacttcatttgtgcattgtcactgctgtaattaaagtatctgaaaaatctttattgaatatcattatgctctttgatcaaaaacttgtattcaatctccattaaccaattaataatgaccctatcaattatagactaattcaattaaccaccaccctgaattttttattcatgtaataagccaaagtccccagactaatcaaaatcaggctaga

SEQ ID NO: 8812 - DNA, 739 bp, Macaca Fascicularis
  misc_feature (1)...(739): n = A,T,C or G
tgtagtttgccagtcctgtaatagatcacagtttgctctnttggtcacaaatattcaaacccctccctagttcagagcatttgatattgtaatatttaaagctcacttgtaaaacataatttgttgcctccatccatagtatctcaaacagaatgtctctcccaaatatacctaaattccatattctccaaagcacaactagctattttcttgacatacatcctaacacaccccacagttcacaatttgatctaaaaacttgttaagggaggctttttggcatgtgatgccataaaaagagaggtatgggctctcctttaaatagaggcatggactctttatcctattgtgagtctcataaaaagagaccctttttatcattttttcactatatggacacgcatgctgaaaaatgcttttattagtataatgcactaacatttcttatgttcattaacctatatattttagcatatagattcaaagattattagcacaatatggtagataacttcataaaccatttcttcatcttgttttcatttagtatgtaaaatttatttaaaatttacgtgaaagatcagaatagctatataatgctacattgtaactcttatattttccaccagatgtcactaatgctgtaatattcaaattaagatgactgacttttggttctaaaggctataaggttatggaaaaacaatgttacgcataacattggaatttctggctgcaa

SEQ ID NO: 8813 - DNA, 1899 bp, Macaca Fascicularis
tttttaatagtgctctgtgtaaagatgatgcagtttgtgagtcagatttcatactgagcttaatatactcagaacctaagcttccagtggtatcacttgtgatttttttatgagatagagaattacatgaaattctaataagccagttcccacaccaaattatttcaataagcacacatccaagcaatttatacagaccttgtttaaagcactgcttcttatagagctcaattggcagtctcaggagtttgggatgctaccaacagggcattgaggttttcatttttatgaaacaaaaggcaatctggaaatagctaaatttgttttaaggattttattcactgatgtcccgtcaaactaattgcttcaaacccctatagctacagcttgacttctgcacttgctattcagtattaataaggtggcatgcttgattcttattgtttttaaaaatgagaaaatttggagagagaatactattatgtcaactgtacaagactctgaatcttaaagacgtagatggatataatctttagactttatatacatccatagatatgtatttatatatgcatacgttttgtataaatttacaattgactttttgtattctcttttctgtcattacaagaatgagatggaaaccaaaatagttgttccatcctcttatccaaaaaggatactgaaaagtcaggtatgtgcatgcacttatttctctggggtcaaatcagaatgactttctctttaataatgaaaggggagagtcctggttagcttggaaaactggtaattagataagcttcctttcctaggttagtgacaatgtagcaatgatgataaagttatgacccatatcaatgtggtctaaatatctagatggaaagcaaaaatatccagaagaggtttagggccatctaaaccacaaacctggaacctggattgtggtttgatgttttttattttcaacctatatgttgtgtagagatacaatttatatctgcatagctaaaggtaaagtgaaaatatgactattatctgtttagtttgataaatcatttttggataatatgggtaaaattagctttaagaaacttctttgacatctgacttttccaccatttctatctgcatcaattgtattaattagataacggttaaattttatttttttatcatgtagacatatgctttaatgcttttctgtgggtgaaagttgaacagttgctagctgatattatgtggaagttacaggttaaattagaaccagaaattttaacataatcttatcaggttccttagtcccatccccatgtgaatctgaactttgaatttgaatctgaaaggcctttgaatttggatctgaaaggcctacttatttgggtcattttttattggaacttgtgattgtgacacacagatgtttcagttcatattagaataaattgcccaatctataagagtgtttaatcattggaatgaatgtaaatctgattctgatttggtttgctatttatttggtaacatttgagaaacagctaatatggcttgacattaatacttattaatgtcaccaacctaataatacaattggtgccatgtatgaatgcttagctgacaataagaatttaattaactttatttggagacaatgacttctcaaggaggtcctacccatttgaggtagggatatttcccttacagttgtgattacaagggattgtttctatagagagattaacaacaacaacagtaacaatgatgacaacaacagaaaaactgacttttgaacttgagtatatccaatagatagaagaaaaaagattagaattcatggaaaatttgttttgcttttctatcaataaaagagtttttcttgttaaaaaaaaaaaaaaaaaaaaa

SEQ ID NO: 8814 - DNA, 737 bp, Macaca Fascicularis
  misc_feature (1)...(737): n = A,T,C or G
tgaatctgaccacagacgccagtgcaaagcaggtgctcaacgcaggagggtgtactgaacccgatctctctatcaccaggaggaagcacacaggaggcacgcagagcacgtttgtggaatgaataaataaaaacgtatctttgagggaataaagaagaagaaaaacaaagaagaatccggggaagatgggcataaatctccaagtgctgccaaggcttcccaaccgaggctgctgaaaagaccctgtggagagtctcagtccccgctttgccaccatctcctcctccgatctcctttcctgcttcaaaagactccagaatcttcccggttctcagagaaggctgaatccacctatgacctagtgggtgcatcctgtgccaaaattgtttaccttctggtccccggagccacgggtcacgacctggtcctcacataggcccgctcctcagcagcccccaccttgctggggaagaaggagagccctgggggtgtggagaagcccctgcatccctcacatcttacagaatctcgattgagtccctggggacacatcccgcagcaggacaggaacagtctttgccgcagcatggggagggctgtgctggggacgagcgcccagcggccgtggactaagtgaaggagcagatgaccatgctcttctcccagctgggcggcgaggccgggcaggnnnnnnnnnnnnnnnnnnnnnngttttccaacactttgctgtcgagcta

SEQ ID NO: 8815 - DNA, 1806 bp, Macaca Fascicularis
agatgctttgtctcctgcctgggaaggccggagctgcatggacacgtatgacagacattctagaactaataaaaaagaacaccacagccccgcgcagaggcagctcctcccggacaggcgatagtccaaggcggccagacctgcggcgactgatccggcgaggggacggaggggagtgacgagggcttttcccccggagaagtcaagacgccccccaggaacccggggccgagcagccgccagccacctgcaaacacagacggcgtgagggcggcgcagtctccctgccagcacccggccgcgcgtgccaggccggcggggacccactgcctcagtttcctcagccgcagaccccggccgggacgcccctcaggtcgctccaccccggcagccggtgcccccgggccacagccaggtccttgccgcgccctcaacccgccgcccgccgcccgccgccggcagcccgtcctcacctgacagccacccgcacggagctctcatccggggcgcccaacatgctggcggcgggcggcgacagggccgttgggcctccgcaccgcagagctgaggcgccgccggggccgcgggactcgggcacagtaggctggggcgtctgcgggcggccggctcacctccgccgcgctccagccatgttgggcgactgaatggaaaggtggcggcggcggtgaggcagcaagaggaggaggtgattcactgctcgcgggtgcccgccccttctcccccgctcaccccccaggatctggggcggggacggagcgcgcttgaacggtgaccgcgccggtggagaagccaacaggccgccggcggcctcggggcggccgggtgagtgcgccctgccccctccggtggggacgcggcctcccagcggccggactggggactccacgcccgccggggctctcccggctcctcgccccgcactgcgtcagccgcggccgcgcggctgggccctacctagccctcccccagcctgcgccccgccctgccctcggcgggtcactgcctggcgctactgggcagggaggagagggggaaggatgcctgcggccggctgccctcgcccgagggcgaccagcctgtgcgcccttccaggctcttctaggagaaggaagcagcctgtgcaggcgctgctgccaggtcccttctaaaatcgaagcttgattcagcggcgcgccgggagccagccagcttctgctccggttcggctttgtgtcccacgcatagccttattgtcctgtctgcagcctggactttgacccccttccctagcccccagctgaacgctctccctcctccctccctggagtcgatcattcatgctaaacggactcccgggtttgtcccctgtctctggacagctgggctgttgtacagtccatcgccagtttaccagctcgggtgagatacggaaatgatttactcgagattcctgaatgcgtttctgttcaatcatttgtacactggtaaatgaactgcaccctggtactgccaagtgttcccagaactgaatatatccaccaagacctgctgtgtagtaaatccttccaaactgattttctttcccttctggcctttaaaaagcacctcccaatcccaggattctctcaacattgacccattgtggtttctgtttgtcactattgtgcttctacatgccttcagatagctctgtggaaacagcctttattagctttgccacagagtatcttttgtggactgctccatacatctctataaacaaacatgtggcctcatacaaaatagtatcatagattaaatggcact

SEQ ID NO: 8816 - DNA, 590 bp, Macaca Fascicularis
  misc_feature (1)...(590): n = A,T,C or G
tccagcgtggagcnnnangccacggagctcctggnnngcgacgaccnnnccgacgaccnnngnnnnggatgggctggggtcggaccggctgctccgctgtcctgcccccgactcccctggccaagccgggagaccttacccttcatgtcactccagccccagaggagtataactcatagagaccttcaagccccgccgggggaagagtaaaaaaaaaaaaaaaaatcactgcctctcataattattgagatctttgtgttgtgatgtttaagctgtttttagagggagtatatgtcctggtttgctgctgtgtttccccaaagcctcaatcaggtgaggcaacaaaaagaccaccggggccgcaggaaagcagcaaccatctggggtagggagggaggaggagagctctccctccatggccagtttgtccgaagaagagggtggaaaaagtgagattttagaaatttcagccacgggtgtcttcaccgtgcaaaagtggtgctaattcagtaaacggggacacctgcgtgggttggatctgtggggggttgagttccgttcctttgtttttaaatttccatctccgttta

SEQ ID NO: 8817 - DNA, 430 bp, Macaca Fascicularis
  misc_feature (1)...(430): n = A,T,C or G
gtactttcaaagatagatttatgccatgttaatttgctttgaggttcctgtagccttttaagttgaacatgttttggtttcactttattccactgttaagtagtatattttaaacttttcacaaatgtaatgttttttcaaaagtaagccttcagaggattgaaactgtataaattgtttctctcttaaacatctaggccgggcgcggtggctcaagcctgtaatcccagcactttgggaggccgagacgggcggatcacgaggtcagnnnnnnnnnnnnnnnnnnnnnnnnnnnnnnnnnnnnnnnnnnnnnnnnnnnnnnnnnnnnnnnnnnnnnnnnnnnnnnnnnnnnnnnnnnnnnnnnnnnnnnnnnnnnnnnnnnnnnnnnnnnnnnnnnnnnnnnnnnnnnnnnnnnnnnnnnnnnnnnntg

SEQ ID NO: 8818 - DNA, 696 bp, Macaca Fascicularis
  misc_feature (1)...(696): n = A,T,C or G
caaattacaagggactagcaagtcaaccagccccccacgctaccaacccagcccaatccacacaggagtgggcacaggtcacccaggagacccttgagagctctgcagctcgccctgctccctgtcctcagggaacctccctcccaaagagaaggggagggtatgtggaagggagtcctggggccagcaggctggacctgggcactcaggccctctgctctggcttctttggccatgaactttcaaaccccttagaactggagaaagctgagagcccacccagtgcagccccctcaccttaagcatggagagggaagctaagggtgacacatgaggnnnnnnnnnnnnnnnggtggcttggtctggttcctttcatcctcccatctccctcaacagcccatccacccatggagctacttgcagctgcccccttttacacgtggttctctagtccccaagtttctgtcttcctgactcccacctgtccttgaggcttcactgaggctctggaaggcgtcctctgccctaggctgtccagtccccgtgaagaccgccctctgtacctggctgtcttgtctgcttcctaccaggccgtgagggccgccannnnnnnnnnnnnnnnnnnnnnnnngtgttccccatgcttagcagagtctggcacataccatgtgcccaagaggtatttaggaaaaagga

SEQ ID NO: 8819 - DNA, 748 bp, Macaca Fascicularis
  misc_feature (1)...(748): n = A,T,C or G
atgcagaggagatttatgnnntagccataactccagttgtacaaactcaatcgccccattctcttttacggttcaaaactgctgaccttgggtttttgtttttgttttgttttgtttttcctgttaggatttatttggggacttttggtagtgtaaactctttaaccttttccttgctgtgtatgaggaaagctaaagctgttatcaacttcttattctacgatactaacacgggttttcagtgtttgtttgttttgattattattattttgcgtgatgtgaataccctctcccatcaatatttgtattatggtgctatatattggtaatgatcctttaatattgggaagggattttaaaaatactgtgattaaactgggtttcttcctttgattttcatattttaaataaagccacagtcatttatacaaaagaaaagcatctgtccctgggcaaatcttttgaggacagaggtcaaagtaaactgcataaggtttttacatcatttctctatgtatttgatatagaaatcaatatctgtacaaatttaatcttttattttcttggtaactcgtgatcattgagaaagtgtttgaaactttctcatgaagtgtatatataatggcgtgaaaaattcctttggaaaaatttatgttcctttcatttttacnnnnnnnnnnnnnnnnnnnnnnnnngtgaaaagcattaaaattataactttgtgtacaagatgaaaatnnaattcact

SEQ ID NO: 8820 - DNA, 751 bp, Macaca Fascicularis
  misc_feature (1)...(751): n = A,T,C or G
ggaagccgccccatgcagccgcaaccctgtcctgtcagaggaattggcaggtattcccgatctgccatgtattccagaaaggccatgtacaagaggaagtattcagccgctaaatccaaggttgaaaagaaaaagaaggagaaggttcttgcaactcttacaaannnnnnnnnnnnnnnnaagaacggcggtacccgggtggttaaacttcgcaaaatgcctagatattatcctannnnnnnnnnnnntcgaaagctgttgagccacggcaaaaaacccttcagtcagcacgtgagaaannnnnnnnnnnnnnnnnnnnccgggaccattctgatcatcctcactggacgccacaggggcaagagggtggttttcctgaagcagctggctagtggcttgttacttgtgactggacctctggtcctcaatcgagttcctctacgaagaacacaccagaaatttgtcattgccacctcaaccaaaatcgatatcagcagtgtcaaaatcccaaaacatcttaccgatgcttacttcaagaagaagaagctgcggaagcccagacaccaggaaggtgagatcttcgacacagaaaaagagaaatacgagattacagagcagcgcaagattgnnnnnnnnnnnnnnnactcacaaattctaccaaaaatcaaagctgttcctcagctccagggctacctgcgatctgtgtttgccctgacgaatggaatttatcctcacaaattggtgttctaaa

SEQ ID NO: 8821 - DNA, 176 bp, Macaca Fascicularis
agggaacttaataactgctgctacagtgttaggtacaaaactggtttatgccacatgaacagaatcacaagtttggttttggtactttttgttcctctttgtattcagttgtatagaacttccaaattcagaatgagaagaaagctgttctgtatcaaaccatctaagcaataaat

SEQ ID NO: 8822 - DNA, 1142 bp, Macaca Fascicularis
agtttctcgcactgcgtgtgaagattttggtggttttagagactgtccctgcctctcatttaggggatctagccctggcacccagtgtagtagtgcaatcagggctcactgcagcctcaacctcttgggctcaagtgatccttccgcctcagcttcccaagtagctgggactacagaggctggaatcattttccgcaaaggaaacagtttttagggatgtcgtccacgagaaaaaaaagattcaaccctggcttctgggctttgtcattctcgcacagccctctgctcttccacactgttataaagaaggtaaaactctaggaaggaggagccgctcagccaaggacacagcggcgggctcccagctcagctggcagatccctgtttgttgggaaggatatgttcgatgcttacatacgccgtctgacaaatcagaagatggaaggctaatttatactggcaatatggcccgagcagtgtttggtgtgaaatgtttctcttattctacgagtctgattggccttacatttctgccatactttgttacacaaaataatgctttttttgaaagtgtgtctctgcctgttcaaatcgtattttatggcatcataggaagctttacgttgatcaccccagtgttgcttcactttattacaaaaggctatgtcattcgattgtaccatgaggccacaacagacacttataaagccattacctacaatgctttgcttgcagaaacgagtacattgtttcaccaggatgatgtgaaaattccagatgctacacatgtgtttaccacattttatgctaaaacaaaatcactgttagttaatccagtgctctttccaaaccgcgaagactttatccatctaatgggttacgacaaagaagaattcattttggatatggaaaaacccagtgaagagaaacagcataaagatgagaaatgagcctatttttaaatgttcgtgcttaaatgtgatttatgttttaatgtataataataaaatagccttttgcattctgttagtgactgattgttaaataatttgaattagcaaagcttttaatttccagagaatgatgtttatttataataaaacaagatatgtttgaaaaccaaaaaaaaaaaaaaaaaaaaa

SEQ ID NO: 8823 - DNA, 2213 bp, Macaca Fascicularis
attttcaaagatgggtaagagttgtccatgtagacagattctgagggtgcataacatttgcaggggcttagtcacataaagcagtatatgtgtagggagcttcaggtagttaaatattgctggtaaaatacaagctgggggtgtagaagccaaagccagagaatagggaagggttcaagttagagagggtcttggacttttatcctgtaggcagtgtgaacattgaagggtttaggcaaagaaatgacgtggtcagattaatttttaaaaaccattctggtagcattgtacaaaatgggtaggaggggatgagacaagagaccagaactagtgtaataggttgcttttgtaaaagtcaagacaagagatgctaaaggcctgagctaaagtgtgattataggtgagaatggagatgagagacagattagaaagatttgtgaggtataaagtcaataagacttgaagactgatttagatgtattgaatatagccataagggccaaagaatagtggaaaatacgtgtaggtttccaacctagatgtatgggtaaattgtgataccaccaatgtaaatagggatatgagaagggagcagttttgtaggatgaggataggtaattagttccacttttggcatgttatttaaaagtaacttttggatatgctggtggagatgcttatccgaaatgtcaatttgctacttaccggagaagttagggttgaagatatgcatccgtgcgtgtgggaagaaattacagccagtgaatatgagattgcctaaggagggcatgataatgggaaaagaagataggatcaaggacaaaatacccttaaacagtcagacaaaatcccgaagaaaccagcacggtaggcagaggaagaagtaacactgcaggtaagtcagagtaatgtaggaagagaaaggtggcacagaagacaaaggagggcaggttctgcaaggagggccagatgccagagaagataagggaagaacctgggagtttccattggatttagcatcaggatgagaacaattttagtgatgaaggtaggaaccagaatacagaaatttgagaggtgagtggttggcaacaacatagaaacaatgagtatgggttgagaaatttgggtggggatgggaaagcaacagggagaggttaactagactaaggtgcggaaagttgccattttttgttgacttttggaaaggaactgagaggaaaggggaatgattgacacatcaaggtccctaaaaaggcaagtcagggctgagatctagagcacaaatcgaaggactgatcttaggtagaagggtcaccttacctccagaaaatggagggatcgaggtagggtggaaatataaatagattttatagtaggggtggatcatctctagcaacaggtcacacattgtcaaactacctctcagcaggtgggtcccacattgaaaactggcattcgatcctgcgcaatgggctggtcaatgcatcctacaccaaactgcaggaatgggaaaaggacagcacaggataccctccaaggatgagctggtccagagatataacaggatgaataccatcccccagacccgatccattcagtcaaggttcctgcagagtcggaatctaaactgtatagcactttgtgaagtgattacatctaaggacctccagaagcatgggaacatctgggtgtgccctgtatccgaccatgtctgcacaaggttcttctttgtatatgaggatggtcaggtgggcgatgccaacattaatactcaggaccccaagatacagaaggaaatcatgcgtgtgatcggaactcaggtttacacaaactgagggggccccagccctcgtaccacccctgttaccccaggatccatctgcccttataaaagtgttcaggtacagcaactgaggctgccctgaggaatcaaggggccattaccaaggggcaggaaaaggatatgtaagaggtagcctccatggtggagcttgaccaagaactactccacatttggatggcccagactggcttcaacccctgactttccctttgacttcaccctgtttgtaaataaaacaataaaatggaaggtgctgtggactggaaaaaaaaaaaaaaaaaaaaaaaaaaaaaaaaaaaaaaaaaaaaaaaaaaaaaaaaaaaaaaaaaaaaaaaaaaaaaaaaaaaaaaaaaaaaaaaaaaaaaaa

SEQ ID NO: 8824 - DNA, 4083 bp, Macaca Fascicularis
cccagcgctatatcactcggccgcccaggcagcggcgcagagcgggcagcaggaaggcggcgggcgctcagacggcttctcctcctcctcttgctcctccagctcctgctccttcgcagggaggccgcccgcggagtcctgcgccagcgccgaggcagcctcgccgcaccccatcccgtcccgctgggcactcggagggcagcgcgccggaggccaaagttgccccgcacggcccggcgggcgagcgagctcgggctgcagcagccccgccggcggcgcgcacggcaactttggagaggcgagcagcagccccggcagcggcggcagcagcggcaatgactccttggctcgggctcatcgtgctcctgggcagctggagcctgggggactggggcgccgaggcgtgcacatgctcgcccagccacccccaggacgccttctgcaactccgacatcggtaagcgctcctggtgccccgcccgagctccaagctgcagccgggactgcagcgctgcttagggaggcagggcgagccccactcctttcctctgccccaggagaggggcaaatggggttgggacggagtggagaaactcgatgtccttgggcgggggcgctggcataactgagaggggaagatgccctgcagaggaaactcacagtggctagtcacaaagtcaagaaaatccccagggtcagggcggggccaagggatgactatagcctaggaagttctggagctggcagttgtgaacatgtggggtaattaacttgaatggtggctgcttctttttcctccaacctccctctcaccccagggaattcccactcttataaacacaatcatctattccagttggctccaaggtaagagaccaattccaggctccacggaggctaacatgcccgccctgagatgctgttcctgatgtggttcaggccttcctaacctcttattgtctcctccttgctgtctctgcagtgatccgggccaaggtggtggggaagaagctggtaaaggaggggcccttcggcacgctggtctacaccatcaagcagatgaaggtaggtaatgtcatcagtctggctccaggaaggtttctgggtttttgccagaagagtcctggctgagggaggcaaaatgggttggaactggggtgtgtgtctaagcaccagccagacccagcccttgtgcctgctgtagagggagctgctaaggcagcagaaagggatgggtagggagggggcatggggctgcctcgtccaagagcccatgcatgtggagtcactccaaggcacttgttaggatttaatgaacactgggtcttacttcttctgcctactcgtatttttgtacccattaattacatctctttcccccaatccctattacctttcctgcttctggtaaccaccaaatccgctgtctatcttcatgagatttactttcttagctcccatatatgagtgagaacacggtatatttgtgtttctgtgcctggcttatttcacttagcaaaatgacctccagttccagttgcgctgccacacatgacaagatttcatgcttttttctggatgaatcatattccgttgggtatagataccaggttttgtttttccattcatctgctgatgggcacttaggttaatttcatatcttggctgttgtgaatattgctgcagtaaacatgatagtacagacccttcttccatattctgacttcctttcctttggctatatacccagcagtgggattatggatcatacgggtgtccaaattggaaaggaagaagtcatgatgttccttttgcccacagatgtaccgaggcttcaccaagatgccccacgtgcagtacatccacacggaagcttccgagagtctctgtggccttaagctggaggtcaacaagtaccagtacctgctgacaggtaatggccaactctagcttctaaggtccactgtttcttgacttcagaagaacacacaatgagtagctgactcaccaaatgtccagtaaatcgtaaggagtctctaatgttgaattcatcctacttacccagtgctaagagcttgaggctcctacacttaggctcaactctggaattagctccaccactcaccttgtgaggcaaatctcctaatttgtagcttctcaactttactgtaaataaaaagggagtgtgtgttcctctctacctcacactcaacctgttaggcctgcgtttgaaagttattcatctttaggcagtcaaggtagtaaaggagaaaacaaaaacacaaatcgttataaagggagtgaaaagttggcctctagtcctagctccagtatttaatgggcttgggacctttggcaaatcactttacctctccaagcctcattatcctcatctggaaaaatggcgctacagtccattttgaaaggtgttggggagggtgaaataaaatcatgggtctgaaaagtacccagccacagtgcctgggctaagtgggaacatagtaggtatgaattctttctgggctgggctctggacaaaacaaccctctccttgttttcttctttcctcctgtaggtcgcgtctacgatggcaagatgtacacagggctgtgcaactttgtggagaggtgggaccagctcaccctctcccagcgcaaggggctgaactatcggtatcacctgggttgtaactgcaaggtaagccctggggtcactgggggaaggaggggaggtgctgacttgcagccctagaaacatcagctcccaatgcattgggagccaggccctcgtgctgggaagggtgtgcatgtgttaggccagggcagaggggcaggtctgagcagacacagtaaggaatgttgccccaggtggggcagtgaggaaggcagggaaggaagaatgcctttctgctgtaatgggctgcctccatgatgaccacttgcaagctgctggggcatgagggctcttgagtccctggccccacctggcagttcagggctgtaggtataggatcctgacagtggcaggttctgccaagtggtttcaagtgggctcaccctggtagctgactcataagtcaggtgggcaaatgtgcccaggactacagagaccagatgctacagaaagtctttcttcaaccaagcccatccccctgacccaagtatagggccaggtacagcctcctgggcataccatggcagattccatcaactgctgcctgttatctaattgcagatcaagtcctgctactacctgccttgctttgttacttccaagaacgagtgtctctggaccgacatgctctccaatttcggctaccctggctaccagtccaaacactatgcctgcatccggcagaagggcggctactgcagctggtaccgaggatgggcccccccggacaaaagcatcatcaatgccacagacccctgaacgccagaccctgccccacctcacttccctcccttcccgctgagcttccctcggacactaactcttcccagatgatgacaatgaaattagtgcctgttttcttgcaaatttagcacttggaacacttaaagaaaggtctatgctatcatatggggtttactgggaactatcctcctggccccaccctgccccttctttttggttttgacatcactcatttccacctgggaatttctggtgccatgccagaaagaatgaggaacctgtattcctcttcttcgtgataatataatctctatttttttaggaaaacaaaaatgaaaaactactccagttggggattataattcccacccctcttgcttcttccccacctcaccatctcccagaccctcttccctttgtccttctcctccaatacataaaggacacagacaaggaagtggctgaaaggccaaccatttcaggatcagtcaaaggcagcaagcagatagactcgaggtgtgtgaaagatcttacacaccaggagctgccactgcatgtcccaaccagactgtctgtctgtgtctgcatgtaagagtgagggagggaaggaaggaactacaagagagtcggagatgacgcagcacacaggcagttccccagcccagtg

SEQ ID NO: 8825 - DNA, 741 bp, Macaca Fascicularis
  misc_feature (1)...(741): n = A,T,C or G
gatgagctgagtcaggggtagggannnnnnnnnnnnnnnnnnnnnnnnnnnagacttgttctgaggacatccacacaatagtaggaatctccccaaccaatctgtgaatttcctgggggccaaaactgtattttgctcactgctaagtccccagctcaccttaggggctcagtaggtcgctgttgaagggaggaaggggaggagagaaggagaaaggcaagcaggcagacagctatgggtctagcatctgcagtgtgttagcattggggaaacagaagaaccagaaggacagatatgttgatgactcctagattggaactccagtccagttctctctttggagctctagatacccacttttcatgcaccccaaatgaatgcattttcttcccactaacccttgattctccacctttcttctnnnnnnnnnnnnnnnnnnnnnnnnnnnnncctagtgatccaagtcagaaaactaggagttatcgctactctgtttcatagaaatccccatccattaagaaatgtgaaagttaaggccaggtgcagtgactcactcctgtaatcccaacactttgggaggctgaggcgggaggatcacttgagcccaggagttcaagaccagcctgagcaaccaagggagactttgtttctacaaaataattcaaaaattagctgggcgtggtggcacgtgcctgtggtcccagttactcagaaggcaagcagtgatggcaccactgcact

SEQ ID NO: 8826 - DNA, 2013 bp, Macaca Fascicularis
atatttttatgctgtaatatcaaaaggactggaactccaaggttactctctggtaggcattgtgaagaccagcagttgaagtgggctggcttacagcatgaataatgacattactgtctctctcacggagagccttccctctctcaggaacaaaaagttatccattgcttctaatacagtatcaacagttgtctcaaatggatgttggggaatgcttaaaaacactccagttatattatgaggctacattctaaaagtctactcatgtgacctgcacgctggagagaaaagacaatatattttctaatcaaaatcagaagactctgttcacatgtttgctgaaagccacagaagacctgattttggaaactacaaaaagatgtgtctgtcttaacaaaaaataataaaccaaagaaaataaaatatatgggatcctgaaataaaaggtgcaacacaagagagataaataaaaacaatgacaacctctctgtgaagaaagacccaaaataacaactttgcaactgctctagagaataatttgttcagataagactaattcaggagactccaagggggaagtcctgagttttacctacatgcttcctgctgctatttacagaatgtattcattcatccaacaaaattcacagctatggacaaaacaagcccaaatccctacccccatggagcctacattcagcaggagacacagaaaatatacaaaataagtaaaaagatactgtatatttcatggtggtaagtgctctagacagaaataaacctagaaaagagttgataggaacagagaagttgcaactttaaatcaggtagattgtggaggcttcactgaagttggcatttgagcaaagacatgaaggaggtaagggaataaatctgctattatctgcatatcaggcagagggagtggtaagtaaccctgagctgggagcttttcttgcttgtttaaggaataacacagctgctaatggggctggggctgggtgggcaaggaatgaggtaataaggacctcccatgggtaatgggaggtcacacagaaccaggacattacaagaatttttctgagtgaaatggaagtttgtgaagggttttgagtaaaggatattatcatctgacatatcaaaatgatagctctggaggtcatgctgaaaatagactgaacaatgggtccagcacacaagcagagacaatcatttaggaggcaaataataaaaataactaataaaataaatataggccaaagattatattggcttaggctagggaggtagtgagaaatggtcagaaagaggagaaatcaggctggctctgctcctgtttctgactgtttgccttgcaggttgccaagtaccttggagatgttgagtgagaaaaagccctcccacgaaaatgatcctaggagtggcatgcagccatgggagcgtggtgctgagatctccctgcaaaagagaacctgctgtgaggagtgtagttagctgacagcctccagctgctacacctccgagatccactgtagtagtattctcactgagactgcggccaacgaaggctctgaagctgggcctctctacctaatgtggggctcctcaaacaggcaatctttgctctggactgagccttactcagagctgcactgcagactgaagctgtttcaaccttgttttgttttatcccctctctccctcacttcacaaacatcacacttgcattgtggtcagaaggtcttcccacccatttagctttattcttcatatgtgcttccccctagtaaatctcttgctctttgaattccattttggtatctgcttctcaaagggcaaaaactgacacacttggcctctctcatcagccttaaacttagtagttctgtttttctctctgctgaggctcttgggacctcaactggcacacccaattgttccctctagtcaactttcaaaaaaaaaaaaaaaaaaaaaaaaaaaaaaaaaaaaaaaaaaaaaaaaaaggccaca

SEQ ID NO: 8827 - DNA, 738 bp, Macaca Fascicularis
  misc_feature (1)...(738): n = A,T,C or G
caanntaaaannnnnaaaaaattgtgttactggtatcagatgtcagaccaagaacacttcagtctctctaaggatgnnnncagctacctcactattaaaggacgacatcaacacagaatgcactaaacaggaaataagctgtaatcgagggaatttccattatgtgttactttttggtgactaacatggaatgttgaaaaggaagagccggaaagctcagttgttttctttattcctctgacattgtccaggcaagggggcatcctgatcagatgagtagatttggctgagaaaaaccctagagtaaggcaggcacgttgtggagttggatgatccaagatggctcataaaaacgtttgttctcaatccggttcagggctcnnnnnnnnnnnnnnnnntgaactgcttaaatgaaccctacagataaattggcactcttcatttgtaatcctgtttgtacaagtttagagcagcctagctcgagttctcaacccgtcctcttagaagtgnnnnnnnnnnnnnnnnnnnntaaacccacaatgttgaggacacgtgtgatgactccacttgcgcagccagctggcctcttgcactttcccctgcccaccacagtcctatgtacctaaccactnnnnnnnnnnnnnnnnnntgcttttgttttgttgggtctgtatttttgtggtcagnnnnnnnnnnnnnnnnnntgaattaaagcatttgatatgtgaagatacctgc

SEQ ID NO: 8828 - DNA, 625 bp, Macaca Fascicularis
  misc_feature (1)...(625): n = A,T,C or G
tttggtcatgatgataatctaataacctgctttcataagaagnnnnnnnnnnnnnnnnnnnnnnnnnnnnnnnatgtccctggcatacaaaannnaagaggcaagtggtatcacaataattttcaaagataaggcgaaatacagttaaatgttactaagaccttatctccctatgacaccttttaaatttttaattagtaaatcaaaacttgaaaaatacaaaaggactatattagaacactcacctacattcctctgcccatcccaccatgnnnnnnnnnnnnnnnnnncttaaagctaaagtggtttattacctattcagggtttccttttgccaatacagtcaaagataaatgtatattctttcctaccttttgtcacacaaaagttagtgtactaagctcactnnnnnnnnnnnnnnnnnnnnnnnntatagtgnnnnnnngaagccaataagaatcattccaatcttaggtactgnnnnnnnnnnncaagaactccaagctctttttttcttctttttttaagacagggcctcggccgggcnnnnnnnnnnnnnnnnnnnnnnnnnnnnnnnnnnnnnnnnnaggcgggcggatcacaaggtcaggagatcgagaccaca

SEQ ID NO: 8829 - DNA, 158 bp, Macaca Fascicularis
attttagtctttattctcaaccttacaaccaccacatactcacatacgcagaataaataacattaactccttttcctaaaaggcagtgattcctcttttatcctattacatctgttccacattgctatgataatgctgttgaagtgcaccctcttaca

SEQ ID NO: 8830 - DNA, 692 bp, Macaca Fascicularis
  misc_feature (1)...(692): n = A,T,C or G
gcagtgcacaggacacacacagtgcacaggagaaccnagtgcacagagcacacagtacacagcagaacacacagtacacagcagaccacacgcagtgcacagaacacccgcagtgcacggaacacacgcagtgcacaggagaacctagtgcacagagcacacaccccgtgcacagttttgttttgttttgcttttgcaattgcagggagctccctggccccccacagccattcatagaacccattctgtttgggataaaaacagatctccgccagctcacgtgaggctaggcaccagttcctcaaaacatttttgggcagctagcagctcatctcaccaggttgaggctgctgcctgtgaacagttgacagacccaaaggcagccagaatgttctgtgtcagagagccttgtctaacgggcagagctgggagacacccaggaagacccccagcccatacctgttctcaggcctgaggttcattctcattctctcccccttccctttccccttcctccctcctgccctcgaatctgcaaggcctctccgggtggctgtgttctgcccgggcctcccaggctccaagatcactgccttcggggagcccaggaagagctgcacatccactgcctctgtgtggcaggcgtgtccaaggctgtaactcctagttcccacctttcacacctcatctct

SEQ ID NO: 8831 - DNA, 726 bp, Macaca Fascicularis
  misc_feature (1)...(726): n = A,T,C or G
tgtgtcccatacngcaaaagannnnnngnntgtgtgtgtgtgtgtgtgtgtatatgtgtgtgtgtatacatacatatattctccccatataggtannnctnngatacttgtaattttaaatttcaacttctcaatataaaataatgtaagaacnngtggtttacaaaatgtaaaatcttaagccaatggaacccttgatttcctacctcagtgtacactcaannattggtcgtatcagtttgtgtatgtgcaaatgtcaaataatcttatgctttaattgctacagtacttgcttagaaagattactattttatgataaaacgtagttgtctccagagctcaaatataatttgttaaagcacttggtctaaatttctctctacctatgaacagtttagcattaagggtttatattaatgacatataatcataggccaagtataatttcttaaaatttagcattacttcaaatagccagcatgtaatacaagtaactacactacctcatatctacatgatttccaagttgtaaagcagatggacagataaaaaagatttaatctttgtcttttggccataagtggggaagttttgagtatattgcatagcattacacatttacgcatattttaacattaactnntaaagaagttttttataagaaaatgtttcaaggtaatattttttttgaggctgccgaagacaaatgacaggattacgagtata

SEQ ID NO: 8832 - DNA, 766 bp, Macaca Fascicularis
  misc_feature (1)...(766): n = A,T,C or G
taaagatagagaagatagcatcacttacactactgtggactggagagattttatgtgcaatacatggcatctagaacctnnnnnnnnnnnnnnnnnnnnnnnnnnnnnnnnnnnnnnnnnnnnnnnngttgattatattcttcaaaaattgggctttcatcatgctaggactactattcctaaatgnnnnnnnnnnnnnnnnnnnnntccactggacaaggttctgtcagttcttatcaaaaagctcggtannnnnnnnnnnnnnnaaaaggaaaagaaaggcaaagacaaagaagaacactaaaaagtaatttgatctttgaacaaatgattgtgtctgttaagttttattacactggagtgtttttttagtataataattttaaatataactttaaaataaatttgtggctattataattaaaagtnnnnnnnnnnnnnnntttattctagtctcatcattnnnnnnnnnnnnnnnnnnnnnntgataatgtaaattttgtgaaaaactagtattaaaatatataaatcttgttatggtttataattatataatgtnnnnnnnnnnnnnnnnnnnnnnnaaatgtttgcagaataactgtgaatttttttgtaactggccataacttttagaaaaaaatcttgttgctaatgtgattttggggaggtcattaattgctttttctttttttaatgtagacttgtataaatacctgtctgtatatagcttgagtaattgtggtatgattgtataccactaaaatat

SEQ ID NO: 8833 - DNA, 4337 bp, Macaca Fascicularis
gaattccctttcctagccaagggaagctgtgagagatggcaccgggaaaatcaggtcactcccaccctaatactgtgcttttccaatggtcttagctaacagcacaggagtggttgaattttatagaatattctagagaaagggaagagcatgaaggaagttttagtgacacgacatcaatggctcccttatagaactctgtattcagttttctcaggtctagaaatctcctggtggtttctgtgtccatttgcattaatagcacttaaaaatactttaaaatactttaatatacagaattttaggcttcctgtgttatacagcaccaagccttgcctgagctgagtgagatccacagaagcttgaacaatagctgtagcctgagcaggctgcgggcagttctgtcatctttgtgtgcccaggagtgtgctgtcctcacacatctcacagatagcagaagccatctctatcgcatcaaaaatttagataatttttgtcttccctcaatcacctcacaagagagggacataggccataaaagatccggagatattgaccatcttcactgctggctgtagcatcgctgatcacacacacataaacagaaataaatagcacagtggaaagcggataacagtcttatgtaaaagactgaaactctcatggtatctaaattcaattatgacacagtgctggcggcttggacacagttccttgaaaaccatagttcaagtccaaattgtaccttttagaaagaagacactagcaacatatccgacccaacccatcctctgggctagagtatcaaagagaaataagggattcacatgacctgcagcgaacaaagcagaacccagtctctgagtggtgaggcccaccagtgtggagctcaaaggtgtcattgttctgatcctctttataaagggagctgctccattcctcccagcacagagttgggagcacctccagagactcctgcaacatgctgttgattctgctgtcagtggccctgctggccctgagctcagctcagaacttaaatgaaggtaaaacagaagggggagaagatgcggtgaccctgattggggcttaggaggggataatggtaattagggggaagagaagagaatgaaaacccagattgggctgcagagttttcatgcctgggatcaggagaaccgattgcaccctcattccacactaacggtttctaatttatttaacgtacaatgaattctataagatttgttccaagggaatgagaaggtaagatttgcatttatagagagatatgattgtgctgttaaagatgcagtggagaacgcaaggcagattcagagaagtccagttgtgagcatcctatactgatctcattaagtacagagggatgatggtggctttgctgtgcggtggatcagcatggatgatggaaataaacacacatcagagatactgcagagacagaactggatggaacacttgtctctgtctaactagagatatagaaatatcagagccaatcattgtcgtttatctctcccctacatgctgtatttcaatgtgctgggagtgggatggtaagattgtattgaaatgattacttctgtttatgccaattgagaaagcatgcgtacagaagcaatgtatttctaggaggtggagggcataagaataccaaactatcacattgaagtccctggcatgtgtaaactaaattagcattaagtcttgaggatgctagagagggaaaaaaggggctcttctatgttgagttcatggttgttgctctgtgtcgtaacaaccgtgcctcatctttcagcttcctcccctttgagcagcttcacagacagtagctgacgagttaacttagggattcctggggtggtgagaagacccttttccctgtagaacacttgtgagtcttgaaagattcgagatgtaacttttcccatcatcctgtgcttctcttctagatgtcggccaggaagaatctccctccctaatatcaggtaaatcccagttcgttctcaatctgttttaactgtctttttctgctcacaaatggatcagctctccagtgtcttcttatcaacactttctttcaggaattgattaatgttagtgccactaataagaggcaatcttactgcaagcttgattctggggacgtgagcaggccaccaaattgaatggcagagatgcttggcttagatgacaacaggagtgggttgactcatccccctggccaggagtgcctcctggagatgacagacgactgggcagcatcctcattctgactcctctttatactgagagtcccccaactgctttgttcttccccagcattctattccagagatctatgtcttcaccgaaaatgcaaagaaattagtgtcttggtcccatttttgtgcgtttcccccctcagcttgttaccctagctgatcaaaatttgctgcaactattcagtgaatcttgtgtgcgcttttactctgtctttcccttctctctttctccttcagaacatcaacaaggacaaccccaacaaggaggcaacaggccccaaggtcccccatctcctccaggaaatgcacaaggaccaccccaacaaggaggcaagaaacctcaaggtcccccacctccaggaaagccacaaggaccccccaaacaaggaggcaagaaacctcaaggtcccccacctccaggaaagccacaaggaccaccccaacaaggaggcaacaaacctcaaggtcccccacctccaggaaagccacaaggaccaccccaacaaggaggcaacaaacctcaaggtcccccacctccaggaaagccacaaggaccaccccaacaaggaggcaatgcccagcaggctcagccacctcctgctggaaggcccagggaccaccatccgctcctcaagggggcagacccgctggacctccctaaggacagtctccccagtaatctaggattcaatgacaggtatgattccagttgattctacaccaagtgctctaattgctacgggtctccagctttactgtgacaaagaatcaactaaaagcccattgacatcgtattgtcctagaacccatttctaaagatttgtgttcaggtattctggaaatgggtaacaaggccctatatttgtaacaagctcttgaaggaattctgatgttgagaaacaacgttccaaataatctgtcttaaattgtattggcaatgaggaagtagtaccatgttcactctggcactctgttttctgtccacgaactcagagacctcccatttaaagttttcacctgagcactgtttgctctgtcctgcctcacaccagcctctctagtccagtattcctgccaagtggtccctgaactttcagcagctaaatggtgtctcatgttttaaattcttacttttcagtaagtacgtgattaagcttgcaacaaatatctaatgaaatggaaaaatatgaagctaaatttaaaggcataactcatcctacctgccttctctcctttagaaaactaccactgttaacttaatgcgtcttctctttgaaatatttatgtgtatgtaaacaattagaatagttttccctcagaactaagatcataatttatatgcaggtacatatgttagtcatttaaataatacatttccttggacatttccacatgagtaaatctcttaagtggttatctgtttgctttgataattttacgctattccattatgtggttgcactgtgatttctttaaccaatccttgtcactggacactgagggtggtttcagcttctcactattatagaatatattccagtttccattgtgtaaatatatccctgaacaaattcagcagcaagtaataataacaagcgaagaatgatcttatcttttaatcatgtcaggaacaatttggagcacatttagtgcaaaggaagggcatcaaaatagtgaacacacaaaaacttaggaaggaaacgtaggaggtagagggatggggatagaggggatgggctctcatgtactctactgcagtaacaccagggaggaattagacatttcctgccatgtcaagtctggtctatgaacttccttgttggtttgtttcaggaaatgaataagaagacgacagtgattcaaatgattcaaatgccgtgacgttggaagaaggtggtcatagctgtaacttcaatgtgccaataaaatcatcagcttgcaatttctgattgtggtgtctgtttctcaatgtttgtgaatgtgggatctgaggaccaagaggacattctaagaacatctaggaacccttctccttgatgctccaggaagctt

SEQ ID NO: 8834 - DNA, 1713 bp, Macaca Fascicularis
aagtgcttgttgaactggcctcctttggcagctcttctgcctctttcctgatgtggtacacctagttgaatgtaccttgtcacttgggaaaaggcttacatctgtttcctttaaaacaacggaaagcaaatgcttccacttgaactctggcctgcagtatatgtgcctgaaggagaaaacattttctatttggcagttgaagatatagaaacagacacggagcttctgattggctacctggatagtgacatggaggctgatgaggaagaacagcaaattatgacagtcatcaaagaaggggaagttgaaaattctagaagacaatcaacagcaggcagaaaagatcaccttggctgtaaagaggactatgcttgtcctcaatgtgaatcaagttttaccagtgaggatattcttgctgagcatcttcagacattgcatcagaaacccacagaggagaaagaatttaagtgcaagaactgtgggaagaaattcccagttaagcaggctttgcaaagacatgttcttcagtgcacagcgaaaagcagtctgaaggagtcttcgcgaagttttcagtgctctgtttgcaattcttccttcagttcagcatcgagttttgagcagcaccaggagacttgccggggggatgccaggtttgtgtgcaaggctgacagctgtggaaagaggctgaagagcaaggatgccctgaaaagacaccaggaaaatgtccacactggagatcctaagaaaaagcttatatgttcagtgtgcaataaaaagtgttcttcagcatcaagcctacaggaacatagaaagattcatgagatatttgattgtcaagaatgtatgaagaaatttatttcagctaatcagctaaaacgtcatatgatcacccactcagaaaaacgaccctataattgcgagatttgtaataagtctttcaagaggcttgatcaagtgggtgctcacaaagtaatacacagtgaagacaaaccttacaaatgcaaactttgtggaaagggatttgcccacagaaatgtttacaagaatcataagaagacccactctgaggagagaccgttccaatgtgaagaatgtaaagctttgtttcggaccccattttctttgcagagacacaagaagtataggtgtgagctatgtaataaggcctttgttacaccttcagtgcttagaagtcataagaaaacacatacaggagaaaaggagaaaatctgtccatattgtggccagaaatttgccagcagtggtacactccgagttcatatccggagccacacaggtgagcgtccctatcaatgtccttactgtgaaaaaggattcagtaaaaatgatggactgaagatgcacattcgtactcacaccagggagaagccgtacaagtgctcagagtgcagcaaggccttcagccagaagcgaggcctggatgagcacaagaggacgcacactggagaaaagccttttcagtgtgatgtttgtgacttggcttttagcctgaagaaaatgctgattcgacacaagatgactcataatcccaatcgtccactggcagaatgccagttttgccataagaagtttacaaggaatgactacctcaaagtgcacatggacaatatccatggtgtagctgacagctaatgggggctgtaaaggaattaaactattcagaagggctcctaaaaaaaaaaaaaaaaaaaa

SEQ ID NO: 8835 - DNA, 2420 bp, Macaca Fascicularis
  misc_feature (1)...(2420): n = A,T,C or G
aagttaggacctggaaggtggagccgagctggggcgctatcctccacgacccggggaattcaaggcaattataccaaaagagttccaagtaagtgtccctgagagagacgaggcgcgggtcagggtgcccaagcgctgcggcaaagcttttctacacgaaggaccttggagccggagagcccagcctcaagcgcactccacgccccccgggcccgcacgtggtcccaggggcccaggtcccgctctgcgagagaggccccagcccccaggagcgcccgcctcatgccgcctgtcttcgcggcctggccccggccggaagtgctgggcccaacggcctgaagcccggaaccgcatggagaggcgggagtcgccgcccacaggcagccaggccgccgacccgcgcccgcactcaccgtgacggtcacctcatcgtcatgcagaatgagggccgagtagatgcaggcgagctcggagacggaggccatagcgcgggcaagtgtggggctggcgctgccggacgcggtgctagtcgccggatgaagtgaggccctcactccagcgcggccttagctttctcggaaggaccgagcaccttcgcgacagctgaggaaagaggttcttgcgcctatgcgcagtctcttatgtgaccacgcggaccaatcggcgcccgcaccgggcggaagaggcggacccaggaccgattgaagacgcctgcgcgctgcgcctgattcgttcttcctgttgagaaagtttctcagcgccaacagttacggtctcactttattttgttaaattataggacttgagacggttaaaaacacttttaggatagggttgcgtaggtattcggacttcgccgccgttggttccatgagctgcttgacttggcaggagctgcgctgtggccgtggtgacactgttcgtaatctcccagttaggtcgcggccttcccagccggcgctgaccctgagggtaagggctgcgtcccaccatggacgtcgctgcttagcgctgggccttgggtgagatagatagatgtaggtagatgtaggaggacgagcaaactaacggcattatgatagcagtagccgtggagcgcttactatatcccagtaactgagccacattctacaaggattcacgtaatcctcacacagcaggagttggatgttatctccatcttgcagatggcaaaattaagtcttagagccggtaactagcccaagatagtgtagttaccgcgcggtggagcgtggatttggaatctagaagccttagacctggtaactaacccaagattgcatagttccgcgcggtggagcgtggagttggaatccagaagcctaacttcaccgcctagtgcttcggggaagggggattatgggtaaattgtatacaacctgttatttgttatctgaacccaatttaaattcctaccttcaaaaatggtcacctttacattgctcgtggaatttgcttagtttactggaaggttagttcaagatttttttttttcgggaaccttctttatttagtccatgccattatttaataatcatctctgatgaaacatttctgttggaatccaccaatctagagtcctatttgggtcaatcttaactacaaacaaatattttcatatcctgaatttttaaaaaaagtttttataaagctatcaaactttttaaaaataaagctactgagttttcatccaaatctaagaagccattatagtggaattttggtcaagaaagcttaaagctatttaaaaatcctcccacctcagcctcccctgtaggtgggactgcaggtatgtgccgccatgcatggctaatttttaaattgtagggatgggatttcagcannnnnnnnnnnnnnnnnnnnnnnnnnnnnnnnnnnnnnnnnnnnnnnnnnnnnnnnnnnnnnnnnnnnntgagactagacaaggccacagagcaaggccccatctctacaaaaatgaaagattggccagatgtgccggcatttgcctgtagttgcagctactcaagaggctgagaggattgcttgagcctgggaggctgagactacagtgagctgtgatcatgtcattgcactcccttctgggtgacagagtgagatctcatctcaaaaaagtaagaaaaaagccagcctggacaacatggcaagaccccatctctaaaaaaataaaaaattttttaattagctgggcatggtgctgagcacctgtggtcccaactacttggggggctgaggcagaaggatcacttgagtccaggagtttgaggttatagtgagtcatgattgcactcctgcatttcagcctgtgcaacagagcaagaccctgtttctgaaaaaaaatttaaaaacaagaaaatcaagaaataaattctgtatctactaaaaaaaaaaaaaaaaaa

SEQ ID NO: 8836 - DNA, 2435 bp, Macaca Fascicularis
aagttacacagaaatgtggaatcctgggtgacattcaactccttaggtcatctgcattctccccggacggagaaacaaagccttcccgagcccaacaaggaggatggcgctgcccaggccggtcgaagtaagccctccattccagacctcggctccacggtctcccaaaccggttcctggaacgcgagcctgagatgccctcacccccggaaaatacccaaagccagggagccgcggaagtgcttgtacccagcacgctaggcgtgatggacctgtgagttacaataagcgccggaggacagaagggagcctcgcagccttacaccggcgtggagcaggaacgtctggcgcccccgagcggccaagacctcaggagccagaaaaacgtctcccactctcagcacggggccaactgacagtgccatccaccaatgggagagcccagtctgcgttcgtgggaccagtccgaggccacaaagagggccgtcccggcagcaaatcagcgtggcttttaaagaggccctgatgcctctctggtcaccacagagatagagggacagtccctgtgaaacggtgacgccgactacactatgccgcttgttcccagccttcgccttttcctcccgccgcactccaagcccttcggccgccccgcccacgaccttgtcaggtcccgccccccgcgtgagtggactggcgaagatgtggaattaccaaaacttattggatgcttagtggcgtcactctggagggcggcggggcccggagcggcgagggccgcccctctcggacggaactcaagccacgaagtctgcagtcgcagatcggcatcccctgtccggtatgtgatgctcaggtggacctgcccatgggtggagtgaaggctttaaccatagaccacctggccgtgaatgatgtgatgctggagagcctgcgtggggaaggccggggcctggtgtgtgacctgtgcaacgacagggaagtagagaagaggtgtcagacctgcaaagccaacctctgccacttctgctgccaggctcataggcggcagaagaaaacgacttaccacactatggtggacctaaaagacctgaaaggctacagccggattgggaagcccatcctgtgtcctattcatcctgcagaggaactgaggctgttctgtgagttctgtgaccggcctgtgtgccggggttgcgtggtgggggagcatcgggaacacccctgtgacttcaccagcaatgtcatccacaagcatggggactctgtgcgggagctcctcaaaggtactcagccccacgtggaggccctggaggaagccctggctcagatcaacataatgaacagtgccctgcagaagcgagtggaggcagtggcagctgatgtccagacattctcggagggctacattaaggctattgaggagcatcgggacaagctgctgaagcagctggaagacatacgaatccagaaagaaaattccctgcagctgcagaaggcccagctggaacagttactggcagacatgcggactggagtggagttcaccgagcacttgctgaccagcggctcagacttggagatcctcatcaccaagggggtggtagtagaacggctcaggaagctgaacaaagttcaatatagtgcccgtcctggagtaaatgataagatacgcttctgtcctcaggagaaagcaggccagtgccatggctatgaaatttatggtaccattaataccaaagaggttgatccagccaaatgtgtcctacaaggagaagacctccacagagcccgggagaaacagacagcctctttcaccctgctttgtaaggatgccgcaggagaaatcatgggcaggggaggagacaacattcaagttgccgttctccctaaggataagaaagacagcccagtcagaccaatggtgcaggataacaaggatgggacatactacatttcctacacccccaaggagcctggtgtctatactgtgtgggtctgcgtcaaagaacagcatgtgcagggctcgccattcactgtgaccgtgaggagaaagcaccgcccacacccaggtgtgtttcactgctgcaccttctgctccagtggaggccagaaaaccgctcgctgcgcctgtggaggcaccatgccaggtgggtacctaggctgtggccatggacacaaaggccacccaggtcgtccccactggtcatgctgtgggaagtttaatgagaagtctgaatgcacgtggacaggtgggcagagcgcaccgaggagtctacttaggactgtggctctctgatgggtttgtgctcagccttttaaagctgcagtcagcaccactcgatatttccagaggacccagaccttctttcattctaaagagactgatagaattaaaaacaaagtgccttatcttgaaaaaaaaaaaaaaaaaa

SEQ ID NO: 8837 - DNA, 2139 bp, Macaca Fascicularis
ctcggagctggctgctgcgcacaggcagagaaaggctgaagtgttcttgaagactcttcaattacaggaaaagacgcttgactgcatctttagaggagttggtttcgctggttccaaggattctgttaatgagaaaactccacaggccagcattctgtaagctggctccagcagtccagttgacagtggctgaggccagttcctgatcatcctatctgaggaacaccaggtgcctgacctcggaaaatttatttgcttctcagtttttatatatatgcgagaaggacttgaatgtctgccctgtaggattaaatgagataaaaagcataaaatgccttcttggagtaagcgatcctttcttcacacggtccattctggccagctcacaaaccactgagagggaagcctccaggatcctagagtagatgaccagatgcccaggcgcacaatctgtggaagtgaaagtcaagctttctaggccaacagctgtcctcagtcgcttggtcggatagtctaatcgcagtttttcaggatcttgctgtatcatccaggctggagtacagtagtgtgatcccacctcactgccgcttcagcttcctgggctcaagtgatcctcccatctcagcctcccaaatagctggttctacagaatggaagtttacagacagtcatctgggtggaggacacccttttggaatcagcactgaatgtgatgccatatcccactccaaaccagcacaactataaatattaagcaatggtgactcctggccttaaacaggagtctgtttcaaagcaagacttttccagaggaagtccaacacagagtgatgcccaggggactaaatagaaacatttattagggacccaacactgaagaagttcatgggcttctgaatagtttccccaagtgaggggagatcccctttgaagaagcacaacagacattgcctaaagctaaggagagtatcactgataaaggaacctgagacacctgggagaatttgctctgaaattcagtcctgccaatgctctgagagtgggaaaccctcctttcagtttgcacatgattttcaacctcagcaactgtaataaaacaagcaggctctcaatgtaaagttagtgggaaagtcatttttctgaaaatatccctccctatttaaaaaagccttaatacaccagcagccctgacttgaacaccagcatgtccaaactggaggaaagccctatgtttatcttcaacatggaaagaccttcagtgtaaacccaagttccatgaaacaacagagaagccatcctggagagggcttgcatgagagtaaagaatgtggcaaaatcttaagacactggatcttgtcagtgtcttgtcagacatcagagagctcttatggatatcttcagtgtggaaggccttctgtgtgagctcagtattattgaacataagtaaattcattttggacaagagccttatctatattcgtgggtgtagcaaagcctcaaagtgctgtgacagccttattaaacatcagagaatctgcactgcagaaaaaccctattggtctgaagaagatagtaaaaggttcattgtggttcagctctggtcacccaccagagaatccacactggagagcagcaccgttatgaatgtagtgtatgagggaaggcctttatttggaagctagcacttttcaatcatcagaatgcccatgctgaagtgaaaatttataaatgtaaaaatgtaaaaaagctcaatcgtatacatcagaaaatccacactggaacaaaactgtatgcatatgaccatagggaagctaacagtgttagctcattgcttaaagggcatcaagattcccatagagggaaaagctctttgtaaattatgtgggaaaaccttcagtcaaagttcagatcttatccagcatcagagtccacactagatggaagctttgtgacttggacaaatgtaagaaaacattttgatgaactcatcctttactaagcaacaaagaatacacaacaaaaatggacctcaataatcaaatatgtggtagagagatagtaatttttcaacatcatctgtcatgattaaggaaaagaccattaaatagaagtggtgacagtaaaaaaaaaaaaaaaaaa

SEQ ID NO: 8838 - DNA, 2150 bp, Macaca Fascicularis
tgcgcggtagcgggccgtcggttgggcgcagacaggccccagaagatggagagatggagccaccccaagatacaaataggcctttcagcacacttgataaccgcagcgggcgggtccaagccagggcccccaccccgctattgcagaggaatccctacagcagcccggatgtcatgcacatgaaagggtcagacgcttcttccgtcccttacaccctggaccagggcacgatggccctgcctaaggacaagaacaaggagggcaccgggcaccggctgctgaacatgctgaaaaaaactcttaaagggtctgatagtgaagaactggaaataacacaggagacaccaaatttggtgccatttggggatgtggttggctgcctgggcattcatgtaaagaactgcagacattttacgcctaacatcagtttacaacattatgctaatttatttattcgcatctctataaacaaagctgtgaaatgtacaaaaatgtgtagcttgctatccaaagacagtgagaggaacactgtaattaagttcgatgaagtgaagtatttttctgtacaggttcccagacgttatgatgatgagcggaataatattttattggaactcatacaatatgacaatacagaaaaacgtgccttcttgttagggagtgttcaggtacacctttatgaagtaattcagaaagggtgcttcattgaagaagtccaagtgttacatagaaacgtatttgtctgcaggctggaggtggaatttatgttctcctatggaaactttggttatggattttcacatcagttaaaacctcttcagaaaattactgaaccatccatgtttatgaatcctacaccacctccagaaagaacagatcccgtgacaaaagttattacaccacagacagtagaatatccagcattcttatccccagacctgaatgttactgttgggactccagctgtgcaatcctccgaccagacatcttctgtagtgcgacttgaaaaacttcagcaacaaccccgggaaaggctggaaaagatgaaaaaagaatatagaaatctgaatacatggatagacaaagctaactatttagaaagcattctaatgccaaaattggaacataaggattctaaggaaactaatgtggatgaggcatctgaaaacccgaaaagtaatcaatctaaagagaagcttgaaaatgttgcagaagtagatatccctcttgtaaatgaggaagctgaaaccactccaaatgagttactggataatgattctgagaaaggcctgactgtaccaactttgaaccaattggaccaagataattcaactgctgatacttctaaaagtgatgaatcaacaccttcacccacagaagtacactcattgtgcactatttctaaccaggaaataataaaagcaggcagagtaccacctttaggtgaacatcaatcagaaagcatgccagacagaaaaatgaaaaatgtgttttttccatcagaagtaaaattaaaagataactatccaagcattttaaaaacagactcatctctatcagaggtaaatttcaggagtatctgtataaatccaaagagaaggaacttagtttcatctccaacagaaattagctggcaaaacaacagtcttaacttagctgaaaggaagaacacaggcttagtttccaccagattaaaaattaaaaggtagctttcaaagccaagacccaaaagaaggccttgagctcaaggtgtctgcccttatattagaagtgtaagactagggacacaaaataatctatttaaaaaaattaaatacaaataaactgaaaatgccttcaaatgtctccaagtggaaatgtgtctaagtatattaaatattcctactttacttatgtcaatcaagaaatatggataaaaaactttcaagaaaagcaaagtgatttgagatgccagtaatacaaattaatctcatgggttggtaattcagctgaaagtgtaacaacaataacaaaatgtaaattcaaaggaaatttaaaagcctgggaagttatttcagtggaaattcttaatacaactattatattataaaaaaaaaaaaaaaaaaaaaaaaaaaaaaaaaaaaaaaaaaaaaaaaaaaaaaaaaaaaaaa

SEQ ID NO: 8839 - DNA, 736 bp, Macaca Fascicularis
  misc_feature (1)...(736): n = A,T,C or G
ccatggagtnnnnaagcggccccacagaattgaaataatttcaaataactgcaaaggaactgaaaatcttcacagagatgaagtggggtttccattaggtgctttcaagtttgataataaatcatcaacttccactggtcaatatatagattttgggtgtctgaggcccccagattagaaaccactaatctccaaagattccctccaattatgaaatattttgatgtctacttttagatagcattagctannnnnnnnnnnnnnnnnnnntttcttttcatactacataaaattacctggttcaaaagtggtttttgtttattaagtttggtagtaaatatatataatacacagacagaatagttnnnnnnnnnnnnnnnnnnnnnnnctttggtttgaggactccctgataagcttgctaaactttcagagtgtcctgaggcacttccaaccatccctcctcctgctttcgttgaggcagactcgcactgcagtctgacagcaattttttttctgattgagaatcaattcaatacaatgtcagtttttaaaagacgaagttagatcaagagaatatttcagagttttggtttatacatcaagaaacagacacacacacctaggaaagatttacataatagataatcatcttaatgtgaaagatatatttgaagtattatttttaatatattaaatatgatttatgttatagtcttatgtatgcgaatttcgtcac

SEQ ID NO: 8840 - DNA, 700 bp, Macaca Fascicularis
cgcctttgtgagaggacgagaaagccagatccggcccgcatcctttgcggagaggccgcggctagaaaaaggaaacgcttttgctgcctgggttccattttaagaattcttgccgatttttcccacttgaattcggaagtggctttcctatttccttgtcctagccagcctttaattttaaacgctgtaatgaacaattcgcattggtcaatttcctttattctgcaagattcggctttgagaggcatccgccctctttggtccccagcgttttgaaatatggggaggaggggcgcggggagtgtcgcccctttttctgtagaaagaggaagctcgtgagtgtggaacggcagcggaaggagggcgagaagggttttcaggctgcgggtcgcagggcagaagcgcagttcccagcccagagacactgggggtgggtggctcttcctcacgctcgctcttggcttgctccctgcagcttttcctccgcaaccatgtctgacaaacccgatatggctgagatcgagaaattcgataagtcgaaactgaagaagacagagacgcaagagaaaaatccactgccttccaaagaaagtaagctccgacccacccccatctttagaaaggctgggtgggagcggccggtgggagggcgggaggctgggaggggccgcgggaagaattcgggaggggggagtgcggg

SEQ ID NO: 8841 - DNA, 1212 bp, Macaca Fascicularis
ataaaattgaatggtaacccctataaataatatttaggaaaaatttatcaatattcacttctcctccagaggaaatgttgctgtgaacacattttgcaccttgttagaatttctctgggtttttattgagtgagtctgctgtgggccaatatttatccacatctccaggttcagcataatgtgattttaagtgtccacaacattaacctttgaaaaatggaggaagtcatggaaaaaactaacaaagaaaaacagtgccatagcaactgctgttagcaacatcacatctcctactgacaaattatcagaaaaatttttggggctttggttgtagaatgaaaaagtatgattttcatgtctgtatttctttgctgatatgttttcaaaattgttaaaaactgatgtttgcctttgcttagtggggatagtttaacactttcctctctgtctctacctgcccacttccaggtggtgcatatgaagtcaaacagcatcgattcttccgttctttagactggaacagtttactgagacagaaggcagaatttattccccaactggaatctgaggatgacacaagttattttgatactcggtctgagaagtatcatcatatggaaacggaggaagaagacgacacaaatgatgaagattttaatgtggaaataaggcagttttcttcatgttcacataggttttcaaaagttttcagcagtatagatcgaatcactcagaattcagcagaagagaaggaagactctggggacaaaaccaaaagcacaaccttgccatccacagaaacactgagctggagttcagaatattctgaaatgcaacagctatcaacatccaactcttcagatactgaaagcaacagacataaactcagttctggcctacttcccaaactggctatttcaacagagggagaacaagatgaagctgcctcccgccctggagacccccatgaggagccaggaaagccagcccttccccctgaagagagtgcccaggaggagcccgaggtcaccactccagccagcaccatcagcagctccaccctgtcagttggcagtttttcagagcacttggatcagataaatggacgaagcgagtgtgtggacagtacagataattcctcaaagccatccagtgaacccgcttctcacatggctcggcagcgattagaaagcacaaaaaaaaaaaaaaaaa

SEQ ID NO: 8842 - DNA, 734 bp, Macaca Fascicularis
  misc_feature (1)...(734): n = A,T,C or G
agcaatcgtgctgtctacctctcactgggtcctggtaggggttgggatctcttctcctggggtgattgatggcctgagcctggggtcctggtagtagagnnnnnnnnnnnnnnnnnnnnnnnnnnnnnnnnnnnnnnnnnnnnnnnnnnnnnnnnnnnnnnnnnnnnnnnnnnnnnnnnnnnnnnnnnactgggagcagcagctcctgaaggttttgtgggcaggggaacaggacattccttcctggaaggcaccaattttcccagccccactcccattacacacacacacacacacacacacacacagtgattcaggccttgagagtcaagcccaagagctcccttggccctgtcaccactccctctactggcctctgctgttcctgtctttgctcacacccttacagctggtctctggcagaggttggcatagcctagaagcagctgcaattgcgcctgagggacaggccctagagtttggtggcccaagtcctgaacccctcttggaccaggtgaggtgcagaggtggctgctgcttccagtttcccttcagacttagctgtatgagccccactcctatcctttggccttagttttgccatctgtaaaactcagaaacacagttggaaagtccttgttcatttagtcattgaatatattataatatgtatagagcgccttttgtgtaagttactggtcagagtcctcactgagctcccagtcagaggaacc

SEQ ID NO: 8843 - DNA, 692 bp, Macaca Fascicularis
  misc_feature (1)...(692): n = A,T,C or G
cgctcccttntnctccccagntnnngatgggtacagtagattttgataaaaagacaaacgaagctatcagtggggctgatgttgaagaatgaagatannnnnnnnnnnnnnnnnnnnnnnnnnnnnnnnnttatttctcactgaatatttaaagagatccctcggcaaagatggatctgcgcgctcctggggtgtgagcggctagcttctcccagaccccggggaacgtgtaccggagcacgtgtaaatcccgcacccgccccctatcccacaaacaggggtccttgcacacccaccagcccacactctcccaggtacacgaacgcgtttgcgtgcacttgcacactcctttcccggaatgtgcccgtgtttggagccgcccgcatccttctcgtaacaatcttggcttcttgaaagtccgggcctcccgggcaccgcatgcagtcaggaacctagcggagctggcggtcccggaaagcttttctcctggtgcgcgccgcgtgcgcagcaggaagctcnnnnnnnnnnnnnnncatgtgtttgttacttggtctacgtgtgatttaagattaagtggaggaaaaaagaaccttccctcccccgcaaaaaacaccacaacaaacaaccaaacgaaatgaacatgcaaaaagcagcttcgcgatgtttaattaaaaatgggcgagcagagacga

SEQ ID NO: 8844 - DNA, 1096 bp, Macaca Fascicularis
aaaaagggcacttctgtttgtggagtaaagcctaccacattatcaaaatatgtaactggaggattacagtatgcttacctctgattttatttctatactgctgctataagtaacaatgagtaaatctaataaattatgtcgtaagacttcttgtccaaggagcaatatattctgcaatctccttgacaaaattgttaaaagaccctccctacagtttttgggtcagtggggatatcactgttatgaaccaaggatttacagatcactggccaaaattctgagatatgtggatttggatggttttgacgcactactcacagattacattgcatttgtggaaaaatcaagataccgttttgaagtaagttttaacctcgactttactgaaatatgtgtgaatacaattctgtactgggtttttgccagaaaaggtaatcctgactttgtggaattacttctcaagaagacaaaagactatgttcaagacagaagttgtaacctggcactgatatggagaactttcacaccagtatactgtccaagtccattaagtggcatcacacctctcttttatgtagctcagacaagacagtctaatatcttcaaaatactactgcaatatggaatcttagaaagagaaaaaaaccctatcaacattgtcttaacgatagtactctacccttcaagagtaagagtaatggttgatcgtgaattggctgacatccatgaagatgccaaaacatgtttggtactatgttccagagtgctttctgtcatttcagtcaaagaaataaagacacagctgagtttaggaagacgtccaattatttcaaattggtttgattacattccttcaacaagatacaaagatccatgtgaactattacatctttgcagactaaccatcaggaatcaactattaaccaacaatatgctcccagatggaatattttcacttctaattcctgctcgtctacaaaactatctgaatttagaaatctaacatacgtcaatgtcctaagttccttaacaatgcttaccaatgtatggcttagaagttaataaaaattaacttcatgtaaaaaaaaaaaaaaaa

SEQ ID NO: 8845 - DNA, 553 bp, Macaca Fascicularis
acatcagggttttttgtgaaagagatcagacctgtttgctctaagactctatcttgaactaagatgcatacgtagtttggtttcaagttagacgttaatgacttaaacatctttattctttactgagggaaatctcttatgtttgtttaaaatgtcaaacatttcccacccgttattttttagattaagtactaatatataataatctgtcctcacattttttgcgtaccctcgcaaacttcatttgaatcctgtttaatagtacataaactatggctttaaaaaatatttggagtggtcatagttataaagttctcctttatatttgatctgttaataacaatgaagttatcattattcatcataatgttaaagaagtgtaaatacctggaaatgttaagtagaagaaaggctatagagtaattcatttatcttggttgaagtgaaaatgagagtgtctttatggtgataatgtaaagcgtagagtaactattttaagcatttgtaaaaaatcatttagagcttttaaaatattggctatttgccgtaatgt

SEQ ID NO: 8846 - DNA, 709 bp, Macaca Fascicularis
  misc_feature (1)...(709): n = A,T,C or G
tttatattctctgagttgtcttgaggcaaggaggtttcccaggcagcatagtcaggaagttaaaatgatgaccagctcagctttctggatgatcctgattgaggagatagatgagtagaaagaagccatgggacagtgattggtgttcacagtgtaaatcttttttttttttttnnnnnnnnnnnnnnnnnnnnnnnnnnnnnnnnnnnnnnnnnnnnnnnnnnnnnnnnnnnnnnnnnnnnnnnnnnnnnnnnnnnnnnnnnnnnnnnnnnnnnnnnnnnnnnnnnnnnnnnnnnnnnnnnnnnnnnnnnnnnnnnnnnnnnnnnnnnnnnnnnnnnnnnnnnnnnnnnnnnnnnnnnnnnnnnnnnntcttgaactcctgaccttaagtgatccactcgcctcggcctcccaaagtgctgggattactaatgtgagctactgcacctgggttcacagtgtaaatcttgagtgatggagaaaacagctttgtcatcctttacatggtgggcacctgcctgctgtgctccacgtacatacgtggcgtctgcaacaactctgtcagctgtgcaaggtcactgtcttctacagagtagaacatcaacactgagaaggaacgtgacctgccaaggccacagagcaaggtggtggaggggctgtgggtcacatctaggctttgtccaggacccttgcacctcccagtatccat

SEQ ID NO: 8847 - DNA, 671 bp, Macaca Fascicularis
  misc_feature (1)...(671): n = A,T,C or G
actcctgtcctgccgctgtgtgagcaggtctgcctcccgggaccaccaaagccccctcctattccctctcagctcctcccactgcggtgacggggccggatggagaggaggggcaggaggccgctagggggcgcgcgctcctcacggatggcccatttcggccggctgctctccttattcccggcacagttgagccctggtgagcgggggaggacgtggcctctgcnnnnnnnnnnnnnnnnnnnnnnnnnnngcagtctcaatgctcactctgaactctggtttggaccccacgttaagctcctgcacccggtggcccagctgccctcgtggagtgtgtgctgtgagttccgcccttagccccagcacccagcctgcccaggggtggcgctgtccgcatcctcacagttcacagagctgggcgggtggccgggcgctannnnnnnnnnnnnnnnnnnnnnnnnnnnnnnnnnnnnnnnnnnnnnnnnnnnnnnnnnnnnnnnnnnnnnnnagcccgggcaacatggtaaaattccatgtctacaaaaaaaatgcaaaaattagccaggcattggtggcacacgcctgtggtcccaggnnnnnnnnnnnnnnnnnnnnnnnnnnnnnnnnnngaggctgaagtgagctcggattgaaccacttaatccagc

SEQ ID NO: 8848 - DNA, 1616 bp, Macaca Fascicularis
aaataagaaaatgaaaagacaaccttttaaagaaattttctacaaactttctgatgggaagattttgttttgttgtgtttttaaagataattgcaaaatgtttattatacatgtgaatttgcagataaatacccatttgatctttggcattaatttttgcttgggagtacccattgctgctgttataaatctttcaccccatcctcacttcttctatccctgttcttcctctgcctagcaacctgaaaaaagcaagccttctagcaggcagcagatgttgccatgaaaactgtgaatcagtcaggacccaggcatccatgggtagggggcgctgtcagcaacctctgtctctgctgttgttcctttttcctctggcacatttctgtttgtgctcaaggggtctatagtgcagatgcaacctacggaccatcatagcttagcctagcctacctcaaatgtgttcggcgcacttccattagcctatagttgggcaaaatcatctaatacagagcctattttataataaaaggttaactatctcatgtaacttgtggaatattgcatgaaaaaagaaacagaatggttgtatggctactcaacaatggattcctactgaatgcatattgctttctcgccatcaaaatgttgaaaaattctaagtggaaccattgtaagtcgaggaccatgcatggtgctttatctcaaaggagtgatctttatagcatgaatttcagaagccacaggaagcctcctgaggaactggtagtctggagcttctgcatttctaatcagctctgtggctgccaggtccactttatgtggattctgcagatcccagcattgctctcatgtttgacttttattcccacgttcctttgcaccattactgaaaacttaacatcctcaactttgctagcctgtttctcagaaatagcttttatttccccatagcctatatttgaatgttaacctttcaatgtggtctcctactgatttattttgactggcctgttcttaactctactatttcagaacaggttgcatcaatctggaatctggccactccctctcttattcctgtactgctccagttaggcggagtactccagcagcaacctttctggtattccgggcagtcgattgcattctgagagcttgtaatggtacacctagacggatacttcatgataaacatgatgccttaatctcattaatggtattgccccacaagtagcaggaatccccactgagttagatttctataggtcggctagcagtgagtgctggatgatatctatctctaaaccacactagtgtagaacaaagacagaaaactgcttttcttttttttttctgaaatagagtctcactctgtcacccagcctggagtgcagtgacaacatctcagctcactgcaatccccacctcccaggttcaagcgattctcctgcatcagctacttggtaggctgaggcgggagaatcacttgaacctgggaggtggaggttgtagtgagccgagatcatgccattgtacttaagcatgggcaacaagagtgaaactccgtctcaaaaaaaaaaaagaaaaaaaaaaaaaaaaaaaaaaaaaaaaaaaaa

SEQ ID NO: 8849 - DNA, 390 bp, Macaca Fascicularis
gtctctcacggggtgtaaaaagtgagacacatgcgctgtgtgggagagcgagacaagagattttcacacgctttctttgtgagacgaagaaacccgacattctttttgcaaagacacacgaaaatgtgtatgttctcgtaggcacaaaatgaggagagggggagaacaccccacccccgcgtccaccacgaccctcttccccacgcggacacgtgttccctccccacatatatttctcgttctggggagaggggggggggagatgtctatatctgtgtcaaaatcacggggcacagagaggtatattcttctctccccataacaaaaagaacacgagaataaaaatacattttcaaaaaataatcacgagagggggaggagagaaaaaaa

SEQ ID NO: 8850 - DNA, 669 bp, Macaca Fascicularis
  misc_feature (1)...(669): n = A,T,C or G
tgacgatcataaccaaggcagtcgtcaggaccatannnnnnnnnnnnnnnggccgggccatcaataccatagatcgcacttgccatggccgggccgtctgtaaagtgctgtgttcgggttagagaggacaagttggtgttattggagggaacctgtggtgatgggggagannnnnnnnnnnnnnnnnnnnnnnngatggctaaaccttcccgacaatgtcacggggtcagacnnnnnnnnnnnnnnnnnnnnnnnnnnnnnnnnnnnnnnnnnnnnnnnnnnnnnnnnnnnnnnnnnnnnnnnnngttctatcacgtgcagcctcggggaatgagagctgagaaggcccctgtgaatacgggcaggatggggcnnnnnnnnnnnnnnnnnnnnnnnnnnnnnnnnnnnnnnnnnnnnnnnnnnnnnnnnnnnnnctcttcacttgccccattttaaccacagctcgctcatcagccttctttggagaacgctggggaccgagtgacgaggtggggagactctgggcnnnnnnnnnnntggacgtatgttggaaacataactttgccccctaataatgataataataacagcagctgaggaagagctggggttcgcagagcacctgctctgcaaacagcctgcaggatcttttggtgaaagtcgtgaaac

SEQ ID NO: 8851 - DNA, 2132 bp, Macaca Fascicularis
tttggccgtcgcagagcaggaggcatctgtaacatcgctgacaagcaagaggtacatcttgaggttcccagcgctggagacactgatgctggatgacaacagactctccaaccccagttgctttgccagcctggctgggctcaggagactgaagaagttaagcctggatgaaaacaggattatccggatcccatacctacagcaagttcagctctctgacgagtcagtggactggaatggaggtgggggaagtccccagaaagagccccaattcatgctgcagtccaagccaaggatgcttgaggactcagatgagcaactggattatactgtactgcccatgaaaaaggatgttgaccggacagaggttgtgttttcgtcttaccctggattttcaacctcagagacaaccaagatatgttcacttcctcctatattcgagatccttcctgtgaagtcactgaaggccaggaaccagacgctggccccacccttcccagagctgagataccttagcctggcctacaacaagatcgcaaaagaggatgctgtcctaccagtagctctcttcccatctctctgcgaattcgtctttcataacaaccctctggtggcccatacacgaggggtccctcctctgctgaagagcttcctccaagagcgactgggaatccacttaattcgaaggaagacagtaaagcctaagcatcatgttttgatgtctcggaaggaatcacggaaggtgaaaaccgaaatcccaaaggtgccgaagcagcctctggtgctccatcacccacaagtgaccacaaacaagtctccctcaaaggatatgctagagccagaggcagagctggctgaagatctgcccactaccaaaagcacttttgtggagtcagagatgcccactgagagtctggaaggcctttccctgtctcgccggaccttcgtgccactgcctcccatctgctccgactccactgtgcatagtgaagagaccctgtcccacctcagtgacacagctgtccgtctcagcccagagcacccatcagatgaggactccaagagcacagagtccatcttcctgacccaggtgagtgaactgccttcctccatcatccataaggatgatttagagttgaaggagaaagaccaaaagaaaccaccaatagcacccagagaggtgaaagtgactcggaggaagctcacaactgcctcccttcccagcaagtaccacggctatgaagaactgctgacagccaagcctgatccagccttcattgagccaaagggaatccagaaggatgcacaggccctgcaacacatgctgaagcacccactcctgtgccactcctccaagcccaagctggatactcttcagaaaccctatgttcccaaagagaaacgggcccagaggatcccgattccacccccaaggaagactagaacccaactgctggatgacatcttcattcgcttgcgggatccccggaacattacagaggctccactaggtgctgtcctgcaccggcggacagaacggcggctggtgaaccacaagcagtacctggaggccaagaggctgttgaaggagttccaagcacgttaccggcggctggtgagtggctctctgcggacagtgttcgggaccaccccgcttcccccagcctgcccagcgctgagtgagagtcagcccaagttcggccgcttcctcgagttcatggatgagttctgccaggagcccacagccagtgactcacaaggctagggctgtgcatgggggctgtgcgcatcatccagcctgtgcctcagctctccctaagggctctgtgccctggaccgcacctcgaggttgaccagccggccacaggcctcagagctcagctgggccccgctcgctggccacaaggtggcctccccttgttaggatctccccttcttgggccaggcatgatggggtgcctggcccagcagcaataaagagtgggtgcacagggaaaaaaaaaaaaaaaaaaaaaaaaaaaaaaaaaaaaaaaaaaaaaaaaaaaaaaaaaaaaaaaaaaaaaaaaaaaaaaaaaaaaaaaaaaaaaaaaaaaaaaaaaaaaaaaaaaaaaaaaaaaaaaaaaaaaaaaaaa

SEQ ID NO: 8852 - DNA, 680 bp, Macaca Fascicularis
  misc_feature (1)...(680): n = A,T,C or G
actggttagttctttttgttttgttgtttntaatgaaactggtaccatctgtgctttcacaaaaaacttccaatgccatttttgagaactaacctaactagtcatgctaaccagaaaatccactggggaggaggttccttttgaaacaaaatgctgttcagttagtaaccaagttactttgatttcaaaagcagctgtgtttctgatgagtactgaacaaatgtgtgtaattttctgtgccagacttacactttgttttcaagcactgcaatgtgggatggatggttagaaacaataatatattagggtttctgtttaaccctttcaggagtgaactgtatctccttttgttaatttcncccgtgtcgtgataaatgtttgccagcattcagtactgtgttggtccagatgtaggtttatatgctcatttttagcttatttcttgtaccttgcagcatgctctacgcattcagtccttaaggggtttatcttacaaattgtgcgcctgtaaggtttattagcaataagatagaaaatcgagcaagtttataccataattttgtagaaaaaaaagaatctgctcagttccatatttcatccatgaaaaacttgcaatatgagcagtttcaaggaataaataaaatgtgaaatgtaaaccattgtaaaagtcttctgtcgaa

SEQ ID NO: 8853 - DNA, 741 bp, Macaca Fascicularis
  misc_feature (1)...(741): n = A,T,C or G
tttnnnttttttannncannnnnnnnnnnnnnnnnnnnnnnnnnnntgcagtggcgtgatctcatctcactgcaannnntgcctcttgggttcaagcgattcttgtgcctcagtctcccaagtagatgggattacacatgcccgccatcatgcccagctaatatttgcatttttaatagagatatggtttcaccatgctggccacgctggtctccaactcctgacctcaggtgatctgcccgccttggcctcccaaagtgctgggattacagacgtgaaccaccacgcctggctggaatacttactcttgttgggagaacgaaccactaaaatgtcagagcagaattcattatgtgataggtgtcttgtctgagaacaaatacaattcagtcttctctttggggctttagtatgtgtcaaacataggactggaagtttgcccttcttttttcttttgaaagaacatcagtttcttttgaaagaacaatcagagattgtgcatttgagaatagttttccctaatgtggatacagtcccagagttttcagcgagtacacaggtagattagtttgaagcattgaccttctatttattccttatttctctttatcaaaacagtgtctgtgggaggagaaatgagagagcttaaatgaaatgtaaaatatgctttattatacaaatactgtctctgtattgttctgaccctggtaaatatatttcaaaacttcagatgacaaggat

SEQ ID NO: 8854 - DNA, 765 bp, Macaca Fascicularis
  misc_feature (1)...(765): n = A,T,C or G
acaaaggaacacactgtgaattgtacaaggatccctgcgctaannncagctgtctgaacggagccacctgtgacagtgatggcctgaatggcacgtgcatctgtgcacccgggtttacaggtgaagagtgnnnnnnnnacataaatgaatgtgacagtaacccctgccaccatggtgggagctgcctggaccagtccaatggttacacnnnnnnnnnnnnnnnnggttgggtgggagcaaactgtgagatccacctccagtggaagtccgggcacatggcagagagcctcaccaacatgccgcggcactccctctacatcatcatcggagccctctgcgtggccttcatcctcatgctgatcatcctgattgtggggatttgccgcatcagccgcatcgagtaccagggttcttctaggccagcctacgaggagttctacaactgccgcagcatcgacagcgagttcagcaatgccattgcatccatccggcatgccaggtgggctgcgggggcggcgtggggaatgctgccttcacatgtgcgttcttaggaacagggtcatattatacacaggactttccatctgcaaagaggagattttaaagaatgaaacataggttccatgttgtatttggggatagaccattcggccacttgataagcaaactccttttaattcgctgctagcttttccttttgctttgtttacattgaatatatttgttcatctaatttgggttgctctgtgactataaatatctgat

SEQ ID NO: 8855 - DNA, 1991 bp, Macaca Fascicularis
acgtaacagagctgggagcctggctgccagaggtttgtcatcgcggggacggcctgggagcgctgcggcgccgcggcaggagaaacagccaaggacgccctggaagagcaggagcacgtgggcgagaatggcgccaacaccagccctgcaaaaccacatcccagagcggggcccaggacagccaccattaccccgcaggcctcaaggaagacggtcaagtcagccaaggccgcctccctagtcaggagcctcccaaagcgcaggcgcacctacccggggggcgcggctgggcggagtcaagagccggaagagccttgcgccgcagtccctccccggaaacccgcgggccggaagtgtcgggagttccagctcagaaccccgggttgctgggcaaccgatgcggccgctgcagctggtctctgtggtgctgggagcgagcacagtgtagctcccacctcctacgctggtaacctcccgtcccgcccgcttcccttgttgtcgcttctcctcgcgtcggggaatccttgcccttggcactacttacatctctccgggtcccacgacaccttagcgcctacctgcgtgaaagccaagctccacagaaagcgaggcagtctgcccccagcagccgttaccgggacagcctgacgcagccagatgaagaacctatgcgttatggaaacataatgtatgacagaagggtaattcgaggcaacacttacgcactccagacagggccactgctcggacagcctgattctctagagcttcagagacaacgggaggctaagaagagggctcttgccagaaaacaagcccaagagcagctcagaccacaaacacctgaacctgtggaaggcagaaagcatgtcgatgtgcaaacagaattataccttgaagaaattgctgatcgcataatagaagttgatatggaatgccaaacagatgcatttttggacagaccaccaacaccactctttattcctgccaaaactggcaaagatgtggccacccagatactagaaggagagctctttgactttgatcttgaagttaaaccagtgttagaagttttggtggggaagataattgagcagtctcttctggaagtaatggaagaagaagagctggctaacctgcgggccagtcagcgtgagtatgaagaactacggaatagtgaacgtgctgaagttcaacgacttgaagagcaagagaggcgacaccgagaagaaaaagaacggcgtaagaaacagcagtgggaaatagtgcacaagcacaatgagacatcacaaaaaatcgccgcccgagcatttgcacagcgttacctggctgaccttctcccgtctgtttttggcagcctcagggatagtggctacttttatgatcccattgaaagagatattgagataggatttcttccatggctaatgaatgaagttgaaaaaaccatggaatatagcatggtgggaagaacagtgcttgacatgttgatccgtgaagtggttgaaaagagactgtatatgtatgagcataaggaagaaacacatcggtctccagaaccagaggatgagcctggtggtcctggagcagtgacagagtcactggaggcctctgaattcccggagcagagcatgtcacagacgcaggggctggttttagatggagactatgtacaaagaacaacatatgacagaaggtcatcccaggaaaggaagtttatggaagagacagagctattagagcaggatgaagaatcagcaatggggaagtccttagaggaggaagaattgtcataggaggggagcttcgaagtcatgaaaccaatcaacagccaagtcagcaagcaatcaggtaatgatgcgcgagtcccctcaggttatagaaattatgttgtatttagtcaatatgtctttttgtctaatggactgggccaatcaaatgtgataaaataaagctaatttgaaaatgaaaaaaaaaaaaaaaaaaaaaaa

SEQ ID NO: 8856 - DNA, 724 bp, Macaca Fascicularis
  misc_feature (1)...(724): n = A,T,C or G
attgnnnnanngaagcacatatttaaacttgctcagggagaatatgttgcacccgagaagattgnnnnnnnntacatccggagnnnnnnngtggcacaaatatatgtccatggggacagcttaaaggcctttttggtaggcattgttgtgcctgaccctgaagttatgccctcctgggcccagannnnnnnnnnnnnnnnnnnnnnnnnnnnnnnnnnnnnnnnnaaggatctgaagaaagccattttggaagatatggtgaggttaggaaaagaaagtggactccattcttttnnnnnnnnnnnnnnnnnncacatccattctgacatgttctcagttcnnnnnnnnnnnnnnnnnnnnnnnnnnnnnnntaagagacatgagctgagagagtacttcaaaaaacaaatagaagagctttactcaatctccatgtgaagttcaaggnnnnnnnnnnnnnnnnnaatggactgtgtagcaatattatagnnnnnnnnnnnnnnnnnnnnnnnnnnnnnnnnnnnnnnnnnnnnnnnnnnnnnnnnnnnnatgactgagccttttcctgtcccaagaggtctttaacaatattttctctatcatcaatgagtacactttatttttattattaaaatgatattgtagcgggctgctaaaaatatcacaaatggcaatgtaaaaatcaagacattttctcaagaactgtgtaccactaaaagtaata

SEQ ID NO: 8857 - DNA, 783 bp, Macaca Fascicularis
  misc_feature (1)...(783): n = A,T,C or G
tagttacnnnnnnnnnnnnnnntgctaggatnnnnnnnnnnnnnnnnnnnnnnnnnnnaggccagtgagatagctcggccttagcacctatacnnngagctgggagaatggggtcaacgccatattcccgcaggcttcggtgtagttctttatcnnnnnnnnnnnnnnnnnnacccttttctccacgcagaggcagcaggatgctgggaagccatggaatgcagaatctgtgggtgtcggctcggcagccgacgctgcggaagggatgatggcgggagtgggggaagcgaggggtgggcagcgaggcnnnnnnnnnnnnnngagaacttgccctgggnnnnnnnnnnnnnnnnnnnnnnnnnnnnnntgtgtccattcctgcgtgtggcctgggtgcagcagaaaatgtacttaaatccagaaatagcgaaaccagaatttgcttgggggatttaagtagccagaaatataaaaagaaaaccggttgagggaagggtggcaatattattggtgttagacaacacttgaaaggctaaggttgaaatattggatatgaattgtataatactttaaaaacaaagtcttactttatttaatcttcccagataatggctttcctgannnnnnnnnnnntttctgtcttgtttaggccaaatcctgtagtttctgttcaagttgggttgagcatagaactgtctgtactgggccatttttctagccttttcatttttctccatacatgaaaagtttgaacaccatgctgtacctataaaaatggaccaa

SEQ ID NO: 8858 - DNA, 747 bp, Macaca Fascicularis
  misc_feature (1)...(747): n = A,T,C or G
agtttgatgcagtgtttnnnnnnnnnnnnnnnnnnnnnnnnnnnnnnnnnttttcagtcagactaaatgagaaaatctaaactgtcctatcaaaactggcccgcaataactgtaatgtgaggagaaacaaggcaaatgtgggtttcctattgtcgttgtaagacattccaggnnnnnnnnnnnnnnnnnnnnnnnnnnnnnnnnnnnnacatctgttccctcacacatagtggctctcaacacggctgcactttggaatcacctgaggacctttcagaatctctggttgaatcatcctggctgttcatgattccaatgtgcagctannnnnnnnnnnnnnnnnnnnnnnnnnnactgtaatgggagtttgaaacttttacaaaataatagatgtttatnnnnnnnnnnnnnnnnnnnnnnnnnnnnnnnnnnnnnnnnngccaaagaagttttatcaatgatttatggcacaattggttggtnnnnnnnnnnnnnnnnnnnnnnnnnnnnaggtggttatgtggggtggttttgcacttgtggcaattggactacaatttggccttaaaattacagaattcctggttctcagatggagaggaattgccttgaaatttgcatgtaccagactaagtgcccagtatatatgactgatattttcgtgactcatagaaggtgtccatggtatagagtttatgcctatatctctatnnnnnnnnnnnnnnnnnnnnnnnnnnnnnnnnntta

SEQ ID NO: 8859 - DNA, 741 bp, Macaca Fascicularis
  misc_feature (1)...(741): n = A,T,C or G
agaacctgacggccaatgggaacgcggcggggcagcggatcccgccnnnagagcgacttcnnncntagacccccgggcgccgggccacctgttgccgccaagttgggctnnnnnnnnnnnnnnnnnnnnnnnnnnnngcccaggccaccccaactgtcccggcctacctgggcagggccnnnnnnnnnnnnttccggggcagcattctcccggccccgccctgccactccccactcctccgggtgtctgccnnnnnnnnnnnnnnnnnnnnnnnnnnnnngggaagttggggagagctgcagacttgtgcgtggttggaggtctcgaccgccttcggagggnnnnnnnnnnnnnnnnnnnnnnnnngagaactagggactgcgaagtgggcctggagcgggagcgcgaggcccttttcctcttaggaccatttgttgtcttagaaccgcggaacaaggaaggacaggttggggccatgtgaataannnnnnnnnnnnnnnnnnnnnnnagagcgaatgcctgagagtaaaaagnnnnnnnnnnnnnnnnnnnnnnnnnnnnnnnnnnnnnnctggaaatatcaagtcagaacattagagccgataacctatgcaggagtcagcatttctgttttcaccttgtcatgaatttaagtcaatattgttggaacttttcttacatttttctacaagacattttccgatttcccaattgttagccagcaaccaatgatgcgagcag

SEQ ID NO: 8860 - DNA, 640 bp, Macaca Fascicularis
ccaaaaatgaggctgtcacctcccccttcccaccctgctacagacccaccaggaggtgagaatggtgtgtgagtggggccttgaagatgtgtaggagctcactaaggcgaggggatgtctgcagagagtggaggaacagggaagggcgtgaggagggaggaggagtgaacctggcagctgtggctcagttggatgctgaaggctcgtggatgctgggcctgtgggcgctgtcctctaggcagggagcccctggaagttcttgtgcggggcaatgaccaggtgtgcgtttggagaaggtccctccggaggccctcctggcagacaggggattggattcaggctgtggaagcaggacagtagcgggtgcgattccaggatgtgggaaggagatgaaaatgaagagccccagggaagaggtcaaggcagttgggggacccgagttcctggctccagggggaagcgggtggtcagtctgtgaacagagcccagctgtggattctgtcagtggggtcaggtcttaccctgcggcttccagggcagcaaggcaggaagggggtgtccgccgcaaagccagcttcccggggccagagccgtgaggacccaggggacctgcaggtcctggctccacgccagatgtgtt

SEQ ID NO: 8861 - DNA, 704 bp, Macaca Fascicularis
  misc_feature (1)...(704): n = A,T,C or G
aaaccntgtnnctactaaaaatacaaaaaattagctggatgtggtggtgggcacctnnnnnnnnnnnnnnnnnggaggctcagacagaaaaatcacttgaacccaggaggtggcagttacagtgagccaagatcgtgccatggcacttcagcctgggcaacagagcaaaactctttctcaaaaaaatatatgtaataatatgataaattggttacaaaagtgttatagaggctgaaggagcaaaagggagaatggagggtactgaggaacataaaagttaagggggtggtagccattgccggcgctggtagcagaggtgctcggctggggccaggtcttcagtagccgaggaggtgccacactcgnnnnnnnnnnaccaccacaggtgtgtactccnnnnnnnnnnnnnnnnagagnnnnnnnnnnnnnnnncttctcccactgtctcgtcccnnnnnnnnnnnnnnnnnnnnnnnnnnnnnnnnnnnnnnnnnnnnnnnnnnnnnnnnnnnnnnnnntgtagaagggaaggataggactgagagacgacaaagaaatatccagtagacatagaaccaagataacttgctgattgagtcagcgtgggggatggaaggaaagaaatcaaggatgactcccagctttttttttggcttgagcagctgaatggataatgaagatcaatccnnnnnnaggacagaaat

SEQ ID NO: 8862 - DNA, 664 bp, Macaca Fascicularis
  misc_feature (1)...(664): n = A,T,C or G
gggaaatcactcagnggtaggattnnnnggnnaaatagttcaaacatcaggtcccattattgcttcagtatcagagatgcaagttcattaagcaaagtacaagaccattcagtagctcttattaaaatatgttttcttcctataaagagtatacaaggtggggtatgccaaggtatcaaaacattatatgtgagtgtaatttaaactgtgggatatcaactatactatggatgtgtttgtatcttttagatgtcattttaaatatttacattttagcaagacttttaaaaaggattcatttcatttcaaagtgcaaattgtttgccaggcttttggcaaatagttctttcaactgtgaagttataatgtatatatctgtatatttataaatattatatatagtcatatatccttcactttaaaggtacattgtacaggctgtagttagtatgtatagtctatagtttatgttaaatggttgaaatgcttctttttatagaaaatcaaacacagatgttacaggattttgtgtttggtttgtcatttttttttatttttttgactattgcatgagtaattaatttcagatcttttgtattcacttctgtattttatgtttggttgagggggtgctttcagttctgtggcatttgtattcattgat

SEQ ID NO: 8863 - DNA, 3256 bp, Macaca Fascicularis
caaaaacagttattgtattaaaagcacttcctttgaagaaagtccattttacttaattctgacaagtatactgggatatttacccaaaatgctagcttgtcagactgttgaaattcagttgggaatctgatggcgttaaggaactgctcccttcactgcttgttcactagctccactcctcattctcttagctgtctaagacagcaaaccctaccagtttatgttgggctctgttcctggaagaagatgtggttgttgagtacttgaggatgatctgaagactcagatcccacaggacatgcttataggccattgcttcacttagcaatgatgtagcaagctccattaatgctcagaactgtgcaagagactctgaaacaacaggagactggcattcttgttaaagatataaaacatatatgcaaaaaatgagcttgggaacaattggacagcaaaggaacaataacctcattaatgcagtataagctgctgaaatgaaggcataggctaaacaattcaacagaactcattcagccaggtcatgtgtttttccagagcattccaggtgatccttggagtgacaggactcccagacaggttatctccatatccagcacatgttttgtaaccacaaaatccttatgggagtatcacttagcacccagccaggaaggaatctctcatcccctcagtgaactcagtgattctaatgagctactcattcagtctgggcccacagtccagtgattaagtgtggaaagggaataaaacacaaggccctttgctgctctctaggaaattcagagatggatgtaactcctgcagaagaaacctttgattcacaactgtctcaatagaggattattggtttttctttttagaggaagaatgtgtgtgtgtctgtgtgtgtgtgtgtgtgagagagagagggagaaggaaagaggcagggggagatggaaagagagaagatgagagatgagagattatgtttacctgaaattttattattttggaaattttatttgctgtcacttgaatcctgacttctgttttgatttggagacatctaagaacagttgctgcagcaaaatgttttctgcacagtaataattaaggcctaaattgggatgggaaatgccttaaaatagtttataacttgtatagcttcacaatgctgatgaaagttatcaacgagctaagtgctcttacatagtttagtgaaaatactgagtacaatttttgttgaaaagcaaatgcagcaaatagcagaattggacttctttacaaactcagtatcacaaaatttggaaatggatgtaaatgtgaaaatatgtctactttacttgagcattcattatatctaattagcttctaattttatacttataaaaatatagatgtaaagccactgtaaccagactgcctctctagattcttcctctctgggcagagcatctctgaaagaaaggaagcagccccagtcaggggcttatagataaaactcacatctccctgggacagagcatctaggggaagggacagctgtggatgcagcttcagcagacttaaatgttcctgcctcctggctctaaagagagcagcagatttcccagcacagtgctcaagctctgctaacccccgtgcctcctgactaggagtcacctcccaggaggagtcaacagacacctcatacaagagagctctgactggcgactggtgagtgccgctctgggacgaatcttccagaggaaggaacaggcagcaatctttgctgttctgcagcctctgctggtgatacccaggcaaacagggtctgaagtggacctccagcaaactccagcagacctgcagcagaggtgcctgactgttaaaaggaaaactaatccaaaggtcaccaacatcaaagaccaaaggtaggtaaattcacaaagatgaggaaaaaccagtgtaaaaaggctgaaagttccaaaacccagaatggctcttctcctccaaaagatcacaactcctctccagcaagggaacaaaactggatggagaatgagtttgacaaattgatagaaataggcttcagaaggtgggtaataacaaactcctccgagctaaaggagcatgttctaactcaatgcaaggaagctaagaaacttgaaaaaaggttaagcaaatttctaactggaataaccagtttagagaagaacataaatgacctgatgaaactgaaaaacacagcacaagaactttgtgaagcatacacaagtatgaatacccaaatcaatcaagcggaagaaaggatataagagattgaaaatcagattaatgaaataaagcatgaagacaagattagagaaaaagaatgaaaaggaatgaacaaagcctctaagaaatatggggctatgtggaaagagcaaacctacgtttgattggtgtacctgaaagtgacggggagaatgtaaccaaattgaaaaacacccttcaggatattatccaggagaacttccccaacctagcaagacaggccaacattcaaattcaggaaatgaagagaagaccacaagatactcctcgaaaagagtaaccccaagacacataatcatcagattcaccaagtttgaaatgaaggaaaaaattttaagggcaaccagagagaaaggtcgggctacccacaaagggaagcccatcagactaacagtgggtctctcagcagaaaccctacaagccagaagagagtgggggctgatattcaacattcttaaagaaaataattttcaacccagaatttcacatccagccaaactaatcttcataagtgaaggagaaataaaatcctttacagacaagcaaatactgagagattttgtcaccactaggcctgccttacaagggatcctgaaggaagcactaaatatggaaaggaaaaccggtaccagccactgcaaaaacatatcaaattgtaaagaccattgacactttgaagaaactgcatcaactaatgggcaaaataaccagctagcatgataatgacaggatcaaattcacacataacaatattagccttaaatgtaaatgggctaaatgccccaattaaaaacacagactggcaaatcggataaagagtcaagaccaatctgtgtgctgttttaggagacccgtgttacatgcaaagacacacataggctcaaaataaagggatagaggaatatttaccaagcaaatggaaggcaaaaaaaaaaaaaaaaaaaaaaaaaaaaaggccaca

SEQ ID NO: 8864 - DNA, 706 bp, Macaca Fascicularis
  misc_feature (1)...(706): n = A,T,C or G
nnnnnnnnnnnnnnnnnnnnnnnnnnnnnnnnnnnnnnnnnnnnnnnnnnnnnnnnnnnnnnnnnnnnnnnnnnnnnnnnnnnnnnnnnnnnnnnnnnnnnnnnnnnnnnnnnnnnnnnnnnnnnnnnnnnnnnnnnnnnnnnnnnnnnnnnnnnnnnnnnnnnnnnnnnnnnnnnnnnnnnnnnnnnnnnnnnnnnnnnnnnnnnnnnnnnnnnnnnnnnnnnnnnnnnnnnnnnnnnnnnnnnnnnnnnnnggccagaaatacacatcttaagaaaataggaagaaacatcttcatttgactttaaacatttatttatttatttaagagacagactcttgctaggttgcccatgctgggctcgaactcctgggttcaagtgatcctcctccccacaagtagctggagctacaggcatgtgccactacgcctgcctctcatttggcttttgctaatgtatttgaccaaggcctttgggatcttggtttaatttaggttgcatgtcgccttttggtggatggttagttccaacctgtctgttttacaaggatcagggaccagctaaagaggcatactctggatgattgatatccagggacttgagcgtgtttgttcaatagctaagggccaggcactgtgctagttcctgggattatagtggtgaaaagaaagccaccttccctgacacatagagcttacaattca

SEQ ID NO: 8865 - DNA, 757 bp, Macaca Fascicularis
  misc_feature (1)...(757): n = A,T,C or G
caacgtgtgcactgggcagtcatgaactgggcacccccgggctgtgaaaagttagggaagtgtctgnnnnnnnnnnnnnnnattcccaagaagtgcctctggtcccactagcacccgcgtggacccaggccaggcctggaatctccggttggctctggcctcagtgctcccccggaccctgcccaggccagacagacggcacctgcagacacagggggactgcatgactccacctacccaggacctgaccctggagtgctcggccctcctcctcgcccacggggcctcagatctcaggaccctcctcctcggccacggcgcctcagacctcaggacactgccgtctcatgcctttgggaaccccaaatatctgagacaggtctcggtcaatttagaaagtttattttgccaaggttaaggatgcgcccgtgacagcctcaggaggtcctgaaaacatgtgcccgaggtggttgggggtacagtttgcctttacatcttagggagacataagatagtatgtgtaagacatacattggttcggccagccttccactgaatacgnnnnnnnnnnnnnnncagtgaatccgcatttttatgttaacaataagggaggggaacaatcagataagcatttgtctcaggagccccagaggggtgacttccagttccgtctgtcctttgtccacaaggaatttccttgggcgctaattatgagaaaggtatgtagtctttctcattgtagctacgttacttagaa

SEQ ID NO: 8866 - DNA, 753 bp, Macaca Fascicularis
  misc_feature (1)...(753): n = A,T,C or G
gaacttgaccttgactnnnntccaaggagatggcacagcatccacaacnnngagaaatggatcatctcttcaggtcctggaaggacagtctctnnnnnnnnnntgtgctgttgatnnnnnnnctcctgctgggctgagctgggcccaggnnnnnnngatcttgagcccctcacagcccaactccggnnnnnnnnnnctgcctcaaatgcacctcaggaatgaaggagaattcacctgccaagctcagaaccccctgggttcccagcaggtctccctgaggctgtttgtgcagaggaaatcagggcccatggcagaggtggttttggtggccatcggggaggccgctgtaaagatcctgcttctcgtcctctgtctcatcgtcctcagagtgaagtccnnnnnnnnnnnnnnnnnnnnngcagctacaggtgtggaggctgcataggttgtcaaaggttaatctctcaggcctcnnnnnnnnnnnnnnnnnnncctccttgttcagtgcctctaccatctgaagggcggtgcttcctctccnnnnnnnnnnnatgaggtagaaacaccacagcctggactgaaggccttgcatggtctgtcccctgctggactttgctcccaggtggtgtgcaaatggccaagcagcccgtgagaagatgctcagtattgttactcatgtcacgaatgcaaaaccaaactgtaaaggagatgctacttcacacgcattaggaagnnnnnaaatnnnaaataaaa

SEQ ID NO: 8867 - DNA, 501 bp, Macaca Fascicularis
  misc_feature (1)...(501): n = A,T,C or G
ggcacccaggtctcctagttggatctgtcttcagcttctccgtgctaccccgacnnnnnnnnnnnnnnnnnnntgtggcgcgccatctgccacaatgccagccacggccgagacgcaggaggtcgccgaccaggnnnnnnnnnnnnntgaatcgaaagaaaatcagaagtttgatgtctttaaagccatatccttcaagagacagatagtggctggcaccaacctcttcatcaaggttgatgttggtggagataaatgcgtgcacttgagggtgtttcaacccctcccccatgaaaacaagcctttgaccctgtcttcctatcagaccaacaaagaaaggcacgatgagctctcctacttctgattcggggctcctttgcacctgtgtttgggaccacgtagtaaaacccccctcggtgatggagagaagggagttgagcagcttctgttgtgattctcaaactgcgttgtattttgcatccttccaaataattattttca

SEQ ID NO: 8868 - DNA, 2686 bp, Macaca Fascicularis
tactggaaacaaaacagcggctggtctggaaggaacctgaactgcgagcggcggcagcaacggcggcggcggctaagcacctaatctgggagcctgcaagtgacaacagcctttgaggtccttagacagcttggcctggaggagaacacatgaaagaaagaacctcaagaggctttgttttctgtgaaacagtatttctatacagttgctccaatgacagagttacctgcaccgttgtcctacttccagaatgcacagatgtccgaggacaaccacttgagcaatactgtacgtagccagaatgacaatagagaacggcaggagcacaacgacaggcggagccttggccaccctgagccattatctaatggacgaccccagggtaactctcggcaggtggtggagcaagatgaagaagaagatgaggagctgacattgaaatatggcgccaaacatgtgatcatgctctttgtccccgtgactctctgcatggtggtggtcgtggctaccatcaagtcagtcagcttttatacccggaaggatgggcagctaatctataccccattcacagaagataccgagactgtgggccagagagccctgcactcaattctgaatgcggccatcatgatcagtgtcattgttgtcatgactatcctcctggtggttctgtataaatacaggtgctataaggtcatccatgcctggcttattatatcatctctattgttgctgttctttttttcattcaaaaacttgggggaagtgtttaaaacctataacgttgctgtggactacattactgttgcactcctgatctggaattttggtgtggtgggaatgatttccattcactggaaaggtccacttcgactccagcaggcatatctcattatgattagtgccctcatggccctggtgtttatcaagtacctccctgaatggactgcgtggctcatcttggctgtgatttcagtatatgatttagtggctgttttgtgtccgaaaggtccacttcgtatgctggttgagacagctcaggagagaaatgaaacactttttccagctctcatttactcctcaacaatggtttggttggtgaatatggcagaaggagacccggaagctcaaaggagagtatccaaaaattccaagtataatgcagaaagcacagaaagggagtcacaagacacggttgcagagaatgatgatggcggcttcagtgaggaatgggaagcccagagggacagtcatctagggcctcatcgctctacacctgagtcacgagctgctgtccaggaactttccagcagcatccttgctggtgaagatccagaagaaaggggagtaaaacttggattgggagatttcattttctacagtgttctggttggtaaagcctcagcaacagccagtggagactggaacacaaccatagcctgttttgtagccatattaattggtttgtgccttacattattactcctcgccattttcaagaaagcattgccagctcttccaatctccatcacctttgggcttgttttctactctgccacagattatcttgtacagccttttatggaccaattagcattccatcaattttatatctagcatatttgccgttagaatcccatggatgtttctcctttgactataacaaaatctggggaggacaaaggtgattttcctgtgtccacatctaacaaagtcaagattcctggctggacttctacagcttccttccaagtcttcctgaccacctgcactattggactttggaaggaggtgcctatagaaaacgattttgaacatacttcatcgcagtggactatgtccctcggtgcagaaactaccagatttgagggacgaggtcaaggagacatgatgggcccggaagttgctgtgccccatcagcagcttgatgcttggtcacaggatgatttcgccgacactgcggactctcaggactaccgttaccaagaggttaggtgaagtggtttaaaccaaacggaactcttcatcttaaactacacgttgaaaatcatcccaataattctgtattataactgaattctgaacttttcaggaggtactgtgaggaagagcaggcaccagcagcagaatggagaggtgggcaggggctccagcttccctttgattttttgctgcagactcatcctttttaaatgagacttgttttcccccgtctttgagtcaggtcaaatgtgtagattgactttggcaattcttctcaagcactgacactcattaccatctgtgattgtcatttcttcccaaggccagtctgaacgtgaggttgctttatcctaaaacttttaacctcaggttccaaattcagtaaattttggaaataatacaactatttctcatcaattctctatcatcttgaagtcaaatttggattttccaccaaattctgaatttgtagacatacttgtaggctcacttgccccagatgcctcctctgtcctcattcttctctcacccccacacaagccgtccttttctacagtcagtaaggcagctctgtcgtggtagcagatggtcccattattctagggttttactctttgtatgatgaaaagaatgtgttatgaattggtgctgtcagccctgctgtcagaccttcttccacagcaaatgagatgtatgcccaaag

SEQ ID NO: 8869 - DNA, 758 bp, Macaca Fascicularis
  misc_feature (1)...(758): n = A,T,C or G
gtacatttgtagggnnnngaannnctcccgtatttgctgactcactagtggaggagacgtctggctcccagctcccctggtccatggggcctccattgtgtgaagtcagcataggctgcccacctaatggtggagagcacgaaactgggagcatcctgtggggggcttttgggggaaaaaggtggttgttttagcccaccattgttttggggtggtgttgcacactagtagagaatagagtctatgcctttggcaaatttaactgggagtttggattcccacttaagggttttatttcttgggtcctgtggatagtggttctttgtgtcaggatcccagcctgattctgcaaacgcctccatggggtttaaaaacatgaggctttccaagttcttgcccagtatctggggcagcctccagagtatcacctgggagttcagattctctccagggctccaggtgtgtgtttatctcgccccctccagctctcctcatcctgctccccattgctccatgtcaggctgttccccnnnnnnnnnnnnnnnnnntttgggtccagggcctcctcccaagtgtggctttaaggagtaagcttgaggatgatgttttttaattattgtaaatcattacctcatttccagcctcccaggctccatccatcacagcatcttttattctgccattttcctcaccttgtgctatgacaatggggcattgtgtttccacagagacttataggagtgttcagtgtatagttc

SEQ ID NO: 8870 - DNA, 725 bp, Macaca Fascicularis
  misc_feature (1)...(725): n = A,T,C or G
tcaagtacctgcccgaggtgtttgcccccaacgnnncagatgtgctcagctgcctggagctcaggtacaaggtggactggccgctcaatgttgtcatcactgagggctgcctgagcaagtnnnnnnnnnnnnnnnnnnnnnnnnnnnnnnnnaagctnnnnnnnngggcgctcaaggatatctgcttccacctcaagcgcacagccctgcnnnnnnnnnnnnnnnnctccgtnnnnnnnnnnnnnnnnnnnnnnnnnnnnnnnnnnnnnnnnnnnnncgtgaaggtcatccagggctacatcgccaaccagatcctgcacgtcacctggtgcgagttcagggccaggctgnnnnnnnnnnnnnnnnnnnnnnnnnnnnnnnnnnnnnnnnnnnnnnnnnnnnnnnnnnnnnnnnnnnnnnnnnnnnnnacggagaaggcggcgcctgtcatgaacgtcatccacagcatcnnnnnnnnnnnnnnnnnnnnnnnnnnnnnnnncatctcccaagcctggggccccgctgggggcccgcggggtgcagagcaccccaactttgcactcatgcagcagtcctacaacaccttcaagtactactcccactttctcttcaaagtggtgnnnnnnnnnnnnnnnnnngcggctaccagccccacctggaggactttctgnnnnnnnnnnnnnnnnnnnnnnnnnnnnnnnnnnnnnnnnnntgctctgcgg

SEQ ID NO: 8871 - DNA, 756 bp, Macaca Fascicularis
  misc_feature (1)...(756): n = A,T,C or G
agaaaatacaagcaggnnaaggctttagggnnnnnnataatctccaaccacatttaaagtttaattatattaagagtggggcatggcggaatgtgcctacagttccagtgacttgggaggccgaggtgggaggattgcttgagcctcggaggttgaggcggcagtgnnnnnnnnnnnnnnnactgcactccagcctggggtaacagagtgagacccccatctctaaataaaaatcaatcttcagttatgtctcattatacagtttccttaaccagatttctacagtggcgccatgatgtaggcaatcccagattaagaggtcccttttacaaataaggaaatagactctaagatggctgcccataagtggcagtgctgggacttaactcgggtctcatcattaatccagggcttttggaattccagggatatggcactgtgccataattttgttaatttactgattgttttagaaatacatctgttataaccagaaatctggggacagcttagtcaattggttttccttacaagcaaaataaagtaaaatgtagcagtctgctcgttggtgctctggtgggatggtttacctgtgaaccttggagaaccgtgtcctgctttcacaaattaccagcaaaaatggctactcagaatttaaatacgtgtaggacattaatgaaaacacctacattccaactcagtcattgccattctagaatcttattgctatttcaaatgtccattacagcaataaat

SEQ ID NO: 8872 - DNA, 596 bp, Macaca Fascicularis
ggtagaggtgatgatgagcggggggataaggggctgctcaacgtcaggctggccctggacatcgagatcgccacctacacgaagctgctggagaggcgaggataaccggatcaccattcctagtgcagaccttctccaacctgcagatccgacaaaccagcctggacaccatgtctgtgtcagaaggccacctcagagaggaacatcgtggtgaagaccgtggagatgcgggatggagaggtcattaaggagtccaagcaggagcacaaggatgtgatgtgaggcaggacccgcctggtggcctctgccccatctcatgaggagcccgagcagaagcatgatagttgctccgcctctgctggtgcatttccccacacctgagctccccgccgccccagctgctcccctccctcctctatccctaggccagcttgctgccctaggctccatcagtattaggcctgccagacggcacccacccagcacccagaaactccaactaacaagaaactcacccccaaggggcagtctggaggggcatagccagcagcttgggttagaatgaggaggaaggagagaaggggaggagggtgggg

SEQ ID NO: 8873 - DNA, 704 bp, Macaca Fascicularis
  misc_feature (1)...(704): n = A,T,C or G
agaaaacccttgagtgccaagcgcaggttagggaccattnnncagctccacaccttncnctgagctgaaggagaaatgggaaggaaatagcagaggtaggtgaaggtcctgtctttttattttataggaaagggagatgtctgttatcccctttcttcaccgccacttggacacacgtgtcactttcctgcccttctccatacactgcctctcttccctctcttcttcttgaagtctccacccaggagagatctgcgaggtgtgggaattccatgtttgcacaactcccatctccctggaaagaggaactgatgtttcaggggacagatgtgggtcactttccctggcagtgccctctggccttgctgcctcggcttcttgacccctttcaggtttcaggggcctgggagatctcatgcctcagcccgggaaacatttaataggagagcagagacgtgccatgtcagccccgcagacaggaatttctagagcacttgtcctgttgttccttgcccccaccttactcagtctgggctatggaatccatccaataaacacagcaacaccctatgctactgaccaagcaaagcctgcccctggtgccagagagctaaatcatgaccaaagtgtgacacgaatgtaaccgaaacgtgggttagttgctgaatgtatgcaaagtcccatggacaagagtgaggtctgat

SEQ ID NO: 8874 - DNA, 177 bp, Macaca Fascicularis
gtgagtatcaataacaatggggccgcgatgttttccagccatcacgagccacgaggttctatctccaaggagtgcaatctggtttacctgatcccacatgttgtgggctcctctgaggacctgaaaaaggaggaggcagctggaatcgccagacccttggagaagctgtccccagcc

SEQ ID NO: 8875 - DNA, 273 bp, Macaca Fascicularis
gccacacagcacttctgtcactctgggcgtcagggccctgtccactttgtatagccgctggcttatagaaggtgctcgataaatctcttgaattcaaaaatcaattaggatgcctctgtagtgaaaaagatacagtaaagatgagggataatcaattttttaaatgagcagtaagtacacacaaagcactttattcattcttatgacacctgttgcttttttgctgtgtttgggtacacacatgccatgtcatattttgtggggccctcaaag

SEQ ID NO: 8876 - DNA, 734 bp, Macaca Fascicularis
  misc_feature (1)...(734): n = A,T,C or G
atgtcaggctnnncccgtgctggagtcagtgtgagcatgaggagcagtgcgctccatggtgcacacacatcgtgttgaaaaggaagagtggaaggacaaacaccagatgctaaaaatcgtcgggagttccaccggagggtacgtattgcggagccactctcacactgatgagtcacccagatgatgaggaatgtgccactgcctcgctggccttcccgtagacaggcagccggagctgagcttcctctcatgaatgaggacctaggctgtgatgnnnnnnnnnnnnnnnnnnnatagagcctgatggtcacattccgcggtccctgggagcaactgcattctctgaggatagggtgaagttgtgcnnnnnnnnnnnnnnnnnnnnnnnnnnnnnnnnnnnnnnnnnnnnnnnnnnnnnnnnnnnnnnnnnnnnnnnnggtcatgtagaggctcagcctctatcatgcagcctcctcctggtttccgtgttctgtgctcaggaaacacagcatcatgaaaaggtaaccaaagggcttgccctaggctgtgagtggcagggggagcacttgccttcctaggaggatggagggtgactcatgcattacgaggtggggagagacaaatgtggctgtgggacagcagaggctccaggacgtccccnnngaacccaccatggacaaagctttttgtttgcttctgaaggcctttgcaaaaaacaagtcaaggtggttggc

SEQ ID NO: 8877 - DNA, 587 bp, Macaca Fascicularis
gagttaggtctagaagactcttccctgaaggcaacaggaacacgcgtgagggacgcgaccacacgctaacacaggacatgtgcttcagagctgtttaaaactgctgcttgtttcacacacacatcttgccttttttcaggctagctgcaataatttttttcttctgtaaaatattttgtaaacaacaacaaaaaagctattataaaaagggggaaaaaaaaaagaacgctggcattatgatcaggaaaacccattgtcatcgccgaccctccctcccgtcccaccacacgctgctgtcacgacgtaggtgcgaaagacctttttgtacagagatatattttttatgaagaatttgtaaaattattaaatatgctgtaattttttgattaatgtaggtacattgttaaaaaataaatgtttttacaatacagaactgtaattttcccaataatgtaaaatgtaccatctatagatgattttcagttccaatcctattacacatgtattaatattaaagtggcctgttaaaatgaactagtatctttttttgtcgaaaaaaattttaagagggtgtaatatagcctggc

SEQ ID NO: 8878 - DNA, 718 bp, Macaca Fascicularis
  misc_feature (1)...(718): n = A,T,C or G
gggagatgganaaaagaggacgtggaaagcaggctggagtgaggaggaatggtcatgcttccttggaatactnnnnnnnnnnnnnnnnnnnnnnnnnnnnnnnnnnnnnnnnnnnnnnnnnnnnnnnnnnnnnnntttgctgactgagctttaaggagggtgatttatggaccctttgacctacctgcgnnnnnnnnnnnnnnnnnnnnnnnnnnnntcttagccgttttatggtctcctgggccagttgggggctgtggggccctgctgggcttggttgtctttcacttctgaggcctgctgtgtggctccatagctcagtcctccatcactctgcgtggatcttgggtactttcgacagtgagggttagatccaattttaggagtagggttgggggtgtgagtggtagcgtggggtggcnnnnnnnnnnnnnnnnnnnnnnnnnnnnnnnnnnnnnnnnnnnnnnnnnnnnnnnnnnnnggaacagaagaaaagtaagagaactgtttcatatgctaatttttttagtgtattttagaccttgagtaaactaatttagcttctaggatccaagtttccttatttgtgaaacaggaaaaaaaaaattcttgtaggtattactatttgtgtgtttgtgtctacctgcatgtgtttgtgtttgtgtgtgtgtgtgtgtgtgtgtcttttaaaaatactatatataaagaagattctggt

SEQ ID NO: 8879 - DNA, 756 bp, Macaca Fascicularis
  misc_feature (1)...(756): n = A,T,C or G
acatccaattgtttagtgtctatttatnntnnnnnnnnnnnnnnnnnnnnnnaaaaagggacaataaagcaaaaagtatcagtaaggttaggtggctgagacccactgccctgagctactagtgtggctgtgcccatgggtctctgnnnnnnnnnnnnnnngacctgaagccacagcaggnnnnnnnnnnnnnnnnnnnnnnnnnnnnnnnnnnnnnnnnnnnnnaggtaggggctggggttgacgaaccccagctctggcttaaagatcttgctgtggctctgttatgttctgaggccttgggatcagcctcttcctcattatggagctgattttctagtctgtggatcagctatgcctttggacacttctctttttcattgtgccttttgaatgttggcttctcactcagcatcaaccatttccatgtaaatgcagactagggagttgggagaaggaaccaaagtgcagcaccctgcatttattcagtcatttgttcatctgtcaaacacgtatttggacatcaaggttgcagagatcaacaatgcatggattccannnnnnnnnnnnnnnaagcctagtggagagaacacataatacagttgtacttgtaacaagtaagtgctgcagtaaaggtactannnnnnnnnnnnntggaacagaggaagagaaaccacaaaaccatggaaattagggaagcctttatagagggtgtgacaaaactcaatttgacattttcaagctatgtacaatgct

SEQ ID NO: 8880 - DNA, 678 bp, Macaca Fascicularis
  misc_feature (1)...(678): n = A,T,C or G
gtccaggggatgcagctgggcactctgaggctccagtctccatctggtgggctgggaagccacccagcttcagtgcacaggagacagtggccctcgtctgtccctgtggtccatggctatctcctgcatgcagggcatgtacaggtggaccgttccttcatgtattcgtttggtcatttcttatctgctggacccatgccccaaggcacctgttgcgtggggttcttgcttgcatcatgaacacagggtgacggtcaaggtggagggtggcaccctcctttctcccagcagcaggctccttattccctgtctgccctgggctctggccacaggagcagcaggaactgatgagaagcaggagcctggatgattttgtgggagatttttaggcagctgattttgtgtctttttcctccagctattcatcaagatcatgaggctgggcacgnnnnnnnnnnnnnnnnnnnnnnnnnnnnnnnnnnnnnnnnnnnnnnnnnnnnnnnnnnnnnnnnnnnnnnnnnnnnnnnnnnnnnnnnnnnnnnnnnnnnnnnnnnnnnnnnnnnnnnnnnnnnnnnnnnnnnnnnnnnnnnnnnnnnnnnnnnnnnnnnnnnnnnnnnnnnnnnnnnnnnnnnnnnnnnnnngccacaaagtttgaggctgcagtgagctgtgatggca

SEQ ID NO: 8881 - DNA, 711 bp, Macaca Fascicularis
  misc_feature (1)...(711): n = A,T,C or G
cggggaatgatgaggcgcttcatatgttgccttacaaggtcaccagagagaagccagagatctgtgtacaatgatttgttttttgagacagtctcannnnnnnnnnnnnnntggagtgcaggggcacgaccatggctcactgcagcctcaacctcctgggctcaagccatccttccgccttagcctcccaagtagctgaaactacaggcagtgtgaccacaccctgctggttttcgtatttatagtagagacagggtcttgccatgatgctcaggctggcnnnnnnnnnnnnnnnnnnnnnnnnnnnnnnnnnnnnnnnnnnnnnnnnnnnnnnnnnnnnnnnnnnnnnnnnnnnnnnngcctacaacgattttcttcacaatgttttctttaaatcgaggtgaacgttttgcagtaccttgtgtatggggtgttttcgatgcatattannnnnnnnnnnnnnnnnnnnnnnnnnnnnnnnnnnnnnnacaaaagcgagactccatctcataaatagatagtacaagagtatttaaaacgcacacagaaaaaatacagaagtgaagtgcatcaaaacgtaacctttatttttgtgtagaacatctccattaagtgattttatttcctttgtgtttttctttccttgctgaattttctgcattaataagtattacttctgtaatgagaagaaaaactaaatattgagaataa

SEQ ID NO: 8882 - DNA, 25 bp, Macaca Fascicularis
tgcccttcggcctgatctttattgt

SEQ ID NO: 8883 - DNA, 25 bp, Macaca Fascicularis
tgatctttattgtcttcgccgtcca

SEQ ID NO: 8884 - DNA, 25 bp, Macaca Fascicularis
taccgctcactggtcagccataaga

SEQ ID NO: 8885 - DNA, 25 bp, Macaca Fascicularis
tcactggtcagccataagacggact

SEQ ID NO: 8886 - DNA, 25 bp, Macaca Fascicularis
ttgctcgcttacaggaccagctgga

SEQ ID NO: 8887 - DNA, 25 bp, Macaca Fascicularis
agccactatgcctaggcccatgtgg

SEQ ID NO: 8888 - DNA, 25 bp, Macaca Fascicularis
gtggtctgggcccttccaattcttt

SEQ ID NO: 8889 - DNA, 25 bp, Macaca Fascicularis
gcccttccaattctttggccttacg

SEQ ID NO: 8890 - DNA, 25 bp, Macaca Fascicularis
agcctcacggacagcctgtgcaagg

SEQ ID NO: 8891 - DNA, 25 bp, Macaca Fascicularis
gaggctttttgtaagagaaatttct

SEQ ID NO: 8892 - DNA, 25 bp, Macaca Fascicularis
tctgcactttgaaactgtcctctaa

SEQ ID NO: 8893 - DNA, 25 bp, Macaca Fascicularis
ctttgaaactgtcctctaagagaat

SEQ ID NO: 8894 - DNA, 25 bp, Macaca Fascicularis
agaataagcatttcctgttcttcca

SEQ ID NO: 8895 - DNA, 25 bp, Macaca Fascicularis
gggaagttctttaagtgcaactcaa

SEQ ID NO: 8896 - DNA, 25 bp, Macaca Fascicularis
gtgcaactcaaacctctttaggcat

SEQ ID NO: 8897 - DNA, 25 bp, Macaca Fascicularis
aagttctttatggagaggtctacac

SEQ ID NO: 8898 - DNA, 25 bp, Macaca Fascicularis
attctttagcttgaaatctgtcctc

SEQ ID NO: 8899 - DNA, 25 bp, Macaca Fascicularis
aagtcccacctcatttgtcatcaga

SEQ ID NO: 8900 - DNA, 25 bp, Macaca Fascicularis
tgtcatcagacagttcacgctgcag

SEQ ID NO: 8901 - DNA, 25 bp, Macaca Fascicularis
gttcacgctgcagcaaagcagtgca

SEQ ID NO: 8902 - DNA, 25 bp, Macaca Fascicularis
ttaggtataactccacacttctcag

SEQ ID NO: 8903 - DNA, 25 bp, Macaca Fascicularis
gtccacactggataaggccgttatg

SEQ ID NO: 8904 - DNA, 25 bp, Macaca Fascicularis
aggccgttatgaatgcagtggatgt

SEQ ID NO: 8905 - DNA, 25 bp, Macaca Fascicularis
atgtaggtacagttctccaatcgct

SEQ ID NO: 8906 - DNA, 25 bp, Macaca Fascicularis
cagttctccaatcgctatgtatcag

SEQ ID NO: 8907 - DNA, 25 bp, Macaca Fascicularis
gtgtgttcagcaaacttgggacatt

SEQ ID NO: 8908 - DNA, 25 bp, Macaca Fascicularis
tccggtacaagtcatccacagatca

SEQ ID NO: 8909 - DNA, 25 bp, Macaca Fascicularis
agatcaggagcaccagttctatccc

SEQ ID NO: 8910 - DNA, 25 bp, Macaca Fascicularis
gttctatccctgctaagtttcagag

SEQ ID NO: 8911 - DNA, 25 bp, Macaca Fascicularis
agactatgtcactgagctcactggg

SEQ ID NO: 8912 - DNA, 25 bp, Macaca Fascicularis
gtgaccctgtgtacaaggtagccac

SEQ ID NO: 8913 - DNA, 25 bp, Macaca Fascicularis
gcagatctacacatgctgtcgagat

SEQ ID NO: 8914 - DNA, 25 bp, Macaca Fascicularis
gagatggtcttgtacgacgctacca

SEQ ID NO: 8915 - DNA, 25 bp, Macaca Fascicularis
aggaccatggcccttagtgtcttgg

SEQ ID NO: 8916 - DNA, 25 bp, Macaca Fascicularis
tgggcaccccttggaaatcacagaa

SEQ ID NO: 8917 - DNA, 25 bp, Macaca Fascicularis
gctgtactggctatatggaactctc

SEQ ID NO: 8918 - DNA, 25 bp, Macaca Fascicularis
ctctcatgccaagacctactttgaa

SEQ ID NO: 8919 - DNA, 25 bp, Macaca Fascicularis
aataggaaggtcactgggcccactg

SEQ ID NO: 8920 - DNA, 25 bp, Macaca Fascicularis
ttctccttgtataaacgtaccccag

SEQ ID NO: 8921 - DNA, 25 bp, Macaca Fascicularis
gccaaggcctaaagccaattgacct

SEQ ID NO: 8922 - DNA, 25 bp, Macaca Fascicularis
aaaggtaatcatttcagctaacatt

SEQ ID NO: 8923 - DNA, 25 bp, Macaca Fascicularis
ggaacctgcattgtcattctctgaa

SEQ ID NO: 8924 - DNA, 25 bp, Macaca Fascicularis
ttctatcattatttagccccacctt

SEQ ID NO: 8925 - DNA, 25 bp, Macaca Fascicularis
aatgtccttcagaatacttttatga

SEQ ID NO: 8926 - DNA, 25 bp, Macaca Fascicularis
gagactggacttagccacacacaat

SEQ ID NO: 8927 - DNA, 25 bp, Macaca Fascicularis
cacaatggaaattcagaccttgact

SEQ ID NO: 8928 - DNA, 25 bp, Macaca Fascicularis
gaagactgtcttgggagcaacttaa

SEQ ID NO: 8929 - DNA, 25 bp, Macaca Fascicularis
agttgtacatttcttgcagctcctg

SEQ ID NO: 8930 - DNA, 25 bp, Macaca Fascicularis
gcagctcctggcgtggaaacttaag

SEQ ID NO: 8931 - DNA, 25 bp, Macaca Fascicularis
tggtcctgtccaattctactgaatg

SEQ ID NO: 8932 - DNA, 25 bp, Macaca Fascicularis
aaccaaagttgtttagcctccatct

SEQ ID NO: 8933 - DNA, 25 bp, Macaca Fascicularis
tagcctccatcttaaattacgttag

SEQ ID NO: 8934 - DNA, 25 bp, Macaca Fascicularis
aaccaaagccatcaaatcgaaaaat

SEQ ID NO: 8935 - DNA, 25 bp, Macaca Fascicularis
agagggtagggctctacttcactgg

SEQ ID NO: 8936 - DNA, 25 bp, Macaca Fascicularis
acttcactgggcctgtgatcgagga

SEQ ID NO: 8937 - DNA, 25 bp, Macaca Fascicularis
gtgatcgaggacataaggagctagt

SEQ ID NO: 8938 - DNA, 25 bp, Macaca Fascicularis
ggagctagtcacagtcttgctgcaa

SEQ ID NO: 8939 - DNA, 25 bp, Macaca Fascicularis
cttgctgcaacatagagctgacatt

SEQ ID NO: 8940 - DNA, 25 bp, Macaca Fascicularis
aactgtcaggacaatgaaggccaaa

SEQ ID NO: 8941 - DNA, 25 bp, Macaca Fascicularis
gaaggccaaacagctatacattatg

SEQ ID NO: 8942 - DNA, 25 bp, Macaca Fascicularis
atacattatgcctatgcctgtgagt

SEQ ID NO: 8943 - DNA, 25 bp, Macaca Fascicularis
tgcctatgcctgtgagtttgtggat

SEQ ID NO: 8944 - DNA, 25 bp, Macaca Fascicularis
ttctgcccatctttgttatgctcat

SEQ ID NO: 8945 - DNA, 25 bp, Macaca Fascicularis
ttatgctcattctgtggcccacagt

SEQ ID NO: 8946 - DNA, 25 bp, Macaca Fascicularis
ccacctcttgctatcagagtcaatt

SEQ ID NO: 8947 - DNA, 25 bp, Macaca Fascicularis
actctccgagaccaggatggctgcc

SEQ ID NO: 8948 - DNA, 25 bp, Macaca Fascicularis
aggatggctgcctgccggaggaggt

SEQ ID NO: 8949 - DNA, 25 bp, Macaca Fascicularis
ggtgacaggctgcaaaacagtttct

SEQ ID NO: 8950 - DNA, 25 bp, Macaca Fascicularis
aacagtttctttggtgctgcagcgg

SEQ ID NO: 8951 - DNA, 25 bp, Macaca Fascicularis
tctttggtgctgcagcggcacacaa

SEQ ID NO: 8952 - DNA, 25 bp, Macaca Fascicularis
tgctgcagcggcacacaactggcaa

SEQ ID NO: 8953 - DNA, 25 bp, Macaca Fascicularis
gcggcacacaactggcaaggcttaa

SEQ ID NO: 8954 - DNA, 25 bp, Macaca Fascicularis
acacaactggcaaggcttaatcaaa

SEQ ID NO: 8955 - DNA, 25 bp, Macaca Fascicularis
ggcaaggcttaatcaaaagactgga

SEQ ID NO: 8956 - DNA, 25 bp, Macaca Fascicularis
gactggaaaaccacagtctgtaata

SEQ ID NO: 8957 - DNA, 25 bp, Macaca Fascicularis
gtctgtaatagcataaggcttccat

SEQ ID NO: 8958 - DNA, 25 bp, Macaca Fascicularis
taaggcttccattatgaaagaaaac

SEQ ID NO: 8959 - DNA, 25 bp, Macaca Fascicularis
atacttctttttctgcccatctttg

SEQ ID NO: 8960 - DNA, 25 bp, Macaca Fascicularis
ggctcaggccctcgcattgatcctt

SEQ ID NO: 8961 - DNA, 25 bp, Macaca Fascicularis
attgatccttcacgctgcaggctgg

SEQ ID NO: 8962 - DNA, 25 bp, Macaca Fascicularis
gaagcgcccgggaccacggtgacca

SEQ ID NO: 8963 - DNA, 25 bp, Macaca Fascicularis
accacggtgaccaggatcgtaggca

SEQ ID NO: 8964 - DNA, 25 bp, Macaca Fascicularis
ggcaaggtggtagtctccaacagga

SEQ ID NO: 8965 - DNA, 25 bp, Macaca Fascicularis
gtagtctccaacaggagcctgggct

SEQ ID NO: 8966 - DNA, 25 bp, Macaca Fascicularis
caacaggagcctgggctcacacatt

SEQ ID NO: 8967 - DNA, 25 bp, Macaca Fascicularis
acattcccaagccccggcagggtgg

SEQ ID NO: 8968 - DNA, 25 bp, Macaca Fascicularis
ggctgggcttcaggtcctgtctgta

SEQ ID NO: 8969 - DNA, 25 bp, Macaca Fascicularis
ttcaggtcctgtctgtagggaactc

SEQ ID NO: 8970 - DNA, 25 bp, Macaca Fascicularis
ctgggaggaccacctggcctgcaat

SEQ ID NO: 8971 - DNA, 25 bp, Macaca Fascicularis
gaccacctggcctgcaatgggctgt

SEQ ID NO: 8972 - DNA, 25 bp, Macaca Fascicularis
ctggcctgcaatgggctgtcccagg

SEQ ID NO: 8973 - DNA, 25 bp, Macaca Fascicularis
gcgtggcgccactgcacaccgcaga

SEQ ID NO: 8974 - DNA, 25 bp, Macaca Fascicularis
actgcacaccgcagagctgtccagg

SEQ ID NO: 8975 - DNA, 25 bp, Macaca Fascicularis
tgcacaccgcagagctgtccaggcg

SEQ ID NO: 8976 - DNA, 25 bp, Macaca Fascicularis
acaccgcagagctgtccaggcgcag

SEQ ID NO: 8977 - DNA, 25 bp, Macaca Fascicularis
accgcagagctgtccaggcgcagct

SEQ ID NO: 8978 - DNA, 25 bp, Macaca Fascicularis
cgcagagctgtccaggcgcagctct

SEQ ID NO: 8979 - DNA, 25 bp, Macaca Fascicularis
agagctgtccaggcgcagctctgtc

SEQ ID NO: 8980 - DNA, 25 bp, Macaca Fascicularis
tgtccaggcgcagctctgtccccag

SEQ ID NO: 8981 - DNA, 25 bp, Macaca Fascicularis
agctctgtccccagcgctcatggtg

SEQ ID NO: 8982 - DNA, 25 bp, Macaca Fascicularis
ctgtccccagcgctcatggtgttga

SEQ ID NO: 8983 - DNA, 25 bp, Macaca Fascicularis
tgtccccagcgctcatggtgttgaa

SEQ ID NO: 8984 - DNA, 25 bp, Macaca Fascicularis
gtccccagcgctcatggtgttgaaa

SEQ ID NO: 8985 - DNA, 25 bp, Macaca Fascicularis
tcatggtgttgaaactgtctgtcat

SEQ ID NO: 8986 - DNA, 25 bp, Macaca Fascicularis
gagcgcagcctctgcacaaccagct

SEQ ID NO: 8987 - DNA, 25 bp, Macaca Fascicularis
agcgcagcctctgcacaaccagctt

SEQ ID NO: 8988 - DNA, 25 bp, Macaca Fascicularis
gcgcagcctctgcacaaccagcttt

SEQ ID NO: 8989 - DNA, 25 bp, Macaca Fascicularis
gcagcctctgcacaaccagctttcc

SEQ ID NO: 8990 - DNA, 25 bp, Macaca Fascicularis
agcctctgcacaaccagctttcccc

SEQ ID NO: 8991 - DNA, 25 bp, Macaca Fascicularis
tctgcacaaccagctttcccccaca

SEQ ID NO: 8992 - DNA, 25 bp, Macaca Fascicularis
atctccagccagggcacccacaggc

SEQ ID NO: 8993 - DNA, 25 bp, Macaca Fascicularis
agccagggcacccacaggccctgct

SEQ ID NO: 8994 - DNA, 25 bp, Macaca Fascicularis
agggcacccacaggccctgctccca

SEQ ID NO: 8995 - DNA, 25 bp, Macaca Fascicularis
acaggccctgctcccacttaccgca

SEQ ID NO: 8996 - DNA, 25 bp, Macaca Fascicularis
gcacccgcccttcccaggatgaagc

SEQ ID NO: 8997 - DNA, 25 bp, Macaca Fascicularis
acccgcccttcccaggatgaagcct

SEQ ID NO: 8998 - DNA, 25 bp, Macaca Fascicularis
cccgcccttcccaggatgaagcctg

SEQ ID NO: 8999 - DNA, 25 bp, Macaca Fascicularis
tctcccaggtgatgctgttaacgcc

SEQ ID NO: 9000 - DNA, 25 bp, Macaca Fascicularis
ctcccaggtgatgctgttaacgcct

SEQ ID NO: 9001 - DNA, 25 bp, Macaca Fascicularis
tcccaggtgatgctgttaacgcctc

SEQ ID NO: 9002 - DNA, 25 bp, Macaca Fascicularis
cccaggtgatgctgttaacgcctca

SEQ ID NO: 9003 - DNA, 25 bp, Macaca Fascicularis
ccaggtgatgctgttaacgcctcag

SEQ ID NO: 9004 - DNA, 25 bp, Macaca Fascicularis
aggtgatgctgttaacgcctcagct

SEQ ID NO: 9005 - DNA, 25 bp, Macaca Fascicularis
ggtgatgctgttaacgcctcagctg

SEQ ID NO: 9006 - DNA, 25 bp, Macaca Fascicularis
gtgatgctgttaacgcctcagctgg

SEQ ID NO: 9007 - DNA, 25 bp, Macaca Fascicularis
tgatgctgttaacgcctcagctggc

SEQ ID NO: 9008 - DNA, 25 bp, Macaca Fascicularis
tgctgttaacgcctcagctggcagt

SEQ ID NO: 9009 - DNA, 25 bp, Macaca Fascicularis
ctgttaacgcctcagctggcagtga

SEQ ID NO: 9010 - DNA, 25 bp, Macaca Fascicularis
tgttaacgcctcagctggcagtgac

SEQ ID NO: 9011 - DNA, 25 bp, Macaca Fascicularis
gttaacgcctcagctggcagtgacc

SEQ ID NO: 9012 - DNA, 25 bp, Macaca Fascicularis
gccccacatcgtaggaatccagagt

SEQ ID NO: 9013 - DNA, 25 bp, Macaca Fascicularis
ggaatccagagtcccgatcagcagg

SEQ ID NO: 9014 - DNA, 25 bp, Macaca Fascicularis
tgcccggcccatctttgtcgagggc

SEQ ID NO: 9015 - DNA, 25 bp, Macaca Fascicularis
ttctccctgtggctccgaaacaagt

SEQ ID NO: 9016 - DNA, 25 bp, Macaca Fascicularis
gtggctccgaaacaagtgtgtgtat

SEQ ID NO: 9017 - DNA, 25 bp, Macaca Fascicularis
tgtattaccacatcctcagagctga

SEQ ID NO: 9018 - DNA, 25 bp, Macaca Fascicularis
gaccccggaggagtggaacctctat

SEQ ID NO: 9019 - DNA, 25 bp, Macaca Fascicularis
tggaggaaggccctgtcttcgccat

SEQ ID NO: 9020 - DNA, 25 bp, Macaca Fascicularis
tgtgcatggcgggtgcccatgacca

SEQ ID NO: 9021 - DNA, 25 bp, Macaca Fascicularis
tggccaagtggatccagggcctgca

SEQ ID NO: 9022 - DNA, 25 bp, Macaca Fascicularis
agggcctgcaggagaccaatccaac

SEQ ID NO: 9023 - DNA, 25 bp, Macaca Fascicularis
agaccaatccaactctggcccagat

SEQ ID NO: 9024 - DNA, 25 bp, Macaca Fascicularis
ccacacatcctctgcagggctggag

SEQ ID NO: 9025 - DNA, 25 bp, Macaca Fascicularis
ccgcccgaggaccacgaggaagacg

SEQ ID NO: 9026 - DNA, 25 bp, Macaca Fascicularis
gagtctgagcgggcgtgagggcaca

SEQ ID NO: 9027 - DNA, 25 bp, Macaca Fascicularis
gtctgagcgggcgtgagggcacagg

SEQ ID NO: 9028 - DNA, 25 bp, Macaca Fascicularis
tctgagcgggcgtgagggcacaggc

SEQ ID NO: 9029 - DNA, 25 bp, Macaca Fascicularis
ctgagcgggcgtgagggcacaggct

SEQ ID NO: 9030 - DNA, 25 bp, Macaca Fascicularis
tgagcgggcgtgagggcacaggctg

SEQ ID NO: 9031 - DNA, 25 bp, Macaca Fascicularis
gagcgggcgtgagggcacaggctgt

SEQ ID NO: 9032 - DNA, 25 bp, Macaca Fascicularis
agcgggcgtgagggcacaggctgtg

SEQ ID NO: 9033 - DNA, 25 bp, Macaca Fascicularis
gcgggcgtgagggcacaggctgtgg

SEQ ID NO: 9034 - DNA, 25 bp, Macaca Fascicularis
cgggcgtgagggcacaggctgtggc

SEQ ID NO: 9035 - DNA, 25 bp, Macaca Fascicularis
ctggcagttttttgtaagactctgt

SEQ ID NO: 9036 - DNA, 25 bp, Macaca Fascicularis
ggcagttttttgtaagactctgtgg

SEQ ID NO: 9037 - DNA, 25 bp, Macaca Fascicularis
cagttttttgtaagactctgtggta

SEQ ID NO: 9038 - DNA, 25 bp, Macaca Fascicularis
gttttttgtaagactctgtggtatt

SEQ ID NO: 9039 - DNA, 25 bp, Macaca Fascicularis
tgtaagactctgtggtattgttgga

SEQ ID NO: 9040 - DNA, 25 bp, Macaca Fascicularis
aagactctgtggtattgttggagga

SEQ ID NO: 9041 - DNA, 25 bp, Macaca Fascicularis
actctgtggtattgttggaggaatc

SEQ ID NO: 9042 - DNA, 25 bp, Macaca Fascicularis
gagaaaaactttttgcctgagacat

SEQ ID NO: 9043 - DNA, 25 bp, Macaca Fascicularis
agaaaaactttttgcctgagacata

SEQ ID NO: 9044 - DNA, 25 bp, Macaca Fascicularis
gaaaaactttttgcctgagacataa

SEQ ID NO: 9045 - DNA, 25 bp, Macaca Fascicularis
actttttgcctgagacataaaacct

SEQ ID NO: 9046 - DNA, 25 bp, Macaca Fascicularis
tttgcctgagacataaaaccttttt

SEQ ID NO: 9047 - DNA, 25 bp, Macaca Fascicularis
ttgcctgagacataaaacctttttt

SEQ ID NO: 9048 - DNA, 25 bp, Macaca Fascicularis
agaagaaatcatgcagctaaacagt

SEQ ID NO: 9049 - DNA, 25 bp, Macaca Fascicularis
gaagaaatcatgcagctaaacagtg

SEQ ID NO: 9050 - DNA, 25 bp, Macaca Fascicularis
aagaaatcatgcagctaaacagtga

SEQ ID NO: 9051 - DNA, 25 bp, Macaca Fascicularis
agaaatcatgcagctaaacagtgaa

SEQ ID NO: 9052 - DNA, 25 bp, Macaca Fascicularis
gaaatcatgcagctaaacagtgaag

SEQ ID NO: 9053 - DNA, 25 bp, Macaca Fascicularis
aaatcatgcagctaaacagtgaaga

SEQ ID NO: 9054 - DNA, 25 bp, Macaca Fascicularis
aatcatgcagctaaacagtgaagaa

SEQ ID NO: 9055 - DNA, 25 bp, Macaca Fascicularis
atcatgcagctaaacagtgaagaag

SEQ ID NO: 9056 - DNA, 25 bp, Macaca Fascicularis
tcatgcagctaaacagtgaagaagc

SEQ ID NO: 9057 - DNA, 25 bp, Macaca Fascicularis
ctggcagttttttgtaagactctgt

SEQ ID NO: 9058 - DNA, 25 bp, Macaca Fascicularis
ggcagttttttgtaagactctgtgg

SEQ ID NO: 9059 - DNA, 25 bp, Macaca Fascicularis
gttttttgtaagactctgtggtatt

SEQ ID NO: 9060 - DNA, 25 bp, Macaca Fascicularis
tgtaagactctgtggtattgttgga

SEQ ID NO: 9061 - DNA, 25 bp, Macaca Fascicularis
aagactctgtggtattgttggagga

SEQ ID NO: 9062 - DNA, 25 bp, Macaca Fascicularis
actctgtggtattgttggaggaatc

SEQ ID NO: 9063 - DNA, 25 bp, Macaca Fascicularis
gaaataatttgctgtcgtttcagac

SEQ ID NO: 9064 - DNA, 25 bp, Macaca Fascicularis
gtcgtttcagacttggatcctataa

SEQ ID NO: 9065 - DNA, 25 bp, Macaca Fascicularis
cagacttggatcctataaacctgtc

SEQ ID NO: 9066 - DNA, 25 bp, Macaca Fascicularis
gagaaaaactttttgcctgagacat

SEQ ID NO: 9067 - DNA, 25 bp, Macaca Fascicularis
gaaaaactttttgcctgagacataa

SEQ ID NO: 9068 - DNA, 25 bp, Macaca Fascicularis
actttttgcctgagacataaaacct

SEQ ID NO: 9069 - DNA, 25 bp, Macaca Fascicularis
ttgcctgagacataaaacctttttt

SEQ ID NO: 9070 - DNA, 25 bp, Macaca Fascicularis
actggaagtgtcctaatcccacctg

SEQ ID NO: 9071 - DNA, 25 bp, Macaca Fascicularis
tggaagtgtcctaatcccacctgtg

SEQ ID NO: 9072 - DNA, 25 bp, Macaca Fascicularis
tgtcctaatcccacctgtgagaata

SEQ ID NO: 9073 - DNA, 25 bp, Macaca Fascicularis
gtcctaatcccacctgtgagaatat

SEQ ID NO: 9074 - DNA, 25 bp, Macaca Fascicularis
ggagttttcctgttcagattaccct

SEQ ID NO: 9075 - DNA, 25 bp, Macaca Fascicularis
gagttttcctgttcagattaccctg

SEQ ID NO: 9076 - DNA, 25 bp, Macaca Fascicularis
agttttcctgttcagattaccctgc

SEQ ID NO: 9077 - DNA, 25 bp, Macaca Fascicularis
gttttcctgttcagattaccctgcc

SEQ ID NO: 9078 - DNA, 25 bp, Macaca Fascicularis
ttcctgttcagattaccctgcccag

SEQ ID NO: 9079 - DNA, 25 bp, Macaca Fascicularis
taccctgcccagcaggaactggaat

SEQ ID NO: 9080 - DNA, 25 bp, Macaca Fascicularis
cctgcccagcaggaactggaataca

SEQ ID NO: 9081 - DNA, 25 bp, Macaca Fascicularis
cagcaggaactggaatacagtgttt

SEQ ID NO: 9082 - DNA, 25 bp, Macaca Fascicularis
gaactggaatacagtgtttaatcca

SEQ ID NO: 9083 - DNA, 25 bp, Macaca Fascicularis
gggtgagcacagacaggatcgcagg

SEQ ID NO: 9084 - DNA, 25 bp, Macaca Fascicularis
agacaggatcgcagggagaggccgt

SEQ ID NO: 9085 - DNA, 25 bp, Macaca Fascicularis
gtcggactatgtaattgtaactata

SEQ ID NO: 9086 - DNA, 25 bp, Macaca Fascicularis
gtaattgtaactatacctctggttc

SEQ ID NO: 9087 - DNA, 25 bp, Macaca Fascicularis
taattgtaactatacctctggttcc

SEQ ID NO: 9088 - DNA, 25 bp, Macaca Fascicularis
attgtaactatacctctggttccca

SEQ ID NO: 9089 - DNA, 25 bp, Macaca Fascicularis
ttgtaactatacctctggttcccat

SEQ ID NO: 9090 - DNA, 25 bp, Macaca Fascicularis
tgtaactatacctctggttcccatt

SEQ ID NO: 9091 - DNA, 25 bp, Macaca Fascicularis
gtaactatacctctggttcccatta

SEQ ID NO: 9092 - DNA, 25 bp, Macaca Fascicularis
taactatacctctggttcccattaa

SEQ ID NO: 9093 - DNA, 25 bp, Macaca Fascicularis
tatacctctggttcccattaaaaat

SEQ ID NO: 9094 - DNA, 25 bp, Macaca Fascicularis
atacctctggttcccattaaaaatg

SEQ ID NO: 9095 - DNA, 25 bp, Macaca Fascicularis
tctggttcccattaaaaatgaccat

SEQ ID NO: 9096 - DNA, 25 bp, Macaca Fascicularis
actggaagtgtcctaatcccacctg

SEQ ID NO: 9097 - DNA, 25 bp, Macaca Fascicularis
tggaagtgtcctaatcccacctgtg

SEQ ID NO: 9098 - DNA, 25 bp, Macaca Fascicularis
tgtcctaatcccacctgtgagaata

SEQ ID NO: 9099 - DNA, 25 bp, Macaca Fascicularis
gtcctaatcccacctgtgagaatat

SEQ ID NO: 9100 - DNA, 25 bp, Macaca Fascicularis
agtgtaaggcccctaaaccagatgg

SEQ ID NO: 9101 - DNA, 25 bp, Macaca Fascicularis
gtaactatacctctggttcccatta

SEQ ID NO: 9102 - DNA, 25 bp, Macaca Fascicularis
ggagttttcctgttcagattaccct

SEQ ID NO: 9103 - DNA, 25 bp, Macaca Fascicularis
agttttcctgttcagattaccctgc

SEQ ID NO: 9104 - DNA, 25 bp, Macaca Fascicularis
gttttcctgttcagattaccctgcc

SEQ ID NO: 9105 - DNA, 25 bp, Macaca Fascicularis
ttcctgttcagattaccctgcccag

SEQ ID NO: 9106 - DNA, 25 bp, Macaca Fascicularis
taccctgcccagcaggaactggaat

SEQ ID NO: 9107 - DNA, 25 bp, Macaca Fascicularis
tgcccagcaggaactggaatacagt

SEQ ID NO: 9108 - DNA, 25 bp, Macaca Fascicularis
gaactggaatacagtgtttaatcca

SEQ ID NO: 9109 - DNA, 25 bp, Macaca Fascicularis
tccctctcatttcccattaagtctg

SEQ ID NO: 9110 - DNA, 25 bp, Macaca Fascicularis
atttcccattaagtctgagaggcaa

SEQ ID NO: 9111 - DNA, 25 bp, Macaca Fascicularis
agtctgagaggcaagagctaggtta

SEQ ID NO: 9112 - DNA, 25 bp, Macaca Fascicularis
agctaggttaggcaaggaggcggtt

SEQ ID NO: 9113 - DNA, 25 bp, Macaca Fascicularis
gggaacagccaggtgccctagtcct

SEQ ID NO: 9114 - DNA, 25 bp, Macaca Fascicularis
aggtgccctagtcctctgatttttc

SEQ ID NO: 9115 - DNA, 25 bp, Macaca Fascicularis
ctagtcctctgatttttcctccatc

SEQ ID NO: 9116 - DNA, 25 bp, Macaca Fascicularis
tctgatttttcctccatcctgctta

SEQ ID NO: 9117 - DNA, 25 bp, Macaca Fascicularis
gatttttcctccatcctgcttacca

SEQ ID NO: 9118 - DNA, 25 bp, Macaca Fascicularis
ttaccacctccctgggtacttacag

SEQ ID NO: 9119 - DNA, 25 bp, Macaca Fascicularis
ggtacttacagccttctcttgggaa

SEQ ID NO: 9120 - DNA, 25 bp, Macaca Fascicularis
tacttacagccttctcttgggaaca

SEQ ID NO: 9121 - DNA, 25 bp, Macaca Fascicularis
cttacagccttctcttgggaacagc

SEQ ID NO: 9122 - DNA, 25 bp, Macaca Fascicularis
gaaagggatcgcagggacaccaagc

SEQ ID NO: 9123 - DNA, 25 bp, Macaca Fascicularis
cagggacaccaagcggcacagcaga

SEQ ID NO: 9124 - DNA, 25 bp, Macaca Fascicularis
agccggagtcggagcacacctgtgc

SEQ ID NO: 9125 - DNA, 25 bp, Macaca Fascicularis
gggaaaacactagagctgcaggtac

SEQ ID NO: 9126 - DNA, 25 bp, Macaca Fascicularis
agagctgcaggtaccagccactcgg

SEQ ID NO: 9127 - DNA, 25 bp, Macaca Fascicularis
agagggataggcacagtctccacca

SEQ ID NO: 9128 - DNA, 25 bp, Macaca Fascicularis
tggagccaagggtctttcacatcac

SEQ ID NO: 9129 - DNA, 25 bp, Macaca Fascicularis
ctgcccctacatacataccaaatgg

SEQ ID NO: 9130 - DNA, 25 bp, Macaca Fascicularis
caaatggaacggtggctatcctttc

SEQ ID NO: 9131 - DNA, 25 bp, Macaca Fascicularis
gactgggtcacctatgagctgaatc

SEQ ID NO: 9132 - DNA, 25 bp, Macaca Fascicularis
gagctgaatcagcatctcctcctga

SEQ ID NO: 9133 - DNA, 25 bp, Macaca Fascicularis
tttcccacaggttccactttatatc

SEQ ID NO: 9134 - DNA, 25 bp, Macaca Fascicularis
tccactttatatccaccttttcctt

SEQ ID NO: 9135 - DNA, 25 bp, Macaca Fascicularis
tccctctcatttcccattaagtctg

SEQ ID NO: 9136 - DNA, 25 bp, Macaca Fascicularis
atttcccattaagtctgagaggcaa

SEQ ID NO: 9137 - DNA, 25 bp, Macaca Fascicularis
agtctgagaggcaagagctaggtta

SEQ ID NO: 9138 - DNA, 25 bp, Macaca Fascicularis
agctaggttaggcaaggaggcggtt

SEQ ID NO: 9139 - DNA, 25 bp, Macaca Fascicularis
gggaacagccaggtgccctagtcct

SEQ ID NO: 9140 - DNA, 25 bp, Macaca Fascicularis
aggtgccctagtcctctgatttttc

SEQ ID NO: 9141 - DNA, 25 bp, Macaca Fascicularis
ctagtcctctgatttttcctccatc

SEQ ID NO: 9142 - DNA, 25 bp, Macaca Fascicularis
tctgatttttcctccatcctgctta

SEQ ID NO: 9143 - DNA, 25 bp, Macaca Fascicularis
gatttttcctccatcctgcttacca

SEQ ID NO: 9144 - DNA, 25 bp, Macaca Fascicularis
ttaccacctccctgggtacttacag

SEQ ID NO: 9145 - DNA, 25 bp, Macaca Fascicularis
ggtacttacagccttctcttgggaa

SEQ ID NO: 9146 - DNA, 25 bp, Macaca Fascicularis
cttacagccttctcttgggaacagc

SEQ ID NO: 9147 - DNA, 25 bp, Macaca Fascicularis
tatccaccttttccttttgttcaat

SEQ ID NO: 9148 - DNA, 25 bp, Macaca Fascicularis
aagtgagagacagagagcacctttt

SEQ ID NO: 9149 - DNA, 25 bp, Macaca Fascicularis
gagagacagagagcaccttttatac

SEQ ID NO: 9150 - DNA, 25 bp, Macaca Fascicularis
gagacagagagcaccttttatacgt

SEQ ID NO: 9151 - DNA, 25 bp, Macaca Fascicularis
gacagagagcaccttttatacgtgt

SEQ ID NO: 9152 - DNA, 25 bp, Macaca Fascicularis
agagagcaccttttatacgtgtgac

SEQ ID NO: 9153 - DNA, 25 bp, Macaca Fascicularis
agagcaccttttatacgtgtgacaa

SEQ ID NO: 9154 - DNA, 25 bp, Macaca Fascicularis
cccagctactcccaaggcggaggca

SEQ ID NO: 9155 - DNA, 25 bp, Macaca Fascicularis
ttgtagtgcgctagacggtgcctgt

SEQ ID NO: 9156 - DNA, 25 bp, Macaca Fascicularis
gtgcgctagacggtgcctgtgaata

SEQ ID NO: 9157 - DNA, 25 bp, Macaca Fascicularis
gcgctagacggtgcctgtgaatagc

SEQ ID NO: 9158 - DNA, 25 bp, Macaca Fascicularis
actgcactctagtctggggaacata

SEQ ID NO: 9159 - DNA, 25 bp, Macaca Fascicularis
ggaacatatgagatccccccaaatc

SEQ ID NO: 9160 - DNA, 25 bp, Macaca Fascicularis
atgagatccccccaaatctcaaaaa

SEQ ID NO: 9161 - DNA, 25 bp, Macaca Fascicularis
acagcgccctcctgaggacccagtg

SEQ ID NO: 9162 - DNA, 25 bp, Macaca Fascicularis
ggagaagagcttgggcccgcagctg

SEQ ID NO: 9163 - DNA, 25 bp, Macaca Fascicularis
gcttgggcccgcagctggacaccaa

SEQ ID NO: 9164 - DNA, 25 bp, Macaca Fascicularis
gtgcagggcactgaatgcccaggca

SEQ ID NO: 9165 - DNA, 25 bp, Macaca Fascicularis
gcactgaatgcccaggcagctgctg

SEQ ID NO: 9166 - DNA, 25 bp, Macaca Fascicularis
gtgaatggataaatagaagagctgc

SEQ ID NO: 9167 - DNA, 25 bp, Macaca Fascicularis
tgagctcgacctgatagctgtgcag

SEQ ID NO: 9168 - DNA, 25 bp, Macaca Fascicularis
gctcgacctgatagctgtgcagaaa

SEQ ID NO: 9169 - DNA, 25 bp, Macaca Fascicularis
gacctgatagctgtgcagaaagtga

SEQ ID NO: 9170 - DNA, 25 bp, Macaca Fascicularis
agctgtaacagaaagatcaatggac

SEQ ID NO: 9171 - DNA, 25 bp, Macaca Fascicularis
gaaagatcaatggacttgacccaac

SEQ ID NO: 9172 - DNA, 25 bp, Macaca Fascicularis
gatcaatggacttgacccaactgaa

SEQ ID NO: 9173 - DNA, 25 bp, Macaca Fascicularis
tggacttgacccaactgaaaaggaa

SEQ ID NO: 9174 - DNA, 25 bp, Macaca Fascicularis
agctgctctgagctcgacctgatag

SEQ ID NO: 9175 - DNA, 25 bp, Macaca Fascicularis
aagtgagagacagagagcacctttt

SEQ ID NO: 9176 - DNA, 25 bp, Macaca Fascicularis
gagacagagagcaccttttatacgt

SEQ ID NO: 9177 - DNA, 25 bp, Macaca Fascicularis
gacagagagcaccttttatacgtgt

SEQ ID NO: 9178 - DNA, 25 bp, Macaca Fascicularis
agagagcaccttttatacgtgtgac

SEQ ID NO: 9179 - DNA, 25 bp, Macaca Fascicularis
agagcaccttttatacgtgtgacaa

SEQ ID NO: 9180 - DNA, 25 bp, Macaca Fascicularis
agctactcccaaggcggaggcagga

SEQ ID NO: 9181 - DNA, 25 bp, Macaca Fascicularis
ttgtagtgcgctagacggtgcctgt

SEQ ID NO: 9182 - DNA, 25 bp, Macaca Fascicularis
gtgcgctagacggtgcctgtgaata

SEQ ID NO: 9183 - DNA, 25 bp, Macaca Fascicularis
gcgctagacggtgcctgtgaatagc

SEQ ID NO: 9184 - DNA, 25 bp, Macaca Fascicularis
actgcactctagtctggggaacata

SEQ ID NO: 9185 - DNA, 25 bp, Macaca Fascicularis
ggaacatatgagatccccccaaatc

SEQ ID NO: 9186 - DNA, 25 bp, Macaca Fascicularis
atgagatccccccaaatctcaaaaa

SEQ ID NO: 9187 - DNA, 763 bp, Macaca Fascicularis
  misc_feature (1)...(763): n = A,T,C or G
attcacacagaattaggctgtgtttttgcattagctggtaggtgactttctcaaaattcttaaattcaggaagtatttagtaaacttgaggaaggtatgaaatctggaggaggcatccaggacccaggggtttgatagctttacaggtaggatcataccacaccaaaagagcagtggacagtgagactatatgagctgtatgaagcttctaggaatcatttaggacagacagagccctgaacaacccgttcatgacttaagttgttggctcagtgtatgctggggacaaagaaaaactaacaagccgacctgcctttatggtaaattctagtgtgnnnnnnngggannnnnnnnnnnnnnnnnnnnnnnnnnnnnnnaagaacttcacaactgaagaaggggagctgtgagaacatggattgttctacaccttggacagggtaacagaggaagtggctgaggcctagannnnnnnnnnnnnnnnnccttcgcaaactgtatttcttggaacgcaaaaggaaggtttacctatttcctagaacacctggaatccataacctcagaaagtgatactattggtagaaaatgtggaaggatcaggaaggtcttagattcttggatgacagatgtatgttgatgccctatggagatgtccttgtgctttgaggtcactgaggcaggaagacctgtctgctcttggtctcaccactaaaacagtcttgggctggatgagttatagagctgaggggctgtgatggttctg

SEQ ID NO: 9188 - DNA, 733 bp, Macaca Fascicularis
  misc_feature (1)...(733): n = A,T,C or G
actcacaaaattttatnnnnncaaacatgtacattctttccnnntnttgttccgnnntcttttnnntttttcctttctttggtgggctgagaaagnnnnnnnnnnnnnnnnnnnnnnnnnnnnnnnnnnnnnnnnngtcaaacgnnnnnnncctgtgtatgtgaaaagggaattgtaaacggactgcaatgtaatgtacactgtaatttgaatacaattactgtatctaaaaggagctgctatgaactacctttcttatgttgttaggctactgtttctgaaagccctgnnnnnnnnnnnnnnnnnnnnnnnncagatagactctttttaaggatcttggctgctttttactagaaggttgcttttatgagcatnnnnnnnnnnnnnnnnnnnnngtgttaattttaattaacnnnnnnnntttgtagagaaaactattcacaatataaattccacgtcttctcacctatcaggcatgcatattttaatatctgtttggatagccagaagtagaatcataaaggtaaaatatgagttgtttctttgtttcttaaatgtcatatattatgtgtaatatatatgtaaagggccattcttaagttctctccttaaacttaatgctgtcaagtgttagatgtgtgcatgtgaacttgttgcacagcagaaacatattcagagtttatctatgtaacttattcactctgtaaatacatttaaagtttttgtgatgtaa

SEQ ID NO: 9189 - DNA, 705 bp, Macaca Fascicularis
cagaggaagcgggagctggcagatgtcctggatgcccagatcaacatgctcagccccttcgaggcagtggccacacgcttcaaggagcaatacaggacgttcgccacggccctggacaccaccaggcacgagctgcctgtgaggtccatccacctggagggagacgggcagcagctcttagatgccctgcagcgtgaactggtgaccactcagcacctcctggcagcacttgacgttggcgattcggaagaaaatgtgcaggtgctggacttactgagcgaactcaaggacgtgacggagaaaaaggaccttgagctccgaaggagcttcagccaggtgctggaactctccgcagaggtgagcaaagaggcagccttggcaaaccaggaagtctgggaagagacccagggcgtggcgccccccagccagtggtatttcaatcaagatggtgcctgcagagaatctcggggagcacccaagaacgcgcgcctgtctgaggacgacaacccgggtgcctcatcagcccccactcaggccacgttcatcagcccaaaggaagacttttcttgaagcagccagggagaagtcccgccctcggtctctcgttcagggagggacttgtggtgacccatggtcacattcaggacacttgagcactttatacactaccgtagccctgtagctatttttatgtgataatcttgt

SEQ ID NO: 9190 - DNA, 879 bp, Macaca Fascicularis
  misc_feature (1)...(879): n = A,T,C or G
gattnnnnnncgctnnnnnnnnnnnnnnnnnnnnnnnnnnncagagctcacagccgagaagctgggctttgctggtcttgtacaggagatctcatttgggacaactaaggataaaatnnnnnnnnncgagcagtgtaagaactccagagctgtaaccatttttattagaggaggaaataagatgatcannnnnnnnnnnnnnnnnnnnnnnnnnnnnnnnnnnnnnnnnnnnnnnnnnnncatccgtgataatcgtgtggtgtatggaggaggggctgctgagatatnnnnnnnnnnnnnnnnnnnnnnagaagcagataagtgacccactttagaacagnnnnnnnnnnnnnnnnnnnnnnnnnnnnnnnnggtcannnnnnnnnnnnnnnnnnnnnnnnnnnnnnnnnnnnnnnnnnnnnnnnnnnnnnnngtccgagccagacaggtgaaggagatgaaccnnnnnnnnnnnnnnnnnnnnntgcacaaggggacaaatgatatgaagcaacagcatgtcatagaaaccttgattggcaaaaagcaacagatatctcttgcaacacaaatggttagaatgattttgaagattgatgacattcgtaagcctggagaatctgaagaatgaagacattgagaatactatgtagtaagatccacttctctgattaagtaaatggatgtgttgtgatgtgtctacagttatttattgttacatccttttccaaacactgtagatgctataataaaaatagctatttggtaaccatagtttcacttgttcaaagccgtgtaattggggtactatctcaacatgcttttgtattcattgtattaaaagaatctgtttaaacaacctttatcttcaggttaaga

SEQ ID NO: 9191 - DNA, 752 bp, Macaca Fascicularis
  misc_feature (1)...(752): n = A,T,C or G
ctgtnnnnnnnnnnnnnnnnnnntgcaacnnntgnctgcctcccctctgtacaggaacgccactgccatgctctgtccccacctggcttctgctgagtgctgggaccagctttctcccctggacaccgaggattggaaacaagggcctggagctgagtggtagccggtctgctgtgaccacaggctcaggtccaaccttgctgcctggccacagctgtggcagggcaagtgggaaccaccatctcttgggagccaccaaagctgggaaatgccggagaggccgggcctttcccgctttgccctggccgccnnnnnnnnnnnnnnnnncgccccgcagccctcgtgtgtccactccgcagtgcctctgcccatcgggggactgcacacacgtcctgccaggggctctatgaaggtttgcccagacagaagccaggtgggctccctgttcactcccactctcccgaggggtgctggcctccccagggtttaccttcttacaggatttagacgaggttcgaggctcccatttcagggcagctctcaggattgtcattttcctctttgcctgtgggtttaacttttgtatttttttaatcacgtttgatacgaaatgtttttatcgtactctttggaggtgcccattctacttctgaatttagcttactaactcgcatctggaagctcagcaagtgcacaagccttactttggtgaccgtggaaaccactgccgcccctccccaacgtggtgtgct

SEQ ID NO: 9192 - DNA, 789 bp, Macaca Fascicularis
  misc_feature (1)...(789): n = A,T,C or G
tcacagagaccccncataggtagtatctcatccatggaagtgaatgtggacacactggagcaagtagaacttattgaccttggggatccggatggagcagatgtgttcttgccttgtgaagatcctccaccaaccccccagtcgtctggggtggacaaccatttggaggnnnnnnnnnnnnnnnnnnnnnnnnnnnnnnnnnnnnnntctaggacctcctcctcctcctccgactcctccaccaacctgcatagcccaaatccaagtgatgatggagcagacacgcccttggcacagtcggatgaagaggaggaaaggggtgatggaggggcagagcctggagcctgcagctagcagtgggcccccnnnnnnnnnnnnnnnnnnnnnggctattctccacatgagaccgtaggcccagccggagcctttcgggagaagaccagactctttacttgcagtaggcaccagaggtgggaaggatggtgggattgtgtacctttctaagaattaaccctctcctgctttactgctaatattttcctgctgcaaccctcccaccagtttttggcttactcctgagataagatttgcaaatgaggagagagaagatgaggttggacaagatgccactgcttttcttagcactcttccctcccccaaaccatcctgtagtcttctaatagagtctctcaaacaagtgtctctagatggatgtgaactccttaattcatcaaatgaggtggtactcaagccatgctgcctccttatatccttttggaacagagcacg

SEQ ID NO: 9193 - DNA, 761 bp, Macaca Fascicularis
  misc_feature (1)...(761): n = A,T,C or G
actgtatggcannnncagacctgntttnnaatccccagggtcgggtaggactcctaccagcagccagcctccattnctgggaggatgacaggcagaggaactgaggtcaaccatgactagtaaccccttgttgaggggtaagccaggctaggggactgcacaattatatactatttatttatttattctccttggggttggtgtcaggggtgaaccaagcccacctctatgccctgagccctggtagtccagagaccctaactctgccctggcttctctggttcttccctgagacatgttgctggaaccaaggcaatcctggatgtcctggcactgacccacctgtctgtgaatgtgttcactcttttctgcccccagccatacttggggaggatggacaactacaatagataagaaaatgcagccagagtctcagtccccagcagagcctgtgtctcaccccctcacaggacagagctgtgtctgcatagagctggtctcactgtggcacaggccctggggaaatgcctgtgctgtcaggaagagggggtgctggtttgagggccgccgctgcagttctgctgggtctgcttcctgcccaggaaggtgcctgcacgtgagagaaggagagaaatacacatctgataagacttcatgaaataataattataacaaagaacagcttggtggtcttttcttttccactgatatttctgtaatgatattatacctttattacctctttattttattacctctat

SEQ ID NO: 9194 - DNA, 573 bp, Macaca Fascicularis
gtctgggcccaacactgcatagcactgtgcacaggccgacccatccttaggcctcagctttcccatctgcaccctgcagcatctctaagggcccctccagcatctctaagggcccctccagcataggtggtttgtgaaactcacaggtggtccccaggccaaggtgggcaggtgttacagagaagagggccctaagggctcacaaccaaagtgatccgccaagcaggacagtatctgcgttacagccacagcaggaagaaccactggagagacactcggagggacttccctgacatctgcaccaaggagagtctggacaaagctactgaaactcctccatctgcttctaaaatgcccagaagacaactggaccagtttggtgttagaagtaggaggttggacgacttcatccccaaagggtcctgaagcaccagaactggcgtgtggaaggggccgaggcctaactgaggttggtggattcacacgtgggggtcctccaggacctcagctgcacccattttctggaggttttgctgcccacaacaccagtatttcacaacttcctggtcgctg

SEQ ID NO: 9195 - DNA, 726 bp, Macaca Fascicularis
  misc_feature (1)...(726): n = A,T,C or G
tgtaaatatagataaagtacaagaacaagatacgtattgctattaatacatattaacaattgttagcatttaaaaatattagccccaagactgaaagaagggaaggagaaaggaaagaggagaggaggaagggtaggagacagggagaggataaggaaggaaagaaagcaggaaaaaagaannnnnnnnnnnnnnnnnnnnnttccctcgttttcctagtatttggatttctttatttttgctttgccagtttatatctctcaaaatagaaacagtctttaattttagaatgtcagagtacttttgttttatttaaggctgatctttttaaatttttaaattaacataaaaatcgatatatttatgatgtacaatatgatgttttgatgtatataagcattgtgaaatggctaaatcaagctaattaacatattcattgctccacatatttttgtggtgagaacttttaaaatctactctctcagcaattttcaagtatacattatcattaactatggtcactatgttgtacaataaatttcctgaacttattcttcctgtctaattgaaattttgcatcctttaatcaacatctcaggctggnnnnnnnnnnnnnnnnnnnnnnnnnnnnnnnnnnnnnnnnnnnnnnnnnnnnnnnnnnnnnnnnnnnnnnnatctctactaaaaatacaaaacatttagccgggtgcggtggcatacacctgt

SEQ ID NO: 9196 - DNA, 765 bp, Macaca Fascicularis
  misc_feature (1)...(765): n = A,T,C or G
cccgaaatggagcagttgccnctgaacatgaccagtggctcgggctcctcctccaaacnnnnnnnnntatctgcacgcaatgccacgcnnnnnnnnnnnnnnnnnnngaccgccctcacnnnnnnnnnnnnnnnnnaggtggaggagttttgctaccagcccatggccgtcctgggctatgagcgggtcaacagtcctgaagaggtcaaagacctcagcaagaccctgcttcggaagccccgtctctgaaagcggggnnnnnnnatgccctgtgatgatacctataaagaggattgtagtgtgtttaaacaaacacagtccagactcaaacagaggaagcccacatactctattatagatatataaataatcacacagannnnnnnnnnnnnnnnnnnnnnnnnnnnnnnnnnnaggaacagccacaaaatacacacatacacccctcagaaaaggcaagacttgaacgttctgtccaggtgcccctcttctcctctcctttgctttctcttgtcgtccttctcctatttcttaccctgccctccacctgccttccattttgaagtgggatgttcatgaaatcaagttccagtaacccaaatcttgtttacaaaattttcgtggtatctgtgaacatgtaagagtaatttggatgtggggttgggggtggagaaaggggaagtggtccagaaagaaaaagccccattgggcatgataagccgaggaggcattcttctaaagtcgacttttgtgtaaaaagcaaag

SEQ ID NO: 9197 - DNA, 1141 bp, Macaca Fascicularis
  misc_feature (1)...(1141): n = A,T,C or G
ctgcnnnnnnnnnnnnnnnnnnnnnnnnnnnnnnnnnnnnnnnnnnnnnnnnnnnnnnnnnnnnnnnnnnnnnnnaagcaacacgcaaacgagagctgaggctaatgaaaaacagggaagctgcccgggagtgtcgcaggaagaagaaagaatatgtcaaatgtcttgaaaatcgtgtggctgtgcttgaaaaccaaaacaagactctcattgaggaactcaaggccctcaaagatctttattgccataaagtagagtaactgtctttgacttggaccttgtttactgtgaactctaatcaaggcaggagatgcagcagtcctacttattgccatgtggacttgtggaaaggacacgtgtgacccttaagaatccagttcggattagtgtttgaaattgaattgggaatgttgttccaggatgtggaatgcagctgtgatcacacttaccgagcttactttgacctgtttgtcaatagcatgcaaaaaaatgctttgtttgccctttgcttctgctttnnncagggaagctgccaaagaatgtcgacgtcgaaagaaagaatatgtaaaatgtctggagagccgagttgcnnnnnnnnnnnnnnngaacaagaagcttatagaggaacttgaaaccttgaaagacatttgttctcccaaaacagattagtagaaatatttaactatgaactgaagacagcatgtatagttgcttttgaaggaatacagtatatagctggcaagaatggtggcttcttttctttgtatcattcatcttctttaatctcttaacattcctaaaatgcttcactgtatatagttaagtcatagctataacttcaaattttttaaaagagacaaactaaaaaatgtatgtaacagattcttaaaatgcaatatttgtaaggcttgttccaatgccacatacttgcagctcccattctctgtgtcatcagtagtgtcctatgcaataaaattatttgcaggtctttaaatcattttaggaaaggatgatcaaaaataatgcatccagcagtacaatgaaagtaaaccacaaaaaaaatacctcaggaaagaatagaaagaaagtctatataatggcatgcctatatgagaagaatagcctagatatgaatatatgg

SEQ ID NO: 9198 - DNA, 962 bp, Macaca Fascicularis
  misc_feature (1)...(962): n = A,T,C or G
agcnnnnnnnnnnnnnnnnnnnnnnnnnnnnnnnnnnnnnnngttatgtgaatggactgtaatcagactatactaaacttggttccannnnnnnnnnnnnnnnnnnnnnnnnnnnnnnctannnnnnnnnnnnnnnaaagtgtaactgccataccagaaaaaagagctcccatcatgaaaatgnnnnnnnnggtattttttttatttttgaaggtatnnnnnnnatcttggcacatcatatctatctgtgggaccttgggtccaaaggtcctacataactnnnnnnnnnnnnaattctctgtattnnnnnnnnnnnnnnnnnnnnnnnnnnnnnnnnnnnnnnnnnnnnnnnnnnnnnnnnnnnnnnnnnnnnnnnnnnnttnncccagagaaaagtcctgagatgttaatannnnnnnnnnnnnnnnnnnnnnnnnnnnnnnnnnnnnnnnnnnnnagaaaagctaagaaattcacaaaagtaaaatcagtccctgaaaaacagnnnnnnnnnnnnnnnnnnnnnnnnnnnnnnnnnnnaaggtgttttataaaccagagagtgttttgtttttgttaggtaaagggatttcttcatatgttattttgataaaagggaatttcataggtaaaaaccaatattcaaaattgtaaaacannnnnnnnnnnnnnnnnnnnnnnnnnnnnnnnaaaatttgcaagagattcaacagaaattctttagttgacaaatgtggtttgaagnnnnnnnnnnnnnnnnntatggctaaaccaagagtcttgcttcctgttggcccaaaaacagatgtttcatttcccagataagtaggttctccactgtaaagaaatattcttgtatagtttgtttctacgttctcgaactctgctccaaattcagccaacttgnnnnnngtccttaacacannctgggaacagtcgtnnnnatcaaaccatgtctctgc

SEQ ID NO: 9199 - DNA, 764 bp, Macaca Fascicularis
  misc_feature (1)...(764): n = A,T,C or G
agtaatactacaacacttatggcctgncnnngagnnnnnctnnngattattggtgtgatatgtcttatcagctgcctctctcaagaaatgaactgtgatggtggacnnnnnnntgtgaggaattacttacagaaaccaacttttgcattaggtgagctttatcctcctctgataaatctctgggaagcaggaaaagaaaaaagtacatcattgaaagtaaaagcaactgttataggtttaccaacaaatgtcgtaaaaaccaccaactaaacctacttcaaaaacgaacaaaaaaaagctnnnnnnnnnnnnnnnnnnnnnnncaaaacaaaacaaacaaacaaaaaacaacgtaaagaaagattacttttgagagaaaagtttnnnnnnnnnnnnnnnnnnnnnnnnnnnnnnnnnntatgtataacgtcagcattttaagtaactggcttcaaggggtannnnnnnnnccaaataaaataactccattttctaaaactttcatgtaacttttatgtctggactacagttaaagtggacaaaaacatttctgtattttttttaagtatataagagtagttgaactgagcaatacctcctcctgtgnnnnnnnnnnnnnnnnnnnnacgagtttttgcagtgaccagataaacttgacacgtggtgtaataaaatggacaaattctgtagagtagacacagtgagtatgtggacctcttttataaggaaaaatacattttggattaaaatcaattgcttttgtc

SEQ ID NO: 9200 - DNA, 739 bp, Macaca Fascicularis
  misc_feature (1)...(739): n = A,T,C or G
taaagaatagcatagctcagccacgantaaaatgtctatgnnnngagtaatnnnnncccaagtatnctgctaactggctgcaaagggttaggatctgcttgtttttattaaagactggatggatagaaaatagaatcagctgtagtgttatagtgattatgggaaatcaaagtaagtttgttttctcttgctgttccaacaattataggaaactatggtccaggaggcagtggaggaagtgggggttatggtgggaggagccgatactgagcttcttcctatttgccatgggcttcactgtataaataggagaggatgagagcccagaggtaacannnnnnnnnnnnnnnatcgaaataacaatgttaaggaaactcttatctcagtcatgcataaatatgcagtgatatggcagaagacaccagagcagatgcagagagccattttgtgaatggattggattatttaataacattaccttactgtggaggaaggattgtaaaaaaaaaaatgcctttgagacagtttcttagctttttaattgttgtttctttctagtggtctttgtaagagtgtagaagcattccttctttgataatgttaaatttgtaagtttcaggtgacatgtgaaaccttttttaagatttttnnnnnnnnnnnnnnnnnnnnnnnnnnnnnnnnnnnntgtaataagacataacgtttttcctttaaaaaatttaagtgcgtgtgtagagtt

SEQ ID NO: 9201 - DNA, 730 bp, Macaca Fascicularis
  misc_feature (1)...(730): n = A,T,C or G
gaccaagaagcnnnnnnnnnnnnnnnagaactttacatcaatgaacatnnnnnnnnnnnnnnnnnnnnntgttagaggaactaatgatgactaatccacacaaccacttatactgtacatcaataaacatgaagttaaatatacccaaggtggacttgaaaacctcgaactttcaagaaagtattttgcacaggcattgaagctgaacaacagaaatatgagagctttgtttgggctttatatgtcggcaagtcatattgcttctaatccaaaagcaagtgcaaaaacgaaaaaggacaacatgaaatatgctagttgggcagctagtcaaataaacagagcttatcagtttgcaggtcgaagtaagaaggaaaccaaatattctcttaaggctgtcgaagacatgttggaaacattgcagatcacccagtcttaaggtttcaaaaactctttgacattagatttcacaactgcacaattgaacttattggcctgtaacttatttactaaatgcccagtgctgtttatatactacagtgattttctgttaagaaggcagttgtaaagaatgtgtttatataaacctaaaaatgccttttactgctaagtgggaagatgggggaaatccatggaagagagatttaagacttattgattgtacatcagtctcttcatatcacacatatatatatatatataaaactctaatgtagaataacnntgtaaataa

SEQ ID NO: 9202 - DNA, 549 bp, Macaca Fascicularis
ctcgttcttggcaggatggcttctcatcgtctgctcctcctctgcctcgctggactggtatttgtgtctgaggctggtcctacgggcgttgatgaatccaagtgtcctctgatggtcaaagttctagatgccgtccgaggcagtcctgctgtcaatgtggctgtgaacgtgttcaaaaaggctgctgatgagacctgggcgccatttgcctctgggaaaaccagtgagtctggagagctgcatgggctcacaactgaggaggaatttgtagaagggatatacaaagtggaaatagacaccaaatcttactggaagtcacttggcatctccccattccatgagcatgcagaggtggtattcacagccaacgattccggcccccgccactacaccatcgccgccctgctgagcccctactcctattccaccacggctgtcgtcaccaatcccaaggaatgagggacttctccagaggatctgaaggacgagggatgggatttcatgtaaccaagagtattccatttttactaaagccagtgttttcacctc

SEQ ID NO: 9203 - DNA, 844 bp, Macaca Fascicularis
  misc_feature (1)...(844): n = A,T,C or G
ccagaaggcagaggtgatcatgaactaccatgtcggagagacggtgctgtccttacagaagactacactgatccccggaggctcagaatcacttgtctataccaccttgtcnnnnngaattggcatcntnnngccattcacgtcccatgnggaccnnnnnnnnnnnnnnnnnnnnnnnnnnnnnnnnnnnnnnnnncatccccctctctgtgggnnnnnnnnnnnnnnnnnnnnnncctactacttccctgtgaagaatgtgattgatggnnnnnnnnnnnnnnnnnnnnnnnnnnnnnnnnnnnnnnnnnnnnnnnnnnnnnnngaagaactggaccgaaccccacccgaggtgtccaagaaactcgaggatatccggacccgctatgccttctgagccctcctttccctatggggcttgccagagactgtgtattttgtttcccccaccaccatgccatgtggcaggagggtgactgnnnnnnnnnnnnnnnnnnnnnnnnnnnnnnnnnnnnnncccctcacctcttctcctggaatgactggcttcccctcaaattggcgctgagattggctatacttctccccnnnnnnnnnatgatacatgaccccannnnnnngtgtggaacccaattcccccattccccaaagccatccctacattgatatgtctgactctcctgtctacttttgcacacacccttaatttttaactggttttcctgtaaatacagttttgtacaatgttatttctgtgggaggaaggaaggaaggctgtggtgggactggataggatacagtatcactcctgagttctgctgctnnnnnnnnnaacccagaaaga

SEQ ID NO: 9204 - DNA, 363 bp, Macaca Fascicularis
cccttttttaataataaaatattgtgcaatatattcaacggaaaggcaacacgaataagcagaaaacatacttgctttgaaaaagaaaaaaaaggaaaaaaaaacccaaactgaaattctatatctgttgtgtgggttccaaatgtcgcagaagaaatcatgcagctaaacagtgaagaagcccaaatggagtcccgctttgaagatgacaccttcttatattttcacagcaaatgggtggtatcaaaatccgacattgctttttggtgataaaaagcctgaaggaaataagtgaaaccacatttatggaaaaaaaaaaaaaacaaaacattgagaagtgcaaatgtttgcatcttttgtttt

SEQ ID NO: 9205 - DNA, 731 bp, Macaca Fascicularis
  misc_feature (1)...(731): n = A,T,C or G
gacatttaaaagatggnnnnnnnnnnnnnnnnnnnnnnnnnnnnnnnnnnnnnnnnnnnnnnnctntaattggaaaagcatttgtgttgttttcctgggacaatcttgtcaaagagaaaactggtttttctgtttctagcaaagacagtaaaggcttagaaataaaacctgttttcttgagaaataaatttcagaccgtgggaggaaaatagaacacttcataatatataaaatcctcttaagttggcaactgaatttttatcattgttttctatttttaaaataaccattggtttgtgtgatgtctacatcttttaacttctgcttctgttataaacagtacgtcatggttcataggcagtaacatttcagagaactgacatgaacaagtggtgaaaagtgggcattaaatgtaaaaataacagttcttcataaatagaaggaaaatgaggaaatagaaatactgaagagagagtccttgaaagagacccaaggaaaccctgaattcatacccatgtcaaagatacagatatcctgagatgatgccgcttgatgaatgtgcattaatctgatttatcatgtaccttaagagagccagatggggtagggtatgcttttgtgctgtgatatagtatgtatacaggtacaaatgtaaggccttaagtannnnnnnnnnnnnnnntacaatttggatatttcctctcctcctgtagccatgctttgatttagct

SEQ ID NO: 9206 - DNA, 740 bp, Macaca Fascicularis
  misc_feature (1)...(740): n = A,T,C or G
tgtgagtattcaaagcatgcnntgnnnnntaatattttaataacctccatagnnnnnnnnnnnnnnnnnttaaactgaaancttcattgcagttttattatctggaaagggcnnnnnnnnnnnnnnnnnnnnnnnaaagcaaatgtagaatgaaacaaatcattcactttgtcttattttaaggtgtattggcatgtaatttgcatagnnnnnnnnnnnnnnnnnnnnnnnnnnnttgaggctgtttagggaaatccttattcaattggtggcagtggttggtttaaagtagaaggaaataagatcaccttaataccagaaatgatnnnnnnnnnnnnnnnnnnntcaacaataccatatnnnnntnnnnnnnttttgtgagaagaaatgggtaagtcttaactttcaatgtgtacccaaatacttgtatttatgcttttgataaaatgtattttcagcattattacacatccgattatgccttatttatatacgaagagtaaagttaccatgttatactgttatgtcctaaaattcaaatcactatttgagaaaccctcaaattggtgctttcattatataatgatacatttagacaaaaccccaaaccaagccatttgaaacaagattctctccattgcagtttgtagcaatgttatttctgtgtatatcatgagaaggctaaatatcagtgttaatttcttgnnnnnnnnnntgaaatcgtgcctgtaaagcccaaa

SEQ ID NO: 9207 - DNA, 673 bp, Macaca Fascicularis
  misc_feature (1)...(673): n = A,T,C or G
cannnnnnnnnnnnnnntnnnnnnnnnnnnnnnnnnnnnnnnnnnnnnnnnnnnnnnnnnnnnnnnnnnnnnnnnnnnnnnnnnnnnnnnnnnnnnnnnnnnnnnnnnnnnnnnnnnnnnnnnnnnnnnnnnnnnnnnnnnnnnnnnnnnnnnnnnnnnnctgaccttgtgatccacccgtctcggcctcccaattctgtcaatnnnnnnnnnnnnnnnnnnnnatttactttaccctcattcttgaaggaattttttcctcttaggtgtgtaggattttaggttgacagtattttgtctctgcactttgcaaacatcgttctgtcccccgtctctggcacgggcacctgtagggtcttggccttggtttttggtgcttgtgctcagatgggccgacatgtattctcaacctgttcagagtttgaggcctcttggatctgtggcttgaggccttcatcacgtttcttccagtgttgcttctgcctcgttcttgttcctccaggggccctgagagcctgnnnnnnnacctcttgaaacttcgtcatccctttgtctttcctgtttcctgatagatattctctggtgtnnnnnnnnnnnnnnnttctcttttctggttatatgtcatgtggtggtaaattcatccattgaattctattttttttttttttgagat

SEQ ID NO: 9208 - DNA, 713 bp, Macaca Fascicularis
  misc_feature (1)...(713): n = A,T,C or G
ggaggagtgtatctgtagccatcctgaacnnnaggtcctagnnntgcgtgacagcagtggcagcggtgtggaggaagaccatgaatgcgtgtactgttaccgtgtcaaccggcgcctgttccccgtgcctgtggatcccggcaccccctgccgcctgtgtaggacaccacgagaccagcagggccctgggaccctggcgcagccggcgcaggtcagggtgagcatcccgctgtccatcctggaacnnnnnnnnnnnnnnnnnnnncaccggcggaagagctttgacgcctccgacacactggccctgccccggcactgcctgctgggctgggacgttttccctccgaagtctgagaaaagctcagcccccaagaacctggacctctggtcctctgtctccgctgaggtccagcaccagaannnnnnnnnnnnnnnnnnnttttgcctggtgccgccccccaccccgnnnnnnnnnnnnnnncaggtccctcggccccacgtcccacggcagaagccttgaggactgactcctggaggaggacagcattcccgccgcctccagcctcnnnnnnnnnnnnnnnnnacccaggagatggaagcccctgcccgccccgctcaggcccggctgtcctaggttgggcaggtgggtgggcccaggcttgtctgctgcctgggttccagagaggaaggaccctggggtggagggtgaggga

SEQ ID NO: 9209 - DNA, 715 bp, Macaca Fascicularis
ccccacccctaccccaggctgtactgctcaggctgcagctggacagaggggactctgggctatggacacagggtgagggtgacaaagatggctcggagggggcactgctgctgcctggccactcctccctatgccagcctggtccgtgcagggggctcctgggggtgggggagtgtcacgcggtgcccctagctttatatatggacatggcaggccgatttgggaaccaagctattccttttccttcctcttcggccctcagatgtcccctgatgcacagagaagctggggagaagctttgttttgggggtcaagcagccagtgagatgagggatgggcctggcattcttgtacagtgtatattggaatttatttaatgtgagtttggtctggactgacagcatgtgccctcctgagggaggacctggggcatagtccaggaacaacctaattgggagtccaggcacaggacgctgtgttgtcagcaaaccaagcatcagagggaagaagcagagagatgcggccaagataggaccttggaccaaatccactctcttcctgcccctctttctctttcttcctttactttccctttcttcttttccctcttttcttactcctcctttttctccccccgacccccattctcatctgcaccccattttctcgcgtgtttgcataaacattcttttaacttctttctatttgacttgtg

SEQ ID NO: 9210 - DNA, 746 bp, Macaca Fascicularis
  misc_feature (1)...(746): n = A,T,C or G
catgtatacaactgtgatgcaaatgggtnnnngaaannnnnnnnnnnnnnnnnnnnnnnnnnnnnnnnnnatttagctctccaactaccatacaacgtgcttggtttaggtcggagcgcaaattttctnnnnnnnnnnnnnnnnnnnnnnnnnngtccatctggagaaaaatctatacgaaaacaagagtggactgcaatcattccaaattcccagctaattgtcattccataccctcacaatgtccctcnnnnnnnnnnnnnnnnnntatatcttacaccaagtaacattgttctgnnnnnnnncatagctctcatcggtgtctgtgttttcatcttggcaataattggcattttacattggcaggaaaagaaagcagatgatagagaaaaacgacaagaagcccaccggtttcattttgatgctatgtgacttgcctttaatgttacataatggaatggctgttcacttgattagttgaaacacannnnnnnnnnnnnnnnnnnnnnnnnnnnnnnnnntatttgtaaatgatgtatcccatggtaattattggaaagtattcaaataaatatggtttgaatatgtcacaggtccttttttttttttaaaagcactttgtatataaaaagtttgggttctttattccgtagtgctgtacatttctgttcctttgtggaatgtgttgcatgtactcccgtgtgtgtgtatttataatcttattagtgtcatgatgaggaaaaaga

SEQ ID NO: 9211 - DNA, 734 bp, Macaca Fascicularis
  misc_feature (1)...(734): n = A,T,C or G
tagcaacnnnnnnnnnnnnnnnnnnnnnnnnnnnnnnnnnnngcaagtgactggcactcaccacaacttcttgatgatcctctcttcctcatgaagatatttttgtctctcttgctccaccaggacgcgctgtcgctgcacaggatcctccagtctcttcattgtttctatcactttgccactgatttccagctcggccttcttcatcatcgccctcagcagttcctggttctgcagctgtgaacacaaaaaatcaacttcagtgggcgctgcctgcctgaaatggaggtgagtgaatgcnnnnnnnnnnnnnnnnnnctttgggtagacagccctgtggctgaatctttacttatttcagtgagaaaggaaagggagcaaagactgtacatacagcttcttccaccaacatctgaattttggcnnnnnnnnnnnaaccagactgcctgcaagacaaaggatcctttttctactctggtcaatgcatcacggacaacaggcataaactctcattgacgtatctttacagggagcagcacagggcacctgctttggagccaagaagactttgggtcaaatcgcacactctctccctagcccactgtgagactttgggcccattacttagactcccttggtcttcgtttccttacctctaaggatggggaatccactttccttggccattcttgannnnnnnnnnnnnnnnnnnnnnntatagaacgggaactcaa

SEQ ID NO: 9212 - DNA, 744 bp, Macaca Fascicularis
  misc_feature (1)...(744): n = A,T,C or G
aaccatttaccaactgaaaggacaagagtctagctccggacaaaagctgttaagaggaccaggccgtctgcctgcggtccttcctccctccggccagagtggaggccccaggccgctagcacaggtggaaggctggggccccggggcgggtgctcaggcgggggctcctctgcgcttctctcctaagttctctgcgccccaagaactcgaggttgtgccttgctcttggcggccatgtcctcctcctggcgtggctgtatcggggcgcgggtgggtgtggtgaatgtgggtgtgtcagtgtggcggccacgtggaagcagggcacgtagcaggccaggccaggggcttgcagctcttctgagggcgtgcctggcctcttctggggcctgcgcaggcagcctgtccaccccgccggagttcccacggacgcttctgctcatggtccaaggctgtgtcgtgtggtcattctcaccctcccttttcctctctctgtccctgctccctcnnagaagtactgactggtctctatcgtgtttgctgatccacagtgttgggcacaactttgacatttcttaaaaaaaaaaaatttaaaaaatnnnnnnnnnnnnnnnnnnnngtgtggggcgggcggaggcggctggcggaggtggcgtccgtgcgtgcagggccccttcccgctgtctcaccccgtgtttccctgtaagtgcacgtgcccagctgtccccccaggcctctcctcagtgg

SEQ ID NO: 9213 - DNA, 714 bp, Macaca Fascicularis
  misc_feature (1)...(714): n = A,T,C or G
ggttccaggaagccctgtccaccctgggccacggggccggttggaaggatatttggaacgggaagcacatgagaggtgggcacccgttgccgaggacatagacgagggactggtggctgggagggagagaagggnnnnnnnnnnnnnnnnnnnnnnnnnnnnnnnnnnnnnnnnntcctgctgagcctgnnnnnnnngtggagtcccagggtgctcagctcttcagctgacccttcctcccttatttattctcttttctatttatatgtgtggcttaggaccctccgtgaacagatgatagagggcatctctcctaggtgacccttcttttctgtcccaggagggtgggtaattcccttcaggatggggctcccacacctccctcaggtccccactcnnnnnnnnnnnnnnnnnnnnntctgagaatgttggcagctcacagacagcagggccggcccgggatggggggcaggtactccccacctttctgcctcccttcctgctcctcatccctccctccccctttattaccgttttnnnnnnnnnnnnnnnnnnnnnnnnnnnnnnnntctgtgggaaggagggagccgggagnnnnnnnnnnnnnnntccccagagagatggctttaggggctttatttaaagactgtgatggtggagccacgcaaggctgcacctctgtgtgttgggagacgaatgatgatgtccattgct

SEQ ID NO: 9214 - DNA, 630 bp, Macaca Fascicularis
  misc_feature (1)...(630): n = A,T,C or G
gtctgtgtgccacggtggggcggtgtgacagggtagaggaggtgggagatgagattttccacacaggaacgcaccagtcccccctttctcgagggctgctttccccttgcatcctgggagccccactgccctgccatccccagtactcccgnnnnnnnnnnnnnnnnnnnntcgttggtggccatatgaaaatggccccaagaaggagacgattctttcaagggacacaggcagcttctctccttgtcctctggggaggtgctgaccccgcagaaaccccttccccccaacttgaccccaggctgaacagaccactgcatctcactgggccggcagccacccagctccccagccttggtagggaccaagcagcctttcccgtcccctcctcgacccgcgcagttgagagccaggggctgtcgtgtggagctgctacctggcagtttctcgaggggtcaccgagcctctggtgggacacctgggcaggagtgctctcaccacgaggctgcttccgcagggaaccctggcctgcccgcgacttcgcatcaggnnnnnnnnnnnnnnnnnnnnnnctctctgctgggttttctatgttctttttgagtgtgggagaaaagttttagtagaagg

SEQ ID NO: 9215 - DNA, 757 bp, Macaca Fascicularis
  misc_feature (1)...(757): n = A,T,C or G
gtatgcagtgtnnnnnnnnnnnnnnttatgaagtnnnnnncagattacagctgtcagaaaattcatagaaatgnnnnnnnnnnnnnnnnnnnnnnnnnnnnnnnnnggctggtccnnnnnnnnatatgtttnnnnnnnnnnnnnnnnnnnnnnnnnnnnncttttcaaatgtgggatagcagtggctccagtctccagctgggaatattacgcgtctgtctacacagaaagattcatgggtcttcccacaaaggatgataatcttgagcactacaaaaattcaactgtgatggcaagagcagaatatttcagaaatgtagactatcttctcatcnnnnnnnnnnnnnnnnnnnnnnnnnactttcaaaactcagcacagattgctaaannnnnnnnnnnnnnncaagtggatttcnnnnnnnnnnnnnnnnnnnnnnnnnnnnnnnnnnnnnncggcctgtccacgaaccacttatacacccacatgacccactttctaaagcagtgtttttctttgtcggactaaaaacgatgcagatgcaagcctgtatcagaatctgaaaactttatataaatccctcagacgatttgcttgttttattttttatgttgtaaaatgctggtataaacaaatgaatgctgttctgaaggctggtaaaaaaatgatgaggactaagaagttcaggataaatattgtttacattttctggtactctgtgaaagaagagaaaagggagtcatgcattttgctttggac

SEQ ID NO: 9216 - DNA, 710 bp, Macaca Fascicularis
  misc_feature (1)...(710): n = A,T,C or G
tcttcccattnnnnnnnnnnnnnnnannnnnnnnnnnnnnnnnnnnnnnnnnnnnnnnnnnnnnnnnnnnnnnnnnnnnnnnnnnnnnnnnnnnnnnnnnntttgcctacaaggtacagcctnnnnnnnnnnnnnnnnnnnnnnnccacgcaacaaatgaagtagcccagctcatccagggagggcggcttatcaaatacgagatgactaaaaaggcatctgcataacaatggaaaatgaagaacaaggtcnnnnnnnnnnnnnnntgccagctgctgctgagtcacagatttcattataaatagcctcactaaggaaannnnnnnnnnnnnnntttttactaaccattctatttttatagacatagnnnnnnnnnnnnnnaccaactctctgctgccttacaagtattaaatattttacttctttccttaaagagtagctcaaaatatgcaattaatttaataatttctgatgatggttttttnnnnnnnnnnntgtatattatcnnnnnnnnnnnnnnnnnnnnnnnnnnnnnnnnnnnnnnnnnnnnnnnnnnnnnnnnntaagtactcctaattcttgacattgtctttaatgaccacaagacaaccaacagctggccatgtacctaaaatcttgtccccactgtttaaaaatgttatctgtgtatttccatgcagtgtgtaannnnnnnnnnnnnnnctaaggca

SEQ ID NO: 9217 - DNA, 747 bp, Macaca Fascicularis
  misc_feature (1)...(747): n = A,T,C or G
taagccccaaggagttctatgaactcgatttgtnnctgctggccccctacagcgtggaccagagcctgagcacagcagcttgtttgcgccgtctcttccgagccatattcatggctgatgcctttagtgagcttcaggctcctcctctcatgggcaccatcatcatggcacagggacaccgcgactgtggagaagattggtttcaacccaagctcaactatcgagtgcccagccggggccataaactgactgtgaccctgtcatgtggcagaccttccatccgaaccacggcttgggaagactacatttggttccaggcaccagtgacacttaaaggcttccgcgagtgaatgagtgcttcttaattataaaaacacaatggctgaattatctttcttcatgtggcactgaattacccatctagtttggagctagagtttcttcctggtgagagacgaagcaactctccttctggttgtctgcctcccctcctcaggtttcctgatgggctgatggcatgtggcggtgactgtaatcattgctgaacaacatctctttgaatcaaaggttgattttcccagagggtgctgggtcaggtatttctgttaggggttgtaaagcaaagatgggtccatagacagaaactccatgaaggtggccctttctgcnnnnnnnnnnnnnnnnnnnnaatttttcnnnnnnncataatgtggatgtgacttatgaatttaaatataaaataaatag

SEQ ID NO: 9218 - DNA, 745 bp, Macaca Fascicularis
  misc_feature (1)...(745): n = A,T,C or G
atnnnnnnnnnnnnnnnnnnnnnnnnnnnnnngggaggagaagaaagttcaaggagaaaatgatttaaaatgcagactgggaatcagcacaggaagtcggnnnnnnnnnnnnnnnnnnnnntgtgagcacagaggatttttagggcaatgaaactactctatttgataccacaatggtgaaaaatgtcattatgcatttgcccaaatccacagaatgtacaacaccaagagtgagacttaatataaactgtggactttgggtgataatgatgtgcctgtgtaagttcataaattatagcaaatgtaccactcgggtgggaaacgttgctaatgggggaggctatgcatgtgtgggagcagagtgtgtctggcagcagtccctagccttttttttggcaccagggaccagttttatggaagacaatttttccacagatcgtggggggaatgtgggtgtgatttggggatgaaactgtgaaactgttccacctcagaccaacaagcattagttagattctcaaaaggaacatgcaacttgggnnnnnnnnnnncacagttaacaatagggttcgcgctcctatgagaatctaatgccaccactgatctgacagaaggccgggctcagttggtaatgctggctcacccactacgtggctgtttctaacaggccaccaactggtaccggtccatggccgggggtttggggacctctggggtatctctgtaccttctgctcagtttttct

SEQ ID NO: 9219 - DNA, 679 bp, Macaca Fascicularis
  misc_feature (1)...(679): n = A,T,C or G
gccannnactgnttccagcannnnnnncgagtagcctatcaggatcccagcagtggctgcannnccaagaccctggccgtgcccccagaggcctcgatcgccaccctgaaccagctctgtgccaccaagttccgagtgacacagcccaacacttttggcctcttcctgtacaaggaccagggctaccaccgcctgccccctggagccctggcccgcagnnnnnnnnnnnnnnnnnnnnnnntctaccgccgggcagagtggcctgagnnnnnnnnnnnngcaacagaggaggagggcagagggcagtcagaggcaaggagcagaggggaggagcaagggtgccagggagatgaggacgctggggtnnnnnnnnnnnnnnnnnnnnnnnnnnnnnnnnnnnnnacaactgctgaagggggccagggtcgagcccgtgaaggccctgctcagccaggggagccagaggcagagggaagccgggcagcagaggagnnnnnnnnnnnnnnnnnnnnnnnnnnnnnnggcgggagaccttgcgcctgctgagaagtccnnnnnnnnnnnnnnnccccacccagggccctgtccagtgtctgccaccacctttgtctgatacttgtctccagggaagnnnagggaactgccacatctgaggaactggaataaagatgaggggctc

SEQ ID NO: 9220 - DNA, 736 bp, Macaca Fascicularis
  misc_feature (1)...(736): n = A,T,C or G
ataaagcatgataaagattattannnaagatatacttgtatttatanctcagatattcttttgggttttgtacctcaaggcttttttctccttattgtaaatacactttacgtgaatacagtctaagtgaagaaaataaataaaaggaagaggtttataacttgctctatatctgtacagaatataatcaataagtgcactattaaatgtttaaagtaagggaaacgtctgggctgccttccttaatattgcatctnnnnnnnnnnnnnnnnnnnnnnnnnnnnnnnnnnnnnnnnnnnnnnnnnnnnnnnnnnnnnnnnnnnnnnnnnnnnnaggaaaaatcggactgcaaatcattccaaggccaaactgcaactgagccacccactcccaacaggaaaccctggtgaaggttcaggaagcacggagattctctccaaacaaaggtccagttaggaaacgacgctgagaggatgacaagaacgtgcaacagcagannnnnnnnnnnnnnnnnnnnnnnnnncgccgacgaatgccacaaaaggtctctttcccactatttaatttgacaagagaaaaatttgaaggatatgaacattttcaagaactctgctgagatcaattagagcgccatcacaacttatttgtgtgactaattgtctagattgtaagctctttgagggcagggctcgtctcctacacatctttataatcccctgcagcagctttcagtatt

SEQ ID NO: 9221 - DNA, 719 bp, Macaca Fascicularis
  misc_feature (1)...(719): n = A,T,C or G
aggccatcagnnnnnnnnnnnnnnnnnnnnnnnnnnnnnnnnnngtcctcatgaacnnnnnnnnnnnnnnnnnnnnnnnnnnnnnnnnnnnngagtacnnnnnnnnnnnnnnnnnnnnnnnnnnnnnnnnnnnnnaggagaactcagagagcaaggagacagggctgtcacatctgnnnnnnnnnnnnnnnnnnnnnnnnntcacagtgctggccaccnnnnnnnnnnnnnnnnnnngccaggaggttcccaagaccaccaacccctcaaagtacatccgcttcatttatnnccgagtgttcttggagcatgaggagttccggccaggtgctgtgagtgctctggccaattttggaggcccagaatgaagagatgttacccagtatcttggtgttgctgaagaggtgtgtgatggatgatgacaatgaagtaagggaccgagccaccttctacttaaatnncctggagcagaagcagaaggccctcaatgcaggctatatcctaaatggtgagtcattccctagctaccttggactcagcaccttactggagctgtggttcttctcatcactccctgggcaggggaaatccgaggcaagatgctcgtggctggacttgcctggtaaccacatggcatcacggtgacctcaggaggtcctgggtcattcaggtcacaccagtgtgggtggaaattgtccagtgaatcaaactctcatcat

SEQ ID NO: 9222 - DNA, 757 bp, Macaca Fascicularis
  misc_feature (1)...(757): n = A,T,C or G
atggatggggaactcagatccagggacagaggccccagcctccntgaagcctttgcattttggagagtttcctgaaacaacttggaaagataactaggaaatccattcacagttctttgggccagacatgccacaaggacttcctgtccagctccaacctgcaaagatctgtccacagccttgccagagatccaaaagaaggccccagctaagaacttggaacttggggagtaagacctggcagctctggacagccccaccctggtgggccaagaaggaacactaactatggatggtgccccaggaccagctcaggacagatgccacaaggatagatgctgcccagagcccagctcgaaggggaatcagaactcaaatggggccacatccagcctggggtctagagttgatctggaacccagactcagacatgggcacctaatccaggcagatctgggactatatttgggcctgctccagacctgatcctggaggcccagttcaccctgctttaggagaagccaggaatttcccaggaccccgaaggggccataatggcaacagatctggaacctcagcctggccagacacaggccctccctgttccccagagaaaggggagcccactgtcctggacctgcagaatttgggttctgcctgccagctgcactgatgctgcccctcctctctctgcccaacccttccctcacctggcaccagacacccaggacttatttaaactctgtgcaagtgcaaa

SEQ ID NO: 9223 - DNA, 702 bp, Macaca Fascicularis
gcaaaagctgcgcagttaagtagaaaaatatacttaatttggagactcttacagtaacttttgccatagtcaaaacaatggcttttacattgaaagattaatagaaactctacgtatgttaatttttgatggaacctgactcaaatcaaggtactctccattttattgccttacctgaatcagtcctttttggttggtaatagatttttttaatacacccaagtttgatttaaaagtaaattctagttattaagcacttttaataagaaatccagaagcacatttttctgcacaaatcagttacaaagttcaaaagtgtttcttatgcatttgctttgagattcagtttttaactttgtaaaccacatctaagagacttgtcatttctacattattgtgtgtgtttaatttcttctgattctattttggttaagagagcagtaaattttctggtattcttgttcacttggttacatttgtataaagttctcattgccagttgctcagataacaagtgacatggcagaattctttaaagcagtaaagttccttaagcctaaggctaaatcttgaatacattgttgaattctttaatatcctgatggcaagcagattgatagctgcacatttggcatgctttgttttatggattttatttttaattgcagatttatttggcaatgtacagtaaattttgtaaac

SEQ ID NO: 9224 - DNA, 789 bp, Macaca Fascicularis
  misc_feature (1)...(789): n = A,T,C or G
actggctgggagtnncatnnntcattannttcctcgcctacctgtgcaacgcccagatcaccatgctgcagatgttggcactgctgggctatggcctctttgggcactgcattgtcctgttcatcacctataatatccatcttcacgccctcttctacctcttctggcttttggtgggtggactgtccacactgcgcatggtagcagtgttggtgtctcggaccgtgggccccacacagcggctgctcctctgtggcaccctggccgccctacacatgctcttcctgctctatctgcattttgcctaccacaaagtggtagaggggatcctggacacactggagggccccaacatcccgcccattcagagggtccccagagacatccctgccgtgctcgctgctgctcggcttcccaccaccatcctcaacgccacagccaaagctgttgcggtgaccctgcagtcacactgactccacctgaaattcttggccagtcctctttcccacagctggagagaggaggaagactattaaaggacagtcctgatgacatatttcttagatggggtctgcagctgccactgagctgtagatgcattaagtacctccttgatgcctgttggcacttctgaagggcacaaggccaagaactcctggccaggactgcaaggctctgcagccagtgcagaaaatgggccagctcctctgagacccctcaccacctaccccttccttcctctttatctctcccacactgtcttgctaaatatagacttggtaataaaaa

SEQ ID NO: 9225 - DNA, 754 bp, Macaca Fascicularis
gagtggaatgtgaccagtcaagtagaaatcttgagtaatcagatggaatgcaatctttctaacattaagctaccaagatcctgaatgtcagagatgtactcagagggttaacagacaagcacaaggcatgctgactacattggtgtatccagattgctttgcttttagccagtgctttctaatttttttctcgacattcttgggatagttcaagtttgaaataattaagtggtggtgttctttaaggaatttctataaccaaattgatcttatttttgatttcacttatcatagaacaaatatgtatcattatggcagtgtatctatgtaattatcaatttaatcatcaccacaagtgtttccatattttttcccaagtatttaatatagctctcttatggtggtggcctggtgatggggaccatctttcttttactgacacatgaccaaccatatggtattttcaagggaattttaagattcatcttttcagtttgatagtagactagctaaggaagaactctttcattacttgcatcgtgtaaatcatctctgtagacatgtgttcatattaatgaacacattttttctcaacattgtagcagaaatcattttattcgtcatgatcaatgaatatgtgatttgctccagatcattagaaggaaaagtaagatttcagtcatcaaaaatgtttttaccgtagccctcatctaacttacacgtggtgcatattaaaataaacacagaaaaaaaa

SEQ ID NO: 9226 - DNA, 603 bp, Macaca Fascicularis
  misc_feature (1)...(603): n = A,T,C or G
agatgatgatccagcaaatagggccacaacnnnnnnnnnnnnnnncggtgtccagagggtttcctatcgctgaggtgttcacgctgaagcccctggagtttggcnnnnccaacacgttggtctgttttgtcagtaatctcttcccacccatgctgacagtgaactggcagcatcattccgtccctgtggaaggatctgggcctacttttgtctcagctgtcgatnnnnnnnnnnnnnnnnnnnnttcttacttaaacatcacaccggaaccttctgacattttctcctgcattgtgactcacgaaattgaccgctacacagcaattgcctattgggtgccccagaacgcactaccctcagatctgatggagaatgtgctgtgtggcgtggcctttggtataggtgtnnngggcatcatagtgggcattgttatcatcatnnattccggaagcctagatcaggtgataccacaagatnnnnnnngacacatcatcnnngaaggcacatcaaagcatagtcaagatagnnnnnnntacaccagacataagaaaccaaaagcattcatcatatacagcacaaatccagcccagtattnnnnnnntc

SEQ ID NO: 9227 - DNA, 751 bp, Macaca Fascicularis
  misc_feature (1)...(751): n = A,T,C or G
atacacatnnnnnnngatgaccatatggttatgnnnactgcaaggtgaaaggaaccctccattgtatttaggattgtatttaggnnnnnnnnnnnnnnnntggccacctgctctgaaagtcaaaaggaaacataaattagtgttattagtatgttggaagagaaatactacttttctttttcacaggagttctctggccctgtgaactccaccttgagcaatgtcacagattacagttattttgcaggtgaattaagcttcaccaaagaaaagtgagtcaaagttaatgtgtgtgtgcatttatatgtaggcagctcatagaccacatnnnnnnnnnnnnnnngtaacaaagagcttagttttccttgtttgaatgctgtagatctatacctagtacccctcccatctactgatttgtttgtttttataaccaaacacattttcagatagaaggagccttaaaaaaaaaaatcacattgagtaacttcagtatgaatgaatgagagtgtgcggagctacccctcaccctccacccctttgtggtttattccctaattttcnnnnnnnnnnaaacagaaaaaatgannnnnnnnnnnnnnnnnnnnnnnnnnnnnnnnnnnnnttttttagagggagaaataagttttccccaactcacacagcataagcaatgtttgacagcaatataatgccgttgnnnnnnnnnnnnnnnnnnnnnnctgttctggtagccatgtacagaatgtgaaac

SEQ ID NO: 9228 - DNA, 755 bp, Macaca Fascicularis
  misc_feature (1)...(755): n = A,T,C or G
tgcatgctctattctaagtagaatgttcaatgtaactgactaaaattgcatgttaaagatatttaggtttttttgttttctttatttttatttgttttcagtttcctgtatatttgcttactgtgccgttttagtggttttaggataaaaatgcactggtgaagcaaatgtagtgccaacagaaggtgattttccagttgtaaatgtcatgcagcatttgaagggactgtgttttctttaaaaaaaatcacagttacttctaaatcagatttcgtttcttttatcgttttatgtgccaaaccacgaagtgcattgggcttgaatctctgaacactgtagacccattagaagactgttnnnnnnnnnnnnnnntgtagtgcctgaaaacactcttaagatgattgtcttaaaaaaatgaaagttctccaaagacaaaacaggaacaattattataacaaaataattatggttgaaatgtctgtggttccttggaaanggtgcgctctttgtgttctccatcattagtgcagttggaatgaatgtgtacaggtcagaggtcttcgtgttcacgttttaaaattaggtaaatgacctcatctttcaagcttgaattcatttttaattttaattttattttatacanntgtgtannnnagttnnnctgnctgcatttagaagtatacacaatataaatctgttaattctgtaagtaatttttataattatgatgtaactactaccttatgcagagaaca

SEQ ID NO: 9229 - DNA, 755 bp, Macaca Fascicularis
  misc_feature (1)...(755): n = A,T,C or G
gcccagactggannnnnnnnnnnnnnnnnnnnnggccagacagaaacnnnattaacttgcgtagtttccaagacgatgaaaatcaaaccaggatacatgggaatagctgctccccattatgatgtacaggtcatagatgataagggcaacgtnnnnnnnnnnnnnnnnnnnnnnnnnnnnnnnnncagggtcaaacccatcaagcctataggcatcttctctggctatgtggacaatcccgagaagacagcagccaacattcgaggggacttttggctccttggagatcggggaatcaaagatgaagatggatatttccagtttatgggacgggcagatgatatcattaactccagcgggtaccggattggaccctcagaggtagagaacgcgctgatggagcaccctgctgtggttgagacggctgtaatcagcagcccagaccccgtccgaggagaggtggtgaaagcatttgtggtcctggcctcgcagttcctgtcccatgacccagaacagctcaccaaggagctgcagcagcatgtgaagtcagtgacagccccatacaagtacccaagaaagatagagtttgtcttgaacctgcccaagacttccacagggaaaattcaacgaaccaagcttcgagacnnnnnnnnnnnnnnnnnnnnnnaagcccgtgcgcagtaatacatctaggaggcattcatttggattcccctcttctttctctttcttttccctttgggcccgtggcctta

SEQ ID NO: 9230 - DNA, 165 bp, Macaca Fascicularis
caccagagcatcaagactgcacactgtcttctccattttccagcaggaacttctagctcatttaacagataaattgaggcccacggtttcagctagacaatgatttggccaggcctagtaaccaaggccctgtctctggctactccgtggaccacaaggctgatt

SEQ ID NO: 9231 - DNA, 706 bp, Macaca Fascicularis
  misc_feature (1)...(706): n = A,T,C or G
aagccctcaagaagtacttattctactttgagaggtgggaaaaccacaacaaaagcttgcagcttgaggcacagacataccagcggattcacgagaagattcaggagagggtcatgaannnnnnnnnnnnnnnnnnnnnnnnnnnnnnnnnnnnnnnnnnnnnnnnnnncttggccaagtgtcgatacaccctgcagtacacctacccatatgcatattacatggagtccggacccaggaagaagctgtttnnnnnnnnnnnnnnnnnnnnnnnnnnnnnnnnnnnnnncctctcatggaaagtggagcgtgcagacagctatgacagaggggacttggagaaccagatgcatatagcggagcagcggaggagaaccctnnnnnnnnnnnnnnnnnncacctaagttgggatgtggatgtgccggggtgaggaagatgnnnnnnnnnnnnnnnnnnnnnnnnnnnnnnnnnnnnnnnnnnnnnncctttcatgaccccaggcgacagccagggccccactcctgagagacactggcaacacctcttagttgatttctgttttcttctcttttcactttttgtttctaccagggtagaggccatgttgaactggcctcttttcaggacttttatttccccctggatggttgttgggagggaacgtgtttnnnnnnnnnnnnntaatagtattagatcattacaactt

SEQ ID NO: 9232 - DNA, 796 bp, Macaca Fascicularis
  misc_feature (1)...(796): n = A,T,C or G
cagcagtgtgnngatttgtgtgaaacnnnnnnnnnnnnnnnctcatnnnnnnnnnnntatatgtgtgtgtggtgaactgctgccattccaggcctctcctctaccaaagtgttgtctttaatgtgctgtgtgtggacaggtagaagggctataccatgnnnnnnnnnnnngaagtacatnnnnnnnnnnnnnnnnnnnnnnnnnnnnnnnntgggatgaaggcaaatgtgggcacagtctctgcatactgtactgcctttaaaaatttgccagctgtttaatatggagagcctatgagagtaatattcacctttgtttattctttagattgaccctgctacgggaatggttatgaatttggctgatctcaaaaaatatatggaggnnnnnnnnnnnnnnnnnnnnnntcataagaatctggatatggatgtgccatactttgcagatgtggtgagcacgactgaaaatgtagctgtttatatnnnnnnnnnnnnnnnnnnngttcttcctgtaggagttctttataaagtaaaagtatatgaaactgacaataatattgtagtttataaaggagaatagctattaggggttagcactgtacaaagcccagtttccttctgtgtttgaaaaagattttgatccccttggaatattaagaggtcaacacgtgattgttgtacctccacattgtgctctggagtccctatttattgaaatcattgtaagacctgttataaatataagtctatttaaaactaaacttgtaatatattctgaaaatcatttagagagtctt

SEQ ID NO: 9233 - DNA, 748 bp, Macaca Fascicularis
  misc_feature (1)...(748): n = A,T,C or G
tgactcacaagatgctgctcttgctcagnnnnnnnnnnnnnnnnnnnnnnnnnnnctgttgagatataaaggcccctcggatcactggattgggnnnnnnnnnnnnnnnnnnnnnnnnnnnnnnnnnnnnnnnnnnnnnnnnnnnnnnnnncagtttcctatcctgggagcaggagagtatgcctatttgaatgacaaaggtgccagtagtgccaggtactacacagagaggaagtggatttgttctaaaccagatacatatgtccagatggtacagcaaagccccaactaatctttagaagcccattggaactgataaccccattttcccattttagaatgagcaacgaatttatttttttaaattgtatttattttctgttgttgttgnnnnnnnnnnnnnnnnnnnnnnnnnnnnnnnnnnnnnnnnnnnnnnnnnnnnnnnnnnnnnnnnnnnnnnnnnnnnnnnnnnnnnnnnnnnnnnnnnnnnnnnnnnnnnnnnnnnnnnnnnnnnnnnnnnnnnnnnnnnnnnnnnnnnnnnnnnnnnnnnnnnnnnnnnnnnnnnnnnnnnnnnnnnnnnnnnnnnnnnnnnnnnnnnnnnnnnnnnnnnnnnnnnnnnnnnnnnnnnnnnnnnnnnnnnnnnnnnnnnnnnnnnnnnnnnnntggcaagaatttatttcttatactaacaggtatatgaaaatgtactcaatctcactnnnnnnnnnnaaaatacaaataaaaatca

SEQ ID NO: 9234 - DNA, 563 bp, Macaca Fascicularis
  misc_feature (1)...(563): n = A,T,C or G
aagtttttgtttcttcagtttcttctgggatatctttttctnnnnnnnnnnnnnnnnnnnnnnnntaggaacaatctgttccttttcagtaaggatcatctcaatgtggcagggagagctcatgtatgggttaatgngaccatgagctctgtaggttcgtcggcgcatcttatgtgctttgttnnnnnnnnnnnnnnnnnnnnccatagaatctacatctaaacccttaagttcagcattactctctgcatttnnnnnnnnnnnnnnnnnnnnnnnnnnactcttcttgggccaccgaccctgtgtccagccccactgcttggcctgggcacacctgccaactccaccattgtaacgtcggaatggtacgcactgtttctgtaaagtgacatctttcagatacttcgtggcttttcgaatatgcatacccttgatggcctgggcagtttcacgagtgttcttaaagtgaacacgaagattggaacctcttgatttgcatgatttcgtggggttctccgggtcaagtgaatagcgaaccattttcacagattacctcaggccgc

SEQ ID NO: 9235 - DNA, 751 bp, Macaca Fascicularis
  misc_feature (1)...(751): n = A,T,C or G
caggaggatgnnnccaagagatatgagtgtgccaactttggagagcaaggcatcaccgtgggttgctgggatctctaccggcatgacattgactgtcagtggattgatatcacagatgtgaagccaggaaactacattctccagattgtcatcaacccaaattttgaagtagcagagagtgactttaccaacaatgcaatgaaatgtaactgcaaatatgatggacatcgaannnnnnnnnnnnnnnnnnnnnnnnnnnnnnnnnnnnnnnaagaggccaacaggaggnnnnnnnnnnnnnnnnnncagaccnnnnnnnnnnnnnnnnaagtgccatcgccctctgcaaaccaccactggcccctaatggcaggggtctgaggctgccattacctcaggagcttaccaagaaacccatnnnnnnnnnnnnnnnnnncagaccatgtactatggatgtnnnnnnnnnnnnnnnnnnnnnnnnccctccttcnnnnnnnnnnnnnnnnnnnnnnnnnnnnnnnnnnngaatcttttctcccaggcccagcaccgagcagaacagagcagagctcaccacaccacaaagagcagcacctgactaactgcccacaacaaaagatggcagcagctcattttnnnnnnnnnnnnnnnnnnnnnnnnnnntccagtatctcccctaaccttagggggatacagctttacctctnnnnnnnnnnnnnnnnnnnngntccagccctcccacctcattttg

SEQ ID NO: 9236 - DNA, 663 bp, Macaca Fascicularis
  misc_feature (1)...(663): n = A,T,C or G
tgacaaatttcnnnnnncnnnnnnnnnnnnnnggggctgggcaggccagctggagctgtgnctcctgctgggnnnnnnnnnnnnnnnnnnnnnnnnnnnnnnnnnnnnagcaatttaaaacgtggtattgttcctggaagactggttatgttggctagggtcagcaagagagggcatcaaggctgtagtctagcagtgacttaatctgcaagtcacaccagacgggtattttgtattattcatatgtcagatcctaccaacaggcagtgagccaggcagagctcctggtgctccttgtcactcacataattttcacatcaagaaaactctgggccgggcgcagtggctcacacctgtaatcccaacactttgggaagccaaggnnnnnnnnnnnnnnnnnnnnnnnnnnnnnnnnnnnnnnnnnnnnnnnaaccccatctctaccaaaaatacaaaaaattnnnnnnnnnnnnnnnnnnnnnnnnnnnnnnnnnnntannnnnnnnnnnnnnnnnnnnnnnnnnnnngagtctgggaggnnnnnnnnnnnnnnnnnnnnnnnnnnnccactgnnnnnnnnnnnnnnnnnnnnnnnnnnnnntctcaaaaataatttaaaagcctctgccccaaactcgttaaaagattttataaccacaacta

SEQ ID NO: 9237 - DNA, 726 bp, Macaca Fascicularis
  misc_feature (1)...(726): n = A,T,C or G
taagtgaagcttctggaggtagnnnnnnnnnnngtnnnnnnnnnnnnntggaagaggacaacgaaagggagggaccggaaaatggagccnnnnnnnnnnnnnnnnntgatgaaaatcttttcactggagaggatttggatgaactagaagaagaattaaatacacttgatttagaagaatgacatcaaacacgtcgctgaaaaaattaagtcagctcagcatgagttgaaattgactacattaatttctttccacctagaatcaacaggatgtttatttcctatgctgattctgaaggagttaacctcctgcgaaaaaggaatattgtccctacgtcttctcttctgactttggctacatctcatagtaagttcagagtagttcatgataaattgaaaatataatggtcattgcagaaaatgattgattgttgtaactgtccacccaagtaagaagtgtatctgcttttccatctttggttttcatttgggcatgtgctattaccagaaacaacaaacttacatttaaaatacccttcatttgacacagtttttaatgagtgatttcatttcctttgtannnnnnnnnnnnnnnnnnnnnnnnnnnnnnnnnnnnnntacttcataaaggaaactgcatatgcagattcagtattgtatatctttggacaattagatggacatttaaaatggaacttcttatatctgacaggatcagctacaatgc

SEQ ID NO: 9238 - DNA, 755 bp, Macaca Fascicularis
  misc_feature (1)...(755): n = A,T,C or G
acaaaaggcaacttaaaacaaaatatcannnnnnnnnncggggaggctgaagggctgggaactgggaggagacgctgcttaccgatcccggggcttttccagcccatgggcgcctgaggcaggctggggcaagtggtgtgtggggcctggtccccagggggcggctgggaggccgccactgagcatctctatctgtcattnnnnnnnnnnnnnnnnnnnnnnnnnnnnnnnntttttattgcagatgtgtagctctatgtcaaatagagggggaatggaggaccccctccttcctgcctcatggctgttcttgaaannnnnnnnnnnnnntctatgaaaaaatgtaataaaaaattaaaaaaaaaacaaaaaacaacaaaaaaacaacaaaaaaaggaaatannnnnnnnnnnnnnnnnnnnnnnnnnnngataatagttctttgatactttgagaggcgcnnnnnnnnnnnnnnnnnnnnnnnnnnnnnntttcctatggttttctgtattctatgtctggatggagctgttaaggtgaacaaattggtggatatttggggaaagcaacacaaatcttaaaactcattaaccgtggagtgtgagaaaacaaagaggggannnnnnnnnnnnnnnaagcaaggtnnnnnnnntgaaaagtctgtaaatgcttctaactcttccccctcttaaaatcctaatagttgtacagaattttaaaaaggaaaagttaaaatacctatataatagaagaaa

SEQ ID NO: 9239 - DNA, 731 bp, Macaca Fascicularis
  misc_feature (1)...(731): n = A,T,C or G
gacattaggaatttcactttagaatgcgcattacaaatttcttaggtgttccaggaattatcaagtgactttaaaatgactttttcaacctgctttgtttttaaaaattatattccagttttaatcattgtaaaaaaagcacctggagtttcaaaatatgtgaatactaccaagtttctgtccccaaagtcaggcatcactgctagtcttttgggacagatgggacagatgttcacttgaatgttttacttgaagtttcactgctcttggccatgtggtaaaaagagcctgagacatgtaagaattcccagaggatattatgtgtcagaatttcggacactgatgcgaagtttttaattgttctttttaatttgattttggaattcaggtgtactctattcaagtgcgaggagatcagaagttttttttaatttttttatttaaaaaatgnnnnnnnnnnnnnnnnnnnnnnnnnnnnnnnnnnnnnnnnnnnnnnnnnnnnnnnnnnnnnnnnnnnnnnnnnnnnnnnnnnnnnnnnnnnnnnnnnnnnnnnnnnnnnnnnnnnnnnnnnnnnnnnnnnnnnnnnnnnnnnnnnnnnnnnnnnnnnnnnnnnnnnnnnnnnnnnnnnnnnnnnnnnnnnnnnnnnnnnnnnnnnnnnnnnnnnnnnnnnnnnnnnnnnnnnnnnnnnnnnnnnnnnnnnnnnnnnnnnnnnnnnnnnnnncatgccggcc

SEQ ID NO: 9240 - DNA, 748 bp, Macaca Fascicularis
  misc_feature (1)...(748): n = A,T,C or G
tcattgcccagcagtgggaggggcaggggtaatgggacccaaggataaagggtggggaaacagggtcccctgaggcctgtgggggctggaggggaggaggttataccttgtgtctgtttcaagtgccttaatccgagccagcagggccctctgcttgctcgctgccatactgtatgtaggaaagtgctctgtggctgctttgtgtcaagagaagagcagtcactctcagaatcttgatttccccatcagccaaaacaaaagatggctgctgctttgtaggcatgtgcttgcaagtgggaccttgctgggcattatatgccctatgggggtttcagagaccctgaaggaggaaggaggacccgcctccttgtttgcacaactgcatgcacttctgtccccatcgctccactccctgaaaccaannnnnnnnnnnnnnnnnnnnnnnnnnnnnnnnnnnnnnnnnnnnnnnnnnnnnntcctttcccttcgcgtggtctgcgaagagcagggtgagctgccagctgcccctctccaccagggtgccccatcttggtggttaggggccacttttcctttgaggctctggtggaggtgggtatccttctctgccaggcctggcacatgatgtgaagaaaaaatgcccaattcttactgttcaggtttgatgtagaatcacagctgcagtgatatatatatattttttatcagcgcttggttggttttaaataaaatgcacgctattttatat

SEQ ID NO: 9241 - DNA, 728 bp, Macaca Fascicularis
  misc_feature (1)...(728): n = A,T,C or G
gcatcacagatnnnnggtgatnnagttccggatatgatatggggccagcgggtcactgctgtggtgaccctccgagannnnnnnncactgtcccacagggagctcaaagagtgggccagagatgtcctggccccgtacgccgtgccctcggagcnnnnnnnnntggaggagatcccgcggaaccagatgggcaagattgacaagaaggcactcatcagacgcttccacccctcgtgacccgcgcaccaggggctgggcacttggactgcgggtctggcggggagcagcagacgtctccctcacaccgagcaccgcgggggcctgtctgagacctggcctcccttaagcctgaatgccccaaatcgggtcacgtagaacaaaaactgtttgnnnnnnnnnnnnnnngtgaggtccccagccttggaccagttgttgcagctcaaggagaccgtcnnnnnnntcacctctgcctggtcaccgccgacctcgcagcccgccccacgtgcccacggctgcctagttaccaccgacctcgcggccggccccacgtgcccacgtctgcctggtcaccaccaacctcgcggccggccccacgtgcccacgtctgcctggtcaccaccgacctcgcggccagccccacgtgctcaggcacctcccgccccacagtgccctgcagttaccaggctctccagggtgggtcccggaggttcccccaaaaaagaaaaaag

SEQ ID NO: 9242 - DNA, 586 bp, Macaca Fascicularis
  misc_feature (1)...(586): n = A,T,C or G
gcagcacgcccaggagnnnancgtgnnnaaacagccgccgccccccagcccggagccgcccgaggacggtgatgactnnnagactgacgcagagctcaggccaccgcccccggaggaggacaaccccgaagtggtcaggccgcacaatggccgagtagggggctccccagcgcggcatctgtactccaagcgactggaccggagtgtctcataccagctgagctccctggacagcaccgccccccacacgctggtccatgacaaggcccaccacaccctggctgacctgaagcgccagcgagctgccgccaagctgcagcgacccccgcctgaggggcccgagagccccgagacggcggggcctggcctgcctggtcacacggagaccccccagcctgactgtggcttcagggcaggcggggacccaccgctgctcaagctcacagccccggcggtggaggctcctgtggagaggaggccgtgctgcctgctcatgtgaggcggctcctcggcgggcagggctcctgtccctgggcacagcccaaggttgcctccccacggtgcatgccctggtgctgcgggtggg

SEQ ID NO: 9243 - DNA, 1041 bp, Macaca Fascicularis
  misc_feature (1)...(1041): n = A,T,C or G
agtagaccagaactgaccnnnntcannnctacttcagaaaacnncnnnnngcttttcaatgatctgttaaaaaataatgcannnnngtgctgaaaatacagagagaaagcaaaatcagaattattttatggaggtgatgactgtagaaggagtctnngattannngatgtatgtaggacgggtagttttccaggttcctgactggcttcatcatctcttaatgggaactcgaatcctctttaaaaacaccctggaaatgtatactgactactatcttcagtgtaaactagannnnnnnnnnnnnnnncaccgtttggtctcactcataacacttnnnnnnnnnnctatattctgtgaaaacactgaacctcgttctctccaagataagcaaaaaggagcaaaagcaccgtttggtctcactcataacactacattagagatctgttagtcaagtgtattggtgaagaaaccaagtatgaaagcatcagacttctgnnnnnnnnnnnnnnncagccagtactcaacaagcagctgacttatgttttattggacattgtgatacaggaactgtttccagagctcaataaggtacaaaaggaagttacctctgtgacatcttggatgtaaacacttggatttggtatagaataacccattgaaatttctgctgtgctagggtggtataagtgtacttttttgggtatattcttatatatattatgtacattgctgtctgaaattttaattattttttgtttttaataaagactaacataaacttaataatgattaaaagtgattgagtctcatagcctgtcatttgctagccatgnnnnnnnnnnnnnnnnnnnnnnnnnnacttgttattgccatttttaaaagagaaaattcgtaatgatagggcaaacagataagactgataaacttcgtattgtataactttgaaaataattatgcctagtatggagaaacaggagtaagatctgattttcttatgtagacttaatatattttagtagattggttttcctttttttattt

SEQ ID NO: 9244 - DNA, 813 bp, Macaca Fascicularis
  misc_feature (1)...(813): n = A,T,C or G
agaacttccaggcntnnnacctcgantctcaccgcagcccnnnnnnnnnnnnnnnnnnnnnnnnnttcctccacatccgagggacacaggagcagctaggatctgcattttcaggttccgagcctgacccctggaactgaccagtgctcaattgtcagacttggcctatggttttgaccttgccagtgaagtttcagttttgaagtgattaaatgtcactttctcatcagtttcacttctggaggttttctgatcccactccctggtggcagggatgtacctgggannnnnnnnnnnnnnnnnnnnnnnnnnnnagccgtgttgggtgaaggtcaggggctcagtgaggcactgggggggttttcaggaggaaaatgaaaatggctgtataaccagtgaaccacatcatagctctcactgttcttatttttcaatagcttttttttttagcatagacaccagagccacattcaaatggcttagtaggttatgacctctctttgaattatttctgaatgcccaactgttgcattcaagttttctgactaatcaagaaattaagcgttcatccttcgtatcactgcagaagcaacagtggggggacagggagggaactcttgacactgagccactaaaatatggactaattttttggacaaatcttcaaacggactgtgctactgtttttgtttcaaagctaccaagtttgtgcaataagtggaagggatgtcatctctcttcaataaatgctgaatgacattcaagttgattttctagaccactgagaaaatgtcaaacctactaagccattga

SEQ ID NO: 9245 - DNA, 751 bp, Macaca Fascicularis
  misc_feature (1)...(751): n = A,T,C or G
tcaaagtttgaaaagatgtttggatatatttgagtattcagatcatgaaaacagaaattgccctgcctactacaaggacagactgatgggaaattatgcacctggtcaacttagcttttaagcagacaatgctgtaaaaactaatggcttctctggtatttattataagttttagtactgatctccttttccagtgctgcacactcctgtgtttggaactttaatagcattgcaacgaaatcttatatccagtttcctgtaatttaattgaagaaaaatacgtccaaataaagactttattattaacagaccagatagcatcagaaatcatgtgactattatgattatcagaatatgtcttaactttttagggcaaagttaacactgaaagttacagcttaagtgttggaacttttgtggcaaaaacatcacttttgaaactcagacttcagtgtatacccaataatttaaaattatgtgaaatgttttaaatttgtgaactcgtaattactgttttaatgattcagtttcttgagagtggtaattgtataaaattgcttttgcagctttatattcnnnnnnnnnnnnnnntaaaccaaggagttttccccgtttgtaaaaagacattgtagataattgaatgtttgattttagaaaggtcattagtttcttgttacacattttgttagtctggtttttgttgcttatcgggtttaatattgttcttgaaaatagttgatgctatgttatg

SEQ ID NO: 9246 - DNA, 788 bp, Macaca Fascicularis
  misc_feature (1)...(788): n = A,T,C or G
gcagagtcctgnnnnnncggccnnnnngagccgggagctgcccggcagccccggatcatggaagagaaagcgctagaggtttatgatttgattagaactatccgggacccagaaaagcccaatactttagaagaactggaagtggtctcggaaagttgtgtggaagttcaggagataaatgaagaagaatatctggttattatcaggttcacgccaacagtacctcattgctctttggcgactcttattgggctgtgcttaagagtaaaacttcagcgatgtttaccatttaaacataagttggaaatctacatttctgaaggaacccattcaacagaagaagacatcaataagcagataaatgacaaagagcgagtggcagctgcaatggaaaaccccaacttacgggaaattgtggaacagtgtgtccttgaacctgactgatagctgttttaagagccattgcctgtaattgtttgatatatttgtttaaactctttgtataatgtcaaagactcatgtttaatacataggtgatttgtacctcagagcatttttttaaaggattctttccaagccagatttaattataaggtagtatctaatttgttcaatgtataacattctcaggatttgtaacacttaaatgatcagacagaataatattttctagttattatgtgtaagatgagttgctatttttctgatgctcattctgatacaactacttttcgtgtcaaatatctactgtgcgcaaatgtactcaattttaaatcattactctgtaa

SEQ ID NO: 9247 - DNA, 771 bp, Macaca Fascicularis
  misc_feature (1)...(771): n = A,T,C or G
agaaaacagatatattcagagtcacatagaccatgccacaaataatactcatgctgcggaggatgccagannngcgtcaggcgctggggtacaagcnnnnnnnnnacaagcaggaagacagcaaacatnnnnnnnnnnnnngatactccaaacattgggttannnnnnnnnnnnngagaaagcaataaaacaccgtctcttacatgtctaatgagggagacccaaacaggtaaataatcacaacaattaattagtgcaaggnnnnnnnnnnnnnnngagaagcatttaatgcttggttttgtgccacagagtagtttnnnnnnnnnnnnnnnnnnnnnnnnnnnnnngatggtcacagatgaggctaaggcaatcctggtaggaatttgaggactgttagtacgttattgccatcaacttagttgttgatgagtaaggggaaggggtaagggaagagcaagaagagtcaagggtgcttccaggcttgggtactgggtaagtagtggtgccattgtcagagacaggaaacagaagagaagttagtttgaggaagatatactttagggttccattttatacagttcaacaacaatccaattgaatcaatggtaatgtcagnnnnnnnnnnnnnnnnnnnnnnnnnnnnngtggcggggcattgggagcttctgaggtgctggaaataatttatgtcttgatcctggttatggttacatggatgtatacacatgtacagactatttgtacactttgtgtatgtaagttatcaca

SEQ ID NO: 9248 - DNA, 444 bp, Macaca Fascicularis
  misc_feature (1)...(444): n = A,T,C or G
gggccagccccgcttcggcccctcccgggagatccgtgcgcccgaccagcaccagcatcgcggaccgcaaaggccgcccgtcccgtcaaacaagtttcttcttaggctaagaaacgcagtatatacgagtatctatatatagtactaatggatttggtgtgcttcccccttagcgtccccttccctctgctcctcctccttcagcctggtctccccctcttctctgccctccacccccgtctctgcactgagatacataagaaacaagggtagtttactgtctgttttgttttctgggttttcagtgtcctagcggaatgcaagtaggcagccagcccgtctgttccctctccgccccgccccgccccgccccgcccnnnnnnnnnnnnnnnnnnnntaccatctttgcctgactctctccggcttctccattgaatggctaat

SEQ ID NO: 9249 - DNA, 661 bp, Macaca Fascicularis
  misc_feature (1)...(661): n = A,T,C or G
gccgcccaccatggctgagggaacttnnnngcctcagcgcagagccctgtttggggctgnnnnnnnnnnnagctgccggccgctggggactgggccctgctcgcatgccgccccgccctctccccacctccacaagtatttattgagcgcctattgtgagtcacggggccgtgggggctgtaggggtgtttgggtggnnnnnnnnnnnnnnnnntccctgggcgggagtcgccccagcccgtgctcctggttccctggatagaggggtcaccaggctgctgtcccaccacatgtnnnnnnnnnnnnnnnnnnnnnnnnnnnnnnnnnnnnnnnnnnnnnnnnnnnnnnnnnnnnnnnnnnnnnnnnnnnnnnnnnnnnnnnnnnnnnnnnnnnnnnnnnggggcccgggcactgttgcnnnnnnnnnnnnnnnnccagccgtgtatttatttctcacctatctccttcctgtcaaggcaggccagnnnnnnnnnnnnnnnnnnnnnnnnnnnnnnnnggtggggggggggcgtctgcaggtcacctggggggcccagccctctcccagccttgcctggctgagctgtgttccaggggagccctggacaagccctcatggggggagggggttcccgaggccgggcatccactgccctgtgtc

SEQ ID NO: 9250 - DNA, 740 bp, Macaca Fascicularis
  misc_feature (1)...(740): n = A,T,C or G
agtgtaacagaattcaaatgggaaaagtgagagggagtgtttaaacaaannnnnnnnnnnnnnnnnnnnnnnttggtcctgaacaatggaggaagtcaaaccttcttnnnnnnnnnnnnnnnnnntaaatcagagaannnnnnnnnnnntattccacaccctaaaatacccaaacccattaaaagcacagatataggcttttacaaacatttactaaataagcaaaatcatacaaaatatgttcccgatggcaatttttcccataccannnnnnnnnnnnnnnnaaactccttatcatcccagnnnnnnnnnnnnnnnnnnnnnnccagtaaatccttctgtaacaagtatcattgctccaagaatctctcaactccattcaaacccaagtcttcagacccttggccctctggggcctccagagcgtttgagaaacagtgccacccaaggcagcggccagggcttccactgggacagcccctcactcctccactccgactgtccccactgggctcctctggagcaaaagccatgggccggactgggcagactgcccagtgctgctgagctcagagcagcggcatctgaggggaggtggtggcaatgtggactcctttgctgtactcacaggccccagctcttcactggccagggtgcccaggtctctaccaaagaagtcactggtcaatctttattctcatttttggcatnnntcctttgaatggagccgccctctctct

SEQ ID NO: 9251 - DNA, 749 bp, Macaca Fascicularis
  misc_feature (1)...(749): n = A,T,C or G
gctgcagatggcgggtgttggactgggctccatggctgttgtgatcattcttacatttcctnncnnnnncagcggtgtgatggcagatggacactgagtggggaggatgcactgctgctggggcaggtgttctggcagcttctcaggtgcccacacagaggttcagtgtgacttccatccagggagcatgtgggcctgcaactttctccattcccagctgggcccccttcctggattcaagatggcagctatccctgtgaagtcccccaaaaggagaaannnnnnnnnnnnnnnnncttccctgctacaggaccagttctgtgcgatgaacttgagactcctgatgtacagtgtgatattgaccaaaggctacagatctgnnnnnnnnnnnnnngacttcctctgagtgatgcctgagggtcagctcctccagacattgactgcaagagaatctctgcaacctcctatataagcatctctgttaattcattccgaatccattttttacaatatgcagtgagataggcttaagtttgggctagagtttgactttatgaaggaggtcattgaaatagagaacaatgatgtaggcaaacgtttcaagcactttagaaacagtacttttcctacaattagttgatatactaatgagaaactatacnnnnnnnnnnnnnnnnnnnnnnnnnttgctgtgtcnnnnnnnnnnnnnnnnnntgatnnnattcttattgtcctatnnntcaaaagta

SEQ ID NO: 9252 - DNA, 761 bp, Macaca Fascicularis
  misc_feature (1)...(761): n = A,T,C or G
cccagcagggtgtgaagcaagactttccgggccactcccggaatcccccagcagataaaggcggccccgccacctggctctcctagcggtctccccgcccctgccgccctgccgctatgtcccgccgctgtgcgctgcttgcctgggctctcctcggcctccttcgactcggagaggctcagaagacagaagccccggcctgctgcagccctatagtgccccggaacgagtggagggccctgcannnnnnnnnnnnnnnnnnnnnnnnnnnncccttgcgctatgtggtggtgtcgcacacggcgggcagcagctgcaacaccccagnnnnnnnnnnnnnnnnnnnnnnnnnnnnnnnnnnnnnnnnnnnnnagacactgcgctggtgcgacgtgggctacaacttcctgattggagaagatgggctcgtatacgagggccgtggctggaacttcacgggcgcgcnnnnnnnnnnnnnnnnnnnnnnnnnnnnnnnnnnnnnnnnnnnnnnnnnnnnnnncatggatcgggtgcccctaccccgggccctccgggcagcccagggtctactggcctgcggtgtggnnnnnnnnnnnnnnnnnnnnnnnnnnnnnnncaaaggacaccgggatgtgcagcgtacactctctccaggcgaccagctctacaacctcatccagaattggccacactacccctcccactgaggccctgctaatctgccccccattcctctcctcccatggccaaaaaccccactg

SEQ ID NO: 9253 - DNA, 770 bp, Macaca Fascicularis
  misc_feature (1)...(770): n = A,T,C or G
cacgcgaccctggagccccgctcgtaggccagaggtcgatggagtccgcaaagcnnngcaagacctggggctccgaattgtggaaataggagacgagaacgcgacgctggatggcactgacgttctcttcactggccgggagtttttcgtaggcctctccaaatggaccaatcaccgaggagctgagatcgtgnnnnnnnnnnnnnnngacttcgccgtctccactgtgccggtctcgggtccctcacacctgcgtggtctctgcggcatggggggacctcgcactgttgtggcaggcagcagcgaagctgcccaaaaggctgtccgggcaatggcagtactgactgatcacccatatgcttccctgaccctcccagatgacgcagctgctgactgtctctttcttcgtcctgggttgcctggtgtgccccctttcctcctgcaccgtggaggtggggatctgcccaacagccaggaggcactgcagaagctctctgatgtcaccctggtacnnnnnnnnnnnnnngaactggagaaggctggcgccgggctcagctccctctgcttggtgctcagcacacgcccccacagctgagggcctggccttggggtactgctggccaggggtaggatagtatagggagcagaaggggaaggagggttagatagagaatgctgagtaggcagtagttgggagagaatctcaatatggggggagggcagagtgtagggaaaaggataggggccactgggtggtcctccctctcaga

SEQ ID NO: 9254 - DNA, 1179 bp, Macaca Fascicularis
  misc_feature (1)...(1179): n = A,T,C or G
gagactcagaaacagtccaaagattcttctagaaccgtataaatacttacttcagttaccaggtaaacaagtgagaaccaaacnnncacaggcatttaatcattggctgaaagttccagaggacaagctacagattattattgaagtgacagaaatgttgcataatgccagtttactcatcgatgatattgaagacaactcaaaactccgacgtggctttccagtggcccacagcatctatggaatcccgtctgtcatcaattctgcaaattacgtatatttccttggcttggagaaagtcttaacccttgatcacccagatgcagtgaagctttttacacgccagcttttggaactccatcagggacaaggcctagatatttactggagggataattacacttgtcccactgaagaagaatataaagctatggtgctgcagaaaacaggtggactgtttggattagcagtaggtctcatgcagttgttctctgattacaaggaagatttaaaaccacttcttaatacacttgggctctttttccaaattagggatgattatgctaatctgcactccaaagaatatagtgaaaacaaaagtttttgtgaagatctaacagagggaaagttctcatttcctactattcatgctatttggtcgaggcctgaaagtacccaggtgcagaatatcttgcgccagagaacagaaaacatagatattaaaaaatactgtgtacattatcttgaggatgtaggttcttttgaatacactcgtaatactcttagagagcttgaatctaaagcctataaacagattgacgcacgtggtgggaaccctgagctagtagccctaataaagcacttaagtaagatgttcaaagaagaaaatgaataatgttaagccattcttgattgggcctcatagcttattttagtcaatttttttgtcttttagccttaaccaccttttaaaaaaatttgttattctccagaaacagaataggtgaataggggtgatgcaagtgaattcgttttcatttagaagcccctctgtacagataatcaaaattcaaagttgaaagaatcaaaagaagccacagttatgtaggtctgatttgaatgtcataattgcagtgacaggacattaccaccagctctaccctactatcatcaatgttg

SEQ ID NO: 9255 - DNA, 737 bp, Macaca Fascicularis
tgatgggggtcgtggagaacatgagcggcttcacctgcccacactgcacagagtgcaccagcgtcttctccaggggcggcggggaggagctggcccggctcgccggggtgcccttcttagggtctgtgcccctggaccccgagctcacgaggagcctggaggagggccacgacttcatccgggagttccccgggagccccaccttcgccgcactcacctccatagcacggaggattctggacgcaacgcccacatgcctcccctgactgaggccgcctcgaagctgccttccagagccaccgagggctctgctccagcctctcggagaaacagagcgggcttggttcccgggccctgcaggggcaggcccaggcggcgccaacgggagagcagctcgctgaccagcgctgccccagggatgtatcaggcaccagcagctctgcctggttggcctgtggctgagaggacagctcgggccctggtgctgtggcctgggtgccctgcagctgtgagacgggggcggcttgggctctcctcccttccacgtttcccacctgtgcccctggcagccgcgtgtccacatgattggcagagcacaggacttccgcagtcctcaggtgaccccgggccgccagcacgctggggtcactgtcatctgcgtgaagctgggggagcgctccctaagggggcgaactgacctcaggcctgtcttgtaacttagaggagcctaccataaa

SEQ ID NO: 9256 - DNA, 711 bp, Macaca Fascicularis
  misc_feature (1)...(711): n = A,T,C or G
acagaaaagacaaacannntnnngcgctannngcatcagcaatggacaaaaagaacgctgccaagaagagagaccaggagcaagtggagctggaaggcgagagctccgcacctccccgcaaggtggcgcgaaccgacagcccagacatgcacgaggacacttaagactctcaaccccacaggggcctcctgccaggtttggncctcggtcgcccacccgcctgcccgccatgtgtaagcaccccgcccgcccgcttccctgccggcccatccacaccctgcgtccacaccaattccaacctcataggagccgatgtatttattttccttgagtttttatttatgctgtaacctgtatcaagcgttggttaaaggggacatcagacccagtagtgtgatgttggtagatgctttttaaaaaaacacaacattgtcccccgacccccgccttccaccgggccagttccccgaatcctgcccccagttctccagagaaccagagcgtgtctgtgagggtctctagtgggggcttcactgtggctgggcaacaagggcgggcctggggcagcccacccaccaggacagccgagtggccttctccccccgacaccggtccaggcccttgagactcggtcttgtcccacgctctgcctggaactctcccatgcccagacctcactcagcgtgtgcgcacgtcggggagaagtcggcc

SEQ ID NO: 9257 - DNA, 725 bp, Macaca Fascicularis
  misc_feature (1)...(725): n = A,T,C or G
gaaatatgttatttgcctctancnnnnntgaagttttatttggcaggaaaaaaaaattaaatcttggtcaatatttaaaccaaagtaaaaggggaaaaaccaaagttatttnnnnnnnnnnnnnnnnnnnnnnnnnnnnnnnnnnnnnnnnnnnnnnnnnttttttattttctctttagaattttgttaaagaaattctaaaatttttaaacacctgctctccacattaaatcacaaacactaaaataaaattacttccatataaatattattttttcttttggtgcgggagatcaaaggtttaaagtctaacttctaagatatatttgcagaaagaagcaacatgacaatagaaagagagggttacgctacaattatttcttggtttccacttgcaatggttcattaagtccaaaaacagctgtcagaaccttcagagcagaacatgagacactcagagctctggacctaaagcagaaagtttgccggggaaaaaagagcattgttaccatcgcatcagtgcctggataaagaggaaagcttacttgtctaatggccgccnngtgcacggagatgctgagaagaaaaagaattccaaatcctcaccttctgaggtttcggctctcccatttaattcttcggcaacaggaaacaggtcttgcaggttcaaggttcactccctgtatgtgataataggaattgtatgtggaaatggattaacatac

SEQ ID NO: 9258 - DNA, 741 bp, Macaca Fascicularis
  misc_feature (1)...(741): n = A,T,C or G
caccactgtgtnntcccagcnnnntggtggataatgaataacaactgagccagaccttcacacgccgaggaccccgggaccctgcctccctcnnnctggagnnntctgccctggccagcccacccagcgcaaagaccagggcctgcctgctcctggacctgggcctggtggaagnnnnnnnnnnnnnnnnnnnngggactgggctgcttgctttctatttattattgatttatttatccatgtatttttttgnnnnnnnnnnnnnnnnnnnnnnnnnnnnnnnnnnnnnnnnnnnnnnnnnnnnnnnnnnnnnnnnnnnnnnnnnnnnnnnnnnnagggcaggttctgtccctgtgtgggtgggccttgggccatctggctgcctagcaagggtcctggtttcttcccgctgtcttgggnnnnnnnnnnnnnnnnnnnnnnnnnnnnnnnnnnnncagggctgatgctcagggacccaacccctcaaaccttgcccctgaggctgggctggacctgggtgcccctgttgccctcccaggccactaggctctnnnnnnnnnnnnnnnnntggatgtgccagaggcctatgggttggtttgcatgccattttattatcatttgcatgccctcaccccacccattatcagggcaatatgggaagccccaaggtgacctggccaagtagcaataatttgggcccagggtcacctattgcccccagaggcctctgaagcccaggct

SEQ ID NO: 9259 - DNA, 768 bp, Macaca Fascicularis
ccagtgcactcactttacagtgacagatctccccctaccatcatccttttagtccttgggcagagcatgtggtctcagggcccacagtgaaagaagagcagtggtggcaactatgccttgtcttctggagcctgtagggagttttccaggcaggtcctttgccatgacagcatggtctggccctgttggcccctcccctctcctgttacccacccccgtgctgtaaatacttgtcatcatggactccaacagggtcagagggacaggcctaatcaactaaaactcctcggagatgccatctctgtctccctgggtgccagcagccctgctgccatgtgcactggggtggcactggagagccatggaagttgtgagatattgtgtgtgtatgcacatatgtgtgtgtgtgtgtgtgtgtgtgtgtgtgtgtgtgtgtgtatgtttctgcctcattcagtttccggggtgaaatcagctccttctctccaaatgcactaccctggagagtggtggccactcaataccttttcctctagctttcatgtcttggtttttgctttccccttcctcctccctctctccctttctttccttctctccttctttatttgaggggggaagagtgctgtacaaagtcaaacaaacaagtttacagttgtaagtgcaatgacccgagtcctccacatgaccttgtgaattgtgtgctgtcctcctgtgctctgtgagaactcgtggtacttctagtgtccctcccccctgtattgtgac

SEQ ID NO: 9260 - DNA, 1148 bp, Macaca Fascicularis
  misc_feature (1)...(1148): n = A,T,C or G
ctggtattcacnnnctggcctgtggtccgtgaggacactaggctggtggccatggtgctgctgtctgcggttgtgctgctccatgcactcctggccgtgggctgtaagttgtacttcttccagtcgctgcctccggagaaggtggctcctccaccccaaatcacatctctgccctcaaacatcccgctgccccctaccctgcctcagtccatggccccctcctagaaaggcccgggtcccacaggcaacacctaagtggaccaacccctctgcctgtcctgccccccagatgatgactgaaggctcccttgacaccttgagatgactctgctactttccagacttttcttacaaagcaaacacttttattttctatgcaaaggtgattcagagaatttatataaaggcgggagaggggcagccgagcagggagctttgggacagggctggggcccccatatccccctgggccacctgctttccctcccatggctcccctggaacaggagagcgagccaagggggcgccccagcctggacagcacccgctcctgcctgggtgcacatatggcgggcctgggtccgggcctgagctccagcatctgagtttgggggtgtcagaaacaggggagcagaaggagaagaaaactgcnnnnnnnnnnnnnnnnnnccttgtttattttttctttctttttctttttttttttttctggagggagaggtccctgcaaggtcccttcccaggcaggggagggacggaaatgccgtcacagtagtagggactggagcgtctacaaggatggaggggagctactcaggcctaacattagctacaaggaaaaaggacgccttccgtgacagatctttgaggtgtctgnnnnnnnnnnnnnnngccggcagtggccttccctccgggcccaaggcctgcagccacctgctctaactctgggtggggggagctggggggactgcaggggctcggggacaggacagcagcaagaggcaggggccgaggacggaggccttcccgacagtggggtgggttgtacattcaagtgtgaggtgaaccctttggtggggagggggcccctgaagcctcagcggggccacccctccctgcggcgcctcttgagtctagggggaggggct

SEQ ID NO: 9261 - DNA, 383 bp, Macaca Fascicularis
  misc_feature (1)...(383): n = A,T,C or G
cctncnnnnnnnccctgtttggcgagcccnncagggaaaaaaaggaagaggccccgcacccctcctccttgctgatttgcacacattggccgcttcagacatgcacttctggggccagcccctccccgcctcctccctgcccggcggcagggatcgcgatgatgggctggagcagtctggggcagggggttctgggacccactccgactccccttccccggcatcatttcctctcccgcttcctccggctggacctggggtcccccctccctgtaatgcactcctgccccggcccaacctcgccctctctcaccagccttgaactgtggccacctagaaaggggccctttcagcctcgtctctctttacagaagtagtttgtc

SEQ ID NO: 9262 - DNA, 638 bp, Macaca Fascicularis
  misc_feature (1)...(638): n = A,T,C or G
aggacgccgannngcaggnnnnggggcctcacgtggagcttttcagaaagcacgagatngatggcaatgctctgctgttgctgaagannnnnnnnnnnnnnnngtacctgggcctgaagctgggacccgcactaaaactctgctaccacattgacaaactgaagcaagccaagttctgactttttaaaaaagacacaagcgaaacccaaaacaacagatctcaagattatcttctgccttaccaacatcccaccaatatcacaaaatagactctcctcttaaaattaacagccacaaagacgtggtctttttataaaacttgtgaatctttgccttttaaagaattgaacgtggacctttttgaaaggctcctctgtgttaataatttgccaaaaaattannnnnnnnnnnnnnnnnnnnnnnnnnnnnnnnnnnnnnttctcttaaagtgggtcctatttgcataacgagagagtggggaactgaatgcttatgtccaaggaaagttctggagggttcaaaggatgaaagaaggacctttgtccctgcattctctgcagggacacccacctcagcaccatctgcctctgagtctgacctggggacctatccatgtgagccttgtttgcctcagctct

SEQ ID NO: 9263 - DNA, 774 bp, Macaca Fascicularis
  misc_feature (1)...(774): n = A,T,C or G
acaaatacacanncatgcacacacacnnncacacacatgcatacacttangcctcatgcccatttnnnatcacactgggctccatgatattctgttccctaagaaccacttctgtnnnnnnnnnnnnnnnnnnnnnnnnnnnnnnnnnnnnctctcctacctggctcttttgtcccagggaggggtcctgttcggaagcagtggctgaatttaccccctgaaagtggttttggaggaaccgggatggaggaggccttcccctgtgggaatagaatcgtccactcctagccctggttgcttctgatactcacacagccactgcacacacatactcacactcacactcccttgtctgatgccccaaagccaattcctggggcaccctaccctctctaatttggggtttctgtttgtttacctgagttttctctggggcctgcatagaggcagcagcatggacatcacggcctctcaggtcccttttggttctcagcttcgttggttcctctttctgttcccccattgccttctgcgccccgccctggccttttccataaccgtaggtattcagtttggagggttttttgtatttttgaggattcctgtattctgtatcctgtcctcgcatctcctcacatggaaagaaataatgtatttgtgccttctgtgagggatggggggaacaagtggtcccaggtatccccatttcccagccccctctccctctccaggtccccccatagcaataaaagcttccccctgatatccatccct

SEQ ID NO: 9264 - DNA, 711 bp, Macaca Fascicularis
  misc_feature (1)...(711): n = A,T,C or G
ctgaaaggccatactcgtggctggctgcctgcctgtgggnnnangccttcccagtatcntcannnnnnnnnnnnnnnnnnnnnnnnnnnnnnnnnnnctgcctccacaggtccctctagcaagcctcactgcacctctccccctgctgtttgtgtttggaattttgtcatttttagctgagaccaaattaaaccttggtgcataaagtgagcttaaaacttgccactgtttaataagttagctctcatttacccttctttttctcattgtcatttgttggtgttaatagggctgtcttacaggatcatgttggcatttactatcatgtctttcataaaccatgtttgtttggggtagaagaatcaccgtataatttgttgtccaaactgggactattaagaaagaaaggggatgctattacaccagatcaacaggcataaaccagacctgtcccaggccaatggggatatatggtctttctagttgtgggtaacctgatctaggtggtttgtaattgtgcatactgactgcatatatgtttgtgtatgtctaaatgtgggctccctgttaagtggggctcatggatacgaggcccgcgtgtggcttgctagtctgttatgttaacatgcttttctaaaattgcttcacgtgttaattcatttaatcctgcattcattgactgtttttgttcttttccattcacttgtactc

SEQ ID NO: 9265 - DNA, 693 bp, Macaca Fascicularis
  misc_feature (1)...(693): n = A,T,C or G
tcctgctgtggcctgggttgcatttcctcttggggggtattgaggacccccccagcccggaatgagaagggtcctaggttccacgtccaagacccgnnnnnnnnnnnnnnnnnnctgttggctgcaggaggtttttggtacccccttttgttccagaaccttcctgcatctcgcttgggggcaggggggcttcggatggccactggtgtgcacctggacccagccccggcctggcaggatccagggatgggtgcctggggtcctgcgggcagggaggcaggggacgcccttctggagctgggctcggagggtctgccccatccagccctcggctctctgtattctctgtccccagcctcaaaccctcctctggcagcgctagtgagatgccttagtgtgtgggggtgggtgggggactggggccccgttttcctttagtgtcttgttggccccagccctggccggggcctgtctggagcaggggagggtagggctgtgggttccataactctctaagcgggcccctctccagtgtccaggggcctggagagacctgcgcccacccctccactcccccaggagccgctggtcactgggacttggttccaggcgtttgcaggggaggtggctccaaggggcgtgtgctttccgtgggtggcgctcctcccccaccctgcctggcctcatccttgt

SEQ ID NO: 9266 - DNA, 741 bp, Macaca Fascicularis
  misc_feature (1)...(741): n = A,T,C or G
aaagctcacattnannnnntgccgtgggacttcagaccacattggcttggaggcattcgtctccttctggggtggggacaggctctcacggcaggcttgttcccatggctctgagtgaggcctcttcctgctgggctgnnnnnnnnnnnngcccgggcccccaccttctcggcttttggtttttctttctttttggtagaacacaacannnnnnnnnnnnnnnnnccttctttatctcctcctcnnnnnnnnntttttccaaagaattaagagtcgagtcctctgaggtctgtacttgaaaactgtccgaaggtgttctcgttaggtttgcttttctccccgtatcccaaggcgaagcannnnnnnnnnnnnnnctaaaaaaccctcgacccgaaaccctcacctggtcagctacagtttgtttaggaggccctgaccttcacggtgtctttgaagcccaaccacttggtttccttcagattttcctccctttgttcagggtttggtttggctcctctgtgtgtgtccgtatcttgttcagtgtcctcgagnnnnnnnnnnnnnnnnctgcggcagaggcagagtgcacactcggatttgctacatttctatatatnnnnnnnnnnnnnnnatatatgagtagttcgccgtgnnnnnnnnnnnnnnnnnnnnnnnnnnnnnnnnnnnnnnnnnnnnnnngttctcnnnnnnnnnngtattttgtaatttttttgaaatatt

SEQ ID NO: 9267 - DNA, 776 bp, Macaca Fascicularis
  misc_feature (1)...(776): n = A,T,C or G
accacagaacnnnnngcaaggagcaagcaaccgtggccctgtctaccccagcaaataagaagtatatctgtagcttgaggccaagaatccgtaaaaaccccataactttctcttcgtgcataaacagatgtatttttgatttcagggaattatttagtatcgtcaatggnnnnnnnnnnnnnnngtcccaaaccaaatcccacccgtgccgggcagagtgcgtgcacgccattcctacagcattccaaagatggaaggttctttacttcatgttaatttttcctttgaaattatttatatgttctatatataaatacatatgtacatagacagatatatgggcctctgtgtggctgaacagtatattttgtaaatacaagtactagtcctaattgcagaaagnnnnnnnnnnnnnnnnnnccccacaagcacttcagatcagtattgtattcattttattaataaatggttatctttttcattgtaatataaagctgggttttatttttttnnnnnnnaaataattgcctttattttctctcattgcctccttggtttcagaagagagtagttttattataaatattgtatggactttgtatattaagagaggagctcatttcagattcctaaagaaacagacattttactgttattttgaaannngcatcttttgattttgttgttgttgttcactttcggcatatgtatataagtaatattgatggtgatatgaaaacttttgttatgtgaaaatatttaagtcagaaaatgta

SEQ ID NO: 9268 - DNA, 747 bp, Macaca Fascicularis
  misc_feature (1)...(747): n = A,T,C or G
agcngnntcgctgctnnnaaccagcaggatggcaccttgtcnntgtcacagcggcagctcagcgaggaggagcggggccaactccgggatgnnnnnnnnnnnnncggcctgtaccgggtccgggtcccgaggcgacctggggccctggatggcctggaagctggtggctacgtctcctcctttgtccctgcgtgctccctggtggagtcccannnnnnnnnnnnnnnnnnnnnnnnnnnnnnnnnggctggcaacgtggtgggcgtgtcggtggtgacgcaccccgggggctgccggggccatgaggtggaagatgtggacctggagctgttcaacacctcggtgcagctgcagccgcctgccacagccccgggccctgagacgnnnnnnnnnnnnnnnnnnnnnnnnnnnnnnnnnnnnnnnaaggccaagaacccccannnnnnnnnnnnnnnnnnnnnnnnnnnnnnnnnnnnnnnnntggggggggccgtgttgctcacagccctgcgtcctgctgcgccagggcccgcgccaccgccgcaagaggcctgagtgaggaccgagacccctgcccctccctgcgccccactggccctccctgacctgtnnnnnnnnnnnnnnnctgggcgccctccccttacgcggcctcccttcatgccgggccccaccttccctaccctgggcgggcaatgcccacactcacctccttcccctctctctctctttctgtgtctgtctgtccat

SEQ ID NO: 9269 - DNA, 1003 bp, Macaca Fascicularis
  misc_feature (1)...(1003): n = A,T,C or G
taacagaacgagttgtagtttnnngaaggannnnnnnnnnnnnnnnngtacagtctgtttttaaaannnnnnnnnnnnnnnnnnnnnnnnnnnnnctataaagagacatttagcannnnnnnnnnnnnnnnnnnnnnnnnnnnnnnnnnnnnnnnnnnnnnnnnnnnnnnnnnnnnnnnnnnnnnnnnnnnnnnnnnnnnnnnnnnnnnnnnnnnnnnnnnnnnnnnnnatacaataagtgcttgaaagatgaaggaccaaagggccaaaaaacagtaaaatatgatcatcatctccttggggacttctctgcctggttttgtgtgttctgctattcagacaataaaaagctggtggaacttactctttcttttaagataagttgtagacntcgacgtttcatgctcatgtacttcaaataatgcatgttttgtagttagtcccttatcacttgaagtgacttatgagaattatgcagagccaacatggatcatttcacagtgagatgctttatggattgaaggatatggtaaaatatttatactttactttgaaagtaaaatatactatgtcttggttttgaggatattggatacaaaactctcttcctttagggctgctgagtcttgattcctgatcatcagaaatttcaccagaaacaacttgcttccaatatacccaattctatatgaagaattcatggagagtgtactnnnnnnnnnnnnnnntagtgtttcatgtatgcttgaaaataaaatatgtactgtgttgaatgtgttccaagtcctctgaagctgatcttcataaaggatgtattttggggtctggttgggcctagaaaatggatgaggacttcagaacagatcattttcttgataatattggaagtgacatgtggccttataggaggcatgatgttagttaattccacatttgcctacatctnnnnnnnnnnnnnnnnnnnnncatgtgggtactgtaaatacacgtttatcttttggcc

SEQ ID NO: 9270 - DNA, 388 bp, Macaca Fascicularis
gaatattgtcgaagaaacaataaaactacaccatgaggaaaattaaaggtttttatttaaaatttggcattgtaataacatgtgaatttataatatgtggtattttatacatttcctcagtagtgatatttggtaaagcagttcacatagtttttttttaagttccatgaattttaccccgtgtttcctgaagtatttaagcagcatttgaatatttccaaccagcaatgttagtttatttcagaaagtttagaattcatttttgtgttgaatttacctcttaacttccgttcctagacacatacgtgaccttcaatttgactctccggcaagtgagtgtggaagaaaacagcagttttgttatcattgcttgaaattaggaaagcac

SEQ ID NO: 9271 - DNA, 138 bp, Macaca Fascicularis
  misc_feature (1)...(138): n = A,T,C or G
ctgagtttgtcaatgtgtgtttgtggnnngtaccccccagcctgcgagggaagcaggacagtccagattaccacgagaggctgtccaaggtnnnnnnnnnnnnnnnnnnnnnnatggtgaaggagggctccctgatga

SEQ ID NO: 9272 - DNA, 652 bp, Macaca Fascicularis
  misc_feature (1)...(652): n = A,T,C or G
gnnnnnnnnnnntgagatgatggctagctttgtttaatgtcttatgaaattttcatgaacaatccaagcataattgttaagaacacgtgtattaaattcatgtaagtggaataaaagttttatgaatggacttttcaactactttctctacagcttttcatgtaaattagtcttttggttcggaaacttctctaaaggaaattgtacattttttgaaatttattccttattccctcttggcagcnnnnnnnnnnnnnnnnnnnnnaaacacgaaatttatcataacaaaaatactaatataactgctgtttccatgtcccatgatcccctctcttcctctccaccgctgaaaaaaatgagttcctattttttctgacagaaggggagattgattggaattccatttaaaattttggtatatggcattttctagcttaggaagccacgatgttcttggcccatcatgacactgggtagcattaactataagttttgtgcttccaaatcactttttggtttttaagaatttcttgatactcttacagcctgccttcgattttgatcctttattctatttgtcaggtgcacaagattacgcttcctnnnttagccttctgtcttgtcaccnnccattcctacttggtggccatgt

SEQ ID NO: 9273 - DNA, 693 bp, Macaca Fascicularis
  misc_feature (1)...(693): n = A,T,C or G
caaaaaaaaaaaaagaaatgggagacttcaaatgaacttaacagactactggatcttgaaattccatgagtattgaatttatttttattgttatgtaacaaaaaaagattccacaacatcctaaaaaacctaaaaacagttattaacaccctcattgtcaggacatttctnnnnnnnnnnnnnnnggaggcctcagcataaatactgtccatttggtagttggacttggcaaatcacttcctccagataacccaccaagcctgcagaaggcaagcatgggaccacactgacccctagcnnnnnnnnnnnnnnnnnnnnnnnnnnnnnnnnnnnnnnnnnnnnnnnnnnnnnnnnnnnnnnnnnnnnnnnnnnnnnnnnnnnnnnnnnnnnnnnnnnnnnnnnnnnnnnnnnnnnnnnnnnnnnnnnnnnnnnnnnnnnnnnnaagtagagtgattagtatttttatgtcctgatgtcaatacatgtaccccattttcgctataaaattattttaataaattatgctgagagaaattatctgtaagataacatagcttatgcttacnnnnnnnnnnnnnnnnnnnnnnnnnnnnnnnnnnnnnnnnnnnnnnnnnnnccagagtaaagctgtcaacttgctcttgactgagacgacgaaactgtaattcttgttcagagagtttctcagacagg

SEQ ID NO: 9274 - DNA, 747 bp, Macaca Fascicularis
  misc_feature (1)...(747): n = A,T,C or G
gcagggtnnnngatgagctgaccctggccaggactgacctggagatgcagattgaaggcctgaaggaagagctggcctacctgaagaagaaccatgaggaggaaatcagtgtgctgaggggccaagtgggaggccaggtcagtgtggaggtggattcggctccgggcnnnnnnnnnnccaagatnnnnnnnnnnnnnnnnnnnnnnnnnnnnnnnnnnnnnnnnnnnnaccggaaggannnnnnnnnnnnnnnnnccagccggactgaagaattgaaccgggaggtggctggccacacggagcagctccagataagcaggtccgnnnnnnnnnnnnnnnnnnnnnnnnnnnnnnnnnnnnnnnnnnnnnnnnnnnnnnnnnnnnnnntgaaagctgctttggaagacacactggcagaaaccgaggcgcgctttggagcccacctggcgcatatccaggcactgatcagtggtgttgaagcccagctgggcgatgtgcgagctgatagtgnnnnnnnnnnnnnnnnnnnnnnnnngctcatggacatcaagtcgcggctggannnnnnnnnnnnnnnnnaccgcagcctgctcgagggccaggaagatcactacaacaacctgtccgcctccaaggtcctctgaggcagcaggctctgggggcttctgctgtccttcggagggtgtctcctgggtaaggggatgggaaggaagggacccttacccctggctcttccccctgacctcc

SEQ ID NO: 9275 - DNA, 719 bp, Macaca Fascicularis
  misc_feature (1)...(719): n = A,T,C or G
atgaagtgtttgatgtgtacaaagccccactgcagggcgaccacaatcatctttttataagacaaggtactggtctacagggacaagcagtctttaaaacgaaactcaccttcagacctcactctacggacagtgccacacatagaaagatgactctgtcgcttgcagataggtgttcaaagacacagaagattagaatcttgccaatggnnnnnnnnnnnnnnnnnnnnnnnnnnnnnnnnntgattaagaaagaagaagaacgtttgagggcttccatacgtagggaatctcagcagcgccgaatgagagagaaacagcaccagcgggggctgagtgccagttacctggaacctgatcgatatgatgaggaggaggaannnnnnnnnnnnnnnnnnnnnnnnnnnnnnnnaaaccgatataaagggggcattcgagaggaacgagccagaatctannnnnnnnnnnnnnntgagggatcagaagaagataaggctcaaagattactcaaagcaaagaaacttaccagtgatgaggagggtgaaccttctggaaagagaaaagcagaagatgatgataaagcaaataaaaagcataagaagtacgtgnnnnnnnnnnnnnaagaagaagaagatgattgaagtatgaaatatgaaaacattttatatattttattgtacagttataaatatgtaaacatgagttattttgattgaaat

SEQ ID NO: 9276 - DNA, 708 bp, Macaca Fascicularis
  misc_feature (1)...(708): n = A,T,C or G
tnntttacttacaagtcannnngtaatccaccattnnnnnnnnnnnnnnnnnnnnnntggtgaggtttgtactcnnnnnnnnnnnnnnnnnnnnnnnnnnnnnntccttagcccttggagtttcttgcaaacattaaaaaaaaagacatatttaagaaagaaagataaagaaaaaacatatttaattactgtaaacaggtactgctttatactttattttctttctacttcaaccaaaatcagatctttaaggttttgctgacattgttggtggttttgcacacgctctttctaattggatttatgaatagtcctatgggttttcaaagatgaatcatgctaagaacacttttgctttttgatccacnnnnnnnnnnnnnnnnnnnnnnatgtatatgaaaaatccactttgaataatccatattttgtatttggaaattgtttttaaaaataaaaagaaaactataaagctgttatttattctgcatttcttacacatctatcgcttgtcagtatacccgtttggtgtatattgcctctgcacatctacatttgtatttgcnnnnnnnnnnnnnnnnnnnnnnnnnnnnnnnnnnnnnnnnnnnnnnnnnnnnnnnnnnnnnnnnnnnnnnnaccaaaagtatgtaaaaaaaaaaaacccgcattattttgtaattatttcttatagatgtttcatggtaagtttag

SEQ ID NO: 9277 - DNA, 666 bp, Macaca Fascicularis
  misc_feature (1)...(666): n = A,T,C or G
gcgtgctgntccccggggctnnnngcgcagcagggtttgggatgatggcccccctgccacccaccagcccttccaggactgccgtgcccccaggcctttccagcctcccactcacgtctgtggggaacacgggagtgaagaaggctcccaagnnnnnnnnnnnnnnnnnnnnagcctctctggagatggtgcagatgnnnnnnnnnnnnnnnnactatcattaccaggagatgcaggctctgaaggaggtcttcaaggagtatttnnnnnnnnnnnnnnnnnnnnnnnnnnnnnnnnnnnnnnnnnnnnnnnnnnnnnnnnnnnnnnngagactgtatggaccattacaagcatatcttaggcagaatgatttggacattgaagaggaggaggaggagcactttgaagtcattaatgatgaggtaaaggttgtggccagaaagcacgggcagcctggcagtcctgttgccatagcaacccagcttccccccaggacttccgcagcttttccagcccagcagcagccgctnnnnnnnnnnnnnnnnnnnnnnacaatgcagctccccagactttcctcactcggatttgaggactcgatgttctgaggcaggacccagaggtctcccaagagcctgtcctctgttgttcaaaatacatcttgagacg

SEQ ID NO: 9278 - DNA, 736 bp, Macaca Fascicularis
  misc_feature (1)...(736): n = A,T,C or G
tctagatactcttactcatcctgtctaattggtatgtttaaaattatgtggtgctgtgtaggtgaaactttaagaatatttttgaagcatatgtaatatatgcactgctatttgtgtgtgtgtgtctttgtatatatgtaagagtgtgtgtatgtgtgagagcaagagagaggaaactcaaagaggagtgcttgtcttaagacctgttcatactggtatattggtgagacttctcacctctggtcggaagtttcacacatagcttagctcaagtcattaatctctttttaatttttactcttgaattccttaaacttcgctcattatgaaatgttttaaaattatgacaaaaattactgtaacctcttgccttgtctgctaccagtttgttaaaaattattccccccaaccagtaattccaccactattacttgatttgtgttttatttnnnnnnnnnnnncctttgtttcgcttgcttgtctaattttactttcccttttttgggtcaaatttttcttttgctttttttgaagaaggaatatacagaagcaaaatcttgtcttctctgttgattctttaattaacctgagccggatactttccactgtcttcttggcacnnnnnnnnnnnnnnnnnnnnnnnnnnnnnnnnnnnnnnnnnnnnnnnnnnnnnnnnnnnnnnnnnnnnnnnnnnnttcttgaaggtcacatgtacctattgtgaaaatgtgaagct

SEQ ID NO: 9279 - DNA, 705 bp, Macaca Fascicularis
  misc_feature (1)...(705): n = A,T,C or G
ccagaacgcccgagccaagttcaggcgcaacctcttacggcaggaaaacacgggcgtggacaagtcgacagacacggcgctgcagactgggacgccatcgggcccggcctcggagctctccaacgcctccctcagcccctccagcacgcccaccaccatgacagacttgactagccccaccctgccaactgtgacgtccgtcttaatttctgtgcctggcaacctggagggccatgagcctcacagcccctcacaaacgactcttaccaaccttttctaatgactcgcaccctcccaccccacaatttctttaaaaaagaaattatctttagttgaattccaagtgtattttaaaatagaggctttgagcaactaactaaccacattttaggatctcgcctggaaacagaggaaaaaaaaaacaagtgtgcacccagctaatgcagnnnnnnnnnnnnnnnacttggaagatctacctgcaacacaacatttgtgtcactgtacagttttgtggactgagcgaggaaaaacaacaaataatttaagttggctagagcttctgtattttcaaagactgccacgtgccttaggannnnnnnnnnnnnnnnnnnnnnnnnnnnncttgttcatttttctctccctctttttctctgtatatttatgaccagagcaaaaatgtaaaaaacaaaaaccaacaacaacaaa

SEQ ID NO: 9280 - DNA, 1050 bp, Macaca Fascicularis
  misc_feature (1)...(1050): n = A,T,C or G
cactgnnnnnnnnnnnnnntccgcacgacgcccctggagaagaacgcccccgtcnnnnnnnnnnngctgggtnnnnggtacatnnnnnnnnntgggtgtgagacgcatgccatgnnnnnnnnnnnnnnnnnnnnnnnnnnnnnnnnnnnnnnnnnnnnnnnnnnnnnnnnnnnnnnnnnnnnnnnnnnnnnnnnnnnnnnnnnnnnnnnnnnnnnnnnnnnnnnnnnnnnnnnnnnnnnnnnnnnnnnnnnnnaatggccaannnnnnnnnnnnnnnnnnnnnnnncaaggcaccaagatgataccctgtgacttcctcatcccggtccagacccaacaccccatacggaagggtttgcatcacaagatcctcctggcnnnnnnnnnnnnnnagacggaagccctgatgagggggaaatcaacggaggaggcccgaaaggagctccaggctgcaggcaagagtccagaggaccttgagnnnnnnnnnnnnnnnnnnnnnnnnnnnnnnnnnnnnnnnaccaactctattgtgttcaccaagctcacaccatttatgcttggagccttggtcgccatgtatgannnnnagatgttcgttcagggcatcatctgggacatcaacagctttgaccagtggggagtggagctgggaaagcagctggctaagaaaattgagcctgagcttgatggcagtgctcaagtgacctctcatgatgcttccaccaacgggcttatcaacttcatcaagcagcnccgcgaggccagagtccaataaactcatgctcagccgcagcctcctctgtgattcctctttctcttgtccctgctccccagagccggcactgcatggtcctggacaccacccagagcgccctctggttgtgggcttggaccacgagcccttggtggggagggctgatctcaaattgctacccccagcccctccatgtcttcgctccctctgtgttacaactggctgaagtgtttttgtgnnnnnnncttttctgacccatgttcacgttcacatccccgtgtagaaaaataaagatg

SEQ ID NO: 9281 - DNA, 695 bp, Macaca Fascicularis
  misc_feature (1)...(695): n = A,T,C or G
tcactgtgtnnnnnaggctgagcgcagtggtgcagtcttgactcactgcaacctctannnnnnnnnnnnnnntgatcctcctacctcagcatcctgagaagctgggactacagattcctttttctctggtccagtttcccttatgggagtccttaaaagccctctggtcctggaggcaggatcatgtggtggattcttggcagtcagcagtctgtggagcttttgcnnnnnnnnnnnnnnnnnnnnnnnnnnnnnnnnnnnnnnnnnnnaagacaagaattatgctggcaaaggctggctccagcannnnnnnnnnnnnnnnnnnctctgccctgcatggggtctggcagtcacaggggctggcaggattatttgcaggtgtcttccctcgaatggcagccatcagtctgggaggtttcatctttctgggggcttatgaccacacgcaccgcttgctgttggaagttggcagaaagagtccttgaagcagagacagcctcacctccacttctgtcaagagaggggcctgcagtgtaaaccctcttccgctgagcagctgtctgaactataggccccagtgctgaagaccagttctgccaagatgccgnnnnnnnnnnnnnnnnnnncgtggtgtaggctggctggtatgaagtcnnnnnnntgtatgccagagagctaagagatgaaaacggggt

SEQ ID NO: 9282 - DNA, 330 bp, Macaca Fascicularis
  misc_feature (1)...(330): n = A,T,C or G
gcatgtcatcagctatgataatgggaaagtggctaatggaaagagcacagctcagatatgtgacacaatggaaacatttgggcattagaaagacttcaggcnnnnnnnnnnnnnnnnnnnnnnnnnnnnnnnnnnnnnnnnnnnnnnnnnnnnnnnnnnnnnnnnnnnnnnnnnnnnnnnnnnnnnnnnnnnnnnnnnnnnnnnnnnnnnnnnnnnnnnnnnnnnnnnnnnnnnnnnnnnnnnnnnnnnnnnnnnnnnnnnnnnnnnnnnnnnnnnnnnnnnnnnnnnnnnnnnnnnnnnnnnnnnnnnnnnnnnnnnnnnnnnnnnntg

SEQ ID NO: 9283 - DNA, 735 bp, Macaca Fascicularis
  misc_feature (1)...(735): n = A,T,C or G
gcacaaaggaaacacacagccaagaaggcgcccgacggcactgtcatccccaacggctactgtgacttctgcctggggggctccaagaagacggggtgtcccgaggacctcnnnnnnnnngcagactgtnggcgatcaggacacccctcgtgtttacaattcacggtgaacatgacggcagctgtgcggacctaccgctggcagtgcattgagtgcaaatcctgcagcctgtgcggaacctccgagaacgacgaccagctgctgttttnnnnnnnnnnnnnnnnnnnnnnnnnnnnnnnnnnnnnnnnnncccccatggcggagcccccggaagggagctggagctgtcacctctgtcttcggcacctgaaggaaaaggcttctgcttacatcaccctcacctaggccggctcggcgccgggactctggggtggtgctcgcctacctgcctctatgagctcctcacttctcccccannnnnnnnnnnnnnnnnngggagcgggagaggcggaagccgagagggggctgggccaccccctcccctctgnnnnnnnnnnnnnnntgccctgtgggtgggtggcccggccggggcctctccctccctccctccctctctgtcccttggcaaatggacaccaggggcttctcccctcaaagccataccccgcctctgggcgggcatggggggtggtgggtgccagccanggggcatggacagagcnnnnnaaaaaaaaa

SEQ ID NO: 9284 - DNA, 772 bp, Macaca Fascicularis
  misc_feature (1)...(772): n = A,T,C or G
ccnnnnnnnnnnnncaccccctccttcatatgaaaggtgccatggaagaggctacagggccaannnnnnnnncacctgcccttttttctgcctcctttagtaaaactccgannnnnnnnnnnnnnnnttttggtttttacttaactgtttcaaagccaagacctcacacacacacaaaatgcacaaacaatgcaaatcaacagaaaagctgtaaatgtgtgtacagttggcatggtagtatacaaaaagattgtagttgatctaatttttaagaaattttgcctttaagttattttacctgtttttgtttcttgttttgaaagatgcgcattctaacctggaggtcaatgttatgtatttatttatttatttatttggttcccttcctgttccaagcttccatagctgctgccctagttttctttcctcctttcctcctctgacttggggaccttttgggggagggctgcgacgcttgctctgtttgtggggtgacgggactcaggcggnnnnnnnnnnnnnnnnnnnnnnnnctgtggggcccctcacctgcttacccaggtgggtcccggctccgtgggtggtggggaggggcattgctgactgtgtatatagcataattatgaaaagcagttctggatggtgtgccttccagatcctctctggggctgtgttttgagcagcaggtagcctgctggttttatctgagtgaaatactgtacaggggaataaaagagatcttatttttttttttttatacttggcgtttgaa

SEQ ID NO: 9285 - DNA, 1199 bp, Macaca Fascicularis
  misc_feature (1)...(1199): n = A,T,C or G
tcagcagggccgaccacannnngacaatgcaggtggagaannnnnnnnnnnnnnnnnnnnnnnnnnnnnnnnnnnnnnnnnnnnnnnnnnnnnnagnagtagnnnnnnnnnnnnnnnnnnnnnnnnnnnnnnnnnnnnnnnnnnnnnnnnnnnnnnnnnnnnnnnnnnnnnnnnnnnnnnnnnnnnnnnnnnncagtatatccgcttagcccagcctgtatcaggcactcaagttgtgcagggacagatccagacactnnnnnnnnnnnnnnnnnnnnnnnnnnnnnnnnnnnnnnnnnnnnnnnnnnnnnnnnnnnnnnnnnnnnnnnnnnnnnnnnnnnnnnnnnnnnnnnnnnnnnnnnnnnnnnnnnnnnnnnnnnnnnnnnnnnnnnnnnnnnnnnnnnnnnnnnnnnnnnagccctccgacgggcaggccccccaggtgaccggcgactgagggcctgagctggcaaggccaaggacacccaacacaatttttgccatacagccccaggcgatgggcacagccttcctccccagaggacccggccgacctcagcgcctcctgcaggctaggacactggtgcactacgccccatgcctgggggccaagattctccagcagaaagatgcaatattttttgtttccttttttttccatttttttctccaaggaatcaatatttcaatannnnnnnnnnngnngtccaatnnnnnnnnntaaaatattaaataacatatttatggcattttcttgaagagtgtggttaaagaaatatttcttcttttgtttttttttgttgttgtttgttaccgccacttctttttaggagcaaatctccccaggggtgtatggtatttcttgactcttggaacagctgctacccccaagacttgccacgttgttctgccctcagatggaattaggtgaatgtgtgtagctgctttttcactcgtggtcctctccccatcccttgctcttacgccagagctctgtgtatttgcatccagaggccatggaaacattccttgcatttaagagatttattccccatggagagtgggtgggttcattgccacactcttttctcccagggacccaggagactaggactttgtgcgtttgctgcccacctcccctttattttttaaatgcattaaacactgtgctagtctcctttgcatggacttcagactgc

SEQ ID NO: 9286 - DNA, 604 bp, Macaca Fascicularis
  misc_feature (1)...(604): n = A,T,C or G
ctgnnnnnnnnnnnnnnnnnnnnnnnnnnnnnnnnnnnnnnnnnnnnnnnnnnnnnnnnnnnnnnnnnnnnnnnnnnnnnnnnnnnnnnnnnnnnnnnnnnnnnnnnnnnnnnnnnnnnnnnnnnnnnnnnnnnnnnnnnnnnnnnnnnnnnnnnnnnnggctgcgtatttattcattcattcgacagaggtttatgtagcacactgtgctgggtggggctgggatacagcaatgactgaggcagcctggccttgccttcacagggctcaccatacacaagtaaataaaaaatatgtaatgtttggaattgctaaatgtgaaggggacatttttctgtgtaaggccagttgaggggacagaggatgacttggagtctgatctaaataaggagggcagaggagggcttgttgcggtggctttccagcaaagacttgaaggatgtgcggcactcagccctgtggctgtcgtgggaagagcatttcaggcagagggaaaagaaggtgcaagggccctggggttagagagtgtctgaattttcggctgggcatggtggcttacgcctataataaggagcatctttgagggtccacaggctggcggcat

SEQ ID NO: 9287 - DNA, 696 bp, Macaca Fascicularis
  misc_feature (1)...(696): n = A,T,C or G
gatctataannnaggtaaagcataatctgtcagagaagcacatgggaaatttggaatgaaggcatttgttaatannnnnnnnnnnnnacagcactctgtctgaggctttggtaaaaagtaaaggggaagaaagaacttgacagatctttttcaactcaaattaatggtaacgatgatgctgtttcaccaagtatattttgaattggtttctacacatttccagtagtatggcagtacagtgctctgnnnnnnnnnnnnnnnnnnnnnnnnnnnnnnnnnnnnnnnnnnnnnnnnnnnnnnnnnnnnnnnnnnnttcttttttcttataattaatataacatttctggactcgaactctggcaagagatgccaaaaggcagtggtaccatgttatttgtnnnnnnnnnnnnnnnnnnnnnnnnnnnnnnnnnntattcattaaatgaattcaacattttccctgtaaaaacaatagagtttcagtacatgaactatagaaaaaatctatatataatgtacataaatgttacatttgtaaaaaaaaatgtaaaaatgtaactatagaatatgaattgcttaaactgtgctgcattgttggatgacaactctttttgtcacagttagannnnnnnnnnnnnnaatgcgtattatgaattgagtccacaaaggaacacaaaactatttgtaattctgtta

SEQ ID NO: 9288 - DNA, 507 bp, Macaca Fascicularis
  misc_feature (1)...(507): n = A,T,C or G
cacacacacacacacacacacatactctctctctgtcttactctcttcnnnnnnnacttgtacacttagtttcctagtagaatctcacttgccacctcnnnnnnnnnnnnnnnnnnnnnnnnnnnnnaatcccaaaactacagttggggggaactggagggagcaaaacactgatttggnnnnnnnnnnnnnnnnnnnnnntagttcacctaaagctagatctcttaaaaccaatttactgaaaacttgtttgcttaaagttaatgacttaatnnnnnnnnnnnnaaaagcttaattcgtattttggtgtgtttatatccatttaggtgtcctattcttttttgtcttgctttggatatttcaaggatttatatctattcatccaagagtacttctgacttattatcagcaacataaattcatcaaatttgcagcactttgtaaatgaagannntgcntcctaccttctatggatgtcctaatctatgttatctacctttcaaaaac

SEQ ID NO: 9289 - DNA, 721 bp, Macaca Fascicularis
  misc_feature (1)...(721): n = A,T,C or G
ggagtttgagactatgnntnnnnnccnnnnnnnnnnncagatggggaaactgaggcttaggaagagaatgaaacttgtggagagctatacagagcctctgggnnnnnnnnnnnnnnnnnnnnnnnnnnntgagattaggggttggaccatagtgatgtcctctcttggctgtcacatcacaagataatgctggctccaaacttcctttctgtgcctcctcatgcaggattttttttttccctcttggaaaaataggtagaaaggctcacccagataaccccctatccctcatagcatggagtcnnnnnnnnnnnnnnnnnnnnngacacgctgggaccaactcaagaccttgtgttgctgtcttcatcatcttacctgtgcttggcccacagtctggctcatgatgtgggctcagtaatgtgcaagaaaatgaaaatgccactctctccaccccattttacagaggagaacaccgaggcccagaggaagttaagggagagtcaatgggcagagccagggctaggccctggtgatgtgtggagcacccaggcagacccagtcctggttgggatcacaaccacaggtgctactgcacatgacactcttccttaggcctggaggccaaggtgtgggtcctcacgcctgatctttgaaaacactacacaatgctgctgtcagttcccaggacccaggccgcagcccaggcctcgggaccaactct

SEQ ID NO: 9290 - DNA, 725 bp, Macaca Fascicularis
  misc_feature (1)...(725): n = A,T,C or G
cgtggagcttggagccccctggcggcaggggttggcagcgcctcaccccagccaagcctgactttggggacaccttcctgccccccaccctacctaactccctaggcctgagtnnnnnnnnnnnnnnnntggtgctgtgtgtgagcgagtgacagaaggcccgaggaggccgactgggctgctagggcagggcccagggaggtggcagggaagggtgcctggctgggctttggggccggtgggataggagggtacccctgggaacacagtgccccagaggtgcgggaaggcttggtgccaggggcaggtggctaggcagggagggggctgggaaagaacttggactcctaaaggtggaggggctccctgggcaccctgcaggcaggcagaccacagtgtcaggggtgccccacaaggcccagccctgggcaaggaagctttggaagcagcaaggtaggggtcaggctacaggtgccccacctccccagagccctgcagccatgtgaggcccctgtgcagtagagagccgttgtccagctgatgctggccggggccggggccaccgcatctgcctggagcctgggnnnnnnnnccaggactgaccttcggcagtggannggggactgctttcagtgcatgnngtttgtgactcagaaagaaaaacactgagaaaacgcattaaaaataagccaaaataagactgtattggtaacatctaaattttg

SEQ ID NO: 9291 - DNA, 743 bp, Macaca Fascicularis
  misc_feature (1)...(743): n = A,T,C or G
tcatcaagatgcccgttatgtaccggatcggctgcctgcgggacgatgtggtttccttcatctacctctaccaacggtggatctaccgcgtcgaccccaccagggtcaacgagtttggcatgagtggagaagaccccacagctgccgcccccgtggccgaggttcccacagcagcaggggccctcacgcccacacctgcacccaccacgaccaccgccaccagggaggaggcctccacgtccctgcccaccaagcccacccagggggccagctctgccatcgagccccaggaagcccctccaaagccagcagaggacaagaaaaaggattagtcgggactggtccnnnnnnnnnnnnnnnnnnnnnnactactgcccctgcgccccggcccctcccctccctgtcgccctttccctggacagatcaggccggggtggcgggaggcccgccccaggccagggcccagcgtgtgacataggggccagggcaggccagggtttgtgtgtggaggcgctgtctgtccctcnnnnnnnnnnnnnnnnnnnnnnnnnnnccctaccagcccagcaccactgggaatcatggtgaagccgacgcggcgttgccgagggggtgggttgggcgggggcggggccgggcccccctacgggatgcccacggccattcatcatcttgtccctcgtccccctaccacactccccctcctagaccgccgccctttaacacagtctggatttaataaa

SEQ ID NO: 9292 - DNA, 671 bp, Macaca Fascicularis
  misc_feature (1)...(671): n = A,T,C or G
cccctttgagcagcacgtgaagaacagtaagcacaccnncaagtatgaagnctggcccgaggcactggagatggaaggttgcatcccgcggagaagcacggccagctagcacggccagcgccaggaccaggccgagggaggccaggccaagggaggcacgcgcgctgccaggtggacggaggccgaggcccacaccccacgccnnnnnnnnnnnnnnnnnnnnnnnnnnnnnnnnngggctctgaggcagtgaccagaatgtggtctcaaggtggtggaggatatgggggctgcaggggctagctctgccgcactttgtcacgggagcccagggtacccgcctccttttcgtaacactgttcccccggtcagcccatctagccctgtcctcctccattcttcacaccatctctgtccccatcctgagtcctggagcagccctgggtgcccgcccctcactgtgcaactctgggagcagcccccggcaggttgggacatcttccagaacctctcccttctggaagcaccctctgcactgcgggctaaacatgtttccagtgtgattccnnnnnnnnnnncaaacccggtggctgcttcatgagcaggctggcccggggtggtaaagcagctggagcctgatcatggtcccgtccgtagtttgtcagggggcc

SEQ ID NO: 9293 - DNA, 748 bp, Macaca Fascicularis
  misc_feature (1)...(748): n = A,T,C or G
acaagnnnnnnnnnnnnnnnnnnnnnnnccctgctgtnntnnaatccaatggacnnnnnnnnnnnnnnnnnnngaaacacccaggacctcacttctcagtcacttccacagcctatgactcagaagagccaaacccagaatgaggcctctcttttcctcaccacagcatcccctgacaacatttcgtgctgtagctagaggagtcccagcgcaggattggcttaaaagttttgttaaataaacaggtgcatgaaaggagcctaaggcctttcgttggtgtctgctctcttctttccacttccttctcatctttttctccgtgttttatgcttctctgattccctcttctgcctgcaccaggccagccccagccctttattcctctccatttttacnnnnnnnnnnnnnnnnnnnnnnnnnnnnnnnnnnnnnnnnnnnnnnnnnnnnnnnnnnnnnnnnntgactcatctggggaggttaagttcacgggggacaaaaaaaggattcctagagaagaggcttcctagaccagcacaggctcgagaaagagatcccctaggcctggacttctccggccggcagccagaggcggcctttccccattgctcgatggattccatgtttttatttctcgggggggagcagggagggagaaaggtagaaaaatggcagtcacctttccaagaaaaatataaatggtccaagctgtatagtatttgtcagtatttttttttctgtaaaattcaaa

SEQ ID NO: 9294 - DNA, 729 bp, Macaca Fascicularis
  misc_feature (1)...(729): n = A,T,C or G
ttgacagtagtgataggttagaaatggttgtgcnnaaagaagaactcgatnnnnnnntgnatcatccagatatcaaacaccgtcgaattccnnncttattctttgcaaataaaatggatcttagagatgcagtgacatctgtaaaagtgtctcagttgctgtgtttagagaacatcaaagataaaccctggcatatttgtgctagtgatgccataaaaggagaaggattgcaagaaggcgtagactggcttcaagaaaaaataatacaatcagatccagactgtgaagacatgaaaagataatagttggaaacctctgcaattttcaattcaaggaatctatctaaggcaaacagaatactttacattttgtaaaagatgtttatgcatcaaaaaatataattttctgcttgcatttatggactctgaatgacctttttaagaacataggacttcaggtatgctaattcggccattaattatttaaaaactgaatattccctcaaaagggctccctaaaattatcaacttcttagtgaaggtctacatttgattgtatgtagaatgtctaaaagtcagagttataagcccatcataatttatgatatgttcagtgtattttattttttaattgtcttttttaaaaatttaatttatgaatctgcagcacgaattgtgaatgtgaaaaagaactataaacatttacaagggacaatgagtaaaagttctt

SEQ ID NO: 9295 - DNA, 622 bp, Macaca Fascicularis
  misc_feature (1)...(622): n = A,T,C or G
ggtcacccccaccatcaccaccatcaccatccaggcttgagagcccctggctacccctcttcaccagnnnnnnnnnnnnnnnnnnnnnnnnnnnnnnnnccaccactgcaacctgaggaggatgacgatgaggnnnnnnnnnnnnnnnnnnnnnnnnnnnnnnnctatgatagctcagaaagggacttctcactcattgatgatcctatnnnnnnnnnnnnnnnnnnnnnnnnnnnnnnnnnnnnnnnnnnnagccccagcatgggccccattgcttgggcggctgctgtatttttcatttactctggcccttggactatggaaacgtgggaggggcaggggagatgtggggaagtccaggactccaggaggtgaaaaggaaaaaaaaaaatgtacctgattgctcccaattatgagaggattgggtgggcaggggaactcctaaaataatacatgaccacttcctcatttctggggaaggaaaggagactagagcagctggtgcgctcacccctccctagtcacctccattaaccacagactatgtagcgnnnnnnnnnnnnnnnnnnnnnnnnnnnnnnnnnnnnnnnactgtggatacagctggagggtcaggaactgt

SEQ ID NO: 9296 - DNA, 732 bp, Macaca Fascicularis
  misc_feature (1)...(732): n = A,T,C or G
cgcgccggggnnntcgtgtggctgcaatccgtggccacggtggccgggagcgggaagagccccggggagcaccatgtgctttgggtcagccnnnnnnnnnnnnnnnncgagggtggccaaactcctttnnnnnnnnnnnnnnnnnnnnnnnnnnnnnnnnnngaggaggcatccagcccggggccagagcccacagagctagagcctccgactgaagggaagcaggctgcccctgcggagaacgaggtcccccagacccagggcaaacgcatcaaagtggagcccagcccgagggaaaccaaaggctcagaggacagtggcgatgaggatccctccggccacccggccaccccgcggcccgagttcacctctgtcatccgggcaggggtcctgaagcaggatccggtgcggccatggggcctggcgcctcccggggaccccccgcccgccctcnnnnnnnnnnnnnnnnnnnnnnnnnnagtgcgaggnctgtgcacgcccggcaccatccgctacggccccgcggagctgggcctggtgtacccgcacctgcagaggctgggtccgggccccgcgctcccggaggccttttacccgcccctgggcctgccctacccggggcccgnnnnnnnnnnnnnnnnnnnnnagggggactgaggactggcacagccgccggcactggaccctgcgacgactgggggccccccgggacagcgggcccgactgtgcccg

SEQ ID NO: 9297 - DNA, 749 bp, Macaca Fascicularis
  misc_feature (1)...(749): n = A,T,C or G
tgacctgggcgacctggnngtcatgatgttctgtgaagtgctgnnnnnnnnnnnnnnnnnnnnnnnnnnnnnnnggttgtctgaaatgtannncaattatgagacaaaaagcgcgttagaaacacttcaagaagaaaannnnnnnnnnnnnnnnnnntttgagccttcgtggtaggnnnnnnnnnnnnnnnnnnnnnnnnnngcggtctccgggccctccagccgggggtcctcaggtggagcgagctgcgacccatgcaggccaagagcacagctctgtgatccttccgggggagtgtcggagaggagagcgcgcccgccgggccttcgtgtggagagctggggcgtctcctttgcgcccgggtgagggagacaccagggcnnnnnnnnnnnnnnnnnnnnnnnnnnnnnnnnnnnnnnnnnnnnaggatgttcctcttggtgacctcatgtaattagctcgttcaataaagcacttcctttgtctttatttttctcttctcactgtctaactttctttttcctatctttttttcttctttgttctgtttacttttgctcatatcatcattcctgctatctttctattaactgaccataacacagaactagttgactatatattatgttgaaatttnnnnnnnnnnnnntatttatttaaaatttttgtaatactgttgttttctaataagaataatccatgtttgtgtagctagttgaaaattcaggaatatgtaaaactttttttt

SEQ ID NO: 9298 - DNA, 664 bp, Macaca Fascicularis
  misc_feature (1)...(664): n = A,T,C or G
ctggggaggggcacnnnnncagcggggcaggacnnnnnnnnnnctccagagcacaaaatgtgnnntctacaagcactgtccccagcccaagtcgaaccatgccttcctgtccctatcccagcagagccacaacccagtctccatcctggacagccccnnnnnnnnnnnnnnnnnnnnnnnnnnnnnnngaggannnnnnnnnnnnnnnnnnnctggaaatgtccctggcagagaccaaaccccaggttccaagttgtcaggaggaagaagacctagctttagcacaagcactgtcagccagtgaggcagaatnnnnnnnnnnnnnnnnnnnnnnnnnnngctcgaagccatccaactgcagcctgtgctagggccctgggcttggggagggaggttcacctgaggaggactgtggccctcacacctctagggtacacagggagaggcggcccggagtagcctggagggcagagacaagcgagagtgatgtcgaggtcgccctgggagcctctggaaggccttgctagtgttccagctgcatgggagagagcagctagnnnnnnnnnnnnnnntgggccctcggtggatgctggccaggccctgctctcagtcctatcatcatgtcatctcccttnnnnnnnnnnnnnnnctgacactggagtgg

SEQ ID NO: 9299 - DNA, 726 bp, Macaca Fascicularis
  misc_feature (1)...(726): n = A,T,C or G
ggcattnnnnnnnnnnnnngcacnnnnnnnnnnnnnnnnncctcnttagccggggnnnnnnnnnnnnnnnnnnnnnngccattgcatctgtcacagtgacttttcaaatatnnncagctcggccttcctgggctatgtgctgtatggagagtgccaggaggtcttgtggtggggaggagtgttcctcattctctgcggactcaccctgatccacaggaagcttccgcccacctggaagccccttccacacaagcagcagtagcaccacttggctggacggactagctgnnnnnnnnacgatggtgnnnnnnnnnnnnnnnnnnntgtgggactgtgtcctagggcgacccagttgtgcagcnnnnnnnnnnnnnnnnnnnnnnnnnnnnnctctgacggagcaggcttgagggtggacaactctggctctgtaaggagaggtgcagccacagcagtgttctactggaannnnnnnnnnnnnnnntgcagtgctttggattcttgctcccaggcccaccccagtgagccttcnnnnnnnnnnnnnnnnnnnnnnnnnntctgctttgtgtatggtacttgaaaccatgctgtaattattatcnnnnnnnnnnnnnnnagccagtcatgtaactctagaagcagtgactggtggggccttctgacnnnnnnnnnnnnnnntatcaggccatctgtgtcatgcttatgtattatggcaagaagaggaaa

SEQ ID NO: 9300 - DNA, 728 bp, Macaca Fascicularis
ggcatgcctcaaggatgcggggagccagcggactctcgatgacacgtgcttgcctgttggctgctgcggctgtgggcgagcatgggggctgttctgtgtctgttgtgggaagtagctgctgagtgaaatggcgggggccgctggggtccatcttcacactgcataggtctcttccagcctggggaccccacttcagaaggtaggggccgtgtcccgaggtgctgactgaggcctgcttcaccctccccttcctgctgtgttggagtaccacaggggaccagggccagcacaggggaccgtctcagaagactctgcttttccgtccctttttctccacactccactgacaaacgtccccgaaggtttccacttgtgggtttcaggtgttttcaagcacaccccaccaaaacaagcaagtgttttttcagtcgttttgcttttttgttttgtgctaacgtcttactaatttaaagatgctgtcggcaccgtgtttatttatttccagtggtcgtgctcacccttgctgctctgcgtggcgcaggtgccacgcctgcttctcgtctgtgtcccgaccacgcagggccatccactgtgacgtcggctgaccaggccggacaccctctgccgagtaatgacgtgtgtgcctgggaccgtttctattctgtgttaatggctaacctgttacactgggctggggtgggtaggggtgttctggcttttttgtgggg

SEQ ID NO: 9301 - DNA, 765 bp, Macaca Fascicularis
  misc_feature (1)...(765): n = A,T,C or G
ctcttttnnnnnnnnnnaatgtagtggctttnnnnnnnnnnnnnnnnnnnnnnnnnnnnnnnnnnnattatcatcttagcatgtttcagtannnnnnnnnnnnnnnnnnnnnnnnnnnnnnnnnggaaaaaaaaaaaattcaacagaatccgcatttgaagtgtgccattggtacttgtttatgaaattaccagatattcataaatgtgacagatgaacagcaggattatgaattatcaaaggaaaaatatttgctgaggtgaaaaaatctgatatttgaggaagtttttatttttttttatttattttctttttgaggtnnnnnnnnnnnnnnnnnnnnnnnnnnnnnnnnnnnnnnnnnnnnnnnnnnnnnnnnnnnnnnnnnnnnnnnnnnnnnnnnnnnnnnnnnnnnnnnnnagacagggaggaagtttttatttttataaacaaaatctgatgttcagaggcnnnnnnnnnnnnnnnnnnnnnnnnnnnnnnnnnnnnnnnnnnnnnnnnnnnnnncatttcctgactttttgctttaatttagatttttctccactctgtttctagcacaacaatttgcctgctgtgttacaaaaataaatttatactgtcctgtcccataaactgatatatttaatatttttattctttggttttgaacattgtaagttcctaaaaacgttttattaactagacattttgttattaaataaatgtgatctgtcatttctttgtgcagaatgatttgaagtatttagt

SEQ ID NO: 9302 - DNA, 711 bp, Macaca Fascicularis
  misc_feature (1)...(711): n = A,T,C or G
cgtgaaaatttcannnanttcnacgacagagttggagatacattccggtggaaaggggaaaatnnnnnnnnnnnnnnnnnnnnnnntatagtaggactggttgattttgtccaggaagtgaatgtttatggagtgcatgtgccagatcatgagggtcgcattggcatggcctccatcaaaatgaaggaaaaccacgaatttgacggaaannnnnnnnnnnnnnncattgctgattacctgcctagttacgcgaggccccggtttctaagaatacaggacaccattgagatcactggaacttttaaacaccgcaaagtgaccctggtggaggagggctttaaccccgctgtcnnnnnnnnnnnnnnntatttcttggacgacacagccaaaacgtatgtgcctatgagnnnnnnnnnntataatgccataagtgctaaaaccctgaaactctgactattcccaggaggataactcaacatttccagaaagaaacagaatggacagccacttgatataatccaactttaatttgattgaagattgtgaggtgcagtttttttaggaaattatgcataccagtaagggagactttttaaaatgacagctgagtctttgcaagtaaaaagatttagagattattatttttcagtgtgtacctactgtttgtatttgcaaactgagnnnntgttggagggaaggcattatttttaa

SEQ ID NO: 9303 - DNA, 884 bp, Macaca Fascicularis
  misc_feature (1)...(884): n = A,T,C or G
catatacccttcccagaattcacatgtaatctccagtgaacttttaagtggttaaaacttgtattcatgtgaacctttgcaatttttttttttattcatctacacctacagattttctcagtaatgtttttgttagcttttggttccattttttattgtgcatgcaaaatgtacattgatgcctgtgaccttaggtttactaaaggctaggtttatttgggcagtattaggaaaaaaaatcatggatcaagagatactcttgagaatttgaatagggccaaaacaaagttggtgacctaaaggcttgttagtgatgtggagttcctacatgaagtgagtggaaaatgaagtttgttttctcttaggaaaatgggcagctcttttctgcctaatgtgtatttttcatgttaatcctgacagttcaccaaatagctagtcatggagaatgcaggcagttaacttaatatccctccaggaatggttcctacgttgtatattatttggtttcttttacttacctgcttgaatacttgaataaaccattcaccaattttaatccttttattttaatccttttacataaaataatctgaactctttgacaaattgcacagagctctttggcattaatctcattttaatgtactgataaaaacaaacatgggttttcctttactttgacaaagtaatgtaatttttaccttatttatctgtatgaaattccaggagttaatttgaacatttatttatatgacgtttgtatttttaggtctttaatacagtgtttctacctctcatttgtaactgcatgcattattcttgaaactaggtaaaactcactgaattgttgtgtaatagcctttttannnnnnnnnnnnnnnntg

SEQ ID NO: 9304 - DNA, 709 bp, Macaca Fascicularis
agggctggaggggatggtcaggggaaaggaggaatgacgctcaacctgcccaggtctggacacaactacaaagaacagcaggacagaggtggcctctgtcctgaggcttctcatcagatgggaagtggctgtagtctcagtggatccccactggcaccaacagtgtgggtgggcctcatgtaacatctgggaggggcttcatccccccacccaaggcccagtgctatgccgcccgctatctggggccctgagaaaaatgtgcaggtctcgagcgcggagctgctcacgccttggcccccaggcccctggctcatagacacagggcttgagcagtgctctgggcatcggaccaaagcctgggcacaccctgcctctctccccagagcagggtccctgctgaggactggcctagagcaagcactggaaaagaggccctgccatacaccctgcatacccactgccaggaccctctcagacaagtgtggcacagccatgctgaccttccatctggtgaaccaagtggcagccccaggggcccgccctgcaggtcacagctcagcaagtctagcagaagccatgcttgttccccgtgtacctctggagaagcagaaaccaaaatccccctgtgccctgggagggtggggtcctctaatttattagtgcccagcattccttccaacgggaagtagacgagtgactgctttgtcac

SEQ ID NO: 9305 - DNA, 708 bp, Macaca Fascicularis
  misc_feature (1)...(708): n = A,T,C or G
cacattcacacannnntgcngggagtattaatcccaacccacatttccccccaaaaaatgagatctcacctggtctccacgtttccgcgtcnnnnnnnnnnnnnnaactaattcctgctttctgnnnnnnnnnntcttctcttccctacnnnnnnnnnnnnnnnnnnnnnnnnnnnnnnttcaaaccnnnnnnnnnnnnnnnnnnnnnnnnnnnnnnnnnnnnnnnnnnnnnnnnnnnnnnnnnntttcctacacannnnnnnnnnnnnnnnnnnncttgactcccactcttgcctctcctagctccaaagaagggctcagggccttccccacagatctaacgactgnnnnnnnntgcctgtccactgaggttcctcctaaaacnnnnnnnnnnnntctggtctgggccctgtggccctctgggaagcttcgtaccccttttgggggatctcggggtggggagggacaagctagttccccaacctcctatggctgctttctatgctnnnnnnnnnnnnnnnnnnnnaaccttcttgaaacttctccctgcacatactcacagaaaggagccaatggtgctacttcccctctctcctcctcaacctgggaatacttcagatatcaaaactcatccttgtgtatagtctcacacccttccccatgtgtataaatgggcccatatttaacacattttgtgattttgggtta

SEQ ID NO: 9306 - DNA, 697 bp, Macaca Fascicularis
  misc_feature (1)...(697): n = A,T,C or G
aggcannnnnnnnnnngcccccagggatgattgtgaaggaggcccctccccttgtgaggagggggcgctcctctccagcccctcgtaccacagtcctcatgatggtgcagcgatctctannnnnnnnnnnnnnnnnnctgctttccgtctcttgcctcatccctttttggcagctccagttcaggccgtggagggacgtgatgctgggctatgtttactaaacccacgggttttcagcctcttaagcccagctccgatctccaattagttgggagcgctgggttgactaacctctggtatctgagcacagacagagggtgctgtgggtctgctgggtggcagaaatggttccttccagcgtggcgttctcttctggccgctcctcctgctgcctctgactactcagccttgttttcggtgtgtaggccccagctgcccacnnnnnnnnnnnnnnnnnnnnnnnnnnnnnnnnnnnnnnnnnnnnnnctggctgcacctgggtagggatggtggcaccgatgcccctctgtctgctgaaggacctgttgctgcttctgtcttttcacccctccttggnnnnnnnnnnnnnnnnctctgatgatggcattctcctggcaagagaaaaggacttaactagacttctgaacttgaacagtttcaggttatattttaattttttttttnnnnnnggttctga

SEQ ID NO: 9307 - DNA, 722 bp, Macaca Fascicularis
  misc_feature (1)...(722): n = A,T,C or G
gatannnnnnnnnnnnnnnnntnnntaagtgatggtacatttgtccatgtaacagaacaaaagatccatttggaaattttttttactgggtatcaccttacatggtatcactgggaacatttatggaatcaacacttctgtagctcagtgacaggtgggggttatttaagtgcagagcaatattaaaatgtactggtgactagtacatgtatttctccataagcagagttgccaaatcaataaacatacaagtttgtactttgatcttcaccaggtcagtggattgcttcaaaagcaaagttttgtgcaagcactcactatgctctctgtaagagcctatggccnnnnnnnnnnnnnnnnnnnnnnnnnnnnnnnnnnnnnnnnnnnnnnnnnnnnnnnnnnnnnnnnnnnnnnnnnnnnnnnnnnnnnnnnnnnnnnnnnnnnnnnnnnnnnnnnnnnnnnnnnnnnnnnnnnnnnnnnnnnnnnnnnnnnnnnnnnnnnnnnnnnnnnnnnnnnnnnnnnnnnnnnnnnnnnnnnnnnnnnnnnnnnnnnnnnnnnnnnnnnnnnnnnnnnnnnnnnnnnnnnnnnnnnnnnnnnnnnnnnnnnnnnnnnnnnnnnnnnnnnnnnnnnaagaaaaaagaaagagcctgtgcccacgactaactatagacttttctgctgttgtgcaaagttcagtttcttctcagcaacatcaaggatat

SEQ ID NO: 9308 - DNA, 762 bp, Macaca Fascicularis
  misc_feature (1)...(762): n = A,T,C or G
catcaagctggccctggacnnngagannnnnnnnnnnnnnnagcnnnnnnnnnnnnnnnnnnnnnnnnnnagtggagaggnnnnnnnnnnnnnnnacatttctgtggtcacctccactctttccagtggctatggaagcggcagcggcattggaggtggaagcctgggcctcggtgggggcagcggctactccttcaccaccagtggcgggcatagcctgggtgcaggcctgggaagttctggtttcagtgccaccagcaaccggggcctagggggcagtggttctagtgtcaagtttgtctctaccacatcctccagccggaagagctacaagcactaagagagccgcatggctccctctcccctgccttgaggcctgtttgcagtcacacctggacacctgggtcctcctcnnnnnnnnnnnnnnnnnnnntgcacttnnnnnnnnnnnnnnnnnnnntactggctacaccccattcccagnnnnnnnnnnnnnnnnnnnnnntgacagtgcccagactgccggcagcacctgtctgctacacatgtaaaaccaaaacctgctctctcccggggctctcattcagcctatcttgtgaggcccaggcagctggaaagtcctcctccagctccacctccctccctccctccagatgcagaggttggggagtctgtctcaacgctaggttgtcacccacctgtctcatcgtgtttataagcagcctgttgggagtgagcgctccttctgttccctccctggaa

SEQ ID NO: 9309 - DNA, 787 bp, Macaca Fascicularis
cccacatctgctccccagtttcatgtggggcactcaactgacattcccatggggtttccctcccatctgcctgatccacctcctcctcccactaggagagttgggggttggccacaattgatctcttttgggaggggtggctaccagtgtgtggggggtcatcactgccttggggaggagtggggcagggcagagaatccccccaattcctgcctgaaatctctggcctcacccctgctgggggcaggactgaaaaccctcctcctcaatttggggggtgttgcccccatcacttcccagctcctctgacttcccccacccccgaatttagggtggggtactagtcactgccaatgtgtgcatgggacttgctggaatatggggatgcttgcccctctccagggctattgagcccagagagagctgtcttttcattgggtgaagtgattgaggaagggtctattgtctttttaaatggcacaattttaagggtctgagggtacagtcccttaacctgccacgggagggggcccccaaactttcttccccccacacttgaggttttctgtgtggagggggagcagggatatctaagctgtggtgtgaaagggtaggagagatgctgggggcgggggtgctgtgttctagaccccccatattatcccagtgtcccctgcctccctcttcccccaccccatgcccccaattctgtggcgcatccagattgtgaaaatgtacaataaatgtgtaatgagtaaccaaaaaaaaaaaaaaaaaaaaaaaaagg

SEQ ID NO: 9310 - DNA, 814 bp, Macaca Fascicularis
  misc_feature (1)...(814): n = A,T,C or G
aagacttctgtatggatnnnagtaactctggtgagagttttcannnttattctgctgtgaaacaatcgaatcaaagccttgtgtcagttaagaggacannnnnnnnnnnnnnnnnnngnnnnnnnnnnnnnnnnnnnnnnnnntaagagattggtacctacctanntacaaaagttctacccnnnnnnnnnnnnnnnctcctcaaaaagaccatcagtgttagcacaaactgagcagaaaaactaggctgttgattttctacctgatatttaagccagtggcctactttaattcacaacagttccattttgattagcaggacttttccactttgaagataaaatagcaactttgtcaaagtgactgtactgcaaattcataatgcctgatagttttatatgtagagacttatgtggaaggcatgttaataggtttccatgagacaccaaagaaaagaggactctatactgggtggagcagggtcttcacctttttgtttctgtcaacttgtcatacacacctccagggaccaaaaacaaaagcagctcagagagtctgtgcctgcctgattggaaagtagaagctctggtgtatgctacagcacataatgcatttttattaaaggaaaaaagctaattatgtccatgcctctcataaaactggggggaaccataaagaaaaagaactaaggcttaagttatctgtagtataatcaattaaaagtaatgaatggatgcatgtaaaatggatgtgatttttttttcaagcttattttgcaatcttagaaatcaggttacaccatagctactcaaaa

SEQ ID NO: 9311 - DNA, 749 bp, Macaca Fascicularis
  misc_feature (1)...(749): n = A,T,C or G
agctggcctggcccctcagccacaggcttggcctcgtnnnnnaccgtgagcagacagcctgtggtccctgggcctgagccgtggactcgtagcgccagggtttggaggctgggaccgccccggagaacaatctcgcgctggcgccgcagaggagcccggtgccctccccagcctgcatctggcttgggtacgcgggcccagaggactggggtgacgggccccgtgctgtggtgtcgagagctgagaaaaaccaccaaggccctgagccccacgcccagccctgctttgggccctgagcctcagagcagtggagttgctgccctgtggacacgggctgggaaggcagggcttcccctagcacgtgcggccccggccttgggggtggcctccctgccccgcccctgccggccacaatgtgcaagtgcagcaggggcctcagaggacacctggcccagcacggggctagaagggccggtggacaccggagccgagaagccctccacctgctcacctgagggcccctcagaggctcctccagccaacctgactgggccccctctctcagggtgttagaggcaacttcagtgtccctgttagagcaacatgggtccctccatggggggctgggggcagctccctgctgtgtatttcctccccagggagtggggcctccccaggagctgacaccacaccccctgtttagccctcacggggccccaaggcatctgagnnnntcgnnnnnctnnnnc

SEQ ID NO: 9312 - DNA, 842 bp, Macaca Fascicularis
gatgatagaaacagcacaagtggatgagagagcaaaaggtaatggctctagtcagccgggaactgcaaggcgaggtgtacagattattgatgatgaacctcaagcccagaccagtggtggagggtgctgttcttctggataactgtgtacgcctaagaaattaaaagacagaacaaaactgtggatcatttccctcaacatgaagactgccatattccaagtcacattattttaccaatggaattatagaattaacagtattttaaattacgtttataacactgcagagaccttaagtgctaaacttagtggagtttgtgaccagagaattggcattttctacaaatgttaacaaagcaattaccaatggcctttttacatttttttttctttaatgaggaataatatgcatgtagaaaagacctacttaaaggcttcatttatattctttcaaatcaaatctttatttaataacttatatatgttgttggaatggttacatttttgcagccctttgtattttgtggtagtttgaattgtatcacttctaaacagcaaactgtttttgtttctgtttttgtttttaattagcagatatctgaagtactatttttgcagggtttgcacaggcccataactgtctactactttgatataatctgtatacatcctgtatgctgagctggtaaaatacattgtaaattacatattaaatattttatctgcttttacaagcgcaaggtgcaaaaatatatacaatagtctcattgatgactgtaaagtgaattaacatttggtgattatgcctaagcttttttgactaatataaagatcataactcc

SEQ ID NO: 9313 - DNA, 892 bp, Macaca Fascicularis
  misc_feature (1)...(892): n = A,T,C or G
atgacactatataaaattttcatttgagagtttctcaattgtatctagttatatagcacagtttggaaacttgtctnnnnnnnnnnnnnnnaataatctaaccgacaaagatcatatccatgtgtatgtggttagatatttttatttaattgactaacccaggacaatttcagtgatgcaaattgtgtgccctctggttctgctgaaacagtcctggactttcaaaaaccttgaataagtctcccacagttgtataaattggacaatttaggaattttaaactttagatgatcatttggttccatttttatttcttttttatttttgttaatgcaaacaggacttaaatgaactttgatctctgttttaaagattattaaaaaaaattgtgtatctatacatacagctcttgaggacttagctttcactacactacaggatatgatctccatgtagtccatataaacctnnnnnnnnnnnnnnnnnnnngctcgatactgttaattacatctccattnnnnnnnnnnnnnnngacctacatttctctatacagctgtgttgcttttgatgttgtgttattgtacacagaagtgtgtgcactgnnnnnnnnnntgtggtccatatggaaagcctggtagccctgcgagttaagtactgcttccattcattgtttacgctggaatttttctccccatggaatgtaagtaaaacttagtnnnnnnnnnnnnnnaatggtaatactaaattttttttgttaatttattctcaaatgccactactgctaggttggtcccctcccaacttgcccctatcctttttttatttttaagaaaaannnnnnnnnnnnnnnnnnntccatctgggnnnnnnnnnnnnnnnntgaaataacttt

SEQ ID NO: 9314 - DNA, 767 bp, Macaca Fascicularis
  misc_feature (1)...(767): n = A,T,C or G
agtttatgatgaannnnnnnnnnnnngagagagtctgtgatatcnnnnngccccggctgcagaannnnnnnnnnnnnnnnnnnnnnnnnnnnnnnnnnnctcgagttagcgctctggaagaggacatggatgatgtggagtccagtgaagaggaagaagaggaggatgagaagttggaaagagnnnnnnnnnnnnnnnnnnnnnnnngaagctaccgagacttggacaagccccgtcgctctcccacactgcgctacagaaggagnnnnnnnnnnnnnnnnnnnnngcggagtcgatctcccaaaaggagaagcccctccccccgccgagaaaggcatcggagcaagagtccaagacgtcaccgcagcaggtcccgagatcggcggcacagatcccgttccaagtccccaggtcatcaccgtagtcacagacacaggagccactcaaagtctcccgaaaggtctaagaagagccacaagaagagccggagagggaatgagtaatggactgtttggttttagtccacatggcctcctgtggatatgaggatatctgtctatgtgaaaggattaagatctcccccaggcagctataaaaatattttagtttttttcttatcaagttaatgaaggaggtgctaagttttgtatctnnnnnnnnnnnnnnnnnnnnnnnnnnnnnnnnnnnnnnnnnnnnnactgtattcaaacttatgagtagaaaggatctgaaggttggggatatgaatgacaaggaaaggatgtggc

SEQ ID NO: 9315 - DNA, 658 bp, Macaca Fascicularis
  misc_feature (1)...(658): n = A,T,C or G
ccggaagggtgttttcacgagtgnngttactggcacagggcccaagggatgggcacggagcccaggatatcctttttgacccagaggtcctggggtccctgggatattgggcttcctctctcaggagcagggcttcttcatcggggggaagaccccagggtctcagaaagtaggcaggggaggagagggtgagggaagggtggaggggctcagggcaccgtgaggaggaggtttcagagtagacggtggtgtcagctccagctcccctctgtcggtggtggggcctcgccttgaagagggaagtctcaatattaggctaagctatttgggagacagctctccccaccgcccctgtatgcgtcatcctagccccccaaaggaaaggagttagggtctcagtgcctccagccacaccccctgctttccccagcttgtccatttccctgccccaaggcccagagctctccctggactggagagcaagcccagcccagcctcagcgaagacccgcttccggtacacccacaggctcgcttcccggggttcattcctcagcctctgcttctcctttttatcccgataagttattgctactgctgtgaggccataggtactaggcaaccaatacatacacggttgtgttttctaatttttttaa

SEQ ID NO: 9316 - DNA, 755 bp, Macaca Fascicularis
  misc_feature (1)...(755): n = A,T,C or G
ggtggcagcaagctggcgtgtgggggagctggcacgcaggcgcctgtggaggtggtcaaggaggtggtgaccgaggatgggaccgtggtcaccattaagcaggtgctnnccgccccaggctcggcagggcagccccagtctgaggacgaagacagcctcgaggaggccggcagccccacacctgggccgtgtcctcgctccannnnnnnnnnnnnnnnnnnnnacggggtgctctacgtctacaggggcatgtttgaggctggcgaccgccaggtcaccctcagcgacctgcactgcctggacctgcacaggatggagnnnnnnnnnnnnnnnnnggagatggacccagaaactcaggagtggctggaggagacagactcggaagaggacagtgaggnnnnnnnnnnnnnnnnnngtggagacgaggatgaggacgaagacagcggagaggagagcggtgcggaggactgaggcatnnnnnnnnnnnnnnngtgtttctctctcattccttcctccttgtgtatcagaagagccccctccaggggnnnnnnnnnnnnnnnnnnnnnnnnnnnnnnnnnnnnnnnnncatgttggttgaagctcttggggccagcctgtgccctgacacacaggagagagctgaaggtgggtggcccaggccagggcgtgaactttctcccatgatttagtctttgatgcggcgctgggccagaagctcaactgagtgcagtgcgggtggattccctcagcagcct

SEQ ID NO: 9317 - DNA, 1133 bp, Macaca Fascicularis
  misc_feature (1)...(1133): n = A,T,C or G
gctgagcactgttagacacacagagacctgcaggctgtnnnagtacgttttgatctctttggggaatctggagtacaggcctctccgcccctgacnnccgaaatgagcaggcactctcactcaccctgggcagctcgctgtcgggtctctctaggcctatgaaccacaaagcagggaagtgggcacattctctcagggtggctcacagctttgaacctgccacaggaccccagcccagcctgacgtggatgtggctgcnnnnnnnnnnnnnnnactgtgaaaaagtactnnnnnnnnnnnnnacccaggcttgccccaagcagaggacagagaagacgctcctcttctcnnnnnnnnnnnnnnnnnnnnctcttgtggttcaaaatctccggcaccatcttgacctcttggctctctctgcactttggccctgtctcgaaaatgtccctcaggtccatttcctgtccagaagactcacgaggactgtgtgacctgcacaaggccacacctgggcaggctgttgctatctccttggtccttaggcagatacttccctgggtcccccatctagggccagctgcagagggcttctctctaggcagagcgttcctggccggagctctacctccttgcctcctgctgacccagacagcgtcccgtggcatttctttcctttctgcatattgcatagccttgtcctcctgtgtgcctgagctcctcccttttcaataagattattagtcctgcatgtctgtgagctgcctttcatcacnnnnnnnnnnnnnnnnnnnnnnnnnnnnnnntggaaagatatctccaagatgaggtccacccccacagcagcagatctcaagtnnnnnnnnnnnnnnnnntaccagctggagggacacccctgggtttttgtacaaagctatttgatgagcctgagccttggggactcagcaggctggagcttggggcctggtggaccatcacctggtgtctgtaagtggacccagtctcccacaggtgataccaacctgaggggggcatctttagaggcaggcacatgggcagccctgttcccttcgcctccactgcaaggcctggggagatgttgttttcatgctgcttctaccatcacactngggttc

SEQ ID NO: 9318 - DNA, 688 bp, Macaca Fascicularis
  misc_feature (1)...(688): n = A,T,C or G
caaatacattaaanctgaaatagtcatctcaatatgctaacgatctgaaaacattttaagcaactttttttcttactcaagataaactagttatgcttttaaaaaacagtttttccatttggttatcaacaaagctctctgaactactgtacctttataaagcttacccaatattatggtcatttctgcctgtatataaannnnnnnnnnnnnnnnnnnnnnnnnnnnnnnnnnnnctcccaaacaaacaaaaatactaataggactgataaaggataaaatcaaggaaaaggtaataatgaaaatggaatcttgggactgctgggatcttggaaaaaggtaggccaatatattaagataataagagagatttaggtaaaacagaaaatgttttacagtaggtttttaacacatattgttaactactctttacaatgtagtaactgctatttcatcttctttctcaaaattcctatcaggtagtaacttagaattccatttctttatatacacaatctttcatatacaaaatgagcactaccctggaactcaagtatttatgagtgaagaatgtaaaccccatagaggcagtgctatacaatgtacagcatggactctggagtcagatggacttgagtacagatcaaccttttcaccagttgcatgattttggtcagcttacctgttt

SEQ ID NO: 9319 - DNA, 687 bp, Macaca Fascicularis
  misc_feature (1)...(687): n = A,T,C or G
tttttttttcatttttgnnnnnnnnnnnnnnnnnnnnnnnnnnnnnnnnnnnnnnnnnnnnnnnnnnnnnnnnnnnnnnnnnnnnnnnnnnnnnnnnnnnnnnnnnnnnnnnnnnnnnnnnnnnnnnnnnnnnnattacagatgcccgccaccacgcctnnnnnntttttgtatttttagtagagtcagggttttgccatgttgatcaggctggtctcgaactcctgacctcatgatctgccctcctcggcctcccaaagtgttggaattacaggcatgagccaccgcgcctggcccactttggctatttttaaaaataggacctgttgttttggattactatatgagaatttcatggattcactcctgggtataggagataagaatacatttaattcataacttttatattaaccaatatagtaaaacaataaagctgacacatacaaaaactaagttgcctttccttgaatgaaccctgcctgaataaaacaatgaaagaaaaataaaaataaaaataaaaaattaatggtatgtagtctaatttgtaaatgaatgaatatggaaataatacacactgtggatatattttaaggccttatgtagttttaattgttctgcttgttccgtggttatgtctaagactatagtatacgattcttcttcaaagtatatcaagtattgtga

SEQ ID NO: 9320 - DNA, 313 bp, Macaca Fascicularis
  misc_feature (1)...(313): n = A,T,C or G
caagttcacttcatatnnnaagcattatctttactcttttgagnnnaatataacttatattacactgtaaaagcttctttaatactatttttcaagtcttcaccaagtatcaaagtaataacacaaatgaagtgtcattattcaaaacagtccactgactcctcacatctgttatcttattataaagaactctgtagtaactctttgtagtaacattctaaaacagaaattgcatttttgctatgccacattaacattttttaaagttgatgagaatcaagtatggaaaagtaaggccatactcttacataat

SEQ ID NO: 9321 - DNA, 758 bp, Macaca Fascicularis
  misc_feature (1)...(758): n = A,T,C or G
gccagagcattgcacaaatgcccctgtttatcgataggtgactacttactacacatgactcataatgctgtgtcttgtgcacgtctgctctgatatacttcgaacaatgtagcagacactgtcttttctnnnnnnnnnnnnnnnnnnaaacttcttcctaaggagatttgtattctggcctacactgcagtccttgattgttgacagtcacagaattccaaaccaagtagtgtctatcagcccttttaactctgtgcacaccctatttaccctatttcagtcttacatttgttcttctagggaatgtatgcatctctatatatattttccctctcaaaaccagaacatcaacactgctgtttctgacacttcagacatcccacgcaaagccacattgaatttttgccaaatgaaaaatgcatccaacaatcaagtttctaagaaggtgtcaagtggggaataataatgtataataatcaagaaattaatttattaaaaggaagcagaaacattgaccatctttttcccagagaagaggagaaatctgtagtaagcaaaggacagaccatgaatcctccttaagaagtagtcctctcagaaaggagaagcaccactcaagttcttttaacccaagactttagagaaattagtccgagatttttatatgttcagttgtttatgtacaaaaataactttctggattttgtggggaggaggaggagaggaaggaagttaatacctatgtaatacatagaaac

SEQ ID NO: 9322 - DNA, 1011 bp, Macaca Fascicularis
  misc_feature (1)...(1011): n = A,T,C or G
tgaaggaggagaagtaccagttntaaatgtcagttataagccacagaaaattagtcccaaatcaactggaagtgttcgccagttactacatgaaaagataagagatgcttatactcatccacaatttgtgacagatgtgatgaagcctctgcaaattgaaaacatcatcgatcaagaggtgcagacattatctggtggtgaactacagcgagtagctttagccctttgtttgggcaaacctgctgatgtctatttaattgatgaaccatctgcatatttggactctgagcaaagactgatggcagctcgagttgtcaaacgtttcatactccatgcaaaaaaaacagcctttgttgtggaacatgacttcatcatggccacctatctagcggaccgtgtcatcgtttttgatggtgttccatctaagaacacagttgcaaacagtcctcaaacccttttggctggcatgaataaatttttgtctcagcttgaaattactttcagaagagatccaaacaactataggccacgaataaacaaacttaattcaattaaggatgtagaacaaaagaagagtggaaactactttttcctggatgattagactgactnnnnnnnnnnnnnnnnnnnnacttattaaaaggaatatttgctagaaattttgtcatgtaaaacttgaatcaggattttatgccccaaatactctggaacttgaagtataatttacttaatataacataaaaagccagttgggttctaacttttctgttcctgatgaggcccttttgtgcataatattctaaaatgaagacatttcagactacaaattacctccaagttttcatgatgtatgggaagattttcagtaggtgtattatnnnnnnnnnnnnnnnnnnnnnnnnnnnnnntccattttttaaatcttgaaaagggttnnnnnnnnnnnnnnnnnnnnnnnnnnngccagtgtgaagaaactgcccttnnnnnnnnnnnnnnnnnaagatccca

SEQ ID NO: 9323 - DNA, 345 bp, Macaca Fascicularis
  misc_feature (1)...(345): n = A,T,C or G
gcactccaccgcctcagagccatgcggttaattcctgacttagtttatttttgcaaaacgtcgatctcctcctcccccgccccgcatctgcgaaggcttttaatgggaggggcgtcaaagctcaaaactgccttcctctctcctcccccctccagttgtaaatgccacttcatgaggggaggggtgaggggaagccctccccctgcatgcttctggctggagcacctccctggggagtggggggattgggttgtgggcagtccccatggccgcctggagaagccgctggtgcccgggggtgtggggcggtgtggcgggcgcacactgtatnnnctataataacca

SEQ ID NO: 9324 - DNA, 736 bp, Macaca Fascicularis
  misc_feature (1)...(736): n = A,T,C or G
ttaacaaccnnnactgttccatataaagctgtactttnntcatcaaaattgataaaggaatatagagaaaaagaaattacaattatcaatcctgcacaattccctgataaatcaaaagtaacagaatattnnnnnnnnnnnnnnttgggcactattatcacaccagatgaatacactggaaaaataatgatgctttgcgaggctcgaagagcagttcagaagaatatgatatttattgatcaaaatagagttatgcttaaatatctctttcctttgaatgaaattgtggtagatttttatgactctttgaaatccctatcttctggatatgctagttttgattatgaagatgcaggctaccagactgcagaacttgtgaaaatggatattctactgaatggaaatactgtagaggagctagtaactgttgtacacaaagacaaagcacactcaattggcaaagccatatgtgaacggctgaaggattctcttcctaggcaactgtttgagatagcaattcaagctgctattggaagtaaaatcattgcaagagaaactgtgaaagcctataggaaaaatgttttggcaaaatgttnnnnnnnnnnnnnnnnnnnnnnnnnnnnnnnnnnnnnnngacaagcagaagggaaaaaaaagctnnnnnnnnnnnnnnnnnnnnnnnnnncaaaagatgcttttataaaagtgctgaaaacacgatcttctaaataattgg

SEQ ID NO: 9325 - DNA, 898 bp, Macaca Fascicularis
  misc_feature (1)...(898): n = A,T,C or G
atcaatnnnnnttgnnnnngggactttgtttgtcttctggcgtgagctacgagacaatgtgattacacctcgagacacaacaatgaccttcacatgctttgtgttttttgacatgttcaatgcactaagttccagatcccagaccaagtctgtgtttgagattggactctgcagtaataaaatgtnnngctatgcagttcttggatccatcatgggacaattactagttatttactttcctccacttcaaaaggtttttcagactgagagcctaagcatactggatctgttgtttcttttgggtctcacctcatcagtgtgcatagtggcagaaattataaagaaggttgaaaggagcagggaaaagatccagaagcatgttnnnnnnnnnnnnnnntcttttcttgaagtctggctctgggagaggagtggacaacagctggttgagatannnnnnnnnnnnnnnnnnnnnnnnnnnnnnnnagaagatgtgagctgtgtctaagtccagtcttgtgcccagccgtgtctgcaccttcactctttggaactctgcatacaacatcttagcaccatcttcctgcagctcttccttacctaaataaagaaacaatccaagggcagtatttcaaaagcactgtaacagcttttcatttccccacatatactacaaattccatacagaaaacaatgcattgaaaaaaactaagatgtttttctcttctggcttcataaatgcctnnnnnnnnnnnnnnnnnnnnnnnnnnnnnnnnnnnnnnnnnnnnnnnncctaactttattcaacccatcagaatttactttttccctgaaataagatctcttccactggtctactacctgactataaacatgtctgcatttgnattctctaaaccct

SEQ ID NO: 9326 - DNA, 740 bp, Macaca Fascicularis
  misc_feature (1)...(740): n = A,T,C or G
gaagtaaaaggcaaaagcngggaattggaagtactgactgcaaatatccaggatctaaaggaagaatattctaggaagaaggaaactatttctactgnnnnnnnnnnnnnnnnnnnnnnnnnnnnnnnnnnncagaaatctgcagacttgtataaagatcgacttggactagaaattcgaaaaatttatggtgagaaatnnnnnnnnnnnnnnnnnnnnattgaccctaagaatcctgagagcccatttatgttttccctgcatctaaatgaagcaagggactatgaagtgtcnnnnnnnnnnnnnnnnnnnnngggcctagcagaatttcaagagaatgtaaggaagaccaacaatttttcagcttttcttgccaatgttcggaaagcttttactgccacggtttataattaaggtacaaatagtgtatataaaaatggtttatttttcttgtctattttgtgtctctttttaaaagaattctcattatctgctgtctgcctgtaattctttggtatttttgtaacattctgtgtggcatacttctttcaatcacagtagtccatccttatctacagttttgctttttacagttctagttacccacagtcaactgtggtccaaaaatattaaatgggtagaatgcagtacaagacattttgagagaaagaaacatttcatatacataacttttattactgtatgttgttacaattgttctattttattacttattgttg

SEQ ID NO: 9327 - DNA, 711 bp, Macaca Fascicularis
  misc_feature (1)...(711): n = A,T,C or G
atgtttgtagccaaaacctcannnttttcctcagggcatcaagttatcagcagatgtcaaaccatttgtccccagatttgccgggctcaatgtggcatggttagagtcctcagaagcatgtgtcttccccagctcnnnnnnnnnnnnnnnnnnnnnnnnnnnnnnnnnnnnnntgaccgagtatgtatctttctaaatgtcttgcctgggacttgctttttggatttaatggtgattagactttcaaatactcggcagttactgcactcaagttctgcagatggcagagaatgctcttcagtcaagaagagtctgagccagtagcacaacttaactgtaaactgtgccaaaaaacagaagctttaattcccctttttttccttcatactcattgtnnnnnnnnnnnnnnnnnnnnnnnnnnnnnnnnnnnnnntgttagtannnnnnnnnnnnnnnnnnnnggcgctgtgactcacgcctgtaatcctagcactttgagaggccgaggtgggtggattgatcacctgaggtcaggagttcaagaccagcctggccaatatggtgaaaccctgtctccacaaaaatacaaaannnnnnnnnnnnnnnnnnnnnnnnnnnnnnnnnnnnnnngtggtggtggacccctgtaatgccagctattcgggagattggggcaggagtatccctgaacgcgggaggcggagattgcag

SEQ ID NO: 9328 - DNA, 766 bp, Macaca Fascicularis
  misc_feature (1)...(766): n = A,T,C or G
acagatagcagtnnnctgcaactttagtnnnnagaaatttagttgaggtgttggggttggacctcagntnntgttannnnttttatgtggtggtttctatacatgaatcatagccaaaaactttttgggaaactgttggctgagatagttggttttttaccccactaagacatcaagatacacttgtaaataaagctgatagcatatattcatgcctgttgtacacttgggtgaaaagtatggcggtgggagactaagatatattaacctacctgtgaatcgtatgttgtagaaaaagctgttcccatgtctaacaggacttgaattcaaagcatgtcaagtggatagtagatctgtggcgatatgagagggatgcagtgcctttccccgttaattcctgatggaattgttatactaggttaacatttgtaatttttttctagttgtaatgtgtatgtctggtaaatagggattatattttggccttacaataccataacaaagtttgtcattttgaaatacccaatgccaagtaacaatgcatgctttggcaatttggaagatggttttttctttgagaagccaatatgtttgcattaaatgctttgattgttcatatcaagaaatcgattgaacgttctcaaaccctgtttacggtacgtggtaaaagggagcctgtttggtagagaccattgcatcgctgtccaagtgtttctagttaagtgcttttaaactggagaggctaacctcaaagtatttttttaac

SEQ ID NO: 9329 - DNA, 691 bp, Macaca Fascicularis
  misc_feature (1)...(691): n = A,T,C or G
cttgcaccaaaacagcatagaaaaccagagtgtggtgggaggacccgaagccggttgggggaggatgtgagtaggggcctggagggcgcagggtcatnnnnnnnnnnnnnnnnnnnnnnnnnnnnnnncaggaaggggaggggtggggcaaatgcaccgaggtccccactttttcctgctgccctcggcaccctnnnnnnnnnnnnnnnnnnnnnnnnnnnnnnnttattgctgcccannnnnnnnnnnnnnnnnnnnnnccaacactagcaccacaggtggttccggggcagggagaggcaggaatgggaaaattgcttagagaaagattccactagaatnnnnnnnnttgtgctcagttctctttacttcctacaaccgagtacatgggtcacagggtagagggtgcaacaggacatggnnnnnnnncctccgtgccccccaacacacacctgcacacaggatggtggtgtctgcagcatcacaggtcatgcagggcttggggaaggggaggttcacacacacatagatgcccacggcgggtaccagacagagaacacccctgaatatacacagctgtacatggggaacccccaggtccccaccccaaccctctcccctgtcttgctgtcccccgcaggggaactatattgctttgnnngagncaccnnnngggctgctctgccaggca

SEQ ID NO: 9330 - DNA, 716 bp, Macaca Fascicularis
  misc_feature (1)...(716): n = A,T,C or G
aaaggcgaggaggctgcaggcagcgtcaggacagaggaggtaaagagcagagcgtgnnnnnnnnnnnnnnnnnnnngaaaaaagaggcagcaacaggaggaggacttgaacctagaagatggagatgaggaaactgttttaggtggtggaaccagggaagcagagnnnnnnnnnnnnnnnnnnnngagaagcaagaagaaaagacagcagcatgaagaggaggaggacatcttggatgtaaaggatgaggaggatggcggggctagggaagcagggagcggagcacannnnnnnnnnnnnnnnagaggtaagaggaagaggcagcagcatgccaagaagnnnnnnnnnnnnnnnnnnnnnnnnnagaaagccaaaaagaagaaacagaagagagactaaagnnnnnnnnnnnnnnnnnnnnnnnnnnnnnnnnnnnnnnnnnnnnnnnnnnnnnnnnnnnnnnnnnnnnnnnnnnnnnnnnnnnnnnnnnnnnnnctcaatgaggagtccctcccagaaaggaaactgatctctgggacgtcagctgctgagaggagcaggcggtagtaccaacccttagttgagggagtcagcatagtcccctctgcagcttctaacccaggatcataaactcaggtgcctagagaagccaggcagctaaaggataaggaatgctgggggctgtgggaacaggaatgcagatacccttgaaggag

SEQ ID NO: 9331 - DNA, 733 bp, Macaca Fascicularis
  misc_feature (1)...(733): n = A,T,C or G
gaaagccatcgaatgtggcgattcagtgggcagatagagagagtgacttggaatcacttttcaccttgtcattttttggccagtacagatgacggctttgtgtataatttggatgcacgttcagataagccaatttttacacttaatgcacacaatgatgaaatctctggtcttgatcttagcagtcaaatcaagggctgtctcgtgactgcttcagctgacaaatacgtgaagatctgggacatcttaggagataggccaagtctagttcattctagggacatgaaaatgggagttctcttctgttcttcatgttgccctgatttgccatttatttatgnnnnnnnnnnncaaaaagaagggcttcggttctgggatataagcacagtctcttcagtaaatgaagcatttggaagacgagagaggcttgttcttgggagtgcaagaaattcatctattagtggcccttttggcagcaggagctcagacacacccatggagtcttaatgaagatcatctaatttcctctttaccttaactggaaattttgannnnnnnnnnnnnnnnnnnnnnnngtgtggcagcaaccatgcagagtgactgagacacaattcatttctgattgcctgacattcctttctgcaactgtggtggcaccacaaacagagccggtctttgtgcttgctcttcaaatggatggtttgtaaggctcttgttgcatttctaaaaaaga

SEQ ID NO: 9332 - DNA, 752 bp, Macaca Fascicularis
  misc_feature (1)...(752): n = A,T,C or G
tacacgattccgccgactnnnngctggaggcctgtaagannnnnaactacacgcagtatcagcacgtgtgtgacgctctcttcctcatcttctccttggtcttcttctacacccgactggtcctcttccctnnccagatcctttacaccacatactacgagtccctcggcaacaggggccctttnnnnnnnnnnnnnnnnnnnnacggnnnnnnnnnnnnnnnnnnnnnnnngcacgtgttttggtcttgcctcattctgcgcatgctctgtagcttcataaagaagggtcagatggagaaggacattcgtagtgatgtggaagaatcagactccagtgaggaggaggaggcgggagcccaggaacctctgcagctaaagaatggggcagctcgagggccgaggccagcccccactgatggccttcggagccgagtggccgggcgtctaactaggcacataacggccacatagccaggcagggctggccgtaaagggctgcccccaacgccttggatatttctggggtgactggactggcgggccctgggccacctttccggagacagggagggccccacccggggtgggccgggagggtnnnnnnnnnnnnnnnnnnnncttccttctgcccacccgcccttcttccnnnnnnnnnnnnnnnnnnnnnnnnnnnnnnnnnnnnnnnnnnnnnnnnnnnnnnnagacacctccaggctgtagcctggggactagggggagccccagcctgaa

SEQ ID NO: 9333 - DNA, 764 bp, Macaca Fascicularis
  misc_feature (1)...(764): n = A,T,C or G
tttcatccaggtgttcntttaagtattntcatttatatgttcatagaagtcatcagatcaacacattcactccaacacctgggtataaaggcgaattaaaacctgaagaattactttattattcattaagaactgcattcccacatcctcacaccaatatcttccactgttactgtgcagtcatactaagagttgggttatgtgatttatgcaaaattgttattggtgtgttctaatgatttttttccaggaattcaaataagtgaagtacaaatacttagcaccatagattgtaaaaatagaaagaagaaatgagaaaacttaatgtcgttcttgtacagctgagttttgcttctttataaactgtctgtcaaaatcaggggttgctgttagactgtcaagcagaagtgatggatgttcaaagaggcgggttgccccagtgttttctaactttcaaggtgagaattttatgttctaataagaaaaatacaactcattcttaaccaccccccaaaacagagaaaacacatacatttatgcattttaaagataaaagtagtttctcaaaaaaaatcagtagtttctctgaaaaccagcttattaaaagtgctgttttatggtgaaaattgaaaccaaatgcactcacatttcgtatcgggtcttnnnnnnnnnnnnnnnnnntcaccattccactagatggcagtgttgcttactgnnntgtcannngcttttttccccctaaatggaatcatnntttttctccc

SEQ ID NO: 9334 - DNA, 731 bp, Macaca Fascicularis
  misc_feature (1)...(731): n = A,T,C or G
agatgacatggcgtcaggccaaccattggccagcgcgtgcggctcagtcagggagacatagctcaagcccggaagctgtacaannnnnnnnnnnnnnnggaaaccctgcannnnnnnnnnnnnnnnnnnnctgcacctggtttcccaaatgggtacccatcttactcccactgcgtctggaggatctcggtcaccccaggggaaaagatcgtcttaaacttcacatccatggatnnnnnnnnnnnnnnnctgtgctggtacgattacgtggaggtccgggatggttactggagaaaagccccccttttgggcaggttttgcggcgataaggtcccggagcccctggtctccacagacagccggctctgggtggagtttcgcagcagcagcaacatcttgggcaagggtttctttgcagtgtacgaagctacctgcgggggagacattaacaaagatgccggtcagattcaatctcccaactatccggatgactacagaccttccaaggaatgtgtctggaggattacggtttcggaggggttccacgtgggacttaccttccaagcttttgagattgaaaggcacgacagctgtgcatacgactacctggaaatccgggatggccccacggaagagagtgccttgatcggccacttttgtggctatgagaagccggaggatgtgaaatcgagctccaacagactgtggatgaagtttgtgtccgatggctc

SEQ ID NO: 9335 - DNA, 749 bp, Macaca Fascicularis
  misc_feature (1)...(749): n = A,T,C or G
ctgtgcaggtgcaaaagnnnnnnnnagcttggtgggtggaacnnnnnnnnnnnnnnnaggtcccnnnnnnnnnnnnnnnnnnnnnnntcatccccaacaggtccctggcagggctggttggtctttctctgctgggcatgctctttggggcctacctgatggtactggcaatcctgagcccctgcccacccctggtgggcaccactgcaggggtggtccttgtggtgagcaagtggggacatgaagtggggaggagggtgttccctggggcaaaggcattcacactcagcctgctgctgtgtccccccttgcaggtactgtcgtgggtgctgtgtctttgtgtgttctcatacgtgaaggtggctgcaagctccctgctgcatggtgggggtcggccggcattgctggcggctggtgtggccatccaggtgggctccctgcttggtgccggcaccatgttccctcccaccagcatctaccacgtgtttcaaagcagaaaggactgtgtagacccctgtggcccctgagcctgggcaggtggggacccaactctacaccacctgccttcatcttgcggctgccacagtgcctgattacttgtggccgaggcaggcttcccccaacacaggaacgnnnnnnnnnnnnnnnnnnntccaaagaagaccttggcccatcaggccagggtgggcaccaaagaccaggctcggagccaggggacaggttggcgctgtgggcttggccccagggcc

SEQ ID NO: 9336 - DNA, 741 bp, Macaca Fascicularis
ctataatcagaattgtaattatgtctccagaggccaatttcattaactctgatgaattaggatcagctagccagattagtaacctctttgtccagccttgatttacagtgcagggtaaagtgcagaccttaaaaaaagcgaagtacctagaagagctccctgcaagtgtaaatattaaggatgacctgtgcaaaattatacccacaccagcactagtggtaattattctaaattattgccaaaaagtttttctttaatcttctgtctttcaagtttacagaaaagaaagtaagtgcattgatgtcattttattatgtacatatatcatgtgcattcaaagaagctgtgtgacaggatatatcaatataaaaacaaggtatatactttattttttaaaaacaaggatattgtggtcaattttaccctataaaacatatttctgtatttatagatcttaaacatggtgaattttttctattacaagtttatttaaaactgctttgtttctcaagttgttattgatacagcaagtgaacctgctgcagacagaagcagaggaaagccaagaacagccttttaatggtgaggaaaagaatgaatgattctttgtaggagccatcagccacttttaggagccatcagccagtgtgttgggaaaagaggtttgtcaagtgttggcctatgggaagaaagtcaatgaatgttttgatgaaatgaatgtttttgtataatggccttaaa

SEQ ID NO: 9337 - DNA, 691 bp, Macaca Fascicularis
  misc_feature (1)...(691): n = A,T,C or G
taccgctagagaggtggacccnctccggattcctccacaccatccacacaccagccggcagcctccctggtgtgatcccctgggcccatttgctgtcgggggagaagacttagacccttttgggcatcggagaggtggcatgattgtggatcccctgagatctggcttcccaagagcacttattgacccttcctcaggcctcccgaaccggcttcctccaggcgctgtgcccccaggagctcgctttgaccccttcggacccattgggaccagcccacctggacctaacccagaccatctccccccgccgggctacgatgacannnnnnnnnnnnnnnctcaagaatgtaacatcccaggcttccctccactctcctggagctgccactgctgtccccatcagcaaccatgttcttgcgggctgggggcaagggattctgctcatatgtttgcaggccggctgggatagcctccccaccccttatcagagccaagacacctgctgcagctctccacctagctgcggatagctcccaaagagaaatcagtgtgtctctttcaccaccagctcctcccctttcaccaccaactcctccccacttcccaagggagactccggcaaccttcagcaacatatatcctcgacnnnnnnnnnnnnnnnnngaacagaatgcattttggatgttattat

SEQ ID NO: 9338 - DNA, 677 bp, Macaca Fascicularis
  misc_feature (1)...(677): n = A,T,C or G
cacgcagcacttgccctcgnnnnnnnnnnncacactattacatagtcctaggagctcttgatctttgtcaccnnnnnnnnnnnccttaggggacggaagggtcaccgcagggccnnnnnnnnnnnnnnnnnnnnnnnnnnnnnnnnnnnnnnagggcaggccccaggtccctggaacaaaaagcannnnnnnnnnnnnnnnnnnnnnnnnnnnnnnnnnnttggcagcaattctaatccgcnnnnnnnnnnnnnnnnnnnntttttcttccctacgttattttgcagnnnnnnnnnccagtacctgtcagaatgagattaccctccaggttccaaatccctcagaattacgagccaagccaccttcctcttcctccacctgcaccgacacggccnnnnnnnnnnnnnnnnagggtggggagtcccccgtggttcagtctgatgaggaggaagttcaggtggacactgccctggccacatcacacactgnnnnnnnnnnnnnnccggatggtagtgnnnnnnnnnnnnnnnnnnnnnnnnnnnnnnnnnnnnnnnnnnnnnnnnnnnnnnnnnnnnnnnnnnnnnnnnnnnnnnnnnnnnnnnnnnnnnnnnnnnnnttttnnnnnnnnnnnnggtttttacataattgccaataatgtgtgagaaacgaaagaacag

SEQ ID NO: 9339 - DNA, 719 bp, Macaca Fascicularis
aggacaccaacatcattctttcttcctactccaggacccaccactattccagttctgggccatttagagagataatggggcgtttattcccctattacctttgctaagtgctatattattggctgtttctcccgtaaccatgctgaaaagggggtcttagggagaactgtcatccgagtggcattcctagtaagttgggcagaaatgacattttccacagctgaaggagtgaagaaccactggccatattagagctctccttccctaggggcgtgggaactcagctacgttcagaattcacgtggcctttgttatgaccagaggagaggcataaaaaaggtactccccaccccacccccaaatctgggtatggttttgttttaactagcaaagttactccagtaatcacaaattatgccagatggttaaagaaaaccctttcagagtacagaatgagaaaactcgagtttgaccagtaagactaatttctgccgtgaagaaccgggaacacacgttcattgtttaatgtactctcattttaagcaccttctttcctgtctcttgattgttttttctgagggaagtgtaaagaatgtctcagtctgccttaaaggaactgtgaaggcttctctgtaatttaagcttgaagtgaactgaaacattgtctaacgtcttcgtggctttagagcttttgttatattgtgcctacaaagcaaatt

SEQ ID NO: 9340 - DNA, 617 bp, Macaca Fascicularis
  misc_feature (1)...(617): n = A,T,C or G
tccgtagatgaggtggtggtgacgaatactgtccctcatgaggttcagaagctgcaatgtnnnaagataaagactgtggnnnnnnnnnnnnnnnnnnnnnnnnnnnnnnnnnnnnnnnnnnnnngagagtccatggcctacctttnnnnnnnnnnnnnnnnnnnnnactaactttcacgagggtctcgaccctggacctcctgagggaaacatggaaaaagcagtgccatgagtgatacagtgtttccttgcaagggaggactggaaacannnnnnnnnnnnnnnnnnnnnnnnnnncggattgatgggtaggagggattgaaagagtcaggaagaagacggagctaatggataaatgtcataacatggccttatatctctgctgtcatcagccctgatccttaaaannnnnnnnnnnnnnnnnnnaaataatctgaaaatcttattgatactaaagaggagttaaaggcacataaagtcttaactctataatgttcatttagttgtttcagctccagggaaatggaggtnnnnnnnnnnnnnnnnnnnnnnnnngctgagcgcctgtggctctgttgctatccagttggcctctcccaaatcaacttcaggtcttt

SEQ ID NO: 9341 - DNA, 761 bp, Macaca Fascicularis
  misc_feature (1)...(761): n = A,T,C or G
ttcactcatcactaccgacatgtgcagttcatnnnnncaccttctcccaatgatgcaaattaannnnnnnnnnnnnnnnnnnnnnttgaagaagtatggtgggaaatacaatcagnnnnnnnnnnnnnnnnnnncaggatggacacactctaacaagttccctagaatagcagatgttattccccagaccaaaggaaacatttcaatatatggaattccttacagtgaacacagcagctacctagaaatgaagcgctttgtccagtggctgaagccccagaaaatcatacctaccgtaaatgttggcacctggaaatctaggaacacaatggagaaatattttagagagtggaaattggaagccggatattgatgatacctccaagtatnnnnnnnnngttgtagcttggatgtagcttgttagtagttaaatctatagagatatgaactgcactttgtgtggaannnnnnnnnngagattattcagatagtttactttctcatttatgtttgaacaacatgttcnnnnnnnnnnnnnnntctcagtgtcatcaaggataactgaaactgggtctccctgggacccttaatttcttgtcccctgccctccatgggcagttatattctgcatcaagccttggaagaggaagcagaggcagattcagagaccagggattaatgataattaataaactagatggaagtattatatatataagtaattatgtatctttaaaattatgagatgaaacttttatatg

SEQ ID NO: 9342 - DNA, 739 bp, Macaca Fascicularis
  misc_feature (1)...(739): n = A,T,C or G
gtatgcccagctggctgtctcttattctgggctggtaaatgacaactggaagcgagggaggaatgagaggagcctgcgtttcatcaagcgctgcatacaagacctgccagcagcctgtatgctcggcccagagggagtcccagtctcatgggtaaccatggacccttcttgtgaagtaggaatggcctacagcatggaaaaataccgaaggacaggcaacatggnnnnnnnnnnnnnnngatacatgaaatatctgcgtcagaagaatattccattttacctctctgtgcggnnnnnnnnnnnnnnnnnccgcagatttgtgcagcagttaggtttctttgagacctcctgtgagtggcaccaatggatttgctatccacagaatctagttccattttagacaatgaagctgcttagtaacctctggcaagccatctcttaatattaaagcagacaccacagaatagctttcttcacttacaaacgcacattgtgcatttatgatatggcaggaactcttctcannnnnnnnnnnnnnnnnnnnnnnnnnnnnnnngctcttgaggagctcacaatccaggctggaggcaggggagggtatagtctttatgcttaagcgttgtagggaaggacggggttaccagtaaacatgtcactagaaagccaggctcagttcttacctctgggaatcagaactctttatgaaacttggttaatagaatcgactatctggaagata

SEQ ID NO: 9343 - DNA, 664 bp, Macaca Fascicularis
taatttttgagaacagcaagccctatttgaccactctcttcagcctgtgtgttcctgctgttttgaagtaatcaaatgctgtgcatggtattttacctgagctgcaacctgttatggacttgaacttctgtttaagttgaaagcaagagtccctgactataaaggaaaaacagcaaaacaaaaaacaagacaaaaaaaactacaaaagtctaaaatacccattggtgatgttttttaaaaaatcttgctttcagctttcaggagttaatattctttgttttaatttgataattggatatggttgatttatattgggtttaaactgtggagctttcatgtttactgtaatttagtcttaaaatattttttacttagtaaccagtgcttttgataatgtggttggcaacaaaccagcaactatttagaagtgtcataagacttcattctttgagtattgggaaagttaattcagatcctactctaaaagcatcttcatatattaaaagattcagacagggatctgtgtagaggagtaatttgcagttatttaacataaacctgatttgcagtgatctctaagtaattctgcaaaatcctattactatgtcaagttattgcttttggtaaattgtctggcccagttattaatgaaagaatatggatt

SEQ ID NO: 9344 - DNA, 718 bp, Macaca Fascicularis
  misc_feature (1)...(718): n = A,T,C or G
gaaaccctcacggatgnnnnnnnngnctttagtctcacccctctcgagtacatcagcannnnnnnnnnnnnnnncatgtccctccccctgaatcttgagccatttgtgactcaggaggactctgccttagagttnnnnnnnnnnnnnnnnnnnnnnnnnnnnnnnnnnnnnnnnnnnnnnnnnnnnnnnnagnnnnnnnnnnnnnnnnnnnnnnnnnnnnnnnnnnnnnnnnnnnnnnnnnnnnnnnnnnnnnnnnnnnnnnnnnnnnnnnnccccgagctgagcccgcactctgccaagcagctggccaccgacatcgactatnnnnnnnnnnnnnnnnnnnnnnnnnnnnnnnnnccgtcccgcaccnnnnnnnnnnnnnnnnnnnnnnnnnnnnnnnnnnntgaggactatagacaggtcagcaaaggcctgccccgtcgcctggccaccactgtggccaccatgcggagtgtgaattactgaccccaccacacacccgaccaccaagagagccaggggtgctgttctgtgactcgccagcacagatttgctcagaaactctgcccaatcttgggcaaagttacttgaaaaagacttaattcagccatgcacagtggctcacacctgtnnnnnnnnnnnnnnnnnnggccaaggcaggcggatcacgaggtcaggagttcgagaccagcnnnnnnnnnnnnnnnnnnnnccatct

SEQ ID NO: 9345 - DNA, 691 bp, Macaca Fascicularis
actttgtagggaatccgcagaaggtgtgtttttgcacttgcagactgctctacctcagtgtttcctcgggagactattcagctgagagtgccctagacagtaacttccaaggtcacatttactatttccatggaagtaccttgccaggacacctacccatcattatagaacagctaccttcagctgacccctttcctcacagggaccaagacaaagcatgggacatgaaattaagagtgaacttcttatgggaggctgcagctggatcagaggaaaaatccagtgtggcagagtgaaagtcagaagacctggcttttcatcccagctttgagacttggaactttttgatggacaaattgataaacctctttaagcctcagggtcctcatctgtaaaatggggatgcctaccttatggggttggtatgaggattaactgagataacacttgaaagtgccttgcatgggcctggcatgtgggtgctcattacatagtcctcttgctttcttgcctctgggttggggattcacagcactgcactacaagggtagcccctctccattctggataccttgctaggggagagtctgggcttctacctgtggccagggtgaggggagaattcttgccttgtcagagatggatcaatgactatgaaaaacctagcctgtgattttttttcactctaagc

SEQ ID NO: 9346 - DNA, 1130 bp, Macaca Fascicularis
  misc_feature (1)...(1130): n = A,T,C or G
agggacttgtccggcnnnnnnnnnnnnnnnnncgtgctgcagagnctgctgntcccattcgccgtgctgcccatcctcacgttcaccagcatgcccgccctcatgcaggagtttgccaannnnnnnnnnnnnnnnnnnnncacctcctccatcatgatgctagtctgcgccatcaacctctacttcgtggtcagctacctgcccagcctgccccaccctgcctacttcggccttgcagcnnnnnnnnnnnnnnnctacctgggtctcagcacctacctggtacagtagggccaggggatgccttaggaatgggtgaggtctggacctgttgccttgcccacggagccacctttctggcccacagctcccaccaccacttcctgtatgggctccttgaagaggaccagaaaggggagacctctgcctaggcccacacccggggcctggctgggagtggcatgcgtggcgtgactggcctgctggatgtggagggggcgcatgcagggagcaggatggagtgggacagttcctgagacctgcctttagggctttaggggctttagggatctgctatttcctagcacagccatgtgattaacctctgggtctcagtgtcctcatctgtaaaatagagacaacaccacccttgctatggaggttgagcactttaacacagtgcctggcactggggacaaaaacaaacaaacaaaaaacatttcaaaaggtatttactgagcaccttcaggcgtgacctgccagcccaaggacgggtagggtaaggacttggggacttgggcaagacacacaggctccaaactggagcttgaaatagtgtctgatgaatgtatgtttgtttgtttatttatttatttgagacagggaaaggnnnnnnnnnnnnnnnnnnnnnnnnnnnnnnnnnnnnnnnnnnnnnnnnnnnnnnnnnnnnnnnnnnnnnnnnnnactgattctcgtgcttcagccccgggagtggcgcgcaccaccacgcccagctaatttttgtatttttagtagagnnnggggtttgccatgctggccagactggtctcgaactgccggattcaagtgatcccgcccccacctccgcctcccaaagtgctgggaatagaggc

SEQ ID NO: 9347 - DNA, 778 bp, Macaca Fascicularis
  misc_feature (1)...(778): n = A,T,C or G
accagatgatgtgccagagtcgatagccatnnntgctccccaaagtnnnnnnnnnnnngattctttaaactaactgaccatggactagaggagannnnntcctgccgccagaaannnnnnnnnnnnnnnagcaaggatccaccgctgttctgtagctgcagccacgtgactgttgtggacagagcagtgaccatcacagaccttcgatgagcgtttgagtccaacactttccaagaacaacaaaaccatatcagtgtactgtagccccttaatttaaggtttctagaaagctttggaagtttttgtagacagaatagaaagtggggcatcacctgagaaagagttgattttgtttcaggtttgaaaagaaataactgaacatattttttagacaagtcagaaagagaacatgatcacccaaaagcaantgnnnnnnnnnaattaagtggaaagaatggtataatgaacccccatatccccttccttctggattcaccaattgttaacatttttttcctctcagctgtccttctaatttatctgtcaatttgtttatatnnnnnnnnnngctcaataagggcatnnnnnnnnnnnnnnngaagccatttagaaaatcttttggattttcctgtggtttatggcaatattaatggagcttattactggggtgagggacagctcactccattnnnnnnnnnnnnnnngctaacacatcctgaagagtgattttgtcaggaattattgttatttaacaattttttttttttttttttttttt

SEQ ID NO: 9348 - DNA, 711 bp, Macaca Fascicularis
  misc_feature (1)...(711): n = A,T,C or G
gcgnnngagagagagcagaaagaaccctnnnnngagaaggttcggtccagcctggtttagcctggatgttgctgtgcacggtggacccagacacatcgcactgtggattatttcattttctaacaaatgaacgatatgtagcagaaannnnnnnnnnnnnnnnnnnnnnnnnnngggagannnnnnnnnnntatatgnnnnnnnnnnnnnnnntcatagaaagtgccagaaagtgtttaaacttgtcaaaaaacaaaaacccagcaacagaaaaatggagtttggaaaacaggacttaaaatgacattcagtatataaaatatgtacataatattggatgactaactatcaaatagatggatttgtatcaataccaaatagcttctgttttgttttgctgaaggctaaattcacagcgnnnnnnnnnnnnnnnnnnnnnntaagttgttatttcagttttaaatgtaccttcagaataagcttccccaccccagtttttgttgcttgaaaatattgttgtcccggatttttgttaatattcatttttgttatccttttttaaaagaaatgtacaggatgccagtaaaaaaaatggcttcagaattaaaactatgaaatnnnnnnnnnnnnnnnnnnnnnnnnnnnnntggctgttagcccaaggataaaaagttcataacagattttttttggactgttttgttgggcagt

SEQ ID NO: 9349 - DNA, 659 bp, Macaca Fascicularis
  misc_feature (1)...(659): n = A,T,C or G
gtgcgctacaannnnnnnnnnnnnnnnnnnnnnnnnnnnnnnnnnnnnnnnnnnnnnnnnnnnnaggagagggcgcgcgtgctggaccggcgtggctgcagccgcgtggagggcggtggcacgtcgctgcatgtggcctgcgagctagcgcgcccnnnnnnnnnnnnnnnnnnnnnnnnnnncggcgcctcgcccggcttgcgcgacggcggcggcctcacnnnnnnnnnnnnnnnnnnnnnnnnnnnnnnnnnnnnnnctggggccactccctccgcnnnnnnnnccctggcctcagctccaggggagccgcgccagcgccgcctgctgctcnnnnnnnnnnnnnnnnnntacaccccggtgggcgccgccggctcggcccgccaggagctgctgggcgaccggccgcgctggcagcggatgctgggcgaggacaagttccagtggctggcgggcctggcgccgccctcgcttttcgcgcgcgnnnnnnnnntgatggtcaccgccatctctccaggccgcttcccggaggccctggacgagctgccgctgcccccattcctgcaaccgttggacctcaccggcaagggctaggcccggagcatcctacgcgctggattttgggacaaaactatttttcagagcgttgtacccggcac

SEQ ID NO: 9350 - DNA, 644 bp, Macaca Fascicularis
  misc_feature (1)...(644): n = A,T,C or G
ccccacaggtgactccgaggccactnnngtgccgcccacaggtgactccgaggccacccccgtgccgcccacaggtgactccgaggccacccccgtgccccctacaggtgactccgaggccacccccgtgccgcccacaggtgactccgaggccacccccgtgccccctacaggtgactccgaggccactcctgtgccgcccacaggtgactccgaggccacccccgtgccccctacaggtgactccgaggccacccccgtgccccctacaggtgactccgaggccacccctgtgccgcccacaggtgactccgaggccacccccgtgccccctacaggtgactccgaggccactcctgtgccacccacaggtgactctgaggccacccccgtgccccccacgggtgactccgaggccacccccgtgccccccacgggggactctgaggccacccccgtgccccccacaggtgactccgaggccacccccgtgcccccaacgggggactccgaggccgcccctgtgccccctacagatgactccaagggggctcagatgcctgtagtcattagtttctagcatcccatgagccttggtcttaagaggccgcaagggtgggaccccaggggctcccctcccgtct

SEQ ID NO: 9351 - DNA, 799 bp, Macaca Fascicularis
  misc_feature (1)...(799): n = A,T,C or G
acatggtgtgtttcctgttcatcacgccgctggccgccatctcgggctggttgtgcctgcgcggggcccaggaccacctccggctccacagccagctggaggccgtgggtctcattgccctcaccatcgcccttttcaccatctatgtcctctggacgctggtctccttccgctaccactgccagctgtactccgagtggagaaagaccaaccagaaagttcgcctgaagatccgggaagcggacagctccgagggcccccagcattctccgctggcggctggactcctgaagaaggtggcagaggagacgccagtatgaacgctgggctgtccgggccctgcagcagagaggccagaggtagctggcaataccctgtcctgtggaaggatggaaactgcctaacacttcccgcacggcctgaacgcttcttaggccaagagacaccatgcggagcctagtctgtgatcctgtgtgaagatattatcagggttgtttgtttttttttttttgcacactgttgttcatatcgaggacaggtggacacggtcctgagctctggacggagcaggcacactgatctcattctgaggcccacatggcaccttctgggccagcagctgtggccggtgtatcaagggcgcccttaaagctggaacattccagcaagcttcttgcgcttctctgcacctggcaggcccactttcctggcaccctcgactttatataaaagttgcacnnnnntttcaaaaacccacccctgaatgaataaaaggagccctggcnnnnnnnaaaaaaaa

SEQ ID NO: 9352 - DNA, 709 bp, Macaca Fascicularis
  misc_feature (1)...(709): n = A,T,C or G
aggaagcccagcaggcctgncggccccacaacctgnntgtgcttcaggcggctcagcagcgagaactagaggcggtggaannnnnnnnnnnnnnngagcagcgggcgnnnnnnnnnnnnnnnnnnnnnnagctggaccggaaggtggctgaccagcagagcacactggagaaggcgggggnnnnnnnnnnnnnnnnnnnnaccaacccacaggannnnnnnnnncagatgaacctgctggaactcatccggaagctgcagcagaggggctgccgggcagggaaggcagccctgggactaggaggtccctggcagccacctgctgcccagtatgaccaggaaggcagccctgtcccaccatagccacaggcagcagnnnnnnnnnnnnnnnnnnnnnnnnnnnnnnnnnnnnnnnnnnncccagctgcccacaggggtcccctgctgaggagaggccgggtgaacccggctgcctgtccccctgcgtctgggacttgctgccaaacgctaggttggtctcataaaaggaaggccggcccagcctgccgctgtctgnnnnnnnnnnnnnnnnnnnnnnnnnnnnnnnnnnnnnnnacctcactccacggggcacatcccagcctgcaccgcgggccacctgagtgcttgttctggtctcagccgctcccttggcagctgcagcccccatgcagaagaggctccgaggccca

SEQ ID NO: 9353 - DNA, 744 bp, Macaca Fascicularis
  misc_feature (1)...(744): n = A,T,C or G
caggaccaacagacgttcgcgcnnnnngtgggnntcaaatggcgcaaggtggggcgttcgctgcagcggggctgccgggcgctgcgggacccggcgctggattcgctggcttacgagtacgagcgcgagggannnnnnnnnnnnnnnnnnnnnnnnnnnnnnnncttcgtgcaggccgagggccgccgcgccacgctgcagcgcctggtggaggcacttgaggagaacgagctcaccagcctggcagaggacttgctgggcnnnnnnnnnnnnnnnnnnnnnnnnncctagaccaggggtgcagccnnnnnnnnnnnnnnnnnnnnnnnnnnnnnnnnnnnnnnnnnnnnnnnnnnnnnnnnnnntccatccatgggaccctgaaaccccatctggcctatctgctggacctgctggggcagagttgattgccttccccaggagccagaccagcacccactgagcccgctgggggtgcaccattggggattctgcctcaggtactttgatagagtgtggggcgggggggagcnnnnnnnnnnnnnnnnnnnnncttctcccacnnnnnnnnnnnnnnnnnnnncagcccttnnnnnnnnnnnnnnnnnnnnnnntgacctttggtgtcctggacttcatcctgggtgctgcagatactgcagtgaagtaaaacacgaatcaatcctgactgcccccagctcacactcagtgtgggaccccgaatgtaaagcaattataataaag

SEQ ID NO: 9354 - DNA, 717 bp, Macaca Fascicularis
  misc_feature (1)...(717): n = A,T,C or G
ttgccacttccctctttgtccagaaagatagcccacagccaatgcttactgatctgatctaagtatcccagctgtctcctctttactattcctacagtcaatctgcaacccataacacgttcttacaatctcatggatcatttaatgcattcttcaagttttgctccaaaatttgtcttttaaaattatnnnnnnnnnnnnnnnnnnnnnnnnnnnnnnnnnnnnnnnnaaaaatacatatttcattatatatttcatataacatatatatatttatttccccccatagaannnnnnnnnnnnnnnnnnnnnnnnnnnnnnnnnnnnnnnncctcnnnnnnnctttgacagagacaacctcctctgaaatattaaagttctggtatatttttgaaacagtcatattacatgtcaacataactataatgtaaacatcgtatcaaaaaagannnnnnnnncttttctgctatggtatgaatcatctgtttatgaagtggctgaacaagcagaaannnnnnnnnntttggaaattcaaatctgaaagtcatagtgctgaattaagtcttcacaaacaacacacaaagatctagacattagnnnnnnnnnnnnnnnnnnnnnnnnnntgtttattgagttctttctgttgcttctcttttactctctctatttctttttgtttttctgaaaccctactatcataataaacacattaataaa

SEQ ID NO: 9355 - DNA, 715 bp, Macaca Fascicularis
  misc_feature (1)...(715): n = A,T,C or G
cagctgcagctgnnnggaaaaggaatagcaaaacaaacccnnnnnnntggactgggccttattcccatttattggagcaatgtccgttgccgaggagatgaagaaaatatactgctttgtgaaaaagacatctggcagggtggggtgtgtcctcagaagatggcagctgctgtcacgtgtagcttttcccgtggcccagcgttccccatcattcgccttgttggaggcagcagtgtgcatgaaggccgggtggagctctaccatgctggccagtggggaaccatctgtgatgaccaatgggatgatgctgatgcagaggtgatctgcaggcagctaggcctcagtggcattgccaaagcatggcatcaggcatattttggggaagggtctggcccagttatattggatgaagtacgctgcactgggaatgagctttcaattgagcaatgtccgaagagctcnnnnnnnnnnnnnnnntgtggccataaagaagatgctggagtgtcctgtacccctctaacagatggggtcatcagacttgcaggtgggaaaggcagccatgagggtcgcttggaggtgtattacagaggccagtggggtactgtctgtgatgatggctggactgagctgaatacttacgtggtttgtcgacagttgggatttaagtaaggttcattaatgtaaaggcagttaaatgccagattatattgttaaa

SEQ ID NO: 9356 - DNA, 866 bp, Macaca Fascicularis
  misc_feature (1)...(866): n = A,T,C or G
cccaccacctctttagcctggtatgagaaacagtttttagaaaatgagagaagggatccccaagaggccaagnnnnnnnnnnnnnnnnnnnnnnntctccttagcccctatagacttcacggaattatctgaaaaaggagagctttttcacccctggctttctagaattttctttgtctgcatttgtgaatataccacacatgatggtgtctctgagccgaccagattatggaaactcaattgtcagaggacccaaaacaaaacttagagtgatttgggtattgcctgtcaatgctgaaccttgagacgttttaaatacaacacaaatctctatactcccaggatttgtgcgttcaccccacccaagacttcaggaagtgtcacagcactcgtggactaggtgtcatgtgacaaaggcattctgcaagaagtagaagcttgtgaccnnnnnnnnnnnnnnnnnnnnnnnnnnnnnnnnnnnnnnnnnnnnnnnnnnnnnnnnnnnnnnnnnnnnnnnnnnnnnnnnnnnnnnnnnnnnnnnnnnnnnnnnnnnnnnnnnnnnnnnnnnnnnnnnnnnnnnnnnnnnnnnnnnnnnnnnnnnnnnnnnnnnnnnnnnnnnnnnnnnnnnnnnnnnnnnnnnnnnnnnnnnnnnnnnnnnnnnnnnnnnnnnnnnnnnnnnnnnnnnnnnnnnnnnnnnnnnnnnnnnnnnnnnnnnnnntatctcaacaacaacaaaaaaaagtagaagctcgtggccaggcacgnnnnnnnnnnnnnnnnnnnnnnnnnnnnnnnnnnnnnnnnnnnnnnnnnnnnnnnnnnccgagttccagaccagcctgggcaacatggtgaaacctcgtctc

SEQ ID NO: 9357 - DNA, 1381 bp, Macaca Fascicularis
  misc_feature (1)...(1381): n = A,T,C or G
gtgcagcatttttagttatgtnntgttnggcagnnnnnnnnnnnnnnnnnnnnncattttnntttcaggaggacatgaatagtgtgtttattgtgactcctcgtactaaccacttttaaaaccaacatcttttttcataaatgttggtagtatttgtccaggtacctcaattgtagcttgtgtaannnnnnnnnnnnnnnnnnnnnnnnnnnnnnnataatggctagttgacgttgaaaaacctatttctgtgttttgaggagtggggaagaaaaacactgagtgaaaatttgagaaaggcatattactttcagattctgatgtgtgagggaaaatactgtcacaatgaaaatcttgacaatttacttaacaagtaaccaatagttcatcaaaaccaacttgtacagactaatacatctttttcatagtattcagttttctcacctcttgctattgtatattgtagatttttttcactcatgtgttatttaatttacactgatctctgctattttaaccccccaaataagttatttgtcctttaaggttggttactataataccccttagtaagattccagtattaatttctgggcagtttgttctctgtatacgattgcaaatgataagcatttttgtgagtgaccacctttgcaatatgtttgttaatttacttcatgttgggttctttctgaaatgtacatctttacatataaaaacctcacatttatttgatttacacttcctagtctacattacatgtggttgaaggttttatacattctatatgcttttactaaatatacaagatttactactagaaatttggagaaagaacactaacacaggtacttgtgatttgttcatgttatattaaaacttgagatttgtgtatttatgtagagtctgtattgacaagactgttgttttttgctccttgagctatataatcatctgtgtattggattgttgtcttgatttggtctaaatttgaatatatacaagttacttgaatataacaaaaatgaattttgtttgatagatttatattgtaacctttttctagttcttgaataaatatagcctaccttccctagatgcatttgtgcaggaagtatatacatttccctattactctcatcagctgaggaatatgtactatggtgttactgatattatgtggctttcattttattattttgttgcacgcttagtgttttgtagtggaggttttgtaagtgacaacagttgtaatatctaaagtcaggcacctagtagcagggttttgttaattctttnnnnnnnnnnnnnnnnnnncttaaagggtcttttgcagatggtacaaattagaacaattagaatgtagtattttgagttctgg

SEQ ID NO: 9358 - DNA, 718 bp, Macaca Fascicularis
  misc_feature (1)...(718): n = A,T,C or G
cccccgctttgcatggctcccggggcgctgactgcgtgttaacatcaggtgnnnnnnnnnnnnnnnnnnaccaaggtgacctctcagtgaaggatgctgccgtcgacactctgtttggagacttgaaggaggacaaggtgacnnnnnnngatggagccagctcggacgggcacctggcacacatcttcagacatgcggccaaggagctgttcaacgaggatgtagaggaggtcacttaccgagccctgagaaacaaagacttccaagaggtcacccttgagaagaatggggaggtggtgttannnnnnnnnnnnnnnnnnnnnnnnnnnnnnnnnnnnnnnntgatcctgaagcttaagaaaggaaagttcccgtaccactttgtggaggtcctcgcctgtgctggaggatgcttaaatggcagaggccaagcccagactccggatggacatgcggataaggccctgctgcggcagatggaaggcatttacgctgacatccctgtgcggcgtccagagtccagtgcacacatgcaggagctgtaccaggagtggctggaggggatcaactcccccaaagcccgagaggtgctgcacaccacataccagagccaggagcgtggcgcacacagcctggacatcaagtggtgaagtcaggccagggccttccagctgctcttggggccagagccactctcagtagagggaggggctgcctt

SEQ ID NO: 9359 - DNA, 751 bp, Macaca Fascicularis
  misc_feature (1)...(751): n = A,T,C or G
caggctgagtgcattnnagggagggaggggcccttcggatgccccatccagggaggctggtcctaaggcctcacgttaaataggcggggcttgccttctggtgttggacaagcttctgagatgtcacgaggagattctgcctttgccaggtgactctctggggagcaggtctgctcccaaggggcctgagcagtccttggcccgctagggtcttggaactcacctgcctttccatccatggccagcagtacctgccccacctgccccacttgtccttagcctggacctctgatagcagcatctctacgttctccccagctcccaggaccacaggctcaggcaggggcttccatgggccccaggggaacagtggggactcagcctctctctagggtgcatggtgctggttcaggctgggagaggcagcccaggaagtctcatctggggagcaggcagcctgcatctgggccttggcttggaacacaaagaccctggctttcattttctctcagatgaacggaaattaaggcaacaaaagaagcccggctcctggtcacctaggaagcctcaaattccttcccgttgagggagggagaggtttgcaggtgaccgagttcctctaacttggatcatactcgacatgaaaattcagaattttatactttccctgccctctagagaaataagatattttttgtcaatttgtttgtttgaaactaaagccctttatttgttaatagtcctgctaaaa

SEQ ID NO: 9360 - DNA, 880 bp, Macaca Fascicularis
  misc_feature (1)...(880): n = A,T,C or G
agatgcagagagagcacaaggctcnctnnnnngtnntcagtgtgnnngtgttcttgctaccatcacagctgagtgcaatgaaaggcannnnnntgagaggagcnnnnnnnnnnnnnnaaagcagaggccccctcccattnnnnnnnnnnnntcnnnnggcacacgctccacccacccaccccattctctgcnnnnnnnnnnnnnnnnnccatcacagaagacgtgacatggaaaaagcactgtgtccaccctagttcttttctcaaatttgggaagggatccagggtgtaggttaagaggttttnnnnnnnnnnnnnngtatgnnnatgttgttaaatatacaatgaatctatggtatnnnnnnnnnnnnnnnnnnaacattacttgaggtcctnnnnnnnnnnnnnnnnnnnnnnnnnnnnnnnnnnnnnnnnnnnnnctttnnnnnnnnnnnnnnnnnnnnnnnnnnnnnnnnnnnnnnnnnnnnnnnnnnnnnnnnnnnnnnnnnnnnngtgcagttgggtttcttttccagaattaaaagtattttgggtggtggggagggtcagaggaagaagtaaagattgtgagaaaggagaaacatgggcttggggagaacccagaattggagacagaagacctggcactaggctacagcactgagcacctctgatcttgtttttcctcatctgtaaaaggagattaacaatgcttttctgcccacctcttggggagaagggaataatttaattggtaaaaaagaaaaaaaaagttttgaaaaataagtaacactgtttttatataagtagccaagcattattaattatccaccccatatcactggtagatacttgtattcaagttatctggactggaaagc

SEQ ID NO: 9361 - DNA, 728 bp, Macaca Fascicularis
  misc_feature (1)...(728): n = A,T,C or G
gaaaaagctgatgaacaaccacatgaagctcatctgtgagtccctgtatgcctcgggttacaggttggctcgcgcctgcctgagcctgatggctgccatggtgacccagggtccggnnnnnnnnnnnnnnnnnnnnnnnnnttttgatttgaataaaaagaccttgnnnnnnnnnnnnnnnnnnnnggattcaaaggtttggaaaggttcttggggagcaggcacactttgaggactcctgagcttgagcgagggcatcctcccgtcacgtgtgccggctgcaggttgtctgtcgaagggcatcttctggttgccatatcagctcccctgctggaattcagtgctgtgaacagccctggccagagtgtcacccnnnnnnnnnncgtaaagaataaggagacagatatcagcccatcccatctgccgcggtggagaaccacattagagtaattcacttctataaccccgtgccaccttgttctgtcagtatccctgggaactagaagtttctacattgccaggaattggactaaaaggttgataataccaagtagcttttnnnnnnnnnnnnnnnnnnnnnnnnnntgagggttttactggaattacaaataaggtattctctaaggaaaaaaattccaggtcttaatgtctcttagatactacgctttatccatgtgtcaacaaattccattcaatgaataatggctcctgacatttaaatacgttct

SEQ ID NO: 9362 - DNA, 767 bp, Macaca Fascicularis
  misc_feature (1)...(767): n = A,T,C or G
ggaccccctgggatgccagggntgncnnnnnnnnnnnnnnnnnctggagagccaggcgaggagggcagatacaagcagaagtaccagtcagtgttcacggtcgctcggcagacccaccagccccctgcacccaacagcctgatcagattcaatgcggtcctcaccaacccgcagggagattatgacactnnnnnnnnnnnnnnnnnnnnnnnngtccccggcctctactactttgtctaccatgcgtcgcatacagccaacctgtgcgtgctgctgtaccgcnnnnnnnnnnnggtggtcactttctgtggccacacgtcccaagccaatcaggtcaactcgggcggtgtgctgctgaggttgcaggtgggcgaggaggtgtggctgggtgtcaatgactactacgacatggtgggcatccagggctccgacagcgtcttctccggcttcctgctcttccccgactagggcgggcagaggggctcgagccatccacctccctcagcttcnnncntggacccaccttaccggccagtctgcatccttgcctagaccattctccccgccggatggactcctcctccagggagcccaccctggctcacccacccccaacccactccaccccaccacatgggttctctccttcttctgaacttctttaggagtcactgcttgtgtggttcctgtgacacgtaaccaatgccttctggtactgccattctttttttgttttgttttgttttcaagtatggaagggggggaga

SEQ ID NO: 9363 - DNA, 796 bp, Macaca Fascicularis
  misc_feature (1)...(796): n = A,T,C or G
ccnnnnnnnnnnnnnnnnnnacctacctcaacaacccgtacgtgcggaaggccctccacatcccagaacagctgccgcaatgggacatgtgcaactttctggtaaacttacagtaccgccgtctctaccgaagcatgaactcccagtatctgaagctgcttagttcacagaaataccagatcctgttatataatggagatgtagacatggcctgcaatttcatgggggatgagtggtttgtggattccctcaaccagaagatggaggtgcagcgccggccctggttagtgaagtatggggacagcggggagcagattgccggtttcgtgaaggagttctcccacatcgcctttctcacgatcaagggcgccggccacatggttcccaccgacaagcccctcgctgccttcaccatgttctcccgcttcctgaacaagcagccatactgaggaccacagcaaccagctccacggcctgaggcagcccctcccagccactcctgctaggagagtcttcttctaagcaaagtgcccctacaggccaggttctgccttcaggactgcccccttcccacagccctgtgcatcccagactgggccagggtctcccacagacagcctgggggcaagtgagcactttattcccataacagttcctgaatggggtggcctggccccctctctgcttaaagaatgccctttacgatgcactgatcccatcccaggaacccaacagagctcaggacagcccacagggaggtggtggacggactgtaattgatggattgactgattag

SEQ ID NO: 9364 - DNA, 852 bp, Macaca Fascicularis
  misc_feature (1)...(852): n = A,T,C or G
atgcagcctgcnnnnnngtaaagtcacctaggtgaggacaggcgcgggagcctcggcatgacaccgtggaggtcggggccctcttcccagtgggttcactccttttcacacctgctggatccctcctcacccagcaggcccagtccacctctcattgcaagccccaagcactgagccagccaggtgccagggagccacccccgcccctcgcccctgcacgcctcagactcaccccatcaccttggcagcaaagcactggctctccgctctgacccctggtccaggcagcccctccgcagagaaaagggctggagagaagcctccgcagcccctggacgatgtggagtgctgggtgagaggcatcggcccccccaagtatgtttttgtgtcttaagataccagtttactttgaaaacgagagaacggcttctgggctgtcctctgcccagtgagacggaggacacgagggagagtgctgagtgtcccgagagaggcccccgagctggtgcatggaggtccttcggcctggctcagttgggctgcggggcgccccctttgcggagggaggcacagggcttgggcgaggggcaaaagccatcagaactgcctggcttttttggaaactgaggacccaacaactaaccacgtttacacaacttgagtgttgaaccccgattaatgtctgtacgtcacctttcctagttctgaccctgagccccggggaagcaggaaagcgtggccggcctcttgcactgctttgtctccaaaataaactactgaaatcaaaccgcatttcacacgtgtttacacatgttgctcaagtttgttatgtcattctcnnnngtccttaaa

SEQ ID NO: 9365 - DNA, 636 bp, Macaca Fascicularis
agcggtgacagacatcctgacccagcgggagcgcgcaaggctggaaacacccccaccctggctggcaatgtttacagaccagcctgccctgcctaacccctgctcgcctgcctcagtggccccagccccagcctggacccaccccctgccctgggggagaccccgaaccttttccctggatgctgtacccccagaccacttcccgagggctcgctcggttgcccccctcccacctcagcgatccccacggaccagaggcctctgcagtaaaggccaacctcgcacttggctccagtcaccagtgtgagagagaaaggtgctggcataggatctgcccagaagagaaaatgacccatgcacagtcgggctctggatacggcgctgtctatagcaagctggccagtctggcctcctgttcctctgctggacctggggtaggctgcaggggtgggcaggagcccctcttaaattgtggttgccatggtactgagggactcattcctggggctggctgggacctccctaaacccttcctggaagaaaactggaaccaactctgccctacctccctgcactaaccagctttgaggatggcactgaagaacccttggaggaaacatacctcccttgtgatcc

SEQ ID NO: 9366 - DNA, 766 bp, Macaca Fascicularis
  misc_feature (1)...(766): n = A,T,C or G
gcattatgaaaatattccaaatgtnnncttggactttatataaatctgtaatagattttagaattgaaaaactctttgtgaangtcttctaaaagtgttcagtttatctcaaaatctccatatataggctcagctttaacctaaaacatagaaaaaacccttgaattcctcaaacgtttgagacgttcaagacagtctcttaatctgttaatacttttggaaacagttgacaacatagggcaggcagctaatctcatgtactaaagttggaatttaaataatttctatttgcaaattagaatgacagtgttggaatttggnnnnnnnnnnnnnnnnnnnnnnnnnnnnnnnnnnnnnnnnnnnnnnnnnnnnnaggaatgtgttcaatcatattttagtgggctatttataaatagtcttgaagtcaatttagtttatttatttaaaagataatgcatcctaaaagggatcatttatgaataacaatatgaagtcttttcctaaaaaaacttaatacactttagttgtacatttagccagtgttatttgaagtacataacttttaaaatattaagtgtattgtatgattagaatatgtgaatgagtaatttattttgtatccggaatgttttggtaatgtgttttcactcaaaccactgacttaacagatactactgtgtataacatgtactaaatattacagttattgtgcataacagattgttcctcttactattcgtgtgtatacaggcaattcatgtttaat

SEQ ID NO: 9367 - DNA, 727 bp, Macaca Fascicularis
  misc_feature (1)...(727): n = A,T,C or G
gtcgccgggcacacaacgatcaccccaacannnnnnncnnnnccccccctacactgatgatgtcaaatggttgctggggctggcagcaaagctgggagtgaactacgtgcaccagtnnnnnnnnnnnnnnnnnnnnggggtgctgagcccgtttgtgnnnnnnnnnnnnnnnnnnnngacgctgcagcggctgagtcccgctcatgcccacaaccacctgcgtgccccggccttccaccaactggtgcagcgctgccagcagnnnnnnnnnnnnnnnnnncaccaccgcttgattcacctgactcctgcggactacgacgactttgtgaatgcgatccggagcgcccgcagcgccttctgcctgacgcccatgggcatgatgcagttcaacgacatcctacagaacctcaagcgcagcaaacagaccaaggagctgtggcagcgggtctcactcgagatggccaccttctccccctgagtctttcacccgtagggtcctatacagggacccaggcctgtggctatgggggcccctcacacaggnnnnnnnnnnnnnnnnnngacagatcatcctcactcagttccctggtagcccagactgacagctgctcttgggctgtagcctggggccaagatgtctcagaccctagaagcctagggctgggggagacagccctgtctgggagggggcgttgggtggcctctggtatttatttggcatttataa

SEQ ID NO: 9368 - DNA, 771 bp, Macaca Fascicularis
  misc_feature (1)...(771): n = A,T,C or G
gataaatatacnnnngtgtttaccctaaataaaatctatannnnagatacagtctaagaaaaatgtttataagtagtnnnnntttgggcataatctcttttcgtgtctcaggggcattgaaataaaacttatttcattnnnnnnnnnnnnnnnnnnnnnatgtttcagtctttatagcaagaaatagcctgatagtaaataaacagatctatttgttattatatatgggaacctgtaaatattaaattattttagaaaaataaatgcaagaataactacagccattacttttctatgaaataacgttttgcttttttaacttccttacagttcttatttcatcgaccattaaggctgttaaatctgcttatccttattgagggcagtgtcnnnnnnnnnnnnnnctattccttgctgcggtcggagaagtggaaccacacactttccatggctctcatcctcttctgcaactactatgttttatttaaacttctccgggacagaatagtattaggcagggcatactcctacccactcaacagttatgaactcaaggcaaactaagctgcnnnnnnnnnnnnnnnnnnnnnncagataaaaatattttcatacgttctatttttttcttgtgatttttataaatatttaagatattttatattttgtatactattatgttttgaaagtcgggaagggtaagggatatnnnnnnnnnnnnnnnncaaggtgatgtgatctttcannnnnnnnnnnnnnnnnnnnatatacata

SEQ ID NO: 9369 - DNA, 745 bp, Macaca Fascicularis
  misc_feature (1)...(745): n = A,T,C or G
gagatggagtctaannnnnnnnnnnnnnnnnnnnnnnnnnnnnnnnnnnnnnnnnnnnnngcctgtaactcctgnnnnnnnnnnnnnnnccagcctcggcctcccaaagtgttgggaatacaggcgtgagccactgcgcctggcctcactnnnnnnnnnnnnnnnnnnnnnnnnnnnnnnnnnnnnnnnnnnnngtattctttaactgttgttgttattaaggaactgaggcccaggaaatgaaaggagtgacttgcatgaagtcccacatggattaagaatctggagctgaggcaggtgtcaggtgctgaggatatagcagaatacatgagagagannnnnnnnnnnnnnnnnnncaggagagacacaagtagagaagaaggacattttttaggtgctgtcaaggattacgaagagaagaatacagctggggattaatgtggagatgccggtgggggtgtgcacatcgagccccggtatagacagttcccccagctgaccagatcccnnnnnnnnnnnnnnnngttatacagtggattcatgtggttctggatcctctggcgcnnnnnnnnnnnnnnnnnnnnnnnnnnnnnnnnnnnnnnnnntcctgatccttcccagtggacagatgaagaactaggtatccctcctgataatgaagactgaagatacagactcagactcgctctgtacaagagccaggtgagaatttcgaggattatcgacttcatattaaagtacaaat

SEQ ID NO: 9370 - DNA, 753 bp, Macaca Fascicularis
  misc_feature (1)...(753): n = A,T,C or G
aannnnnnnnnnnnnnnnannnnnnaaaagattgaacnnnngctggaatacaaaannnnnnnnnnnnnnnnnnctaaaaattgacttgaggtttttttnnnnnntagtcattgggaatgtagagcagtgtgtcttgcatgtcatcggaagaatagatttttgttttgattttgttttggttttgttttgaaaatgactctgaacatttatttccattgcaatttctgtggctgagaagacttaaactttacaagtattatccttttaagatcattttaattttagttgagtgcagagggcttttataacaaatgtgcagaaattttggagggctgtgatttttccagtattaaacatgcatgcattaatcttgcagtttattttctcattgtgtatgtatatatggctcttctctgcagcacgatttctcttttgataatgccctttagggcacaaatagttatcggtaacggaatgtatcttaatcattatggctgcttctgttttttcattaacaaaggttattcgtatgttagcatatagtttctttgcacccactatttatgtctgaatcatttgtcacaagagagtgtgtgctgatgagattctaagtttgtgtgtttaaacttttttttgagcgagggaagaaaaagctgtatgcatttcattgctgtctannngtttctttcagattatgttcatgggtttgtgtgtatacaatatgaagaatgatctgaagtaattgtgctgtat

SEQ ID NO: 9371 - DNA, 502 bp, Macaca Fascicularis
aaagctctgacccttctggggctcacttcctgccacccccaaccacagcgcctgtgacctttggctctgggagcatcagccccactcctgccacctaccgaacagaaaaggcaggcctccaagcgctctactgcctgcctccagccacagtccccagcagggattgggagaggcagaggcagctcagggaccacgcctcggcggggtccagccccttcaccggaatgccttggctgggaacctggggcatagcatgctgggtctcaagccctggaaccagcttcgggaaagcaggcaagcagccacccaaaagagcccatgcagtgcgctcagctccccctgggcttgacctccccggccttgtccctggcacacaggtgctggccccgagctggcctctgcctgcttgcccccaggttcctggggcgactgtccttgccaaccccaccgcaccagcttacctggggcgggcactgaccggcttcctgggcttctgggcacc

SEQ ID NO: 9372 - DNA, 717 bp, Macaca Fascicularis
  misc_feature (1)...(717): n = A,T,C or G
tgctagtgaaggtggatgaatatcattcagtgcatcagaagctcagtgctgacatggctgatcattctannnnnnnnnnnnnnnnnnnnnnnnnnnnnnnnnnnnnnnnnnnnnngagggacatgaaaacaatgaagagtcgttatatggaactgtatgaccttaatagagannnnnnnnnnnnnnnnnnnnnncgcagtaacaatcacacagagctgttgggaaacctcaaagcagtaaatcaagcaattcaaagagcagnnnnnnnnnnnnnnnnnnnnnnnannnnnnnnnnnnnnnntgcttgtcgggatgcaattcgaagtaataacatcaannnnnnnnnnnnnnnnnnnngagtggggacagcttcttcataggagaggaaaatacaggtcatgaagttcttggcaaagattttctgttaaaaacctatgctggtttgctnnnnnnnnnnnnnnggtgaaccctagnnnnnnnnnatgaaaataaccttggtgagttgtataaattaaagacagagaactacttgtgaagatagattcactttctattttaaaatcagtagtactgttgctgaataatactaggtttgtatggaataggatgaatgcttttgaagtattagggcttcagagtccaatttttgcttatttatggtatataaatacatattttttcttgaaattgtaactgaatttgtacttttcaaattga

SEQ ID NO: 9373 - DNA, 705 bp, Macaca Fascicularis
aaaacatcaagttggtctgacagtatttgttaaagaatatttgtttgtatgtttattcagtatacttacataaaaattatttcgccatcagccaaaactcggtaatcatgacagctatcttttgttgttttatgaagtttatttctcaagaaaatgggaataaatttggggtttgttcaccttttttactaaagatgcctaaagccacaggtgttattgcctaacttaagccatgacttttagatatgagatgacgggaagcaggatgaaatattggcatgtggctggagccttcacacttgaggctgaaagtggcttgtggtattataatgttcagacttgaagaggaaggtgcaggtacacatgaattagacagctggtgagacagttgggaactctttgtgcctgttatctactggactttttttgcaggaagtgcattctctagtccttccccattttctgttctagatgtcagtgcagtgcactgctactgttttatccacttggccatagactctttttctaacagctgcatatttctatatactaattgcattggcagcattgtgtctttgaccttgtacactagcttgacatagtgctgtctctgatttctaggctagttacttgagataagaattttccatagaatatgcactgatacagcattaccattcttctatggaatgaaaacttttgatg

SEQ ID NO: 9374 - DNA, 814 bp, Macaca Fascicularis
  misc_feature (1)...(814): n = A,T,C or G
ggactggacannnnntnnncttacgatcaagccaaaatccagctgcttccaaagagtactttcagaannnnnntcagtagatcgcccatgtgtatctgcaccttctcannncagnnnngaaccacagttgaaacctgcttttatcattttaaagatggttatttgtagaaggcaaggaaccaattatgcttgtattcataaatattactctaaatgttttgtttttgtaattctggctaagaccttttaaacatgatagttgctagtacaaggaatcctttattggtaacgtcttggtggctagctagctagtttctacagaacataatttgcctatatcgaaagcgattcttagatcatgtcttcagtggaaacagtcttctgtcttagccttacttgaatcttgcctataacaaagtagagcaacatgcattgaaagcgtctgatcaagggtcctgaaattttcaatttgaatgtctttgtattaaactgaattttcttttaagctaacaaagatcactattttcaattagccatctaactcttgcaatgaatgtttatgtgattgaagcaaatgtgaatcatattatttttaaaagtggcagagtgacttaactgatcatgcatgatccctcatccctgaaattgatagtttatgtagtcattctacttattttattcactagctaactttgtctatgtatatttctagatattgattagtgtaattgattataaaggatatttattaacttcaggggattgcattttgaaattacaattattttctttgctgnnnntattccattgtaaa

SEQ ID NO: 9375 - DNA, 736 bp, Macaca Fascicularis
attgtataaagatgttactcttctatttactgttatatactgtgaggccttctttatgcctttagctctgttcctccagtagtaaaacagttaaaatatgcttcactagtcacacattccccataccatttcttgttattcacatgtacagtaaaataattgttttttaaagtatttttattttggttctctcattctcttccctatttatcctgtacactgtctgttatgattgcctatctctttcgctatcctatagcatcagagacttagggttctgggtaagcccaagtctgctactgccaccgagcagtgccaggcatattaaagggcatgactccctacatgtaaaatgaggaagctaaactggaatgaagttaacaataaaattatctttttttatggttcttaggtaaataactataggcatagcaaaatttcaaagggtttagtaattgaaactggttttatagttttatatttgctttcaacttcagaaaaacagccatttcccataactacaggttcccagtattcctgtgatttctggacaattaaaatttccagtacttttttcatatacctggtgcttagttttaagctattttaaaactgtcagattgagaatttcatagatgtcataaacaagttttattagctactatgtttaaatcaatataatactaagtgctgttaatatactataatagttttagtagctattttgtttctataa

SEQ ID NO: 9376 - DNA, 751 bp, Macaca Fascicularis
  misc_feature (1)...(751): n = A,T,C or G
gatgtcgccacgagagcttccgtgcatgctgccgtgaggcnnntccccagtgtggccccagcccgacaggcgtgctccagtgccatgtgtgcccacgtgtgcagaccttgactgcagagacctcgcgtccatgtgtagactgcgtggaccccgacaaaggggtggccgctgtgtagctctgtccactgtgaatgccagtgtgttgggaattgcatgccatctccaccccgagcccgacctttctgagtgacgnnnnnnnnnnnggctagactaggaggttcctgtgtttcgaaaagcactttacagatgagattccctctcctcacccaccttcaagcgccccgttgcctcttatttacttttgtgttggatttgttgtttaaagaaccaaataagcatctgtgtaaactccacaatagcgtttctnnnnnnnnnnnnnnnnnnnnnnnnnnnnnnnnnnnnnnnnnnnnnnnnnnnnnnnnnnnnnnngctggcgcctatcatgtgctcaaggcccagccccagcagaggctgggagaggcggcgcactggcagtgtgtcacactgagcacagcaccacaggctgcctcatgaccctcctgtccagcaggtagtgggtgagtttgtgagggtcttgcctgaatccatcgggacttgggaaacagaaccctgtggtggggggcggggggaggggtcctgtcagtgctctgaagagcctgaccatgttcagtgctgtagagcagaaagccgg

SEQ ID NO: 9377 - DNA, 805 bp, Macaca Fascicularis
  misc_feature (1)...(805): n = A,T,C or G
ttccttttgagtaaagatactattacaatgtaaatannnnntatacagaaagtcacagcacatgtgcccattgatacaaggnnnctgaggcctggtctccagnnnaaatataattaagggtgacaaggactggagtaagttggagagtgcatagcgagtctgtgaagacaactgctacctagcnnnnnnnnnnnnnnnncacgtaagaatggtgtgggcccagtattgccannnnnnnnnnnnnnnnnnnnnnnnnnnnnnnnngagactcttgtctcaaaaaaaaagtttcattgtttactcctagagaagccaaaaatccagatttgtatatgaaatcttaccattttaaaagattggcagctaatgatttttttaaaaagctgtgaggtgtgatgtatcccaaacggactggctcatgggnngccacttcacaacctctgatctcagaccgtgcatgctttgtcttcttaagacaactcctgtggcaccatttctccctccacagggccaaagccatagagtccggtcccaaggagaaggcacttccagtgctaggagaggtatggacagcctctcacctgtgagttgtggctgcctcagtctcagagtcctgtcgggtgaatgaggcagatgggcaagagttagcttcaccagcagctgcttttggagcaggggtccaaggaagagagggtggcctcgacatcaaactgcctggatttttctaccaccctgttacaccataacaacttctgaaccacacaccagccctgagttctgggctcnnnnnnngccnnaaatagca

SEQ ID NO: 9378 - DNA, 651 bp, Macaca Fascicularis
  misc_feature (1)...(651): n = A,T,C or G
gtgccagtannnnggcttgccagtgnnngatnacttcaagcagtggantannntgaaaaagnnnnnnnnnntcgccatgggctgctggcccaagaatggacttctagacatgaacaagggcctcagcctgcaacacataggccggccccacagcggcattgacgactgcaagaacattgccaacatcatgaagacactcgcctatcgaggcttcatcttcaagcagacatcgaagccgttctgattggccgaggacaggatggggcaggacagggtagctgtttggcccagcccagaattctcctctccctcaccagaggggaagagggagagtggcatagctctgcatccagagtgtcccccagatgccctgtgggcttgtgcccttggcgtgggcttgtgcccttgcaagggcttggccacttggcccttctggagcagacactttgtgccccccatccccacccctcaatctcagcccagtattagcccctcccattgcgggcctgggctaggggaacccaggcactcaccgcctcctccctggtacacaggcttctgtggggccaccaagccccccctgtgccccctcccatccatagtgcatggtgtgtggtgcccccagggctccnnngacnnnatnnnggcccc

SEQ ID NO: 9379 - DNA, 767 bp, Macaca Fascicularis
  misc_feature (1)...(767): n = A,T,C or G
cattcaaaatcagggctgttaagatttaaaatcacaaacgttaacggcagtaggcaccaccatgtaaaagtgagctcagacgtctctaaaaaatgtttcctttataaaagcacatggcggttgaatcttaaggttaaattttaatacgaaagatcctcatgaattaaatagttgatgcaatttttaacgttaattgatataaaacaacaacaaaattaggcttgtaaaactgactttttcattacgtgggttttgaaatctagccccagacatactgtgttgagagatacttagggggatggagtaggttttgaagaggttgatggtggtggggagggangnnnnnctgaattgagtttgatgcagagctttttagccatgaagaatctttcagtcataggattaataattaaattttcagtatttaaaaagacaaaatattttgtccatttgagattctgcactccatgaaaggctcacttggacgctggggccaaaagctgatgattttcttaagttgacggttgtcaatatcgaactgttcccaagttagtcaagtatgtctcaacactagcatgatataaaaagggacactgcagctgaatgaaaaaggaatcaaaatccactttgtacataagttaaagtcctaattggatttgtaccgtcctcccattttgttctcggaaggttaaatgctacatgtgtaagtctgcctaaataggtagcttaaacttatgtcaaaatgtctgcagcagttgtcaataaag

SEQ ID NO: 9380 - DNA, 749 bp, Macaca Fascicularis
  misc_feature (1)...(749): n = A,T,C or G
tcagcaaggacnnnnnnnnnnnnnnnnnnnnnnnnnnnnnnnnnnnnnnnnnnnnnnnnnnnnnnnnnnnnnnnnnnnnnnnnnnnnnnnnnnnnnnnnnnnnnnnnnnnnnnnnnnnnnnnnnnnnnnnnnnnnnnnnnnnnnnnnnnnnnnnnnnnnnnnnnnnnnnnnnnnnnnnnnnnnnnnnnnnnnnnnnnnnnnnnnnnnnnnnnnnnnnnnnnnnnnnnnnnnnnnnnnnnnnnnnnnnnnnnnnnnnnnnnnnnnnnnnnnnnnnnnnnnnnnnnnnnnnnnnnnnnnnnnnnnnnnnnnnnnnnnnnnnnnnnnnnnnnnnnnnnnnnnnnnnnnnnnnnnnnnnnnnnnnnnnnnnnnnnnnnnnnnnnnnnnnnnnnnnnnnnnnnnnnnnnnnnnnnnnnnnnnnnnnnnnnnnnnnnnnnnnnnnnnnnnnnnnnnnnnnnnnnnnnnnnnnnnnnnnnnnnnnnnnnnnnnnnnnnnnnnnnnnnnnnnnnnnnnnnnnnnnnnnnnnnnnnnnnnnnnnnnnnnnnnnnnnnnnnnnnnnnnnnnnnnnnnnnnnnnnnnnnnnnnnnnnnnnnnnnnnnnnnnnnnnnnnnnnnnnagtgcaatcctgagggtggactccagatctgcaccgtcggccagctggggtctgactgcacatggcttctcatgaatcttgcgttttttacaaattggagcagggacagatcatagatttctgattttatgtaaaa

SEQ ID NO: 9381 - DNA, 667 bp, Macaca Fascicularis
  misc_feature (1)...(667): n = A,T,C or G
ccaggtggcctgggaggtggacnnnnnnnnnnnnnnnccactagcgccctgggaccccaagtacgaagcgaaagcgggccgtcagccggtgtggggnnnnnnnnnnnnnnnnnnnnnnnnnnnnnnnnnnnggacgctgtgtcacccctcgttnnnnnnnnnnnnnnnnnnnnnnncgggcaggggtctcaggcccgtggcccctgccannnnnnnnnngaatggacagcaggcgcacccannnnnnnnnnnnnnnnnnnnnnnnnnnnnnnnnnnnnnnnnctcggaccctctgctgccnnnnnnnnnnnnnnnnnnnctgtacctgtccaaggccccccagcaggtgatgggcnnnnnnnnnnnnnnnnnnnnnccnnnnnnnnnnnctgcctgggtcctcccccgcctgtcaccctcccggagcccctccaccgcctggctcagtgggccggagctgatcgctctcactggcctactgcagnnnnnnnagggggaacccaggcccagctcctccgtggctgccacgccccctgctggccccccagaccctacctctgacccaccaagcccctgtggtagccccagcagttctcagggtgctgacccctctctcccacagaccccagacacccattgtccatagccttctcggggcagaatggcc

SEQ ID NO: 9382 - DNA, 703 bp, Macaca Fascicularis
atctttataattgttcatctaaaactccccaatgcctaaggttctagtcttggaagggttagctgcaaaattccagttcggaagccaacggaggctcagtccagacagggattaaccgacttgtgctggtatctaggtgcttggattgccgagttgagtttgctggaagggaaatggggaggcccgacaggcttggctgccagtcggcttccgcgaaaacgactcttgctgtccacatagccagccgtgaagccaaactgcaggcctctgccctcccctaaatgtcctcgcaggaggcagtcactcgggaggaagatgtgcctgttaccaagtgcttcgtcccggccccagcgcagacctatgaatgaagatggagggagatctgatgtgaaaggcctgggtcccggccgcagagggggcgccagaccgaaaccagcgatcgtgtctctcccaccaaagcctccaggccagcggccacgtctgaaagtcctgggctaagcaccacgccgggggagtaccggacaccctggctgcagctgccgagggcctcactcaccttcagggccgccggcctctcggcctggactgcccacctcggccctgcgtcagagcggaaggccaagtcttccagaaggtgctgcggcctccccgcagcccctcagcgactcaggatggggcagctggctgagtcacgagcgccgag

SEQ ID NO: 9383 - DNA, 807 bp, Macaca Fascicularis
  misc_feature (1)...(807): n = A,T,C or G
aaccacatagctgannngaaaaaggaaatnnagannnnngggaannnnnatcatgagaacattgtgaagtacaaaggaatctgcacggaagacggaggaaatggtataagctcatcatggnnntnntgcnnnnnnnannnnnnnnnnnnnnnnttccaaagaataagaacaaaattaacctcaaacagcagctaannnnnnnnnttcagatttgtaaggggatggactatttgggttctcggcaatatgttcaccgtgacttggcagcaagaaatgtccttgttgagagtgaacaccaagtgaaaattggannnnnnnnnnnnnnnnnnnnnnttgaaaccgataaggagtattacaccgtcaaggatgaccgggacagccctnnnnnnnnnnnnnnnnnnnnnnnnnnaatgcaatctaaattttatatcgcctctgacgtctggtcttttggagtcactctgcatgagctgctgacttactgtgactcagattctagtcccatgnnnnnnnnnnnnnnnnnnnnnnnnnnnnnncatgnnnnnnngacagtcacaagacttgtgaatacattaaaagaaggaaaacgcctgccgtgcccgcctaactgtccagatgaggtttatcaacttatgaggaaatgctgggaattccaaccatccaatcggacaagctttcagaaccttattgaaggatttgaagcactcttaaaataagcatgaataacatttaaattccacagattatcaagtcctcctcccacaacaaatgcccaagccattttttaaaaatttgtaatgaaaacag

SEQ ID NO: 9384 - DNA, 739 bp, Macaca Fascicularis
  misc_feature (1)...(739): n = A,T,C or G
gcatacagcatccagtgacgtctggagctttgggatactcatgtgggaagtgatgagttatggagaacggnnntactgggacatgagtgaacaggaggtactaaatgcaatagagcaggagttccggctgcccccacctccaggctgtcctcctggattacatctacttatgttggacacttggcagaaggaccgtgcccggcggcctcattttgaccagctggtggctgcatttgacaagatgatccgcaagccggacaccctgcaggctggcggagacccaggggaaaggccttcccaggcccttctgacccctgtggccctggactttccttgtctggactcaccccaggcctggctttcagccattggactggagtgctaccaggacaacttctccaagtttggcctctgtaccttcagtgatgtggctcagctcagcctggaagacctgcctgccctgggcatcaccctggctggccaccagaagaagctgctgcaccacatccagctccttcagcaacacctgaggcagcagggctcagtggaggtctgaggccgcggcagcgtgnnnnnnnnnnnnnnnnnnnnnnnctcaggcctggacactggtccgagaagggacatgtgggacgtgagccgggctccaacagcctctgtgagagatgccccacagcaaacccaaccctcccgatggctgcattccctggtcctccgcctctccaccagccccctcctc

SEQ ID NO: 9385 - DNA, 807 bp, Macaca Fascicularis
  misc_feature (1)...(807): n = A,T,C or G
tttgatttctaaatgcaacantgtgtttatacataattnnngaactcaaagaaagcnngcttatacaatcatgtgcaactttaaactttaataactctggatgaatacatggtggcaacagtccatgacacctgaaaacatcatttgtggagtggcgtagagtncnnnnnnnnnnnnntgcatattacaacgatatttcacacagccctgctcagtttgattttctccacgtggttgataatggtcttcagttgctgctaagtgattttgcacatttcatttataatcctcaccctacaattacctacgtactgtttctgcaagttaacctatatgctatgctcagtcatgtacctttcaaagttactaatgcaactaccaaagaggnnnnnnnnnnnnnnnnnnnnttccatcagaagnnnnnnnnnnnnnnnnnnnnnnnnnnnnnnnnttcctaacagaagtttaatttcagaggaatgtgagaattcgtttgaccttaattccagatgtgcatgcctcaaaagaaaagtcccattctcnnnnnnnnnnnnnnnnnnnnnnnnnnnnnnnnnnnnnnnnntggggtagtggannnnnnnnnnnnnnnggagtcacnnnnnnnnnnnnnnnnnntggtcttcactagctgtgtgacttgggcannnnnnnnnnnnnntctgagcctctgagatccccgatggatgagaacaatgaccccctccccaggctgtgctgagagagggaattgannnnnnnnntgaaacgctgccccggcannnnnnncnnnngctgnnnaacactgct

SEQ ID NO: 9386 - DNA, 725 bp, Macaca Fascicularis
  misc_feature (1)...(725): n = A,T,C or G
atataagtggcaccccnnnnnnnnnnnnnnngttcatcgagacatcaaggcctcgggagctgggggaccgtgcaaggttagtgagtcccctctacaatgccagcgccaagttctactgtgtctccttcttctaccacatgtacgggaaacacatcggctccctcaacctcctggtgcggtcccggaacaaaggggctctggacacgcatgcctggtccctcagtggcaataagggcaatgtgtggcagcaggcccatgtgcccatcagccccagtgggcccttccagattatttttgagggggttcgaggctcaggctacctgggggatattgccatagatgacgtcacactgaagaagggggagtgtccccggaagcagatggatcccaataaagtggtggtgatgccgggcagtggagccccctgccagtccagcccacagctgtgggggcccatggccatcttcctcttggcgttgcagagatgatgagagctgtgtgggcccccccacaactttgcccccggcacaccaaagtgtccacattgtaccaaagactgacccctgccagctggggtgcccaggggcagggccggcctgccagggagggggcctgcattggctgcaaggatgagcagaggacaaggacagaggccaggcactgaggccctgcagacagctgttccacatgcacacacgcacacactcatgctctcacacacagag

SEQ ID NO: 9387 - DNA, 668 bp, Macaca Fascicularis
  misc_feature (1)...(668): n = A,T,C or G
ggannnnnnnnnnnnnnnnnnnnnnnnnnnnnnnnnnnnnnnnnnnnngtttcctgaaaaaccggagcatttccagggggcaagtggaacctgtggtccattaaaccctctccctaaatcctacactttggggcagcccttgaggaaaccagaccttggggatcgccaggcaggattagtggcaggaattgagagaacagagccccacagagctcgtaggggaccgtcccccagtcacaagagtgtctcaaggaagcagtcttctcccacatcccccaaagatagctaccagagggtcagtcctctgagcccttctcagtgtagaaaagacaagtgtcaaagcttccccactnnnnnnnnnnnnnnnttctatgacaatannnnnnnnnnnnnnnnnnnnnnnnagcagaggatgctggaccnnnnnnnnnnnnnnnggtcaaatgaagaggacgaaacaacaagtacannnnnnnnnnnnnnnnnnnnnnnnnnnnnnnnnnnnnnnnnnnnnnnnnncacagctggggtctgctactcatgttttgtagacttttgtgtaactatttgtaccatgggacagaatgtgaggaggaagtaacacacacacaggagaatgtgtgtgtatgcatgtgtttgaattcacaagaaagaaattatttatcttg

SEQ ID NO: 9388 - DNA, 741 bp, Macaca Fascicularis
  misc_feature (1)...(741): n = A,T,C or G
gcgagccaagnnngtagaacgcttnnnnagtccnnnnnnnnnnnnnnnnnncttcatgctgagcagcaaagctgggggctgtggcctcaatcnnnttggggctaaccggctggtcatgtttgaccccgactggaacccagccnnnnnnnnnnnnnnnnnnnnnnnnnnnnnnnnnnnnnnnnnnnnnnnnnnnnnnnnnnnnnnnnnnnnnnnnnnnnnnnnnnnnnnnnnnnnnnnnnnnnnnnnnnnnnnnngccacaagaaggcactgagcagctgtgtggtggacgaggagcaggatnnnnnnnnnnnnnnnnntctgggcgagttgaaggagctgtttatcctggatgaagctagcctcagtgacacacatgacaggttgcactgccgacgctgnnnnnnnnnnnnnnnnnnnnnnncaccccctgannnnnnnnnnnnnnnnnnnnncctggctcagtggaaccactgcactgataagcgggggctccaggatgaggtactccaggctgcctggnnnnnnnnntcnnnnnnnnnnnnnnnnnnnnnnnnnnnnnnnnnnnnnnnnnnnnnnnnnnnnnnnnnnnnnnnnnnnnnnnnnnnnnnnntagctcttagaggaaggagatagggaaaaggggttccttgccccacagggccctgtnnnnnnnnnnnnnnnnnnnnnnnnnnnnnnnnaagggctgcatgatgtttgcccaaaatttattttataagaaa

SEQ ID NO: 9389 - DNA, 764 bp, Macaca Fascicularis
  misc_feature (1)...(764): n = A,T,C or G
gggcccannnnnnnnnnnnnnnngatgtgccaaaactgctttctccttggttaaannnnnnnnnnnnnnnnnnnntataatttcctttaagttggagactgaccctgccattgtaattaatcgagctcggaaggctttggaagtttatcagcatcaagtggtggtggctaatatccttgannnnnnnnnnnnnnnnntgtttattgtaactaaagactcggaaaccaagttattgctatcagaggaagaaatagaaaaaggcatagagatagaagagaagatagtggataatcttcagtctcgacacacagcttttataggtgacaaaaactgaagtaaaaagcccttacaggatcaaaaattgttcagggctcttagagatggtgaaaactataataaaaccgtggctttcatatggacagagaaaatgaaagaaagggaaaaggcagtggtatgcaggcaaatatggtttggtattttgtcttttaatgacacctgatacactcacctgaatgttactttgattttgaaattgaacactagaactgtttctcacctttaaaaagaagagcttattgggaattacatattccttaaaatatacatgggggcctgaatatcagccatctttatactataaaaagaggattatggatgcatgaatggtcatgnnnnnnnnnnnnnnnnnnnnnnnnntgcctatgtatgtcaggccctgtgctgagccatgaggattaaaaagatgaataaacatgtcttgttta

SEQ ID NO: 9390 - DNA, 812 bp, Macaca Fascicularis
  misc_feature (1)...(812): n = A,T,C or G
gacagctgtgtgaaacatctgtnnnnaatgactacaaannnnnnnnnngcacacgtggagctgcagagagcaaggagaaaaggaactctcgcctcgatctgccgtgccgtcccaaagaataccgtttgcaggactacacnnnnnnnnnnnnnnnnnnnnnnnnnnnnnnnnnagactggtgaactccccagggctcccgcggactccgccactggacagaaggcctccagcccctccgctctgccctgggagcccttcacgaannnnnnnnnnnnnnnnnnnngagcgacctcgcgtgctgtggctgggccccgagggtggaaacgtattcgcgtctccccgtctcctccttaactgtgactctccgggtcttccgagttttgcatgctgcgggtgtctaggacagacttgcttctactagaacctggagacatagcatctttgatagcataagccagactatctgtgtgcggtggcgtgtgtgtgcgtgcacgtgtgaatgcgagcagcagagctggtatttacccacagatacctgtatatgcatgcatatacaaccaagtgggtagacctaggtgttcactcagaagggtgtgtgcgtgtgtgcgtgcgcgtgtgcctagaatatatattactctcagaggagattctgttgcttttgaataggaatttgttttgtgattagttcgccccttccccaccccttaccagatgttaagcagctatgaaacattctctgtactagctctggtctccttttgactggactgtggctctgaaccctgagcatataccacggactccggggcgct

SEQ ID NO: 9391 - DNA, 749 bp, Macaca Fascicularis
  misc_feature (1)...(749): n = A,T,C or G
ggatagagggnnnnnnnnnnnnnaactttgggccanntgaaagttctgntnnnaggactaagaggaattccttttaatgggtccagagagccaaggacagagggagagatggcctgtacnnnnnnnnnnnnnnnacaccctccctctaagtttgcaatggacttctcctgcccctcctcctcttctgtccttggctatctcagcctggcctctctgatccnnnnnnnnnnnnnnnnnnnngaatctctgagaaatcaaacagcacagtaatgatcggnnnnnnnnnnnnnnnnnnnnnnnncatttctcatcagaacaaagcacgagatggaannnnnnnnnnnnnnncttcatggtggactgcttatcattgagggtctttgggagataaagccccctaagagctttggacagagaaaaacagaccctagaatatgggagtgggtnnnnnnnnnnnnnnnnnnnnnnnnnnnnnnnnnnnnnnnnnnnnnnnnnnnnnnnnnnnnnnnnnnnnnnnnnnnnattacagggctaagcatgtgtatgactaaagaactatctgaaaaacatgcagcaaggtaagaaaatgtaccactcaacaagccagtgatgccannnnnnnnnnnnnnnnnnnnnnnnnnntaccattgtttttgtgtgacaaannnnnnnnnnnnnnnttgaatcttggttttattgcttaaaatgtattatttttccctatgtgttgacaaaggtatttctaatat

SEQ ID NO: 9392 - DNA, 783 bp, Macaca Fascicularis
  misc_feature (1)...(783): n = A,T,C or G
atgagactgtagagctgtgcaagcaaaggtgagcgccctggaccttgcagttttggatcaagtagaggctcggctacagagtgtcctgggaaaggtgaacgagattgccaagcatnnnnnnnnnnnnnnagaagcagatacacaaagcaaggtgcaccagctatatgaaactatacagcgctggagccccattgcctccaccctccctgagctggtgcagagacttgtcannnnnnnnnnnnnnnnnnnnnnnnnnnnnnnnnnnnnnnnnnnctcctgacacatttggataccacccagcagatgattgctaattccctgaaggacaataccaccctcnnnnnnnnnnnnnnnncaacnnnnnnnnnnnnnnnnnncacggttgaggnnnnnnnnnnnnnnnnnnnnnnnnnnnnnaagaagctgggaaagtgagcannnnnnnnnnnnnnnnnnnnggggtaatccctacccctgtgaactgttaacagcttacatagggtttcccctttactgtaactctagcatccccatcccatttgacactgggggcaagggttttttttgcatgtggggtttacacccctcccctgatgaatagagtggtagctaggggttattagaaggtggtctcccctcaggcctgggggataaggacgtgggcccagtcacatgccannnnnnnnnnnnnnntgctttgcctggtgtggggaaggattgggtcttgtcctccaacacagcttctgtggctgactctaatactgtacaactctttctgaccat

SEQ ID NO: 9393 - DNA, 726 bp, Macaca Fascicularis
  misc_feature (1)...(726): n = A,T,C or G
cagagcattgctgtgggaagcattcggtgaaagcgggtgcaggcgcttcggacggccgagggagaagattccaccggcgctgtcttggcttcgagttttaggatgtctgaactttctgctttcatgttttcaaccatcatttttttttttttaaatggcacaacctacatcttgtttttaaaagaagtagcctcaaactaaacttctcaaactctgatgccccggggatgagaacaactagcttggatcttgtgccgtgtaatttgatgtttcattccactgcctccatcgtggaacagaatcgctttccagaaaggctagctggaaacagcagaggctcccagcagtgagaggnnnnnnnnnnnnnnnntcccatcacccccgccccccttgtttttgtcctctgagggacccaagggttatggctttcatgtctaggtgtgggacagaggagggagaggcagagcctgggcccggagcggacggcctggtctgaacctggagtcattcataccacccaaagaaaaggtcccaccaggtccagtgttgtcttagatctgaagatgctgctatttacaaaaccctgatcgtccgaaagcttgaatctgttcctccttgaatgaccctgtagatgcttcacctccacatacctccacatcaccatttatgtctttgtaggaaaacgagcacatgccccacgcactgggggacgggcgtgtttttaaa

SEQ ID NO: 9394 - DNA, 1022 bp, Macaca Fascicularis
  misc_feature (1)...(1022): n = A,T,C or G
gagccggggcttacgctattattacgacaagaacatcatccacaagacgtcggggaagcgctacgtgtaccgcttcgtgtgcnaccnnnnnnnnnnnnnnnnnnnnnnnnnnnnnnnactgcacgccatcctgggcgtccagcccgacacagaggactgaggtcgccaggaccaccctgagccggccccaggctggtggactgagtgggaagcccatcctgaccacnnnnnnnnnnnacccaggaaaggcaggannnnnnnnnnnnnnnnnnntcgccaagaagcagtggccttattgcatcccaaaccacgcctctngaccaggctgnnncgcttgtggcagcgacggcacagctgattctactcatagtgcttttaaatgaaaatggtcgagaaggaggcaccgggaagccatcttggcgcctggcaggccgtgggacgggatggttctggctgtttgagattctcaaaggagcgagcatgtcgtggacacacacaaactatttttagattttcctttgccttttgcaaccaggaacagcaaatgcagaaactctttgagagggtaggagggtgggaaggaaacaaccatgtcatttcagaagttagtttgtatatattattataatcttataattgttctcagaatcccctaacagttctatttaacagaaattgtatattgtaatttaaaataattatataactgtatttgaaataagaattcggacatccgaggttttgtttcatttttcagtagcacatatggaattttgcaaagatttaatctgccaagggccgactgagagaagttgtaaagtgtgtattatttacatttaatagacttacagggataaggcctatgggggggggtcatccctgctttttgtgggtttttttgtttgttttttgggggttttcttgccttggttgtctggcaaggactgtacatttgggagtttttataagaaacttaaatgttattatctggggttannnnnnnnctctgctttctcctttaa

SEQ ID NO: 9395 - DNA, 766 bp, Macaca Fascicularis
gttgggatatgtattattttggatatggtattattttacatactgagacaacgttaattttctttgggtagtaactaatgtcaagtctacatctactggtaaaatattcaaagaacaaactgacaatgatgttctacctacttgttacatgctcatggaagactgtgcagtattgaaagtatttgttaattatctgcttagtattaacactaaatttgtagaatgactttcaggtttgttgaacaatgccttttcaggttggaagaggaaaaatagcctcaatctcccaccccatgtaggcactacctccccaattacccttagaaaacgatcacaccaactctgcctacacacttccagcgatagtggttcattgtctgttaaggcaaactgttccactgttgggcatatctctttgttagaaagttatttcttaggttgctaaaatctgcctagtaccccactaccctacatttaattttgctcactggtcctagttctgtcttatggagcagcccggagtatctttactcatggcaaccctggagataatcgaggccagctactcatcatctcccaaccagtcttccctcaactgcccttcatatgtcatggttttcagatccattccaacctgactgaatgttaacagacagaattcttgaaattaaggaactgtctttatcatcatacatgtagaaaagaatctgaatatttaagtgctaagtgttctctagaaatatatttaagatatgtttattctatt

SEQ ID NO: 9396 - DNA, 720 bp, Macaca Fascicularis
ctgagaccctgggaaggaccagcatgctaatcagcatcagtgaatccacagtctttacttcctgcctcacaaagggccaggtctccccagtgccaggtcctttcctcatgaagttgtgttgcctcaggctgtttagggaccattgcctgtcttggtcacttgagtctgtctccttactttagtccctgggcaatgcttgcttaatgcttttgttgactcaacaagggccgaggccttaggttttctattaaggtctctgccccaggcatggtgctctatatcttggccaaataaattactttccttgaatatccaggaatcttttagactaaagcaatgaggagttatcacctcatcctcaaactccaacaagatctatgccttagtgttgtttttgttgtctgctttgatgtaaaagcaacagtatttggagcaagaagctgcagtactccaaatacacaataggccttttctttatcattcatacaacatttctggtttaggtgtatgtagatgggccatgttatttgtccagaggaagagactgtaaagatacaagaataattttttagtcctaaatgctgttttgtttactttctgtcaagatatttacccgtgtcaaattcaaactacagtactgtgtaattatgtataaagtttttttatttatttgaagttagactagatatacatttttaaatttaacatctggctggacag

SEQ ID NO: 9397 - DNA, 677 bp, Macaca Fascicularis
  misc_feature (1)...(677): n = A,T,C or G
aacaactgcttggaggaccagagctttnnnnaggattcttaaaagcttatgtgagaagttttcctataagagcataactactgatgactggaaggatttcctgtattcctattttaaagataaggttgatgttctcaatcaagttgattggaatgcctggctctactctcctggactgcctcccataaaacccaattatgatatgactctgacaaatgcttgtattgccttaagtcaaagatggattactgccaaagaagaagatttaaattcattcaatgccacagacctgaaagatctctcctctcatcagttgaatgagtnnnnnnnnnnnnnnctccagaggatggctgcggctctgcattcaatccaagtgnnnnnnnnnnnnnnnnnnnnnnnnnnnnnnggcaactgaacaagggagaatgaagtttacccggcccttattcaaggatcttactgcctttgacaaatcccatgatcaagccgtccgaacctaccaagagcacaaagcaannnnnnnnnncgtgactgcaatgctggtggggaaagacttaaaagtggattaaagacctgcctatcgatgattttagagatttctcttttttaaacggaattcgtaaagaaatataaaacttcagctcacaattaaaactgtctttttagttttgactttt

SEQ ID NO: 9398 - DNA, 841 bp, Macaca Fascicularis
  misc_feature (1)...(841): n = A,T,C or G
aagaaaagctcaagccactgatcaaggtcatagaaannnnnnnnnnnnnnnnnnnnnnnnnnnnnnnnnntctgattgacccgggctgcttccgagaaattgatgagctaataaaaaaggaaaccaaaggcaaaggttctttggaagtactcaatttgaaagatgtggaagaaggagatgagaaatttgaatgacacccatcaatctcttcacctctaaaaacactaaagggtttttgtttccgacagcactgtttcatgtctgtgatctgccaaatacttgctcaaactatttgacattttctatctttgtgttaagagtggacaaggcaaggctttcctacataagtataataatgtggaaatgattaggttttaattataaacgggagtctaaatcctaaagcaaaattgaaactccaagatgcannnnnnnnnnnnnnnnnnnnnnnctctgtttcatgccttgacaactttccaaaatgaaagttatttgaggcaactcttgtgagtgaaaagttatttgtacagtagagtaagattattagggatatgtctatacaacaaaagggggagtctttcctaaaaaagaaaacatatgatgcttcatttctacttaatggaacttacgttatgagggtcattatgcttggatgatgttcctgattatctgagaaacagatctagaaaaactgtgccggacttaaataattttcattgaacatactgccataacttagattattcttcgttaaaaaataaaagtcacttatttctaattcttaaaatttataatatatattaatatagctaaaattgtgtgtattcaataaaaccactct

SEQ ID NO: 9399 - DNA, 715 bp, Macaca Fascicularis
  misc_feature (1)...(715): n = A,T,C or G
gagctnnnnnnnnactggaaannnaggttgggctccatgtaaattggttggcagtgggaatcagctagggctgctgtacctgagttcgcagaccaggtggcttagacagcagggaggtactgccacacggctttggagaccggaagtctgagaggaaggtgctggcagggctggttccttctggggctgtgatgggaaacctgtcctgacctctcctggcgtctactgttatctttggtgttccctgtagacggctgcccgctccctgtagcttcatgtcttccttctctgtgtccttctcttcatgtggtagtctttttaggatgctggtcgtgttgccttagggcccctacatcagtgccatcatctagactgattctgccggcagtcatcctgtctccagataaggtcatgtcctgaagtgttctgggttaggactttgacgtgtttgaatggtggggactggtggacacaattcagcccctgacagcagcttttctctcccctccctgacgctgtcgcagctgcagtgacatgtacgagaaagtgctgtgcaccagctgcgccatgttcgagacctgaggctggctcaagccggctgccttcacggagagccacaccatgcatggcagccttccctggacgagcgctcggtgttcacactgaactgtggggtcagtgggaaggccttttacatgttctattttgtatccta

SEQ ID NO: 9400 - DNA, 724 bp, Macaca Fascicularis
  misc_feature (1)...(724): n = A,T,C or G
tgcgcgtaggttttgnnnnnntttgcagttttgnnnnnnnnngcggttttctaaccaattgcacaactccgttctcggggtggcggcaggcaggggaggcttggacgccggtgaggaatggggggccacagctgcagactcaagccctcccccacccctggaaaggtccctccccgacccaggcccctggcgtgtgtgggtgtgcgtgcgtgtgtgtgccgtgttcgtgtgcaaggggccggggaggtgggcgtgcgtgtgcgtgccagcgagggctgctgtgggcgtgtgtgtcaggtgggccacgcgtgcagggtgtgtgtccacaagcgacgatcgtggtgcctccagcggcctgggcgttggctgagccgacgctggggcttccagaaggccgggggcctccgaggtgccggttaggagtttgaaccccgctctgcagagggaagcggggacaatgccggggtttcaggcaggggacacggggagggcctgtccagaagtcacatcggcagcagctgtctaaagggcttggggcctgggggacgttgaaggtgggcggggcccctctgtaaatacggccccagggtggtgagagactcccatgccacccgtccccttgtgacctaccccctctgacctccagctgaccatgcatgccacgtggccggctgggtcctccaccctctctggagtttgcctcccccagcccccctccccatca

SEQ ID NO: 9401 - DNA, 727 bp, Macaca Fascicularis
  misc_feature (1)...(727): n = A,T,C or G
tggctccccaaccagcagtgatgacatgaccctcaccagccccagcatggacaactccagcgcagagctgcttcccagcggggactcaccactgaaccagaggatgacggaaaacctgctggccagcctgtcagagcatgaacgcgcagccatcctcagtgtacccgcagcccagaaccctgaggacctccgcatgtttgccaggctccttcactacttccgaggccgccaccacctggaggagattatgtacaacgagaacactcggcgctcccagctnnnnnnnnnnnnnnnnnnnttccgcagcgtgctggtggtgaccacccatgaggaccccgtgattgccgtcttccaggctctgcttccctgagcccaggcagagggcggaaggctgctggggtgtgcaggtttggaaaggtcccttggattcccggctggggacaatgatgacctggaccctggccagaggagccctagccctccagcaaggcagctccnnnnnnnnnnnnnnngtgactcacctgtgcacccctggccctcccagccacctgggnnnnnnnnnnnnnnnncagaggtggccannnnnnnnnncactcttgggctgtggccannnnnnnnnnnnnnnnnnnnnnnnnnnnnnnnnnnnnnnnnnnnnnnnnnnnnnnnnnnnnnnnnnnnnnnnnnnnnnnnttcctctcagcagataccctgaccagcnnnnngtcaa

SEQ ID NO: 9402 - DNA, 750 bp, Macaca Fascicularis
  misc_feature (1)...(750): n = A,T,C or G
tgctagaggctttnnnacnntgagatctcaatgcgaaatgaaaactcaggcagtttagtccatagtggtactattttgatgatattttccattaataaaatgtaatttcagattattcgtttacaagctttataattttatgattttttaatcgtgttttgtcacagacttccctagtgtttgtgctacacgtagtcagaagcgagtgtccttttcttttgcttcaggctgagggctgcctcgctctttgtcccccattaggattctattacatatgcaattgtaggttcaacctgccccttcccctgccagcaaaccccaccaccctaagagaaattttagcttatatatgatggtatatttacaaaaagagaaagagaaaatctggtatttgcaatgatctgtgccttctttttaccaccctcttgattggagcttttgtgatgcagctaccatgattcaaaaaaattaaaaaattaaaattaaaaaaaaaatctgccacttatccaagtccactagaggccactgtcttcaaagcttctctcaccctagccaaaggtcctaagaggagacagctgtgaagttgggcgtgctctgtggtaccagctgtgacttttatatttctcctagtcttaggttgttcatgaaactagaaatgtcatccctgcttgatttttcatcagccaagttaaacccctgctttctgtcctttgcaccttttgcgtgaacagaatactgcattataaagca

SEQ ID NO: 9403 - DNA, 750 bp, Macaca Fascicularis
agccaataggtggaaagaagaaacgaagaaacttactgaaagtgctgaaattagaatcaataatctaaagagtgagttgagtcgacagaaacttcatacccaagagctgctttctcagctggaaatggcaaatgaaaaggtagttgagaatgaaaagctaattctagagcatcgagaaaaagccaacagacttcagaggcgtctaagtcaggcagaagagagagctgcttcagcttcccagcagctcagtgtgattacagtgcagagaagaaaagcagcctccctgatgaatctggaaaatatttaaaaatattcatagttcattcacagaactttagagttgggaaagcagttggactagaagtgtattgaaatggtaaagcctgcagagtataatagttaaggcttgtgttattttgcttaagcattgtcattctgttttgagggttattggaaaacagagcagtgaccacttcctgtaagtaaagaaaatataatcctatattgagcttcagtggagaataaaccagctgagaagaactcattgccttcatcaatgtgtctgttttttaattcctcgtttttcccttgaaaggctataataattttcaaactatgcaaatttctctttcataagaaagagtttttaagaaaattctagaatttaatatttcagtttccaagatttgaaaattttacatctaattgttacttctaactcatttttaaagttcctaagtatccatttta

SEQ ID NO: 9404 - DNA, 737 bp, Macaca Fascicularis
  misc_feature (1)...(737): n = A,T,C or G
acgccttgccaggggcggggaggcgcagggcgaggaaggggccaggggagatggtgacacagacaccccacaacaaccgcctcaaagacgttcccgtgtgccctggaaggtcgggcctggaggccgccccgaggagcttgtactttgacagggagctggccgggcacacggggaactgtgcagccggctgaggaagcggcaggcacccaggctggggtcggcaagtgtgggtgaggagtggcggccgggcccaaggtccttgttggacaagacactttggctcagggtggggcagggtgagccctgggccacccacagacgacggggtctgcatctggctctgccactcgctggcctcagttggcctctctgtgatgtgggctgcggagtgggtttggtaggacagctggcatacagtcggcactcaagcatgtctgtggtgtcccactccaggccactgccagtctggcctccagtccggagctctgagtcccagtgactgtgcgtgggctgagccgctgagctgtgagggccggggctggggctccctggggtggtgcttgtcgctggctcatttatggtcaacagcggcccagacgggccctgcccgctctgactcccacatcccaggaaccctctgccaaccttnntcgtggtgttcctgnnnntggcgtccccctggatgtctgggacctccccccgcannacacacacannnntgctgccctcgcactggg

SEQ ID NO: 9405 - DNA, 705 bp, Macaca Fascicularis
  misc_feature (1)...(705): n = A,T,C or G
cacatcacaactcgccaccaggnnncagctgcccactcagcaaccctgccatcccacccacccaggcccctgaaatgccccagccccggcccttccgcctcgagtcccttgacatccctttcaccaaggccaagcgtaagaaaagtaaaagcaactttnnnnnnnnnnnnnnnnnnnnnnnnnnnnctgccgctgtctgccttataggcatctaatgactgccaggccctcccagnnnnnnnnnnnnnnnnnctcctcccacctgccacacagcgctccagggcctgagggctccctcagccctgggaagacacattcccttccctgttccccagagagtccacctctgccctgggcaggagccccttggaggctgaacagtcctccttagagaggcctgctccannnnnnnnnnnnnnnnnnnngtttccgtctgctcacctgccacggagcgcacacccatgcccaccagtgttggtctttgcttnnnnnnnnnnnnnnnnnnnnnnnnnnnnnnnnnnnnnnnnnggagtgggcagcagctgccacgtggaggaagctcagtatcagccgggaaggaactgtgccnnnnnnnnnnnnnnnnnactnnnnnnnnnnnnnnnnnncccgtgggtggtacaggggtcccacagcaagtcttcctgcactgcccacccctggctggtctgtggcccagggaaggcc

SEQ ID NO: 9406 - DNA, 772 bp, Macaca Fascicularis
  misc_feature (1)...(772): n = A,T,C or G
cacagcagtgctgggggccagcgtgggtgcgggtannnnnnnnggaaagcagactgccctaccagcccccagccctgtgcagccttcgagcactgtccagcctcctgctccacaagaaggccctggagcacaaggccgcctccctggtggcggggggcgaggctgagcggccggctggagcgctgcaggcctcactggggctggtgcgggggcagctccgggacaacccagcctacctcctgctgcgggcacggttcctggcggccttcaccctccctgcgctcctggccaccctggccccccatggtatccgcaccaccctctcagcagcctccatagcaggctccgagagcgaggacgaggacctcnnnnnnnnnnnnnnnnnnnnnnacagggacgggcagccgggctgcacggcggccacacgccacattcagggacccccagactctggtagatgctctgccgcctcctgcctggatgcttttaatgaccttgatgtnnnnnnnnnnnnnnnnnnnnnnnnnnnncatgccaggcacagccggaagcggaggcggctggtgtgagcagcaggacaagcacgcctccgaagcccgtggnnnnnnnnnnnnnaaacagcccacacccagcctgcgagagaggcagccagaggccaggtgtctgctggccacccaccgaccaggtccgcagtgaacagaggcaggcctgccaactgaccgtgtggcccggggcacagctgttccccaagtgcacacctgaacactggagg

SEQ ID NO: 9407 - DNA, 761 bp, Macaca Fascicularis
  misc_feature (1)...(761): n = A,T,C or G
gtagagcagagaggtgnaaancacttaactcttgtttagtaccctcattgccttgctgcctgggtatctggcccctttccataaacatttcttttcagttcatgtagttctttaacagaaagctgctattatgtatattgtcatttgtgaaggaagttggagagtcacagctttactgtgacaggttttgcgcaaggctttgatacctgtcacccagggtatcttaaaagcaagttgttctcccactactttcctttccctctgccctgccattccttttacaatgctgtgaaaaaagttgtgcttcttaggtgagtgggtactttctattttgtttctcaatgagcaattttgaggatgaaatgggaagatataattgcttcccttttgcacctatttgggtatgtacactctggcagaagggagtccttaggtttagtttcaaaatatattaccttcctggattcccttcttaactttttctgacttgggtccattttcttttcattgcctccttttccaggcagctctattcttgcagagccatggcaggacatattaaaattccaatagagaacactaaaaggaaagtctgtggaatcactagtgactaaatactgggaacctattttctctatcttcctccatgttgtgttctttgtattatcaagatgataatatattatgtatttgaattcctgaaaaatggaaaatgtttaagatatatgtatataaagcatatgctgtattggtgcaataat

SEQ ID NO: 9408 - DNA, 753 bp, Macaca Fascicularis
  misc_feature (1)...(753): n = A,T,C or G
accgccactgggccctcgcccgccgggaggctccttacggggcaccccgcttcgacatgccagactttgaggacgatggtggcccctatggcgaatctgaggctcctgcgccacccggcccgggcacccgctggccctatcggtcccgggacacccgccgctccttcccagagcccgaggagcttcctgaaggtggaagttatgctggttccctggctgagccctacgaggagctggaggcagaggagtgcgggatcctnnnnnnnnnnnnnnnnnnncgctgcgtgcgcgtccccgaaggcttcacctgccgctgcttcgatggctaccgtctggacatgactcgnnnnnnnnnnnnnnncatcaacgagtgtgatgaggccgaggctgcctccccgctgtgcgtcaacgcgcgctgcctcaatacggatggctccttccgctgtatctgccgcccgggattcgcacccacgcaccagccgcaccactgtgcgcccgcgcggccccgggcctaagacctggcacccgctggccgcccatccgcgcctaccacacatggcccctgcagcgcatcctgcagcccccttatgcgtatgtgcatggggcggcccgcttggacctggagaagggacctacggacgcctggaagctgcgacgccctgcactgccccgcctcccccagcgctcccactgatgcggtggtcccgggcctggcccaggggccccttcacatgcccttcccttttataaaat

SEQ ID NO: 9409 - DNA, 612 bp, Macaca Fascicularis
  misc_feature (1)...(612): n = A,T,C or G
gacattcagaggcannnggttccaggcttgnnnntgtatcttgtacgcagattttatttgtccttttgaatcatagagttnnnaagtgatatcttccagtatccttatgagactttacttagatataggggctattcagtgtagagtgcagacagaccaagaagggtgcagaagatatggaatggctttaaacagggagatgggnnnnnnnnnngaggccttatcctcaggtctaaattcannnnnnnnnnnnnnnnnnnnnnnnnnnnnnnnnnnagcagctagctgaccttggctataagaccttctctgcctccatgatgctccttactgtgtatggggggtacctctgcagtgtcggaatctaccactatttccagcagcgcagggcccagcgccaggcggcagaagaacagaagacctcaggaatcctgtagatctggggggctttttctcctgagcagagaggcccaaggcatgctgtggagagacttcacctgccaccatttccaggtcaacaggactagagcgttgatggttttcaaactctgttggannnnnnnnnnnnnnntttctctggttctgccagnnnnnnnnnnnnnnncagtttat

SEQ ID NO: 9410 - DNA, 738 bp, Macaca Fascicularis
  misc_feature (1)...(738): n = A,T,C or G
gaaggcacctgggggttgtgaccggcgtcttggtggccttcgtcctgttgctcttcctcctcctcctnnncttccttgtcctccgacatcgacgtcagggcaaacgttggacatcggcccagagaaaggctgatttccaacatcctgcaggggctgtggagccagagcccagagacagaggccttcagaggaggtccagcccagctgctgacacccaggaagaaaacctctatgctgccgtgaaggacacacagcctgaggacggggtggagctggacagtcggaggccacacgatgaagacccccaggcagtgacgtacgcccgggtgaaacactccggacctaggagagaaatggcctcccctccctccccactgtccgaggaattcctggacacaaaggaggcagatggacactgaggctgctgcatctgaagacccccaggatgtgacctacgcccagctgcagagcttgaccctcagacgggaggcaactgagcctcctccatcccaggaaagggcgcctccagttgagtccagcatctacgccaccctgaccatccactagcccagaggggacccagaccccacattccagggagtctgggacgcatgggagttgcccccagtggacaccattgaaccccagtcagcctggacctacaccaggaaacgctgggaacttttaggggtcactcagttctgcagtataaataactaacatctatacattttgaaa

SEQ ID NO: 9411 - DNA, 727 bp, Macaca Fascicularis
  misc_feature (1)...(727): n = A,T,C or G
tcccaaattgctgnnnnnntacaggcatgagccacgcccaaccttgttcttaattttgtattatccaatcgttgctaatattacatgcactttctcacttaatcctcatgacaagcttgtgaggcagatgctcattgttcccatcttgatgaaacttgagtctcagggaggtgaagtgacttgcccagggtcactnnnnnnnnnnnnnnnnnnattcaaacccacatgtggctccaaagcctgcgtctggatttgggggtgttttttggcacagcaccatcgcctctctccctgcctgttttccccaaaatggaaaggaaggccttttaaaccagagtttcnnnnnnnnnnnnnnnnnnnnnnnnnnnnnnnnnnnnnnnnnnnnnnnnnnnnnnnnnnnnnnnnnnnnnnnnnnnnnnnnnnnncccatgcccctnnnnnnnnnnnnnnnnnnnnnnnnnnnnnngcgcctcccccatcctgtcagggactggtgggagggcaggggagcccacgcgaacccttcnnnnnnnnnnnnnnnnnngtcagttccgcatggagccagcctggtcccatggaaaatgctggtggcctgtgctttctgnnnnnnnnnnnnnnnnnnnngtagttcctgtcccccaccaggccttgaggctcagggtaggagagggcccctggctgccctcctgtcactcctctgccacttccctccccttcctcaacctgc

SEQ ID NO: 9412 - DNA, 667 bp, Macaca Fascicularis
  misc_feature (1)...(667): n = A,T,C or G
ccagnnnctggatcgatgtgatcttgttgcacatttccatggggtgtacctatactttaagccaatcctgctgcattcactgctaagttaaataaaaagccaagaagattttgcatcatgcagatcctttgctatctgacttgcatctcttcccccacctgtcagctagccatctgcttgtttgtgttgggatattttttagcacctgaagcaccatctgaaaggggcaccattttcttcttcccttttacctcacatatgctacctaaaaactcttaagttgtcaatctgacctccagcgtgaggttaatgagcaaaattggtctttggggccctttttgtccaagccccactgaaaggcctcttcataaaactattatctttaaagtcctactttaactccttaattccagcatacagctaaaactggatggatattctggtaagtaaaggctgaggactcctccttactttaatcctcagatctagacaactcatgacattttctttgaccaacatagcacatgatgagatatcaagnnnnnnnnnnnnnnnnnnttgaaaaaaatacgtaatctgtttcacctgtaactgtttaagccaatgaacttttcaaaatttatgtaatatgggacttttatgtagcactttatgttttcatgctgct

SEQ ID NO: 9413 - DNA, 666 bp, Macaca Fascicularis
  misc_feature (1)...(666): n = A,T,C or G
gggagacgcagccggacgcccggccaactgggccccagggcggaagaagaaagacnnnnnnnnnnnnnnnnnnnnnnnnnnnnnnnnnnnnnnnnnnnnnnnnnnnnngcctgaggnnnnnnnnnnnnnnnggccagcagccggctttgagctcccagcctttgaccctaggactctctcccgctcaggacctctctgcctccccgagtccagggccctcctgagctccagcccagaggtggttgtcgccgtgggattccctggggcnnnnnnnnnnnnnnnnnnnnnnnnnnnnctcgtgtcggccggatacgtccatgtgaacagggacacgctaggctcctggcagcgctgtgtgaccgcgtgtgagacannnnnnnnnnnnnnnnnnnnnnnnnnnnnnnnnnacacaaacccggactccgcgagccgcgccaggtacgtccagtgcgcccgagccgcgggctttccctgccgctgcttcctcttcaccgccactctggagcaggcgcgccacaacaaccggtttcgagagatgacggactcctctcatatccccgtatcagacatggtcatgtatggctacaggaagcagttcgaggccccgacgctggccgaaggcttctctgccatcctggagatcccgttccggctgtgcctggagcc

SEQ ID NO: 9414 - DNA, 618 bp, Macaca Fascicularis
  misc_feature (1)...(618): n = A,T,C or G
cccatggttcgnnnnnnnnnnnnnnnnnnnnnnnngagnnngcagnnnncttccctgnnnnnnnnnnnnnnnnnnggtatgaggaggaagagcccnnnnnnngctgtggccctgtgcgctatagcccagagggaggtgtccactatgtagctggaacaggagacctaggacnnnnnnnnnnnnnnnnnnnnnnnnnnnnnnnnngacttttctcctagacgtatagtctaaaacattctccnnnnnnnnnnnnnnnnnnnnnnnnnnnnnnnnnnnnnnnngggcaccaccacctgcctgagagcctagctcactgcagcacatcctccagaatctagctttctatctacnnnnnnnnnnnnnnnnnnnnnnnnnnnnnnnnnnnnnnnnnnnnnnnnnnnnnnnnnnnnnnnnnnnnnnnnnnnnnnnnnnncnnnnnnnnnnnnnnnnnnnnnnnnnnnnnnnnnnnnnnnnnnnnnnnnnnnnnnnnnnnnnnnnnnnnnnnnnnnnnnnnnnnnnnnnnnnnnnnnnnnnnnnnnnnnnnnnnnnnnnnnnnnnnnnnnnnnnnnnnnnnnnnnnnnnnnnnnnnnnnnnnnnnnnnnnnnnnnnnnctcagag

SEQ ID NO: 9415 - DNA, 751 bp, Macaca Fascicularis
  misc_feature (1)...(751): n = A,T,C or G
ccatccttccaaaatgtaaggccagtcacggtgtgaccgagctggctaacaggcttgtctgcttggtttttctcctacacgatcctcctacctggtccaccccagggctacnnnnnnnnnnnnnnnnnnnntgaaccaattatgagcagtctccttactgaaggcannnnnnnnnnnnnnnnnnnnnnnnnnnnnnnnnnnncagccggggagaagtgcctgcgggtccccacggttcctttctgcttttctgaatgcatcaagggtacaagaacttgccaatgggaaattcatctgagtggcannnnnnnnnnnngataggagtggaatgcccacacggtgaccaacggaactggcctgcgtgcacagccagctgccccgctcaggcctgggcccggagctcagggcgccctctgtctgtaggaaccgtttggaggacagtctgagagcggaaacttcaatgtgattctannnnnnnnnnnnnnnnnnnnnnnnnnnnnnnnttcgtggccccaaatcccctgagacgtgccttgtagaatgacgtttgtgaggtnnnnnnnnnnnnnnnnnnnnnnnnnnnnnnnnnnnnnnnnttaaactgtgcaaggtaaaaatcaannnnnnnnnnnnnnnnnnnnnnnnnnagtannnnnnnnnnnngtttaagaaacagttatgatcctaaactttttggataatcttttgtatttctgacctttgaatttaatnnnnnnnntagataaaataa

SEQ ID NO: 9416 - DNA, 733 bp, Macaca Fascicularis
  misc_feature (1)...(733): n = A,T,C or G
gtgaaggaggtatacgtgactaccactctggaccgggaggcccaggctgtgcggggccaggtgtccttctaccgtggcacagtgcctgtgcaggtacccgaggaggctgaggctgcccggcagaggaagggcgcagacgccctgtggatggccacnnnnnnnnnnnnnnnnncgagacttcggagctctgaggagccacggcggagggctggcctctccttggcgcccttgaacctgggagnnnnnnngaccggctttctgacacagagcaacctgctgagcgtggctgggnnnnnnnnnnnnnnnnnnnnnnnnnnnnnnnnnnnnnnnnnnnnnnnnnnnnnnnnnnnnnnnnnnnnnnnnnnnnnnnnnnnnnnnnnnnnnnnnnngcagatccgccacatgctcttctcctgggctgagcgccaggctgggcagccaggggctgtgggactcctggtgcaggccctggagcagagtgaccggcaggacgtggcagaagaggtgcgtgcagtcttggagctcggctgccgcaagtaccaggacggcatccgacgcacgggtttagcccccaaggaccccgctctgcctggctcgtcagctccacagcccccagagcctgcccaggcctaggccccacagactttgnnnnnnnnnnnnnnnnnnnnngcggatgggcagagcccccaccttcaagcctctccagtggggggacaggcgtccccgtggcaac

SEQ ID NO: 9417 - DNA, 744 bp, Macaca Fascicularis
tttcctttctgctgcatttcaagaggttttgaaacaaaggaaaacagcagaggtagttagcttgatgaaggggacagcatggtggaaaggatgttccttgatggaaggagccagtgacgagggtgacttggagctttcaattccctgagaatgaatgctgtgttgataaggactggggcagggttgaggaagtacccttggaaagaagcaatgcgaggaacacacctctgccatcagcagaaaggccaggggaggtgagagctatgtggagggagaggaagggaatctggcctgtgcttaactgacgtgagagccagactttaaactttagtggcttcctttaccactcatgtcatcttgggccaactgagatcacttttctaagcctctgcttcactggaatgttgtgaggcctaaatgagaagcacagagcctggtctgtggagatatttttagtattggtggggagctgcacacttcgtggcctccatttctcccatggactaagttacctgggttggtgtggtgcttgaaagcacagactttggggatagagagacccagggtagggttcttgcctagccatacatcagctgtgagaccttgggcaagtgcttggtttctccttctgtgtaaaattaggatactaggacctattcttaaatgtagaaccaagaggattaaatgagataatgtgtgaaacactcatcgtggtacctggtacatagtaagcactcaataagt

SEQ ID NO: 9418 - DNA, 731 bp, Macaca Fascicularis
aggggccaagcactcagccagtgcacaaggctgagagttctacagacagctcagggcccctggagagggcagaggaggccccccagctgatgcggaccaagagcgacgccagctgcataagccagaggaggttcaaatgccgtgcccccggtgaggcccagcgcatccggcgacaccggttctctatcaatggccacttctacaatcataagacctccgtgtttactccggcctatgggtccgtgaccaatgtgagggtcaacagcaccatgacaaccctgcaggtgctcaccctgctgctgaacaaatttagggtggaagacggccccagtgagttcgcactctacatcgttcatgagtctggggagcggacaaaattaaaagactgcgagtacccactgatttccagaatcctgcatgggccgtgtgagaagatcgccaggatgttcctgatggaagctgacttgggcgtggaagtcccccatgacgtgagtgggggctgaggctagggaggcctgctctagggtgaggggctcttgggtgacgaggcctaccgaggactcctggccagagccctctcaggtgatgtctccaggagctccataccctcctgaagggctcccagcccagcacagggaggcaccagccctacctctcccatcagtgaccgccagcgccaacagcttagggaaaagaagaatttgagtcctataaaaccatggccctgtcct

SEQ ID NO: 9419 - DNA, 803 bp, Macaca Fascicularis
  misc_feature (1)...(803): n = A,T,C or G
gattctggagaacttccttcacaagtgggacccccagagccacctgcagccacttgctgggaccgcggaggccacctaccagatgactgtggagctcccattcagggatattctggaggagcccagggaggatgagctcatggagaggctgaaccagcacccgcacctgcagctgtgcaggtgacatccgggctgccgtcccagccagggcggcaggagagagaggctggcctacacaggtgcccatcatggaagaggcggccatgctatggccagccgagcaggaagagacctttcctctgatagaccactaagcnnnnnnnnnnnnnnnnnnnnnnnnnnnnnggcccaacagccatccacagnnnnnnnnnnnnnnnnnnnnnnnnnnnnnacgcgctccgctttcttttatagctgcttcagtgagaattccctcgcccactccacagggaccttacagacaaaaaagcgagaagcagcggcctcccctgtcccctgcagcttcgggtgcctttgctgctggtggccgttagggaccacaggcctgaccagggcccgcacaggttaaccggcagacttccggggcattctggtggggatgctggtggtttgacatggagagaaccttgaccgtgttttattatttcgtggcttgcatgagtgtgactgcgtgtgtttctttaggggtctgattgccagttattttcatcagtaagtcttgcgaagaatgggattgtcattcttaacttcagcacaattctagtcctgcttctccggagtggggttgtgaataaagctgc

SEQ ID NO: 9420 - DNA, 741 bp, Macaca Fascicularis
  misc_feature (1)...(741): n = A,T,C or G
gcaaaacatacacataattttaaatagctcagaaaggtaaaatatgaaacacaggtcatattcttcctctggggtttttgggaggcttcctctaaatcactgcctagatcttctgtctcaggaatttttcttgatctccatctttaatgcttatcttctgnnnnnnnaagcatttattgtttcaactgtcccattcttcccagtctcacgactgtttcatatgagttttatgttaagcaaatcttggcagtgtagaaagnnnnnnnnnnnnnnntaatcaaacagtagttttaagagcattttcccaataccaacnnnnnnnnnnnnngtgattaatgtcggaactgttatctggtagtatgtcatttcgtaagctgttaagaaacttagttgttagcttcagcctttggatactggggctataatgaagttagaaatggaagatattaannnnnnnnnnnnnnnattagagttcacttcagctgctgttaggttcagagaataacagcagccataacctacatcaagccaatttaaattagactgtannnnnnnnnnnnnnnnnnnnnnnnnnnnnnaatccctctattgacagttattagtgtaagaggttctaatacccagggtaaggcannnncatacatgagagtctgtctgnnncatgcagaacannnnnnnnnnnnnnnnnnnnnnnnnnnnnnnnnnnnnnnnnnnnnnnnnnnnnncttccngnatnnnagc

SEQ ID NO: 9421 - DNA, 778 bp, Macaca Fascicularis
  misc_feature (1)...(778): n = A,T,C or G
gcagcatcagcacggcagtgggcaccatnnncgccgagcannnnncncnnngtaagtccaaggcttgagggcatcaagatggcaatggtagcctgtggggnnnnnnnnnnnnnnnnnattggggcagagggtgaagtgtactcctggggcaaaggggcccgaggtcgactgggaaggagggatgaggatgccggactccctcggccagtgcagttggatgagacacacccttacacggtgacttccgtgtcctgttgccatggaaacaccctcnnnnnnnnnnnnnnnnnnnnnnnnnnnnnnnnnnnnnnnnnnnnnnnnnnnntacacctctggaccacnnnnnnnnnnnnnnnnnnnnnnnnnnnnnnnnnnnnnnnnnnnnnnnnnnnnnnnnnnnnnnnnncgtctcctagattgggtcatcatggggtatccgggctggcaaaacccctgctctgcttttggccttggatatggaaacctcaaccactttgttttcccaccacctctttgcctttcctaccccttcctcccttcagtcagtgtccccaggatccagcctggctacagttagaaggcagacctagcctttggaagcagagccttaccaaaaaaaggctgaaggcagctgtagctccacatagaccgtgccctttcccccagcccagttagaaaataagtctgggccgggnnnnnnnnnnnnnnnnnnnnnnnnnagtgctttgggaggtcaagccaggaggatcccttgtggccaggagttgtagaccagcct

SEQ ID NO: 9422 - DNA, 733 bp, Macaca Fascicularis
  misc_feature (1)...(733): n = A,T,C or G
ttttaacagaatctttttattatttgtaaaagatataaaannnnnnnnnnnnnnnnnnnnnnnnnnnaggttatacattttaaccagattttctcaggccttttttggatacctttagtagttaactctcttttgtcaaacccnnnnnnnnnnnnnnnnnnnnnnnnntacagaagcctggggaatacagccaagggcactgctcactgtggcccatgtattcgttcccacaggctgcactgaaaataacttggtaaacagtaccctcctccattttgtgtctgtttcctctgttgtgcttctttggggataggaagacaaacataactactattccaggtgttgccagtgaaacgttcccagacacaaagaattgtgcttttaattccatgtcaccatttgccttttttttttttttttgtcatggtctgaccaaaattccttccctgcacagcnnnnnnnnnnnnnnnnnnnnnnnnnnnnnnnnnatacgcaatgtggcattttgtttacttcgcatttgccatgagcaaaaacacttcttggaatggctgcagcgaggctgtgtcattggcttacaaaggtgactcataggtaatttctgtgtttgcattccactgctctgctccctaaggtccttgactttctcccctggaattcacttaaaaagggactgagcattgtgtcaacctgttgcagcgtttttcatatatgtgttcactctaaaaatgca

SEQ ID NO: 9423 - DNA, 699 bp, Macaca Fascicularis
  misc_feature (1)...(699): n = A,T,C or G
agcgggcccagctgtnnnnnncacggacacgnnctgnnnnnnnnnnnnnnnngggccagggaggatacgctccgnnnnnnnnnnnnnnnnggaccagggactcgaccgtggggacagatgtcccccagtgcctgccaggccctggagtggagattgaggaccaaggggcttctggccctccagcccccgtactcggccatgccctgtggtcactgcnnnnnnnnnnnnnnnnnnnnnnnnaaggctgaccggcccgggctgcgcacacccttgccctgctttgccttaaagcctcatcatctgcccagcccctcgccccttcctagctctgctcaccgcccaaggcgacaccggctggaccaggcactgccggcctttctcctgcccagccttggaaccagcttttttttcctacaatgaaggctgacgctgagggcggactgtggacggggctgggtcagtcgcgtatttattttgctttgagaagaggctcctctggccctgctctcctgcagggaggtggctgtcccgcgggaagccatcagcttgggccagctggcaggcagcaggaatggagaagctggccttgctgaccaggcgagggccagaaccccccctacccccagctgctgtcgctctcccacccagcttggccccctgcccgcccacctgcctgaagccgggcctgtacatagcgca

SEQ ID NO: 9424 - DNA, 750 bp, Macaca Fascicularis
  misc_feature (1)...(750): n = A,T,C or G
tgcgttggngaanngatgntcttcggctatggaagttatgaaacccagaacatggcctggtccaaaccaagaaatgtacagattttgaatatggtgactaggcaaggggcactttgggctaatactctaggttctctggctttnnnnnnnnnnnnatttggtgtcatcattgagaaaacacgaggtgcagaagatgaccttaacacagtagcggctggaactatgacaggcatgttgtataaatgtacaggtggtcttcgagggatagcacgaggtggtctgacaggactaacacttaccagcctctatgcactatataataactgggagcacatgaaaggctccttgctccaacagtcactctgaagattttgccaactcatgaatggaggacacttagtatctagatcattttataagacagtctggagttatcctctctctcctacctacaattagtttgaaaaattggagattttgatttgctgtgatgaaaatcctggatggttgaccaagactggnnnnnnnnnnnnnnnnnnnnnnnnnnnnnnnnnnnnncttnnnnnnnnnnntgagaaccatggttctcttctcctctggagaagatcttgcacatatctcttctcctcccccatgaactagaaaaccacttactcccagaannnnnnnnntgcttgtcagtactatatcaccaagtctgttcatttaatgatccaaaactgtaatgttgcanctgtatccaaataaagg

SEQ ID NO: 9425 - DNA, 870 bp, Macaca Fascicularis
  misc_feature (1)...(870): n = A,T,C or G
ctggcggcagccatcaggtaagccaagatgggtgcatacaagtacattcaggagctatggagaaannnnnnnnnnnnnnnnnnnnnnnnnnnnnnnagggtcnnnnnnnnnnnnnnnnnnnnnnnnnnnnntctccacagggctccccgccccacccggcctgataaagcgcgccgactgggctacaagnnnnnnnnnnnnnnngttatatataggattcgtgttcgccgtggnnnnnnnnnnnnnnnnnnnnctaagggnnnnnnnnnnnnnnnnnnnnnnnnnnnnnnnnnnnnncnnnnnnnnnnnnnnnnnnnnnnnnnnnnnnnnnnnnaggagcnnnnnnnnnnnnnnnnnnnnnnnnnnnnnnnnnnnnnnnnnnnnnnngttggagaagattccacatacaaattttttgaggttatcctcattgatccattccataaagctatcagaagaaatcctgacacccaatggatcaccaaaccagtccacaagcacagggagatgcgtgggctgacatctgcgggccgaaagagccgtggccttggaaagggccataagttccaccacactattggaggttctcgccgggcagcttggagaaggcgcaatactctccagctcnnnnnnnnnnnnnnnnnnnnnnnnngtttgtaaaattcatacctaataaacaatttaggacagtcatgtctgcttacaggtgttatttgtctgttaaaactagtctgcagattgtttcttgaatgctttgtcaaattaagaaagttaaagtgcaataatgtttgaagacaataagtggtggtgtatcttgtttctaataagataaacttttttgtctttatctctattagggagttgtagtca

SEQ ID NO: 9426 - DNA, 721 bp, Macaca Fascicularis
  misc_feature (1)...(721): n = A,T,C or G
gcctggaaatagactcagattttnnnncttccgggtaaatgcagagctacaagcacgctcnnncatctgggtggcaggagatgctgcatgcttctatgatataaagttgggaaggaggcgggtannnnnnnnnnnnnnnnnnnttgtgagtggaagattggctggagaaaatatgannnnnnnnnnnnnnnngtactggcatcagtcaatgttctggagtgatttggnnnnnnnnnnnnnntatgaagctattggtcttgtggacagtagtttgcccacagttggtgtttttgcaaaagcaactgcacaagacaaccccagatctgccacagagcagtcaggaannnnnnnnnnntcagagagtgagacagannnnnnnnnnnnnnnnattgctattcctcnnnnnnnnnnnnnnnnnccacaggcccccgtccagggggaggactnnnnnnnnnnnnnnntcttctacctcagggacaaagtggtcgtggggattgtgctatgnnnnnnnnnnnnnnnnnnnccaatagcaaggaagannnnnnnnnnnnnnnnnnagcatgaagatctcaatgaagtagccaaactattcaacattcatgaagattgaagccccgcagtggaattggcaaaccctctgccacccctgaggggtcggatgggtaaaggagcatttttttattctgcagactttctctgtgtataagtgtgaatgatcaag

SEQ ID NO: 9427 - DNA, 732 bp, Macaca Fascicularis
  misc_feature (1)...(732): n = A,T,C or G
atcattttgaaaaataaagatatctgaagtacaacattacttatagaaatagttactttgtactccttaatcttgnnnnnnnnnnnnnnnnnnngttatgtagtaggcaatttttannnnnnnnnnnnnnnnnnnnnnnnnaagttgcaagtgaggtcaaaactcatgaaaatttatttagaaaaatctaaaaattctggttttaaatatgagannnnnnnnnaaataagggtataattttgtaggtcatataattgaagaaaatattattttaacaatgtaaagcaatatgatttgttactataattaacctgtataaaannnnnnnnnnnnnnnngtttcagtaggtcattttaaaaacnnnnnnnnnnnnattttcaagtataaggtttaagtaatttgattgnnnnnnnnnnnnnnnnnnnnnnnnnnnnnnnnnnnnnnnnnnnnnnnnnnnnnnnnnnttgacaatttctgtattttaattgaatacagtttcttcagtcatggttattgcactttatcctgaataataattcagaaattgggttttggttcagtgattctcaagagaaagatctcttgcccattaagaagtgtatcaaaatctcataagaaatgagggaaagaagagggctgtagagtttgaaaaagtatattcaatattaaaataattttatatttgggaaggcaaaaatgaatctattgttttgctatacaggttataaacag

SEQ ID NO: 9428 - DNA, 736 bp, Macaca Fascicularis
  misc_feature (1)...(736): n = A,T,C or G
aaaaagcccccaagaaagtgaatgagaaannngagtcatcnnntgcacagcnnntagcagtgtcacgccttagcgcnnnnnnnnnnnnnnnngattccnnnnnnnnnnnnnnnnnnnnnnnnnnnnnnnnnnnnnnnnnnnnnnactcaggctaaggggtcaggccagatggggcaggaaggctccgcaggaccggacccctagaccaccctgccccacctgccctttccccctttgctgtgacacttcttcatctcacacccccccacccccctctaggagagctggctctgcagtgggggagggatgcagggacatttactgaaggagggacatggacaaaataacattgaattcctagccccattggggagtgatctcttggacacagagcccccattcaaaatggggcagggcaagggtgggaatgtgcaaagccctgatgtagagttacctgaggccatagctgccctattcacttctaagggccctgttttgaggttgtttgttctaatttattttaagctaggtaaggctggggggaagggtggggccgtggtcccctcagcctccacggggagggaagaagggggagctctttttttacgttgactttttttttctactctgttttccctttttccttccgctccatttggggccctggggctttcagtcatctccccatttggtcccccccnnnnncccccaaatgnnnnnnnnnttgtaaataaag

SEQ ID NO: 9429 - DNA, 796 bp, Macaca Fascicularis
  misc_feature (1)...(796): n = A,T,C or G
tcatgaatgccacggtcaggngancccagcagtgnnnnnggnnaannnnntcggctataccaggtgtcagttggacagtgcctgagagcggtggatcccctgggtcagaagggctctgtcgccatggcgatctgtgatggctcctcttcacagcaatggcatttggaaggttaaggtggatgctgtggcgggagcggtgcttcatcaggtgttgcctcctgtgtggagtttggggctttaggaacgcctgggttgcgtagagtcgagtcatcttggagaggatgacatttccctgtcctcccggagatgcctgggcgtgttagcagaggtgnnnnnnnnnnnnnnnagatgggagctctgagtgnnnnnnnnnnnnnnnnnnnnnnnnnnnnnnncattaaggttatttctgagctgctgttaaggaatttcttgcttatagaggcaaaccagaatatcattttaaccctagaattgggcttgtacagaaggataaaacccaggaaaatggatatttctattcagatttatttatgcctctttttaatcttctttaatgatgcagtggtttttatctgatcaggaacttgtcatgatttcctttcttagactnnnnnnnnnnnnnnnnnnnnnnnnntattattgtttagtatgttgtgagtagatcatctaaaagaactgaagctacattatgtttttaacttcagaaggcatcatttataagacagtataagaggcagttaagtattataaattattttgatgaattatgatactatctacatttaaaataaaa

SEQ ID NO: 9430 - DNA, 891 bp, Macaca Fascicularis
  misc_feature (1)...(891): n = A,T,C or G
gaggctgaggcagaagcatcacttgagcccaagagttcaagaccagtctgagcaacataacaagaccacatctctacaaaattttaaaaattagctgtaagtggtggtgtcacatgcctgtagtcccagctactcaggaggccgaggcaggcagattttgtctggtagtgcttgggaggctgtggttggtttttctcactggagcaagtcctgttccccatttgcctggcttcctccagtcaccccaggtcctggggctggtgtgtcagaagctgcctttgtcctctccattcatccatccttggatctgtctggcctctnnnnnnnnnnnnnnnnnnnnnnnnnnccaggggtgactggcgtggatcctgctcgctgtgccaagatggccctccagatgcggcataccatccctcccctgggggtaatggactctgtgtggctcagccagaaggtggccctggactctctcttgcacccactgtctgcccagtgccccctctgtccttaggggacccaggtgcccctnnnnnnnnnnnnnnngaacctaggcaggcctgcagttggccaggatgaggccacatgcatggttcacccttgggggacccaggacgtacctgatgcgggtatagatgannnnnnnnnnnnnnnnnnnnnnnnnnnnggtgtggagnnnnnnnnnnnnnnnnnnnagctggatgtggacaaagacccgcagaaacagggaaataagaaattacagaaagatgtgtccagagacccaggtactagctctgctctgctgccaaaatactgaggcagatcacaccccccttctgggcctcagttttctcatccatacaatgggaagagaatactnnnnnnnnnnnnngtattgagattctctgcatc

SEQ ID NO: 9431 - DNA, 634 bp, Macaca Fascicularis
  misc_feature (1)...(634): n = A,T,C or G
ggtgcttggagcgggagcgaggggtgtagtggagctgggttctgtcttctgtgggccaccctgaggtcctcagtggttgtctggggagccggacggggatcctaaggggtacagggttggggggccctccctgagggtctggggtcaggctagggtttgacctgtgctgcctctcagtcaccaagtcacctccccctgaaagtccagtccctctttggatgtccttgtgagtcactcttggcctggctgtcgtccctacttagcttcttgttcctgggacaaaggtcaaaccaggatgggccnnnnnnnnnnnnnnnnnnnnccaggacccccagacctcccccacggctgctttgctgggggcagggcagaaatggactccttcagggtccccaaggtggggtcccgtcccagccctgcatcctccgtgccctagacctgctccccagaggaggggccttgacccacaggacatgtggtggtgcctggcactcagggacccccagccccccagccctggtctctggcgcatctcttccctcttgtaccgaagatctgcgcctctagtgccttttgaggggttcccgtcatccctctctgatattgtattgaaaatattatgtacactgtnnnt

SEQ ID NO: 9432 - DNA, 728 bp, Macaca Fascicularis
  misc_feature (1)...(728): n = A,T,C or G
tgatacagtgaatttgctttaatagatgttgaaaactaaatttnctactgtattnnnnnnnnnnnnnnnttctttttctcttcattagccagagatgactaatttaaatttagaaccagattttaatttaaaataatacttccattaataacctattcattgcagatacctattatactgtgtaacagttgttttggaaattttatgtaaaattaaaactatcagtattttacagatgttttaattagacattgttattaacaggaacagtgcagaaactagaatcaagccttgtaatgtcttatagaccatgcatttttgaagttagtgtccactagggtcctattaactgtacatttgcaagatttcattatttttgcctctgacactatgggaaaaattttttagaagctattgggacagattcaagtttttatgtacttggttactacagctgtaaaatgaaatctcgtcttgtagcatggattattcttctcatgttaaactcaccaaaatgaaggggactaaataggtaatgattttcctagtgcatttgcatactgtgacaatcccgggccttgcaatagttttacagggctcttgggcattgaattattaggatgtaattgtacatcnnnnnnnnnnnnnnnnnnnnnnnnnnnnnnntgatgttaatgagcttggggttttgatgcttgtttagagatcagcagtctggatgggaggga

SEQ ID NO: 9433 - DNA, 740 bp, Macaca Fascicularis
aaaagatgaagaaatcaaaggatgcagcatttcagaatgttttaacacatgtttgtttagattaagagtaaagatcatttgtacagttcagtgatctagtttggtgtgtcctcttatcagtcagtggaaatagaatggaaagagtgctcttgaaacaatgagggagctcaatgtttatggttttatactctgaattctaagttattgagatatagttgttacataagtggtattactgtttgtcaaaaatcatgaggaggaacagttgaatccagcctgaatgtgggtgcttgtgtttgacctcttcagccatatattgtacagccttatagaatctaagctggtcttacagtcataaatgattcattgggtcattagtgagaaatggggatgtggttaggtgctggttcctagacatgtgagtatgcatttgtgtgtgtgcgcgtgtgtgtgtatattaaatgtatatatccacacattttatattgacattctgtagatacgtttgaatacagaaaccttttttaccccaactactgaatccaggagtaccaaataatatatagtaaaactaagatttaaggttgtgtcaaaaaggtacagtgattcagccatttccatttgtcatttgtttcaaccttttttaagttgagtgtttttctttctgcagttgattagttggatcctccacatcttgcatatatacatgggctcaattattatgttgtctggataatcaa

SEQ ID NO: 9434 - DNA, 716 bp, Macaca Fascicularis
  misc_feature (1)...(716): n = A,T,C or G
gagacnnnnnnnnnnnnnnnnnnnnnttgagctgcaggcccagcacaacctgcgagactctctggaaaacacactgacggagagcgaggcccgctacagctcccagctgtcccagnnnnnnnnnnnnnnnnnccaatgtggagtcnnnnnnnnnnnnnnnnngctgnnnnnnnnnnnnnnnnnnnnnnnnnnnnnnnnnnnnnnnnnnnnnnnnnnnnnnnnnnnnnnnnnnnnnnnncacgtaccggagcnnnnnnnnnagcgaggactgcaagctcccctgcaacccatgcgccaccaccaatgctagtggcaactcctgtggaccctgtggcacctctcaaaagtgttgctgtaattgaaaagcttgtatcctctttgaaggcatctacagagccatttagatcaaccacaggnnnnnnnntcaagtcctgacttttctggagctcagctgacatcaagaaacctcatcttacctactatgttatttctagaatgctgaaaagctttccccacccaagcaaagacacacnnnnnnnnnnnnnnnnnnnnnnnnnnnnnnntcctcttgagggtcgagcctctttgtttctaaagacgttcaactccctgtaatctgagctccagttactactttagggtgtttcctgaacnnnnnnnnnntcctgttttcctttcttctttgnnnnnnnnnnnnnnnnnnnnagaagacttca

SEQ ID NO: 9435 - DNA, 605 bp, Macaca Fascicularis
  misc_feature (1)...(605): n = A,T,C or G
ggctgctacttctgcctgcccatccnnntcacggtcacctgccagctggtgacgtggcgggtgcgaggccctccggggaggaagtcggagtgcagggccagcaagcacgagcagtgtgagagccagctcaacagcaccgtggtgggcctgaccgtggtctacgccttctgcaccctcccagagaacgtctgcaacattgtggtggcctacctctnnnnnnnnnnnnnnnnnnnnnnnnnnnnnnnnnnnnnnnncatcaaccagttctctgccttcttcaagggcgccatcaccccggtgctgctnnnnnnnnnnnnnnggccgctgggccgggctnnnnnnnnnnnnnnnnnnnnnnnnnnnnnnnnnnnnnnnnnnggggcttcggaggcctcgnnnnnnnnnnnnnnnnncaacaagctcaagaccgaggtgtcctcttccatctacttccacaagcccagggagtcacccccgctcctgcccctgggnnnnnnnnnnnnaggctccagcaggggtggggagggagggagggaggggccgccacccccgccggtgtctgctgttctttccnnnntaggtcttgctttgctgcctgtctgcgt

SEQ ID NO: 9436 - DNA, 719 bp, Macaca Fascicularis
  misc_feature (1)...(719): n = A,T,C or G
acaccaaattnnngtgtccactgtgtatgcgctcaaggcgnnnncgcctggagnnnnnnnnnnnnnnnnnggtagccctgcagagactgcctgtgcggcttcccgagggcgaggccctgcagtgcctcacagagagggccatcagctggcaaggccgcgccaggcaggctnnnnnnnnnnnnnntgtgactgctctgttgggacggctgacggagctccgccaacagctacaggctgaacccagacctgaggagcctcctaactaccctgcagcccctgcttctgaccccctcannnnnnnnnnnnnnnnnnnnnnnnnnnnnnnnnnnnnnnnnnnnnnnaatggagacagtgtgaccagtcctgagaaggtagccctggaggagggctcaggtaagagagatctggagctgctgtcctcgctgttgccacagttgnnnnnnnntgtgttggaactgcctgaggccacccgggcccccttggaggagctcatgatggagggggacctgctcgaggtgaccctggatgagaaccacagcatctggnnnnnnnnnnnnnnnnnnnnnnnnnnnnnnnnnnnnnnnnnnngcacacttctggaggttatgcccctgatgaannnnnnnnnnnnnnnnnatgtgtggnnnnnnnnnnnccctgagttcactttttaaagacagcttattgagatacaatgtacataccatacagttcaccca

SEQ ID NO: 9437 - DNA, 728 bp, Macaca Fascicularis
  misc_feature (1)...(728): n = A,T,C or G
cactgtgcccggagtgctgcagggcannnnnnnnnnnnnnnnnnnnnnnnnnnnnnnnnnnnnnnnnnnnnnnnnnnnnnnnnnnnnnnnnnnnnnnnnnnnnnnnnnnnnnnnnnnnnnnnnnnnngaagtggcacccctcccctcaccacagatgctgagatggtagcatagaaatgatatctggccccccttaacactggagccccactcccttctcccacccggcccaagattaagggaggattgactgtgtcagggatggtgggtggcctctcttgctgccagggcccttgtcagagcagccaggctggacagacagcctccctctccatctgaccggcacctgctgctttggggctcaggccaccactccctgtccccagaggagacagccccagatggactggaatgttgtggcatgacagcgcgtgtgtgcgacggccccaccatgctcccctctctgtccctccatctgtgtgttttctgtgtcccttgcatgtgtgcgtgttagagtgagcgcgtatgcatcaactcattgggctcttggctgnnnnnnnnnnnnnnnnnnnnnnnnnnnnnnttcagctccttggaaccaagacttcctgagtccctctggccctcgccctgttccaccgtggttatctgggtatcggggaatggaaactttgagggagcaactttttaaagagacactacaatttctactactgcactactgtccg

SEQ ID NO: 9438 - DNA, 710 bp, Macaca Fascicularis
  misc_feature (1)...(710): n = A,T,C or G
cagagacagtattttgnngaatactttttataatgtgatgattattaaaaaagcannnnnnnnnnnnnnnnnnnnnnnagnnggaggaannnnnnnnnnnnnnnnattttttcctcgctcctnntggtatatgcatgtcactgcatgataattgagttttcctttgttttaataaaactgtnnncagacattaagctaaattaagagaaaaataactttgttgccaaaaggttgtgctatccagattttttatatgtctgcatgttcttaaaaaaaaaaaaaagcaacaaaagaaaatgcactctaacttatgtgaactgagagaaaaaaatcaggttttaaacaggaaaacctatggggaatgatattttttgaaagacttttgtataaagttgagtacttagaaaaaagacaaaccagatgtaatatattttgtggatgtttttatttcttggatttatagtaccttatactaaggttaaaaaaaatatgcttgatattgtgaaaaggtgaaattcttcaccaacatttcatttgctcctttgtcatattgtaatgccaatataatatagttaatgaaaacagcatttttaaaaacctgcaaatattgaaatggtgtaatgttgtaccatttgcactgtgagcaaatgctaattcagtaaatatattgtgtttgccgacaatcagccggcctataaatctccttattt

SEQ ID NO: 9439 - DNA, 155 bp, Macaca Fascicularis
cgcagctggacgaggatgagcatggcttacatactaagtacattcatcgaatgatgcagattgagttcataaaacaaggaagcatgaatttcagattcatccctgtgctcttcgcaaatgataagaaggagcatgtgcccacctggcttcagaac

SEQ ID NO: 9440 - DNA, 726 bp, Macaca Fascicularis
  misc_feature (1)...(726): n = A,T,C or G
gaggagnnnnnnagacctggaagtnnncagtcagacatatgcttttggagctaagcatctgtgtttagaggaagtgatggaaaagcttctctctatgtcttcctcaggtcatgttggccccccttatttccattgctctcaaagtgtcccagctgcaggagaggacgggacgcagtgcacccaccgtcatcacctaagaagacaggccagatgtggtacgtccctccacccccggacccatccaagtcatctgattgaagagcatgacagaaacaaaatgtattcaccaagctttttaggatttgacttttnnnnnnnnnnnnnnncnnnnnnnnnnnnnnnaaggcactgccaaagaagatgcccttgggagctatgagggaaagaggacctgctggcttagatcaatctcaattccttttcatgcccttctgcattgctgctgtgtgggtatttgtctccttagnnnnnnnnnnnnnnnacactacaatgtaaggtgcagatggagcatcagcagcgagcaaggccattcttcatccttaggatgtggcaatgaaatgacggtgcaaattccnnnnnnnnnnnnnnnnntttccccccatttcctgtttacatgtaacccaacaaaatgcaatttctggtgccttctgnnnnnnnnnnnnnnnnnnnnnnnnnnnnnnnnnnnnnnnnnagatttctgccttgttttgcgacattgtcccattc

SEQ ID NO: 9441 - DNA, 741 bp, Macaca Fascicularis
  misc_feature (1)...(741): n = A,T,C or G
cagaaagctgacggnannnanagtgtccagcggaataggggctgcagctgaagtcctggtcaatctgtacatgaatgatcacagacctaaggcccaggccacctctccagacctggaatctnnnnnnnnnnnnnnnnnnnnnnnnnnnnnnnnnnnnnnnncgtgttacttctgtaagaagcgtgtgtacgtgatggagcggctgagcgccgagggccacttcttccaccgggagtgtttccgctgcagcgtctgtgccaccaccttgcgcctgnnnnnnnnnnnnnnnnnnnnnnnnnnnnnnnnnttttactgcaagcctcacttcattcactgtaaaaccaatagcaaacaacggaagagacgggcagagttgaagcaacaaagagaggaggaggcgacatggcaagagcaggaagnnnnnnnnnnngacactcccactgaaagttcttgcgcagtggccgccattggcaccctggaaggcagccccccagttcatttcagccttccagtgctacacccacttcttggctgacacccacttctgctctaagagtctccctccctttatagaatgtcaaccaaagagtgccctcctcccctctcagcctcctcnnnnnnnnnnctccccatctcatcacaacgcatgtctgtgacctttggtaatcatttacagtgccacacggaaccctgtattttgcacacagcaaaacaaacaatgtttagctttatttatggtat

SEQ ID NO: 9442 - DNA, 714 bp, Macaca Fascicularis
  misc_feature (1)...(714): n = A,T,C or G
actccagttataacatnnnntaaaattttaaaaacaaacagccacacccctcttccagtcnnnntcctcagttcttgtgtgaatcttcagatgatgttaccacagtaaaatgagttaattgggcaagctctgatgtcagtgtgtgtaaatgacatctggcgtggcgtgcacagacaaaccctataatcacaggtgtgtggtggccccgaaatggggggcctgctagtcaggaggatgctgtgcacactgtgtgtgatgaatctcgccagaaaggctcttgatgtcccaggttggcacttcttcctnnnnnnnnnnnnnnnnatatgctggtccctgcaggcaaagctacagccagaatgtccgtttgaaattcccagatcatctgtcaccgagtttcatctgaatgtgccacggagcttgctctccacttcctctgtgcagcggccccgccacagccctccctcggcacactttgaccctttgtaggattggaattagcaggactcggctatttaaagcaccagtctggggtctcttgggcccctgctgaccccttcctccagagcagctggcccagcccgggaacaagacggacttcctctccctttggactcacagccttnnnnnnnnnnnnnnnnnnnnnnnnnnnnctcagtaatatcctttcaatgtgttttatatagttttgacagcctnttttgtagaaataaaaat

SEQ ID NO: 9443 - DNA, 714 bp, Macaca Fascicularis
  misc_feature (1)...(714): n = A,T,C or G
ggccccacagagagtggaggggctccggccgccacannnnnnatgaacctggcaggnnnnnnnncacagctcatctgaaaacagnnnnnnnnnnnnnnnnnncctctcctgggcccaggtgtggccgagcaccagggatggagccacacnnnnnnnnnnnnnnnnnnnnnnnnnnnnnntagtcttcccccacctcctgaacccacacaacaatgccagtctcccactggaggctgtatcccctcagaggagccaaggaatgtcttcccctgagacgccaccactattaatttcccatattcttcacccccttgctcaaaaaaccaatacccacacttagtacaaacatcccagcaacagcacatggcaggccattgctgaggacacaggtgctttattggagaggggatgtgggcacgggataaggaaggttcccacattccaggaggatgggaacagtcctggctgcccctgacagtgggggatatgcaaggggctctggccaggccacagtccaaannnnnnnnnnnnnnnnnnnnnnnnnnnnnnnnnnnnnnnnnnnnnnnnnggctatannnnnnnnnnnnnnnataggagcctgaggcaggtcccctgcacattcnnnnnnnnnnnnnnnnnnnnnnnnnnnnnnnnnagttaattannnnnnnnnnnnnnnnacaaaaatctgtacacacatttgaaaaactcaca

SEQ ID NO: 9444 - DNA, 847 bp, Macaca Fascicularis
  misc_feature (1)...(847): n = A,T,C or G
gatagcaccaaagtggataannnagtacgagatatttatggagnnnactatgagaggttggactgccaggctgggctgtggcttcaagctttggaaacatgatgagcaaggagaagcgagaggcggttagtaaagaggaccttgccagagcgactttgatcaccatcaccaacaacattggctcaatagcaagaatgtnnnnnnnnnnnnnnnnnnnnnnnnnnnnnngtatttgttggaaatttcttgagaattaatacgatcgccatgcggcttttggcatatgctttgnnnnnnnnnnnnnnnnnnnnnnnnnnnnnnnntttttcggaacacgagggttattttggagctgttggagcactccttgagctgttgaagatcccctgatcgttacctggggaggggttcctgannnnnnnnnnnnnnnnnnnnnnnnnnnnnnnnnnnnntaagagacttactcaatttcatgactgtgcactacctgaaacaaagtgagaaaggatgcgtgtatttttctaagtcatcaagataaatccttaagaattcagtctaaactagcaaccaggaaggaaagataatattaaaaacaacaaaaaagtggcccatgtccaagcagtgtgaggatttgctgtatataagttgcctgctttgtatttttgaaatctctgcatcactcactggagatgctttagaagagagctgctctgtgttcagttgactgtggttttgtgtcctgtttgnnnnnnnnnnnnnnnaggcaggctacgatatgttaaaatctaatcacaatttgtnnnnnnnnnnnnnnnnnnnnnnnnnnnnnnnctctggtttgcattaa

SEQ ID NO: 9445 - DNA, 538 bp, Macaca Fascicularis
  misc_feature (1)...(538): n = A,T,C or G
tttttttttttnnntttttttttttttttttttttttttttttttttttttttttttttttttttttttttttttttttttttttttttttttttttttttttttttttttttttttttttttttttttttttttttttttttttttttttttttttttttatttttttttatttttttttttttttttttattttttaattttattttttttttatttaaaaaaataaaaaaaaaaaaaaaaatcccaccccatccacaccccccacctttcccaattttagtttcatgcaataaaaaggccgaactttttattccataaaacatgaaggacaaaactcaaaaatgtatttcaagtcagtgaccagaaaaatcgcaccccttgccctttccccaaaggaccttttccgtacaagacacttttttgttttgttttttgtttggggttttaccgttgggattttttaatttgttttcagggggggttttttggggaaaatttttttaaaatggaagcttttagcaagccccccacccca

SEQ ID NO: 9446 - DNA, 685 bp, Macaca Fascicularis
  misc_feature (1)...(685): n = A,T,C or G
gnnnnnnnnnnnnnnngatggannnnnnnnnncgagccatgatagagaacttcaatgccnnnnnnnnnnnnnnncatgtcaggaagaggtggaagccgggctgagggaagggggattgagggggagagatattgccttgacgggggtcctggggtacctcggcttttggtgaagatccaggaagtgggattggggtgaaggagggaccaagaggaggggcaggcannnnnnnngctacccctcnnnnnnnnnnnnnnnnnnnnnnnnnnnnnncttgttcccctgcagtaaccgggccgcccnnnnnnnnnnnnnnnnnnnnnnnnnnnnnnnnnnnnnnnnnnnnnnnnccaaatactatgcagatggggaggacgcctatgccatgaagcgagacctnnnnnnnnnnnnnnnnnnnnnnnnnnnnnnnnnnnnnnnnnnnnnnnnnnnnnnnnnnnnnnnnnnnnnnnnnnnnnnnnacaaggtggagagcaaaggcaattcacctccgagctcaggagaggcctgtcgcgaggagaagggcctggctgccgaggatagtggtggggacagcaaggacctcagcgaggtcagcgagaccacagagagcacagatgtcaaggacagctcagaggcttccgactcggcctcttagagcctgccccatcccttcctcaccccacga

SEQ ID NO: 9447 - DNA, 731 bp, Macaca Fascicularis
  misc_feature (1)...(731): n = A,T,C or G
cagccgcccctnnnaaacccctgggaannnnnaatcaggggccatgccctctccaaaccctctctgctcactcctcaccttcagtgacttcaacgcaggagccatcaaaaataaggcccagtcagtgcgagaagtgtttgcccggcagctgatgcaggtgcgcggagtgagtggggagaaagcagcagccctggtggatcgatacagcacccctgccagcctcctggccgcctatgatgcctgtgccacccccaaggaacaagagacactgctaagcaccatcaagtgtgggcgtctacagaggaatctggggcctgctctgagcaggaccttatcccagctctactgcagctacagccccctgacctnnnnnnnnnnnnnnnnnnnnnncccagcccccatctgtacccccacgcaggctagccagccttttaacaacatcttttgtggtaaaattagaatctaagtgtttgcagccatatgtgttatgtagaagatgcctggccctggggaccttgtgaaatacgcaggaaccagggataccgtctggaccagtggtttttaaacaaagctgcttaggacctgggattgcctggtcagggagatggagtcagtggggcactgcagctttgaatcgattttatgtcatcagttggtcctcatcaaataaaacttccttaggagtgcagagggctcattgggaaagtaaaaataataaaaataaataaaac

SEQ ID NO: 9448 - DNA, 759 bp, Macaca Fascicularis
  misc_feature (1)...(759): n = A,T,C or G
gaccaggtgatagtgcagtccggccgccaccccacagtgctgcagaagctctgccaatgcncttccagtatttcagtgacccacggctgatcaaaatactgttcccttcacttatcgctgcttgttacaacaatcatcagaacaagatcattctggagcaagagatgagctgtgttttactggccactttcattcaggatttggcacagactccaggtcaagcagaaaaccagccttaccaacccaaagggaaatgccttggttcccaagactatcttgagctggctaacagatttcctcagcaggcctgggaagaagctcgacagtttttcttgaaaaaagagaaaaaataaatgttttggttgattctgtatttgagtacccttgttaatattttaaattgttcaaacaaacattctaattgttccttaagaactcattttcacatgtttatactctcaccacactgtagatatggcatgtactttacactatttataatgactgtagatacttgaatgttctacttgctaattttgcaagttgagtgtatttcatttatgcaaaatatcttggagtttgataactttcatcttatgataatatatactttgcatttgtaatattggtgaaagtagacataaaattagcaagtctgttgtgttcttgtaataaaataacttattctgttttcattgttgacttttcatgttaaggaaannnnnnnnnnnnnnnnnaatgttaactccaccccttgaa

SEQ ID NO: 9449 - DNA, 795 bp, Macaca Fascicularis
  misc_feature (1)...(795): n = A,T,C or G
ttctnnnnncgcctcccctgtgnnnnnagctgctcttgtcactgactctgatgggtgtttgcctggctgtgttgnnnnnnnnnnnnnnnnngcagtgatcctttagctggttggctcagaaaaaaatgtgctttaggtgccctgtaatcctgggcatcaagggaatccatccttcccctttnnnnnnnnnnnnnnnnnnnnnnnnnnnnnnnnnnnnnnnnnnnnnnnnnnnnnnnnnnnnnnnnnnnnnnnnnnnnnnnnnnnnnnnnnnnnnnnntgcataagggagaggatagtatgtacctgccctgcccgctgctatgaaagtctctggcttgtggatcatgggactccccttggaggatctgtgcaaagcggggctgggcaaaaaggagaatgtcctacttgggagggcaggaagcaaaggaactggacagggattggtgggcttggggaacggaagtttatcttggatacccatgaagaggctgggtnnnnnnnnnnnnnnnnnnnnnagggaccctgcttccaatttccctcttccattcctcgagctactccagggcttagaaaaatgcccttggtctgtgggtccagtgttgtctgtcatccatttaagtgttcccactttcaagcgacaatcctctccttggccctgccatagggcagagcatgtctggcatagcagcctgacttgtatgccctaaccttgagttgaggaaatatatgcacaggagtcaaagagatgtctttatatctgactgtacataaatgaagttttcttttttttttttt

SEQ ID NO: 9450 - DNA, 404 bp, Macaca Fascicularis
  misc_feature (1)...(404): n = A,T,C or G
catannnnnnnnnnnnnnnnnnnnnnnnnnnnnnnnnnnnnnnnnnnnnnnnnnnnnnnnnnnnnnnnnnnnnnnnnnnnnnnnnnnnnnnnnnnnnnnnnnnnnnnnnnnnnnnnnnnnnnnnnnnnnnnnnnnnnnnnnnnnnnnnnnnnnnnnnnnnnnnnnnnnnnnnnnnnnnnnnnnccataaaaaaaaacaataaccaaaaaccaaagctgttagtgaaggttccctgggacttttgatattttaaaaattgttattatgactagtagataaattcagtgccataatgaggctagctcccagataaacagttgaatttttttcttttttttttttggtgagtggtccagagctttaagatacttttccagtatgtttgccactttctcagaggtagt

SEQ ID NO: 9451 - DNA, 738 bp, Macaca Fascicularis
  misc_feature (1)...(738): n = A,T,C or G
gatgatccagataaatagactccagaaattaattgatagactggaaaagaaggatctcaaacttgaaccactggaagaagaaattattgaagggaatactaaatctcacatcatgcttgtgcagcggcagatgtctgtgatagaagaggacctnnnnnnnnnnnnnnnnnnnnnnnnacactacgtggagagtgcttcctcccaaagtggatgcttgcgtatttctatacagaagctttcaaatgaatctcgctacataatctatgagttctgggaaaatagtagtgtatggaatagccaccttcagacaaattatagcaagacattccaaagaagtaatgtggatttcttggaaactccagaactcacatctacaatgctagnnnnnnnnnnnnnnnnnnnnnnnnacaacaactagatgttcctagacattttccttatggttccaagtgcaaaacaggtgttcttatctaaaatgtcaattagaaaattatctgtggttgttaatctactgtatatttttgtttggtatatttactaagtgcactcttttaaaacttattctataattttatgattcatgtgaattttagctcaattttcaaagttcactaatattnnnnnnnnnnnnnnnnaaatgctttgctacactgtaactaacctaaaaccttttagtgacaaattcctaatatgtggaaaaaagcatacacataaaggaataatattgtgaaaatgaat

SEQ ID NO: 9452 - DNA, 842 bp, Macaca Fascicularis
  misc_feature (1)...(842): n = A,T,C or G
cagcaaggaacatattnatggtggatcccaatgaacgagaannnnnnnnnnnnnnnnnnnnnnnnnnnnnnnnnnnnnnnnnnnnncgagagatttgtactatccagtccagtggtgggataatgctactaaaagatcaagttttgagatgcagtaaaatcgctggtgtgaaagtagcagaaattacagagctaatattgaaagctttggagaatgaccaaaaagtaaggaaagaaggtggaaagtttggttttgcagagtctatagcaaatcaaaggatcacagcatttaaaatggaaaaggcccctattgatacctcggatgtagaagaaaaagcagaagaaatcannnnnnnnnnnnnnnctccttcagaagttgtttctacacctgtgctgtggactcctggaactgcccaaattggagagggagtagaaaactcctggggtgatcttgaagactctgagaaggaagatgatgaaggcggtggtgatgaagctatcattcttgatagtataaaaatggacactggagtagaagtctctgatattggaagccaagatgctcccataatactgtcagatagtgaagaagaagaaatgatcattttggaaccagacaagaatccaaagaaaataagaacacagaccaccagtgcaaaacaagaaaaagcaccaagtaaaaagccagtgaaaagaagaaaaaagaagagagctgccaattaaagctaacagttgtatatttgtatatataactattaaaaggatatttattccattctaagaaccctgggtattttttattcacaaatcctattataaaatctagctagggttttaaaaata

SEQ ID NO: 9453 - DNA, 692 bp, Macaca Fascicularis
tcaccaaaacaacctccagtatataccaaagctttgacctggttgagctcttgagcttagaagttgattttgcacttagtcttttgggggtgggaatgtactgcagtcagtaaacgttattgactgtttaacttaaacagatgctttatggcacctgctcaagcccgtgactgtacagaaggatcctggttgctaccagtgggtgctgattcagcatcacaagtgactgaaattggccgtggatctgttctttctgaaagaattcctgatttctccatggagcatgtacacaacagttttgatcatattaactgtacttcagttttgcatttttattcaaatgttatctccttttttttttctttgagaaataaactgtcactgatgtggcaggttctttattctaataacgtgtatatgtctaaagcaggttgtgttgtttacattgtttctagacatttcatcctttaaaaattgttcagagaggctgtatttaccttcccaaggttggaaagcaggggaatttcccagtttcctagttttccaccagaggaatatgtgtaagtagcaaagtattcgctgcttacatatagtgtatatgtatgtatatatgtaaattgtgtgttaaagagctgatactgattttcatatgacaatgttaggcaaaggcctccctgcatttgtagagcagg

SEQ ID NO: 9454 - DNA, 1390 bp, Macaca Fascicularis
  misc_feature (1)...(1390): n = A,T,C or G
tcannngcaannntccannntcctnnggttcaagcaattctcgtgcctcggcctcccacgtagctgnnnnnnnnnnnnnnnnnnnnnnnnnnnnnnnnnnnnnnnnnnnnnnnnnnnnnnnnnnnnnnnnnnnnnnnnnnnnnnnnnnnnnnnnnnnnnnnnnnnnnnnnnnnnnnnnnnnnnnnnnnnnnnnnnnnnnnnnnnnnnnnnnnnnnnnnnnnnntgcgcctggcctgtgagcagtcgttttagtcaggaacaaatctaataggagagttgactgaagttggcccacaggattctgagctgggcagtgcctccctgaaggcttgctaccttgggacgccctggtttactgcggtgtcttgcggaaatgcagaaggcagtgtgtgggccttgggcctttctggcagctgcccgggtttggccaggccctgcctcccctccccactgccaacccctggtccccttcctctttccacttgcattcaggggtgtctgctgttctgagaacattagaactgggaagagaggtggagtcacatgcattcttggtgggcattattctaaacttttgtatccaagttcatcccccttcttccacggtggcattgccgttctaagcagttcccccatgcgtgctgctgaagagctgctcaccggaggcaggcagcggccccggcactgccccttgcattaggtcttgtgtttgatgtgctcttgtgaatttactttgtcggaacaaaatacatgtcgggttcaggaatctctccttttagctccccatctggctatgaaattcaggaaacctgttctcccgttgcctagtaatcgccccacgtagctgtaaattgtgannnnnnnnnnnnnnnnnnnnnnnnnnnccctcggtgaccccaacacattcacagcagtgttaaaaatgacctgtgtttcggagatgctggctggcctttcagnnnnnnncaggaagccacatggcctttccctcttcagatgnnnnnnnnnnnnnnnnnnnnnctggggatgtgctgggaatgtgggcggcctccctccggccccggggccctctgtggacctgggctccctggtgagcactgcaannnnnnnnnnnnnnnnnnnnnnnnnnnnnnnnnnnnnnnnnnntagacccgagtgctattgtattttggcttggtgtgtatgcttttcattgtgtannnnnnnnnttcttttgccaatttaagtgattgttttgtttactgtaagtttgaaaataaaaattaagaaaaaaattccaattgactgtgctgtggttggagactttatttaccaagatgtttactctttcctttccccnnnnnnnnnnnnnnnctctggactcctcctcttcccctaatgctttgtagtc

SEQ ID NO: 9455 - DNA, 1090 bp, Macaca Fascicularis
  misc_feature (1)...(1090): n = A,T,C or G
atgaacttagtgagagctgtagtgcaagtgnnnnacaggcaagattgaaagtagctgcacatgaagctgaggaagaatctgataatattgcagaagacttcttggagggaaagatggaaatagatgattttctcagtagcttcatggaaaannnnnnnnnnnnnnnctgtagaagagccaaggaagagaaacttcagcaggcaatagcaatgcacagccaatttcatgctccactatagattttcctggaaacatgaactgccaagagaggaatgggacacaaaactaaacaccattttatatttatggtttgcaaactggcatttcatcagtggctaaattcacagatatcctgtatagattgtatacagaactgagactgattttgtacagattagaatgattgctatgatctttactttgagaaatttttctgcactatttgcactgaaatgtttatttattgttgataaatcctatcatatttannnnnnnnnnnnnnnnnnnnnnccttgattaaacgcctatgcatgtaattttagctagtttttaatattttataaaacttcatttaaatttgtatttttaacttgaagctccatttctttatcaagagtggtatttagatttttttcctcttaaccttttttgaaaaactatttnnnnnnnnnnnnnnncccttatttttctttctttnnnnnnnnnnnnnnnaaaagcaatttaagatattcatagtattaggaaacaccaaacctgcctatgtgccatctcacaaaagaaacttttaatacctacaataaatcaaaataataaaccagctattcttatatattgtttcatttttaaaactaaagatgcatttaagaagcaatacaagtaaatatttaatagaaaaaaaaaagttgcctttcatttaaaccagtccaacacaaactctcatgctaatttttaaacaaaataagtatcccgtaggtttgtggcaggataggtttcctaaattcctaatgttaataaacagtaaatctatacacaaaaaagtcaatgaacttttctgacctnnnnnnnnnnnnnnnntttcctaagagaaaag

SEQ ID NO: 9456 - DNA, 998 bp, Macaca Fascicularis
  misc_feature (1)...(998): n = A,T,C or G
gccgcctggcctgggtcagccacgacagcaccgnnnnnnnnnntgatgcctcaaaaagtnnnnnnnnnnnnnnnnnnnnnnnnnnnnnnnnnnnnnncctgagtgtgtcatttgtctcagagaacagcgtcgtggctgnnnnnnnnnnnnnctgcccaatnnnnnnnnnnnnnnnnnnnnncggctgcctgaccttcgtctccaagttagacattccaaaacagagcatnnnnnnnnnnnnnnnnnnnnnnnaacgcttccgcaacatggacaagagagccacgactgaggaccgcaacacggcctnnnagacnnnnnnnnnnnnnnnnnnnnntcaagtctctatttatgaggtggacaannnnnnnnnnnnnnnnnnnnnnnnnnnnnnnnnnnnnnnnnnnnnnncaatttgggatttcaagactggcctccggataatgtgnnnnnnnnnnnnnnnnnnnnnnnnnnnnnnnnnnnnnnnnnnnnnnnnnnnnngtgccgtggcacnnnnnnnnnnnagccagccccaaggaaacactgaaaacatatcacgccaatgccgtgtggttttgtttgaatataaaattggtgaaagtgttggttttttaaaagcagtaatttttttgtttttgtttttttgcgatttcattccattcttgaccaaagctnnnnnnnnnnnagtttattatggaaaactgtcacactaacttaaaagacagggtgagggagatatgtaaattgtccactagaaaattaaataaaggaactgaatgtggttttggttttgtttccttgtagtattnnnnnnnnnnnnnnnnnnnnnnnnnnnnnnnnnnnnttcaattaggtttgttttaggcaaaatcgtagatccttggtttcttaaattgcaccattctatacaaccttgaaccaaaaagcagcatttagtggggggtgnnnnnnnnnnnnnnnnnnnnnnnnnnnnnnntctgcaaagcaggttgtgtnggtct

SEQ ID NO: 9457 - DNA, 708 bp, Macaca Fascicularis
cgatgtggacatcgtcttctccaaagtcaaggggaagtctgctcgggtcatcaactatgaggagttcaagaaggccctggaagagctggcgaccaagcgattcaaggggaagagcaaggaggaggccttcgatgccatctgccagctggtggcaggcaaagagccagccaatgtgggcgtcaccaaagcaaaaacagggggtgctgtagaccggctgacggacaccagcaggtacacgggctcccacaaggagcgcttcgatgagagcggcaagggcaagggcattgcgggacggcaggacatcctggacgacagtggctacgtgagcgcctacaagaatgcaggcacttatgacaccaaggtgaagaagtgaggcttgggaagactgccccgccaagtgcggctgcccctgccagaggctcaggcctggatctaaggggcatgtggagcaagagatcctggtcccctccctgctggacctgccacccagagcttcctgcctagtcccatggggccggcccaccaggcctctgacccaggctgctctgcggccccttcctcctcctcttccccctccgacttctgtccacctggggacagtctgtgcctgtagcctcatgaccccagcccagccccaggcatggctaacccctgcctgcttgcctcatatttaagctgctgctctggccaagtgcctaatttaaccca

SEQ ID NO: 9458 - DNA, 722 bp, Macaca Fascicularis
  misc_feature (1)...(722): n = A,T,C or G
atttcactttttgacttgacttttgtatttctttaaaaatttccttccttttaaaaaatataaaagggactactgttcatttcagttttcttcttctttcttgttgttctagtatgacttttcaagtgtaacaccgttcttcctgtctttaacattgtccagttctggtcttttctgtgaactaccactgggccccttacctcannnnnnnnnnnnnnnnnnnnnnntggttcccttgtttatctgagtctgttggtaccccaaatgaccccacacccatcttaaagtactttttttcaccttccctgtttagtactggccagatgagtttttcctagcactctgtcactatctgaaaagaaagaggctgtgggaaacacagaaatggtatgcattaataactgattataggctgaagagaaaaaaatgtagctgactgcaaacccagtgctgtgaggggacttgtatgaggttccaggtcaaagacaannnnnnnnnnnnnnnccagaagggtgtaagttctctgaatattccttgctgattgttgggtgacacatgtaccacatactgtctccatttaagtcatggttctactgtagatttatttttatattagttaataaatgacttaaaatcgtcannnnnnnnnnnnnnnnnnnnnntttcgcttttctttatataactcagtcaaatctttttttatgtcctctcctcatctctta

SEQ ID NO: 9459 - DNA, 721 bp, Macaca Fascicularis
  misc_feature (1)...(721): n = A,T,C or G
agacaacagggacacgctcacggccaagtnatccagggctgcgnnnccccaaggtcaacccccagggttctgggcctgaggagaagcggcgccggggcaagctggccccacgggagaggccaccctcaggcaccctggagaagctggtctccgaagccaaggcccagctccgtgacnnnnnnnnnnnnnnnnnnnncctcccagggacactgtgcagcnnnnnnnnnnnnnnnnnnnnnnnnnnnnnnnnnnnnnnnnnnnnnnnnnnnnnnnnnnnnnnnnnnnnnnnnnnnnnnnnnggtgacggcttggccaaccagatcaacaaccccgaggtggaggtggacatcaccaagnnnnnnnnnnnnntccggnnnnnnnnnnnnnnnnnnnnnnnnnnnnnnnnnnnnctgcgcagcgcctacaacggcaatgacgtggacttccaggacgccagtgacgacggcagcggctcgggcagcggtgatnnnnnnnnnnnnnnnnnctgtggccggggggccagcaggaagagctccggctcccggacgcccttgacccatgccctcccaggcctgtcggagcaggaagggcagaagacctcggctgccagctgcccccagccccccaccttcctcctgcccttcctcctctccctggcccttacagtagccgggccccggtggcggtaactgccccaaggccccagggacagaggccaagg

SEQ ID NO: 9460 - DNA, 659 bp, Macaca Fascicularis
  misc_feature (1)...(659): n = A,T,C or G
tcctaattactnctanngttgtngaaatnnngcttcgatcatggttcaaagatgtaaatacaagagaaccaaagttattccgggcagttccagattcagaacgtgttattcctnncagaacgacaacgccgtatttcctttgaggccttcgcccatcctgttgacccatttttctgccctcttcttaccccaattttcttgtattaccttctacaatatactttttattgagcactnngctgctgaaatgctgcctcttgccttttttttttttttattgaattttaaattatctaaatttattgtatgttgtggtgtatatagcaaagtttttctatcaattttcccgccatcccatccacaccctggactcatttgagaagacttgagaaatgtcttcatactcacactgctgcatgtagctcttgcttatttactggtctgggaaacaggatgtgtttcctttttttaaaagccaattgacagattacacctaaatactcctcctttatgtatcattcagccttttgttttagtttggtaagttttaagaaatttcagcagcaaagttgttattcagtgggcacgatggactccaaatgcctcaaattagtgtatacctgtccccagatgtaaacttcattgtcctttgttggatg

SEQ ID NO: 9461 - DNA, 742 bp, Macaca Fascicularis
  misc_feature (1)...(742): n = A,T,C or G
ttgagaagagnncagtgttacatggacacagaacagtatgaagaagcagtacgagactatgaaaaagtgtnnnnnnnnnagaaaacaaaagaacacaaacagctcctaaaaaatgcacagctggaactgaagaagagtaagaggannnnnnnnnnnnnnnnnnnnnnnnnnnnnnnnnnnnnnnnnnaggnnnnnnnnnnnnnnnnnnnnnnnnnnnnnnnnnnnnngcaccatccagatcggcatagtggagccagtgctgaggttcagaaggaggaggagaagaagttcaaggaagttggagaggcctttactatcctctctgatcccaagaaannnnnnnnnnnnnacagtggacaggacctagatgaggagggcatgaatatgggtgattttgatccaaacaatnnnnnnnnngctttcttcggcggtcctnnnnnnnnnnnnnnnnnnncatctggtcnnnnnnnnttctttttnnnnnnnnnnnnnnnaagggcaaccacccagaacccagaaannnnnnnnnnnnnnnnnnnnnnnnnnaatgtggaaacagttcacctcctcccttcatcacgtctccatgtacttagagcagtttcgttttctcagttggatgccctgtgtctctgtgagtggggtggagcaaagggaaccaatgccgaagaccgcgggcaggggagggaggcgggggtggacagggaggcagcttgtgaatttttgttttactgttaaaagg

SEQ ID NO: 9462 - DNA, 820 bp, Macaca Fascicularis
  misc_feature (1)...(820): n = A,T,C or G
agannnnnnnnnnnnnnnnnnnnnnnnnnnnnnnnnnnnnnnnnnnnnnnnnnnnnnnnnnnnnnnnnnnnngccaaagcatnnnntgcaagctgccacccaaggggaagcttcggagcctgtgtagccagcacgtggaaaggctnnnnnnnnnnnnnnnnnnccaccccatcgtggtccaagccgctttccctccactctacaaggagcnnnnnnnnnnnnnaaccgagtcacctgtggggctgtccaagtnnnnnnnnnnnnnnactccttacctctccctatggcctgctggctcacctccctggaccccgttccaccctcggccttttcgtttnnnnnnnnnnnnnnnnnnnnnnnnnnnnnnnnnnnntgggagtgagcagatgctgcgactggctttctgtccgcaggctggcctggcagtgggacaatcgccagagggtggggctggcagaacgccatctccagcctcagctttgacnnnnnnnnnnnnnnnnnnnnnnnnnnnnnnnnnnnnnnnnnnncatgaggtagctgggatataaggacttctgggggaccaagccatcctcaagaaaacaggggcatccagggctccctggatgaatagaatgcaattcattcagaagctcagaagctaagaataagcctttgaaatacctcattgcatttccctttgggcttcggctgagggagatggatcaagctcagagactggcattgagagcccagaaggacccgtataaaatgaatctggagctttacattctctgcctctaccttcctcccagctcaacaaggaagtgtttgggcaccc

SEQ ID NO: 9463 - DNA, 742 bp, Macaca Fascicularis
  misc_feature (1)...(742): n = A,T,C or G
tgagtgattaaggaagttcaggagttttacaaggacacctacaacaagctgaaaaccaaggatgagccccagcgggaaacgctgaaagccatccattatgcnntggactgctgtggtttggctgggggcgtggaacagtttnnnnnnnnnnnnnnnnccaagaannnnnnnnnnnnnnnnnngacnnnnnnnnnnnnnnnnnnnnnnnnnnnnnnggtcttcgacaataaattccacatcatcggnnnnnnnnnnnnnnnnnnnnnnnnnnnnnnnnnnnnnngcatgatcttcagtatgatcctgtgctgtgctatccgcaggaacnnnnnnnnnnnnnnnnnnnnnnttacatccctgagcaggaannnnnnnnnnnnnnnnnngttgggatttgtttgttggttgtttggtttttgtttttgattttgttttttttttgccactaattttagtattcattctgcatttctagataaaagctaaagttattttatgtttgtcttttaatgcttcattcaatattgacatttgtagttgagcggggggtttggtttgctttggtttatattttttcagttgtttgtttttgcttgttatattaagcnnnnnnnnnnnnannnnnnnnnnnntatttgctagcctctagacaagatattgtacataaagaatttttttgtctttaaatagatacaaatgtctatcaacatctcgcaagttgtaacttatatgaagacaattg

SEQ ID NO: 9464 - DNA, 709 bp, Macaca Fascicularis
  misc_feature (1)...(709): n = A,T,C or G
cacaatgaccacagcaaatgaccaagcatgaactaaaggtaaagatgtttacagattacttttcttacaaaaaaaaaaaaatctagaagacactgtgtttaaatagatatttaaatgtttttgagatttagtaactgattttttagacactgcctatcgcatgaactgtaaagctgtgtgtgttaggtgtaaaatctgttaggtgtaaaatatttataagatatatggactggggaatttgattattcctccctttgaaaaaataattctaataatttgaacaagtatgttagtaatgatggaagagatcattgaaaagtagatttagatattgtgagaatannnnnnnnnnnnnnnntggaataaagcctactctaccagttaaactactttaatacacattcatttttcaagaaaatatttgttttaacataaataaacaaatcgtatcagtgtttgtgaataaaatacaaaaatgattgttaatgattggtgctcttaaagtgagcttaaaatttatccaagacctctatccaaatttgtcctgtagtaatagattaatattcatagattgttggtgtttaaagatctgaagtgtgagtagaatgtatnnnnnnnnnnnnnatgtagtttagatactcaaaagtatgcatgtagaatttaaagaatatgtttaaaattattaattttaatattttgttggaaaagc

SEQ ID NO: 9465 - DNA, 770 bp, Macaca Fascicularis
  misc_feature (1)...(770): n = A,T,C or G
agcatggctcatnnnntanntcattcagangnnnnnnnnnncaaatgnnnnnnnnnnnnnnnnnnnnnnncttggagatgcagctaagaaagccatcagtaaattgacaaccaggacagtaaagaagggtgacaaggaaactgacccagactttaatcattgcgcagtctgcatagagagctataagcagaatgatgtcgtccgaattctcccctgcaagcatgttttccacaaatcctgcgtggatccctggcttagtgaacactgtacctgtcctatgtgcaaacttaatatattgaaggccttgggaattgtgccgaatttgccatgtactgataacgtagcattcgatatggaaaggctcaccagaacccaagctgtaaaccgaagatcagcccttggcgaccttgccggcgacaactccctcggccttgagccacttcgaacttcggggatctcgcctcttcctcaggatggggagctcactccgagaacaggagaaatcaacattgcagtaacaaaagaatggtttattattgccagttttggcctcctcagtgccctcacactctaaaaaagnnnctgtttagccacagctagcttgaatgctaatgaggtagaatggttttgaagaagaaaaacannnnnnnnnnnnnnnnnnnnnnnnnnnaaaaaagaacctatttttgtgcatcatttaccaatcatgccacacaagcatttatttttagtacattttattttttcataaaattgctaatgccaaagct

SEQ ID NO: 9466 - DNA, 758 bp, Macaca Fascicularis
  misc_feature (1)...(758): n = A,T,C or G
tatggcagctgatgatgtagaagagtatatgattgagcgaccagagccagaattccaagacctaaacgaaaaggcacgagcacttaaacaaattctcagtaagatcccagatgagatcaatgacagagtgaggtttctgcagacaatcaaggatnnnnnnnnnnnnnnnnaagaacttcttgatacagtgaataacgtcttcaagaaatatcaataccagaaccgcagggcacttgaacaccaaaagaaagaatttgtaaagtactccaaaagtttcagtgatactctgaaaacgtattttaaagatggcaaggcaataaatgtgttcataagtgccaaccgactaattcatcaaaccaacttaatacttcagaccttcaaaactgtggcctgaaagttgtatatgttaagagatgtacttctcagtggcagtattgaactgcctttatctgtaaattttaaagtttgactgtataaattatcagtccctcctgaagggatctaatccaggatgttgaatgggattattgccatcttacaccatatttttgtaaaatgtagcttaatcataatctcacactgaagattttgcatcacttttgctattatcattcttttaagaattataagccaaaagannnnnnnnnnnnnnntgtcattatataacattccttaaaagaattgtaaatattggtgtttgtttctgacattttaacttgaaagcgatatgctgcaagataatgtatttaacaatattt

SEQ ID NO: 9467 - DNA, 716 bp, Macaca Fascicularis
  misc_feature (1)...(716): n = A,T,C or G
ttacaggcacacaccaccacacctggcccaactaattcttttttgtatttttagtagagacggggtttcaccatgttgcccaggctnnnnnnnnnnnnnnnnnnnnnnnnnnnnnncccgtcttggccttccaaagtgctggattacaggcatgagccaccgcgcccggcctgaatcttgtcttttgacaataccaaagaaatagggggtagnnnnnnnnnnnnnnnnnnnnnnnnnnnnnnnnnnnnnnnnnnnnnnnnnnnnggtgtgggaactgggtatttccctggggtctgtatgcctttgtcttgtcatttgcttttagggnnnnnnnnnnnnnnncccacccttttaaagccacaagtctgtcttctttcttgaaccatttcaggaggagccctctcctttaccccgatataatatttaaaagacagaacaagaaagcatgtagccctaatgataggagattactgcatagagttcagnnnnnnnnnnnnnnnnnnnnnnnnnnnnnnnnnnnnnnnngtaaatcacccaattttaggctcttttctgcaaggatggccaaaattaatcatttttaaaaagtagattcatgcccactgcccttgggtgagggggaaggatgcaggggttcccagnnnnnnnnnnnnnnnnnnnnngtttgtatttttttttnnnnnnnnnnnnnnnnnnnnnnnnnnntacctattaaa

SEQ ID NO: 9468 - DNA, 777 bp, Macaca Fascicularis
  misc_feature (1)...(777): n = A,T,C or G
gagagaacatnnnnncngnggcagaagcagcatttnnaagaaataaaaggtttactgcagctgaccnntctaaatggttgaattaaaattttataaggcattactttttgtacgcagaagtnnnnnnnnnnnnnnnnnnnnnnatatatatattttttaaaaaggaccatctttattttatattggatgaaatctgtgaacgtatatacaatttaaagcattgactcttaactagacactgcactgagttaaaagtagcaaacaacctgaaattaggcattaacctgaccttccatagatactctagaaatagctaagtcccgagtgtagcgagttggtttcccaaactgaagcttgtcctacagcaagcttgcttgcagctgtacttttagttcaagatgacaaaaaataaatggcaggttgacactgttcctttattttacttagggtttttaaggtgtgtatatcttaaggtagtaaaacagtggtatattgcattcaaaagcatattgatgggcaaattggctgtgttttgctccacttcttcctgctgtggttttgcactttggggtggagaggattgagaagtctgtggggacacattaattttgtagactgctggtaacacttccagtgaaacagcatataatggataagtgtttcccctcgttcacggtttttcactactttcacctgagaagactgaagcaacgtatgtaaacaaatgaaaagtcatcacaatcagtttaattaagtgcacagaatagcaatcagtca

SEQ ID NO: 9469 - DNA, 767 bp, Macaca Fascicularis
  misc_feature (1)...(767): n = A,T,C or G
aggaagctcatcacagatgactttgtgaagcagaagtacctggaatacaagaagatccctaacagcaacccacctgagtatgaattcctctggggcctgcgagcccgccatgagaccagcnnnnnnnnnnnnnnnagattcatcgcccagaatcagaaccgagacccccgggaatggaaggctcatttcttggaggctgtggatgatgctttcaagnnnnnnnnnnnnnnnnnnnnnnnnnnnnnnnnnnnnnnncagannnnnnnnnnnnnnnnnnnnngggacgaagctctgattggacggtggagctgggatgacatacaannnnnnnnnnnnnnnnnnnnnnnnnnnnnnnnnnntggcgacgcctgggccaggatcccctttgctttctggnnnnnnnnnnnnnnnnnnnnnnnnnnnagcaaccgtgccaacaggagggccacgtggagagctggtgtcagcagtggcaccaatggaggggccagcaccagcgtcctagatggccctagcaccagctccaccatccggannnnnnnnnnnnnnnnnnnnnnnnnnnnnnnnnnnnnnnnnnnnnnnnnnnnnnnnnnnnnnnnngcnnnnnnnnnnnncaagccagagtgcctcctctcagattccttctcgacacagcaccctaggcagcttcttcctgtcagtcagaggtggcatgcaagatgaagctctctttgctcttcctgctttcattttgtgcttttccttgcgctttcatgttttgggtatca

SEQ ID NO: 9470 - DNA, 749 bp, Macaca Fascicularis
  misc_feature (1)...(749): n = A,T,C or G
cttgatcatgaactccataaaatcctttnccgaccacgctcaatgtggaaggctggaagtgcacctcgttggaggcttcagtgacgacaggcagttgtcacaaaaactcactcatcaacttcttagtgaatttgacaggcaagaagatgacattcacttagtgacactgtgtgtgacagaattaaatgaccgggaagaaaacgaaaaccactttccgataatatatggcattgctgtcaatattaagactgcagagatttacagagcctcctttcaagatcggggtccagaggagcagctgcgggccgcgcggactttagcaggaggaccaatgattagcatttatgatgcagagacagaacaacttcgtataggaccatactcctggacgccatttccacatgtggatttctggttgcagcaagatgacaagcaaatactagagaatctttctacttcgcctctggctgagccacctcactttgttgaacatattagatctaccttgatgtttttaaaaaaatacccatctccaactaacacactgtttcctggaaataaagccctactctacaaaaaaaacgaagatggcttgtgggaaaagatctcttctccaggaagctaaaaaacaggaattaccaaagaaagcacctttttggcctgacagagaccattggtggggctggtacgaatccagatttggaacctacatccgttgggtcgtaggcctccttgcctcctgtcttcaa

SEQ ID NO: 9471 - DNA, 695 bp, Macaca Fascicularis
  misc_feature (1)...(695): n = A,T,C or G
tcaagcaattcaaacaggaannnnnnnnnnnnnnnnnnnnnnnnnnnnnnnnnnnnnnnnnnnnnnnnnnnnnnnnnnnnnnnnnnnnnnnnnnnnnnnnnnnnnnnnnnnnnnnnnnnnnaaaaaccaaacccaatttagataccaaattaatcaactaatttgagctctctggccttactcttagtagtttttagtacgtgctggacaccactttgaaaaagcaatcactgtgctagaaaagtatattggctttgttaggtttgaagttcattaacttcaacgtaatcattcctcctattactgaagtcagattggaaccactaaagatccaaaccttctgtctggtaatagaaagtaaaaatctagacatcatttacatttgagaaagctgtttttaacattattttaaaatgccaaatatgttctttctagaaaaatatttatttttgtttttgttggatagcttttaattgcatttcagagaagtgtgattttgggtagatgctaattacatttttgaaagatttactgttccaaaataaagatttagatgactggtgatactggctttacagaaatttcagagaactaatttttaaaacatttaaaactttttttgttttgttttctgacatattctgacaaagagcagcaaaccactgctgtgtggcattcttggagtgtgctgtgaa

SEQ ID NO: 9472 - DNA, 715 bp, Macaca Fascicularis
  misc_feature (1)...(715): n = A,T,C or G
gtgcactataagggagtaggctgtattttgttttatatctgtaaatttaactgcatatagataattantcaggatgtgtggctcattcttttcagcttgtttctatactgtttgtaatatacagtttttgtaaccatatgattgaaaagaagaaagtctatgcttaggcccgtcagtacacccagttttaaaaaataacatattcttgctttcataaatatagttgaacaagatttccctaannnnnnnnnnnnnnnnaatttctaaaattctagttnnnnnnnnnnnnatgcacatttgtcactgaataatggaattatgtatgacaagccaaacattcttattttagacaatcatagaactgtcccacaaaatatttctaagcttatttccaactattaggaagaatgtgcttttgcatctaaaatactcaccaaaatataaataaatagttaattgtggctttatgaagttaacagtctcattacagatttagtttaccaatcaacagcatgtctactgcttggatccatacaaaactatcagttcaagttgatacggtgacaagggaagggagcaccagatgacacataaatctgtctgattctatgcctgtatttccaacaagcctaatgtcagagaatatgacctaaatccattttctaaactgttttcacgtgttgcagataataattattctagtcaactgctgttt

SEQ ID NO: 9473 - DNA, 785 bp, Macaca Fascicularis
  misc_feature (1)...(785): n = A,T,C or G
cacagtgcaggaagatgtgaccctcannnggtgcnttnnntnntgcataaacagtggactttatatagttaactcccttatataaattctcctatagtaatctcaaagaatattctagacttctgaatgcttttannnnnnnngnnnagcaaaaaggacttgctgtggaagtgggagaagacttcaacatcaaagtgattttttctactctcctaggaatgaaaggaacacaaagggatccagaagcatttcttgtccagattctgtcaaaatctcaattgccatctgagaatagagaaggtaaagtgttgtggactggctggttctgctgtatttttggagacagtcttctggagactgtttcagaagatttcacctgtctgcccttattccttgcaaatggagcagagtctaacacagccataattggaacttggtttcagaaaacctttgactgttatttcagtcctttaacaatcaannnnnnnnnnnnnnnnnnnnnnnnnnnnnnnnnnnnnnnnnnnnnnnnnnnnnnnnnngtggctactactgaatttctttggtctgtaccctgtagccctcaaagtctggacatttcttatgcaatacatccagaggatgcaaaagctctatgggacagcatccacaaaacacctggggnnnnnnnnnnnnnnnnngttgacctattcatggactgcctttattcacatttccatagacatttcaagattcatttatcagccacaagattggttcgtgtttcaacatctgtagcttcagcacat

SEQ ID NO: 9474 - DNA, 731 bp, Macaca Fascicularis
  misc_feature (1)...(731): n = A,T,C or G
tgcccgagacggaagatgacnnnnnnnnnnnnnnnnnnnnnnnnnnnnncaccctggactcctacgaggacaagcagaaactgaagcgaaccgagatcatcagccgctcctggttccnnnnnnnnnnnnnnnnnnnnnnnnnnnnnnnnnnnnnnnnnnnnnnnnnnnnnnnnncccagagccgcagaaccgcgcttgccacctcccccatcaccgtgggggacctgggcatcgtgcggcggaggtctcgggatgtcccggagagccccnnnnnnnnnnnnnnnacccgcaagtctggggaaccgcgggtcccagaggaggctgcccaggaccggcccatgtcccccggagactgtcctccagaaacagctgagacccccaagtgcagcaggccgagggggcaggaagggagccatcaggacaagcccctgtcactagcaggctcctcccaggaggcagctgaccccgaccccgcagacacgcggcacccctgcagcctcggctcctccctcgtggcggactactctgactcggagagtgagtgagcagtccccagcctgaggactggccccgctccagaggcccggacacacccaggaggcccctcacagactgcagacccccgctcgcccaccagacctgggagagctcagatgccaccccctccccagacctcaccttcctgcaaccgtggagttatttatttggtcttggtgagggtgtttgtgcct

SEQ ID NO: 9475 - DNA, 767 bp, Macaca Fascicularis
aagtaagtcagtggacagtgagaaaaagtaagagggtagatccaaacacagtatgtctcaattctagcactctactggctgcttagaatacaccaaacctggaagacctttccaagagtaaaatcccagtctgccactatcaaaattgccacagtcgcttttactacttgcgttcatagtagactcagcacttctttttcattggacctagtataactgagaaataaataactgtgtgcaaaatattggtatcgttaaggacccagagctgcccattttctctttattctaataggaaaataattactgatagaaatctgagatttaaaatagggtcctccctgctgctgcaaacaattgcctaagcatggtatgtatcttagtcctctgttcccagagattccaacctaacccaggaaagaactgtgctgtataaagcaaaacccaagtcatccccctccagaagtttctctggcagccaaggctgaccctaagggttccactttgctttaaaagctaggagtggcctctagagccaggaacacattaatacaacagttcaacctcagcaccaagtcaggtctgaagctcttgatatgtggaatttttctgtatatcaagttcaaatttctggaaatagactttggttgctaatgataattaatttataccatagtctgtaatttgagaaaaggtgaaatgtattaaatatatatttagttttaataaaaagataaaattattacagaaataattgatagaaaatc

SEQ ID NO: 9476 - DNA, 986 bp, Macaca Fascicularis
  misc_feature (1)...(986): n = A,T,C or G
gagacatcatggggtgattgcagaagcggggagtggcggcccacacannnnnngctgaggagctgactgtnnngagccgtnnnnncgtannnctgctctgtgtctgcgtgtattgtgaccgcgcggctccannnnntccagctgctgctacagccgaggcctggatcctggcctttccctgtgacnnnnnnnnnnnncaccggcnggcagccctatgaatcctggtaacctgctctcccaagaacagagcctgtccccagatgtcccagtagcgacgagtaacagatggctgtagacttcctttacttccccttgctggatcagggccttcctacctcctgctgggccgatctggccttgctctcttggcagggccccagcccctctgatcactgcagctcaccatgcaactgatgccaaagttgtggtgtcctgtgtgcagcagccctgggagccactgccaccttcagaggggttccttgctgagacccacattgcttcacctgcccccaccatggctgcttgcctagcccaacccagtgttctgtgccatgctagagcttgagctattgttcttcagaggaggaaatacggtggggaggggaagggtcttgctcctctcctaagtgttgctgctgtggcttttttgccttctccaaagacgcactgccaggtcccaagctccagactgctgtgcttagtaggcaagtgagaagcctggggtttggagcccacctactctctagcagcatcagcatcctactcctggcaacatcaggccaactgtccgccccagcctcacattgccagatgttggcagaagggctaatattgaacatcttgattggctggagcattcaaagccaatgggatgtctctccantncacctaggtcccgtgaccagctccctgtcgccataggggtaggcatttcactggtttatgaagcccggagtttcattaaatatgttaagaatcaaagctgt

SEQ ID NO: 9477 - DNA, 744 bp, Macaca Fascicularis
  misc_feature (1)...(744): n = A,T,C or G
tacagaccagctcctanntgatgtccactcgctccttcccgtcctactacaccagccatgtccaagaggagcagattgaagtggaggaaaccattgaggctgccaaggctgaggaagccaaggatgagcccccctctgaaggagaagccgaggaggaggagaaggacaaggaagaggccgaggaagaggaggcannnnnnnnnnnnnnnnnnnnnnagnnnnnnnnnnnnnnnnnnnnnnnnnnnnaagaaggaggtgaaggtgaagaaggagaggaaaccaaagaagctgaagaggaggagaagaaagttgaaggtgctggggaggaacaagcagctaagaagaaagattgaacccccatttccttaattattnnnnnnnnnnnnnnnnnnnnnnnnnntcaaccccatcaccaaccaaccagttgagttccagatcctatgtgaattaaaaagtcaatatatgtataattctgagatgacttaggttggacattcaatgttgtgctatgaatttcctctttatgcagagtatctgtttgcttgcagagtggctttctggcttgctgccagcctgtgcatggtccacgcttnnnnnnnnnnnnnnnnnnnnnnnnnnnnnnnnnnnnnnnnnnnnnataaaaaaacaccacatgagtaaatgaattcgctaatgttaatgttaaacttcatggaaaaatagtcttttgaacctttggtggttagcaattaaagaccctgagtt

SEQ ID NO: 9478 - DNA, 885 bp, Macaca Fascicularis
  misc_feature (1)...(885): n = A,T,C or G
tagttgtgagtcacatcgnngtcnncaaatccatnnannatggtattggagggtgagtaaaaccttgaacggaaaacttatgttgaaaaactgtaaaaccatttcacgcctgcaatgaatagatctaattctttctgtccacaatgtgcttcgtgacatagatcaagcaattaatcccaagttgcttcagttggtcgaagacagaggttcaggtcgttccaggggtagaggaggcatgaaggatgaccgtcgggacagatactctgcgggcaaaaggggtggatttaatacctttagagacagggaaaattatgacagaggttactctagcctgctaaaaagagattttggggcaaannnncagaatggtgttnnnnnnnnnnnnnnnnnnnctaatgggagctttggaagtaattttgtgtctgctggtatacagaccagttttaggactggtaatccaacagggacttaccagaatggttatgatagcactcagcaatacggaagtaatgttccaaatatgcannnnnnnnnnnnnnnnnnnnnatatgcatatcctgctacnnnnnngnnnnnnnnnnnnnnnnnnnnnnnnnnnnnnnnnnnntctcaataagactttagaagtatatgtaaatgtctgtttttcataattgctctttatattgtgtgttatctgacaagatagttatttaagaaacatgggaattgcagaaatgactgcagtgcagcagtaattatggtgcactttttcgctatttaagttggatatttctctacattcctgaaacaatttttaggttttttttgtactagaaaatgcaggcagtgtnnnnnnaaaagtaaatgtacagtgatttgaaatacaataaatgaaggcaatgc

SEQ ID NO: 9479 - DNA, 684 bp, Macaca Fascicularis
  misc_feature (1)...(684): n = A,T,C or G
cannnnnnnnnnnnnnnnnnnnnncgaacagtcaacaccctagagattgagctgcaggcccagcacagcatgagagatgctttggaatccaccctggcagagacggaggcccgctatagctccnnnnnnnnnnnnnnnnnnnnnnnnnnnnnnnnngtggagacccagctggccgagatccnnnnnnnnnnnnnnnnnnnnnnnnnnnnnnnnnnnnnnnnnnnnnnnntccgggcccggctacagtgtgagatcaacacataccgnnnnnnnnnnnnnnnnnnnnnnnnnnnnnnnnnnnnnnnnnnnnnnnnnnnnnnnnnnnnnnnctccaagtcatgccttccctgtcttcctgcggcctcctgcggtcctagtgcagcccgcctaacctgcagcccccgccccatttgtgtgccctgcccagggggccggttctgagagggggtgacccagaagggcatagccatcgtctcgagggcttgaacttggcctctacccaaccttaacccttgtagcccaatcccctctcttcatgcagagcccaggcccaggggctggccctgaaaagnnnnnnnnnnnnnnnnnnnnnnnnnnnnnnnnnnnnnntcacaaannnnnnnnnnnnnnnaaggtctcaactcctcatcatttnnnnnnnnnnnnnnnnnnnnnnntgcctcc

SEQ ID NO: 9480 - DNA, 756 bp, Macaca Fascicularis
  misc_feature (1)...(756): n = A,T,C or G
agtcctnnnnnnnnnnnnnggaannnntgagtcaggatgtaatgcggagtttcaccactttcagaaatggcaccagtatcattcagggagcgctgacccagctgatccaggtctnnnnnnnnnnnnnnnnggtgctgtcccagccgcagctccgagccctgcctgcccgggctgagctcatcaacattcaccaccttatggtggagctcaagaagcataagcccaacttctgatgtgccggaaaccaccctgagatctgccagtcatctccatggacttctgcaccccattccatacccttcttcacctgggggtcccctttccagtttttcccttgcctcccaggcccnnnnnnnnnnnnnnnnnnnnnnnnnnnnnnnnnnntgcccaacaggataagctggatctccttggccgtctaaatttcccagtgtcttcaggtttcccaagactacttccctgtgggcttccnnnnnnnnnnnnnnnnnttctccagtctgtcaccctcctttcctgctcccatacacccaaggcttgtttcttcccctgtaaaaaccgtcactgcgtcaatctctggttcactcaactagtcaccatgtcttgaggcatgaagcctcagctcttgnnnnnnnnnnnnnggggtgactgcctctgtcattgtgtttttcaaagtgatttctgtagttttttgacnnnnnnnnnnnnnnnatgaacactaacccctcccctcctggctcaagaattaatcccaagtag

SEQ ID NO: 9481 - DNA, 724 bp, Macaca Fascicularis
  misc_feature (1)...(724): n = A,T,C or G
ggtagagactatcccaacatnnnnnnnnnnnnnnnnnnnnnngccaggtataaagtaggaccggtgctgtctgtcagtcatggtatgggcattnnntctatctcannnnnnnnnnnnnnnnncatannnnnnnngtactatgccnnnnnnnnnnnnnnnnnnnnnnnnngcattggcaattctggtgggataggtctggaacccggttctgtggtcataacagagcaggcagtggatacatgnntctaggcagagtttgagcagannnnnnnnnnnnnnnnnnnnnnnnnnnnnnnnnacctgaacaagaagctggtgcaggagctgttgctgtgttctgcagagctgagcgagttcaccgcggtggtggggaacaccatgtgtaccttggacttctatgaagggcaaggccgtctggatggggctctctgctcctacaccgagaaggacaagcaggcgtatctggaggcggcctacgcagccggcgtccgcaacattgagatggagtcctcggtgtttgccgccatgtgcagcgcctgcggcctccaagcggccgtggtgtgtgtcaccctcttgaaccgcctggaaggggaccagatcagcagccctcacaatgtgctcaccgagtaccagcagaggccgcagcggctggtgagctacttcatcaagaagaaannnnnnnnnnnnnnnnnnnnnnnnnnnnnnnnnnnagacctgctgggat

SEQ ID NO: 9482 - DNA, 654 bp, Macaca Fascicularis
tgacaggaacgcagaagggtcctggtagaggtctcgtgcacagccagaataaaggaggaggaggcggtggtggagagtacaggtggtccaggtcaggctgggtctgggacatggtgcacacacccaggggtcctgtggccagtgggttgggggaggcagaagtgacgctggatgaggctgtggtcgaagctggggaagtgaccccttgcaagatgcctgcactcacaatattgatgatgccttctgggtagcagctggcaccagggtactgagggtcaatggagaacttgcccatgtaagtgaaggtctggtttctaggtgcagagacgggagcaaagctgctgggatatgggagatccaacgacctcttctctccagtcatgtcaatgttgatcatgccatctccagccactccgttcatctggtcaaaggggcctcccagttcggcattgggaaagatggtcaccgacgtggcggcgaggtcctccaccgggtagatgttgtcagacagctggtgcacaaaaccactgagagttactgggattttgtctacggccttggcggtcatcatttgctcctcgcacaacctggagacccaactccctcgctacctggagtgtcagaaaagccgtttggagaggggttggactgagc

SEQ ID NO: 9483 - DNA, 621 bp, Macaca Fascicularis
  misc_feature (1)...(621): n = A,T,C or G
cagaccaggcccaccggctttgcctgggtgagcagcctgccttcccagcccagccttcactctggcttctgcttgtttgtccccacccacctggccatcagtgccaactggccccccacttccccttcccagggatgcagagggtccggcaggnnnnnnnnnnnnnnnnnnnnnnnnntgaagaccccccttcctcnnnnnnnnnnnnnnnnnnnnaccaatgcaggtgagctggtcattgcctcgtggccagagggcccannnnnnnnnnnnnnnnnngggtgttccggggctgcagaagaccgactgtggatgtgccatttgccaggaaggtgtctaacttggctttgcacccaaagaactgtttcttgccttttgctgtagccgtgagaaactccttaagctatggttcagcctgggccctccctctctcctattaaacaaaactaggagagtcccgatgtctccattgtgagttatttagaatggaggagtcgtgactgcttctaaccagagcctcagccctcctgaggatgtgaaaagaaaacaaacaacctgtaccttctttctgatagcaccatcattcctctttctttgtcgnnnnnnnnntgagtaaaggaa

SEQ ID NO: 9484 - DNA, 697 bp, Macaca Fascicularis
  misc_feature (1)...(697): n = A,T,C or G
agccatgcccccaccacctatgcctcctggagctgcaggacatggccccccatcggcaggaaccccaggggcaggacatcctggtcatggacactcacatcctcacccattcccaccaggtgggatgccccatccagggatgtctcagatgcagctggcacaccatggccctcatggcttaggacatccccacgctggacccccaggctctggggggcagccaccaccccgaccaccacctggaatgcctcatcctggacctcctccaatgggtatgcccccccgagggcctccattcggatctcccatgggtcacccaggtcctatgcctccgcatggtatgcgtggacctcctccactgatgcccccgcatggatacactggccctccacgacccccacccnnnnnnnnnnnnnnngggcctctccctccacccagacccactccccggcnnnnnnnnnnccctcgaggtccacttcgaggccctctccctcagtaaattcacatttttccttcctcctgttacatcttcccaatatcttttctattccttggaccaatcagagatgctgtagctccttggggctaaggtactaatccctttcagcacccccaccccattcccctttttaatgtaattttttccacaggaggtatttcttttttatgttggtcctgcagtattttgcaaatgcac

SEQ ID NO: 9485 - DNA, 748 bp, Macaca Fascicularis
  misc_feature (1)...(748): n = A,T,C or G
accactgctgagtcnctcgaagaccaaacttacgtggctactcagcatcgacctcaaggggtggttgcccaagagcatcatcaaccaggtcctgtcccagacccaggtggattttgccaaccacctgcgcaggcgcctggagtcccgccctgcctctgaagccaggtgttgaagaccagcctgctattccccagtgtgcccagctgcactggtatgcatgctcatcaggagaatccctgctggaagtctgcaagtctaagatctccatctggcgacagtgggatgggtggggttagtgtttagagtatgacactaggattcagattggtaaaagtttttagcaccaagaaaacagggatgaggctcttggattaaaaggtaatttaattcactgattagctatgacatgaaggttaaggcccctaaaataattgtaaaactcttttttctgggcccttacattcccacctaaaactatctttaaaatgctagtggctgatatgggtgtgggggatgctaaccacagggcctgagaagtcttgctnnnnnnnnnnnnnnnnnnnnnnnnnnnnngtgcgtgtgtacaaggcagaatctcagagtgtctcctgcagccctctgctcctcccattcactgcacagcaacaccacagaacaagcagcgccccacagtgggtgccttccagaaatatagtccaagctttctctatggaaaaagacaaaactaattagtagacaggtttccctg

SEQ ID NO: 9486 - DNA, 766 bp, Macaca Fascicularis
  misc_feature (1)...(766): n = A,T,C or G
atcaggtttagtttggagacatggcannnnnnnnnnnnnnnnntatgattatnnnnatccaggtttagacactctcagcatggaagtgttagttacaatccaatncngttgtttcaaaggaaagatctgacatccgaaaagcaagtgcatttggtgaagatcatccaaggtattatgcaagatatgttaataggcaaccaggtttatatagccattctagtgatatatcaaaacaactgggatttagtcagtcacagagatactattactatgagtaagaaattaatggcaaaggaattaatccacgaatagaagaatgaaacaagatcactttcaatcaagaaacttcgtaatactttcagggaagttatcttttcctgtcaatctgtttaaaatatgctacagtatttcattagtttggtggtagtttatttttattgtgtagtgatctttaagctctatatttcagaaatattaaatagaagaaatcaatatcatggagagctatctttacaaaactaggagtatttggccnnnnnnnnnnnnnnnnnnnnnnnnnnnnnnnnnnnnnnnnnnnnnnnnnnnnnnnnnnnnnnnnnnnnnnnnnnnnnnnnnnnnnnnnnnnnnnnnnnnnnnnnnnnnnnnnnnnnnnnnnnnnnnnnnnnnnnnnnnnnnnnnnnnnnnnnnnnnnnnnnnnnnnnnnnnnnnnnnnnnnnnnnnnnnnnnnnnnnnnnnnnnnnnnnnnnnnnnnnnnnnnnnnnncacg

SEQ ID NO: 9487 - DNA, 779 bp, Macaca Fascicularis
  misc_feature (1)...(779): n = A,T,C or G
gcaattggcagtagatgtgcagataccagaatgtttggagggagtggcaggtgaagcagtttttattgatacagagggaagttttatagttgatagagtggtagacctnnnnnnnnnnnnnnttcagcaccttcagcttatagcagaaaaacacaagggagaggaacaccgaaaagctttggaggatttcactcttgataatattctttcccatatttattattttcgctgtcgtgactacacagagttactggcacaagtttatcttcttccagatttcctttcagnnnnnnnnnnnnnnnnnnnnnnnnnnnnnnnnnnnnnnncttttccgtttcgtcatgacctagatgacctgtctcttcgtactcggttattaaatggcctagcccagcaaatgatcagccttgcaaataatcacagattagctgtaattttaaccaatcagatgacaacaaagattgataaannnnnnnnnnnnnnnnnncctgcattaggggaaagtnnnnnnnnnnnnnnnnnnnnnnnnntaatctttcattgggaccgaaagcaaaggttggcaacattgtacaagtcacccagccagaaggaatccacagtactgtttcaaatcaaacctcagggatttagagatactgttgttacttctgcannnnnnnnnnnnnnnnnnnnntccttgagcactcgcaaacggtcacgagaaccagaggaagaattataacccagaaacaaatctcaaagtgtacaaatttattgatgctgtgaaaccattgtgt

SEQ ID NO: 9488 - DNA, 636 bp, Macaca Fascicularis
tgccacgccctgcaggcccacgtgctgggcgggaccctgaccgtggccgtggggggtgtgctggtggctgccttactggtcttcaccgtggccttgctggttcggggccggggggctgggaatggccgcctccccctcaagctcagccacgtccagtcccagaccaatggaggccccagccccacacccaaggcccacccgccacggagccccccgccccggccgcagcgcagatgctctctggacctgggagacgccgggtgctacggttacgccaggcgcctggggggagcctgggcccgacggagccactctgtgcacggagggctgctcggggcagggtgccggggggtaggaggcagcgccgagcggctggaagagagtgtggtgtgatgcacgggcagcttcctgtgtgctccaagggatgagcctcgtggggcagagggcccagggcggccacctggcctgggagtccctccctggtttttactctcggtacctcaggctcccctgtgtgcttggcggggcagggagccctttcctcggttctggcctccagaccagagtaaggggcaggtccctccaacaggtgctcacagccaccaaggcaggggctgcagccaccaattgggagtc

SEQ ID NO: 9489 - DNA, 748 bp, Macaca Fascicularis
  misc_feature (1)...(748): n = A,T,C or G
gttgtaaacagacttaaaaaggcctatgcacagatccgagtnnnnacccatgggactctaatgttctctatgggccactccacaccaagcaggcagtgagcatgtttcttggagcagtggaagaagcaaagaaagaaggtggcacagtggtctatgggggcaaggttatggatnnnnnnnnnnnnnnnnnnnnnnnnnnnnnnnnnnnaggtcttgcccacgatgcgtccattgcacacacagagacttttgccccgattctctatgtctttaaattcaagaatgaagaagaggtctttgcatggaataatgaagtaaaacagggactttcaagtagcatctttaccaaagatctgggcagaatcttccgctggcttggacctaaaggatcagactgtggcattgtaaatgtcaacattccaacaagtggggctgagattggaggtgcctttggaggagaaaagcacactggtggtggnnnnnnnnnnnnnnnnnnnnnctggaagcactacatgagaaggtctacttgtactatcaactacagtaaagaccttcctctggcccaaggaatcaagtttcagtaaaggtgttttagatgaacattccttaatttgaagttttccggcagctgtttttgaagaagacaaagnnnnnnnnnnnnnnnnntgaannnnnnnnnnnnnnngactgtgacagtgactaatccccctatgaccccaaggccctgattaaatcaagagaccccttt

SEQ ID NO: 9490 - DNA, 760 bp, Macaca Fascicularis
  misc_feature (1)...(760): n = A,T,C or G
ggcgccgnnnnnttcattnnncttagattccacagttgccctcatgaaaagactgctcctgagccccaaggcacgtgctctgagaaatagacaggagtggtatttccgccctctcggagggctggtgttcaccaagtttccctcctcgcnnnnnnnnnnnnnnncctgtatnnnnnnnnnnnnnnnnnnnnnnnnnttcctaagatttctgggagcgttgttcacccaccccctttaggaaccaggctggtgttcttgcttgaaagccttgtgccctccgagtgtctggctgatcacgtcagagaggtctgcgtnnnnnnnnnnnnnnnnnnnnnnnnnnnnnnnnnnnnnnnnnnnnnnnnnnnnnnnnnnnnnnnnnnggtcctgtctttttctctgccctgggtctgggacacaggtgatgccagccaggcccaggagtgcccagcatcccccagctnnnnnnnnnnnnnnnnnnnnnnnnncttttcctcagaatctggcctttttccatggcaatgaagtagggcccagcctcctctaaagtggctttgtttcgtttctgcacagttataactgctcttgggggtgtcagtgaggccgggggcagggagccacgggatgctgagagaggaggcccgagaggacaccccaccgtccagcgtggcctnnnnnnnnnnnnttagggacgaggctgtcactggtgggcaccctctgttcctgtttgtgtgtttgaatagtctgaaatgctggacttttt

SEQ ID NO: 9491 - DNA, 806 bp, Macaca Fascicularis
  misc_feature (1)...(806): n = A,T,C or G
gcagatgcgcgggttntacnnngacctatatgagaaagaaagatgatgangggctaccctaagagaaagatagnnnggagggcattttaaattttatgttcaaaattttaggttaaaatcaaaagtcagtcttaaattttggatgtggatgtttggctgaatttatatatagtattactcatcattaccacattctttgttgtattcaagaactgtaagagtgtgctaatttcctgtaggtacataatgaggaaaattggctccaccacaaccattaaaaaataattttggccagatgtgnnnnnnnnnnnnnnnnnnnnnnnnnnnnnnnnnnnnnnnnnnnnnnnnnnnnnnnnnnnnnnnnnnnnnnnnnnnnnnnnnnnnnnnnnnnnnnnnnnnnnnnnnnnnnnnnnnnnnnnnnnnnnnnnnnnnnnnnnnnnnnnnnnnnnnnnnnnnnnnnnnnnnnnnnnnnnnnnnnnnnnnnnnnnnnnnnaggaatttgatgttacagtgagctgtgatcataccactgcactccaacctgggtgacagaatgggaccctgtctctaaaaaaaaatttttttaataaataatttaactcttctaataatgttttgttgcaggagctgtttgttttataaatattgtatttaagataaaatacggatttgaaaaacagaaaatatactttatgttctgaaatttgtattaaagtgtaaaatgtgaatcatacatcttgtctaaatagcttacagcatagttggcttaaatgaaaataaaatgatatgcttatacattttatgca

SEQ ID NO: 9492 - DNA, 984 bp, Macaca Fascicularis
  misc_feature (1)...(984): n = A,T,C or G
gaacagcacattcaggacattgtggtccnnnnnnnnnnnnnnnnnnnnctcatgctgcaggagcccctgctggtggtggcggccttctacatcctgttcttcaccgtcatcatctatgttcggctggacttctccatcactaaggatnnnnngctgtgaagccaggannanntagcctgcatcacagagcagtcttganntggtcaacaagagaataggcctttaccgtcactttgacgagactgtcaataggtacaagcaatcccgggacatctccaccctcaacagtggcaagaagagcctggagaccgaacacaaggcctnnnncagtgagattgcactgctacagtccaggctgaagacagagggctctgatctgtgtgacagagtgagtgaaatgcagaagctggatgcacaggtcaannnnnnnnnnnnnnnntcggcggtggaggctgagcgcctggtggnnnnnnnnnnnnnnnaagacacgtacattgagaatgagaagctcatctcaggaaagcgccaggagctggtcacnnnnnnnnnnnnnnnnnnnnnnnnnnngtagcccctgcnnnnnnnnnnnnnnnnnnncagggtgcctgcactnnnnnnnnnnnnnnngaatgggtggtagtgggaggttgtgcatggaggccagtgaaggctgacatctgtaaaaggccttcaaggaagagaaaccaggccctgcctcaggcagtgtgagaagcttgctgtttgtccttaaatctttcctttttttaaaaaaaaagaaaaaaaaactccaattaaaaacaaaacatctttgtgttttgaacaaaggaattttcaatatttgattggtattctgttctgaagctagggtattttttcagcctataaanncccnnntgttttatgcccttctnnnnnnnnnnnngggtattttgtgagtgcatgtgatatttttttttttttttaaannngtgtggaacaaatgaa

SEQ ID NO: 9493 - DNA, 989 bp, Macaca Fascicularis
  misc_feature (1)...(989): n = A,T,C or G
ttcagcatatgnnnnnnacnnttgcnnnnnnnnnnnnnnnnnnnnnnnnnnnagtctantnnnntttaatttgttactacttagtcacaaatcctatgttattccagtttggaattacttattaaggagaattagaaatacatatgcccatgcttaaattttatagctttaatttgtattatttctttattggcgggaagaggtacatctttgttttccttactgaaaacaaatatggattaattgcctcaaatttgtataagtgattggctagtgattcttgttttcagaagggagagtggtgtagatagaaaatgacaaagatggcaatatacacttaatgttgttacatgttgttactgaaatacttagatttttaaaatttcaaatcctaaatcacttcttgtaggagggttttcattaactagctgcaatatatacagttcactacatatgggttgtttgagttttttgtgtgctgtatttctttctgttttttaatacctggttttgtacatatctaactctgttgtcttttggtnnnnnnnnnnnnnnnnnnnnnnnnnnnnnnnnnnnnnnnnnnnnnnnnnnnnnnnnnnnnnnnnnnnnnnnnnnnnnnnnnnnnnnngttcatactgttacatctagaacatttgtcaggcnnnnnnnnnncatgtacatacggtatagaaaccatggagttaggcacttcctggatttttttttatgagaaaatactgtatttaaaatgtaaaataaacttttaaaaagcaggcactaatatatannnnnnnnnnnnnnnnnnnnnnnnnnnnnncttgcacatgttaagatgaactatctcctaaaaatatgattgttcttgggagcagtgtatgttactttacatagcagcggttcctgtcatgtgttcatgtcagaatatttttggttttaaacttttttattgcctttggctgttgattagtacagtacaagtgcgatttcag

SEQ ID NO: 9494 - DNA, 751 bp, Macaca Fascicularis
  misc_feature (1)...(751): n = A,T,C or G
gcnnnnnnnnnnnnnnntnntcccccaaaccnnngaggcctacatccatcgagccggcaggacagcacgcgctaacaacccaggcatagtcttaacctttgtgctgcccacggagcagtcccacttaggcaagattgaggagcttctcagtggagagaacaggggccccattctgctcccctaccagttccggatggaggagatcgagggctnnnnnnnnnnnnnnnnnnnngccatgcgctcagtgactaagcaggccattcgggaggcgagattgaaggagatcaaggaggagcttctgcactctgagaagcttaagacatactttgaagacaaccccagggacctccagctgctgcggcatgacctacctttgcaccccgcagtggtgaagccccacctgggccatgttcctgactacctggttcctcctgctcttcgtggcctggtgcgccctcacaagaagcnnnnnnnnnnnnnnnnnngtaggaaggccaggagagtgaagtcccagaacccactgcgcagcttcaagcacaaaggaaagaaattcagacccacagccaagccctcctgaggttgttgggcctctctggagctgagcacattgtggagcacaggcttccacccttcatggacaggcgaggctctggtgcttactgcacagcctgaacagacaattctggggctggcagtgctgggccctttagctccttggcacttccaagctggtatcttgcccctgaagcag

SEQ ID NO: 9495 - DNA, 281 bp, Macaca Fascicularis
  misc_feature (1)...(281): n = A,T,C or G
cgttctgagtcctggtaaggacagtcgctctgggggtcttcattttactgcagttcctgcgtgccagtgcaaggagatagaccctggaaggcagagctnnnnnnnnnnnnnnnnnnnnnnnnnnnnnnnnnnnnnnnnnnnnnnngactggatggggatgcaccggtgactatatcaaatcaaacagtccttttcttctctctcctttagtatcgattttaaagtgcattaggcactatggtttcagagtttcttggggaaactttgcagattcgtattca

SEQ ID NO: 9496 - DNA, 660 bp, Macaca Fascicularis
  misc_feature (1)...(660): n = A,T,C or G
aggagctcatggatgctatggtctctcactttgagaaactgcttgnnnnnnnnnnnnnnnnnnnnnnnnnnatcgtgttcatcccagagtggcgggaaccccccacaccagcgctcacccgcatggagcagagccgcttcaannnnnnnnnnnnnatcctgcctgcctttgagcacgagtaccgcagtggctcccagcacatctgcaagaaggaggaaatgcactacaaggccgtccacaacacggccgtgctcttcctacagaacgaccctggctttgccaagtgggtnnnnnnnnnnnnnnnnnnnnnnnnnnnnnnngctgccnnnnnnnnnnnnnnncgcagccacagctctggttcttcctcatcgtcctcctcggatgccaaggaccgggactcgggccgtgagcagggccctagccgcgagcctcaccccacttaacataccctgcggggaggaggagccccaggggtgctggtctggactgctgggactcaggcccctggggcctgacagggaccccgctgccactgacataggaagattatggttctgccagggctcccctccctgcctgtccccaactcctcacctcaaactccctccaagtcccatgtatataggtcccgnatgccttcccaaccccacccctcatcct

SEQ ID NO: 9497 - DNA, 718 bp, Macaca Fascicularis
  misc_feature (1)...(718): n = A,T,C or G
cgcctgtagtttctatnnnntgccgtaatagnttngnnaaagggacaagtgtcctgctgggtccctgcagtcgacatcctatttggctgggcatcgatgccccctttctggatcgatgcctcctttccgggactcccggcacgagtcccctcatccagggagggaggaagctgctggggaggggcttggctaggcagttctgtgtggcgatggttttcccctcattaaacaccagttcttggtgaccgcaggggctggtaggtcattcaaagctttggccagctcacgcctgcttccttcctccctgccctgctgaatcctaaagctgtgcctctatgtgatttgaatgagggagcccttcagggcaaattcaggtgcccccattgcctcagactggccctggtcccaggtggtagcggttgaggaggggtgcagggctctcaggcctgaggttctctcctctgggcttaattttctcttggggtacgctcctgacagagtttaaggtgtcccttgagctggagctgcagacctttaaatagatggccccttcagatcatctgtgcctacctcctgcccgccaggcgtctacactcactcagatgcctgtggcatgtggaggagactgccttgtcctgagcctggaaaatgtgaaactgtctcctgtctcctgctgggcatgtgggcctggccacgttcaatgcaagaacaattttta

SEQ ID NO: 9498 - DNA, 749 bp, Macaca Fascicularis
  misc_feature (1)...(749): n = A,T,C or G
aatagaatgaactcatgatggaacttcagttcannngctttgtcctgaaaattccctggttctgttccattctgagcgaaattggccttgggaaaaaccacgttcttccnnnncgattcttcatccggtctatgctatgcgattcctccccaaatatggatcttatttctgctcatttcccctacttattaaaatcacaccaaacccttactattttcttatctctttcactttttaaatatctttcaccaggtcatattttgggattatttttccaaatatttttaagcactgaatcgaacaagcactcaaattgaagtattagtcttgttttatgtatttttcactgataaaaattatttaacatttttctttttacttgattacatatgcacatgtatttgtaaatgtaaaatactaatattcactaatgtatgtacataatgatcaattggtttaacttcttttatgtaagtatggtatataaatttcaagaacacttttttggctgttggtgttggtttgcttgttttgagtttgtttcactccagtttgccccttcatagtccagtttgggtcaaaacttcatgttaaacaactctgcattggttatggtggtagacatatgacggtagaaaatgtatacagagctagagacaactaacattcttggaaatactgcttttgttttactgtggaccattcctttcatgcattgaaatggagaaatttaaagtaaaagaattctg

SEQ ID NO: 9499 - DNA, 918 bp, Macaca Fascicularis
  misc_feature (1)...(918): n = A,T,C or G
agaaaaatcaactcactgttcagtgctgagaggtgatgtaggcccatgggcacctggcctccaggagtcgctgtgttgggagagccgggcatgcccttggctttagagctgtgttgaaatccattttggtggttggtttttaacccaaactcagtgcatttttaaaatagttaagaatccaagtcaagaacacttgaacacacagaagggagaccccgcctagcatagatttgcagttatggcctggatgccggtcaccagcccagctgttcccctcaggaacatgtggtggcgcagcagaccgcgatcaattctgcatggtcatagtagagatccccgcaactcgcttgtacttgggtcaccgtgcattccatagccatgtgcttgtccctgtgctcccacggttcccaggggccaggctgggagcccacagccaccccactctcccgcaggccgccccacccaccttcaggcagcctatgggacacagggccccatctgtccctcggtcaccgtgtggccagagtgggtccgtcgtccccaaccctcgtgctcgctcagacactttggcaggatgtctggggcctcaccagcaggagcgcgtgcaagccgggcaggcggtccacctagacccacagccccttgggagcaccccacctctgtgtgtgatgtagctttctctccctcagcctgcaagggtccgannnnnnnnnnaaaaagacaacctctacttttttcttttgtattttgataaacactgaagaagctggagctgttaaatttatcttggggaaacctcagaactggtctatttggtgtcgtggaacctcttactgctatcaatacacgattagtaatcaactgttttgtatacttgttttcagttttcatttcgacaaacaagcactgtaattatag

SEQ ID NO: 9500 - DNA, 644 bp, Macaca Fascicularis
  misc_feature (1)...(644): n = A,T,C or G
gaaatggttcttcgtgtggtggaaggaggtatgggtgatgggtaagtgccgtgtcagtgtggacagaggcatttgactaagccaagctccctctcacagcctcagtatctctgcaggccgccctggttccatttttctgtgtgataccgaataaacaaatttacttttatatgatggtataagtttgtagattatgctaaacaaattttgtttaaattttttaaataaaaatcttaaaacattttttttctaacctagactgagaaattcatgcgtttactcttctgggtgtttgatactttgtaaagttgatattttcctaagaatttaacatgtcatactttttgaaatagatttaagtgtgtttcttattgctaaaaatactaaatgtcatgggtcatagtatcgnnnnnnnnnnnnnnnnnnnnnnnnnnnncagctaacaccatgatgtaggcataaactgaaaaccaaaaacctactatttcaaatatattgtactttttttatttctgtaacccaactgtgtgccattttcgttggacttttaaatgtagatgtctatattgtaactgatcttttgtggatatgtgtcacttggtttcagaaagttcacaaatgtagcaacaggtcacatgactgag

SEQ ID NO: 9501 - DNA, 738 bp, Macaca Fascicularis
  misc_feature (1)...(738): n = A,T,C or G
tgaaggaagtaccaattagtttatttgttgatggcattcctcttttgggaaagcaatgtaagattatatctgtgtgtgtcattcacacatagggaagcatacacaggcacatggctttaagaaccacactgatgccttgataattaaaaagaatacaagcattccatatacacatgttaattagcagttagttactgggccaacactttctcataannnnnnnnnnnnnnnntgttgtctaattatcatttttccnnnnnnnnnnnnttgtaggactactgttcgaagatttttggaagaatactgagaacggcataaagtgaagatcgacatttaaaaaatgaggtgaaagaaagctatagtggcatagaaaaagtataaagctcagttagtttttttattattattattattattaaaagttaattcaggactgatgtgacctaccagatttcagaacatgtgttaatagtatatatgccactgaaaacttaggtcctgtatcatacttttttctttaagacttttnnnnnnnnnnnnnnnnnnnnnnnggcttgctcagtgtttaattgcaagttttcattcttggannnnnnnnnnnnnnntaaacgttagtattcgtgtgaatcagactaagtgggatttcatttttacaactctgctctacttagcctttggatttagaagtaaaaataaagtatatctgactttctgttacaaagttgattgtctctgtca

SEQ ID NO: 9502 - DNA, 713 bp, Macaca Fascicularis
  misc_feature (1)...(713): n = A,T,C or G
gaagactgaatggcagaannnnnnnnnnnnnnnnnnnnnnnnnnnnnnngggatctgaagctgacaagtaccgcctaacatatgcctactnnnnnnnnnnnnnnnnnnnnnnnnnnnnnnatggctatgattttggcgacgatcctagcgacaagtttttcacatcccacaatggcatgcagttcagtacctgggacaatgacaatgataagtttgannnnnnnnnnnnnnnncaggatggatctggttggtggatgaacaagtgtcatgctggccacctcaatgnnnnnnnnnnnnnnnnnggcacttactcaaaagcatnnnnnnnnnnnnnnnatgataatggaattatttgggccacttggaaatcccggtggtattccatgaagaaaaccactatgaagataatcccattcaacagactcaccattggagaaggacagcaannnnnnnnnnggggagccaaacaggtcagacaagagcaccctgtggaaacagaatatgactcattttaccctgaggatgattcgtagaaaattaactgctaatttctgttgacccacaaagtttcagaaattctnnnnnnnnnnnnnnntattttctattactatatttattgatttcaagtcttcttttaaagatatttagcctccaatggacattaaaactcatttaggactgtatttccaaattatgacatcagagttatttaa

SEQ ID NO: 9503 - DNA, 972 bp, Macaca Fascicularis
  misc_feature (1)...(972): n = A,T,C or G
aaaaacaataaccaatccatatgtcntcnnngtnnnnnacaaagatnnagtttacaacatccagatccgttatcagaaagaaagtcaagtttacttgttgggaactggactccgagggaaagaggacttcctgtctgtgtcagatattattggctacttcaggaaaatgccacttctgctcattgatgggaaaaaccgaggttccagataccagtgcacatnnnnnnnnnnnnnnnngcacccatagcaagttagagccgagcgagcgagccctcctcctgcctctgctgccagcacgagatcaaccagccttggccaacggacaaacacttaggactgaactgaacccctccnnnnnnnnnnnnnnnnnnnagccttccctttaaaaacagtgtttgaaatgaagactgtcaaatatcccataatttatttattcttcttcaatgtttgtaaagtgcataagtcatgttcacacttgaagtctagtagtgcactgtaataattcattttttaaaagtttttttaatgcccatttcaaaatacaatagtttacacagctacaaaaacaatttggggcaagttttaaaacacnnnnnnnnnnnnnnnnnnnnnnnnnnnataaaactgattttcttacagccannnnnnnnnnnnnnnnnnnnnnnnnntagttttatacatgtaatttgaaaattactaaacctcattnnnnnnnnnnnnnnnnnnnnnnnnnnnnnnnnnnnnnnnnnnnnnnnnnnnnnnnnnngtatttttttccttgggggatttttatgtaatttttttatgaaaagataaatgcatgttgagataacttctgggattaaaatagtcttttgctttacttttttggtttcctaaaacaactttattgacttttagtccatactgttatattttcgtcttaaagaaaatttaaactacaaataccaaaacattttaaatttagggatg

SEQ ID NO: 9504 - DNA, 715 bp, Macaca Fascicularis
  misc_feature (1)...(715): n = A,T,C or G
ggaaaaaatcaccaccattcttggtataatacagtgtagcttagatgaggtggtgaaatagaggtatcagcctaatattcctaatatagtttctcttgaattaataaactgaagatttgtaggaaaataagtgagcaaaatttgtttcctgttgtgaatttttcctacagcactctttttcatcttgatgttttccaactttctgtactaatagatacatttctgtgcataagattatgaggcatatactcacagttcagtagtttttgttaaggatttactgtgtgagtacttcattgtcaggaattgcagaaccttttccccactgctctcatcgnnnnaaagttctnnnnnnnnnnnnnnnatgcgacccactcagtcagacttagatagtgaaaccatactgtagaatttttgtcgtaaaaagaccacatacccagcacccgtgaaataaaagattcatctgtaactggggttcaaactgattaaattcctttgctcatactcataaatagcactaaaatgttacaacattttcatttacctatttttagttcctccattttaacttactaaaaatcttggattgatattcttaaccaataaaagtttactggtggtcctatttggcatattattgaaacttggaaaggataatttgaaacaaggtttgaagttcactgaaatacagagattgaatttatactcaattctt

SEQ ID NO: 9505 - DNA, 732 bp, Macaca Fascicularis
  misc_feature (1)...(732): n = A,T,C or G
gttttaaaaggtctnnnataagctcctttagaacgctgtgcaaagccnnnnncagtgaggatagctacaccatggccatggtgcatcagttagtctgtgtgtacccggatttgtnnnnnnnnnnacaaatgtataaaatgtattatagataaggtgttaggtgcaaagaatgtctaataatccctgcatacgtttgtggatttgcagtgannnnnnnnnnnnnnnnnnnnnnnnnnnnnnncttttctcttagctagtgtttgaaaattatctttgcttttataatgtggcctcaaatgtcatgccaattttcacattttccacaaactccatttagggagaagtgtttaaacccccggtaagtttactctataccagagtaaactatatattactccatataagcagccttgcaataactaatcaccaccatagacgaaagaaacagactgcaaggaacagagctgagcgtctggagccatcaaaggcattaaaaactccagcaaaagcagaggtcatagcaaaaatcatgaaaaaacacttcaacctgtcctttcaatcatccaattaaatttgggtaaattaatgaaaatgtattatatcaatattaactcatctacagcactttgagtttctttgtaattcatgatgtcctatcctatagtgtggaggtaaatgattttatatgcattgggggtcatatataaaacttcaatnanttcactacaataa

SEQ ID NO: 9506 - DNA, 681 bp, Macaca Fascicularis
  misc_feature (1)...(681): n = A,T,C or G
gaccagctgngnnnnngnnnngcacnnnctgtccgcaccactgttgccctgacagcgccagatatcacactggtcctgcnnnctgatgtcatccaacaggaagggtcagccctgagggaggagacagaagcctgggccaggccacacgagtccctggcccgggaggaggccctcactgcacttgggaagctcctgtacctcttagatgggatgctggatgggcaggtgggagcacctgtgaggggttgggggtgctgtggacctaggggcagggaccaggacctgccaacgagatgtggcctgtccagaggagggctgggtggtgcagaaccacatggatgtgaacgttgccttgtgccaagaacggttctcagaacagccccagggatggggnnnnnnnnnnnnnnngacctctgacctcagcttcttcagttaaatgctctttggcagagaggtgaagggggtgatttaaagtatacatttaggcagggtgcaatggctcatgcctgtaataacagcagtttggggggccaaggtgggaggaatgtttgagctcaggagttcaagaccagcctagagaacatgcannnnncctgtctcnnnnnaaaatataaaagtcagccatagtgtggtggccgtgtnnnnntagttcagttagttagntggnnnnnggcaggagga

SEQ ID NO: 9507 - DNA, 718 bp, Macaca Fascicularis
  misc_feature (1)...(718): n = A,T,C or G
ctagagagtagagnaaggccgtgaaatggcagttagaccaacagaggnnnnnnnnnnnnnnnnnnnnnnnnnnnnnnnnnnnnnnnnnnnnnnnnnnnnnnnnnnnnnnnnnnnnnnatagtcacaaatatcttataacaaagttcattgttttaggattttttaaaaatgtgttgtacctaaggccatacttactcttctatgctnnnnnnnnnnnnnnnnnnnnnnnntgtattatatgaaaaaaaaaaacccttaatgcactgttatctcctaaatatttagtaaattaatactatttaatttttttaaagatttgtctgtgtagacactaaaagtattacacaaaatctggactgaaggtgtcctttttaacaacaatttaaagtactttttatatatgttatgtagtatatcctttctaaactgcctagtttgtatattcctataattcctatttgtgnnnngtacctgttcttntgtgttttttcagtcattttctgcacgcatccccctttatatgattatagagatgactgtagcttttcgtgctccactgcgaggtttgtgcttagagccgctgcgccccaacaaggcctgctccatggagtgcaggacgagctactgctttggagcgagggtttcctgcttttgagttgacctgacttcctttttgaaatgactgttaaaactaaaataaattacattgcatttattt

SEQ ID NO: 9508 - DNA, 685 bp, Macaca Fascicularis
  misc_feature (1)...(685): n = A,T,C or G
actttactcgacctgcacgggctctgcccgacatgccgtgggagctgctgggattcctnnnnnnnnnnnnnnnnnnnnnnnnnnnnnacagacctttctnnnnnnnnnnnnnnnnnnnnnnngagtctggggacctggtgtgcagggcaggctccannnnnnnnnnnnnnnnnnnnnnnncttcccaaggggcgctgtgcagactgaccaccggcctcccgcctgcaggtcagaggctctgacactgtctggtttccaatgcttnnnnnnnnnnnnnnnnnnggcctcatcctcttctttgccagnnnnnnnnnnnnnnnnnnntccagcattaggacttacctcctcgtttttgtaaggtctcttgtatgttgttacatgtttggcttaaacaatttataaaagcctttctagaaggcagacttagccacggtcgaccctgtcctccccagcagagcccgggaggacgacggccgctggggctcctgggcatcctctctggggagctgctggccgcttagcgttgtttgnnnnnnnnnnnnnnnnnnnnnnataggcttgtggtttttttaatttaaagatattaagacttaattcactaaaatttattctgaggggatatttatacttttatacttttttaggtattgtattttatcagcttacagtttaatgcctaagttcc

SEQ ID NO: 9509 - DNA, 751 bp, Macaca Fascicularis
tagttttgctgatggtgtgttgctaatgttgggtttcctgatagaaatagtgtatttgtatttaaggtttttgcttgctgtcacttaattcttttgattttgcgagtgatagactctcttatttttcagtttactgaggaaggttcccccactccggccacccgcccctgcctgacggcacagcatggtgacagcgacttttcgtgtgtccctctagtactttgttcaaatggcagcaaataggaatatacaatctaatttccccccttaggagaaaagtaatattctatatgcgttattctgcaattttcttttttcatataacaaaatattctcgaggtcttccttatgagtgcatggaaaactttgtgggccgtcgctggagctgctatctttacagccgttgttttttctaacaacgtatactctaatctcattagaggtttgtcactgctaatccagattatatcttctttgtacctcaaacaaccctctgaagtaggtggtgctgggggcgtcaggaagagaagacactgagattcagagaggttaacggacgtgactgaggcgacagatggaagtgtggggacgcagcccaccctaggtctgtgtgcctagacaaaggccgggtgcactgtcgccttctcagggccgctgccacctgctgagtccagcacgctcagggcactttccccccttcttggcgatggtgtgctgaggtccacccgcagtagctgaccgtgttggtctt

SEQ ID NO: 9510 - DNA, 830 bp, Macaca Fascicularis
  misc_feature (1)...(830): n = A,T,C or G
gacgccagtagataccaannncatagaacttgacacaaaatgatgacgacattgtattgaggacttgcccgccagagactgaaaggcatgaaggatgacaaggaggaagaggagaatggtaccggctctccacagctcaacaacagatagatgggccggccctgcctccacgtggctccggctccactctcgtgcgctcggatgcttattcgtcttcttcccgttctggtttattttcccctttgttcttccagtttctaccaggggggcctgtggccttccagatcacggtgatgaacctctgacctcaggattggccccacatcaccatgccaacaggaccacagcacaccggctccaccccatctctgccattgcctctccactgccctccttttcatgctgtctccnnnnnnnnnnnncagggttctggccttggaattggacttgagatggggnnnnnnnnnnnnnnnnnnnnnnnnnnnnnnnnnnnnnnnnnnnnnatgagggcttggaggggtggggatgagggctcaagacacgagagaagatgtccacggttccaggtggttaacaaagttctggcagctaaaagatgaccgcattgaaggccacctccttctggctgggaggggcagacctgtggacagattctcaatgcctttttgaagttctgacccaccaaagaccttctgccttcaccctcctcccnnnnnnnnnnccctctgtgtctgatagtgacgttggtgaaagtttgtagaccacaggagtagagaaaagcaactggagtgacttnnnnnnnnnnnnnnncctagactgaggcaagctgt

SEQ ID NO: 9511 - DNA, 618 bp, Macaca Fascicularis
  misc_feature (1)...(618): n = A,T,C or G
gatataaaaactgnctccagagtgcaaaagtatttaaactttgatccccgaacagctcagaaaatagacaacggaatattttggatttcctgggatgatctgtgccagtattatgatgtgatttatttgagttggaannnnnnnnnnnttaaagaatcaacgtgtattcacaggatgattttgcgaataatcgagaatttatnnnnnnnnnnnnnnnnnnnnnnnnnnggaaaaaagtttattacccaggtatattnnnnnnnnnnnnntactttttcaaagattccttcaccatacaccttatcaaaacggattaatggaaagtggagtggtcagagtgctgggggatgtggaaatttccaagagactcacaaaaataaccccatctaccaattccatatagaaaagactgggccattactgattgagctacgaggaccaaggcaatatagcgttggatttgaggttgtaaccgtttctactgtaggagatcctggtccccatggctttctgaggaaatctagtggtgactataggtgtgggnnnnnnnnnnnnnnnttagaaaatatacctnnnnnnnnnnnnnnnntcattcctagcacctttttgcctaaacaa

SEQ ID NO: 9512 - DNA, 923 bp, Macaca Fascicularis
  misc_feature (1)...(923): n = A,T,C or G
cgnnnnnnagcagacacactgannnnnnnnnnnnnnnnaagtgaagcatggcatatagtgcccttggaagaaaatgaggcctcaaatgacagtagcattgaagtcnnngctgcggagtgagggaaacccccagccaccctcctggaatctgagatagggcggcacatctgtcctgacagacaagggagcgtaactgaaccaggaagactgcctccgtccctgctctcccgctgcacccagggtggtggcatgttacccctctgggggtggggccccctgccgttttggctcagtttgggtttgttggtcacatggagctcttccatttcatttannnnnnnnnnnnnnnnttcctagaggagacagcctatctctccttgttacccccaaagcccatgctggggtggtggcagctggggctgtggatgggaggggtcccgggtgtggacgtgttgccccctcctccgcatgccagcgtggttcattgacaagcccctctgcaactggagagaacatgaattccnnnnnnnnnnnnnnnnnnngagaaatgccgcccacgtggagacagtttattgcagcactattggtgttcagagctcctctgtgccctggctccatgccttcatctacacaaacatcaccttcctaatcaccgcggggcggggtgcatgtggctgtgcccctttaatctcatttaatttttattaaacatgctcattacctgtgttgagaaaaggctttctttatcctaaagattattacctttttaaagtgctcttatattttcatgagtttttattttgtctctgagattttgtattccacattctagggtattctgtaatttggctccttaccaatattaaaatcgtattaaaatctgccttgccagagaaaaaaaaaaaaaaaaaaaaaaaaaaagg

SEQ ID NO: 9513 - DNA, 708 bp, Macaca Fascicularis
  misc_feature (1)...(708): n = A,T,C or G
gaagcagtctnnggaccaagtggacgcggagcgtgacggcgtgaaggtgcccaccacgctggccgagtactgcgtgaagaccaaggcacccgcgcccgacgagggctcggacctcttatacgacgactactacgaggacggcgagggcggcgaggaggccgacagctgcttcgggnnnnnnnnnnnnnnnntgggcacggaggagtcctgaccccgcagaataaacgcgcagagtnnnnnnnnnnnnnnnnngacccgtggctccnnnnaagacagactacctcacggaggttttgtgctggtccccgtctcctctggtggtttcgttctgggctcttttctcctttcccgtatttgttctgggttttcatgtgcttcagagaagaggggctgccccaccgccgctcgcgtcactcggggctcagtggacggccagggtgggagagccccgcgcacctctcctcgggaggggagctgagccccgacgtctgctgggccccctagcttccggactggccgtaccccggaggagccacgggggctgctgggaacgtgggcgggggccgttcctgccactgccagcctgggagacccaggtgtgggtccgaggggccccggcccgcctgtcagctccagggcctggagccacgtcccagcagcagtggacggattcaccgtggcnnnctcttctctctgctttggtttgtt

SEQ ID NO: 9514 - DNA, 734 bp, Macaca Fascicularis
acaatgtctgcaagagaaaatgggagagcagtaagggcacagtgtctcctgtcctcagtgatacaggcgggactccacgctggttctgtaggaaaacagggtcatagcctctgaactttgctttttctgcaaagaaccagatatgatctgtttaatgaggaaagtacgtagccgtggggtcaggctaactgcccatcaattgcttttcctttgattacaccatgttctgccttgtaacgctgggacctgcatcctttgaggcaacactttggtgagtttcctttcacacctcttagatacatttttttgcatctgacaggactgctgataaaagcataagggggattaatgactttatgcactaatctctctgcaggcatcaaattctttcttcaggacagacacccagaattactggctcaaaaacaggaccttttaaaaaatactcttaccacaaattgccaaactgctttctggaaaggccataccaatctccattcccaccagcagtcatgagagtgcttgtcctatccaacactttgcccgcatggtagactttcatgtaacgatgacgacaaaaatacacttaagagaatatgggttggccaattatgacccatggaccaaatctagccctctgactttttatatggcccatgagcaaagtatgatttttacatttttaaatggctgaaaaaacatcaaaagtatttttgtgacatgttaaaagtgta

SEQ ID NO: 9515 - DNA, 735 bp, Macaca Fascicularis
  misc_feature (1)...(735): n = A,T,C or G
ccatnnnnnnnnnnnnnnnnnnnnnnnnggggtaaatcataaagccagcgaaaattccacnnnntgagcgagttccccaatctgaaggggaagagggtgacctcagcggcttttctcccaaaaatcggctgaaggctggttgtggatccttgttcctctcttgaccccatctggctgctgccccgtctcccacccctgtccccagggcttactggccctgcactctgccttagtcctggggccggcgacacagtgggctcctcacttgctgcagtgtcatagcaataaaatgtgattcttggggtccccccagggagctgcccatggctttatttatgaatctggttttcgggagtcaggggaggagatgactttgcttctgtgcacagccccgtcttccaggagccacgactcagaagaaaagggtgctcagacttttgttatacacatttgctttgtgtaaataaatgtttacaattttatatgaaagatggaataagcgctagagcttccaactgtatattttttacttttatagattttaaaactatggtcctttatatgtgtgtgttgggggctacgatgagtttcatggcaaacggttggcattgttaactttttattgtcatcaaaagtgcataaaagtcctattaatccccatattgttctactgcccttaactctggtatacaccaaaaagaaatctttactttccttgttttatcataaaaaaaa

SEQ ID NO: 9516 - DNA, 766 bp, Macaca Fascicularis
  misc_feature (1)...(766): n = A,T,C or G
ctgatgctagatgagagataaaagacagtannnnnnnnntcaaagataatatgaaaagcacattgcatctttnnntnttaaaaagaatgcgaagatttacattgctgccaaatcatttcaactgaaaagaacagtattgctttgtaatagagtctgtaataggatttcccatannnnnnnnnnnnnnnnnnnnnnnctcaggtgccttaaaaagtattccaagtttactccattacatgttggatgtctggttgccattgttgaactaaagcctttttttgattacctatagtgctttaaagtgtatttttaaaagggaggaaaaaataacaagaacaaaacacaggagaatgtattaaaagtatttttgttttgttttgtttttgtcaattaacagtatgtgccttgggggaggagggaaagattagcttnnnnnnnnnnnnnnncatgctcatgtcttactattttaaaacattttaatgatttttgaaaattaattaaagatgggaataagtgcaaaagaggattcttacaaattcattaatgtactttaaactatttcaaatgcataccacaaatgcaataatacaataccccttccaagtgcctttttaaattgtatagttgatgagtcaatgtaaatttgtgtttatttttatatgattgaatgagctctgtatgaaactgagatgttttctatagctatgtctataaacaacctgaagacttgtgaaaccaatgtttcnnnnaaaaaacaattttcaag

SEQ ID NO: 9517 - DNA, 652 bp, Macaca Fascicularis
  misc_feature (1)...(652): n = A,T,C or G
caaaannnnnnnnnnnnnnnnnnnnnnnnnnnnnnnnnnnnnnnnnnnnnnnnnnnnnnnnnnnnnnnnnnnnnnnnnnnnnnnnnnnnnnnnnnnnnnnnnnnnnnnnnnnnnnnnnnnnnnnnnnnnnnnnnnnnnnnnnnnnnnnnnnnnnnnnnnnnnnnnnncaaaaaaaaaattaatacacatgaaaaatcatgttttactatagctaaaaaatatatgaacaggatataagaattgaataaaaatcaaacatttgaaaattataggtgaaatgagtagggattaaaaataatatgattataattatagaatgcctaatggaacaattttatgaacatgccaaggatatgcctaaataattgagatttttgtaagtgatgagagaggaaaaaataatttagatactatcttttatattctaaaaaagtaggaagagaagctggtggttgttgacaactttttccctggttaaacaatacgttattcgctcctaagtcagtagttaaggaacttcgtatttaataaatttctggaaaatctcacccaaaaccagtttaaccgttgtagtatttaaattaaacataaaacttgtgtcactgttgttaacaaaaagccaaatcactaccaaaagaaaaaaatctgagtg

SEQ ID NO: 9518 - DNA, 736 bp, Macaca Fascicularis
  misc_feature (1)...(736): n = A,T,C or G
cccagaaaccacaacatgaaagaatggtgctacccagctcaagcctgggcctttgaatccggacacaaaaccctctagttggaatcgaacacgctgcactttacaaccactgcactacttgactcaggaatcggctccagaaggtgaagctagaggaacaagacctcatcaacccaacaccaaagacgccnnnggaccagcagcgcccgcagcacccaccccccaccagcgannnnnnnnnnnnnnnnnnnnnnnnnnnnnnnnnnnnnnnnnnnnnnnnnnnnnnnnnnncagagctgagnnnnnnnnnnnnnnngaccccgtccccaccacctccctcttcttcttcttcatccttctgtctctttgtttctgagctttcctgtctttcctttctctgagagattcaaagcctccccgactctgtttcccccgtcccttctgaatttaatttgcactaagtcatttgcactggttggagttgtggagacggccttgagtctcggtgcgagtgtgtgtgagtgtgagccaccttggcaagtgcccgcccaggacccggccgcccttcatctgggctgggtgactgggcgccggctgtgtgcccgaggcctcactctgccctcgcctagtctggaagctccaacatcacggggcaaccttcaagcattccattacgccccatctcgccctgtgcccctccccaccagggctcagcaggagccctggactcatcatc

SEQ ID NO: 9519 - DNA, 354 bp, Macaca Fascicularis
  misc_feature (1)...(354): n = A,T,C or G
aacttgatgggagctatgcagctatnnnnagacttcagcacacatgtcagcattgactgcagccctcataaaactgtcaagaagactggtaggagacagatgtgtcagctttaagtttttacttgcggtgagaggtggtgggaatcttatcccatagataacttcctaggatacttgcctgggaatggaggacacaggacatttgtaatttctttcttctctcttttatcctcccttcgtactcattatctgagttctagaattacatgataatctctgggcctgggtaaggcatggaggcagtggacagtataggagtannggaggaagagatatgaccatacagagctgcag

SEQ ID NO: 9520 - DNA, 985 bp, Macaca Fascicularis
  misc_feature (1)...(985): n = A,T,C or G
gcagnnnnnnnnaccgcgcgctcacggtgcccgagctcacccagcagatgttcgactccaagaacatgatggccgcctgcgacccgcgccacggccgctacctgacggtggctgccatcttccggggccgcatgtccatgaaggaggtggannnnnnnnnnnnnnncgtgcagaacaagaacagcagctacttcgtggagtggatcccnnnnnnnnnnnnnnnnnnnnnnnnnnnnnnnnnnnnnnnnnnnnnnnnnnnnnnnnnnnnnnnnnnnnnncnnnaacagcacggccatccaggannnnnnnnnnnnnnnnnnnnnnnnnnnnnnnnnnnnnnnnnnnnnnnnnnnnnnnnnnnnnnnnnnnacgggcgagggcatggacgagatggagttcaccgaggccgagagcaacatgaacgacctggtgtctgagtaccagcagtaccaggacgccacggccgacgaacagggggagttcgaggaggaggagggcgaggacgaggcgtaggtgccccgcgaggcggaggcgggttaggggaagcggaggaggaaagcgagggggtggggggcttcccgggacggtaccctggcagtcgaaggaaagaagcatggtctactttaggtgtgcgctgggtctctggtgctcttcactgttgcctgtcactttttttcccttttttgtaatattgacgacatcaaagtaacaccagagaaacatctgaattacagaaataatctcaaaaatcacataaacgtttgtgtcggaatggtgtcctctcttctttctctccctttttctttttattaacgattcaaatgtaacnnnnnnnnnnnnnnncattaaattcttcctttaacaaaaagcaaaggcgtaggtaaaagctcaaatgaatttattctttgggtatgataaaattgaaccaatcacanntaagatgagagatcaannnnngttctaaaanaccgaaatatctcaaatg

SEQ ID NO: 9521 - DNA, 755 bp, Macaca Fascicularis
  misc_feature (1)...(755): n = A,T,C or G
gcggcttgagctggnnngtgtcnnnccaccgcctgcaccacccacctccagagtgcagtgctgggcaagggcagttcaagaggacagaccaggcgctcagcaagacatcnnnnnnnnnnnnnnnnnnnnnnnnnnnnnnnnnnnnnnnnnnnnnnnnnnnnnnnnnnnnactgcagctccccgctcctgcaggtccagcgtcctcgcagggacaccagggcctgtgctccggagccttccttcagacccttcctccacgtgcccacttgggatgcagaatgcggcagagccggaaccccttccagcctgggctttggctgcagtaaagttacctgaggcctgtctcgtgggtcctggaagtggcagccatcagtcgcttttgctgaccccttggagcaagcgctgcccaggcagtggccgagacagctggcgctgggggccccaagctgcgccggcctccagcccacccacagctgttgctaaagtcaggcctccctccccagcnnnnnnnnnnnnnnnacggctaagaacctccttcttctggttttgaaaagcagttcaggttgtccaattctgtaatattcatctccattttttaaaaaggtttctctgacggccccacggcccgagccgcggtgagcatcgtgttgcatgagcctgggccccgggcttcccatgcgcctctgccacaggcgcttctgggcaccttcctctgcgtttcatttgcagtcgactgtacagaaggcactcaccac

SEQ ID NO: 9522 - DNA, 747 bp, Macaca Fascicularis
  misc_feature (1)...(747): n = A,T,C or G
cggcctcccacccctcgtttgcacgcacgcacgttcattctccgtcctcgcgcccgttttcctacactttcctcttctccccgaccggaggagccgctctttccgcgcggtgcattctggggaccgaggtcgagcccgccgctgccgccgtcgcctgagggaagcgagaagaggccgcgaccggggagaaaacgcggagtcgccactggagagaagtcgactccctagcagcagccgccgccagagaggcccgcccacccgttcgcccgtccccctgccccgttcacaatgcagcctgcttctgcaaagtggtacgatcgaagggactatgtcttcattgaattttgtgttgaagacagtaaggatgttaatgtaaattttgaaaaatccaaacttacattcagttgtctcggaggaagtgataattttaagcatttaaatgaaattgatctttttcactgtattgatccaaatgattccaagcataaaagaacggacagatcaattttatgctgtttacgaaaaggagaatctggccagtcatggccaaggttaacaaaagaaagggcaaagcttaattggcttagtgtcgacttcaataattggaaagactgggaagatgattcagatgaagacatgtctaattttgatcgtttttctgagatgnnnnnnnnnnnnnnnnnnnnngannnnnnnnnnnnnnnnnnagtagatggagcagatgatgatttnncagacagtgatgat

SEQ ID NO: 9523 - DNA, 747 bp, Macaca Fascicularis
  misc_feature (1)...(747): n = A,T,C or G
cagttccctgggagttttcctggcagcctgtgtgggagtggtctgcctggctgttgacccagcatgcttcataaatcaggatttggccctctgcttggggcatccaaccccttgaactcagacctattgcgcaaggggataagagttctgttctcttgccaccctggctgggcaaaagcctgtgccnnnnnnnnnnnnnnngcaaatgtgtttttcatcctgccatatgacacctatgannnnnnnnnnnnnnnnnnnnnnnnnnnngagtagccaggttgctaggacagtaaccctgccacacactgccnnnnnnnnnnnnnnnnttggcctccctcttaactaggtgacccatgtggaannnnnnnnnnnnnnnnnnnnnnnnnnnatgagaggggaagggtattggacacggcagtgtcctccttattgaaaannnnnnnnnnnnnnnnnnnnttttaaataagcttttagcaatcctaacactaaaagcaaaatggaagannnnnnnnnnnnnnnnnnnatacatttttcatctcatggctacaatggaattcttgaaaaggaaaaaaatcctatctacatataaaaacctgcatgaatgaatcactacatatgcttataatgaggaagagttatgggtcctgagtgtaatttttttatcttttcttaaaaagtttcnnnnnnnnnnnnnnnnnnnnnnnnnnnnnnnnnnnntccatttatattttaaatattatgtactgc

SEQ ID NO: 9524 - DNA, 713 bp, Macaca Fascicularis
  misc_feature (1)...(713): n = A,T,C or G
acagttcannnttggaacaactggtacaaaagcctagttgggcacactcagtaaatcctgttcacctggaggctcagggcatacacatcaatagacacacaagacctaaggcccagcccttgagcaatcccaagaaaaattctggttccaccgccagacctttcactgccatcggcctctgcaggaggagccagaccccctgcgccctgcagagcgccggccnnnnnnnnnnnnnnnnnnnnncgaaggagaggatggcagccccagcaggctctcaggcacaccccgacatccaaagcagactnnnnnnnnnnnnnnnnnnnnnnnnnnnnnnnnncgcggttgccatggcgccnnnnnnnnnnnnnnnnnntcctcatcccccgcggggcaggaggcctcgggcggacacctccctccatggcaatctggcaggagcgccccttcctctgctggccggtgcttccacccatttcccctccaagaggttannnnnnnnnnnnnnnnnngcacccnnnnnnnnnnnnnnnnnnnnnnnnncggtttgnnnnnnngccctttctaggccggtggtgaatgctcacttacattgaccgctgcgagggaattgttcggcgagtgctgcccatcttcaaatcaatgcctgctcagaacaacagaaagnnnnnnnnnnnnnnnnnnnnnnnnnnaaccattgttaggcttttggaagc

SEQ ID NO: 9525 - DNA, 748 bp, Macaca Fascicularis
  misc_feature (1)...(748): n = A,T,C or G
ctgtgagctggctgaggaggacttcctggcggtctccccctcagacccacgctaccgtgaggtccactatatcctgctggatccttcctgcagtggctcaggtatgccgagcagacagctggaggagcccggggcaggcacacctagcccggcgcgtctgcatgccctggcggggttccagcagcgagccctgtgccacgcgctcactttcccttccctgaagcggctcgtctactccacgtgctccctctgccaggaggagaatgaagacgtggtgcgagatgcgctgcagcagaaccctggtgccttcaggctagctcctgccctgcctgcctggccccaccgaggcctgagcacattccctggtgccaagcactgcctccgggcctcccctgagnnnnnnnnnnnnnnnggcttcttcatagccgtaattgaacgggtcnnnnnnnnnnnnnnnncctcacaggccaaagcatcagcaccagaatgcacacccagcccagccccaaagagaaagaagagacagcaaaaagctggnnnnnnnnnnnnnnngccgcnnnnnnnnnnnnnnnnnnnnnnnnnnnnnnnnnnnntggtaggaaaggaagacgcccgtcctctccgtggaggaccctgggccctnnnnnnnnnnnnnnnnnnnngttttgaaaggttattgggtcctttccttgggctgtgttcttgctggtgagaaaagtnnnntgcagaaataaaataaaatgcagaa

SEQ ID NO: 9526 - DNA, 726 bp, Macaca Fascicularis
  misc_feature (1)...(726): n = A,T,C or G
gaagttcaccccaaagaagatcanngcatctcaaattatgtttgccgcagtgggttcctggaggtatatcctttaacagttgtggttgnnnnnnnnnnnnnnngaaaaatggagatcccacaaggattgattagaagtgccaacacaactcctaaaatcagttatctttgctcacaaactaaaggaagttttgtgaatggggtgtttgaggtacataagaaaaatgtaaggggtgaattcacttattatgaaatacaagataatacagggaannnnnnnnnnnnnnnnnnnnnnnnnnnnnnnnnnnnnnnnnnnnnnnnnnnngataaactgaaactcacctgctttgaattggcaccgaaaagtggcaataannnnnnnnnnnnnnnnnnnnnnnnnnnnnnnnnnnnngtcatcaaggccaggaaaaacaagaaagacatattcaatcctgattcnnnnnnnnnnnnnnnnnnnnnnnnnnnnnnnnnnnnnnnnnnnnnnnctgatggtaatgtttatggagataggtctaagtgcctaaaaaatgtacatatacctggttgaaatnnnnnnnnnnnnnnnnnnnnnnnnnnnnnnnnnnnnnnnnnttaatcctatggaatggggtattgnnnnnnnnnnnnnnnnnnnttataggttttttttttaataaaatgtcatatgttgcatcttcaacttctataattgaaaaaaaaataaata

SEQ ID NO: 9527 - DNA, 742 bp, Macaca Fascicularis
  misc_feature (1)...(742): n = A,T,C or G
agcccagagagtgtgggacactgagggcggtggatgcatgcaggccnncaccacctnnnnnngntnnnaacaggttgccgcctcctctcgccagggtgatgaggtcccggctnctgnnnnctgtggcccatctgcccacaattcgggagaccacggaggagatgctgcttgggggtcctgggcaggagcccccgccnnnctcctagcctggatgactacgtgagatccatatctcgactggcacaacccacctctgtgctgaacaaggccacggcccagggccaacccaggccaccccacaggccagcccaggcctgccggaagggccgccctgctgtgtccctgcgggacatcaccgcacgtttcaggggccagcagcccacactgcccacggctgatgctgtggaccccctggactggctttttggggagtcccaggaaaagcagccaagccagagggacctgccgaggaggactggcccctctgctggcctctggggtccgcacagacagatggacagcagcaaggccaggggggcccccagagggaggctctgtgaagccaggatgcctggacactccctagcaagaccattgcgggatgggcagcagagctctgacctaagaagctggactttggggcagcctgcccaagccatggcctccccccgcagcccccgccccagcagtgtcctcagaactctctgctcgcacctcccggtgatccantgaactctgaccc

SEQ ID NO: 9528 - DNA, 717 bp, Macaca Fascicularis
  misc_feature (1)...(717): n = A,T,C or G
atcgcagccaggtctttattngnctgctttggatgctacacatcagcagttgacaccntnnnaggagctggatgatctgatagattctcagaagaacttagagacttcatcagccttccagtcctcatctcagaaattgactagccagaaggaacagaaaaacttagagnnnnnnnnnnnnnnnnngattccatctcaggagttagctagccagatagatcctcagaaagacatagagcctagaacaacgtatcagattgagaactttnnnnnnnnnnnnnnnnnnnnnnnnnnnnnnnnnnnnnnnnnnnnnnnnnnnnnnatcactaactctaatggagaagtggaccatagagtnnnnnnnnnagtgtcagatttctcagggtatacaaatatgatgtctgatgtaagtgagnnnnnnnnnnnnnnnnnnnnnacacccaccagccagagttacaggtaaggtnnnnnnnnnnnnnnnnnngggggtcttctaatgtaattttgttttattttgacaacactgccattggaatgtttctacacgatcctattaagaataatgnnnnnnnnnnnnnnnnnnnnnnnnnntatttagtttattttgttagtgtgattttagctctgtttgtattatgatttttaatcaaaatcaatagattaaaaatagtttgacattcaaagtgannnnnnnnnnnnnnnnnnnttacatgtata

SEQ ID NO: 9529 - DNA, 711 bp, Macaca Fascicularis
  misc_feature (1)...(711): n = A,T,C or G
cagtggttctggtagctgggacgctctgcnnngcttggtggagcgaaggggatgcaagtacccagcctggccagctggccccacccacggagcatccggtgcccgagggccccagccccctgctcaagtccgtcagcttcgtctgctgcggcgcaggtggcctgctgctgctcattggcctgctgtggtccttcaaggccagcacccgggggccaccccgatgggacctctatcacctctccagagacctgtactacctcactgtggagtcctcagagaaggagagctgcaggacccccaaagaggttgacatccccacttatgaggaagccatgagcttcccagtggccgaggggcccccaacaccacctgcataccctatggaggaagccctggagccaagtgcaccaaaggatgccctgctcagcacccagcccccctggcctccacccagctacgagagcatcagccttgctcttgatgccgtttctgtagagacgacactgagcaccacgtgctcctgctcaggcctggttcagactgcacggggaggaagctaaaggctcctagcgggcccnnnnnnnnnagacaaaaatgctgtatcttttccagagtctcatgcagtgcctgggccacagtaggcactcaacannnnnnnnnnnnnnnaggctgttctatttatctattgctgtatagcaaaccaccccaaat

SEQ ID NO: 9530 - DNA, 715 bp, Macaca Fascicularis
  misc_feature (1)...(715): n = A,T,C or G
ctcacatggaagaaactaaacnnanttcgctgctcnnngatagaaagacgtgggatcaactggagtattatttccaanntatgaaaatgacactctcctgtgtacactannngacagtgaaagtgacctgacagctcaggaacaaaatgaaaatgttcccatcatcancgaagatacatctaaactgtatgccttgaaacaaagcagtattttgaaccagttgctactacaagagtgcttgaaaaactagaagaaactaccacagaagcaatttttcatgtttttctcctatgagacgacatgaaagaataatttaaatttgaacatcagcgaaggattagtccttggtgaaataaacttttcaaaaaataaagtaggaaaatgcacttactaagaacatgaaaaaaaatgaagtaggaaaataagatgaagactttgtattttggctatcaagttttatcgtatgatcatcttaaatgagctcatttcatgaaactcataattatctatagaaggatatgccaattacaaagaaatgaaaagttcgtattatttataaacctgatttttctatcagtagtttcagtctcctccccaaggaccttcttcatccaacaagttacaaaatttcaatgtcctttctgtactatgttgggtgacctgtaaatgtaatgaccaaaagaaaagccacagaaaaagaagaaatggtcaaaga

SEQ ID NO: 9531 - DNA, 866 bp, Macaca Fascicularis
  misc_feature (1)...(866): n = A,T,C or G
tagctgctatgatggnnnggtgttttaaactcacttgctgtaactcttaaggctggttcattgtttctcatctttgagtacatgtgaccttttcccaaaccttgttggaaaccnnnagtannnnnnnnnnnnnnnnnnnnnnnnnnnnnnnnnnnnnnnnngttaatgaactgtaatttgggagtctgttcccttnnnnnnnnnnnnnnnnnnnnnnnnnnnnnnnnnnnnngagctcagcggggctctgccaggtctcctgagcatcatgagtaatgtgtctgctcagactctgctgacaccaaagtattttaaacaaataaaaggtcttggggaattctgtttggctacctggacgcgccagtctgcaccgtgtgtccctgcagctcactgtgtgcggcgcatgagnnnnnnnnnnnnnnnnnncatcacatttcattcgctgaaggaaaggcaagagttgaaacattttccataaaaaaaatgatctttgtgaagaannnnnnnnnnnnnnnnnnnnnnnnnnnnnnnnggctgaaactgaccactgagaaatgggcgtggnnnnnnnnnnnnnnnnnnnnnnnnnnnnnnnnnnnnnnnngagcttggctnnggaaggtccttttaccctgttctgttcatctaaatgcagacatatttaaatcatattcaactagttactaacgacctcaaggtgtattccctggcannnnnnnnnnnnnnnaaataggactgnnnnnnnnnnnnactttaaatgttaatgtttaatttaaaaattttattaagaggataaaagccctaatgtttattttcctactttctgataacaattttgtgtccactcgtggagatccttgccactg

SEQ ID NO: 9532 - DNA, 757 bp, Macaca Fascicularis
  misc_feature (1)...(757): n = A,T,C or G
tannnnnnnattactcatgtataccccatttccttccagtcagcccaacattttccaccagtctatctgtccccgtctctgaaatccatccttcttttccctctaaaccttttgagtatnnnnnnnnnnnnnnnnnnnctcggttccatctcatccattttgttttcaatggagactacagtgtcagccagctcagccttggcttttaactcagtattccagtccatagggtggtgaaaagttgctacaaggcnnnnnnnnnnnnnnnnnnnnnnnnnnnnnnnnnnngatggacttctgtgcttttagctggttgacaagtactactcccactctgaacaacatctggccttccctgcaaagagtgtactgtacttgaagcagagcactcgcacataaatggctgtgtatggaattgcttgccaaagaagtttctagcctttccctttcccctaactgcatcagggaagaattcttatctctagcttagtttccacatgaggtttttctgagaaaggggcctgggacaagaagtctgtcatgtagttaagtaggcaagaaatcctactaatccagttttgtttgaaagttgtttgtccatatgattttttaaaagtcaagtttaatttcaaaaaaccttttttttctgagattacttttggggtaatatttaaaatgagagacattttgtaaccctgtaaaatacatagggaatataacattccagtgtatacaaagaagnncaaattcttaatca

SEQ ID NO: 9533 - DNA, 328 bp, Macaca Fascicularis
gcagcatttttcacaggactgatatttacaaaggcaagccccagcaatcataaagtcatccctgtgtacgtaggagtgaatataaaaggacttcatctcctcaacatggaaagtaaggctttactcatcagtcttaagtatggtcgttttttgtggcaattgggagatgttgatacttgttttcagatccatagcatggaaaataaaatgagctttatagtacatacaaaacaggctggtctcgtggtaaaactgttaatgaagctaaatggacagttaatgccccctgaaagaaattcataaaagagaagtaattgttactcaagcc

SEQ ID NO: 9534 - DNA, 693 bp, Macaca Fascicularis
  misc_feature (1)...(693): n = A,T,C or G
agtccacctcannnnnnaaaccaaagtgtgggtagaaaccccaaatgtccnnnnnnnnnnnnnnnnngggtgacnnnnnnnnnnnnnnnnnnnnnnnnnnnnnnngaacctctgtgtnnnnnnnnnnnnnnncacggacaaaatgcccaaactggagccctcnnnnnnnnnnnnnnnnnnnnnnnnnnnnnnnnnnncttannnnnnnnnnnnnnnnnnnnnnnntctaaatgagacatcagtgacaacaaatctttgaaatggtgctatggatttaccattccttattatcaataatcatctaaatgactcactggaaatccaattaacaattttacaacataagatagaatggagacctgaataattatgtgtaatataaatggtttataactgctttcgtacctagctaggctgctattattactataatgagtaaatcataaagccttcatcactcccacattnnnnnnnnnnnnnnnnnnnnngaacaagtgtctagactccttgggcccgtgagttcccagagctcggctgggtctaggctgttctgtgcctccaaggactgtctggcgatgacttgtattggccnnnnnnnnnnnnnnnntatacggtgcccttctgatgctaagactccagaccttttgattttgcttcgcattnnntgattttataccaactgtgtggactaag

SEQ ID NO: 9535 - DNA, 752 bp, Macaca Fascicularis
  misc_feature (1)...(752): n = A,T,C or G
aactaacagagcaggtatttgcccattagatacctgtggggatccttactactgggtgaattattaggtataaaaagtaatcatcaaccaggcaaattactttgcttcctagctgatgtcatcccacattggtacaggtgttatacagctctggctggttctgcagggaagccgggtgggaccagtgtgtctgtcatgaaaccactaactgcattgctgactgaagagccctctgtcgtttattgaggaaggtcttcagttgagctctcagcctcaggaaggaagcacgtggaggagggagggaggaggcgccctcgctgggcatgctccgtggagggccaggannnnnnnnnnnnnnnnnnnnnnnnnnnnnnnnnnnnnnnnnnnnnnnnnnnnnnnnngcttttcattctgcacagtcccaggtcccaggtcccagctccnnnnnnnnnnnnnnnnnnnnnnnnngctttannngattgactccaaannnnnnnnnnnnnnnnnnnnnnnnntctcgtgggaaccaatatgtacatgtttgcaattatgttgtgagaatttaaatgtgttagacggaaaatgctattggcagggaataataaaaaaaaaaagaaaagaaaaaatcattctgtttcctgcagtaggaactgcccatgtagtcttaacagtcttttgtacaaatatctacaaagcagataatatccctatccagtgcttgcccttggaattgtctctaaatgcatcaagca

SEQ ID NO: 9536 - DNA, 673 bp, Macaca Fascicularis
  misc_feature (1)...(673): n = A,T,C or G
gagaccaaggctgtnntggaggagtttggtggtttcgagctggagcttcgaggagatgtagaaatgaagggcaaaggcaaggttcggacctactggctcctgggggagcgggggagtagcacccgaggctgacctgcctcctctcctatccctccacacctccctaccctgtgccagaagccacagaggtgccaggcctcagcctcgcccacagcagccccatcaccaaaggatggaagtcgtttgaatagctcaggtgtgctgaccccagtgaagacaccagataggacctctgagaggggactggcatggggggatctcagagcttacaggctgagccaagcccacggccatgcacagggacacacacacaggcacatgcacctgctctccacctggactcaggccgggctgggctgtggattcctgctcccctcccctccccatgctctcctccctcagccttgctaccctgtgacttattgggaggagaaatagtcacctgaaggggaacaagaaaagagactaggtgaagtgagggcaggggagcccacatctgggcctggcccacaatacctgattccccgaccccctccacgcagccatagacacagtgcacaggggagaagaggggtggcgcagaagggttgggggcctgtatgcctgctctacg

SEQ ID NO: 9537 - DNA, 757 bp, Macaca Fascicularis
  misc_feature (1)...(757): n = A,T,C or G
tgcacagattggacctgaaccaaaatcaagtcaaagaacatatgtttaaaccaacttcatggaagtggaagatcctgtgctcttgaacttattttaattcttatagtttgcacctatataaacaaagctcctactacattcttctcttcatcatccttttgtggtgatgggttgccttttctatgagcatttggaaggagtgatcaaataccaaaattaaactttctaaaacctacacatagcatgcttctaaattctattatataaagccccaagtgttttaccttctaaaacatgcttctgtataggtgcaaagttataagacatttagaagaaaacatccatcagaatcttctagagaatatggtcagagtcttaaacaggcccagtgctgagttctttgtccactnnnnnnnnnnnnnnnnnnnnnnntgggaaaggaannnnnnnnnnnnnnnnngacaaaggcttttccttatggaataacccaaagcctgggtgagggttgatatataatgtcccatgatttaatatatgtggtttgggggaaaggacaagaaaaaactataattccacatataagaaggtagttgcccgtttacaagttccagttatgtgtgtaaaacagaaaaattaagtaccaaacctattaggaaatttttttagaaagtggatttaacttaaattactgtgtacttgaggttggctttggatatggattttctaaaaagtgatgttttattgtttatcatctaat

SEQ ID NO: 9538 - DNA, 756 bp, Macaca Fascicularis
  misc_feature (1)...(756): n = A,T,C or G
tgtgctgtcagattcaggaacatgctttaacaagtaganctgtaccaaggcagaggccatgccatgccgtacttttaggaagtctgaggtgataaatatttcaaggtcagtgaagtcctatcattctccccttcctcatnnnnnnnnnnagaaatgtcnnnnnnnnnnnnnnnnnnnnnnnnnnnnnnnnnnnnnnnnnnnnncacagtccttaaagtgaaaagtgagttgttgctgacctccacaaaagaatacagaaaaaannnnnnnnnnnnnnnnagttgtacagccactctggccaattctatttcctgtccctctgtggttctgactggagaccccattgttgggggggggaggtcttacccatttaatatagaaatgatatgaataactaatgcagtgtacttggaaaatccaaataaggaagtgttaaggttggtgcatatctttatttctcaaattttcattgtcagaacaaatggatggagaatattatttagactaatccagatttgctttctatgaaaatcaaatgtctggattattttccttttctcatggcctaagaaataagtattgataaggaatgatttgaatgtaattttgtgaatgtgtgaaaaatataaagcagggatttagccttaataaaggtaaccttctgacatctgttgttaatccccctttgtactcttatcctgtatctgcactctgttattttgagatgtcatactgtacactgtatgtaaaaataaa

SEQ ID NO: 9539 - DNA, 161 bp, Macaca Fascicularis
tttttttttttttttttttttattctgaaatatcaaatttaaaaaaatcatacttatgaggtgtggtacaggaattcagatacaataaattgcatattaatcccgacgtcattgctcagtttggtaaagcaaggatgagaaacgcacgtcagaagcaaaaa

SEQ ID NO: 9540 - DNA, 709 bp, Macaca Fascicularis
  misc_feature (1)...(709): n = A,T,C or G
accagtgaagaggtggacagnnnngactnnngccaagtgggtggaggagactggtgtccccannnnnnnnnnnnnnnnnncgtaggacaggaacctggaatgcagctctccccggggccaccggtgtgtgtgtcttttgaaacaccacttcccacaatttaggcagaatccaatatcccagaaagactatatatatatatatatattttttttttaaagaagannnnnnnnnnnnnnnnnnnnnnttttctattatagccatatttatatatttatgcacttgtaaataatgtatatgttttataattctggagagacataaggaatcctacctgttgaggttggagagggaaaagaaagaagccgccacctaacaggagtcccccaggaaagcaccgcacaggctggcacgggacagactcctaacctggggcctctgcggtggcagacgaggctgctggaggcccacagataagctggcaagaggaaggatcccaggcacatggttcctcacaaccacgaggttgaaaagcaagggtcacggtatcacagcctggagacacccacacagatggctggatccggtgctactggaacattttcctacgatgcccatgagaacagaccaagatgtgtacagcactatgagcattaaaaaaccttccagaatcaataatccgtggcaacatatctctgaaaaacaaacact

SEQ ID NO: 9541 - DNA, 617 bp, Macaca Fascicularis
  misc_feature (1)...(617): n = A,T,C or G
actggccagaagccctacaaatgtaatgactgtgggaaannnnnnnnnnnnnnngcagcccttactcgtcatgaaagaatacacagtggagagaagccttttaaatgtaacgagtgtgggagagctttcagggataactcaactgtgttggaacatcagaaaatccatactggtgagaagccatatcagtgtaatgaatgtggaaaagcctttaggaagagctcaactcttattagtcaccaaagaatgcatactggagagaaaccctatcactgcagtaaatgtggaaaatctttcaggtatagctcatcctttgctggtcatcagaaaactcatagtggaaataaaccctatcagtgtcgtgactgtgggaaggcctttacaaagagctcaacccttactggacatcagagaattcatactggagaaaaaccctatcactgtaagaaatgtgggaaagcctttcggcacagctcaggccttgttgaacatcagagactccatactggggaaaaaccttataaatgtaatgaatgtgggaaagcttttccccaaagttcagcccttaaacaacataagaaaattcataacaaagaaagagccacgaaatgtagtta

SEQ ID NO: 9542 - DNA, 786 bp, Macaca Fascicularis
  misc_feature (1)...(786): n = A,T,C or G
cagcctgcaggagttgtcaaggccttttacctgaagaccaacgaccagatggtggtagtgtacttggcctcgctgatccgttccgtggtcgccctgcacaaccnnnnnnnnnnnnnnnnnnnnnnnnnnnnnnnnnnnnnnaaagaagggcaggagaaagaagacagcaaaaaggataggaaagaggacaaggagaaagataaggaaaagagtgatgtaaagaaagaggagaaaaaggagaaaaagtaaaacatgtattaaatagcttttttaatttgtaaattaaaatcttacaaactaaatcagtctggtgcnnnnnnnnnnnnnnnnnnnnnnnnnnnnnnnnnnnnnnnnnnccgccaagagccctctgcctcggccactcttgctgtggagctacatggaagcgtgtggagannnnnnnnnnnnntgaactgcagcttcagctgctgtgagctggggatatgnnnnnnnnctcaggcttcaggttgtgtgagaaaaatgaggagaaatcaacaaagcgttttggtactcttcattcgtttctctgtaaaaccagaagttgaattttcccnnnnnnnnnnnnnnnttggggtctgtttggaattttacacagtcgctaaatggaatgcatgaattnnnnnnnnnnnnnnnnnnnnnaacacgtagagtccagacccttctgaactctgccgacaataccacaccatgttttggacccatagctctggcattctcaggggttgtgatccagctccatatatgtttnacctcaaagacacaata

SEQ ID NO: 9543 - DNA, 758 bp, Macaca Fascicularis
agcatgcatgtgggtgatgctgggcattttgtgtatgagtgggatgcacatacacacatctacatccatatcatgcccacgtatctgtaacttgcttttcccgtgtaagaacgtttcttagaatctgttcaacgcatgtgtgtgagtgattgaaggcatttctaacccattttgaagatggctacgtaggactgtacggatattgtactgatgtcaatttgaccacatccattctttccatcttttgggctgttcttgtatattttactttccgtataacactgtgacattgagaattggtacctaaaacagtctatttgctttacattaaattcgtaggctaatttgtgtaccttcagagtgtgaaagttttctactgaggaaaatgggatagatcatgttttttcaggttttcttcttgtcttcacatgtgctttctaattcacttcataaataataataatgaactcctgcgatctctcagtatatgtaaagcaccagtcaaagaatatggtgtgggttctctatttaaatcttcacaacaccctgtgaggtaagagtgtcatctgtatgaaggatttgagacgctggttctccagagtctctgtcctcgcccaccagcatgggacttaccagtggccgagtgtggatcagacttttgggaccagtgcccgttttcccaatcactgcacaatgtagccttggacggcatgagctaccttggtgtctaggttgtttgttgttccccgtgaatggat

SEQ ID NO: 9544 - DNA, 690 bp, Macaca Fascicularis
aaggggaagtccaggccaaaactgtccttctcattaaaaacccaggattaaattgcaaactctgaactttttacaaagaaaaatggaaaaacttcgtatggtagcttcatgttgaagtggttttttgtttttgtttttgttttcgtttttttaatttgtaaaatctggaaatttagcttgttctaataggggctatgctctgcaattcccttttttttttttttttgttctctttcctttcactaagtcaaatccttatcagatcattgttgtcttctaaagagtgacatatttttcacctgtttggattctatattagtggtctgaggaagagcagatcacattgtaaaactatggatggtctgataaggcttttactgaccccactgacttcagagttatactatgctacatcataatgctggttttgctgactttttgtttttttatatatttataaaaaaagaaaaagttggtgattgcattgggaaattcccagggtattactggacctatgtggtgtattgttaaaccagtgtccttgtgatactgttgctcttgatgttcctgatacaggtaaggaaacagttggtcaactctgatacaaagtacatatacagttcagtattggtctctgttcagtttgtttttatttcattgacaaacttaaaccagcattccccattgtgt

SEQ ID NO: 9545 - DNA, 742 bp, Macaca Fascicularis
  misc_feature (1)...(742): n = A,T,C or G
gcatactgtactgccnnnnnnnnnnnnnnntgttaatatggagagcctatgagagtaatattcacctttgtttattctttagattgaccctgctacgggaatggttatgaatttggctgatctcaaaaaatatatggaggnnnnnnnnnnnnnnnnnnnnnntcataagaatctggatatggatgtgccatactttgcagatgtggtgaggtgggtggcactataccttgctttatatagattgtaaaacaagaattgatttgaatatttgattgttgtgtgatttctgaagttttaattaaatctttcaaaactagaatttctattctctataaatattaaacatgaaattttattgtttgcattttgaatttttgtttgtttgtttgttttcctatagcacgactgaaaatgtagctgtttatatctgggacaacctccagaaagttcttcctgtaggagttctttataaagtaaaagtatatgaaactgacaataatattgtagtttataaaggagaatagctattaggggttagcactgtacaaagcccagtttccttctgtgtttgaaaaagattttgatccccttggaatattaagaggtcaacacgtgattgttgtacctccacattgtgctctggagtccctatttattgaaatcattgtaagacctgttataaatataagtctatttaaaactaaacttgtaatatatnnnnnnnnnnnnntagagagtcttt

SEQ ID NO: 9546 - DNA, 668 bp, Macaca Fascicularis
  misc_feature (1)...(668): n = A,T,C or G
cactnnaacccccaagacnnnnnnagaannnnnagaatattaccagtcagaggcagaaggactcctggaatgccataaatgcaaatacttgtgcactgggagaggnagtgcttacccaactatggggcaaaagtcactaactggagagaaagattaacttgccttcatgattgggagtctgaaagcctccacccagaaggaagtaaaaagtgacacaagacagttctatagtgacgctgaagnnnnnnnnnnnnnnnnnnnnnnnnnnnttaataattggtacattnnnnnnnnnnnnnnnnnnnnnnnnnnnnnnnnnnctcttcattaataattattggatagacagagaaggtgagcctgtnnnnnnnnnnnnnnnnnnnnnnnnnnaggtctaaatgggaagannnnnnnnnnnnnnnnnnnagtagatctgccacacccaannnnnnnnnnnnnnnnnnnnnnnnnactcactacaagcacctgtaatagcacnnnnnnnnnnncacaccgctcctgctggctcttccgtacaccagtaaatgaactcaccaatnnnnnnnnnnnnnnnnnnnnnnnnnnnnnnnnnnnnnnnnnnnnnnnnnnnnnnnnattcaatgacttgactttatagtgcactgtagctttacgtcatacccactatt

SEQ ID NO: 9547 - DNA, 776 bp, Macaca Fascicularis
  misc_feature (1)...(776): n = A,T,C or G
acataaaagctccatnnnnaagctactcctagtcttaacatttgcagtccttgtgtcactgtcttctggtcctgatgtagtcccactgtttctagatgtctctttttagcattatttttggaaaaaaaaatatttttatnnnnnnnnnnnnnnnnnnnnntagtggatgtgatcttggaacttccatgattatccacttaaagatcaaagtattatatgctgtgtgctttttaggtgttagtactgtgaaagcaaaaacgctttctannnnnnnnnnnnnnnnnnnnnnnnnnnnnnnnnnnnnnnnnnnnnnnnnnnnnnnnnnnnnnnnnnnnnnnnnnnnnnnnnnnntagtatgtttgcatgtttgctgaaaatcctttnnnnnnnnnnnnnnnnnnnnggttctctgggttaggtagggactctgcagttnnnnnnnnnnnnnnnnnctcttactaagatgatgttccactgtccagcccagcatgagtagcaggtagggcacagctttactggctgtttgtatgctttggttcagtgcaatgtgtggtagattacttaccagaaaacatatnnnnnnnntctagaatgaagaaaaagcatagtagttcaattcccagtgtgtccctttgatttttttaatagtaaaaagaatctgtactgacttttcacttggccattctggttttaaaggacaagctatannnnnnnnnnnnnntctgtttttctgtactgatgtgtcacttattaaatacttttgtaccatgagtaaa

SEQ ID NO: 9548 - DNA, 403 bp, Macaca Fascicularis
agccaggggtggcacagggcactagatccctggagttcaggacccaacacaagcacaaacacgggcataagttggccttggccactgccacccatggccctccttttgtgctccatgctggcatcttcactcccctaccccttccccagccactgctgttcattcaaacccctgtccgtgtccctccaccattcctatcagcaggtggcccctgggcatcagaacagcctgccctgggcaccaggtggcggacacagagcatgtctggctttcctggtgggtccaggctcattctgtttcttgtttcccctcccccagggctcatttccctcctttttcctgtacacatccgtgtctacctcctctcaccctgccacagattcttcctatcacacagagatgc

SEQ ID NO: 9549 - DNA, 1035 bp, Macaca Fascicularis
  misc_feature (1)...(1035): n = A,T,C or G
ggcgcaaaggctgccctggatgggactcctggtatgatcgggtacggcatggccaagggtgctgttcnnnnnnnnnnnnnnngcctggctnnnnnnnnnnnnnnnnnnnnnnnnnnnnnnnnnnnnnnnnnnnnnnncccggttaccctggataccccgatgaacaggnnnnnnnnnnnnnnnnnnnnnnnnnnntcctggacacccttagaattcctagttgaaaccttccatgactggatcacagggaaaaaccgnnnnnnnnnnnnnnnnnnnnnnnnnnnnnnnnnnnnngaaggaaggacggaactcaccccagcatatttttaggcctcatctcagtgcctgtgaggggcctgccagaaaagtcactaacccgtttcagtgtggccttgtccagccttgtgttttctgtaacccctgtttgtggaacgagataatgagtcctatttttctctcacgtaacgtgcatttgctctcctaggacagtgtaatacgtttatgtgaannnnnnnnnngcaagactggtggcctgcaaatagcatccgtcaatctgtgttaactgcatagggagggctnnnnnnnnnnnnnnnnnnnnnggcgtcatgtnnnnnnnnnnnnnnnnnnnnnnatctgtccttgacagtggctgtcatcttgactactttgttgatttgttggtattggggacatttgaaaggctgagttatttttgaatgtcatgtttatgtcatagacgtagttttcgcagccttgaattaaactgccttaaaactccttttgtggtataagcaagactccatggaacctgtcctggtatccttttcctgtgcggttgccccgtgtcctctggcctagggttaagtgtgcaagatgactacttgtgagtattcagaatgttgttcctaatacatgcacttgttgtccgtcttctttaatcaaatcacgtcttatatacagcagtcagagatgagtacactagaatcatggattgctggaggtcttttaatctggtgttctcagaagggggtggat

SEQ ID NO: 9550 - DNA, 610 bp, Macaca Fascicularis
gggcctttctggggtcatgataatgttgacctttgattggggtgtattcagtttatggaaatgcattgatctgtacaccaatgataaatgtacttttctgcatgtatattttacttcagtaaagttaaaattgaaaaaacaaaccactctgccaaattttttagtgcggaagtggatacagtttagggcaagtgaatggctactgcagtctatgaagcaaggaaatgtctgagagtttggacttgagtcctggcaggggagatctaagtagatgggtgtaaggtattcctgcagaataaaaaatctaagacatagcagtagtactggttgtaacagccccaaactagaaactaccactagaaactagaactactggctatgtaacagcagcagagtacaacctcgagggaagagaagctaaagaagaggaattctgttggatcttgatacttgaaaagttcttctctgagcttgatcttaacaatatggaatatatttcctttctcatgaatcgaatcactctacatggtttacatcaaatagtatttatgtaatcaatgctgttcattggtgtttagcttttagaattgacttatgagtaaagccagaa

SEQ ID NO: 9551 - DNA, 154 bp, Macaca Fascicularis
aggaagaaaaaagcaagttggtcaattgaaattttattctttctcagacttcaatcggatgaaagtattccagtatttgaagccaaaattttatttggaaattgttgagaaaaaccaaggaagagaaaagcaagttgcatttataagcacgttg

SEQ ID NO: 9552 - DNA, 753 bp, Macaca Fascicularis
  misc_feature (1)...(753): n = A,T,C or G
atgctcattgggcctgnggatgtgatcaactttaagaagatttacaaaaccctcaagaaagatgaggacatcccgctattccctgtgcagacaaaatacatggacgtggtcaaggagcgaatccgtttagctcgacagattgagaaatctgagtatcggaactnnnnnnnnnnnnnnnnnaactcttggatngagcaggcagcagctgccctggagannnnnnnnnnnnnnnnnnnnnnnnnnnnnnnnnnnnnnnnnnngcaagaagagcgtcggagacaaaagcagatgaaggttctgaagaaggagctgcgccacctgctctcccagccgctgtttacggagagccagaaaaccaagtatcccactcagtctggcaagccgcccctgcttgtgtctgccccaagtaagagcgagtctgctttaagctgtctctccaagcagcagaagaagacaaagaagccaaaggagccgcagccggaacagccacagccaagtacaagtgcaaattaactgccctggtcaagtgtgttagtgactgcacattgctgtctgttctctggctatttgcaaaacctctcccacccttgtgtttcactccaccatcaaccccaggtaaaaatgtctccctctcttctactcacacccatagcggaagagacctcatgcagatttgcattgttttggagtaagaattctatgcagcagcttaatttttctgtattgcagtgtttataggcttcttgtgtgtca

SEQ ID NO: 9553 - DNA, 721 bp, Macaca Fascicularis
  misc_feature (1)...(721): n = A,T,C or G
cagcccgaccagcaggtggtcatcaactgttccatcgtccggggcgtcaagtataatcaggccacccccaacttccatcagtggcgcgacgcccgccaggtctggggcctcaacttcggcagcaaggaggatgcagcccagtttgctgccggcatggccagtgccctagaggcgttggaaggaggtgggccccctccacccccagcacctcccacctggtcggtcccgaacggtccctccccggaggaggtggagcagcagaaaaggtggggctgggccctgggtggggaatcttagccacggacagttccatacgttctggaacccttgactcctagagttcagaacccagccaacttgcagttttcagaatgttcaagaaatttctgacactgagagttgcagaacctcctggtccctgcagattcctggaaatcagaatatggtggttgaaagaatctcgtggctgggcgtggtgactcacccctgtaatcccagcactctgggaggctgaggcgggcagatcacctgaggtcagaagtttgnnnnnnnnnnnnnnnnnnnnnnnnnnnnnnnnnnnnnnnnnnnnnnnnnnnnnnnnnnnnnnnnnnnnnnnnnnnnnnnnnnnnnnnnnnnnnnnnnnnnnnnnnnnnnnnnnnnnnnnnnnnnnnnnnnnnnnnnnnnnnnnnnnnnnnnnnnnnnnnnnnnnnnnnnnnnnnnn

SEQ ID NO: 9554 - DNA, 777 bp, Macaca Fascicularis
tgctgaaaagtagtagtcagttctgcgcagcagcagatgcagcatttttttttaaagatgtagtgtgatctgtcaaattaatgtgcagatgataatactggctttgactttgttactccatgttcagctcatttaggtttgtgagattaattttaggactttttgttgtgtaagacaatgatgactattatttgtgcaacatttctctttgaaataaaaattggcatgtagccaatgtttcctgcccacacttttttctatagaccattaacataatttgacttggaactaatgatttctttttagggtttcttatttctttctttatagatcattccagttcaaaatatatatcagattaatacactggcaaagtatcattgtgttattgaactattttacatttgaagatgtttatatatcaggtatataatcactgggagaagtctgagaaagcgatattgcctttatttctaacatttaactgtagtttcttatagctcttattgtgtgtcttacattatacagtgtaggcagggccatcaaacctaccaactgtttccccttttgatgactctgataccttcattcatttttcaaatgaatttactgatcatgaggttggaaaatctggatttctcttgcttattctatgttaataatcataaatgtctcgattcaccagaagtcaccagaaggtgtgtctcggcgaagaaaacttacaaagccactttactgcattttgtgtttcagtgttaccatttgagatctgtatat

SEQ ID NO: 9555 - DNA, 820 bp, Macaca Fascicularis
  misc_feature (1)...(820): n = A,T,C or G
tgctgacgannnnntatgagcggcaggagggttggcagctggcagncnctcggttccagggaacactannnnnnnnnnnnnnggagacgccgaaagcccgggcccagaggcttgctcggccaccgctcctccaagagcttatgtacatcccacacaaattctgctgcttctcnnnnnnnnnnnnnnnncctggaagctccccagacccctctggggaggttaacaccaacgtggccttctgctctgtgctacgcagccgcctgggaagccaccctctnnnnnnnnnnnnnnnggtagactgcacagacccccagaccccatccatacagccccccacctgctatgtggagctcaagacctccaaggagatgcacagccctggccaatggaggagcttctacagacacaagctcttgaaatggtgggctcagtcattcctcccaggtgtcccgaatgttgttgctggcttccgtaacccagagggtttnnnnnnnnnnnnnnnnncctttcctaccatgaagatgtttgactatgtcaggaatgaccgtgacggctggaatccctctgtgtgcatgaacttctgtgccgccttccttagctttgcccnnnnnnnnnnnnnncaggatgaccccaggcttgttcacctcttctcttgggagcctggcggcccagtcaccgtgtctgtacaccgannnnnnnnnnnnnnnnnnnnnnnnntatggtacgtggaagccatgactcaggacttcccatcaccccccaagactccctcccccaaatagtgatgtttagaggggggcagtcatatctctgtgtgcag

SEQ ID NO: 9556 - DNA, 916 bp, Macaca Fascicularis
  misc_feature (1)...(916): n = A,T,C or G
accnncctgnnnnnnncggtgaaaccncgtctctactaaaaatacaacaaaataagctgggcgtggtggcaggcgcctgtaatcccagctgcttgggaggctgaggcaggagaatcgcttgaaccttggaggtggaggttgcagtgagcacagatcgccccactgcactccaacctgggtgacaaaacgagacttcgtctcaaaaaaaccatagaatttggatcctttggtcagattctcccgaattcctttgaggtgtccatggtcaactgcttcagctttgttttggcaaccccctgcccaaagtcgcacataggctgttcttcaccttgtttccaaggctgaggaacagaaagtagcctctgttttgaggaggtggaagttaagtatacatttattttttactgtgacttgttcaggaccacattttacaaaatgccttgtttcctttattgtttctggaaaggaaagttctattaatattgttttactttgaatatagaatagtttttttaattagggcttattttgaaaaattctgagtttaattcaaatgtatgccaataccttccaaagtaaggtaatattcagagacagttgttctgatcagatggcttagataaatttctggaatattcacattcgaagattccttattaatgaatgtctttgacttaaatctaaccaaaaactgcaacattattctttgtacattttcattatatagtgttaacaagcttagttgcaaacaaataaaatacttaagctatttgtttaccttgctttcttaatactgtgataatgtttattaattcacataattatgtgagagctgctataaccatttccccagttaaacattgcattgaagatttatggacctttaaaaaaaaagcccaacagtgatttttttttt

SEQ ID NO: 9557 - DNA, 689 bp, Macaca Fascicularis
tcaccaaggaggatgagctgaagaagaaagagaaggaggaggaggaggagcctctgcgggagcagggagcaaagtactcagcggagactgggaggctcatacccgcttccactcgggctgttggccgccgcagatcccaccagggccagcagagtcagtcttccagcagagatgaaggagtccaggccttcccccttcaggatcaggagctgctggtcctggagctcctgtgtcagatcctggaaacagactcgctaagcgcgatccagttctggctgctctacgctccgcccaaggaaaaagaccttgctctgggactcctgcagacagcagtggctcagctccttccccagcccctagtctccatccctacagaaaagctcctaaaccagctccaagatgtgcaccaacctcctcaagagaagcaagagccaccctgcagtcaatccccgaagaaaacgaagatgtcacctttttcaaaaagtgaaaaaccagagtacattggagaagctcaagtcctccggatgcattcaagccagaacacagaggagaagacatcgaagccgagggcagagagctgaggagccctaacaccttcccctgtcttgctcaagagcagccctaagggttcaggggtgtttctgtctccaccaccttcatagcagtacctgattccctaccatgaaaag

SEQ ID NO: 9558 - DNA, 723 bp, Macaca Fascicularis
  misc_feature (1)...(723): n = A,T,C or G
gccgcnnnnnnngctgtnnnnnnnnnnnctgcaggacnnnnnnnnnnngccnnngctgctgtgtgtccagctgctgcaggccccagnnnnnnnnnnntgnnnnnnnnnnnnnnnnccnnnnnnnnnnnnnnnnnnnncatctccagctgctgccgcccctcnngctgtnnntccagctgctgccgcccctgctgctgcctgcgtccagtnnnnnnnnnngtctcctgccacaccacttgctatcgcccaacctgtgtcatctccacctgcccccgccccttgtgctgcgcctcctcttgctgctgagccccctgccctgcttcacctcccccttcactgctggcccacagatgcagacccttctactatgctggctattagaacacatggagtggggttgatgtcattcaataggatggacctcatgtttccaatgagcccatcaccatttcactgactctgagaatattctggttcattttaagctccctcccttgctttctttttcnnnnnnnnnnnnnnncacatagaaattaatttgtaatccactaactaagaaattattccaatcctctaatttccttattttctttatcacnnnnnnnnnnnnnnnnnncttctcagtgaggtagacattatctgcaggatcagttttgtcactgatgttgcaccctcagacccaggggcccagttatattctgtgtttctccatagtgtgaattt

SEQ ID NO: 9559 - DNA, 779 bp, Macaca Fascicularis
  misc_feature (1)...(779): n = A,T,C or G
ctgatcacacacagacacacaatgtagtgctatagaaaagttgnttctagaaatactcatcntcagttnctctgctttggtcaatgtctaggnaacctcttcagaaataagaagctatttcagtaagtgtgatataaacctcctcaaacattttacttagaggcaaagattgtctaatttcaattgtgcaagacatgtgccttatgattatttttagtttaaaattcaacagattttttaataatgtaactttgttaataggtgcataaacagtaatgcannnnnnnnnnnnnnnngtagtggcatacacaatataaatcatatgtcttcacacgttgcctatannnnnnnnnnnnnnnnnctgagggttctgaaatcaatgtggtccctctcttgcccactaaacaaagatggttgtttggggtttgggattgacactggagacagatatttgcaaagtttgtctacggtttccctagctgtatttagcctctaactatattagtatacaaagaggtcttgtggttgagaccaggtgaatagtcactatgagtgtggagataagcacagcacannnnnnnnnnnnnnnnnnnnnnnnctaagaaatggtgtgaaaatgggttggaacccatcagtgatcgcatattcattgatgagggtttgcttgagagagaaaatggtggctcctttctgtgttatctcctagtttcttcaatgcttatgccttgttcttctcaagagtgttgtaactgtctggtcttcatatgtccctgtgctcc

SEQ ID NO: 9560 - DNA, 757 bp, Macaca Fascicularis
  misc_feature (1)...(757): n = A,T,C or G
ctgcgcaagttggggctgcgccctgggatacatcattcactctttggggacgtgagaaactcatcactgatgagtttgtgaagcagaagtacctggactatgccagagtccccaatagcaatccccctgaatatgagttcttctggggcctgcgctctnnnnatgagaccagnnnnnnnnnnnnnnnnnnnnnnnnnnnnnnnnnnnnnnnnnnnnnnnnnnnnnnnnnngcagctcagtactgagaggcgatggaagcggatttgaaggctnnnnnnnnnnnnnnngctgaagccaaggcgagggccgagattagagctggaatgggcatcgggcttggctcggagaatgctgccgggccctgcaactgggatgaagctgatattggaccctgggccaaagcccggatccaggcgggnnnnnnnnnnnnnnnnnnnnnnnnnnnnnnnnnnnnnnnnnnnnnnnnnnnnnnnnnnnnnnnnnnnnncaataacagtgccagtgccagtgccagcannnnnnnnnnnnnnnnnnnnngtgccagcctgaccgccactctcacatttgggctcttcgctggccttggtggagctggtgccagcaccagtggcagctctggtgcctgtggtttctcctacaagtgagatttcagatattgttaatcctgccagtctttctcttcaagccagggtgcatcctcagaaacctactcaacacagcactctaggnnnncactatcaatcaattgaagttgaca

SEQ ID NO: 9561 - DNA, 323 bp, Macaca Fascicularis
cagggtttcacctccccactcagggcacctgtaagggcgcgaccgccttcccttttccccactggaagggaattttgtcccggcaatcgcggagattacagcaaaagggctctggccccggccgggcttctggacaccggtgcccttggaggccgccagagaacgctccagctttggcccggggatcaagcgcgcgggctctgcctttgcagccgggtcgagggatagagaggctccgcggagcggcccgggccggcccaggatgcgggcgctgcaagatggcgatggccgtgcgcccggcgtccgcccgtgctccctgcttc

SEQ ID NO: 9562 - DNA, 566 bp, Macaca Fascicularis
  misc_feature (1)...(566): n = A,T,C or G
gctgtggccgccaccacctgggccggccctcgaggcctgctgcactccgcccggacccccggccccgccgcggctatccagtcagttcgctgctattctcatgggtcacatgagacagatgaggagtttgatgctcgctgggtaacatacttcaacaagccagatatagatgcctgggaattgcgtaaagggataaacacacttgttacctatgatctggttccagagcccaaaatcattgatgctgctttgcgggcatgcagacggttaaatgattttgctagtacagttcgtatcctagaggctgttaaggacaaagcaggacctcataaggaaatctacccctatgtcatccaggaacttagaccaactttaaatgaactgggaatctccactccagaggaactgggccttgacaaagtgtaaaccccatggatgggcttccccacggatttattgacactgctacttgagtgtgaacagttacctggaaatactgatgataacatattaccttatttgaacaagttttcctttattgagtacnnnagccatgtaatagtaac

SEQ ID NO: 9563 - DNA, 638 bp, Macaca Fascicularis
  misc_feature (1)...(638): n = A,T,C or G
ggtggtgccttctgcaccacnnnannnngaggccgaggctgccgctggcggcccccacttcttggacccggtctccctctccaccaagagccattcgcagcagcagcccctgctggccaccttgggttctgtgcctggtgcccccgagccctgtcctcaggatggcagccctgcctcatatccgcttcggcctcccttgtgcatttcaacaggtgccactgtcccctactttgcagagggctctgggggaccagtgcctaccaccagcaccttgattcttcctccagagtacagctcttggggctacccctatggtgagtcaagggccagggcttggcagggaggggacgccaggagccccatgcagaccctgctttctccctgcagaggccccaccgtcctatgagcagagctgcggcggcgtggaccccagcctgacccctgagagctgaccccgtgctgccttctccaggcaggcctggcctctgccctgggactggggcgcccagggcctcgtgccttctctctcggcctggcctgacccactcaggacctgcccagcctctgccagcacctctggtgtccaccctcttcaccctggggctggggtgggggtggcagggagctgggacctggag

SEQ ID NO: 9564 - DNA, 730 bp, Macaca Fascicularis
caggactacccctgcagttcttcacatttcggaaggtctgggcagcatccacattacagcagtaggatccaggcatccacaagagaagaccaagctttgtccaaagaagaagagatggagactgagtcagatgcagaggtagaatgtgacctgagcaatatggaaatcaccgaagagctccgccaatactttgcagagactgagaggcacagagaagaacgaccagctggatgcagagcgcctgaacagctacgtaaacgctgaccacgacctgtactgcaacacccgccggtcgatagaagccccaactgagaggcctggtgagcggcgccaggccgagatgaagcgtttgtacggggacagcgctgccaagatccaggccatggaagctgcggtgcagctgagctttgacaagcactgtgaccgaaagcaacccaagtactggccggtcatccccctgaagttctgagctcggggcactgggcacccagcctctccctcttccttttgggtgcatgctcttcatctctcctgtacatttcttagggaaaggggactttgtactggggcacaggcatgttcaccacagtcccagtgggcctgtcacggggtggatgtactatgccagccgcttggaggtctgcagcacatgttctgttgccaacatgataaattttctcctgacataaaaaaattttgtatatactatactggttttttatgttgttgg

SEQ ID NO: 9565 - DNA, 725 bp, Macaca Fascicularis
  misc_feature (1)...(725): n = A,T,C or G
tgagaatgaaannnnnnnnnnnnnnngaagaggaggaggagnnggaagagnnnnnngagaaagaaaaggaggagcatgaaaagaaannactggaggatggaagcctcagtaggccacagccagagatagagccagaagcagcagtgnnnnnnnnnnnnnnnnnnnnnnnnnncacacattttaaagaaacccaaacccatgaaaacatgtctcaacttagtgaggaagaacagaataaagattatcaagacagtagcgaaaccacttcattgtgcgagggaccctcagcatcaaagaatgaatatgagaaaagcagagatgaattgaagaaaaagaaagnnnnnnnnnnnnnnnnnnnnnnaccaacactttcttccaaatatcctgaagatgacccagactactgtgtgtgggtcccacctgaaggtcaaagtggagatggcagaacccatcttaatgacaagtatggctatnnnnnnnnnnnnnnnnnnnnnnnnnnnnnnnnnngaccatgtgacatggaatatttgggataatgtatcaaaatcnnnnnnnnnnnnnnnnnnngatgatcatttgtaagatctggtgactggcctttccttctgtgttcttggcttcccaaatttatctgcccatatgattctcatgcatttgatatttatgtttaaaagtgtttatatatatatgtaaaaagggaaccatatgttttgagaatttgtaaa

SEQ ID NO: 9566 - DNA, 687 bp, Macaca Fascicularis
gttctgtgtccatcccatggcaaaacgagatgatagaaacagaatgctttaaggagctgaacgtgtttggacctgatggtaccctctcgccagatctgaacagaaatcaccctccggaaccgccaaagaaagggctgctccagagaaaccccaagccccagcatcagaacaattccaagagttcgcccagctccaagaccaattttaaccaccacataaactcaaaccacgtcagctcgaactccaccggaagcagctagtttcggctctggaagtccacagtggaaccagcccagaccttctccttagaagcggaagtactggagcttctgctctggtggggctgccaggggagccccccaggagccggggaaggaggccgtccatcccgtcgacgtagaacctcgaggtttctcaaagaaatttccactcaggtctgttttccgaggcagccccggccggggtggattggatttgtctttggtgaacattgcaatagaaatccaattggatacgacaacttgcacgtattttaatagcgtcataactagaactgaattttgtctttatgatttttaaagaaaagttttgtaaatttctctactgtctcagtttacattttgtatatttgtatttaaagaaagtgagattgagggtgtatattttctgtgcagccactgtaaccca

SEQ ID NO: 9567 - DNA, 699 bp, Macaca Fascicularis
  misc_feature (1)...(699): n = A,T,C or G
atgtgagcacccagannnnnngccgcctggccggnntgaaacccggcaccgtgtacttcgtgcaagtgcgatgcaacccctttggcatctacggctccaagaaagccgggatctggagtgagtggagccaccccacagccgcctccaccccccgcagtgagcgctcgggcccgggcggcggggcgtgcgagccgcggggcggagagccgagctcggggccggtgcggcgcgagctcaagcagttcctgggctggctcaagaagcacgcgtactgctccaacctcagcttccgcctctacgaccagtggcgtgcctggatgcagaagtcgcacaaaacccgcaaccaggacgaggggatcctgccctcgggcagacggggcacggcgagaggtcctgccagataagctctaggggcgcaggccaccctccctgccacatggagacgcagaggccgaacccaaactggggccacctctgtaccctcacttcagggcacctgagccaccctcagcaggagctggggtggccactgagctccaacggccataacagctctgactcccacgtgaggccacctttgggtgcaccccagtgggggtgtgtgtgtgtgtgagggttggttgagttgcctagaacccctgccagggctgggggtgagaaggggagtcattactccccgctacctagggcccctccaag

SEQ ID NO: 9568 - DNA, 728 bp, Macaca Fascicularis
  misc_feature (1)...(728): n = A,T,C or G
gatgatgtgctgaaaagaatcaaagggagaaaagacattaagttcctaactgccttcagagacctgcnnntcgccatactggctttccctgtatccacatttgtannnnnnnnnnnnnnnnncctctttctctacaatcgagatctcatttaccccaaggtcctagatactgtcatcccagcatggctgaatcatgcaatggtgaaagaagaagagagtaaaaatatatttctaatgcattcttaaaatgcccattttggttctgttgtttaatacaacattcactgtctttgtaaattgcttgtaatctgtgtcagtagtgatctgagtcagtgttagttgctatcaaatagtgagccctaattcatcttcctttgtgttgtttnnnnnnnnnnnnnnnnnnnnnnnnnnnnatagagctgaaatgtctcaatctctacaaactgctcaccttacagaagaggaaactgaggtttgagtagtttattcaactttcccaagaccacagaactgattagtgatagaaatgggtctagaatatgatccaaagtcataaacctgtgttttctctaatactcatgtatttaatacatccattactcaaggcaagtccagtcccctagtcagaaaaaaataaacttcttccactgtaatctttgtataaacacatatccagcatctactatctgcatagttttcctttactctattcctaaactcactgtaat

SEQ ID NO: 9569 - DNA, 757 bp, Macaca Fascicularis
  misc_feature (1)...(757): n = A,T,C or G
ctgcactgaaccatttctaccacaacccttggcccaaggannngtacagggaagggagaagggtgagtgggcagggagcagacagggtctggctttgctcagagggcacgggctttcccacctctcacaagaagcaaggaagccgcctgtgagcagaagcagcatcccagtgcccctggcctccccatgtgttgattcaacccagttcctgcccctctctcggtgggtgtgctgtttcttgtaactacatagtgttggtttgatgtggaagtgtttatccacatacaaagtacaaaacaagccatgaacaagcttcttccccttaccccccatccacagtgtctgagcttggatgtcttttatagatttttaaattattttagtgattgttattttattaaaggggtctgggctcactgcctcgtgaagtttcaagtgttcagcagacctctctggtaacatatctggaatattgttgttttttaactgagttttcccatcagtgccaaaactcaactcaatctgaaagtagagtgactgagaggacagaagtgaatgggaactgtagctggaagcctcaggccatgggtcaaacctgggagggaaagagaccctactcatggcctagaaatgagagaagagagaggtatttacccagagggttttcctatggttggggatgcaaatattagaaaacagattgtattttgctgaagggagtggctgtcatgagcatgtcagttctaaaaggggtttt

SEQ ID NO: 9570 - DNA, 737 bp, Macaca Fascicularis
  misc_feature (1)...(737): n = A,T,C or G
gcggattattggagctacagactccagtggagagctcatgttnnngatgaaatggaaaannnctgatgaggctgacctggtccctgccaaggaagccaatgtcaagtgcccacaggttgtcatatccttctatgaggaaaggctgacgtggcattcctacccctcggaggatgatgacaaaaaagatgacaagaattannnnnnnnnnnnnnnnnnnnctgnnnnnnnnnnnnnnnnttcaagtgggaagggaaggagttctacttgtcttgacnnnnnnnnnntggcttgagaagatgtcctttgaagagccagtatagtttctgtgccctgcagcagcccaagtgctttnnnnnnnnnnnnnnnnnnnnnnnnnnnnnnnncatcccagtggaggggaaaggggataagtgtttcaaggcaaccttttctgcactttgctgagaaaagcaaagggccttctatgaaggacaaaacttgcagaattgggtgtgtgggagagcaaaaaaatactgtagatcttcaaagagcatctccacaacccacagccttcttcccaatagtgttaactctgcatttttacagcgtagcatgtgtgtagtctttggctattactggtgtattatttgggggagggatggggaggggagaaagggagatgggtagcnnnnnnnnnnnnnnnnnnnnnnnnnnnnnaggggaaatggtgaagcaatggaaaagaacagacaactaat

SEQ ID NO: 9571 - DNA, 704 bp, Macaca Fascicularis
  misc_feature (1)...(704): n = A,T,C or G
atccagtacnnnnnnnnnnnnnnnnnnnnnnnnnnnnnnnnnnnnnnnnnnnnattnnncagtcttacagaaatgtatgtatacttgggttgagttcaaaatgcttgaggatttctaatacagttcattagtttgtattgtatatgtgtttaagtataatttttatttatatgaatatcttatagtcttagaagtatgaaaaatannnnnnnnnnnnnnnnnnnnnnnnnnnnnnnnnnnnnnnnnnnnnnnnnnnnnnnnnnnnnnnnnnnnnnnnnnnnnnnnnnnnnnnnnnnnnnnnnnngtattacttatctgagataatgaataagatgtgatatttggcatgtgtaaaattagtnnnnnnnnnnnnnnnnnnnnnnnnnnnnnnnnnnnnnnnnnagctgtaggtaggaaagtaaacatcagaaccagcctagtccttgttatgattagtactttggatttgatgtttcctgtaaaacagatgcannnnnnnnnnnnnnnnnnnnnnnnnnnnnnnnnnnnnnnnnnnnnnnntctccttttgagctgatacgggttttctccccagaatccttttctggcatgtttattgtatgaaatactgaggctctccatttaaggatgaacacatatgagtcaagggattnnnnnnnnnnnnnnngggcttaggttttggatgttgtaactattgtatatgc

SEQ ID NO: 9572 - DNA, 373 bp, Macaca Fascicularis
caccccaccccactcctcccccaaaaccagagctacctgccagcctcgctgggcagggctggccatagccagaccccaagctggcccgctggtcccctctctggctttttgggtccctgggctctggacaagcactgggggaggtgcccccagagccacccacttcttgccccaaacccagtttccttgccccctgacgctgccgattcgggctgtggcctccacatatttatgcagtacagtctgcctgacgccagccctgcctctgggccctgggggctgggctgtagaagagttgttagggaagcagggagctgaggaggggcatctcccaacttctcccttttggaccctgctgaagctccctgcctta

SEQ ID NO: 9573 - DNA, 702 bp, Macaca Fascicularis
  misc_feature (1)...(702): n = A,T,C or G
caggaaatgatggcaaatttttgctgcttatgcannntacagatgtgctcaccggcctgtccatccgcctcgggccagccctgaaaatctacgagcaccacatcaaggtgcttcagcaaggccactttgaggatgatgaccccgatggcttcttaggctgagcgcccagcctcacccctgccccaacccattccggcccccatctcacccaagaccccccagagtccaggagctggacggggacaccctcagccctcataacagattccagggaggagggcaccctcttgtcctcatctctgccccttgtgtctctctctctctcttacacatctgcccctcagcacgtcggtgtggggagggaattgctccttaaaccccaggtggctgaccctccccacccagcccaagacattttaggaaaaaaaaaaatgaaatgtggggggcttctcatctccccaagatcctcttnnnnnnnnnnnnnnnnntcctgtataaatgtttggatctgcctgtttattttggtgggtggtctttcctccctcccctaccacccatgccccccttctcagtctgcccctggcttccagcccctaggggactagctgggttggggttcctcgggcctttcctctcctgcctcttttctttctgttgattgtcgctcgagctggctgtattgctttttaatattgcaccgaa

SEQ ID NO: 9574 - DNA, 687 bp, Macaca Fascicularis
  misc_feature (1)...(687): n = A,T,C or G
aatattacttcaatcgnnnnnnnnnnnnnnntnnnnnnnnnnnnnnnnnnnnnngtattatgtttctacaaagtctcctttatcccgtgtgtatgtgacatgtgcagcacatctcggttcagggcagccgccttccgaggactcaggggctggtggcagctgtgtgggacagagcagctgtggggatggggcagaggagcagcccacagagggccagagaccagtcataccgcagaaccctggaggggcttgaggaagggatggcaggagccgaggagcttccctgccctgtggggcaggctgctgggtgggtcagggccccaggaagggctgcacctccaggaagggaggtagaggagaggtggcagaggggagggtggggaaagcaggaggaggatcttgttggctaagggctgacgcctccccagggagaannnnnnnnnnnnnnnnnnnnnnnnnnnnnnnnnnnnnnnnnnnnnnnnnnnnnnnnnnnnnnnnccacaccccagccccaccttgcaggggatgaagtctgaagagtgtagatggggaacctggggtagtaggacgggctcagagctgggacaggagccctgtacnnnnnnnnnnnggacagtgtcctggaactggccctcagctnnnnnnnnnnnnnnnnnnnnnnnnnnnnnntgtgcctgcatcccgctg

SEQ ID NO: 9575 - DNA, 754 bp, Macaca Fascicularis
  misc_feature (1)...(754): n = A,T,C or G
gacacactgcagggggagctgcaggagcggatccagaggctgaggaggaccgccagagcctggacctcagctctggtgggtggccctgccctcgtcacctgccgcctccactgggcttccttgacccccaccacaggcccatacannnnnnnnnnnnnnnnnnnnnnnnnnnnnnnnnnnnnnnngacggccatcaaaaaggctagggcagctgtgtcccctcagaagagaaaatcggatggnnnnnnnnnnnnnnnnncagagccagggggaccctcagagcagctggcaccgcacccaggattcnnnnnnnnnnnnnnnnnnnnnnnnnncccacaggcccctcagggtctgcccagccaggctcctgtggtgctgctgggccctcccactccgctggcactggcctggactcctcctctgccctcctcgaggcctgcacagctgtggctgtggagccgacctggccaggcaaggctactgtctccatccctgagccgcctgccacctcccgctcctgaagatccgcctcttggggctcccctgacagagaagacagctgaagtcaaagccacatcctcttgctgaccttggatgcaggctctccggcctcagggccagggagccaggccccnnnnnnnnnnnnnnnnnnnnnnnnnnnnnnnnnnaggggggctgtccaccctggctggggctggaggcgagatgccaggccccccaggttttctcagggcagttcttggtgtctgcctct

SEQ ID NO: 9576 - DNA, 767 bp, Macaca Fascicularis
  misc_feature (1)...(767): n = A,T,C or G
gccagtgccccatcnnnnnnnnnnnnnnngaggccccagagggtgtccccatngacgccatcatctttggtggccgcagacccaaaggggtacnnnntgttnnnnnnnnnnnnnnctggcgtcatggggnnnnnnnnnnnnnnnnnnnnnnnnnngagtccactgctgcagcagaacacaaagggaagatcatcatgcacgacccatttgccatgcggcccttttttggctacaactttgggcactacctggaacactggctgagcatggaggggcgcaagggggcccagctgccccgtatcttccatgtcaactggttccggcgtgacgaggcagggcacttcctgtggccaggctttggggagaatgctcgggtgctagactggatctgccggcggttagagggggaggacagtgcccgagagacacccattgggctggtgccaaaggagggagccttggatctcagtggcctcggagctatagacaccactcagctgttctccctccccaaggatttttgggaacaggaggttcgtgacattcggagctacctaacagagcaggtcaaccaggatctgcccaaagaggtgttggctgagcttgacgccctggaaagacgtgtgcacaaaatgtgacctgaggctgtggtctagcaagaggacatagcaccctcatctgggaatagggaagtcaccttgcagaaaatactagcaatttgatattaattaacatcttctatgtgccatagaccttcccacaaagac

SEQ ID NO: 9577 - DNA, 709 bp, Macaca Fascicularis
  misc_feature (1)...(709): n = A,T,C or G
aatcagcatnnttannnnnnntaaagtnnngacttgtaatgaaatgttcaagtattacagcaatattcaaagaaccacagatgtgttaaccatttaagcagatcatctgccaaacaacattatattactaataaaacttaaccaacacttacaatccagtcatcaaagtaagtaaaaattagatgttacagctagctaactgtatccctagaaatgatgaataatttgtcatttggacagttaacatccaggtgttacaaattcagtgttaattctaaagatgaccatttctgccctttagaatggcttgtcccatcagcagatgaatgnnnnnnnnnnnnnnnnnnnncttaaagcacaaagagagggactaactgatgctgcatctagaaaacacctttaagttgcctttcctctttgtagttagtgtccaggcaggtgaagtgtggaaagtctaggggcttccattctggccgtgtgagcccagctcctaccaacttcagtaacttgagcagtctttgttgctggccagagactgcctggtcgccagctcaccatggtgccaggacactttgctgaggcactgtgctcggggttggactcggtgtcagtgggaaagggcagtgtggggactgtcatttttgtgatttaataacacagtgaaaatccaggaagaatgaattaagctctttctgggagttgtttattc

SEQ ID NO: 9578 - DNA, 745 bp, Macaca Fascicularis
  misc_feature (1)...(745): n = A,T,C or G
gaattgtagtgactnnnnnnnnnnnnnnnnnnnnnnnnnnnnnnaaatagaaaattggagaatctggttttgctttattattccctcaaattgaaggaataaaaatacaaccctttcattttattaaggatccaaagaatttaacattagaaagacatcagctcactgaagtaggtcttttagataaccctgaacttcgtgtggtccttgtctttggttataattgctgtaaggtgggagccagtaattatctgcagcaagtagtnnnnnnnnnnnnnnntatgaatatcatcttggctggaggccaggtggacaacnnnnnnnnnnnnnnnnnnnnnnnnnnnnnnnnnnnnnnnnnnnnnnnnnnnnnnnnnnnnnnnnnnnnnnnnnnnnaccgaatccagagtgccactgtgctcctcaacgaggacgtcagtgatgnnnnnnnnnnnnnnnnnnnnnnnnnnnnnnnnnnngcggccaacattccnnnnnnnnnnnnnnnnggcttcatgtttgcatgcgttggcaggggctttcagtattacagagccaaggggaatgttgaggctgatgcgttcaggaagttttttcctagtgttcccctattcggcttctttggaaatggagaaattgggtgtgatcggatagtcactgggaacttcatattgaggaaatgtaatgaggtaaaagatgatgatctgttnnnnnnnnnnnnaacaataatggcactcatacatctggg

SEQ ID NO: 9579 - DNA, 671 bp, Macaca Fascicularis
catacattgggcagatgttgattctgtgcatgcccaccttttattactaaacaaggttttgtttatatgattgtattagaaatgctcagacttccccagaaatgaaccataagttttggaactttctttcagctcaagaggttcagctatattgtacttgtgcagtgtaatcattgctatttctgcttggtttcctgaaaggaaaaaaaaaaaaaaaaggcgcagtggtgatgaccctcatgaatgagccttgcttctgcattcttcttagaaactgctgtgaaaaacaatttatgtttgcagggtttaaaaatcagtaaaaatgggaatgattgagctaaaacccactctatgagaaggaaaattactgaaaagcatgtgatatattgctacaaagatttttttccctaaatgattcggtaattgattatttaacatatagtgctatcaaatcaagctatccctggtactttggacttccatggcttgttatataaaattacatttttacatgtaaaaataaactaaacaaatctaatgataaagtataaaaataatgtcagatccatgttctaaaaaatgtttctaatgacatgacattacaagagtataaaaatggatattaaatgatggccttgcattaaaatatggaaagcagagcagtacatatt

SEQ ID NO: 9580 - DNA, 476 bp, Macaca Fascicularis
  misc_feature (1)...(476): n = A,T,C or G
tccaatnnnnnnnnnnnnnnnnnnnnnnnnnnnnttatttcacatggnnnnnnnnnnnnnnnnnnnnnnnnnnnnnnnnnnnnnnntnnnnnnnnnnnnnnnnnnnnnnnngttcatggcattgtacctatctgcaggtgttatttccaattttgtcagttacgtgggtaaagnnnnnnnnnnnnnnnacggaccatcactcgnnnnnnnnnnnnnnnnnnnnnnnnnnnnnnnnnnnnnnnnnnnnnnnnnnnnnnnnnnnnnnnnnnnnnnnnnnnnnnnnnnnnnnnnnnnnnnnnnagcagggaatgccctgaaagccattnnnnnnnnnnnnnnagcaggaatgatcctgggatggaaattttttgatcatgcagcacatcttgggggagctctttttggaatatggtatgttacttatggtcatgaactgatttggaagaacagggagcctctagtgaaaatctggcatg

SEQ ID NO: 9581 - DNA, 609 bp, Macaca Fascicularis
  misc_feature (1)...(609): n = A,T,C or G
gatgctgtcacattcttaaagcannnnnnnaatatatagataatannnnnccacacactttnnntagagacagcctgtctcttaaaaaaaaaaaaaattaatttggtagtgagagcttgtgtcactgccagtctgtggtatccctgaaattaagggataacataagcaggaattgggcctttctgacatcgtccttaagagacaggactttttgagtttttcctnnnnnnnnnnnnnnnnnnnnngtttaatgatttatctcctccactataatctctttaggatgatttttttaatcaaaaaccagggaatctcattactcctaagaaacgaaagattccttcaaagcctgttcaggcacatggtttcaacaaagcctgactttgacgttccttgtcctgaggagcactttccaggcacagttacagcttccccgctgtatttacaagccagaattgtgcaactcttctggatcatttaataaagtaacaagatcccaacaaaacccgannnnnnnnnnnnncaatagtcaggtcagaagatttcggccatgctggttnnctatgttgacaagacgggtttttattatatnaaattccaaagacacac

SEQ ID NO: 9582 - DNA, 728 bp, Macaca Fascicularis
  misc_feature (1)...(728): n = A,T,C or G
tggagnnnnacctaggtagagtnntggtgttnnnnnnnnnnnnnnnctctaagaaaatgccatagactgggttgctgacaaatattagaattctatttctcttggttctgaaggcttagaaagctnnnnnnnnnnnnnnnnnnnnnnctgtgtctggtgaggacccacctcttgtttcacaggtgaaaccttcttgctctttcctcacatggtggaaaagggcaagacagttccaggagacctcttttataaggatgccaattccannnnnnnnnnnnnnnnnnnnnnnnncttcccttctcaatggccctgccctgctattaccatcaccttgctgactagatttcagcctatggattctggaggcagacccaaaaattcagattaaactattctgcttctggttctctaaaatctacatccttctcatatacaaaatacatgcgtttctcccccataaccccaaataatcttaactcattttagcatcaactttaaagttgtagtccaaagtgtaatttaaatgttatctgagtcaaatatggataagactcaaggtacaacttatcctgagtccaactgttcttgctgtgaacctatgaaatcaaacatgttacgtgcttccaaaatacagtggttggagaggcataggataaacattcccattccagaaaggagaaacaggaaagaagaaaggagtaacaagtttcaagcaactccaaaatgaa

SEQ ID NO: 9583 - DNA, 481 bp, Macaca Fascicularis
gtgggaggagcagcctggggcagtgggagcgggagtcggggagggcactccggcaaaagagggtgtcacggtgcgttttcgggcaacagttcggttccgggtgagctacagacacgtgcaggggcatttggagcgtttaggactcacacgtcgaagcagtgcgccgccgacagcagccacctctctgccaccagcacggccccacagcggtgttcccggcgccgcagccacaggctcacctgccacggccactccccgcggcccgctgcgctgccgcccacaatcctgctgagcgccgccggcgccaggccgcagtctgtggggggagccaggcgcatgggcaggtggacccagggcgcctcctccaggaagccccccagggcgccgcccctccgcgaatccccctgggagcctcggatgcgagggcggacctgccccaggaaaactcggcaggaaaggatgctgggcctgctgcttggtc

SEQ ID NO: 9584 - DNA, 773 bp, Macaca Fascicularis
  misc_feature (1)...(773): n = A,T,C or G
agtgcagtgtgacaatcttagctcactgcagcctccacctccttgggttcaagtgattttgctgcctcagcctctcctgagtagctgggatttcaggagcacaccaccatgcccagctaacttttgtattgttggtagagatggggtttcaccatgttggccgggctggccctggactcctgnnnnnnnnngatccacgcatctcagcctcctaaagtgctgggattacaggcgtgagccaccatgtccagcctagaatagggatattcttttactgaaacattgatgcatacctttactttcccattcatattccaaattgtgtcagtttgacctgtgagccctgaaaatctgagacacgtctcagttaatttagaaagcttattttgctaaaattgaggacatgcacctgggacacacnnnnnnnnnnnnnnnnnnnnnnnnnnccaaggtagtcatagcagtttggttttatacattctagggagacatcaatcaacatacacaagatgaacattgattcagtctggaaaggcaggacaactcgaagcaaaggcaggaagactcaaagcagggaaggggcttctaggtcgtaggtagataaaagacaagtggtcgcatccttctgaatttctgattagcctctccaaaggaggcagtcagatatgcatttatctcagtgagcagagggtgactttgaatagaatgggaggcaggttgaccctaagcagttcccagcttgacttttccctttagcttnntgatgtgggggc

SEQ ID NO: 9585 - DNA, 239 bp, Macaca Fascicularis
cagcaacctcaacccagagagagtcacaccccatagcctctttattcttttcggcgtctacggcgacgtgcagcgcgtgaagatcctgttcaataagaaggagaacgccctggtgcagatggcggacggcaaccaggcccagctggccatgagccacctgaatgggcacaaactgcacgggaagcccatccgcatcacactgtcaaagcaccaaaacgtgcagctgccccgcgagggcc

SEQ ID NO: 9586 - DNA, 801 bp, Macaca Fascicularis
  misc_feature (1)...(801): n = A,T,C or G
gaaggcgagcggccccccgaaggggcccagcagagcctccagtgtcactactttcaccggggagcccaacacgtgcccgcgctgcggcaagaaggtgtacttcgctgagaaggtgacgtctctgggcaaggattggcaccggccctgcctgcgctgcgagcgctgcgggaagacactgacccccggcgggcacgcagagcacgatggccagccctactgccctatggaatcctcttcggacccaagggcgtgaacaccggcgcgnnnnnnnnnnnnnnctatgaccgggaccccgaaggcaaggtccagccctaggccacagcggctctcatgatgtgggctcacctgcgccccagaccctgcgggggccccagtgcttggctgtgctggaagagtgctcagccacccagtcctgcctgcaagcccagggcgagtattggaggaggggcagccacgggcannnnnnnnnnnnnnnncctgagtctgtggtgtgtctgccccctctggcgtcctctgggcgtcccatgaccccttctgtgtctgtgcctccgaatccccgtgtgaccctgtcccagcattttcccgccagccctgcgagtccctgcagcactgtctgttctccttccctctcctgctgcccacccacctgccagtgttatttatgctccctttgtgggtgatggccacgccctcaccgtgtccctggcagaggggttccctccgggatctcctgcctgctgcccacactgcctcacaagccctcgcccccctcacgtggctcacctgctgctgagccttgtg

SEQ ID NO: 9587 - DNA, 758 bp, Macaca Fascicularis
gtggttaatatgatttaggttggttttgatacgttttctttccaactgttatataagaaactactaatgtaaaatagtaggctgtatgttgggatgtgtatagctatgtcttcaagactaatactcagaatcaaattgtagattgtacgtatctgtgagcctatttgtttagccagttttctgtctactgccaagaaacaggattctctgcctcatgcaaatgcccttttgtgtttactttttgctcttgattttttaaaatgtgattgtgcccttgattgtcccaaagtgctgttgctataacagtgaacatttgtgaacagaggatgtttgtagttccaagtgcagtacccatatgaccttgatcatattttagctatttaaaaattaagttggaggattttggcagaagtcatgtgcatgattgctgtgatagattggttggcgtgtgctgcagggggcttgtccttttaactctcacacaggatggatgtaggcagtgtcccattcattgtgctgagagtgaaggttcatcactcctatatcgtggtagcaaatctcaacaagatagcttctgggatgttgagtgagcagttctccagcagaaatggtgtaggaagaaaaaattgaataattgaatttccttgtcttcacagtttgtattctacagagtacagtaatatattacattccatttgcacccttccttagggaagagctttgtggttatctaccttctgagtggaatgttacagaaa

SEQ ID NO: 9588 - DNA, 597 bp, Macaca Fascicularis
  misc_feature (1)...(597): n = A,T,C or G
ctcgtgatctgcccnnnnnnnnnnnnnnnnnnnnnnnnnnnnnnnnnnnnnnnnnnnnnnnnncgctattttcagttcttatgctgggaccactttgctttgtagttttttctgtctttccaaaatcctcactctgtaccccgttgtcatcccggttcaacttcccccaccgcatcttccctaattaccacctccaataaatatccattctaaattattctctacccaattattaaagtttttcacaagctcggtgggggaagatttaccctgagacaaacagtgaacagagtgaggattttggaaagacagaaaaaactacaaagcaaagtggtcccagcataagaactgaaaatagcgnnnnnnnnnnnnnnnnnnnnnnnnnnnnnnnnnnnnnnnnnnnnnnnnnnnnnnnnnnnnnnnnnnnnnnnnnnnnnnnnnnnnnnnnnnnnnnnnnnnnnnnnnnnnnnnnnnnnnnnnnnnnnnnnnnnnnnnnnnnnnnnnnnnnggcgccagctacttgggaggctgaggcaggagaatggcatgaacccgggaggcagagcttgcagtaagctgagattgcgtcactgcact

SEQ ID NO: 9589 - DNA, 740 bp, Macaca Fascicularis
  misc_feature (1)...(740): n = A,T,C or G
gacatttcagacatattaaagatgagaaacagaaggctactgtagtctgagtacatcatgtattccttagaaacaaatgtgcaaacatctcaaatccagacatgggtatacattttagactagagaaatagaaattctagaccttgtacattgctcagaggattaaaaaggatgggtatatgatggccatggaggagagaaggatagctgtgttttgtggtttagaagattgtctctttagagctttgagagccttcattgatggataaactaggaggccttgaacacacactggttactacatgttaatgtgacatactgnnnnnnnnnnnnnnnnnnnnagtaacatgcagatattagtttccagnnnnnnnnnnnnngtggccttgagcctaacacaactgagagtagcctccaagtccaggctgactcagttcagtttgtctgtttcagaggattaagtccttctctgtatacagttgagaatttctccctcacatagatgaaagacatttagtaagtatgtcacgtatgctttcagttaattaccaatccatttattcgttcaaaaacatgtatgaagtacctagcgtacctagccagctaaccgcctctggcccttgttgagcatttctgttnnnnnnnnnnnnnnnnnnnnnnnnnttgcagtagatcagcttatttaatcttcccaacaaccctgtaacgnnnncnnnntnattctccccattttacagatg

SEQ ID NO: 9590 - DNA, 780 bp, Macaca Fascicularis
  misc_feature (1)...(780): n = A,T,C or G
tgtttctgccttgtgacagagcttcatgaaggcaggaactacaatttagtcactgatggctctcagcatgaggcacagcacatggcataaaccaagtccttaaatgtgtctgactgatccagtaaacacacagggctgctcctctgggcgcccttctgcctgggcactgtcactgcacaggactctcggagactaagcaacctttgaggcactcaagggcagactcacatccttttgggtgccatgtggaatgtgccatggccctgactcagtctgatctctttccaccagaccaggcttgggggtggagcccaggtggcacctctgccgttgatctgggtcattaagatgcagcatctgcaaaggccaatgatactaatggtcccagcctaggaaataagctggcctgggggagtggagaacagggaagacaagaggcagtgtggccccagtgggcagaatggaaggcaatgggccacagnnnnnnnnnnnnnnnnnggttggacatgaggaggtgctccctgcagannnnnnnnnnnnnnnnnnnnnnnnnnnnnnnnnnnnnnnnnnnnnnnnnnnnnnnnnnnnnnnnnnnnnnnnattttaaaataggatgaatccaactgtcctgtccaatttaaccattcgcttgactggagtcagannnangannnnnnnnnnnnnnnnnnnnnntctgagccaaggactccaggctccctggaatcatgtggnnnnnnnnnnnnnnnnnnnnnnnnctggtttggctgtggtctggcatct

SEQ ID NO: 9591 - DNA, 740 bp, Macaca Fascicularis
  misc_feature (1)...(740): n = A,T,C or G
aaggcagagttccagaccagaaannnnnnnnnnnnnnnnnnnnnctataactagctggttgtgtttaaccactgnnnnnnnnnnnnnnnnnnnctgcatagagctttgacaaaannnnnnnnnnnnnnnacataacttcaacagatttgtctgtcatattctcaccagcacatctgaatgaggctttgtgttttccttgctctcttgcatgttccttttcaactcatggcccacagtgactctcagatatttatgccaaaattgcatacaattgttttctgaatcataacttgtctatttttctgcctatgtgtgctacttccagtttgtttctcatcaacattttgactctcagaagagcctccatttgcctctttctctctttaggtatctaagatctttgaacacttgggcctttacatttgatccaaccctatcaaataatgaaattttagaagttcagagaagtannnnnnnnnnnnnnnnnnnnngttgatgaagtcatattttataatacgataaaaatattatcattcagtatgttacataattccaattctagaagaagcaaatttcagtgacatgtcattgagtttttatttggtaaagctatacttgtgcagtgtacaaatcactttttaagaagatgctttgttctatcaaggtatatgaagttagtatacggccacaacagtcaagcctcaattcttgtaccttgtgtctttttattactgttaaat

SEQ ID NO: 9592 - DNA, 724 bp, Macaca Fascicularis
  misc_feature (1)...(724): n = A,T,C or G
cgcccagcgcgtgngagtnnngccgagtgcaggagggccgcgcgtggattaatccaaaagagggatgtaaagttgacgnnnnnnnnnnnnnnnnnnnnnnnnnaccagaggaaggtgagggacgtttggggaaatgttctgctcgagtggttttcaagaatcagaaacccagaccagcnnnnnnnnnnnnnnnnacacggctcatcgagaaaaagaaaagacaacaggaggattacctgctttacaagcaaatgaagcaactgaaaaaccccnnnnnnnnnnnnnnnntacctgataatcatggacatattgacccctatctgagacccatctgggatttggctttccttggaagctcttacgtgatgtgggagatgacaacacaggtttcacactactacttggcacagctcactagtgtgannnnnnnnnnnnnnnnnnnnnnnnnaattgattttgnnnnnnnnnnnnnnnnnnnnnnnnnnnnnnnnnnnnnnnnnnnnnnnnnnnnnnnnnnnnnnnnnnnnnnnnnnnnnnnnnnnnnnnnnnngaagtaccactgtcaagagctacagacaccagaagaagcctctggaactgannnnnnnnnnnnnnnnnnnnnnnnnnntagtaatttctaaaaagaaaaaatgatattttccaacttcttaaaaagtgacgatactagcataaatcatttttctggtaaaatagctaaggtata

SEQ ID NO: 9593 - DNA, 764 bp, Macaca Fascicularis
  misc_feature (1)...(764): n = A,T,C or G
agtgagtactgctgcgcnnnnncccagcaggagttaacaagaacaccttgacctcaggcaacagaatggaactgcctcatcacggaagaccctccggaatcaagaactccacgtccagcaggacaactcagagaggaagcggaaacaccttccagaccgactggatgggcctgcagccaagagtgagaaagcagcccccaggagtcagcactggttgcacagggacctgcgcgtgcggtttgtggacaagatgtacaaaggaggccaatattacaacaccaagatgataattgaagatgtcctaagcccagatacctgtgtatgtcggacagatgaaggccgagtcctggaaggcctgagggaagacatgctggaaaccctggttcccaaggcagagggtgaccgtgtgatggtcgtgctgggcccacaggctggaagggtgggacatttgctgagccgggacagagcacggagccgggctttggtgcaactgccaagagaagatcaggtggtggagcttcactaannnnnnnnnnnnnagtacatgggccctagtgacacagatgatgactgacccatgggactcctcccatcccccaggctggtaccagttctgtaccatatgagaaagttgccttcaagaaggtgggaagatcattgttccatcctctacttctggtgcagtcctgggacaaggacaagggaaagggatgggtgaaccagtagggaagctagaaacaaacccaaggttaccaaaattaggg

SEQ ID NO: 9594 - DNA, 702 bp, Macaca Fascicularis
  misc_feature (1)...(702): n = A,T,C or G
tgattaaaaataagcttttactnnntaaaaccacttggggtttcataaagcttgtggggtttttttgtggtttctttttccctttgtttagaaagccaaattctatgagtctgaaagcaaaccaatcacaatgatacaggcatttttgcgcactccctttttgccatctgtcaccttcccttgcagcttaaggagcccaataagttttggaaatgtttgcaaatcaaattaaatttaagtgggatcattagatatacacaacaccaagtggtacgtctgcagagataattcaaaattcctgattttgagagaacaaatgagtgtttgctgaggattaattaaatcagaatttcatatgagctccaccattcctgttactttcatttcattttggttaataattcttggatgcttagcaccagtcgtatcactgctcccagaaggcaaagatcctttaggacatgagactagtagaagctggctgagataaaataaaaccctgccacatggagtaagtatttatttaaactaatgttctcttaatttgaccattgcagatttgggtgactttttttaacctttgtacatatacgtaatttatatgattctaatgtactatatccatacttgaattggttttttcgtattttgcctactggcaaatattttgcctattttcagccattctaacctatttgagta

SEQ ID NO: 9595 - DNA, 784 bp, Macaca Fascicularis
  misc_feature (1)...(784): n = A,T,C or G
tccctacatgtactgaaacatgccnngaaggttcagcctgatgttattncnaaaacatctataatgttgggtttaggcgagaatgatgagcaagtatatgcaacaatnnnnnnnnnnnnnnnggcagatgtagactgcttgactttaggacaatatatgcagccaacaaggcgtcatcttaaggttgaagaatatattactcctgaaannnnnnnnnnnnnngagaaagtaggaaatgaacttggatttcattatactgcaagtggccctttggtgcgttcttcatataaagcaggtgaatttttcctgaaaaatctagtggctaaaagaaaaacaaaagccctctaaaacttcaagaccttcaagatcacagaaatttttaaaatttgattccagttaataacagaggtggnnnnnnnnnnnnnnnnnnnnnnnngatgtaccccacctctttgcttaaaacaaaaaaatgtcaatagccaggcatannnnnnnnnnnnnnnnnnnnnnnnnnnnnnnnnnnnnnnnnnnnnnnnnnnnnnnnnnnnnnnnnnnnnnnnnnnnnnnnnnnnnnnnnnnnnnnnnnnnnnnnnnnnnnnnnnnnnnnnnnnnnnnnnnnnnnnnnnnnnnnnnnnnnnnnnnnnnnnnnnnnnnnnnnnnnnnnnnnnnnnnnnnnnnnnnnnnnnnnnnnnnnnnnnnnnnnnnnnnnnnnnnnnnnnnnnnnnnnnnnnnnnnnnnnnntaacgagcaaaactccatctcaaataaataaataaaaagaaaa

SEQ ID NO: 9596 - DNA, 718 bp, Macaca Fascicularis
  misc_feature (1)...(718): n = A,T,C or G
ctgaaaaagtgttagatgaggaagnnnnngagagagagtttgacgaagattcagatgaaaaggaagaagaggaggatacatatgaaaaagtatttgatgatgagtctgatgagaaagaggatgaagaatatgcagatgaaaaggggcttgaagctgctggtaaaaaggaggaagaaggtgatgcagatgaaaagctgtttgaagagtcagatgaaaaggaagatgaagatgcagacggaaaggaagttgaagatgctgacgaaaagttgttcgaagatgatgattccaatgagaagttgtttgatgaggaggaagattccaatgagaagttgtttgatgattctgatgagagggggactttgggtggttttgggagtgttgaagaagggcccctatccactggcagcagctttattctcagtagcgatgatgatgatgatatttaatcccttaaacttgctttttagggagagtcttccatatacatttgcctgtgcttcagggtaattactagtagtgttacatgaacatgtgcatagtggtaggatgccatcagattaaagcattgaagtttttcattgttacccgtacctaatggttttaaatatatgttaattgattgtttagttaaaatgtcatagttacaatgcaagtaaactggatnnnnnnnnnnnnnnnnnatttgttaaatgcatgcagaataatatttttaaaagcg

SEQ ID NO: 9597 - DNA, 724 bp, Macaca Fascicularis
  misc_feature (1)...(724): n = A,T,C or G
tatatnnnnnnnnnnnnnnnnnngaccagaagtgtctatatacctgtcagatcaaggatggtggtgtgcagnnncagtttgaaattgttcctgaagatgacccnnnnnnnnnnnncgtcagctnnnnnnnnnnnnnnnnnnnnnnnnnnnnnnnnnnnnnnnnnnnnnnnnnnnnnnnnnaactaatgcctaacctgcttccagctggagctgacttttttgggttttctcatccagccatccaaaacttgatcnnnnnnngtccaggagctcgaaaatgcnnnnnnnnnnnnnnnnnnnnnnnnnnnnnnnnnnnnnnnnnnnnnnggcagctacctgaggggctgccagagaatgatgcagctatgagctttgaagcctttcagnnnnnnnnnnnnnnnnnnnnnnnnnntgatccccnnnnnnnnnnnnnnnnnnnnctcccannnnnnnnnnnnnnnnnnnnnnngtcttcttaccagcccacgtacctgacacatgaacccttgnnnnnnnnnnnnnnnnnnnnnnnnnngtctccatcacagggtagcccaattcagtcttcagagtgaacaagaagggatcagatgccacatcgttttcatcgtgattaatttaaactgaaattttgggtannnnnnnnnnnnnagcaattcagaagtaaagaagatattcacatatttcatcatggagggtcctgtagtgacggttttccctggga

SEQ ID NO: 9598 - DNA, 772 bp, Macaca Fascicularis
  misc_feature (1)...(772): n = A,T,C or G
atgaggatgagatggccagccatcnnnacagcannnncnacaaggaacacttcaagtacgtnnncaccaagctccntaagcannnnnnnnnnnnnnngcaggagtacgtcaccaacaagaccaagaagacagaggagctccgaaaaactgtagaggaccnnnnnnnnnncatccagcaaatctacagagaccnnnnnnnnnnnnnnnnnnnnnnnnnnnnnnnnnnnnnnnnnnnnnnnnnnnnnnnnnnnnnnnnnnnnnnnnnnnnnnnnnnnnnnnnnnnnnnnnnnnnnnnnnnnnnnnnnnnnnnnnccatggatcacaaccggaaccgcaggctcatgatggagcagtccaagaagtcctcgctcatggtggcccgcagtattctcaacaacaagctcatcagcaagaagctggagcgctacctgaagggcgagaaccctttcaccgacagccccgaggaggaggctgagggcggtgccctggacgagggggcacagggcgaagcggcaggggtctcggagggtgcagagggcgcgccggcgcagcctcccgtgcccccagagccagcccccggcgccgtgtcgccgccaccgccgccgcccccagaggaggaggaggagggcgccgtgcccttgctgggaggggcgctgcaacgccagatccgcggcatcccgggcctcgacgttgaggacgacgaggagggcggcgggggcgtcccgtgacccgagctcggggcgggcggggcccgcnnnccgaagctgaagcc

SEQ ID NO: 9599 - DNA, 686 bp, Macaca Fascicularis
  misc_feature (1)...(686): n = A,T,C or G
agcccgaagaggagccgccccggccccgcgcccccccgggagctccgggccctgggcctggttcgggagcccccggcagccaagaggaggaggaggagccgggactggtcgagggtgacccgggggacggcgccattgaggacccgnnnnnnnnnnnnnnnaaagctcgagtcagggagatgnnnnnnnnnnnngagaagctaaaggagctacagaacgaggtagagaagcagatgaatatgagtccacctccaggcaatgctggcccagtgatcatgtccattgaggagaagatggaggctgatgcccgttccatctatgttggcaatgtggactatggtgcaacagcagaagagctggaagctcactttcatggctgtggatcagtnnnnngtgttaccataatatgtgacaaatttagtggccatcccaaaaggaatttgagtatatagagttatcagacaaagagtcagtgaggacttccttgaccatagaagagtccatatttagaggaaaggcaaatcaaaggtgatcccaaaaagaaacaacagaacaggcatcagcacaacagaccggggttttccacgagcccgctaccgcgcccggaccaccaactacaacagttcccgctctcgattctacagtggttttaacagcaggccccggggtcgtgtctacaggggccg

SEQ ID NO: 9600 - DNA, 733 bp, Macaca Fascicularis
  misc_feature (1)...(733): n = A,T,C or G
gcctgattgccctctacatggcttcgcagcctaaaaacaaatgagttaggctgcagaggactggtttgttttttggcataaaccctttgaatttcctttttcattgttaaattaaaaatttttttttacttggatggcttaatatttttgcaagaaaaataggaagatatgaagatgatgttttggtttgtttatgaaatgcatatgacttgtcagagctcattcgacagttaaannnnnnnnnnnnnnnaatggtgctttgctctgtgtgctcctgatttccctggaggttctagatgnnnnnnnnnnnnnnnnttgttaacgtcagtctgtgctgaggacctcagggacttgaggtggcatttttgagcacggggtgcagaagactttctggatttggatgtggctgtggaaagaacacagaagccaaggtcatgtgcatgaaatgaggggtttgagttagtcgcctcggggattttttccatttcgcagtaaaatgttaaattaatgtagcctgcctctattcgttggacagttaatttcaaagggttatttgcctcatctcctatcgtcagtgaaatcttatgtgtaactgtgtgtatttattccatcatgggaacagagaannnnnnnnnnnnnnnncactttagactggtgtctgttttgttaatgcagctgtgccacaaattctcctttatcttttaaaaatgttatagctttaaattatgattta

SEQ ID NO: 9601 - DNA, 739 bp, Macaca Fascicularis
  misc_feature (1)...(739): n = A,T,C or G
tggtacnngtaggcctcattnntnnnnnnnannncagccagcaggcccagcaacttcgcatacagaaacctttggaggaagtagtggggttgccaggaaaacaggagggaaataaggcagttgggagtcttgtcttgaagccctgatcccctgaactattcctcagtgaagccaggtctgaacattagagaaaatcatgctctggtatnnnnnnnnnnnnnnnnnnnnaaaggtcctccagggggcctcagtctgacactgtcttctctcaccgtgctcaattttttctgaacccagagctctgagggccacatgtgaagaaagttccagacttggccagaactccaactgtgtggaatctgagggcctggccttctagagcaggttctagaaggtggatgtgttctatggtataannnnnnnnnnnnnnnnnnnnnnnnnnnnnnnnnnnnnnnnnnnnnnnnnnnnnnnnnnnnnnnnnnnnnnnnnnnnnnnnnnnnnnnnnnngnnnnnnnnnnnnnnnnnnnncatgaaactgtgaattgccataacttcaagggaaatgaaaaatcaaaggaattggcccaatggcgaggagaggaaaggccaagggaagagaaatgcctgcgttagtctggagaagttggactagtgaggtgatggatgtcatcaatnncaggaatgctnnnnnncagannnnnnnngctactactnnnnnnnnnnnnnnnataaaaagaaa

SEQ ID NO: 9602 - DNA, 691 bp, Macaca Fascicularis
  misc_feature (1)...(691): n = A,T,C or G
gttgatttccatagcccagtcccaagcctggcaccaagcccgaggggcctattggagnnnnnnnnnnnnnnnnntannnnnnnnnnnnnnnnnnnnnnnnnnnnnnnnnnnnnnncaagagcccatggatggaggctgggggagactgagtctggctgccatgcacttctcccctacaatggttctctggacaagcctttgtccatcctggtccccagctgagtgcccagccttgagctgggtgcacggtgtgatgccaggaggtaagccaggcccgccctgccgggccctaccttgctggcttnnnnnnnnnnnnnnnnnnnnnnnnnnnnnnnnnnnnnnnnnngctggtttggaccttgtgtgagggaccaagcatgtggtccaggctgtaagctctgcagtgattggagagggatggggagggatgggaaggcagcctccaagaagaggtccctgtggcggagttacctggggatcctggccggcctgccttcctggctgcagcccaggcccaggctagcgggagtggacatgggaaggagcagggcctgctgctcccctggcactgctcccgaagatatctgactcatctgccagctccatcctgcatgcctggcgagctggggcccagggcagcatgaagtagagccctgcgttctgtgcaaacttaccagnnngtttgcaaacc

SEQ ID NO: 9603 - DNA, 988 bp, Macaca Fascicularis
  misc_feature (1)...(988): n = A,T,C or G
tagcaaaaatgtgtgttgctgtcagaatattctttttatattccatggaaaaataaaggaaattcagattgtttaaatgcctaaaagttttgagataagttttgtttcaattaggaaaggaaatagattttaggtggcataatggcttaactggactgaattcaaatactctttcaatttcatctcaatagcgatttttgtataagaatcttgtccaagttgttcattgatttagcaagtgttctgcttcctacatctttctttttaagaaattcctagtgtcttttttggcctttgaggttttggtaactgtagacctgtttcataagctttgtaattcagaagtccttgtatttagtaagtgcttgttttacataactgataattttaaaatgttttatttgtgtgctgttagtattgattcaaatgtcagcagctttaagcctaatatttatgactttcatattaggaatttaaagacaaaaatacataaaggagttatgctgacataattctaaggagttttgttgtattttagaataaaattataaagtaaaattattctctgtactgcttttttctccagtttttagagaccctaacctttgaaatgnnnnnnnnnnnnnnnnttttttccctagaaagattacctcagttagagaagtatttcccagctgactagtgtttgtgagccacagacactgtcttcagaattgattctctcataatgtcttagtatagaaatgtttatttattatgatacatgcaaatgattgtcttgagttaaatggtcgtgtctgtgctattaattgannnnnnnnnngtgattatcttttgaagtnnnnnnnnnnnnnnnnattcacccacccttgggtcatttagtccctgtgattggtgacagaaggtgtagctactgaaataaatgacctattctctctcttccatctctcgcctttaattggtgtttttatttgtgtaggatataagg

SEQ ID NO: 9604 - DNA, 755 bp, Macaca Fascicularis
  misc_feature (1)...(755): n = A,T,C or G
cactttggggccatnnnnnnnnnnnnnnnnnnnnnnnnnagtgagcgggacttcgtggctgagttcctgttctgggcttcgctatgcatgacccatcnnnnnnnnnnnnnnnaggacctcatcctctactgcaccaaggaattcagcttcgtgcagctctcggatgcctacagcacgggaagcagcctgatgccccagaagaaaaaccccgacagtttggagctgatccggagcaaggctgggcgtgtgtttgggcggtgtgccgggcnnnnnnnnaccctcaagggacttcccagcacctacaacaaagacttacaggaagacaaggaagctgtgtttgaagtgtcagacactatgnnnnnnnnnnnnnnnnnnnnnnnnnnnnnnnnnnnnnnnnnnnnnnnnnnnngagagaacatgggacaggctctcnnnnnnnnnnnnnnnnnnnnnnnnnnngcctattacctggtccgcaaagggnnnnnnnnnnnnnnnnnnnnnnnnnnnnnnnnnnnnnnnnnnnnnatggccgagaccaagggggtcgccctcaacgagctgtcactgcaggagctgcagaccatcagccccctgttctcgggcgacgtgagctgcgtgtnnnnnnnnnnnnnnnncgtggagcagtatggtgccttgggtggcactgcacgctccagtgttgannnnnnnnnnnnnnnnnnncgggcactactgcagacacagcaggcctagnnctcctgcacctgccccct

SEQ ID NO: 9605 - DNA, 772 bp, Macaca Fascicularis
  misc_feature (1)...(772): n = A,T,C or G
aggcctnctggacagatggctggccgagtgggagcagaccctagggagtttgcaccttagctgggccggagagtnnntgctggcaaaacagtcacccaggtccagagnnnnnnnnnnnnnnnnnnnnnnnnnnnnnnnnnnaccttctggttggccctggctggcttcccagaggcgttcgcctctagtttctcagggatcgagcaagagcctggccagggaacaggaagaggagccgctctcctatctgcgcccacccaggccctcacccagactttacaactgagggggccgagtgcagctgcagccaggtccgcgtccctcattctttccaccttctgcacgttctttgtgaaactggaaggatcccaggcttcagccagaacacggtggaagagaactttcctaggaaaacggttcatgtgtcacttttcaggatgtgaaaacgctgggacccatagaccctccattgcttggtgctggggctgtgtggcctcactgggcactgaatcgggggccaggggggccccgactgccctgcactcctgcctcccagcccacagccaggcgctttcatcacagctcaacctggttccctccaaacctcccagccactcgggcttgcagctctcttgagcctcggatccggtggggtgaaagcagccagctcctcatctcggtgacttgcaggacnnnnnnnnnnnnnnnnnnnnnnnnnnnnnnnnnnnnncaaannnatacggtaatgacctctaaaacggttagtacataa

SEQ ID NO: 9606 - DNA, 683 bp, Macaca Fascicularis
  misc_feature (1)...(683): n = A,T,C or G
agaggaagaggagaagagaagagaaagagcccannnatnnnantnntgacnnnnnnnnnnnnnnnnnnnnnnnnnnnnnnnnnccgccgtctaacattaaagttcatggcagatgactgctctctttcctttcccctgttttggattacatataaatggaggagtttctgcctatacaaactgtttaatattgaaaatgtttttctccctccagactatgaagaaatcgggagtgcactttttgactgcagattgtttgaagacacatttgtaaattttcaagcagcaatagagaaaaaaattcatgcatctcaacaaaggcggcagcagttgaaggaagagattgagctacttcaggacttannnnnnnnnnnnnnntcttttcaagaaaatagagatcttatgtcaagttctacatcagtatcgtccctgtcttattagggattaccatttcctaagccaggagtcaggctaaattgcaattgggctcaaaaccagagaccaggctgtgaaatccacacatctttagaactagtcatttcctcttggccccggcagctcttccatgttcttgctagttgatattttgatcattctttgcacactcttacttgtgttttttgttcactgtcacattcccagcacctaatatgctcagtaaatgtttgtagaataagtgcata

SEQ ID NO: 9607 - DNA, 755 bp, Macaca Fascicularis
  misc_feature (1)...(755): n = A,T,C or G
tgaagcggcagcaggagccgctgggtgaagactgcnnnncagagctgcgggagatcattgatgagtgccgggcccatgatccctctgtgcggccctctgtggatgaaatcttaaagaaactctccacctttactaagtagtgtatcgaaatctaaaccaaggattccctggacaagaagctggcagaggcacaaattggacatctctctctctcatatcctttgttattgagttatttatgggtgcaaggagtggcagcatttatctgttacaaatagaaaataattccagtcatacaggacacatcccacttcaaatgatatttccaaaaacatatctctgacagtaactttgatagatggtttgtcaaatgtatctttctgggtgtccacacctcttggcaatgtaatttgcagctcctcccatccacaaatgaagtctctttccccaccatttcaatctgggctggcattgggacttgatttgatcaatagaatgtggaagaagtgactgtgtgccagttccaagcctaggtttcaagaggccttttaaatgtctgttgcaaccttacccagccatgaacatgttgagtgagcatgctgggaatgagagaccacatgaagcagaaacatgctttcctagctgaagtcatactaaaccaaccaacatggcagctaacacatgaatgaggacaatcaagaccagaagaaccactcaagcagagcccagtccaaattgcccattcacacaatcag

SEQ ID NO: 9608 - DNA, 743 bp, Macaca Fascicularis
  misc_feature (1)...(743): n = A,T,C or G
acgaggaggcgnnngagcggctgtgcccactggtggagcacctgccccgggtgctgcaggagnctgagagannnntgnnnnagggcggctctgcactccttcaaggctgcccgggccctgctgggctgtgccaaggcagagtctggtccagccagcctgaccatctgtgagaaggccagtgggtacctgcaggacagcctggctaccacaccagccagcagctccattgataaggccgtgcagctgttcctgtgtgacctgctccttgtggtacgcaccagcctgtggcggcagcagcagcccccggccccggccccagcagcccagggcaccagcagcgggcctcaggcttctgcccttgagctgcgtggcttccaacgggacctgagcagcttgaggcggctggcacagagcttccggcctgccatgcggagggtgtttctacatgaggccacggcccggctgatggcgggggccagccccacacggacacaccaactcctcgaccgcagtctcaggcggcgggcaggccccggtggcaaaggagagggaagagatgggtacatttccctgcgctgacggaagccaacttggctttcccggactgcaagcggggctctagccccagaggcctctctctccctcgtgggaagacgtgtacatagtgtaggtcagcgtgctcagcctcctgacctgaggctcccgtgctactttgccttttgcaaactttattttcatagatt

SEQ ID NO: 9609 - DNA, 755 bp, Macaca Fascicularis
  misc_feature (1)...(755): n = A,T,C or G
aggcagacgccataaagctgacgccaatgcctcagcaaccaagtccagaggaagaccaggcagtgggaggagggagaggaagcagcgggggaaggaaagagtgaagaagtggaagaagatttagcctagaagtcagccttcgactgcggcgctgtccctgtgtgccttcctttcccacctgttggtattgccctgctctcacaagtggggggctgggctcccccttaaagcagtactgggtggtgggtggggagcatcgggccctgactcccacccctacaaatcactagcccccactgactcactgggcactgagtcctgagccaccccttggagggagggaaggggcagggcttgtcccggagctggctgcccccttgtctcagccgtcctgagcccaccccaaggccgaggccaccttagtcctggccctggatgttgcctgggattcagcttctcacaggctccccagcaatcatttttgtttgtaatcttgcagaccctcaaccagacttgcatggccatggcagggcctcaggaagaccttcgggagcggggaagggtttctcctccatgatcgaccctcctcgtccacctacaaatcagggaagtctgtccannnnnnnnnnnnnnnnccaggcagttccctgaccatctggacacattgccacgacaggagcctcnnnagtgtgtgggaggggacgggcgggacgagcttggctgttctgctnnnnnnnaatgctttctgttatccg

SEQ ID NO: 9610 - DNA, 548 bp, Macaca Fascicularis
tttatttgttttttttgttttgttttggtttttttttttggcttgactcaggatttaaaaactggaacggtgaaggtgacagcagtcggttggagcgagcatcccccaaagttctacaatgtggccgaggactttgattgtacattgttcttttttttaatagtcattccaaatatgagatgcattgttacaggaagtcccttgccctcctaaaagccaccccacttctctctaaggagaatggcccagtcctctcccgagtccacacaggggaggtgatagcattgctttcgtgtaaattatgtaatgcaaaatttttttaatcttcgccttaatacttttttattttgttttattttgaataatgagccttcatgccccctctttttgtcccccaacttgagatgtctgaaggcttttggtctccctgggagtgggtggaggcagccagggcttacctgtacactgacttgagaccagttgaataaaagtgcacaccttaaaaaaaaaaaaaaaaaaaaaaaaaaaaaaaaaaaaaagaaaaaagg

SEQ ID NO: 9611 - DNA, 721 bp, Macaca Fascicularis
  misc_feature (1)...(721): n = A,T,C or G
gacaaggctgtgccaggctgngnggctcnnngctccccatgcccccgcgcagtgaccgcttccccgatgtgagccgcctcggagtgtggcctccccagacaggnnnnnnnnnnnnnnnnnnnnccccagacgccaggcccctgttgaagccgctcccggttctctccccagnnnnnnnnnnnnnnnnnnnnnnnnnnnnnnnncctgcttttccccactgggagcatcctcagcctgggcctgctcctagcctgggtgccatggctggggggtctcagcatgtagggcttctatggttgtggatgggaggctcctggcggggcaggaaggccgcaacgccgattcctaaggcccagctgccaggggagacagagctggctttgtgagagaggacctctgtgcccccgccgcctccccgctcccagcagataaggccgagcccacaccatctggcccaggctggcccccacccaccttccttgcgaccaccaacacacaggaactctgtgtgagaaagagggcgcccagcccaggcctggtggagggggaggggagaagccaggggacacaggagaccaccccggagcttgcctcagggccaagccagcccaacccaaccactgggggtccccatctnnnnnnnnnnnnnnngcctaagatgatggggtcagcaggcccaggagaagtaggaaggccatggggcagccccccnacctgctct

SEQ ID NO: 9612 - DNA, 756 bp, Macaca Fascicularis
  misc_feature (1)...(756): n = A,T,C or G
gagcgtgacgggcnnnnnnngccatgnnnnnnaggcggaggaccgggagcggctggtggctacggctgtgaagcttcatggaggtatcgatatnntagtctccaatgctgctgtcaaccctttctttggaagcctaatggatatcaccgaggaggtgtgggacaagaggcggctcagnnnnnnnnnnnnnnnnnnnnnnnnnnnnnnntccatttcctctctggatggacaaggaaaaagaggaaagaatgaaagaaaccctgcagataagaaggttaggcgagccagaggnnnnnnnnnnnnnnntgtctttcctgtgctctgaagatgccagctacatcactggggagacagtggtggtgggtggaggaaccccgtcccgcctctgaggaccctgcnnnnnnnnnnnnnnnnnngttgggctctagctcctggtgctgttcctgcattcatcgactggcctttcccaccgctgctcaccttactgttcacctcataaaatcagttctnnnnnnnnnnnnnnnncagccttccctgccgtcaagttggcgtcttactcaggattcctgctgttgctgtgcccttgggtaaaggcctcccctgagaacacaggacaggcctgctaaggctgagtctaccttggcaaagaccaacagatattttttgcccaggccactggggaatttggggggagatgggagagaaggaagctggagtggaaggagcagagttgcaaattaacaacttgcaaatgag

SEQ ID NO: 9613 - DNA, 944 bp, Macaca Fascicularis
  misc_feature (1)...(944): n = A,T,C or G
tgagnnnattattggttggtaacataaatattttaaactaaatatataaatctatannnnnnnnnnnnnnnnnnnnnnnngcgtagcactttgaaattatataaatagctcatatttacacttacagcttttcatttgatcaggtctgaaatctttagcacttaaggaaaatgactatgcataattatacctgaccatggaaaaaataagtacctcaaatgcatgcatnnnnnnnnnnnnnnnnnnnnnnnnnnnnnnnnnnnnnnnnnnntatataggtattttttacatgggttgacatgcacacaacaccattttcattcagtatgaaccttgaggctgttgccatttttccacttaaccaaaccagcctgaagttaaaccttgaaacttgtttcataaatctttcaaaagttgttttacatcaatgttaaaatttcaaaatgctgcagggtaatttaatgtataaaatattagtaagttaaagtatgtattgcatacttagtagaatagatcacaacatacaaattcaattcagtgcatgctttaggtgttaagcatgagattgtacatgtttactgttaggtccttgcatctgtggtgctaggtgagtatgagaagatgtcaaggactggacgtattttgttgcctaaaaaaaaaaaaaggctgtaattttgtgtgtctgtcactacctattacacactgttgctttgtgggtttgttttgtatatgtgtgtgttgtacagtagttaaatttcaatgcagaaaaataaatgtcctgaattctcatattagtattctttattgtatatcatgcatgtaatttatttagaaatgtagaaggtcttactaaatgtatatgcatgtgtttcagattatactaggatttcttggattagaannnaggttgtgttaactgtaacttaaagaatgaatgtaaataa

SEQ ID NO: 9614 - DNA, 715 bp, Macaca Fascicularis
  misc_feature (1)...(715): n = A,T,C or G
agacaaggaactagatgaatatatgcacggtggcaaaaaaatgggatcaaaggaagaggaaaatgggcaaggtcatctcaaaaggaaacgacctgtcaaagacaggctggggaacagaccagaaatgaactataaaggtcgatatgagatcacagaggaagattctcaagagaaagtggctgatgaaatttcattcaggttacaggaaccaaagaaagacctgatagctcgagtagtgaggattattgggaacaaaaaggcaattgaacttctgatggaaactgctgaagttgaacaaaatggtggtctctttataatgaatggtagtcgaagaagaacaccaggtggagtttttctgaatctcttgaaaaacactcctagtatcagcgaggaacaaattaaggacattttctacattgaaaaccaaaaggaatacgaaaataaaaaagctgctaggaagaggagaacacaagtgttgggaaaaaagatgaaacaagctattaaaagtctaaattttcaagaggatgatgatacatcacgagaaacttttgcaagtgatacaaatgaggccttggcctctcttgatgagtcacaggaaggannnnnnnnnnnnnnnnnnnnnnnnnnnnnnnnnnnnnnnnttgatcattctcatgatttggacattttttaagtacatttttgacagtttgaggactaagcctttctaaaataa

SEQ ID NO: 9615 - DNA, 671 bp, Macaca Fascicularis
agaggtatgagaagcggctggcgcagatcgacggcacattatcaaccatcgagttccagcggcaggccctggagaatgccaacaccaacaacgaggtgctcaagaacgtgggctgtgccgccaaggccatgaaggcggcacatgacgacatggacatcgataaagttgatgagttaacgcaggacattgctgaccagcaagaacttgcggaggagatttcaacagcaatttggaaacctgtagggtttggagagaagtttgacgaggatgagctcatggtggaattaagaactagaacaggaggaactagacaaaaatttgctggaaatcagtggacccaaaacagtccctctaccaagtgttccctctatagccctaccatcaaaacccgccaagaagaaagaagaggaagacaacgacatgaaggatttggagaagtgggctgggtccagcgcgggctgggccaggtttctggtggcctgcgcagcgagctggcgtgtgcatgtgcgcggcaggcaggatggatgtggtgcaggcaggttccatcgctctcgactctcactccaaagcagtgggaccgcattgctgctcactctctgcatagcatgatctgcacctggtgggacgggcgggggcggatggaggagaggggcagtggggggaagtgcctg

SEQ ID NO: 9616 - DNA, 736 bp, Macaca Fascicularis
  misc_feature (1)...(736): n = A,T,C or G
aaggaccagaagaaagtggagagacannnnnnnnnnnnnagtgaccatgagcagcccggagcttccagctgaggcctgcagcagtgaggcctggcccgaggtgtcattggtggaactggcctcatctcctgcctttcctcccttttcagtttctcttgaaaggtgtgcccctcctgctctcccaggagcagtgagttgtgaatggaaagaaggctggtgcagacccagctgccttagacagattccctgggcctgcatctcctggcgccggctgcttctgggcccaggaagaggctgtggctcccaccttccttacacccgctgggagcacgccttgcaccagctgcacacgcttagtgttagaggctctcagatctgcccttgcttgcctcatacctccgtgcccgcactgtggccaggccagctgagtccctccatccgtggatgctctcctgcagctgtgtggtgcaggggtcattcctgccgcttggcaccaggtggggggcatgtgcttgttgggcagcaaagtgatggaaccctcaggtgccctccgggagcctgaacctcctgactgaggaacatggacagaccacgtttaccgcacagagtggtcgctgcgcttaggcgtggccgtacacacgttctcagctcatcatcctttccagtaactttaaaagcacatccctcaggtcctgatatatttccctggattcatttcacttggctagagatacac

SEQ ID NO: 9617 - DNA, 741 bp, Macaca Fascicularis
  misc_feature (1)...(741): n = A,T,C or G
tccccaggaaaaagnagccnnngnnnnnngaggctgtgggaacctgtggctgccttggactnngcagccccctcctcaatggccaggccagaggccgagacaggacctaggcaccctcacagcagcgcctctggggcctagaagtcttcgcaagctgacttcctacccccacatctctagataagtgtcatatatttgttgaaggcaaaagactatggacttggaggcagaaagtggggtcctggccccgctctgcctttccnnnnnnnnnnnnnnnnnnnccccactctgggctcagtttcctcacctggagggttggacccacccacctggaacctccactctagccccaaaccctcctgccccaatgttagcagctctgccaggcttccaggccccatcaggcnnnnnnnnnnnnnnnnnnnnnnnnnnnnnnnnnnnnnnnnnnnnnnnnnntcacagctccctggggacggccactccccggctgagggcccacccctcccctctgcctgtccagaacaggaggctgaaatggaaaagctgcctcagccctgcttggctgagtcacgcggggcagtggcctctcgggtgctcttccnnnnnnnnnnnnnnncacccctcttcctaggcctgggggcagactgttcctagcatgtacccctctcaggctgcctgcctgacaatgtcnnnnnnnnnnnnnnnnnnnnnnnnnnnnggtttatttattttctccttcct

SEQ ID NO: 9618 - DNA, 690 bp, Macaca Fascicularis
  misc_feature (1)...(690): n = A,T,C or G
ttcatgctannnnccannncggtgcngaggtcaaagcagctccgttgttccctctggtttgtgggggcacggctatgctccatgtggcgaggtggaaggcatgggcgtgtggaggaggcgctggagctgaaggaatggacggaccctgggaggagggnnnnnnnnnnnnnnnggctgaggatgaagattcagcccctggacggtcccagactctcagggcatgcccagctcaggggcttcgagccacaggcctggcctcatatggcatgagggggagctggcatgggagccccctccctgctgtggttctgccctgtgtcctgcagactgttcttagccccctggctttgtgccaggcctggaggagggcagtcccctatggggtgccaagtcaatgcctcaggaatcaggaggccagcctggtacccaaaggagtacccagggcctggcacccaggcccactccagaatggcctctggactcaccttgagaaggaggagctgctgggcctaaagcccactcctgggggtttcctgctgcttaggtccttttgggacccccacccatccaggccctttctttgcacacttcttcccccacctctacgcatcttccccccactgcggtgttcggcctggaggtggtgggggtgagggggggtttggccattaccatttcagncttccccaa

SEQ ID NO: 9619 - DNA, 691 bp, Macaca Fascicularis
  misc_feature (1)...(691): n = A,T,C or G
gtgggaggaaaggcggccatcatgagnnnnnnnnnnnnnnnnnnnnnnnnntccnnnnnnnnnnnnnnnnnnnnnctttacctcccaggacctcaccatcaagtcggcagcctgcggcgcaggttggggggtccctgggcccactgtctgctgtgaaggtctagggtgaggtggggggctgaccttgcattggggtgggcggtggtggccaggccctagctcagggtgcgtgtgtgtgtggcaggtcctgcnnnnnnnnnnnnnnnnnnnnnnnnnncaccggctctgcagcgattcttgcttctccaaattccgggccaacaagggactgaaaaccaactgttgtgaccagtgtggggcttacatctacaccaagaccgggagccctggccctgagctcctcttccacgagggccaacaaaagcggttctgcaacacaacctgcttgggggcgtataagaaggtggggccgagggagtagtgcattagagggctgtggaagggggtgtggttcttgggtgataaataaaggtggctgacaggtcaaggactgggagaaataaaacaaataaagggggtttcaattgtatctgttatgttttatttttgaagctggctggtggatacacaggtctttgttacatcatcatctatactttttttgtatgcctgaaatatttcatgttaaaac

SEQ ID NO: 9620 - DNA, 754 bp, Macaca Fascicularis
cgtacaggaaagtccattgagcagctggagaaagagatgctgaatgggcagaaactgcaggggcccgagacagcccgggagctacatagcatcctccagcacaagggcctggtggacaagtttcccttgttcatggctgtgtacaaggtgtgctacgagggccagccagtgggtgaattcatccgctgcctgcagaatcatccagaacatatgtgagtagggccagggcccaggccaggccacttctttaccccagtggagaccagcagaagcctgcggtacctagtcaccaggatctccaggactcccagggagcagactctttgcatcttttcactggaggataggaggctatggggcccagctacacacctggagattctgaactgtcaagcctctggcagcctcttgccaccacatttgccagacatgcagttgccctgtccctctcctgatgtggggctttctccgtgtcctctgggagggatggaatcaagctccagcgctgcctgcttggcggcgggggtgatgtatgaggggaagggttgggggagaggccagcagggcaggggctgccagtggctgtctcacacagaccaggaatcctgttaaagggctgaagaagtatctcagccacaggagggatgaggcaaggattgtcagggaggagtctgggcttctgagctgatgcagaccccagggacccctttgctgacctctgccaggacccacacagcttcaatggattcagtgt

SEQ ID NO: 9621 - DNA, 758 bp, Macaca Fascicularis
  misc_feature (1)...(758): n = A,T,C or G
aaactgggggtatgtccactctagcaagtaaaaaaactactgttacacgttccagtaactctgtcaatattttcttgtatcagaattgttnttatgcagnnttcatttgggctggtttcatcattttgcactgtgaaatagctttacagtgcattactacagccagaagaacatatatatatatatttaaaaatatatcggatagttgcacacaaatgagcaaggtatttgttgcaacttactacatagcatatacccaaaatcactgaagaaaatcgctggcatcagtgtgcagcaaatttgttcttttggtttcatcactaacaaaagtgcctcatcataaaaatacagttggtttttagggtgccatattgttaaaattagataacttacattgaataaatgaatgcgttttatcggtaacaaatttcattacatttaccagttttaacacaggtggatacagaacttccattctttagtcattccaggtggatctgagttttatattcaaacttttaatacagtttttgagttttgtgtgacttgaatttttaatctttctgtaaaatacgtaacttaaatgaacatattaaatgtgtatcttttcttcagataccagatttgatataaatgttgtaacataggtgtgtagatagtggatcctggatggaactnnnnnnnnnnnnnnnnnnnntataattctgcatgaggacttaatgaatccaaacctgtgtcatgccgcnnngtgtgcatac

SEQ ID NO: 9622 - DNA, 739 bp, Macaca Fascicularis
  misc_feature (1)...(739): n = A,T,C or G
ccacgtgagnnnnnnggatgcattttgtggngnnnannnnannnnngcnatctcccacgagggccacgtgtacggctttggcctctccaactaccatcagctnnnnnnnccgggcacagaatcttgcttcataccccagaacctaacatcctttaagaattccaccaagtcctgggtgggcttctctggtggccagcaccatacagtctgcatggattcagaaggaaaagcatacagcctgggccgggcnnnnnnnnnnnnnntgggccttggggagnnnnnnnnggagaagagcatacccaccctcatctccaggctgcctgctgtctcctcagtggcttgtggggcctctgtggggtatgctgtgaccaaggatggtcgtgttttcgcctggggcannnnnnnnnnnnnnnnnnnnnncacagggcaggatgaggacgcctggagcnnnnnnnnnnnnnnnnnnnnnnnnnnnnngaaccgtgtggtcttatctgtgtccagcgggggccagcatacagtcttattagtcaaggacaaggaacagagcnnnnnnnnnnnnnnngggcctggcttctgtcccactcaacctccctcacagaacagggaagcagtgacagctgcagatggtagcgggcctctccccagccctgagcactatgtcagctcctgccttttcccatcagcagaacagcatccttttcctatttttcttcctcctcttggaattctcctggga

SEQ ID NO: 9623 - DNA, 1258 bp, Macaca Fascicularis
  misc_feature (1)...(1258): n = A,T,C or G
agcttattgtagcatatttntccaaaaggcaaaaatgtgtcntcttggctgggcgtcgtannnnnnnnnnnnnnnnnnnnnnnnnnnnnnnnnnnnnnnnnnnnnnnnnnnnnnnnnnnnnnnnnnnnnnnnnnnnnnnnnnnnnnnnnnnnnnnnnnnnnnnnnnnnnnnnnnnnnnnnnnnnnnnnnnnnnnnnnnnnnnnnnnnnnnnnnnnnnnnnnnnnnnnnnnnnnnnnnnnnnnnnnnnnnnnnnnnnnnnnnnnnnnnnnnnnnnnnnnnnnnnnnnnnnnnnnnnnnnnnnnnnnnnnnnnnnnnnnnnnnnnnncaaaaaaacataatatagtattttaacaatgtgccctcttaagtatgcatacatacacatatacagtattcccaagagtggtggcagctcaaaatgatatgttgagtagacgaacagctgacatggattcctgtgcacctacagaaggtgaggctttgaaggatccaagtgcatttttatctgtgagttctgttgcgtttgtcaaaaagtcattgtaatctttcatggccatacctgttcagcaaaaactggcaaagacataggaacatatagttttacttggcgtttatgttgcaatctgcttgtgatttatgttttaaaacttgatgctaaaccataatatgtatagcaaatggagcaagctgatattttgtattttgtgttcctctttgcatgatctgttaacatgagatatttttacctacctaaaatatgatgtttaaaagcatactgtatgtgatttatttatttctacctttctgagtctcctggactaagaagatgtattgaaatgtaccaccacatgttaacaaagtttgatatggggttcctctttggtttctgatcacatttgtaaatgtcttttcaaaaggatttactttttataaaaagcttcattctcactttgctttgctctccccaaacttcttgttcagaactaggggagtttannnnnnnnnnnnnnnnntttcnnnnnnnnnnnnnnnnnnnnttccagctcagaaaccattgttcagaagacctccctatgacagagctgctcctcagggtccctcaggaccaaagaacactccaaaagagcactccacatggacaagtannnnnnnnnnnattctttatcatgaacaatcgaggcaactagtggagagaaccgattgtgaactctgcctctgagtcaaagagacctggatttgagtctgacaagaacaataa

SEQ ID NO: 9624 - DNA, 402 bp, Macaca Fascicularis
cagcagcattgggagagcgagcgccagcggcagcaacaggagctggagcgtgcgggcgccctgctgcaggagcgcgagggcgaggcgcggcagctacgcgagcggctggagcaggagcgcgccaagctggagcgccagcgccaggcctaccagcacgacttggagcggttgcgcgaggcccagcgcgcgttggagcgcgagcgggagcgcctggagctgctgcgccgcctcaagaagcagaacaccgcgccgggcgcgcagccgcccgacacgctgaccgaggtgagcactcagcagccagtgtgcgcaggtgggggtgaccggcttgcgcgtgcatttgcacgagtgcatgcaagtgacagggttcgcaggtgcatgcgtgcaggagtgtaagagcaaatg

SEQ ID NO: 9625 - DNA, 674 bp, Macaca Fascicularis
ttgttgcaaatcacttggcaactcacacatgaagtccccatctcaataagaaccagctaagaaacaacattagacaacaagtcctcaaatcaggaatgttggagtctggtattgaccgaattatttctcaggttgtggatccaaagatcaaccacacattcagacctcaggtggagaaagctgtgcatgagtttttggccacgctgaatcacaaagaggaagcaagtggcaacacagctcccgatgatgagaaaccagactcttcccttattacacaaggtgttcctgctcctgggcccagtgctaatgtagccaacgatgccatgtcgatactggaaaccatcacttctcttaaccaagaagccagtgctgctagggcttcaacagaaacatcaaatgccaagaccagtgagagagcatcaaaaaaacttccatctcagccaaccactgatactggtactgacaaagaaagaacttcagaggacatggctgataaagaaaaatctacagctgactctggaggtgaaggactggaaacagccccaaagtctgaagaatttagcgaccttccttgtccagttgaagaaattaaaaattacacaaaagagcataataatttaattctgctaaataaggatgttcaacaggaaagcagtgagcaaaaaaataaatca

SEQ ID NO: 9626 - DNA, 744 bp, Macaca Fascicularis
  misc_feature (1)...(744): n = A,T,C or G
ccttttatcaggacgtggnnnatnnnnnnnnnnnnnnnnntcatagggacacaggcatttaaatatttaacttatttatttaacaaagtagaagggaatccattgctagcttttctgtgttggtgtctaagatttgggtagggtgggatccccaacaatcaggtccactgagatcannnnnnnnnnnnnnnnnnnnnnnnnnnntcttcttctcctggggtctggctcctcaaaatgcctaacccaggaccttggaaattttactcatcccgactgataattccaaatgctgttacccaaggttagggggttgaaggaaggtggagggtggggcttcaggtctcaacagcttccctaaccaccccttttctcttggcccagcctggttccccccacttctactcccctctactgtctctaggactgggctgatgaagnnnnnnnnnnnnnnnnnnnnnnnncccaactttccccactggctccacaaccctgtttggagctgttgcaggaccagaagcacaaagtgtggtttcccaggcctttgtccatctcagccccctagagtatatctgtgcttggggaatctcacacagaaactcaggagcaccccctgcctgagctaaggaggtcttatctctcaggggggtnnnnnnnnnnnnnnnnataatgtcttatttatttagcggggcaaatattttnnnnnnnnnntgagcaatcagtataatgtttatggtgagaaataaa

SEQ ID NO: 9627 - DNA, 780 bp, Macaca Fascicularis
  misc_feature (1)...(780): n = A,T,C or G
agaggtcatatttaagtngcttaannnnnnnnnnnnnnnnnnnnnnnnnnnngcagcatgaaaacctagaaaccatagttgacttataaaaaacacgctacccaacctgggcttggtacagatggaaaagacnnnnnnnnnnnnnnnngagatggacattgctaaacagttacaagcttatgaagttgagtaccatgtccttcaagaagaacttatcgattcctctcctctcagtgacaaccaaagaatggataaactagagaaaaccaannnnnnnnnnnnnnnnnnnnnnnnnnnnnnnnnnnnnnnnnnnnaggtggcaaatggtaggatccaaagccnnnnnnnnnnnnnnnnnnnnnnnnnnnnnnnnnnnnnnannnnnnnnnnnnnnnnnnttaccttagagctggagcggtctgccctgctgcagacggtggaggagctgcggcgtgggagcgcatcacccagcgacctccgagagcctgagtgcacgcagcccgagcccacggnnnnnnnnnnnnnnnncaggagagattgcaacaccatcccacactgtccaggccttaactgagaggttcggaagacgctggagggagagaaggaagcggaaagtgtgcnnnnnnnnnnnnnnaccggcttgtcagcaagtagattcttacgaactcccacttgcaattcaggggacatgtcccagtgtttttgttgttgtttttagatactaaatcgtcccttctccagtcctgattactgtacacagtagctttagatggcgtggac

SEQ ID NO: 9628 - DNA, 727 bp, Macaca Fascicularis
  misc_feature (1)...(727): n = A,T,C or G
tgagtttctagcaacacatcacttctaagaaaagccccaagccaaaaacaaaaaaaccctccagaccaccaaacccttttcctggctgccccagcccctctgcaccctggtttggctgagaaagcacgaggggcagcatctgtaggtgttctggggcgtcccaggtcnnnnnnnnnnnnnnncatctgaagaatgcccggcgtgtgtctggctgaaggtgcgggtacctgcccagctctggcagcccggcgggagccctctccctcctcccaggcagagacgctcctctgcgcggtgcagtcaccacctctgggagatccatgctcagcatctgtcttgatttcccatccttgttgggatgggnnnnnnnnnnnnnnnnnnnnnnnagggctagctgctcttctcccgggctggcatctcctctcccacagctgggcagttacagggccttcnnnnnnnnnnnnnnnnncagtctgaacgcagtgctatggagtcgtttggatggactccttaagcctcggtctcagtgctgaatggtggnnnnnnnnnnnnnnnnnnngggcccgtccctttctcctcttgcctctctgcctttagcccccaaggcagccaccccgcgcagacccttgcagagcacctcctgtgttctgggcttggtgccgggcacaagggatggaggtgactgggaccctgccactttggtggcnnnngnntgnntggaggggtc

SEQ ID NO: 9629 - DNA, 766 bp, Macaca Fascicularis
  misc_feature (1)...(766): n = A,T,C or G
gctgcagagcntcagaatcataggtatgacatcannngtgannnnnnnnnaannnnnnnnnnnnnnnngccactgattgcctcaatcctagagacctacataaacccatccaggaggttatcattgaattgaccaagggaggtgtggattttgctcttgactgtgcaggtggatctgaaaccatgaaagcagccctggactgtacaaccgcaggctgnnnnnnnnnnnnnnnnnnnnnnnnnnnnnnnnnnnncaaaggattgactatttttccagaggagctaataatcggccgtactataaatggannnnnnnnnnnnnnnnggaaaagtgtagattctatcccaaagctggtcactgactataagaataagaaattcaatctggatgcattggtgacccataccctgccttttgacaaaatcagtgaggcattcgacctaatgaannnnnnnnnnnnnnnncgaacaatcctgatcttttgaagatgccaggagcaatttggaatgctannnnnnnnnnnnnnnnnnnnnnnngttaatttattacctgatttgatgaaccaaggaaagccatgagtttaaataaatatttacatttaatacaggaacataaaagagctttaaatattacagcctttgtacctgttacatatatgaatattccctatgttaaataataataataacaactagtgtttatgaacagaatcatatgatctttagaaattgtttaaaattagttctgggaaggtgaaagtggggaa

SEQ ID NO: 9630 - DNA, 717 bp, Macaca Fascicularis
  misc_feature (1)...(717): n = A,T,C or G
tgagcataggtcgtctgtgtggtggggtcaggggcctgtccctttagtggagccagnnngtcgggccctgaatgtcactgggtggatccaagaannnctgagtggtctgacaccaaaacgtgctgtagggagggctgtggtgctnnnnnnnnnnnnnnnnacagccctccttgaccctgaaaggaacactggcttgaaggactgcagacaggttcggaggggcacgccctcctcggcgagaggcagcaaggcggccacggtgtcactggtcaggtgcttctcaccacgggaaagccgctgacctgtgactcatgcgagacgggaaagtagcgccacagacgccgggtctccttggctgtctgtgagccgcccgtggccacnnnnnnnnnnnnnnnnnnnnnnnnnnnnnnnnnnnnnnctgggtggccagcttgctgctccggtttgggctgtcctactnnnnnnnnnnnnnnnggttccacaggccgctgtgagcgctggctccctgggcagtgctcctccgtgtggacggtgcctcgggccagggctcaccagctggggtcctgtccagaaggatgggatctttctgggagctgcgccggaccgagtggggagctcctagtttggaggggggaagctttgatatccatgccacgtccatccaccccaccccttttcgtcacgagcacaatggtcttacattggattttgaaaaaa

SEQ ID NO: 9631 - DNA, 700 bp, Macaca Fascicularis
  misc_feature (1)...(700): n = A,T,C or G
gggacgggagctcaacnnnnnnnnctgtttcttcgacttcaaatatttctgtgaactgcgacctggcctcatcggctgggtcctcatcaacctggccctgtnnnnnnnnnnnnnnnnnnnnnnnnnnnnnnnnnnnnnnnnnnnnnnnnnnnnnnnnnnnnnnnnnntactctatgtgggtgatgccctctggcatgagctattggttnnnnnnnnnnnnnnnnnnngaattcccagaaaaacactttccgaaagaatccttnnnnnnnnnnnnnnnnnnnnnnnnnnnnnnnnnnnnnnnnnncagggcggaaactgctggtgtctgggtggtggggtatggtccgccatcccaactaccttggagacctcatcatggctctggcttggtccttgccctgtggggtgtcacacctgctgccctacttctacctcctctacttcaccgcgctgctggtgcaccgtgaggcccnnnnnnnnnnnnnnnnnnnncagaagtatggcctggcatggcaggagtactgccggcgtgnnnnnnnnnnnnnnnnnnnnnnnnnnnnnnnnnnnggctccaccaccccaggtgggggcatatgcccactcatccaccagcacacccaggaccaggagcctggacacacttgggactcaagggctnnnnnnnnnnnnnnnnnnnnnnnnnnnnnnnctcagagaagag

SEQ ID NO: 9632 - DNA, 752 bp, Macaca Fascicularis
atgatgcagatgatgctggggggcatgtccccagagacgggcgcggtcaggctattggctcagctggttagtgccctgtgcagcaggtactgcacaagcgccctgtggaacttgggtctgacccagtatcacgtcagcgagaggagcttcgcttgcaagaatcccatccaagtcgacctgttcaaagcagtcatcacagaggccgtctgctcctttcttttccacagcgctctgctgcactttcaggaggtccgaaccaagcttcgtatccacctgctggctgcactcatcacctttttggtctatgcaggaggaagtctaacaggagctgtatttaatccagctttggcactttcgctacatttcatgtgttttgatgaagcatttcctcagttttttatagtatactggctggctccttctttaggtatattgttgatgattttgatgttcagctttttccttccatggctgcataacaaccatacaattaataaaaaggaataaataactgttccaaagactcagactaacatacaggacagtccagctggatgtgataaagattttatcacctcatatggaaaacactggctgcactggattcgtcagtgttaacttcctttgaggaagccgccttatagttttcatcactgggacttaaacaaaaaattactgtgaaaatgaggcatcctgtacttctcagttaagacttgttctttgagtgatgtattaaatgctgctagaaaagc

SEQ ID NO: 9633 - DNA, 738 bp, Macaca Fascicularis
  misc_feature (1)...(738): n = A,T,C or G
tatttatacatgcaaaatagaaaaaaatgttcaacatttattgattgatagactgttaaaatttaatgtttggaataacatttggaagtagtagactttgcattaaaaaatggcttttctttaggaaagtataatcagttattttaacgaccatagcattcatggactcaaatgctgctgccacacacaactcaagtgctggaatatttttctacagtctctctgttctacggattgtcttataaaccagtgttcaactagttttataactgaaaagctgcacatttttcacagtacaagccgtagttttttacctgtagtttggacttctctgttagaatgcaactgtattaccagcccttttaaaggcatcttatctatcaaaggaaaatttgggtgttagattttcttgggaccgtttctgtaacctttgcccttcacaacatagaaaatattggttttgccattacattnnnnnnnnnngtttaaaacctgttgaaagctgtagctttatacagctttcttctccctgtgaaatcactttgtttatgtgatggcatttaaaannnnnnnnnnnnnnnnnaaactgaattttatatctaatcaatgtcttcagtcttgaagaagaatttgccattgttgtgtttgtatatagagtattgcagtgcatgaattagctttatgcattttattaaatgctatttcaatgtggcattattgttgtggcttaatactact

SEQ ID NO: 9634 - DNA, 736 bp, Macaca Fascicularis
  misc_feature (1)...(736): n = A,T,C or G
atcgctggctatgaaatcgtcaccaacacacntnnttttgccacctacctactggccaccaaccctgactgccaagagaagcttctgagagaggtggacctttttaaggagaaacacatgnnnnnnnnnnnnnnnnnnnnnnnnnnnnnnnnnnnnnnnnnnnnnnnnnnnnnnnnnnnnnnnnnnnnnnnnnnnnnnnnnnnnnnnnnnnnnnnnnnnnnngcggctcaggactgcgaggtgctggggcagcgcatccccnnnnnnnnnnnnnnngagatggccgtgggtgccctgcaccatgaccctgagcacnnnnnnnnnnnnnnnnnnnnnnnnnnnnnnnnnnnnnnnnnnnnnnnnnnnnnnnnnnnnnngcccttcacgtacctgcccttcggggccggccnnnnnnnnnnccttggggtgcggctaggnnnnnnnnnnnnnnnnnnnnnnnnnnnnnnnnnnnnnnncaagttccagttccaagcctgccctgagacccaggnnnnnnnnnnnntagaatccaaatctgccctaggtccaaaaaacggtgtctatatcaagattgtatcccgctgacacagaaggccgccgggtggagggagggcacccccaaattcaaagaaaaccctgagtgtggatattcagaattttgggaaaatgtcactgaagggattgaaagagtgcctggcatgcaaggataagaggttctttacacaacattcctaaa

SEQ ID NO: 9635 - DNA, 745 bp, Macaca Fascicularis
  misc_feature (1)...(745): n = A,T,C or G
gagctacacttgtgttttagagtgtctgnnnntgtaatattgagagtcattttatagaaatgatttcttaattagctattgtgagatattcctcgggtccttgcagaaaaagaaaatacagactgtgaacaaatcattcacagacaaatagaataaaacagagccaacaacagtattttaagggtcacttnnnnnnnnnnnnnnnnnnnnnnnnnnnnnnnnnngaagcattgtccaggtgtgtctacatctagtgttacttttaatgagaatttgaatgtttattgaacaatagtacttgaatgaacatttataaatgtaattattgcaatcactggttaagaatgttttatataaccttataatatttttcactgatcaaaatgtagttttgctttttcgtttcttaaggaatacatgtgtgggatttttattttttacatttctgaagataagctccaggtcttaccgtatcccttgtcatctgaatttgtttgcgctgcttctcttnnnnnnnnnnnnnnnnnnnnnnnnnnnnnnnnnnnnnnnnnnnnnnnnnnnnnnnttctatagtcattgcaaaactgctgctaccaatagatcatgatggagggggaaatcactggagatcaaatatgtgaaatcacttcaaatataaaatccagtttactcatggattttagctattttttcannngggtaannntatactacatttatttacaaatgagtttatgcattttca

SEQ ID NO: 9636 - DNA, 738 bp, Macaca Fascicularis
  misc_feature (1)...(738): n = A,T,C or G
ctaaaagaggacgtnnnnncnnnnnactacaacagagattccgagaatgcccagtcgctgggaggacagattgtgctgnnaggcagcgacccccagcattacgaagggaatttccactnnnnnnnnnnnnnnnnnnnnnnnnnnnngcagattcaaatgaagggggtgtctgtggggtcatccaccttgctctgtgaagacggctgcctggcattggtggacactggtgcatcctacatnnnnnnnnnnnnnnnnnnnnnagagaagctcatggaggcctnnnnnnnnnnnnnnnnnnnnnnnnnnnnnnnnnnnnnnnnnnnngagggccctacactccctgacatctctttccacctgggaggcaaagaatacacactcaccagcgcggactatgtatttcaggaatcctacagtagtaaaaannnnnnnnnnnnnnnnnnnnnnnnnnnnnnnnnnnnnnnnnnnnnnngacccacctgggccctgggcgccaccttcatccgaaagttctacacggagtttgatcggcgtaacaaccgcattggcttcgccttggcccactaaggccccctgccgcccaggcaggcccagccttcagccctggcccagagcgggaacactctctgagatgcccctctgcctgggcttatgccctcacatggagacactggatgtggagctcctnnnnnnnnnnnnnnnnnnnnnnnnnncctgcccttccctgcttgaggccaa

SEQ ID NO: 9637 - DNA, 771 bp, Macaca Fascicularis
gaggagaagtatgtcactgtgcagccttacactagccaaagcaaggacgagattggctttgagaagggcgtcacagtggaggtgatccggaagaatctggaaggctggtggtatatcagatacctgggcaaagagggctgggcgccagcatcctacctgaagaaggccaaggatgacctcccaacccggaagaagaacctagccggcccagtggagatcatcgggaacatcatggagatcagcaacctactgaacaagaaggcgtctggggacaaagaaactccaccagctgaaggcgagggccacgaggcccccatcaccaagaaggagatcagcctgcccatcctctgcaatgcctccaatggcagcgccgtgggcgttcctgacaggactgtctccaggctggcccagggctctccagctgtggccaggattgcccctcagcgggcccagatcagtaagaacttcgctgacctctaggtcctcactgcaaagctccttagagaatgggcatgggtgcatgaaagccaggggggtgcataggacccccatggcgttttcctcctgggctacagactggcctttgaccctcactctgtcaacttgtgtcatgctaatcacaggagtggagaagacagaggagtatgatgactcaactgctcccaggtgctccacggaagctagatcacatgaggatgtaggtggtagcgttccctccttctctagtggagagccagcaatggtcactctgcagatacatgcgttccaaga

SEQ ID NO: 9638 - DNA, 764 bp, Macaca Fascicularis
  misc_feature (1)...(764): n = A,T,C or G
ttgaccannnnnnnncatggccgccatttccgagagcaacatcaacctctgtggctcccactgtggcgtttccatcggggaagacgggccctcccagatggccctggaagatctggccatgtttcgatcagtccccacgtcaactgtcttttacccaannnatggcgttnctacagagaaggcagtggaactagccgccaatacaaagggtatctgcttcatccggaccagccgcccagaaaatgctatcatctataacaacaatgaggacttccaggtcggacaagccaaggtggtcctgaagagcaaggatgaccaggtgactgtgatcggggctggggtgaccctgcatgaggccttggctgccgccgagttgctgaagaaagaaaagatcaacatccgcgtgctggaccccttcacnnnnnnnnnnnnnnncagaaaactcattctcgacnnnnnnnntgccaccaagggcaggatcctcaccgtggaggaccattattacgaaggtggcattggtgaggctgtgtccagtgcagtagtgggcgagcctggcatcactgtcacccacttggcagttaaccgggtaccaagaagtgggaagccagctgagctgctgaagatgttcggtattgacaaggatgccattgcacaagctgtgaagggcctcatcaccaaggcctagggcgggtatgaagtgtggggcgggggtctatacattcctgagattctgggaaaggtgctcaaagatgtactgagaggag

SEQ ID NO: 9639 - DNA, 721 bp, Macaca Fascicularis
  misc_feature (1)...(721): n = A,T,C or G
ttacaaacaaatacaacnnnnggaacgctgatcagagaaggctcaannnnnnnnnnnnnnnnnnnnnnnctcggagccttcagctctctgggaggagaggccaagcacatactctgctgagggtaatgaactaggacacttttttaaaaaatctctttgaccccattgtcccagggccacacatggggaaaggtgattctaggccccttgacaactaacccagttagaggaggacaacaggaactctatgcagaaaaggtgtgtgttgctgggggggagggggtccttgagtggcagagacggggttgggggagcggcacgggtgtctcctgacnnnnnnnnnnnnnnnnnnnnnnnnnnnnnnnnnnnnnnnnnnnnnnnnnnnnnnnnnnnnnnnnnnnnnnnnnnnnnagtaggcagaagaggccaggtggtcaggggctgaggtgccnnnnnnnnnnatgggggtaggtagttctgaccagcgccatctctctcctctcccctacctctgcgctcttccacagtcccacctgggcagtctctccccacgacagtgaagggtcttcccggtgtcctcctgtctggctggtggcttttctccctctctccaaaggcagtggcactagccacccaaggaacaccctcctcccctctgagacccttatggtccttccttcacagtttctggcagctcccangantgtctctgtcagtgtct

SEQ ID NO: 9640 - DNA, 756 bp, Macaca Fascicularis
  misc_feature (1)...(756): n = A,T,C or G
caaggatcagctgatccgggcagccgtgaagttnntggacactgacaccatctgctacagggtggaggagcctgagacattagtggaacttcaaaggaatgagtgggatccaatcatcgaatgggctgagaaaagatacggcgtggagatcaactcctccaccagcataatgggacccagcatccccgccaagacgcgggaggtgctagtcagccacctggcatcttacaacacgtgggctttacaagggattgagtttgnnnnnnnnnnnctcaagtccctggtgctgaccttgggcctgatnnnnnnnnnnnnnnnnnnnnnnnnnnnnnnnnnnnnnnnnnnnnnnnnnnnnnnnnnnnnnnnnnnnnnnnnnnnnnnnnnnnagtgggcccatgactacgannnnnnnnnnnnnnnnnnnnnnnnnnnnnnnnnnnnnnnnnnnntccatctctgctccgagagnnnnnnnnnnnagcacaagctcctgaacgagtgaggcctgggcagcacacactcagcaggatagaggcagcgcagccacagctcccccaaccttcagggctcctcagcctgtggggctgacttccttgacttttggggcctcggcctcagcannnnnnnnnnnnnnnnnnnnnacacagtgcgctagtgcgactgtccnnnnnnnnnnnnnatttcaaaccaggtgcccctggcctggtcagcaatgaatgtgggagatgaattgtacaactaacttctctcaaccct

SEQ ID NO: 9641 - DNA, 744 bp, Macaca Fascicularis
  misc_feature (1)...(744): n = A,T,C or G
aagatgtaacagnnnaatgatgacatctggagaagaaacnncttttnnttataaaaatgtgttnnnnnnnnnnnnnnnnnagaagcaaaagataattctgcaaattcaaagacacactatcccttcaaaacaaataggagatcagggaagagaaacatccttcaaaggacagtgttgttttgaccgggagatctagagaatgctcagaattagggcctnnnnnnnnnnnnnnnnnnnnnnnnnnnnnnagaaacaactgttttaagattagttccatcaccctcatcatgtatttttgtgagaaacacaagagtgcataccagaattgaatataccatatgggattggagaaagacaaaatgtggaagaaatcatagagctggagactacttttgtgctttacaaaactgtgaaggattgtggtcacctggaacaggtctccaatctatgttagcactatgtggttcagcctctgttaccccttggattatataatatcaacctgtaaacatgtgcctgtaacttacttccaaaaacaaaatcatacttattagaagaaaattctgattttatagaaaacaaaaaatagagcaaggagaatataacatgtttgcaaagtcatgtgttttctttctgaatgagggaaaaacaattttattacctgcttaattgtccacctggaactaaaagggatactactttctaacaaggtatatctagtaggggagaaagccaccacaataa

SEQ ID NO: 9642 - DNA, 762 bp, Macaca Fascicularis
  misc_feature (1)...(762): n = A,T,C or G
atgagagtgacatgggggtaggntatggagaggtaggtgatccagggaaaagcagtgggaaggaaggcaaagaggccactcaacccccacctggaaggggcaaagaaaagccagagttccctgtttgtactcctgtgctggacnnnnnnnnnnnnnnnnnnnnnnnnnnnnnntttttccttttcatggccttggcaaaggtatgagccagggatcctttcctggcccctaagatcaaaccccatggagcagccagcattagatgcccccacccacctgtactctggagagactgtgctgggaacatgtaccactgagcctgagatggggatgagggcagagagaggggagccccttttccattcagttgttcctactcagactgttgtactctaaacctagggaggttgaggaatgagatccttaggttttaacctgcatcctgaccccaccatctatagggtcccaacttggttattacaggcaaccttccctctctccttggtgaagaacatcccaagccagaaagaagagaagttaactacagtgttttcctttgcactgatccccaccccaattcaatccaggaagggacttaggaaacccttctttactagatatcctggccccttgggcttgtgaacacctcctagccacatcactacagtacagtgagtgaccccagcctcctgcctaccccaagatgcccctccccaccctgaccgtgctaactgtgtgtacatatatattctacatatatgt

SEQ ID NO: 9643 - DNA, 721 bp, Macaca Fascicularis
  misc_feature (1)...(721): n = A,T,C or G
ccatgagaactgatggcaagcctactgagaagtctcagacccncaaggacaacagcacagccagtgcaagcctcgcctccaatgggacaagtggtgggcaggaggcaggagcaccagaagaggaggaagatgagcttttgagagtgactgaccttgttgattacgtctgtaacagtgaacagttataagactttttttccatttttgtgctaatttattccacggtagctctcacaccagcgggccagttattaaaagctgtttaatttttcctagaaaactccactacagaatgactttttagaagaaaaatttcaacaaatcctgaagtctttctgtgaagtgaccagttttgaactttgaagacaaataattgctgtaaattccttttgattttctttttccaggttcatggtccttggtaatttcattcatggaaaaaaatcttattataataacaacaaagatttgtatatttttgactttatatttcctgagctctcctgactttgtgaaaaagggtggatgagaatgcattccgaatctgtgagggcccaaaacagaatttaggggtgggagaaagcacttgtgctttagctttttcatattaaatatatattatatttaaacattcatggcatagatgatgatttacagacaatttaaaagttcaagtctgtactgttacagtttgagaattgtagataacatcatacataag

SEQ ID NO: 9644 - DNA, 753 bp, Macaca Fascicularis
  misc_feature (1)...(753): n = A,T,C or G
gcatccagatgnncctgcgttccgacgtcgtgcccatgacagcagagaatttccgctgcctgtgcacccatgaaaagggctttggctttaaaggaagcagcttccaccgcatcatcccccagttcatgtgcnnnnnnnnnnnnnnnnnnnnnnnnnacggtactgggggcaagtccatctatgggaagaagttcgatgatgaaaactttatcctcaagcacacgggaccagggctactctcnnnnnnnnnnnnnngcccaaacaccaatggctcccagttcttcctgacatgtgacaaaacagacnnnnnnnnnnnnnnnnacgtggtgtttggagaggtcaccgaaggcctagatgtcttgcggcaaattgaggcccagggcagcaaggacgggaagccaaagcagaagnnnnnnnnnnnnnnnnnnggggagtacgtgtgaggcggcactctctgcttccccctccgctcttgcccctgcacatccaggaaggnnnnnnnnnnnnnnnnnnnggcagcaccgagggtgccnnnnnnnnnnnnnnnnnnnnnnnnntatgagcccttcctcagggtccgcttggagtagctcctcnnnnnnnnnnnnnnnnnnnattcccaagcgcggctgtgggcccaggagccagcgcaggtgctcccctccaccatgggcaggctnnnnnnnnnnnnnnnggcttttctcagcatttgctgctgggcctgtcctgggactaccagtgtggctcttaggt

SEQ ID NO: 9645 - DNA, 186 bp, Macaca Fascicularis
ttgaggaagtccccgagttactcactgaggcacagaagaaggaatgggttgagaaactgacagaagtttttatcagctctgaggccctcttccccttcagagataacgtagacagagctaaaaggagaggtgtggcgtacacagcggctccccccggttttgcggctgacaaagttgtgattgaag

SEQ ID NO: 9646 - DNA, 762 bp, Macaca Fascicularis
  misc_feature (1)...(762): n = A,T,C or G
acaaccagctgcaagnnnnnnagaacgtgatcgggttacagatgggcannnnnnncgcggnnnttcaggcaggcatgactggctacgggatgccacgccagatcctctgatcccaccccaggccttgcccctgccctcccacgaatggttaatatatatgtagatatatattttagcagtnnnnnncccagagagccccagagctctcaagctcccttctgtcagggtggggggttcagcctgtcttgtcacctctgaggtgcctgttggcagcctctcccctgtgcttactaatacattcccttccccgtacccatcaaaactggaccaactggcctcctcttttcccctgggaccaaaatttagggcccttagtccctgactgccaggcctctcctctttcccccctggcctgttctgtctctgaactctgtgccctccgttcattccatggctgggagtcagtgatgctgcctctgccatctgatgctggactggccttgcttctacaagtatgcttctcccacagctgtggctgcaggagcttaatttatagggaggagcctgtggcagctgctgccccggccacagctgcactgactgtgctcaccacacatctggggcagccttccctggcaggggccctcatggcttctcattttccattcccttcactgtggctaaggggtggggtgaggggacggagagggagggctgcctaccatggtctggggcttgaggaagatgagtttgtgattaaaa

SEQ ID NO: 9647 - DNA, 654 bp, Macaca Fascicularis
  misc_feature (1)...(654): n = A,T,C or G
gcattccacactgcagggaggagtggtacttaagctcccctgccttaacctgggaccaacctgacctaacataggagggcnctgagccaaccttgctcttggggaaggggacagatgatgaaatttcatggatgaattttccagacctatatctggagtgagaggcccccacccttgggcagagtcctgccttcttccttgaggggcagtttgggaaggtgatgggtattagtgggggactgggttcaggttaccaggaccagtacctcagtattctttttcaacatgtagagcaacaggatgaaggaaggggctatcctgggagctccccagcccaggaaaaactggaagccttccccccagcaaggcagaggcttggaggagggttgtaaaagcatattgtacccctcatttgtttatctgaattttttattgctccacatnnnnnnnnnnnnnnncaccccaacctctgtcccccacccagttcttcatttggaggaatcaccccatttcagagttatcaagagacactcccccctccattcccacccttcatacctacacccaagnnnnnnnnnnnnnnnnnnntggggccaggccccagggaaggtatactgaggggtctataggtttgtgattaaaataataaaagct

SEQ ID NO: 9648 - DNA, 751 bp, Macaca Fascicularis
caaagagtttacatgtgcaagaaagtcatcgcaccaaaaaacctgtcaattatgccattgcaatatttcagaagctttaactgaagtgtcaggttccttgtgagaaataacacacgttagaggctttgagagaagacctagttctgtcgtgagcagtcgaccttgtgtctgtcctcccatcttggagcaaccttatcaacaggccgcactgcagaaatgatgttttatgaaaaccaatgaggctgctgccactccagcaaggaaaataatgcaatttcctgtcttatgtaagaaaaagagaaggctctctttttctcccttgtcattgctgttcttttccttatgtacaaacatttttaactactgcagattttcatcccattctactgcttgactgaccatcaactccatcctatcgagatttatttaagaatgaagaacaaaattttctgctgatgccataccctcacctttctcagcaaagaatagtggagagtaggaaactgtactttaggcatcctcttgaatgattgtgtaagtttctctggttgggatgttgtctctgcccagttggacctcctccctttgttgaatgtggtatacagccactcatctcacaccgtgagttgtggcgcagggtggtaccaggaaagaggatattctaggctttgtgtgctgctagctgggttcaggcttcacccactggaaagaaccaccatctgctctaaccatgtagacttattgcggcctg

SEQ ID NO: 9649 - DNA, 780 bp, Macaca Fascicularis
  misc_feature (1)...(780): n = A,T,C or G
ttcaagatgagacccgaaggcttcaaaggctgtgcaaggaggaagaactggaagaagttcgggaactcggagtttgaccccccgggacccaatgtggccaccaccaccgtcagtgatgacgtctctatgacgttcatcaccagcaaagaggacctgaactgccaggaggaggaggaccccatgaacaaactcaagggccagaagatcgtgtcttgccgcatctgcaagggcgaccactggaccacccgctgcccctacaaggacacgctgggtcccatgcagaaggagctggccgagcagctgggcctgtctaccggcgagaaggagaagctgccgggagagctggagccggtgcaggccacgcagaacaagacagggaagtacgtgccaccaagcctgcgcgacggggccagccgccgcggggagtccatgcagcccaaccgcagagccgacgacaacgccaccatccgtgtcaccaacttgtcagaggacacacgtgagaccgacctgcaggagctcttcnnnnnnnnnnnnnnnnnnnnnnnnnnntacctggctaaggacaagaccaccggccagtccaagggcttcgccttcatcagcttccaccgccgtgaggatgccgcgcgcgccatcgccggggtgtctggcttcggctacgaccacctcattctcaatgtcgagtgggccaagccgtccaccaactaagccagctgccaccgcgtgctcggcccaggaccctcggcgacagaaggcagcctctgagagagcgggctccaa

SEQ ID NO: 9650 - DNA, 1045 bp, Macaca Fascicularis
  misc_feature (1)...(1045): n = A,T,C or G
acaagacttcacagtnnngnnngagagannncgnnggctgctcagactnnnnnnnnnnnnnnnnacggacgnnnnnnnnnnnnnnnnnnnnnnnnnnnnnnngacccaagggagcctgcgactgatcctcaacaccaagctctgggcccagatgcagatcgacaaggccagcgannnnnnnnnnnnnnnnacagccatggacaccgaggaccagggcgtgaaggttttcctgatctcggccagctccaaggacacggnnnnnnnnnnnncagccctgcaccaccgcatcctggcnnnnnnnnnnnnnnnnnnnnnggagcaggaggccaagatgcccgtgcctgaacctggggcagccccgtccaatgaggaggatgacagcgacgatgacgatgtcctggctccttcagnnnnnnnnnnnnnnnnnnnnnnnnnnnnaggggacgggcagacgaccgggagcacatagcggccgggagcccggctgcannnnnnnnnnnnnnnttgtccgtctgtccgcccgcccacccgcccccacnnnnnnnnnnnnnnnnnggtgcggggccaggaaccacacaccccgctgggccggccacagtctggacccgcacgtcctgttcaaaagcagactcgggaactgcctgaatgtggtttgggacatgagacctcatcatattgatgagcgaaacaaacaagaacatttctccctcccctccttcgaattgaaatggcacattaagacttgtcacggcttctcactgggactggagacctcgttccttcaccctgcgtgtcgccagcctctgggtccagccagagcccctggcttctccgctgcccacgcccttccctccctgctgcggggccccacccttgtggggagcagctggccctctgcccctgcctggggctccccgactacagtcctgggacccccacccagcctggggactgctctgagtgtagacactgggcccattggacatgctgttaactactatcttcatttcccacttcccctctctgattgggggtgtatattaca

SEQ ID NO: 9651 - DNA, 753 bp, Macaca Fascicularis
  misc_feature (1)...(753): n = A,T,C or G
atncacatccanantnnnagggggcannnnnnnnnnnnnnnnnnnnnnnnnnnnnnnnnnnnnnnacatcaacgccactgccatgctagagcaccccgagtactcaggtccccttctgccagcctcggctgtggcccctaggccctcagcccttgacaggaaggtgacccccctgcaaaaggagctgcaggagacactgaaggggctgctggggagcgccgacaggggcagcctcgaggtggccacgcagtatggctgggtgctggatgctgaggtgctgctggacagtgacggccagtttctgcccgtaagggactttgtggcacctcatcttgcccagccaactgggagccagccaccacctgcaggggctaagaggctagctttcctgcggtgggagttccccaacttcagcacccgaagtaaggacttgttgggtcgctttgttctggcccggcgacacatactgnnnnnnnnnnnnnnnnnnnnnnnnnnnnnnnnnnnnnnnnnnnnnnnnnnnnnnnctgaatggcagaaaggcgcctacctcaaggacaagatgcgnnnnnnnnnnnnnnnnnnnnnnnnnnnnnnnnnnnnnnnnnnnnnnnnnnncgcctgcctctctgctggaagtctagccgtgggtgggcaagaagggtcacccttgaggacaaacctccgtgcaggaccttggccagagtggggagggtggccagctgctctgagggacagagcatcctcttgtgtgta

SEQ ID NO: 9652 - DNA, 738 bp, Macaca Fascicularis
  misc_feature (1)...(738): n = A,T,C or G
cagcgcccagtanncatccgtnatcagagnttcctggcctcctggtttcccaaggagcaagacctctgtccgccctttggcctggcctctgctctgactccttttttacataagaaccaatctgtgttttacattgggctaagtggattccttatccctttgttatatatattttttgcaacttggatttccagtttgtttacagagtagtcttaggtagtagcaaaagagccaaagaagagatttgtattgctgagctcaaagccaagcagaggccggcagtggaggctgagcagggactctccaggcttctctgcccataaacacccgggtcccagcccctccttcctttccctttggtgctccctcctccccatgtaccattgcgcgcgcagctggagcagaataccctcatttttaggaatctagtgatgcctcttgcctcagggaaacgtttctttgatggggagtttgagatttctttttcttgtttatgctttatttgtggtaatgaaagagcgaatgactgaacagccatggcaaggcagatctacaggcgaggccgcagcagagggtagggcagagcggcctcggggtctgggggctgcaggggtttccttggtgcagcgaaagtctctgagcacttaccgggcgtggccgtttcttatgtgtgagaggggctgtggcttttgtgcagcgactatgttggtgttaggggtggtgtggagattgttaatc

SEQ ID NO: 9653 - DNA, 736 bp, Macaca Fascicularis
  misc_feature (1)...(736): n = A,T,C or G
agacatgtgagatnnnnnnnnnnnnnnnnnnnnnnnncattaatgacannnntgggggtaaacccctagaagtggagatggcagggatagaatacatgaatgatgatcctggcatggtggatgttctttacgccaaagtccatatgnnnnnnnnnnnnnnnnnnnnnnnnnnnnnnnnnnnnnnnnnnnnnnnnnnnnnnnnnnnnnctggactaatagtgaaagagtggaatagtgtgaaactgcatgctacagttatgaatacacnnnnnnnnnnnnnnnnnnnnnnnnnnnnnnngtacaannnnnnnnnnnnnnnnnnnnnnnnnnnnnnnnnnnnnagagaatcatttgatggccgaaatattttaaagatgnnnnnnnnnnnnnnnnnnnnnnnnnnnnnnnnnnnnnnnnnnnnnnnnnagggcttgggacacagagagctagtgggtgtgatacagccttgtttgagaacttctactttnnnnnnnnnnnnnnnnnnnnnnttcacatctctcagaggttcaccatagacagcttnnnnnnnnnnnnnnnnnnnnnnnnnnnnnnnntctcctgaggtagatcttggaaagcactagaaactgaacatcctcaccaggtgctgaagaaaagtctcttcattttaattgccaagcagagatgtgcacatttggatggtgactttcctgggtggtgcctctaatggtgtctacagccatcaaactaccag

SEQ ID NO: 9654 - DNA, 667 bp, Macaca Fascicularis
  misc_feature (1)...(667): n = A,T,C or G
gctannnnatctagaacaaaatcaaatattcatcacgttgggttgaaaagttggaggatttcgcatcttattgaaaatttttcaaaaatgtttttgtacaaatgaatggcattgcgccaggctgcccacgaacaccacgtgtggccgattcccagcagttgcccaccagcttccacaggggcagctccctcctggcctcccctcccttcacgggtgtgaaatgaaatgacggagcgggaggtgctggctggggtcgggctccacgctctggatgggacggggccacagcacacgccagccggtgcaggattcttccaagtgcgaaactcaagcaggggatgcgacgggcacggactccaagggagcgctcgacctgaagtgtcttaggctggtttcctgttgaatcttctgtttcccagataacagcaaatggctacattccagaaaaaaaatatcaacttaaacaactaaaataactgaactaagggccagtacgccttcgaagaattgggtttcagaatctcactgggccccctcnnnnnnnnnnnnnnnnnnnnaaactaaaccaaggggagtaaaaatgaaaaccctgcttcactttgcaagtcaagtcaaaaacgctgtgtttctgtttttcaatctnnnnnnnntnnnnnnnctgggcctc

SEQ ID NO: 9655 - DNA, 728 bp, Macaca Fascicularis
gtagctgggactacaggcacgcaccaccatgccaggctaatttttttgtatgttagcagagatggggtttcaccatgttggccaggatggtctcaatctcctgacctcatgatccgcacaacttggcctccaaaagtgctgggattacaagcgtgagccaccgcgcctggccctaaacatcatttttaagagcattgggatatttcctgaaaaggtttatgaaaaagaagaatctcatctcagtgaagaatacttctcatttttaaaaaaagcttaaaactttgaagttagctttaacttaaatagtatttcccatttatcgcagaccttttttaggaagcaagcttaatgcctgataattttgaattccctttcttgcaggaagggctatgaaaagctagaattgagtgtttaaagttcaacatgttatttgtaatagatgtttaatagatgttctgctactttgctgctatggttttctccaagagctacataatttagtttcatataaagtatcatcagtgtagaacctaattcagttcaaagctgtgtgtttggaagactatcttactatttcacaacagcctgacaacatttctatagccaaaaatagctaaatacctcaatcagtctcagaatgtcattttggtactttggtggccacacaagccattattcactagtatgactagttgtgtctggcagtttatatttaactctctttattt

SEQ ID NO: 9656 - DNA, 772 bp, Macaca Fascicularis
  misc_feature (1)...(772): n = A,T,C or G
gcctcaccacgcagcagggagatgacagaccaggtgacaggggccacagccgcacggnnnaggatggagcttaggaggaggaaggtgggggcagcagagcagttcttggtcctccggtgctggcattcggccacaaggttccaggtgtggttgttgaggataacaccaatgataaagagcaccagggcgggcacgccaatggccgccagcccgtacaggtagttccgggccggcgagcaggggcagtggaaggccaccacagaaaacagctcctggctgcccaccgtgcccagtgccactagcccgttaaaaatcatcacatctttgctcttgaagaagagtgacaggaagcggaagttctctgcgatcagggctgccatggtgacggtcgtggcggggtggattgcaggagaggaggcaggaggagacgggattgacagttgctggtggtactaggaaggggcgcaggctgggagacgccggacggcagggtgtggttgtgctattttatccccaactgtggttgacctggtgtttccttgctgtgtccatccgcgagtgtcccgaagaacctcctcttctgcagccgtgaccccctctcctatccagcagcctcccagcagccctgctccaccccgcctgccagcaacaggaagccctggtaagagcaaaggctcagcggtgccaccagctcatctggagattattctgccttggtctgggctgcagcgatgctggcaacctgccgggaagtggccatggcctcgggcaa

SEQ ID NO: 9657 - DNA, 725 bp, Macaca Fascicularis
  misc_feature (1)...(725): n = A,T,C or G
taattcagtcaagcacnnnntactcacatccagatttattttnnnacagtgcagacacaccagatgaaactttaaaatcctactttttgtaagcttatcatacatgagttgcagtaatttgtttgcttgtttaaccacaaccactattttaatgatacactaaagataacactatttagttttttcagaaacatctgcattatatgtgtgttggttgtggattttgtttctaaaattggcttagtccaataaataaagaaaagcattaaggacttaaagcaacaataaccaaataaaaacttgataggatctttgaagtctatttaaatattcattccattacatctagactcaccaagaactacatgttatgatgttaagttgaagttgaaacatgatgttttgcattaaatttaagatatgcaaatttatgtagagaaaataaatgttatataccctataatgttctttcacctaattagtatttaattatatggatttgttttatattataaaagatgctttgattttgtcttttgatattgacaaaattttttggatatccttatgttctcaagtctgtatctgcctcccctgccttatttcttatnnnnnnnnnnnnnnnacccattgtgcttctttgtaatcaaagtttgtgggggaatgggcttattgaatgtctaaaaactaagtttaaagtgtttgttaccctaagttttttacat

SEQ ID NO: 9658 - DNA, 723 bp, Macaca Fascicularis
  misc_feature (1)...(723): n = A,T,C or G
gtagctgnnnnnnnnnnnnnnnnnnnnnnnnnnnnnnnnnnnnnnnnnnnnnnnnnnnnnnnnnnnnnnnnnnnnnnnnnnnnnnnnnnnnnnnnnnnnnnnnnnnnnnnnnnnnnnnnnnnnnnnnnnnnnnnnnnnnnnnnnnnnnnnnnnnnnnnntgctgcacctggccatgatgatatttattaaacaccattattcacatttaaaataataacaatactttttgtttttcaaaaataaaatgcaatgttatataaagctataaactgagttctttatgatatttgagcaacaacaactcaggaatataacatataagggagatgttaatttaaaattttccactaaacttactatctattaaccaaagcttaaaattttgtattcttcagttagataagaccttttacccatttaatttgtctttaaggacagtcatttggcttctgaatgtttgaaacgattttaaaaaataagtagtgctatggtggttatttctataattctaacctttgatagtaatcagaatgtattacatttcatttctgaatagcttttgaatttatgaaaaattattaacaatgaaaaattggtaattttatgtttaaatattatattagcttatttctcttgcattaatagtactgctgtttttgttttgcttctttatatttatgtctagcttttatatgtaatttatctagtttataaaatgtgat

SEQ ID NO: 9659 - DNA, 743 bp, Macaca Fascicularis
  misc_feature (1)...(743): n = A,T,C or G
ctatgcaggcgagccgtacgtgccnnnnnnnnnnnnnnnnnnnnnnnnnnnggacgaggtgtccctgctcgagggcgaagctgttgaggtcattcacaagctcctggacggctggtgggtcatcagcaaatacctgttccctgcggtgacctggatctgctaacctccacccctgcatagactgtggaaggattgctggaagggtctcagttgcacagaccaggaaactgaggcccacagatcaacagaagacgtcacaggctacttcccgtccatgtacctgcaaaagtcggggcaagacgtgtcccaggcccaacgccagatcaagcgcggggcgccgccccgcaggtcgtccatccgcaacgcgcacagcatccaccagcggtcgcggaagcgcctcagccaggacgcctatcgccgcaacagcgtccgttttctgcagcagcgacgccgccaggcgcggccgggaccgcagagccccgggagccctctcgaggaggagccgcagacccagcgctctaaaccgcagccggcggtgcccccgcnnnnnnnnnnnnnnnnnnnnnnnaaccgctgcagcgagagcaccaagcggaagctggcgtctgccgtctgagggtacagcgcagtccccagctagcgtctcggcccctcccgccccgtccctgtatatacgtgttctatagaacctgttgtctggacgccgaggccagccccggccccttccagcgccgctcccgcca

SEQ ID NO: 9660 - DNA, 224 bp, Macaca Fascicularis
cgcaggcaaagctgatggagcaggagagcgccctgcgggaactgcgtgagcgcgtgacccaggtcttggctgaagccggcagggaccgcgaggacgtccgccctggactgttcctggcgctggaggcagtgagtcagcagaacatgttcagcaaaaccgtgcaccatttaatggctgccgccagggagttcagggggaaaccagtgaatgttgaaggtcagagg

SEQ ID NO: 9661 - DNA, 760 bp, Macaca Fascicularis
  misc_feature (1)...(760): n = A,T,C or G
gccgcaagcaccggctaccagnnnnngtgccgaggacatgtgctggcccagccgcaagccagggacatgtgcttgaggcatctgcccaccatgtgccaccttgcccacatttggtccacgcagagctgcatccctcttccttctggctccggggcctgctgggggttctcggggccgccatggccgcagtcctcagcttctcgctctacagggtcctggtgaagagccagtgaggcccctggtacctaagtcccctcccctgacggtgtggctcactgctggggctctgcaggggcagcacagctggggtgcaggccaggctgccactctgggaatgcccttctgcccggactttttgtttctgaaggcagtcggtctgcagcagggcctcaggctgccatgcactgtcctggctcctgccagacccccagggtgggctgtggcaggtggctgagcaggagctcccgagtgctggccaccactgtcaggggttgcccacctctgggcatcatgtgtgttgggctggggaccacaggtgtgggagccggtgaccccagacccggaattctcagggctctacccccctttcctgatcctgggtggccagtgggtgtgaggagggctggaaggcagagctttgggccaaaagcaggcattgggggggttcccccctcaagtttggagctatttctgtgatgcagcaggaannnnggaggttgggttcctgattaaacttcactgtgtcttttccatcgggatc

SEQ ID NO: 9662 - DNA, 714 bp, Macaca Fascicularis
  misc_feature (1)...(714): n = A,T,C or G
gcaggcggnnnnnaggcaccgggantgggccagaagatggcagaccaagcctgggatctccatatggacaaccccctcgctttccagtccctcacaatggcagcagcgaggccaccctgccagcccagatgagcaccctgcatgtgtctccaccccccagcgctgacccagccagaggcctctcacggagccgggactgcagagtcgacctgggctccgaggtgtacaggatgctgcgggagccggccgagtccgtggctgtggagcccaagcagtcaggctccttccgctacttgcagggcatgctagaggccggcgagggtggggagcggcccgggcctggcggaccccggaacctcaagcccacggccagcaagctgggctctccgttgagcggcctgcaggggctgcccgagtgcacgcgctgcggccacggcatcgtgggcaccatcgtcaaggcgcgggacaagctctaccnnnnnnnnnnnnnnnnnnnnnnnnnnnnnggcctgaacctcaagcagcgtggttacttctttctggatgagcgactttactgtgagagccacgccaaggcacgcgtgaagccgcccgagggctacgacgtggtggcggtgtaccccaacgccaaggtggaactcgtctgagctgggcccctgctcccgcccctgcttcttaannnnnnnnnnnnnnnnnnnnnnatatgtttcgccc

SEQ ID NO: 9663 - DNA, 651 bp, Macaca Fascicularis
tccacgtccacgtccacctggggacctcgggagcctaggcccctcctcgaaggcccaccagcccggcactcgtgctgagccccaggcacgcagggccggccacctctctcctgaagccattggccgctcctccacccagtgcttctgcccacgcctgccccagcagcccctctgcagggtagcagttgcctgggcctacccacagcactggtgctcacctctacctcctgccctcgggccacacagcacggcatggccagcacgcagaaggagcccttccgggacccaggacccccgtggtggactccacggcgcacgcttcccaaggtggtcccacggagggtgctactgggcaccagtggactcgccccatggcccattcccgggagatgagggctgtggcctgcatgagctgccagatgagtaagggaaccccggccaggcggccctgccacagtccccaaagacactggcctcctgctccagcctccctgtcctggccccacctgtcctgttgctgccagcagggcccttgtttgggattatgaacaaaccacacagactttgaggacctacatggtcctacgttcacggcatcaacactacccgcactgctgttagacgctccaccattcctggttctttgcgaac

SEQ ID NO: 9664 - DNA, 746 bp, Macaca Fascicularis
cagcagcaccatctgggctctgggtctggagctgggggtacaggtggtcctgcgggccaggctggcagaggaggagctgctggcacagcaggggttggtgagacaggatcaggagaccaggcaggcggagaaggaaaacatatcactgtgttcaagacctatatttccccatgggagcgagccatgggggttgacccccagcaaaaagtggaacttggcattgacctgctggcctatggggccaaagctgaacttcccaaatataagtccttcaacaggacggcaatgccctatggtggatatgagaaggcctccaaacgcatgaccttccagatgcccaagtttgacctggggcccttgctgagtgaacccctggtcctctacaaccagaacctctccaacaggccttctttcaatcgaacccctattccctggctgagctctggggagcctgtagactacaacgtggatattggcatccccttggatggagaaacagaggagctgtgaggtgtttcctcctctgatttgtattgtttcccgtttctggctccaatttggagagggaatgctgagcagatagcccccattgttaatccaatatccttatgggaatggagggaaaaaggagagatctacctttccatcctttactccaagtccccactccacacatccttcctcaccaactcagagctccccttctacttgctccatatggaacctgctcatttatggaatttgct

SEQ ID NO: 9665 - DNA, 713 bp, Macaca Fascicularis
  misc_feature (1)...(713): n = A,T,C or G
tcaggatccccacaccctcaaccaccagaacttgacccactgttcccgccatggctcagggcctaacatcattctcacaggggactcctctccaggtttctctaaggagattgcagcagccctggctggagtgcctggctttgaggtgtcagcagctgggttggagctagggcttggnnnnnnnnnnnnnnnnnnnntggannnnnnnnnnnnnnnngggctaaacatgctgagtgacccctgtgccctgctgcccgatcctgctgtggaggattcattccgcagtgaccggctccaatgaggggacctcatcaccatccctcttcttggccccatcccccaccaccgttcctttcctcccttccccctggcaggtagagactctgctctctgtccccagatcctctttctagcatgaatgaaggatgccaagaatgagaaaaagcaaggggtttgtccaggtggcccctgaattctgcacaaggggtgggcctgggggaactcaagggagggcctaaagcacttgtaactttgaaccgtctgtctggaggtcagagcctgttggaaagcaggggatagagaggagccctggaggcagggcttgtccggatgcctaggggtgggcagtgccagcccctcctcaccactcttccccttgcaatggaggagagagccagagtggatactattttttattaaatatattattatat

SEQ ID NO: 9666 - DNA, 658 bp, Macaca Fascicularis
  misc_feature (1)...(658): n = A,T,C or G
atgctatgagnnnntccccaggcccaggcccgagaccaccatgacggctgtcgcctgcagctggtggagacggggcccgggctccagggcccgaggaggaaaaggattgccaaggctccagggcactcctcaaagcagcgcctgcctcctccctcctgggtcttccctctccctgcctcagcctcctccctcagccactcccaactacgagagccgaggcaggaggcatgggaaacagtgcagtgacctgcccccacaccaaccacccatgttcaggagaagaggacagacatggcgcctctaagccacccgtctcctgtggagcgggtggccgaggggccctggcatctgactcaggccacaccatggaatcactgcatccaaggccatccctgccctctgagtctgtttccccatttgttcagtggagagaattaaccaagtcccacttttgaacaagttgatgattctgaaaccggcccaatttcctaagaagccggatgcttgagaaacctacatttggacaatgacaggcagctcctacagcctgcgggccacctcctcttccttggctcctgctttcttttcagacgatatcaacctacaacattagtcagggagggggacagggatggacctgagtttcgtctcctgtctc

SEQ ID NO: 9667 - DNA, 749 bp, Macaca Fascicularis
  misc_feature (1)...(749): n = A,T,C or G
taagagaagatcgagataggnnnnnnnnnnnnnnnnnnnnnnnnnnnnnnnnnnnnnnnnnnnnnnnnnnnnnnnncatagagaatgccctcagcaccagctcctctccgtcaggcacaccaatgaacctgcggcggcacgttcctgnnnnnnnnnnnngatctgaaagtggagcagacaccatttcagtaaatcagacacaagtaaatttgccttctaacactgagtccacggacctcccatcttccaccccagtggccaattctggaaccaaacccaagactacggctattccaggtatttcagagaaggaaaaggctgctcagtgggatcatttctgctgtttgtctcctgccctgtgatgacaaaaatcttcaaagggaggcaagtttgaaacannnnnnnnnnnnnnnnntcatttcacaaatacttactgaacagcaacatgttctaggcattctattaggttctattgagaaagcagttatgaataaggatggtctctgccccataggaactcaaactctagttggaggatatnnnnnnnnnnnnnnnnnnnnccttctcctcttctcaattgagaatttcttaatcctgcttattcaaaaagcttcccaagcaaggaatcaaatcaaaatannnnnnnnnnnnnnnnnnnnnnnnnnnnnnnnnnnnnnnnnnnnnnnnnnnnaatccaaccaacttcttttttaaataatcagaactaatcannnnnnnnnnnnnatgta

SEQ ID NO: 9668 - DNA, 741 bp, Macaca Fascicularis
  misc_feature (1)...(741): n = A,T,C or G
gcannngntgnngcccttcccatcaccatnnnnntcaacaagttttccaagtactaccagaagcaaaaggacattgatgtggaccagtgcagtgaggatgtaccagagaagtgtcatnnnnnnnnnnnnnnnnnnnnnnnnnnnatttatgcacnnnnnnnnnnnnnnnnnnnnnnnagtctctcttctgtaggcattgtggtgagcgatcccgactccacagacgcttcaagcattgaagacaatgaggacatttgtaacaccacctccttggagaattgcacagcaaaatgagcgggggtgtttgtgcctgtttctcttatcctttcccgacattaggttaacacagctttataaacctcaatgggttcgttaaaatcatttaattctcagggtgtacctttcagccatagttggacattcattgctgaattctgaaatgatagaattgtctttatttttctctgtgaggtcaattaaatgccttgttctgaaatttattttttacgagagagttgtgatatggttttggaatataagacaaatggcattgggtggggtttgtggctacagcttatgcatcattctgtgtttgtcattnnnnnnnnnnnnnnnaactttaaattactcatgagtagaatcagaggtccagctgactgagacgacatgcatgtgagatccacaaaatgagnnnnnnnnnnnnnnnnnnnnnnnnnnnnntaaacannnaactaggagcct

SEQ ID NO: 9669 - DNA, 685 bp, Macaca Fascicularis
  misc_feature (1)...(685): n = A,T,C or G
gagtggaaagccctggtnnngatgagcactccttgttagctaacatttaaattctttttgtgacctcagaatgtctctggatctttcttcattgactgactctgagccacatcatccatagtttattgttagtatgaacacagctgtaacatttacctggtatctacatccttatctacattggagaatgttttctacctcagaagaaccatttgcctcctttaagaacactgatggcctacactttttggatagaaatagaatttgatttcagaatgtatgcttggtgagtctgagtgcccgggaacacttttggaataatttattagacattaaacttctgtgattaatcacttttatagatttactcagtctttaaaatttatctatgatttgccagagaaaaatggtggtaaccatggaaatcgggagtgaaggagcgctgctccgttgtggcttgcctctgccctttgaggtccttgagctactcttcagctctggaagttgtggacaaaccataggaatgcatgtgtgcgtgtggtggagtgattgtctgtggatgacaggccctggctattgattggtattgcatcagtttagcaaattcatttcctccttcttgatggcctaaatacatgtctgcactttgctcctcttaaccagttgtaacgtcttaccatttccc

SEQ ID NO: 9670 - DNA, 709 bp, Macaca Fascicularis
  misc_feature (1)...(709): n = A,T,C or G
caataangccttcacnnnnnnnnnnnnnnnggagttccnnnnnnnnnnnnnnnnnnnnnnnnnnnnnnnnnnnnnnnnnnnnnnagcggcgggacaagctctacgtctgcgaggattgcggctacacgggccccacccaggaggacctgtaccttcannnnnnnnnnnnnnnnnnnnnnnnnnnnnnnnnnaaaaagacatcgaaaaaactggcagcccttttgcagggcaagctgacgtccgcacaccaggagaataccagcctgagtgaggaggaggagaggaagtgaggagaaggaaggggaggacagacgttcannnnnnnnnnnnnnnnnnngtggatttttggttttcagcgtcccccaccccgctggctcttcttaattagaagtgaccagttcacctctgtgtccttttgaaacatcagcagtagggtnnnnnnnnnnnnnnnnnnnnnnnntagtgacatcaggccctgtaacctgtgtcctgtctggcgcagttgctcgcattcaccaaagtttgttttcnnnnnnnnnnnnnnncaagaacaccgtgtgggatttttttttcccccccaagnnnnnnnnnnnntggaaggagaggtatttcttagagagatcatcatnnnnnnnnnnnnnnnnnnnaaaatacttctacttgaaatgctgtttaagcaaggaaaatgaattttgttattctgaaagag

SEQ ID NO: 9671 - DNA, 709 bp, Macaca Fascicularis
  misc_feature (1)...(709): n = A,T,C or G
actggtgnnnnnnacaaagtatntnnncnattagagttttcagaacccaacattgttaaagatactacttgtccgggagttgtgtattnnnnnnnnnnnnnnnnnnnnnnnnnnnnnnnnnnnttccaccattcagcgggttatcagaattaataaaagtatctattatgtgcacttaagccgcagctgctatagnnnnnnnnnnnnnnttgttccagctaggcaatgcctctttttttttttttgaagcagttctctttataaagtgttattttgatagtttgtggattctaaaatatatatatatatatttatataaacaccatataagtcaaatatgtatttaacaaagcaatatgtattcattcactttcaagatttgttttggtgtcaaaataatatgaaaaggtagatggagttgcttctnnnnnnnnnnnnnnnnnnncaatacgtatcttcatacacgtttggaaacgtttcctgcagcattaggtatgacttgttctgagtactgcttccggtgctaaaatgaacaaagaatttgtacttaatggcatggactctggagaatctatgcgaatcagcctttctaccttaatatctcccccaaannnnnnnnnnnnnnnnnnnnnnnnnnnnnnnnnnnnnnnnnnnnnnnnntctgcgtctttgatgatggtttggaacattacctacgatttactctcaa

SEQ ID NO: 9672 - DNA, 741 bp, Macaca Fascicularis
  misc_feature (1)...(741): n = A,T,C or G
agcggggatnnnccagcagcggggcccgggagcacagaaccacgtgaaggagagatgagccacccgggctggacaggggcgcacgtgtgcaaaaagacggtggtgtgtgtcctctcctgcatctgcgtnnnnnnnnnnnnnnnnggcacgcgtgtggtgaggtctgagagggccccgggctgcgctggcgtgggctgcacagacgcagacagccccggccacgtcctgcggccccctgtcggatggatgcgtgccgtttgtagagaagagcctttgggcccgttcgctcgnnnnnnnnnnnnnnnnnnnnnnnnnnnnnnnnnnnncttctgtggggttttcctttctctggtctccgtgcagcccctgccctccctcgggtgnnnnnnnnnnnnnnnnaggaacttggtgggggcgtctcccccaggagggtgtgatttgcagacttgggtctctgctctgctttgggggtggggcttgctttcacagagacccctccttccctctcaccccctcctctcctggccttgccaggagtcttggctgttggcagctcagaggtgggggaggcctgtggtgtggggtgccctgcacctgctcctgtcgccccttcctgctgcctcctccatgcccagggaacgcctatggtgcagtcctcaggcaaggccaggacggggctgaggccctgcgtggagatgctgcaccagcagaaggctgagacccgcttaccttagttcatct

SEQ ID NO: 9673 - DNA, 815 bp, Macaca Fascicularis
  misc_feature (1)...(815): n = A,T,C or G
tatatagtatttccttgtatannnnnnnnnnnnnnnnnnnacttgtgttgtgaacgtttggagactgctgttggaagaaagaaaagtgtgtgagaaagcnnnnnnaagcaaaagcgctgccactacaggtggacaaaagtgaccatataaaagaagttgtgctatttaactctgaatacttggagaaactaggtgaagatgcaaccagaaaggagaatatgtatgcatgaagtctcannnnnnnnnnnnnnnnnnnnnnncaagatgacagccatgatgaaactttttaaaaaactaaaccagaagagactttaaaataagagaaagaaatcataaatgtagacatatgcttggctaaagtggaaatggactttaaattttaaaaagctcatnnnnnnnnnnnnnnnntacacttcaaaaattattgtagactcagaatttgttctatttttgtgcttagtatttaaacctgaacattgaaacagttttcctccttgtctttcttaacagtaagtcattatatttacctgttttttaacacaatgtatgtgatagtcaacaaatcagtttttcattattattcatcttctatacccatgcataaccactatacatagtttcttttgtacttgaatatacaaaacatgaacacagtgccatatgaataatttcacatacagaaccattttttccctgaagtcctgtggacttgcaaaaatatatatatattgctttgttaatttgtttttatatttcatatatgtaataaaggaatatgatttcttgaaaaaaaaaaaaaaaaaaaaaaaaaaagg

SEQ ID NO: 9674 - DNA, 746 bp, Macaca Fascicularis
  misc_feature (1)...(746): n = A,T,C or G
cttagttcaatgacattcaggtcagtgtcaatcaacatgcctatcttttaaaccagatttttttctttctttttttttttttcnnncttgagacgaagtctcactctgtagtctaggctggaatataatggcatcatgnnnnnnnnnnnnnnnnnnnnnnnnnnnnnnnnnnnnnnnnnnnnnnnnnnnnnnnnnnnnnnnnnnnnnnnnactgnnnnnnnnnnnnnnnnnnnnnnnnnnnnnnnnnnnnnnnnnnnnnnnnnnnnnnnnnnnnnnnnnnnnnnnnnnnnnnnnnccatctcttgacctcgtgatccgtccgcctcggcctcccaaagtgctgtgannntaggcgtcagccacagcgcccggcctaaaccagatttctttagggcacaatcgttcctggaatctcactcttgtttttcacagtaatttaaaaaatgtttctactccaattaagaatacatatgatattatcatatatgctgatgaaacagatttatgagaaaagttttttttaataaattatttaatcctagctctttgttattcaccaactttttaaaaaagtgtttgaaaatgataaattcttgactttggggattagtttattcttatggcatcattataaggcttaattgtggaaagctaagtacttgcttctgttccttccaatgagagattataacataaactatcaaaattattctgctaatatacctagatttttatttttaggtctc

SEQ ID NO: 9675 - DNA, 680 bp, Macaca Fascicularis
  misc_feature (1)...(680): n = A,T,C or G
gacagnnnnnnnnnnnnnnnnnnnnnngagcccacggaccccgcgccggactgntggtgaggcgccctcgtggccgcaggactggcccgggaggctccccggatcccaggcccgcgctttgctctcctgctccggctgaagtgagcaggtgcaccagcnnnnnnnnnnnnnnnnnnnnnnnnnnnnnnnnnnnnnnnnnnnnnnnnnnnnnnnnnnnnnnnnnnnnnnnnncaaggaaaggagacacatccaaaactcatatgcggattgtgnnnnnnnnnnnnnnngtacaaagacatccacgtcgctgagagccggggttgcctgcggtgggcggtgggaaagaagccagcgtggaagaannnnnnnnnnnnnnnnnnnnnnnnnnnnnnnnnnnntcagttaatttgtatcgttttatatttttttgtatacgtttgctagctctaaaaaagtccagacgcaatgacacttcgtaagcaacgagttcacctaagtaaggctcagatcctagttttaaatagcatttcccattaaaatgaagttgaagaaacagctgcttctggggctggggcaaaaatttcaaggtgagcctggagcattgtgtgtggtaaagtaaaataagcgctnnnnnnnnnnnnnnnnnnnnnnnnaagggtagaggannnngnnngaaggga

SEQ ID NO: 9676 - DNA, 772 bp, Macaca Fascicularis
  misc_feature (1)...(772): n = A,T,C or G
aatgacagagatacatagagtggnnnnngcatgaagctggatttagaagacttactccaactgaagtaaggatacttggctgccatagcataacagtgaagtgactgaaaaatcnnnnnnnnnnnnnnnnnnnnnnacttaaacatgtttaaagtatgttttgttttgcagactttttgcatacttatttctacatggtttaaatcgactgtttttaaaatgacacttataaatcctaataaactgttaaacccaccttccagccttttaggagttgctaaaattttaacagttacttcctgctttttatcacagttgatttctgaagactacattgcgaagcagaannnnnnnnnnnnnnnnnnnnnnnnnnnnnnnnnnnnnnnnnnnnnnnnnnnnnnnnnnnntcactatcagatgttgcctgtgtttccataaagcaaaatgctgattttggtgaaaaacatcattgcttctagagctgggaggatctgcagactttcacagattcataggacaagaaaagaagcataggtgcttttaggtgccattaggtattnnnnnnnnnnnnnnnagggtgctctatgagattgtactaggcctgtgaagagtggtaagccaaataggtctccatgggagatacaatatgtaagtaaataaacaatggtttgctagttcctgttggtgtctccatcacaagtaggttttaaaggaacctgggttcttagattttgttagactttttaaactcaaggatgagcataagtgctga

SEQ ID NO: 9677 - DNA, 768 bp, Macaca Fascicularis
  misc_feature (1)...(768): n = A,T,C or G
atggaaagttgtantnnncaatcatgctaggggccaacataggtatataaaatgtatgtcacagaaaaacacctatttgcaacgctaacctaacgaaatttccatgaagaaccaagccagggcagcatctccttagtcccagctcaggctctctgccttccagaggcacccttctccagtgactgaccacctcatctggctcctccttgcagacacagttgtcccttgtttcgaacacgaatttccatttacctggtgggaacacgaaacaggagtctcttctccaagtttgatgggtaagaggcagccttttttcaaagtcagatttcctttctcggctgttcaggagagcgtctctacgactgggtagctcaaggccagccaaaggcagctacttttccacggaagcccgtctgctgcctccgtggcttctccagcccttgaactggccccacacgcaccccaggtcccactcctcagccgttttaggtgtagctgtggggcccgttcctaggtctgtactcactttagggaggcttcactgactaggctttcctcctgcatgttgaatttccttcagctttaagaggaagagtggagtaaatattctaagtgatttaatgcactttgacttgtataaaactttgtgatagcgacggtatctatagccctttatacaagcagtggatcttgagctctccttccatattgtaaataggattgtattcttgaaaactgctgtagaaaattcatctgtgnnnnnntaca

SEQ ID NO: 9678 - DNA, 755 bp, Macaca Fascicularis
  misc_feature (1)...(755): n = A,T,C or G
cagcaccacacgcacgtgnggtgtnnnnnnnnnnnnnnnnnnnnagcttctatnnnncccgggtctggtggatgttccgtgtgtttggccaccgcaccgtatcagtgctcaatggtggcttnnnnnnnnnnnnnnnggagggccacccggtgacatccgagccctcacgcccagaaccggccgttttcaaagccacactggaccgctccctgctcaagaactacgagnnnnnnnnnnnnnnnnttgaatctaagaggttccagctggtggattcacggtctcaagggcggttcctgggcaccgagccggagccggatgcagtaggactggactcgggccatatccgtggctctgtcaacatgcctttcatggacttcctgactgaggatggcttcgagaagagcgcagaagagctccgtgctctgttccagaccaagaaggtggatctctcgcagcctctcattgccacgtgccgcaagggagtcactgcctgccatgtggctctggctgcctacctctgcggcaagcctgatgtggccgtgtacgatggctcctggtccgagtggtttcgccgggcccccccagagagccgtgtgtcccagggaaagtctgagaaggcctgagccgtgacgtctcctgcttactgtataactgcggctggtttagtaaccccatgacttgcagccggttcatacctcttaggtgaaggagattgatgtgtttttagaattgctgtgcaaggctcaccctctctc

SEQ ID NO: 9679 - DNA, 1200 bp, Macaca Fascicularis
  misc_feature (1)...(1200): n = A,T,C or G
gcaggcaccacggccgccantgccccagcacgcctgtgcccgnncnnnngnnnnntggccggagagctgcacagcacatctgctatctcnnnctgctaggctcggagcagctacggggaggactgagagggggatgcaagggcagcctgcaggctatcagagtttcctcctcatcattagaggaaaagggagatggagaggtgaacagggatgtttttaattcctgcctcctccccggcatttcccctttccctccaccttgccagtccccgtggtaagacctgaatggtctttaaaaaaaacaaaacaaaagcaaaaaagccaaaaaacaacatatagggagtccaagttggcagtaacaggaacctatccccaagccccaaatcaacgtggcgtcttggcagnnnnnnnnnnnnnnnnnnnnnnncttgttgcattttgttttgttataatcgagacgcttttctgcggctcccggcgtaaatgcactgagtgggagggacgagcatgctctccattcttctccctcataagtgtctccttccatactgagctgcagaaccacacgatgagccagcacgcacagtgagggnnnnnnnnnnnnnnnnnnnnnnnnnnnnnnnnnnnnnnnagacgccgtggggagggccatttgaacattacatccaatcaaagtgtcatttgcaacccagatgtaaaactctaatgatttggccatgaggcgctgcnattataagcagctggaaatgaatattaatggcagagattaaannnnnnnnnnnnnnnntattttttattgtcctgctacagctagtgtgcttttagagtttccgccgcagactacatttctagagttagagaaacccgctttttaaggctattgtcctttgttccttcatgtattatattgatagtttaaaaaaaaaaaattagtgtgattttttttctttgcttctttttttttctttcttgtttttctttctcccccttcagttaactactttttaattgcaattctaggtaattgtgcattgtgatgtgattgcttggctattgtctgaatatttccttttaattttttaattaaagactaatgctttgattggannnnnnnnnnnnnnngacagtgattaaaactatgtaatgaatataatcggtttcagtgcaannnnnnnnnnnncttttaaatgtgacttaatc

SEQ ID NO: 9680 - DNA, 792 bp, Macaca Fascicularis
  misc_feature (1)...(792): n = A,T,C or G
tcactgagcagcagagagctggatgagctgcactgggccccagagctaggagtcnnngcagacnnnnnnaaccacacaaaagcagtacagctgaagcccaggccccctcaggggctggttcgggtggtgggccggccccaacctcgactgcagtatgtagatgcccttggctatgtcagtctttttcccttgctgctgcgactgctggaccccaactcatcccgccttgggcccctgctggacattctagctgatagccgccatctctggagcccctttggtttacgctcccttgcagcctccagctccttttatggccagcgcaattcagagcatgatcccccctactggcggggtgctgtgtggctcaatgtcaactacctggctttgggagcactccaccactatgggcatctggagggtcctcaccaggctcgggctgccaaactccacagtgagctccgtgccaatgtggtaggcaatgtatggcgccagtaccaggctacaggctttctctgggagcagtatagtgaccgagatgggcgaggcatgggctgccgccctttccacggctggaccagccttgtcttactggccatggctgaagactactgaagggagggagaggaggggagccaggccactcataccattctggctctagagggacaaaggcttctggcttctgcccccagtcccttggataccagtaattcaaaccttcctcatttcatctcaggtgtctccttactgtcatcccacatagccctggggtgaatgtgaattcagagt

SEQ ID NO: 9681 - DNA, 749 bp, Macaca Fascicularis
  misc_feature (1)...(749): n = A,T,C or G
cacagggccaggggccccatcannnctgacatcccagaagactctccatcccctgaggggatcaggctttctccctccagtgatggcaggagggagaagggcctggcactgctcaaagaagagccggccagtccagggggggatggcgaggccgggctggccctggccccaaacgagtgtgacttctgcgtgacagcccccccnnnnnnnnnnnnnnnnnnnnnnnnnnnnnncctggaagggaaagggagcttcagccccgaggggcccaggaatgcccaacagcctgaaccagaggatcccagggagatacctgatagggggcctctgggcctggagagcggggacaggagcccagagagtctgctgcctccgatgctgcttcagccccctcaagaaagtgtggagnnnnnnnnnnnnnnnnnnnnnnnnnnnnnncntctccaagggcgagaatggaccctgatggacttggacatggagctgtccttgatgcagcccttggttccagagccgggtgagcctgagctggcggtcaaggggttaaattctccaagcccagcactcctgagagccggaccgcctcctacttgggctctgaagccagtccctcacccctgagaccccgcgcctctgaaggggcttggaaccagtccgcggctgcacatccttcttggcttcctggcgccccctggcgggagtgagcgaagcccctactattcaacggcctctctccactaccccgacga

SEQ ID NO: 9682 - DNA, 734 bp, Macaca Fascicularis
  misc_feature (1)...(734): n = A,T,C or G
accatcccactctggtatcatatctgtgcagcaggctccctgaggctatgcacacctgtgcacaccctgaggctgtggcgggtaggggtggggtgaggcccagctagcctcctctcacccctgctccagcccaccgcagtcatgtnnnnnnnnnnnnnnnnnnnnnnnnnnnnnnnnnnnnnnnnnnnnnnnnnnnnnnnnnnnnnnnnnagaagatgaagagatcccccttcttagtggggtcctccggcaatggcatcccctcacctggcaccttcttgaagtatttggggtggatgatgtcattgatggggatgttgagcatacggtcatctagagtcttcacctccacagtgcagcatgtgagagccttgcccagagggannnnnnnnnngaagaagatgttgtcattctccctgctnnngctagggtgtagcttctcctttacgatgaaaatgatgtctgctgggatgatgttggggccctgggcaggggacgccaaagggtgacaaggactagttggccgtgtgactttggccaagttcctgcctctacttgtctccatgtcttcatccagatgaatccccccagaattacttctgtactgnnnnnnnnnnnnatagaccactcagctggaggctcggnnnnncttcctcagacggcaggtagaacactgagctgggcgnnnnnnnnnnnnnnnnnnnnnnnnnnnnnnnnnnnaactccaggcatga

SEQ ID NO: 9683 - DNA, 576 bp, Macaca Fascicularis
  misc_feature (1)...(576): n = A,T,C or G
tggggccacatagcagcagaggactgtgtaagggagggaggggtagggacacgagctagacccagtctcctttgggatgtgggcagggagggaagcaggcttggagcgttgatttacccacagaatgtgatagtaataggggagggaggctgctgtgggcttaactcctgggttggctgttgagtggacaggtggggaaaaggcccatgagtcattgtaagcacaggtccaacttggccctgactcccgcaggggtacggggaagctgtgacagaaacaatggatgctgtggtcctctgcaggccctcacccctnnnnnnnnncatgcagactggcactgggcagggcctcttatgtggcaggcacatgtggcgctgtgaggccaccccacgtggggtcggtggtgagannnnnnnnnnnnnnnnnnnnnnnnnnnnnnnnggaaggagcaaggcgtggcctgtaggcactgtcnnnnnnnnnnnnnnnnaaagtgaggccgggagcctgagcctgggccggggcctcctccctccccagttcgactagggacagtgttaattttgaaaaggcgtg

SEQ ID NO: 9684 - DNA, 1159 bp, Macaca Fascicularis
  misc_feature (1)...(1159): n = A,T,C or G
gagagatgtaaatgtccnaatatggacatatcatctgtggactgantnngtaaaagacagtgtatgtagaagcatgaagtcttaaggacaaaatgccaaagaaagtggtcttaagaaatgtataaactttagagtagagttnnnnnnnnnnnnnnnnnnnnnnnnnnnnaaactaaagcaatannnnnnnnnnnnnnnnnnnnnaacannnnnnnnnnnnnnnnnnnnnnnnnnnnnntacctgtatttaaaaatagaaacatatcaaaaacaagagaaaagacacgagagagacnnnnnnnnnnnnnnnnnnnnnnntacgcaactgcacggtatgtgctgttttggttgaaatnnnnnnnnnnnnnnnnnnnnnncagctgtcagctttctcaaactgtgaagatgacccaaagtttccaactcctttacagtattaccgggactgtgaactaaaaggtgggactgagaatgtgtatagagtgagcgtgtgaccgtagacagaggggtgaaggaggaggaggaggaggcagagaaggaggagaccggggctgggaaagaaacttctcaagcaatgaagactggnnnnnnnnnnnnnnnnnactgtgtacaatgagttacggagacttgagggttcatgcagtcagtgttataccaaacccagtgttaggagaaaggacacagcgtaatggagaaaggggaagtagtagaattcagaaacaaaaatgtgcatctctttctttgnnnnnnnnnnnnnnnnnnnnnnnnnnnnnnnnnnnnnnnnaagagaaacannnnnnnnnncatcattatgtgggggctttgttctccacagggtcaggtaagagatggccttcctggctgccacaatcagaaatcacgcaggcattttgggtaggcggcctccagttttcctttgagtcgcgaacgctgtgcgtttgtcagaatgaagtatacaagtcaatgtttttccccccctttttatataataattatataacttatgcatttatacactacgagttgatctcggccagccaaagacacacgacaaaagagacaatcaatgatataatgtggccttgaattttaactctgtatgcttaatgtttacaatatgaagttattagttcttagaatgcagaatgtatgtaataaa

SEQ ID NO: 9685 - DNA, 725 bp, Macaca Fascicularis
  misc_feature (1)...(725): n = A,T,C or G
aggctggagtgcagtggcacgatcaccgcnnnnnnnnnnnnnnncctcctcaagcgatgctcccatctcagcctcctgagtagctgggactacagatgtgagccactacacccagttattttttttttatctttatttttagagacaaggtcccacagtgttgcccagcacaactggaactcctgggtacaagcaatccacccaccttggcctcccaaaatgctgannnnnnnnnnnnnnnncaccacacctggcctccaatctcttcaaatttcagaaccttacctttctatcactgtaacactgtttccctcacaggatgcaaggttatcatcaagaaaggcagtaaaggtgaaggtttctagcatttctctctcagtctcatttgatgcttgcatcttattttgcattgcacttaacatcttgacatatggaatacttgtcagttaggcttacaacagccttagagtgatcatgtgggtaatcttgatgagagacatgatcattaaattctaaccaaaatgtagcatccaaacataagacaaannnnnnnnnnnnnnnnnnnnnnnnnnnaagagaggataagggtgcccacctctgataatctgtcctagatcaaggcagtaaaattcttgatgtagtagtcggcagattccaggtagggcgcaggctccttggccagaccacatcatcacggcgggctgattctggtctctgtgcaccaa

SEQ ID NO: 9686 - DNA, 961 bp, Macaca Fascicularis
  misc_feature (1)...(961): n = A,T,C or G
tttacctgtagactgtggaactattttaccttaaggcctgaaaaagttttgtggattataaatttctttcatacggttgtattttctgatcattggtttcttaatatggttgtactacagtatacttggttgatttaggttgcacattcactgaattcactgagattattcctataattttagagtatcatttatttgaacaacatacattatcaacatgtttttgatatttgataatgaaaaaaatctttgcttgtttatttctgaaaaagaattgtatttagtgattattttagatagtgatattatagcattcatctgtgtgtaaattatttcatatagggaagagttctgatctgtacctatggttcttattgaaaannnnnnnnnnnnnnnnnttctgtgatgttatgaatacatttctactttattttgaaacatttgccaaactaaatactataacactgtataacattttaaaatgttaaagaactgcttagtgttagaagcagatcatttcccaaaattctaaaaacagcagcatatgttgttgcttgtataaagcctagggataatttttagactaacttccatggtgccctgttggcattagcactaccattgtaccctgctgtataataaacaatcttagacatttatcaactgttgatacaaatgttagtccctaaccactttttatatatgttttaaatttttgaaattcaagtgtacctgccataacataaaataaacactagactgtatcacactttgaatgatttctttaagatccttggatattcattctgtaataacaaagtttttgtttaaacttagtttaaaatataaaaactaatagtttaggaatgtcttaagtacagcattcgataccaggtnnnnnnnnnnnnnntttgtttaaatgttttgaaannncattttattgaaaaaaataccaaaatta

SEQ ID NO: 9687 - DNA, 716 bp, Macaca Fascicularis
  misc_feature (1)...(716): n = A,T,C or G
gacagccagtagaaactgcttctacaagaattgaaatgttctccctcagtggcacattaatggttacatttgattcctgaagtgctacttaccgaaattcatctgtcacctggaaattatatagtgctgaaagatgggcgtttggtaaacaagaatggatcatctgggcctatactaacagtatccctctttgggaggtggtacacaaaggactcattttacagctcaagtgggaccagcaattcagcaataacttacctgctaatattcatattactaatgatcatagctttgcaaaatattgtattggtatagggcatgtctatcattcagtttctgcatcatatacttggctaaatgtgcttatcagcttcccaagtttactaagaaattttgaagtgctattnnnnnnnnnnnnnnnnnnnnnnnctaaatattttttctcatcaataattgttttttaagttttatgataatgttgtccatttttttggcnnnnnnnnnnnnnnnnnnnnnggaacaatggaaagagcctgggtgtttgggtcagataaatgaagatcagaccgcagttccagcctcatttgcttgagactttgtgtgggtttgtatgtatgggagggtgaagagtgaggagtttcagggccatggcaaacatagctgtgcccttgaagagaatagtaatgatgggaatttagaggtttatgactgaattc

SEQ ID NO: 9688 - DNA, 680 bp, Macaca Fascicularis
  misc_feature (1)...(680): n = A,T,C or G
taagcacccctacatttnnnnncnatcattcttttaaatgacataaagtaatnnngcaatgttnnnnnnnnnnnnnnnncannnnnnnnnnnnnnncaaatctcttggaatgagtgactcaacaaaatgtaatttgaatcagatcctcatcccttgactatgtgaaaaaagtactctccttctagtgaaggattgtcacagannnnnnnnnnnnnnnnnnnnnnnnnnnnnnnnnnnnngtattttacgtatgcctgtaaattatttgtgaagaagaagaagaagaagaggaggaggaggaggaagaggaagaggaggaaggggaagagaaaggaaggaaggaaggaaggaaagaaaagaaaaaaaaccatgataccnnnnnnnnnnnnnnnncaaactcccttaaaaacaaacgttggtgacatagctagttaagtatcagtgagcctccaatctgggacttacctgttcctattgtttcannnnnnnnnnnnnnnnnnnnnnnngataagtttataacttgaaatgtgaactttttttttttttagtgttaagaacaaactactataaatgtaaaaaaaaagttttagagttctgttttcaaacattnnnnnnnnnnnnnnnnnnnnnnnnngctttatatttgaaaagnnnntttatttagatcttgctccatttac

SEQ ID NO: 9689 - DNA, 854 bp, Macaca Fascicularis
  misc_feature (1)...(854): n = A,T,C or G
ggattcttgttttccttgcagaacaaaaggttctctagaatccttcagccaacgaaatgatcaggcaggagaaaaactttagatgggagtgttgtcatcaaaaataaatacagttgnnnnnnnctgcttaagatctgaaccaaactaaaaataggaagacaggggctaaaaagttattttaagaaccccccccaccacaaccacagtcactccgtgggctgagcagggagcaggaagcatgtctggtcacaccatcttggaataagaagccatgactggatgcatcgnnnnnnnnnnnnnnnnnnnnnnnnnnnaacttgacgccagcgctggggcggggcggcattgccctcactgctgcagctccttcattctgttgagggcactgccggcgcggaaccactcgatctnnnnnnnnnnnnnnnnntggttcaggaggatggtctcctgggtcccgttggggtgcttgatgatgcacttcaggggcttgccaggggtgaagtcctttaggccttgaatggtcagcttgtccacagggnnnnnnnnnnnnnnnnnnnnnnnnnnnnnnnnnnncaggggcagcaggccctgtttcttcaggttggtctcgtggatcctggcaaagctcttggtgatgatggcccgggccccaaggtggcgaggctccagagctgcatgctcccggctcgagccctcgccgtagttctcgtctccgatcaccacccacctgatgccatgtttcttgtagtagcgggcagtgtcngggacggggccaaactcctgagtgacggcattgcgcacggagttggccttgccattttcaatgttgatggcaccaatgagnnnnnngttgg

SEQ ID NO: 9690 - DNA, 734 bp, Macaca Fascicularis
  misc_feature (1)...(734): n = A,T,C or G
gatgcttttgttcctctctcctttcacttatgnnnncagtgnaggaaaagtgtcagattaccctgcagcaagacatgccaaggactgggaggggaaaaaaaaccaccctggaggcaactgagaaaatcactgcctttggattgaaatcagtagggtggctgttttccctttgttaaatctactagagtgatgggaaggactcccagccctttcagtaactctcaggagccctgaaacggtagaggcactgccattcttgtgggatactcaaagcccacagggcttttccctcccgattgcatcttctgatgctccccatgcccaccctccacctctccacctctatggtgttgccatttgtgtgtttcccnnnnnnnnnnnnnnnnnnnnnnnnnnnnnnnnnagcagcgagtcagggacagctgccactttccacagagccacaggatgggcagagcagggacccagtgaatgaatagccagtggacaaacagtcttgannnnnnnnnnnnnnnnnnnnncagccccgccagtgaaggggctgtgtcttcattcttgannnnnnnnnnnnnnnnnnnnnnnnnnnnntccccggggctttgtggatagttgagggcttcagtgaggtcacactcagaatggggcaattccagcatttatcctgactgcgtttcattgcattgtctgtgaagtgtaatttctgggcnnnnnnnnnnnnnnngcattgatccaga

SEQ ID NO: 9691 - DNA, 672 bp, Macaca Fascicularis
  misc_feature (1)...(672): n = A,T,C or G
aggcnctgcggggtctctccgagcagctggnnnaggctgagaggcaatggaagaagcagctggggcccccaggccaagccaggcctgatggaggctgggactctgctaaggtcgatgccctgctccatggacagaggactctgctccaggccctgcaagagatgagggatgcagctgtccgcatggccgcagaagcccaggtctcctacctgcctgtgggcactgagcatcatttcttagagctggaccacatcctgggcctcctgcagaaggagcttcagggcccggcgaaggcagcggccaaggccccccgcccacctggccagcccccaagggcctcctcgtgcctgcatcctggcatcttcctgttcttcctcctcattcagactgtaggcttcttcagctacgtgcacttcagcaggcaggagctgaacgagagcctgcaggagtgtctgtccacaggcagccttcctctgggtcctgcaccacacacccccagggccccggggattctcaggaagcagcctctcccnnnnnnnnnnnnnnnctgacccacctcagagcctgctttgcatcactgggaagcaggcagtgtctggggtgggtgcttgatcagcatcctcttcgtctgggtgcccagctcccacccacacctgagcttcagcacactcc

SEQ ID NO: 9692 - DNA, 727 bp, Macaca Fascicularis
  misc_feature (1)...(727): n = A,T,C or G
gaagtggagagnannncagtcagccgcagcgaagagctcagaaaagaagcaagacaattaaaacgggaactcttagcagcaaaacaaaaaaaagtagaaaatgaagcaaaacaagcagaaaaaagaagtgaagaggaannnnnnnnnnnnnnnnnnnnnnnnnnnnnnnnnnnaagagaaaagcaaaagtatgannnnnnnnnnnnnnnnnnnnnnaagaagggaacttcccgggaagatcagacccnnnnnnnnnnnnnnnnnnnnnnnnnnnnnnnnnnnnnnnnnnnnnnnnnnnnnnnnnnnnnnnnnnnnnnnnnnnnagaagtagaagatgatgaaggatggatgtcacatgtacttcagtttgagggataaaagcagaaaagtgaaagatgcaagcatgcaagactcagatacatttgaaatctatgatcctnnnnnnnnnnnnaataaaagaaggagggaagaaagcaaaaagctgatgagagagaaaaaagaaagaagataaaatgagaataatgataaccagaacttgctggaaannnnnnnnnnnnnnnnnnnnnnnnnnnnnnnnnnnnnnnnnnnnnnnnnnnnnnnnnnaaaagaagtatttttgaacctgttgtctggttttgaaaaacaattatcttgttttgcaaattgtggaatgatgtaagcaaatgnnnttggttactggtacatgcgttttttcctagctgacctt

SEQ ID NO: 9693 - DNA, 736 bp, Macaca Fascicularis
  misc_feature (1)...(736): n = A,T,C or G
accaggccaannnnnnnnnnnnnnnnnnnnnnnnnnnnnnnnnnnnnnnnnnnnnnnnnnnnnnnnnnnnnnnnnnnnnntccactgatttccgggtgtcccccagcccnnncnnnncacagccannntgattaatccagaccctttgctttgcagctgtgactggcaactccactactgtgtgnnnnnnnnnnnnnnnnnngggtgggaatgggggggccaccaagggtnnnnnnnnnnnnnnngtgggctacagcaccgtcaagggagggccagtctctgggggaacctccatcctgcggaagacnnnnnnnnnnnnnnnnnnnnnnnnnnnnnnnnnnnnnnnnnnnnctgcaagggcccctgcaatcctctccctgccctcctcaccccacctctgctgccctttccagtcactttctcaggagcaggaacagccaggggacctcagacccagggtgttttcataccagactatttgcatnntngaaagcactcaaatctactcaggtttttttcttggtcctgcaataggctgggaggggaggttaaagttgccagcttgagtgatgtgcttgggtgacttgggggtgatcttttgaccactgagaggaggctgaatttcccaagccatttggagagagagaaattgagagtggtccccaaagacccttcaacctccccagtcccccaccagacccaccctctccctgaatctacccacaccccccttccc

SEQ ID NO: 9694 - DNA, 393 bp, Macaca Fascicularis
gtaccccagctgctgccactcctgctggagggtgaactggggaccctccaccctccgggaagccatggagtctgctggaggcaccatatcagcgaacgggactagcgtggggagcagacagaccagtgggtggaggtctcgacagttcaagtgtgatgcagctgtggcaagaggaaatccacctctgggcctcaggctgcctgtccataaaatggagacatggccagctgatggacaatgagtctatggtccacccatccccgccagccaggatcccccaaggtgtgcaagggatcagcagagaacaatatgggatccccctcaacagggagagacacatccagccacaaagaagccaaagatcagttcataaagctccccagcaaaacgata

SEQ ID NO: 9695 - DNA, 813 bp, Macaca Fascicularis
  misc_feature (1)...(813): n = A,T,C or G
annnnnnnnnnnnnnnnnnnnnnnnnnnngagntngagaccaggtccttgtcgcgggccagaagcagggaattgtgcgcttctatgggaagacagactttgccccaggttactggtannncattgagctggaccagcccacaggcaagcatgatggctctgtcttcggcgtccggtacttcacttgccccccgaggcatggggnnnnnnnnnnnnnnnnncgtattcagaggattggcggatccactgatccccctggggacagtgttggagccaaaaaaagtgcatcaagtgacaatgacgcagcccaaacgcaccttcaccacagtccggaccccaaaggacattgcatcagagaactccatttccaggttgctgttctgctgctggttcccctggatgctgagggcagagatgcagtcttagaggccctggacacctgacaaagagacagagtccccactagcatctcctgacacccgaagagccctgagtcaccctgagatagagattcccagtaacacatccagagtagagacccctgttagccagccctcgatcattgaggccccattattaacagatagccccataataacccccaaatacagaccccatttcacccagaaagagattccctgagtagcaccttcaggctagtccctatccccaaccaccaagaacagattcacagactaacacatcaccacatcaccccaaactcatcatgaccctctccacataacgcattacaacagaacattcttgaatcacccaaccctggatcagaaacttccccattaacaaacactcc

SEQ ID NO: 9696 - DNA, 701 bp, Macaca Fascicularis
  misc_feature (1)...(701): n = A,T,C or G
ctnnnnnnnnnnnnnnnnnnnnnnnnnnnnnnnnnnnnnnnnnnnnnnngtaatttgtctgttcctcccttgaactgtctgtttagtctggggttttttaacttgcaggcgactgactgtgatgtccacttgttccttgatttttacacatcatgtcaaannnnnnnnnnnnnnnnnnccacgaattcctctaagcacatactctgcttttctgtcaacannnnnnnnnnnnnnnaggaaaagtcatatttattcctgcaccccagttttttaacttgctctcccagttgtccccctcttctctgggtataagtagggaaattggaaaaaataatatatatatcctccttttaatggtgaggggctgctggagaggagagacagcaagtccaccctaacttgttacacagcacannnnnnnnnnnnnnnaattctcatcttcgaacctagagaaataggtgctataaacagggannnnnnnnnnnnnnnnnnnnnnnnnnnnnttttaattgtcttaattttttttctattattaaactacaggctgtagatttcttagttctcacagaacttctatcattttaaactgacttgtatattaaaaaaaaaaaaaaaaaatcttcagtaggatgttttgtactattgccagaccctcttctgtgatgggtaatgcatttgtttgagattttctgtttttaaaa

SEQ ID NO: 9697 - DNA, 670 bp, Macaca Fascicularis
  misc_feature (1)...(670): n = A,T,C or G
tgttggcaaaggtctgngccctgtgcaagggctggaactggcgnntggcacgggccagccggggtttagcatcccacttgcccccatgggccatccacacactggccagctggggcctgcttcggggtgaacggcccacccgaatcccccggctactaccacgcagccagcgccagatagggccccctgcctcccaccagccactgccagggactctagccgggcggagatcccgcacccgccagtcccgggccctgcctccctggaggtagctgactacaatccttccagcccaaatctagagcnnnnnnnnnnnnnnnnnnnacgactcagtgaagtttctccagtccttagtcctttcttttcacccaccttcctcagtttgctcactcaccccaggcccagcccttcagacctatagacaggcagcctcctcggccgtggagtccagcagtcactctgtgctctcctggcgctcctcccctaagttattgctgttccctggctgtgtgtgctcatcctcaccttcattgactcagacctggggccaggggtggtggagggtgggaagagtcatgttttttttttctcctctttgattttgtttttctgtctcccttccaacctgtccccttccccccaccannnnaaagaaaaagacaaacacaaa

SEQ ID NO: 9698 - DNA, 760 bp, Macaca Fascicularis
  misc_feature (1)...(760): n = A,T,C or G
tggagcgcatgggcgccaacancctggagcggatgggcctggagcgcatgggcgccaacagcctcgagcgcatgggcctggagcgcatgggtgccaacagcctcgagcgcatgggccccgccatgggcccggccctgggcgctggcattgagcgcatgggcctggccatgggnnnnnnnnnnnnnnncagctttgaccgtgccatcgagatggagcgtggcaactttggaggaagtttcgcaggctcctttggtggagctggaggccatgctcctggggtggccaggaaggcctgccagatannnnnnnnnnnnnnnnnnnnngatttcacatgnnnnnnnnnnnnnnnnaaattcaacgagtgtggccnnnnnnnntacgccgacatcaagatggagaatgggaagtccaaggggtgtggtgtggttaagttcgagtcnnnnnnnnnnnnnnnnnnnnnnnnnnnnnnnnnnnnnnnnnnnnnnnnnnnnnnnnnnnnnattgacgttcgaattgatagaaannnnnnnnnnnnnnnnttttttaaacatcgatacgagacctttgaatttgtattttttcttgttaaccattttaatttgttggctggatgtataaagatgtttaaaaaattcagttgctttttggggtaatttgaattacttttttaatgactggggttccatttgactgtttgcattgagattgcaatgtgcgcaattttttttgtagttgtggcatcttgtgacatcgaatatga

SEQ ID NO: 9699 - DNA, 764 bp, Macaca Fascicularis
  misc_feature (1)...(764): n = A,T,C or G
gaagaaaatggaaagttggtaggtcaccaaaacttgcatcagaagattcagtacgtagtgcgactaaagaaggaaaannnnnnnnnnnnnnnngagacagaaaagttgcgtgctgaaaatgtatttttaaaagaaaagaaannnnnnnnnnnnnnnnnnntccnnnnnnnnnnntaggcatcaccttgtttgaagatgtttcttctcttttacaagtaagacctactcttggccacttaggagagctgtattaacggaccttaattattaaatgtgtgtaaggtggtggtggctgaacctnnnnnnnnnnnnnnnnnttctgcatnnnnnnnnnnnnnnnnnnnnnnagcagtctgctaataagtggcccacttcgaggctttgaatcaactgtaagagaaaaccttttgtctttgtaaaaataaaagcctgtagctaaggttnnnnnnnnnnnnnnnnnnnnnnnnnntcttcttagattatgccataatctcctttgattcttatggaagttctaacaatatatggtggttccaacacctgcagtgagtttaatgactgacttagtagcaggtacaagaagcaaacttgttaatatagattatttttgtattcttactttaggtattttctnnnnnnnnttccatgactgtaaataaagccattttttaagataatagttaaagtgacttacattgttcattctgttgttcattgaacacatacttaatgaacacctacaatatgccacgcactaatcatca

SEQ ID NO: 9700 - DNA, 707 bp, Macaca Fascicularis
  misc_feature (1)...(707): n = A,T,C or G
ttggatttcagtgatttttttcccctcaccccccagcataggagagcacccccagcctcagaaggggaaggtgtcctcctgctctctttcctcagggcccagcaggcgggacttgagtcctggaccccaggctcttagagactaaggagcagctcctgaccaaagacgatacagcttggcnnnnnnnnnnnnnnnnnnnnnntgtggccctgagggctcctccatggtgctgcattgaatccagctttccttctgcccttcctccaggagaaggggcccaaggtccccgtggatggtctcnnnnnnnnnnnnnnnnnngtgtaactggctgctccccgctcccagggactgactgcggggatcatctctgaccgccctccgtcgggcccctccctgccttctcccctgcacgcaaggctgtgctcctcctctgctctctgtgtgtccctttgagtgtctctgccccgcctccccatacttcctgggatgatgtgtgaaacctgacacctagatttatttggaaatatnnnnnnnnnnnnnnnnnnnnnnnnnaactgaggcctcaagcatggcggggtagagtgaagagtagaacccaggtctgatgccaaagctgctttcttctctgcctcctcctcacacaactcacacctcctttgcttctagctttgttgtcctcccaggaaccaaaaaaccccagctatttt

SEQ ID NO: 9701 - DNA, 765 bp, Macaca Fascicularis
  misc_feature (1)...(765): n = A,T,C or G
acaaagggatgaagctccacagagagttggctgccacagccnctgccaagctttgtctttggggcttgctgcagaaacctggactacggaagatacgacaccactgggagggttgtgtaggtgccaggggaccatcgttgttctttagggcgctgtggaaattgggtcttgggctgggtagcatctggcagtcatggataacgtttgcttttccagtcaatgtggccatgtgattccaagtgtcatgttgctttgtggcaggattgttgtgtgacttgttttttgttttgttttgttttgtttttttaaaggaaactttgtgggttatagaaaactttctgacgcctcaggattgtgttaatagtagccatcaggagggtctccaattaaaacacttgttcctgcttgctcctttcccctctcattgttcagcattcttgtcaagttgcccagcttggagttgtctgtcacgcacatgtgtcctgtggttatagctagaagatcaggagtctcctgctgatgcgtgatagcttaagcttggggagaaggtcttttccactgcctagctaagcagtctggggagagcatggggatcatttctgtgtgtgtgggtaatctggtcggtaagattgagacttagttaagatttcccttggaacttccttaatgtttattagcttctaatctagtgttgtaatgtnnnatgccagaatttggagatctgagttcttcttttcatggcttttattcnacgcgtcagaaagc

SEQ ID NO: 9702 - DNA, 752 bp, Macaca Fascicularis
  misc_feature (1)...(752): n = A,T,C or G
agcagttaaacaggtgttcaaggagctggagttctgggttggtataccacaggggggccacctgacccctcggacatccacgtccataagcaggtgtgtgagatcattgagagccccctctttctgaagttgaaccctatgaccaagcacacagatcttcctgtcagcgtttttgagtctgtcatcgatataatcaatggagaggccacaatgctgtttgctgagctgacctacactctggccacagaggaagcggaacgcattggtgtagaccacgtagcccgaatgacagcaacaggcagtggagagaactccactgtggctgaacacctgatagcacagcacagcgccatcaagatgctgcacagccgcgtcaagctcatcttggagtacgtcaaggcctttgaagcgggagaggtcccctttaatnnnnnnnnnnnnnnngaggcctatgctctgtgtcactgcctcccggtgctcagcacagacaagttcaagacagatttttannnnnnnnnnnnnnnnnnnnggctcatggcctacctcggcaccatcacgaaaacgtnnnnnnnnnnnnnnnnnnnnngnnnnnnnnnncaaggtcctctatgatggacaaggnnnnnnnnnnnnnnnncgcgggctcttcttctgaggagggtacttgaagggctgatgcgacaggggtcaggcaactgtcccaaaggggagggcgctacacttgagagaaaccgctgtcnnnnnnaataaaa

SEQ ID NO: 9703 - DNA, 795 bp, Macaca Fascicularis
  misc_feature (1)...(795): n = A,T,C or G
catatacactagacagcctgtattgagcatcnnnnnagccagctccagcttcgggtctgaagcaaaggcccagcagcaggaggagcagggcaatgttaatgatgtcaaggaagaggagaaggaggagaacgaggtcnnnnnnnnnnnnnnnnnngaggaggaagaaaatgaccaagtggaggaagaggaggatgannnnnnnnnnnnnnnnnnnnnnnnnnaagatgatgaagaggaagacagaatggaggtggggcctttctctacagggcaagagtcccccactgccgagaatgctaggcttctggcccagaaaagaggagctttgcagggctctgcatggcaggttagctcagaagacgtgcgatgggacacatttcccctaggccgaatgccaggtcagaccgaggacccagcagagctcatgctggagaattatgacaccatgtatcttttggaccagcctgtgctagagcagcggctggaaccctcaacatgcaagactgacaccttgggcctgagctgtggtgtcnnnnnnnnnnnnnnnagcaacagcagcagcagcaacttcgagggccttctctggagccaggggcagctgcatgggctcaaaacnngnnnntgnnnnnnnnnnnnnnnnnnnnnnnnncaagtgttcatctagccctgccagggcaacagcctaccccctagtacaactgatgctccctgagacaacctgggagacagcctggatcagccacatcaactcagttgtccaccacaggggaattttgaatgtcttttgtttttgtt

SEQ ID NO: 9704 - DNA, 762 bp, Macaca Fascicularis
  misc_feature (1)...(762): n = A,T,C or G
cggaccacgtgtngnnntcaacgtacagcgggacagcgacgcccccggggggccacatcctcaacgtgagcctgtcggtggnnnnnnnnnnnnnnnncgggggcgggccgcccttcctgccctcccaggacctgcaggannnnnnnnnccttaaccgcagcttgctgacagccatctaggcgcagcatgtgctgcccttagacgacaacatctgcctgcgggagccctgcgagaactacatgggctgtgtgtcggtgctgcgcttcgcctcctccgcgccctttatcgccgcctccgtgctcttccggcccatccaccccgcaggggatctgagctgccgctgcccgcccgcctggcttcacgggtgactactgtgagacggaggtggacctctgctactcgcgaccctgtggcccccactggaacggtcctctgataggcagggtaccatcactggctctgctgctagtattagtctgggccagtatttaaccaatgccaggctttcctctgagaagggtatggggcgcagctagaatagtgtaggttccctcaacaacgcctttgtgctgtttacccatgatccgactgtgtaatttctggtgattccaggttttaaataatttgtaagtgttcagtttctacacaacttcattatctgcnnnnnnnnnnnnnnnnnnnnnnnnnnnnnnnntgttaatgctgggatccatatttaattttgtaagtttttacctgtttttagttttgttttgggctttt

SEQ ID NO: 9705 - DNA, 717 bp, Macaca Fascicularis
  misc_feature (1)...(717): n = A,T,C or G
tgtgcacatgtttacctgatacagcagtgctgcgtgttgtacatacttggaacaacaaactagaaatactgtacttctgtaccaacattgcctcctagcagagaagtgtgtgnnnnnnnnnnnnnnnnnnnaggcattacttaggtgtgagactaaaagcttttcttactgactnnnnnnnnnnnnnnnnnnnnnnntgaggggggtggtgggtatggtgtgagcttggatgggaaagaaaaggctccactcacctgtaggagattatttttaagtggaatccatttaaactcaaaacagttatgaaaagcaaggtgaagaacatgaagctgtgtctgtattcattttattctgaaggagctacgtcttaggtgaaagttatgaccaaccagattaaactctacccacatcctgcattttaaggtctaagtttaactggtcaacatttaaatggattggagctattagtacatcaagtgtgatgggctttgttcccaactcttttacatttccctaccccttcaacctttggcctttcatcccttctttcttccatattctttggtttgtatgtggtttctcagttaatacatagctaatagctcttatttttcttatgtttttaaccgcttaggtctatttggatgtaagggtgaaaattcatttgatggaaatacttgtgtatatttaaagacccagttgctcctctggagcttg

SEQ ID NO: 9706 - DNA, 756 bp, Macaca Fascicularis
  misc_feature (1)...(756): n = A,T,C or G
gaagcagttccaggagaaggtggcagagctggcacatgccaaccggcnnntggagcagcacgaggccgaggtgaagaagctgcggctgcgggtggaggagctcaagaaggagctggcccaggctgaggatgagctggacgaggcccacaaccaggcacgtaagctgcagcggtcgctggacgagcagacggagcagagtgagaacctgcaagtgcaactggagcacctgcagtccaggctccgcaggcagcagcagaacgctcccctcttcgggaagatccgcagtgctcgctttggcaccgaggaggccggggatggagccagcgacctggacgaggacgagnnnnnnnnnannnnnnnnnnnnnnnnnnnnnnnnnnnnnnnnnnnnnnnccgccccacacctgcccagggtccaggctaaccagccactcaaactgatgcagcgcctaggctcactnnnnnnnnnnnccctgccacagccgactttcttctctcccagggatggtgtcaacagtcccacttacaaacgccctgtggaaaggaagcctatgtctctcatatatatattatgtatctccaggagtctttggacccatttggttttataaatacaggacagctccaaggcccagtccaggtgacctcacccacccaggacttcatgcagggctggccatgttgggggaggttgttggagccgcagcctgggctgcccctctaggcttcactgttcatcatacaatgcagtgaaccc

SEQ ID NO: 9707 - DNA, 771 bp, Macaca Fascicularis
  misc_feature (1)...(771): n = A,T,C or G
gcaggaattgcaactttcatgnnnnnnnnnnnnnnnnnnnnctgcatgggcaaggacgtaacccttcacgnnncagcaagcaaccccgcnnatnnnntgtaccagaagtttggattcaagactgaagaatatgtattagatttctatgataaatattacccgttggagagtacagagtgtaaacacgcattctttctgannnnnnnnnnnnnnnnngaatacagctcannnnnnnnnnnnnnnnnnnnnnnnnnnnnnnnnnnnnnnnnnnnnnnnnnnnnnnnnnnnnnnntcacagggagtcctaatcttctctgtgattacatggtccttcaaactcccagccgaagtgagaaaagcagcatgcagtgaaatgagcagtgagcagcctttagcaaaatcaccctccagtcctgcctggagannnnnnnnnnnnnnnncccagactccacagttaaatgaaccatgtcatggtcctctctccacctgatggttgtaagagtgaaagagcatctaannnnnnnnncttggagagagagaacctgtctgtcgtaacttaaaggatgagaaaatgtggtgtagctattaaagattcatgcagtcccaagaggcactgtcctgtcctgggatgatgagagattatgagatgatttcataaaaggaatccaaccctgtgcccagccattgatgtgtnnnnnnnnnatccaggaggatttctagggcactgaagtttcattgtttcttttgctgactttggttacagtcagaaaa

SEQ ID NO: 9708 - DNA, 808 bp, Macaca Fascicularis
  misc_feature (1)...(808): n = A,T,C or G
catgagatgacagtataggctgactnnnnngnnnnggctggtgtggnnnnnnnnnnnnnnnnnnnnnnnnnnnnnattcnnnnntccagatcaatatgatcaagtacatcaaagagaaataccccaatctccaannnnnnnnnnnnnnnnnnnnnnctgctgnnnaggccaagaacctcattgatgcaggtgtggatgccctgcgggtgggcatgggaagtgnnnnnnnnnnnnnnnnnnnnnnnnnnnnnnnnnnnnnnnnnnnnnaagcaacagcagtgtacaaggtgtcagagtatgcacggcgctttggtgttccnnnnnnnnnnnnnnnnnnnnnncaaaatgtgggtcatattgcgaaagctttggcccttgnnnnttccacaatcaagatgggctctctcctggctgccaccactgaggcccctggtgagtacttcttttccgatgggatccggctaaagaaatatcgcggtatgggttctcttgatgccatggacaagcaccttagcagccagaacagannnnnnnnnnnnnnnnnnnnnnnnnnnnnngcccagggggtgtctggtgctnnnnnnnnnnnnnnnnccatccacaaatttgtcccttacctgnnnnnnnnnnnccaacactcatnnnnnnnnnnnnnnnnnnnnnnnnnnnnnncaagtccgagccatgatgtactctggggagcttaagtttgagaagagaacgtcctcagcccaggtggaaggtggtgtccatagcctccattcgtatgagaatgcggcttttatgaacagggacagnnnnacaggga

SEQ ID NO: 9709 - DNA, 110 bp, Macaca Fascicularis
ccatggaatcactgtggctcttgttgcagttttgtactctataattggtttttcaattaagaataatggcttttttaaaacatgacttgaagctctagttttctagatct

SEQ ID NO: 9710 - DNA, 773 bp, Macaca Fascicularis
  misc_feature (1)...(773): n = A,T,C or G
aggcaagtggacttggacattttctatgaaaacagacaaacagaaaannnnnnnnnnnnnnnaatcacattcatctcaacattgannnnnnnnnnnnnnnnnnnnnnnnnnnnnaaagggcggttcgcagtgcactttggtttgtgttgtcctggtggtgggtgtttgggccaggtcagccatccagtcgcatggcagtgtgcagtagctggggtggtcaggcccgtcactcaggcccctgagaccgcttccaagaaaaagaaaggagacagtgctgtacccgggcgactgattctgcaggtgaggaaggctggggggcttgggaagtgggggtactggctcaggagccccttggacatcagatgggatcttggtcactggcttgnnnnnnnnnnnnnnnnnnnnnnnnnnnnnnnnnnnnnnnnnnntgtagagcagaagaaggacccactccattcgctaggggctggccaaggacccctccctggtcccctcctcctcttcagaccaccgagaaggggacgacgctgtgtgcnnnnnnnnnnnnnnnnnnnnnnnnnnntgagatacaaataacctgttaacatctggaaagnnnnnnnnnnnnnnnnnnnnnnnnnnnnntcctctgccgtgtttatagggggtgcgggctcttttagacaactttcatctttggcctccctgttcacacttgcctcctnnnnnnnnnnnnnnnnatcccacaagtgnccctctctctggctagcctatnnnnnncgcacgtacccact

SEQ ID NO: 9711 - DNA, 562 bp, Macaca Fascicularis
ctcatcagccctcccccattccccctccgcctacccagggagacaagggtcgtcccagcacagctgaggctgtgactcgttaagccagttcagttctctagaacatctagaacagtgctgtccaatagatggacatgctctctgctgtcaatacagtagccatgagccacatatagtgacgcctctagaaacgtggttagtgcaactgaggaaggaatttttaatcttatgtgattttaattggcttaactttaaacagccgcatgtggttactgtattggatagcacagccctagagcctgaagaaagcaaaccaaagaacaccagctgggtcccaaacagaaggcagaaaaggcagaaccgttcacctcaactattccagccccatcagaaggcaccaggaacagggcaagagaaaaaggcaaaaacccacccagcctcatgaaaattcactcgctcaaccacccagccacatcaaactggaaataccacactctttcctgaaaaaatagatttatctatttttctagaaccaaggtcgattcacactattttataagaa

SEQ ID NO: 9712 - DNA, 770 bp, Macaca Fascicularis
  misc_feature (1)...(770): n = A,T,C or G
caccaacagacgccacagcagctccaggagcccagacaccggcggccagaagcaaggctacgagctgctgcagccatgttggccctcagcctgctcattctgggcctgcnnnnngcagtgccaccnnnnnnnnnnnngcaaggcctggggaaccttcagccctggatgcagggcctcatcgcggtggccgtgttcctggtcctcgtggcaatcgcctttgcagtcaaccacttctggtgccaggaggaaccggagcctgcgcacatgnnnnnnnnnnnnnnnnncaaggcagatggagtcctggtgggaacggatggaaggtannnnnnnnnnnnnnnnngtttcaggtccagtgagcataagaatgcctatgagaatgtccccgaggaggaaggcaaggtccgcagcaccccgatgtaaccttgtctgtggctccaaccccaagactcccaggcacctgggatggatgtccagtgctactacccaagccccctccttctttgtgnnnnnnnnnnnnnnnnnnnnnnnctccctccagcccgacgccggccctcccctcccctgaagtatagccagccaaggttggagctcagactgtgtctaggttggggatcagctgtggccctggggtctcccgctcagctcagaagagccttctggagaggacagtcagctcagcacctcccatcctgcttgcacgtccttctccataactgcggaagcggccccaaatcctgtgaaataaagactttttgtatttctgaggctga

SEQ ID NO: 9713 - DNA, 742 bp, Macaca Fascicularis
  misc_feature (1)...(742): n = A,T,C or G
tgcaaaaaggtgnnnnnnnnnnnnnnnnnnnngcacatgtcataagtgaggccagtagtaaaacaacatctgtactacagtgggctgaaaaaggatactacaccatgagcaacannnnnnnnnccctggaaaatgggaaacagctgaccgttaaaagnnnnnnnnnnnnnnnnnnnnnnnnnnnnnnnnnnnnnnnnnnnnatcgggaagcttcgagtcaagctcnnnnnnnnnnnnnnntctgcctaaagtcccccggtagattcgagagaatcttactcagagctgcaaatacccacagttcnnnnnnnnnnnnnnngcaacaatccattcacttgggaggagtatttgaattgcaaccaggtgcttcggtgtttgtnnnnnnnnnnnnnnnnagccaagtgagccannnnnnnnnnnnnnngtcctttggcttactcaaactcnnnnnnnnnnnnnnttgcaggctgtggtnnnnnnnnnnnnnnnnnncttcataatacagcacagcagttaagcccaccccctgttaactgcctatttataaccctaggatcctccttatggagagctatttattatacactccaaggcatgtagaactgtaataagtgaattacaggtcacatgaaaccaaaacgggccctgccccataagagcttatatatctgaagcagcaaccccactgatgcagacatccagagagtcctatgaaaagacaaggccattatgcacaggtgaa

SEQ ID NO: 9714 - DNA, 709 bp, Macaca Fascicularis
  misc_feature (1)...(709): n = A,T,C or G
caacatgaccgcntnctggagctgcatatgtacannnnnnnnnnnnnnggcaagaatgacatgaagnnnnnnnnnnnnnnnatggcccttgacctcttggccaacaaggagaagaaagactccatcacggggctgcagacgcgcacccagcctgggcggcctgactggagcaaggtgttccagaaagtggctgctgagaagaaaggcaaggtgcaggtcttcttctgtggctccccagctctggccaaggtgctgaagggccattgtgagaagttcagcttccgatttttcnnnnnnnnnnnntagcctcacctctccaagctgtgccccaaatccacaccatgggtctgcttcgtcgcattagtataaacactcccacagggaccagcctcagacaaccctcccaataagacaaagcctaggtaccccccaannnnnnnnnnnnnnnnaaacaggagaccccaagggacaaatgaacttcctctagaacccaggggaagggannnnnnnnnnnnnnnnctgctgtagattctggggttgctgtgaaactgaggaaaccagaggctggtgactggagcttgggggtggggttcgagggcaaccactcccccaaacattttctgacggagccttcccctacatccatagtcccaaacctgcccaatcatcacagtcatttggaagcttgtttctccagcatcttataaaa

SEQ ID NO: 9715 - DNA, 675 bp, Macaca Fascicularis
  misc_feature (1)...(675): n = A,T,C or G
aatttgatatatgtttaaaatatcctacttctggtagccatttaattccttccccccacccccaaataaatcaggcctgcaggaggcctgatgtttaataatgtcattgtgtttgaccttgaaggaaaatgctattagtctgtcgtgcttgatttgtttttgtccttgaataagcatgttatgtatattgtcttgtgtttttatttttacaccatattgtattacacttttagtattcaccnnnnnnnnnnnnnnntgcctaaaatatgcaactatttgcattacaatatgaagtaaagttctatgaagtatgcattttgtgtaactaatgtacaaacacaaattttataaaattgtacagttttttaaaaactactcacaactagcaaatggcttaaatgtagcatctctgcattaattaaatgcctttaagagatataattaatgtgcagttttaatatctactaaattaagaatgacttcattatgatgatttgccacaatgtccttaactctaatgcctggactggccatgttctagtctgttgcgctgttacaatctgtattggtgctagtcagaaaattcctagctcacatagcccaaaagggtgcgagggagaggtggattaccagtattgttcaataatcnnnnnnnnnnnnnnnntataaatgcat

SEQ ID NO: 9716 - DNA, 698 bp, Macaca Fascicularis
  misc_feature (1)...(698): n = A,T,C or G
atggaccaccccctggcatggccctcccctacaaccccatgatggtggtcatgatgcccccacccccacctccagtccctccagcagtgcagcctccgggggcccctccagtcagagacctgggctctnnnnnnnnnnnnnnnncannnnnnnnnnnnnnnnnnnnnnnngccatgggcaatccnnnnnnnnnntttgtggatgttatgtagcccactgtggggccaggcttggcctggcgctcctggtgtgtgactggctgtcctggccatcatgtgcttgctcttacagtgcctgggctcagcctagcagctgctgccatacaggagattgtggccactgtgactctcaccagcagtgcctggttcctcccccttccctcgggtagacaagggacctttgattatttttagctttgtttttttaataagtctttttgggggttaaaatagagtttcttacatttttgggactttttaaataggcattttctcttttatatgaaaaatcccgtccgttgggccccttctaaccccagaatgtgacctcctcctccagttacccatagccttgccctgtgcaggtttgggggtggtcagtggtaccctggggttaggcaccctagacagcagcctgagnnnnnnnnnnnnnnnnnnnnnnnnnnnnnnnnnnnnnnntctatttattttagtcacttg

SEQ ID NO: 9717 - DNA, 681 bp, Macaca Fascicularis
  misc_feature (1)...(681): n = A,T,C or G
ccacagcnnnnngacgcggagtgaggncgtgggttacctggggggccgctgggacatcaannnnnnnnnnnnnnnngtgctcagagccttcccttgtcggagtcggcttggggatgcagagactgcagctgccatcgaagaggannnnnnnnnnnnnnnnnnnnnnnggggcctgtccctggtgggctggtaccacagccacccgcacagcccggcgctgccgtctctgcaagacatcgatgcacagatggactaccagctgcggctgcagggctnnnnnnnnnnnnnnnnnncctgcctcgccctgctctgctccccttacnnnnnnnnnnnnnnnggccccgagtccaagatctcacctttctgggtgatgcctcctcccgagcaaaggcccagtgactatggcatccccatggacgtggagatggcctacgtccaggacagcttcctgnnnnnnnnnnnnnnncacgagatgatgctgctggtggagttctacaagggtgcccctgacctcgtgaggctccaggaaccctgnnnnnnnnnnnnnnnnnncctcgacaagcttaagatctccttggccagcaggacgcccaaggaccagagcctgtgnnnnnnnnnnnnnnnggtgtgcggcatccttaagcaggggagctgagcctcccagggcagggtgggctccag

SEQ ID NO: 9718 - DNA, 752 bp, Macaca Fascicularis
  misc_feature (1)...(752): n = A,T,C or G
cgcaannnnnnnnnnnnnnnnnnnnntgactgccaaccaggtgcagatccctcgggacagatcccagtataagcacatgggctagggaccattaggcaggcaccccctagtcctgctcccctaactggatcaggtagaacaacaaaagcactttcccacctcgtacacgagatacaccaacatagctacaatcaaacaggcctgggtatccgaggcttgcttggcttgtgtccgtgcttgaacccagggatggggaagactcttttggatttgtagggtgaaacggcaattattctttctatgctggggaggagggaaggagtggctcacacagctttcatgctcatggtggcttggctttgactctccaaagagcaacaaatgccacttggagctgtatctggccccaaagtttagggattgaaaacatggttctttgaggaggaaaaccctttaggttcagaagaataggggttgctttgctccctcggacacagctggcttatcctatacagttgtcaatgcacacaaaatacaacctcatgctccctgcagcaagacccctgaaagtgattcatgcttctggctggcattctnnnnntttagngattctcttgggaatgnnnnnnnnnnnnnnnnnnnnnnnnnctttgcagcacaagaacacgattaatgtaactatgcagagttgtttggacttcttaatgtgccaggtccaagtcaggggacctgaagaatcaatctgtgtgagt

SEQ ID NO: 9719 - DNA, 692 bp, Macaca Fascicularis
  misc_feature (1)...(692): n = A,T,C or G
annnnnagcgcccacaagctggtgttcatnngggacacactgtcacggcaggccaaggctgctgacgtgcgcagccaggtgacccactacagcaaccnnnnnnnnnnnnnnnnnnnnnnnnnnnnnnnnnnnnnnnnnnnnnnnnnnnnnnnnnnnnnnnnnnctgctgctgcccaggacatggtagagagggtcaaggagctgggccacagcacccagcagttccgccgcgtcctaggccagctggcagccgcctgagggccgtgaccccaggagggaggcaggggaggggcatggtggtcccagctccctggctcccatctcaagagtcactgcgccacaggcttagagacaggaccccagctctgcctcaggcctggtacccttgatgcccaggaatctgtatatatttatgactgggcagggtgtggggccgtgcctccccaggagccgaagcccaggggtcagccagtggccttccccagcgtgcaccatgggcccagggcgggtcaccaggcagggtctggagtgtgaggaccccgcagcctccaggacctcatgctgccccgaggtctgagcctggccccgcgagggtgccgtgtcccctgacagggccagtgcagtttggtgtgtcctccgccttaccaggagaagaccctgaagaactagaactatttttcattactggtttt

SEQ ID NO: 9720 - DNA, 699 bp, Macaca Fascicularis
  misc_feature (1)...(699): n = A,T,C or G
agatttatggtctcttggtgaccctggccatgnnnnngatgggtggcatcattgtggggcttattttgagattaccattctggggacaaccttcagatgagaactgcnnnnnggatgcagtctactgggagatgcctgaagggaacagcactgtctacatccctgaagaccccaccttcaagccctcaggaccctcagtaccctcagtacccatggtgtccccactacccatggcttcctcagtacccttggtaccctaggctcccagggcaggtgaggagcaggctccacagactgtcccgggactccagaggagctggtgctgacctaactagggacacaagagcgagcaagcagcacccccacctgctgacttggcctcaaggtgcctccatcccttccctccccttcatcccagggggtctgcctgagaatggagaaggagaagctacaaacaaagtgggcatccaagccaggnnnnnnnnnnnnnnnnnnnnnntctgcctggggtcttagccacactggagaaaaacaggctcagagtggggctagagcctgggggtgaacctgagcactcctaggagacaacttagctgccagtcaccacctatgaggctcttctacccactgcctgcacatcagccagcatctcctatgctccctgggtcccctagacttctctgtgttgtgtaggggcag

SEQ ID NO: 9721 - DNA, 715 bp, Macaca Fascicularis
  misc_feature (1)...(715): n = A,T,C or G
acannnnnnnnnnnnnnnnnnnnnnnnnnnncctggcgnnnnnnnnnnnnntggaggacgcacnnnnnnnnnnnnnnnngcagctggcctgcggttctgtcagagaagtgatgctgtgggagaggctcgccagcaccaggagcgccgtgaaggaggccctggcagatgactttgacacacccagggtagtnnnnnnnnnnnngggccttgcgcaccacgggaacggaccgctgcatggtctcttacaggaacctggagtgccgagaagtcctgctgtgtttggtgccatcatctcttactttgaacagttttttgaaactgttggaatttctctgggcaatcaacagtgtgtttcaggagacggcagcgaggccaccttgcgtggtgtggtggaggagctggtgcggttccggcagaaggtccggcagtttgcgctggccaaggccgaggccacgggggaggcccgacggcagcnnnnnnnnnnnnnnnnncccctgctggaggcatgcgacaccctgcgccaggacctgactgcccatggcatcagcatcaaggacagaaacagtacaacgtccacgtgggaactgctggatcaaaggacaaaagaccannnnnnnnnnnnnnnnngatgcagcacagccatgaacctgctcgcgacaagatgcacctgtgctttatgttaaaggctttatgttaaagcttcctgtcggggctg

SEQ ID NO: 9722 - DNA, 766 bp, Macaca Fascicularis
  misc_feature (1)...(766): n = A,T,C or G
tatactttgcagatttgtcnnnctggctttannnaagttctgaatgcattgtaattaagatttgagtttttcttttcccctattgttagacatttagtgttacatatgataactgcccaacatttattctatttacttagctaaatatttgcattcttgtaaccttctatggtgtttttgtggctcttatcttgtggaccataaataacatggcccaataattctttgtctttatggagtgttgttttcttagaataatggagatgcagatatagataccatagtcaagatatgccttgctgaagtatttatttataaagaatattctgtagaacctctattaccagctacacttttaaatcctgtttatttgtaaagctaatatgttcctcaatgtaattattaaaaattctgaagtcacagctaaacttactaattctgatttgagtgtagcccataaattaaaaatggcttccatatgccactctgtatcccaaagagagttctcatgaaatattctccagaatgtattcattatcaagaaaatgccaatcttcacttcctcattttaactcagttgaaacaccaggacccaatagagaaggcaagctgagcatctgtatttccagataaaagttgttattgatgttaaannngtcgtgtgattggtgatgttggaagcattttagcacaannnnnnnnnnnntcttagatgatgtctgtaaccagtttctgaatcccgttggataaaacacgtattgtgata

SEQ ID NO: 9723 - DNA, 634 bp, Macaca Fascicularis
  misc_feature (1)...(634): n = A,T,C or G
cagggagtggggcagggnnnnnnnnnnnnnnnnnggggattcgccatggacacgnnncaactgcgcaannngctccccatgtttccctgccccacttcgtcnncttgggggctgctcaagggtaggtgagcgtgggtggtaggaggttttttttttacccannnnnnnnnnnnnnnnnnnaactgttctgcttgttaccttccctccgtctnnncgcctttcacagtcccctcctgnnngctcctgtccagccaggnnnaccacccaccccacccctcttctccggctccctgcccctccagattgcctggtgatctattttgtttccttttgtgtttctttttctgttttgagtgtctttctttgcaggtttctgtagccggaagatctccgatccgctcccagcggctccagtgtaaattccccttccccctggggaaatgcactaccttgttttggggggtttaggggtgtttttgtttttcagttgttttgttttgtttttttgtttttttcctttgccttttttcccttttatttggagggaatgggaggaagtgggaacagggaggtgggaggtggattttgtttatttttttagctcatttccaggggtgggaatttttttttaata

SEQ ID NO: 9724 - DNA, 723 bp, Macaca Fascicularis
  misc_feature (1)...(723): n = A,T,C or G
tatattccagtgtatgtgaaaaaagcagtatcacttgccataaatagagagcaacaaaaataaacacaacaagctgtacaatggtattaaagtctagctggagactattgtctcctcaagctctgggcttcctgccttccctttctgttgataaggaagctcagcaaatgttagagagacgtgaaagacacagtagtaccaaaccaagacttactcccgggcgcagttcagagaattgaaaggccactgcaaaccagtcctcttcccggggtgacttgatggtgctcagtgctgtgtttgggatgtgacccaaatccacttatttgtcagcagagtcccacactcctggaagccctggcccagacgacctgctttagctcctgcaaggtgtctcagatggccatgttgagtagggaatggagggggtcacaggcgcccatgcccaggtgcagcagagaggaggagaccgatcccagagcagcccgtcagccagatgtgtcctcctgcaccagctgtgggcctgtcgggaatgcagctgactgggccactgccacatgtcaggcacattatctgcaacaaatcccactttgcagagaagaaacggaagcactacaagtcaagtcagttgcctagagtcctacagtgtagtaaccggcaaggccaggcccagagtccagggctctcagnnnccacaagggggagtctaagataacacacagcaca

SEQ ID NO: 9725 - DNA, 1245 bp, Macaca Fascicularis
  misc_feature (1)...(1245): n = A,T,C or G
atcagcgagacnnnnttgcccgtgannnaggtcctacnnncgccaacagtactcannnnnnnnnnnnnnnnnnnnnnnnnnnnnnnnnnnnnnnnnnnnnnnnnnnnnnnnnnnnnnnnnnactgacagacccagagnnnnnnnnnnnnnnnnnnnnnnnnnnnntacattggnnnnnnnnnnnnnnnnnnnnnnnnnnnnnnnnnnnnnnnnnnnnnnnnnnnnnnnnnnnnnnnnnnnnnnnctttgcctcagaggcctgtgtgggctccaagttctgggagcagagtgtgcggctaggctcctgggatcgagggannnnnnnnnnnnnnnnnnnnnnnnnnnnnnnnnnnnnnnnnnnnnntggctggaccgactggaacctcgccctgaaccccgaaggaggacccaattgggtgcgtaattttgtcgacagtcccgtcattgtagacatcaccaaggacacgttttacaaacagcccatgttctaccacnntgtcannnncagcaagttcattcctgagggctcccagagagtggggctggttgccagtcagaagaacgacctggacacagtggcactgatgcatcccgatggctctgccgttgtggtcgtgctaaaccgctcctctaaggatgtgcctcttaccatcaaggatcctgccgtgggcttcctggagacgatctcacctggctactccattcacacctacctgtggcgtcggcagtgatggagtggatactcaagctcagcnnnnnnnnnnnnaggacagagtcagctcacacgctgtctgtggctaaagagggcacagcagggccagggtgcgcttacagcgacataagcccaagggcagtggtttgggtgattcactttcccctctaggtattgccaggggctagaggcccctagaaaaagaccagtaagccccagtgtccccccagcccccatgcttatgtgaacgtgcactgtgtgctgcttgctttggaaactgggcctgggcccaggcctagagtgagctcactgtcgtacaaacacaagatgaggggtgagggtaaggaaaagaagagactaggaaagctaggcccaaaactggagactgtgtttcctggagatgcagaactgggcccatggannnnnnnnnnnnncatcagggcagaagccttaaagcagcagcaggtgtgcccaggcagccagatggttcctgtgggactagccaggaaaaatggcagnnnnnnnnnagaaaa

SEQ ID NO: 9726 - DNA, 747 bp, Macaca Fascicularis
  misc_feature (1)...(747): n = A,T,C or G
agtgcgatggcccgatcttggctcactgcaacctccgtctcccgggttcaagnnnttctcctgcctcagcttccctagtagctgagattacaggcgcctgcccccacccccannnnnnnnnnnnnnnnnnnnnnnnnnnnnnnnnnnnnnnnnnnnnnnnnnnnnnnnnnnnnnnnnnnnnnnnnnnnnnnnnnnnnnnnnnnnnnnnnnnnnnnnnnnnnnnnnnnnnnnnnnnnnnnnncacgcctggcaaatttttaaaatatttatagagacagtgtttcaccatgctgcccagaatggccttgaactcctgtgttcaaacagtcgtcctgcctcagcctcccaaaatcctgggattgcggacgtgagccaccgcacctgacctagcttgtgctctnnnnnnnnnnnnnnnnntgggggttgaagttagattccagataaatgtccaatttgggaataagccagtaatttttaagttgccccaaatgctttcatttagtcttaaacataattaaaggcatctttgtgtaattggcgagtcaggtaacgggagaagaacagtcttcttacttggaaaatcctttaaacagtacccagtgtgtggatgggctcaataattactgtttcatatcgacatgnnnnnnnnnnnnnnnnnnnnnnnnnnnnnnnnnnnnnnnnnnnnnnnaagcagctttacgtttcctaaccttgannnnntngtcatcctttcctgtagcactgtag

SEQ ID NO: 9727 - DNA, 673 bp, Macaca Fascicularis
  misc_feature (1)...(673): n = A,T,C or G
atctcaaaaaaaaaaaaaatagaattcaatggatgaatttaccaccacatgacatataaccagaaaagagaannnnnnnnnnnnnnnacaccagagaatatctatcaggaaacaggaaagacaaagggatgacgaagtttcaagaggtnnnnnnncaggctctcagggcccctggaggaacaagaacgaggcagaagcaacactggaagaaacgtgatgaaggcctcaagccacagatccaagaggcctcaaactctgaacaggttgagaatacatgtcggcccatctgagcacaagcaccaaaaaccaaggccaagaccctacaggtgcccgtgccagagacgggggacagaacgatgtttgcaaagtgcagagacaaaatactgtcaacctaaaatcctacacacctaagaggaaaaaattccttcaagaatgagggtaaagtaaatnnnnnnnnnnnnnnnnnnnnattgacagaattgggaggccgagacgggtggatcacaaggtcagnnnnnnnnnnnnnnnnnnnnnnnnnnnnnnnnnnnnnnnnnnnnnnnnnnnnnnnnnnnnnnnnnnnnnnnnnnnnnnnnnnnnnnnnnnnnnnnnnnnnnnnnnnnnnnnnnnnnnnnnnnnnnnnnnnnnnnnnnnnnnnannnnnnnnnnnnnnntg

SEQ ID NO: 9728 - DNA, 775 bp, Macaca Fascicularis
  misc_feature (1)...(775): n = A,T,C or G
acagagatgggcanntgnnnctgagtccacaaaggagaagaaacatgtgtttnntctcctcgggcctcnnnctccctgggctggggactccatgggtggctggaagactgggcagccacctgcaaacagacgctgtggtccctgcccggctcccccagccattctgctcccctagagacccgttgtacagaagttgcccctaggtggtggggcccctccttnnnnnnnnnnnnnnnnnnnnnntgaggaggtggtcacccagcccagccacctctgcctcttgggtcagccctccttgaccgtgtcccagccagcgccaagccagcagctcgtccctgccattcgggattgttcnnnnnnnnnnnnnnnnnnnnnnnnnnnnnggtgaacaaatccgaaggaaatggtgtnnnnnnnnnnnnnnnnnnnnnnnnnnnnnnnnnnnnnnnnnnnnnnnnnnnncccggtcaagtcatttggtgactttgatgggggggnnnnnnnnnnnnnnnaaggtgctggagacaggaaggacctttggccgccttgggtcgttgacctgccttttctgactctggggcgggccagtcctgggctgcctgcgggagcactcaggtatcccgcaggccatgaggacccactgggcagctcctggacagcctcttggctccagcccccacnnnnnnnnnnnnnnnnnnnnnnnnnnnnnnnnnnnnnnnctggcactannnnnnnnnnnnnnccaatgtagccaaaggaagttttataaaataca

SEQ ID NO: 9729 - DNA, 460 bp, Macaca Fascicularis
  misc_feature (1)...(460): n = A,T,C or G
gagatatggttatggatgtatggttcagatatccataaattgtgaccatggcaggtnnngagcatcaccaatgtgaccacaattgaaagcagaatannnncnttgattactcctccttgtnnaaacaactgtaaaggtgggaagaaacagctggggaaggtagaagaaatttataatcatttgcatttaaaaggaggggagagagaaagagaaggaaggggagaagaggaaacagaggacaaaacaatagaaaacctgaacaaatgaccctgaccctcttcttccaattgcagctatttaattcatgtgaatccctacattatccccaagtaaattttttgtttcacagaaagcttgtccttttgtttttccatgtgcatgtgcgcactggcgcttgtgcgtgtatgnnnnnnnnnnnnnnnnnnnnnnnnnnnnnnnnnnnnnnnntcagttctggttt

SEQ ID NO: 9730 - DNA, 431 bp, Macaca Fascicularis
  misc_feature (1)...(431): n = A,T,C or G
cggtgcggcaaggcggcgcggagccggcccctgggcgccaggtgtttcggggttcgggtctcgccgaccggggagaagatcacacacactggccaggtttatgatgataaagactacaggagaattcggtttgtagatcgtcagaaagagnnnnnnnnnnnnnnnnnnnnnnnnnnnnnnnnnnnnnnnnnnnnnnnnnnnnnnnnnnnnnnnnnnnnnnnnnnnnnnnnnnnnnnnnnnnnnnnnnnnnnnnnnnnnnnnnnnataaacttggacaaagaaacaaannnnnnnnnnnnnnnnnnnngtgggcnnnnnnnnnnnnnnnnnnnnnnnnnnnnnnnnnnncacgctgggggccccgcagcgtccnnnnnnnnnnnnnnnnnnnnagatgagcgcgtgaagctcgctgnnnnnnnnnnnnnggt

SEQ ID NO: 9731 - DNA, 709 bp, Macaca Fascicularis
  misc_feature (1)...(709): n = A,T,C or G
cggggctnnnnnnnnnnnnnnnnnnnnnnnnncacctgtgaagacatcgacgagtgtgccctgccnnncgggggccacatctgctcctaccgctgcatcaacatccctgggagcttccagtgcagctgcccctcgtccggctacaggctggcccccaacggccgcaactgccaagacattgatgagtgtgtgactggcatccacaactgcnccatcaatgagacctgcttcaacatccagggcggcttccgctgcctggtcttcgagtgccctgagaactatcgccgctccgcagccaccagctgtgagcgattgccttgccatgagaatcgggagtgctccaagctgcctctgagaataacctactaccacctctctttccccaccaacatccaagcgcccgcggtggttttccgcatgggcccctccagtgctgtccccggggacagcannnnnnnnnnnnnnnnnnnnnnnnnnnaggagggctttttcaccacccggaaggtgagccccnnnnnnnnnnnnnnnnnnnnnnnnnnnnnnnnncccgagcccagggacttgctcctgaccgtcaagatggatctctatcgccacggcaccgtcagctcctttgtggccaagcttttcatctttgtgtctgcagagctctgagcactcgcttcgcgtcgcggggtctccctcctgttgctttcctaaccctgccctc

SEQ ID NO: 9732 - DNA, 718 bp, Macaca Fascicularis
  misc_feature (1)...(718): n = A,T,C or G
gttggccgcccttcacttggcntcctgcctcgcctctacacctactccctatcggcccttttgccatcctgtcttcgtgtaactcggattctctcctcaggtgtaggtgcagggagtccaggaaacggactcccctgagtgcaagagcccaggtgttggtgtgtccctttaacgccactgtgctctctggtgtttccgattttcctgcctttgttctgtcttcttttgtcccatctccttattccaacccgcatcttctcctttccggattacttttgttgtcctnnnnnnnnnnnnnnnnnnnacagatttggctgtagtcacgttaccagccctgtggcttcttaactcttggttccctgttaactctgcttctgagaaatgtgggtatggaggtgggaaagctcacttccaggcaggatgtctccatgccaggagctgcctgcaccctggcagaggtggccactcacgtgaaggtgggcaaggcccttagcatgcccacacgtcccccaggcagatcaaggggcctctcagaacaatgttccccagnnnnnnnnnnnnnnnnnnnnnnnnnnnnnnnnncaaaaccacatgggtccacaaagccaggcactgccaagtggaacatgaggttatttccaaatcatgggagccaccagtagggagagggcaggatggaaaatcccctggagctggtcannaactttttgcttatggc

SEQ ID NO: 9733 - DNA, 671 bp, Macaca Fascicularis
agaacattgtagctgtgggagctgggctctgtgatggcctccgctgtggagacaacaccaaagctgccgtcatccgcctgggactcatggaaatgattgcttttgccaggatcttctgcaagggccaggtgtccacagccaccttcctagagagctgcggggtggccgacctgatcaccacctgctacggagggcggaaccgcagggtggccgaggccttcgccagaactgggaagaccattgaagagttggagaaggagatgctgaatgggcaaaagctccaaggacctcagacttccgctgaagtgtaccgcatcctcaaacagaagggactagtggacaagtttccgttgttcactgctgtgtatcagatttgctacgaaagcagaccggttcaagagatgttgtgttgtcttcagagccatccagagcatacataaagtgaaccatgcagcgtgtggggggaagttctgcctttctgatcaatcttttgggttcacgtggaaaccaggacttggcaacatgatgtttgtttgactgtaatctcatcatggatatgtatggatttttacaggatcgtttttgaattgtgagaggcagttcattggcaaagatgtactgggtagtaactaaacacacatgcagacgtgtgaatggtggtttattcctca

SEQ ID NO: 9734 - DNA, 721 bp, Macaca Fascicularis
tggaagccccgttctacgaggagtggtggtttctcctggtgatggctctgtccagcctgatcgtcatcctgctggtggtgttcgcccttgtcctgcacgggcagaataagaagtacaagaactgcagcacaggaaagggaatctccaccatggaggagtctgtgacccgggacaacggaggatttgctgccctggagctcagcagccgccacctcaatgtcaagagcaccttctccaagaagaacgggaccaggtccccaccccggccgagccccggcggtctgcactactcagacgaggacatctgcaacaagtacaacggcgccgtgctgaccgagagcgtgagcctcaaggagaagtcggcggacgcgtcagaatccgaggccaccgactccgactatgaggacgcgctgcccaagcactcgttcgtgaaccactacatgagcgaccccacctactacaactcgtggaagcgccgggcccagggccgtgcacctgcgccgcacaggtacgaggcggtggcgggcgccgaggcgggcgcgcagctgcacccggtcatcaccacgcagagcgcgggcggcgtctacacccccgccggctccggcgcgcggactccgctcaccggcttctcctccttcgtgtgagcaaagcgccgcacctccctcagggcggaacggaggcgaactttccggagtctatttttgttaagacaatcaactcc

SEQ ID NO: 9735 - DNA, 703 bp, Macaca Fascicularis
ctcggcgctcgtgactcagccagctgccccatcctgagtcgctgaggggctgcggggaggccgcagcaccttctggaagacttggccttccgctctgacgcagggccgaggtgggcagtccaggccgagaggccggcggccctgaaggtgagtgaggccctcggcagctgcagccagggtgtccggtactcccccggcgtggtgcttagcccaggactttcagacgtggccgctggcctggaggctttggtgggagagacacgatcgctggtttcggtctggcgccccctctgcggccgggacccaggcctttcacatcagatctccctccatcttcattcataggtctgcgctggggccgggacgaagcacttggtaacaggcacatcttcctcccgagtgactgcctcctgcgaggacatttaggggagggcagaggcctgcagtttggcttcacggctggctatgtggacagcaagagtcgttttcgcggaagccgactggcagccaagcctgtcgggcctccccatttcccttccagcaaactcaactcggcaatccaagcacctagataccagcacaagtcggttaatccctgtctggactgagcctccgttggcttccgaactggaattttgcagctaacccttccaagactagaaccttaggcattggggagttttagatgaacaattataaagat

SEQ ID NO: 9736 - DNA, 774 bp, Macaca Fascicularis
  misc_feature (1)...(774): n = A,T,C or G
caagcagtactanntggccagctgcggagacgactgtaaggtgaagttnnggacacccgaaatgtcaccgaacccgtgaagaccctggaggagcactcccactgggtgtggaacgtccgttacaaccactctcacgaccagctggtcctcactggcagcagtgacagcagagtcatcctttccaacatggtgtccatctcgtcggagcccttcggccacttggtagacgacgatgacatcagtgaccaggaggaccaccgttccgaggagaagagcaaggagcccctgcaggacaacgtcatcgccacctacgaggagcacgaggacagcgtctacgctgtggactggtcctcggccgacccgtggctgtttgcctccctgagctatgacgggaggctcgtgatcaacagggtgcccagggccctgaagtaccacatcctgctgtgactcccgggcctgagttatccaggttccactgggtggttatgctcttggcaggttcccaaacagtcacagctctttggcggtgactcattttccaggtgctccctctctgggagagccgctgtccccttcctctagcagcagcgtttatgaatggggtgaatggagctgttgtcgacggcacagctgacgcctgaacccagccgctgtcggcagagacggagccccacgttgttatgtgaataacaacattttctgttttaagggtgttaggagtttcactttttaaaaaaatgttcctgcaatagtaactcttctttctcttcagag

SEQ ID NO: 9737 - DNA, 711 bp, Macaca Fascicularis
  misc_feature (1)...(711): n = A,T,C or G
tgccgccagccgcncatnnccaaggcctttgagatcacgttggctgtgggcgaagggaagggtgtcaacaagaggatcacctacaccaacccctacccctcnnnnnnnnnnnnnnnnnnnnnnnncgaccacccggagctgctgcggttcagggaggactccttccaggttgcgggtggagagacccacaccatcggcctgcagtttgcgcctagtcagagagtgggggaggagnnnnnnnnnnnnnnnnnnnnnnnnnnnnnnnnnnnnnnnnnnnnnnnnnnnnnnnnnnnngtcatctaccagtgagggcttgagggtgacatccttcctggggcacctggctggggcctgtctgcccctcctgccctgcaggccgtcctccccgcctctccgcagcctttgacctcagggcccaccacttggctgaggaagcagagagcacgcgctggtcattttgtagtacctgcgtccggcttagctgctgctgacacccagcaggcctgggttccatgagnnnnnnnnnnnnnnnntggctctggttctggtgctgccgtctgcacacgtgggaccctcattatctctgttgctcaaaatgtattttatgaatcatcctaaatgataaaattatgtttttcttactggattttgtacaaacaatctattatttgctatgcaatattttatgctggtattatatctattttttta

SEQ ID NO: 9738 - DNA, 717 bp, Macaca Fascicularis
  misc_feature (1)...(717): n = A,T,C or G
cacacttgccctgtcttccagagactacttcagtaagccatgcttncttcttccccacttttatttggtgtcatgaatagaaacttccagctgtaaccatggaagctcagtttggcctgttttactttttagtctccacaccatgggcagaactgctgtccttactacttcatctcacccaggtcccgttcccaggcagccaggggcctgggtttgaataattgcagggccagcctgccatgatctttctcacttactcctctcccattcagcaatcaaccagactaaggagttttgatccctagtgattacagccctgaagaaaattaaatctgaattaattttacatggccttcctgatctttctgctgttcttaccttttcgaatgtagttggggggtgggggggcaggttatgatatttaaagagaataaacattttgcacatacatgtattgtacaacagtaagatcctctgttaaaaccagctgtccttgttctccatctccatttcttcccatgctgtaaccccaggctccaccagctgttccccagtgacgttacctagcttccctctaccgttatctactgaccatttccactacacgcctttcctaccttcccttcacaaccaatcaagtgaatacttgattattatctcttccttactgtgctttatcttttttgttttgttcaaactaatgaaaataaaagtttc

SEQ ID NO: 9739 - DNA, 747 bp, Macaca Fascicularis
  misc_feature (1)...(747): n = A,T,C or G
tatggacagacatnnnnnnggaagacgcacacaatggagggtaaacttcatgatccagaaggcatgggaattattccaagaatagtgcaagatatttttaattatatttactccatggatgaaaatttggaatttcatattaaggtttcatattttgaaatatatttggataagataagggacctattagatgtttcaaagaccaacctttcagttcatgaagacaaaaaccgagttccctatgtaaaggggtgcacagagcgttttgtatgtagtccagatgaagttatggataccatagatgaaggaaaatccaacagacatgtagcagttacaaatatgaatgaacatagctctaggagtcacagtatatttcttattaatgtaaaacaagagaacacacaaacggaacaaaagcnnnnnnnnnnnnnnnatctggttgatttagctggtagtgaaaaggttagtaaaactggnnnnnnnnnnnnnnnnnnnnnnnnnnnnnnnnnnnnnnnnnnnnnnnnnnnnnnnnnnnnnnnnnnnnnnnnnnnnnnnnnnnnnnnnagtacatatgttccatatcgagatagtaaaatgacaagaatccttcaagattcannnnnnnnnnnnnnnnnnnnnnnnattgtaatttgctgctctccatcatcatacaatgaatctgaaacaaaatctacactcttatttggccaaagggccaaaacaattaagaacacagtttgtgtcaat

SEQ ID NO: 9740 - DNA, 737 bp, Macaca Fascicularis
  misc_feature (1)...(737): n = A,T,C or G
ggagatggatgcgcggcaggagcgggtggaggtgctgccccaagcccgggcctcctgggagagcctggatgaagagtggagggcaccccaggcacacagcaggaccccggtgcccagcacggtgcaagcaaacacctttgaatttgcggatgctgaggaggatgatgaggtcaaggtgtgaggggctgggacatggtcccggggccccacctaggtgcagagccggcccctcacctaacagctggttcctaccagaccagagaggggagaagccgagttgcccctaaacccctctccacctctgcaggacagacatgggagggaagacagggaaggccaggattgctctgggacttggatgctcccagaggccctgccaagctgaccacctcctcccactgccactctggacctaatagctcttccttaggccccactccacgccacccccaccagctggagggcccagcctcacagtgtggccttcgtgccagactaagctgcctgtggggggtggggggcagggagtgtaccacacagggccattgtcccacctcccaaaggaaccgcctgcccccagnnnnnnnnnnnnnnncnnnnnnnnnnnnnnnnnnnncctctcccaggccgcttccccaacatccccgccccagcctccctcttaccccagaaaggtcaggtatgacctcccggggaggaatcccacctgcctgtataccccagacttgcctctgggg

SEQ ID NO: 9741 - DNA, 697 bp, Macaca Fascicularis
  misc_feature (1)...(697): n = A,T,C or G
taaaaagtaaaagtccttgtccagccatcctcatggggcatctgtctgtctctcacacaggtcactcaagttaatgggaaagaaagaacagggggcccaagtctgaagttataaataatagaaaataaaagatcttccgtctccagcggggaacagatgagaggatgggagggcaagactgggtggggacgggcaggggcagagcaggaaccccccacccctgctggaccctggccctgccctctgtgaggcccctcccattcaaggtgcttggcaggaattccccagctcccccggggaatgggggggatggggggctgggnnnncttgcaatgatcataaaggtaaataagtacagttgtcccttggtatccatggggtattggttcccagaccgccccctcaacccatagataccaaaaatccaagtatactcaagtcccttacataaaatgacatatttgtatataaccaacgcacatcctcctgtatactttatctctagactaatacctaatgcagtgtaaatgctatttaaataactgttatactgcatttttatttgtattatttttatattttttctaatatttttgatctgcaattggtttaatccacagatgcagagtacatggatacagagggccaactgtgttttgtnnnnnntacttcaatagcactacagnanatctttgac

SEQ ID NO: 9742 - DNA, 722 bp, Macaca Fascicularis
  misc_feature (1)...(722): n = A,T,C or G
tgcttnnnnnnnnnnnnnnnnnttnnncntactgtagaagaaaaagtttattaccaaacaagagtatttttatgaaagaaaaggacaaacctataaattaactcaacctatttctcccttgaaaatactttcaggctccaccaaaatgtagaactgaaagcatgtattttggaagaaagagatacattttgtatgctttcttttccttttgtagattcccagtttattttctaagactgcaaagatcactttgtcaccagccctgggacctgagaccaagggggtgtcttgtgggcagtgagggggtgaggagaggctggcatgaggttcagtcattccagtgagctccaaagaggggccacctgttctcaaaagcatgttgaggaccaggaggtaaaactggccatttacggtgaacttgtgtcttggagctgacttactaagtagaatgagccgaggatttgaatgtcagttccaaccttgatagaagcagcttgggttacatgtggttcacattaagaggatagaatcctttggaatcttatggcaaccaaatgtggcttgacgaagtcatggtttcatctcttaaacacagntgtgtaannnnnnnnnnnnnnnnnnnnnnnnnnnnnnnnncttctgtacgcagtggacttaagcgcaatttgttgaaagggaacaagtcatgaagagaaaaaaaaaaaaaaaagcccaatacttag

SEQ ID NO: 9743 - DNA, 701 bp, Macaca Fascicularis
  misc_feature (1)...(701): n = A,T,C or G
tacagtaagaaaaagcactttatgacaatatttcacaaattcacaaggatcactttaatatacagagcaactgctaccattctgaacacaaagcagctattatgtacatagtgttaataaaatgcattgtaactcagtacatttttttctttacacataaagcacaaaaagatttaggtaaaaaaattaaaacagggatgttctagaatgtagggaattttattagaaacgtatttccctcattatttatttattatttcaactccaatagaaacatcagagttaaaaatcaataccctgttttgtgctgacagttttgggggaagtctttaccccaatcctcaaggaaaaaccaaaaagccaaacacctttctaggaacttccctgattattttgcttttaaaaagtttcaagtgatatatctgggttagaaataattccttttgtagggagtgggggagttacaactgacatgtggacaaatcagtcaaggacaactttacatggaaaactgctaactagcactctttgttgccacccctaataaatctatactcaaaaaaatgttgacaaattatttcccacttttaatataaataattttattacatacacaaattggagtggcacttggataaaatacatctataaagcatttaccaattncannttnnaaacatannnnnnnaaaacctcccaaa

SEQ ID NO: 9744 - DNA, 768 bp, Macaca Fascicularis
cccagtagctgaaacctcagcccaccattcccttcttccctgtgtgggctcaagcctggtgcacttagtatagaagagctaatgtactcaggctggtgccacgggtgagcactgaggccccaagtgtcctccctcccccactgtctgggacaacaggacaggtgttgtgtctgactctgtctccccctgtccaggagctataggccggttgaggcatggaaccttatcagtgacttgtccaacaagggaagctttggggcctcagaattcattgaagatttgttttgggacaactggaagaatcagcaccatggatacttgcccgtgggcagggctgtggtcagccaagaatagaggtcatatagttgggctgtggggcaattgttggcagccatgactgacggccccttgtgcaagctcattcttcagtggatccttcagtggagtggtgacatgtgccagcggtcattctgccacatcacttctttcttgaaagcctaagagtgtgtatgcatgtgtgtgtgtctgtgtgtgtgtgtgcacgtgatgcagaagaatatgacagatgtcaacttctccctgtgtcagatgatatgcccttgaagctggcaggggattcccagtccagggaatatccctacatgatttttgtcattcatgggtcctccctgggcctgccaacaagagtggtgggtgggtagagggataaggcccaagtgagtacaggttttgagagggggcttctaggaaggccccagccctagtact

SEQ ID NO: 9745 - DNA, 476 bp, Macaca Fascicularis
agcatgaaatctgtactccaggcagcttggctattgacaattgcagttgggaatatcatcgtgcttgttgtggcacagttcagtggcctggtacagtgggccgaatttattttgttttcctgcctcctgctggtgatctgcctgatcttctccatcatgggctactactatgttcctgtaaagacagaggatatgcagggtccaggagataagcagatttctcacatccaagggaacatgatcaacctagagaccaagaagacaaaactctgatgactccctggattctgtcctgaccccaattcctggtcctgtcttcaagcattttttttttcttctactggattagacaagagagatagcagcatatcagagctgatctcctccacctttctgcaatgacagaagttccaggactggttttccagtacatctttaaacaaggcccctgagattctatgtctgcctgtctatca

SEQ ID NO: 9746 - DNA, 734 bp, Macaca Fascicularis
  misc_feature (1)...(734): n = A,T,C or G
gaaaagcaacacagtcactcctgtgctcatttgtantnnnnaagatcnnnnnnnnnnnnnnnnnnnnnnnnngcaagtatatactcattataggatcaatttaagaagtttaaaatatcccagagtagaatttctatatctagtcttttggttttttcatgaatatttgcaagtaattaccattaaattcacacatgaaagactaatctgaaagatcagacagaccgtgttattcctgaccatgatagaactgctcctgtggttcgggacaagtaacaaaacaactgcttgagttttgtttgtaaaatacactattaatatttgacctacctcaaaacgtattgaggnnnnnnnnnnnnntaagtgcccaaaataaaatattgctgattgtctttttattaaaagtaaatttcctcattaagccaacctgccttctgtaagtcacagtgcttaaatctcaggacttttcattaggannnnnnnnnnnnnnnnnntttgtagatataattgcttagcctccattattggtgcttgggatagagaggttttagatttttctgtttttttgttctgcctcaaagctcagtttattgaagacatttgtaagctattgtgtcaccacttcaatcaagattttgactagtgagcttaattgtccatttcttattatttcaaagttacagtctgagaaatggctaatcttaataactgtcctatcataaattaatgttgga

SEQ ID NO: 9747 - DNA, 740 bp, Macaca Fascicularis
  misc_feature (1)...(740): n = A,T,C or G
gaaaaacggcnnnnnnnnnnnnnnnnnnngagatgtggactggggagaggtcgactacctcatcgtggacaccccacccgggacgtcggacgaacacctctcggtcgtccagtacctggccgccgcacgcatcgacggagcggtgatnnnnnnnnnnnnnnnnnnnnnnnnnntnnnnnnnnnncggaaagaaatcaacttctgccgcaaggtgaagctgcccatcatcggggtggtggagaacatgagtggcttcatctgtcctaaatgcaagaaagaatctcagatattccctcccacgaccgggggtgcggagctcatgtgccaggacctggaggtccctctcctcggcagagtgcccctggatccactcataggtaagaattgtgacaaaggccagtccttcttcattgacgccccggattccccagccacgttagcctacagaagtataattcagagaatccaagagttttgnnnnnnnnnnnnnnnnnnnnnnnnnnnnnnnnnnnnnnnnnnnnnnnnnnnnnnnnnnnnnnnnnnnnnnnnnnnaagtgaggtactccctgggcagcacatccagccagacccgaccagctccgggacagggtgggtcacagcaaaaaggaaccagatgctggcgtggtccaaagccactttcgcagagacactttaatcatcgagtatttgtacnnttttccttagannnnnnnnnnnnnnnnnnntctacaaatatgccg

SEQ ID NO: 9748 - DNA, 710 bp, Macaca Fascicularis
  misc_feature (1)...(710): n = A,T,C or G
gacaatgtcaaatggcnnncatttcatagtggctatgannntggctatatggtaaagttgcttacagattctcgtttgccagaagaggaacatgaattctttcatattctgaaccttttcttcccatccatttatgatgtgaaatacctgatgaagagttgcaaaaatcttaagggaggtcttcaggaagttgctgatcagttggatttgcagaggattggaaggcagcaccaagcaggctcagactcactgctgacaggaatggctttctttaggatgaaagagttgttttttgaggacagcattgatgatgccaagtactgtggacggctctatggcttaggcacaggnnnnnnnnnnnnnnagaatgaggatgtggactctgcccaggagaannnnnnnnnnnnnnnnnnnnnnnnnnnnnnnnnnnnnnnnnnnnnnnnnnnnnnnnnnnnnnnnnnnnnnnnnnnnnnnncttactgtgctgactgtgtacttatcttccccaagagaaaatgcttcttttgagcaaactgtacctaccatctgcattgagcagaaagacttttgttttactgaagacaaagttgtctttattttagacccagaagagaggagtttgctctgaatttgtaagtaagtcttccccattcctcatccctgagcctctcctctctggttgcctcctgccaccagcatccatggctcat

SEQ ID NO: 9749 - DNA, 604 bp, Macaca Fascicularis
  misc_feature (1)...(604): n = A,T,C or G
aatggatttttttttnnnnnnnaatgcagaagtaatgtatactctagtnnnnnnnngtntnnntatttatgtaataatttcttaaaaccattcagacagataactatttaatttttttaagaaagttggaaaggtctctcctcccaaggacagtggctcgaagagttggggcacagccagttctgaatgttggtggagggtgtagtggctttttnnnnnnnnnnnnnnnnnnnnnnnnnnnnnnnnnnnnnnnnnnnnnnnntgtgtagaaacaggcagcnntgagtcagatcngggcccttccacaagggtcctctgaaccaagccccactcccttgctaggggtgaaagcattacagagagatggagccgtctatccaagaagccttcactcaccttcacnnnnnnnnnnnnnnnncggctgttctggacctttactttggtgtgtgttgagggatggggaataggacattgactatgttgattaccttcactattcagccagcctgaccttttaataacttcgtaaaaagcatgtatgtatttatagtgttttagatttttctaacttttatatcttaaannncagagcaccctgtttaag

SEQ ID NO: 9750 - DNA, 726 bp, Macaca Fascicularis
  misc_feature (1)...(726): n = A,T,C or G
ggaacattgtaaaactctctttgtatcggcatttcaccaacacgctaattttggnnnnnnnnnnnnnnnnnnnnnnnnnnnnnnnnnnnnnnnnnnnnnnnngaatagtgacatgtcagtcggactggcgggagctgtgggtagannnnnnnnnnnnnnnnnngctgttctccatgatcctctttgtcatcnnnnnnnnnnnnnnnncgtctgcaaacaaccagaggtttgccttttcaccattgtctgaggaagaggaggaagatgaacaaaaggaacnnnnnnnnnnnnnnnnnnntgagggaatgaaaatgagaagtaccaaacaagannnnnnnnnnnnnnnnaaagnnnnnnnnnnnnnnnnnnatgatttgaagtgggtagaagagaatgttccttcttctgnnnnnnnnnnnnnncttccnnnnnnnnnnnnnnnnnnnnnnnnacgaatgatcacacactttgaaaggtccaaaatggagtaaggaatgggaagatttgcagttaaagatggctcctannnnnnnnnnnnnnnnnnnnnnnnnnnnncttctgtacggctccatgggattaaaggaagcaatgacatcctgatctgttccttgatctttgggcattggagttggcaagaggtgtcagaacaaagagaacatcttactgaaaacaagttnnnnnnnnnnnaaaaatctgcaagcttcatatttacaacactgatgcccc

SEQ ID NO: 9751 - DNA, 763 bp, Macaca Fascicularis
  misc_feature (1)...(763): n = A,T,C or G
ctactagtcagannnnnnnnnnnnnnnnnnnnnntaaatttcatgannnnnntgaaacagtttagatgccttttgaaaggaatgtaacgaagatttagcctctgactatatgtgtgtctcttctgaaataataatggagagtatactgtagattacatgtttacccatcaaatctgacttaaaaggttaaatggaaggttttataagtaaggtaattgattggaatggagtagggggaggagttgtgggggaatagtgtgcatttcagtctcttaatgcatagataaatttaggggaattggatgtattatgccactttgatttgggttgtaaaatgtgttaaatcctgttcattgaactcccatcaactcttttataaaatacatgctgatcttcgttaccgttgcatgattggaaatgtttaaaacattgtacagttttagtacagagtagtgtaatggtttttgtgactagtttttttctgcatgtaatttgaatttctcaaatacattcattagtaatttatcagtaacattagttttatttttgttcatcttcctaatctataaaaaggggatattcttaggataaatacatgaaaaattatacttgatagcttaactataatcagctatttttgtatttttgtaatatttgtccacaaagttggagaagcagcctcataatatacagttgattttgtgtgtatgtggctagtcttattgtcactgtataagtaatctaatggttttagaaactaaat

SEQ ID NO: 9752 - DNA, 997 bp, Macaca Fascicularis
  misc_feature (1)...(997): n = A,T,C or G
acagaagagatgggcagagcaacttactttttnnnacattaaattgtgcatttgggaagcaagtagccatagaatatacacacactatcagcttgggtaaggacagtggaacttatgtgnnnnnnnnnnnnnnnnnngagatcaaaccatcccaagccttttaccaatgaggtacaaccacctggctgctagctaatcttgaatgttttcctgagacaggagcgtatgtgaaaacatcaaacactgcacagaatgacaggatgggtcctctcatacagatgggtagggccagaaagccagaaccacttttccatctggtgtttcctgtatcctccaggtttttatatgggaatcaaaagtttgttaatctgattgggagagttccacaggcagatttcccttcctgaaggccaaaacggagaactgctctcttaaattatttcaagagtcaagaccaaaagtttgctcagcatcacactacatctcaaannnnnnnnnnnnnnnttaatnnnnnnnnnnnnnnnnnnnntgcttagtttacaaggttggggctctcttattgtataatttgcttcaagaagtaaacctaacaccattttttattgtttnnnnnnnnnnnnnnngtcaaaattacctagggtaacttttgataacttacatctgtggacaaagctaatagtggttttttaaacagcaccttgcctgaacatgactttaaagaaattaatatattgaaaacatgtttgaatccttgattattttaattgcaccattaaaacatttgacttaaattgtttgaccattccagttggtgtactgttgatttnnnnnnnnnnnnnnnnnnnnnnnnnnnnnnnnnnnnnnntcctggtcactggtctttataattgttgtgcaataactaaaggctaaggactagatgcactatcgtgtaaagagattacacatgactgtaccatgttgcacttaatcaaatagtatgtggggattaaaatcg

SEQ ID NO: 9753 - DNA, 489 bp, Macaca Fascicularis
gcccccatccctccttcctctcctccaagtgccttcaaaccaagaacagcaattcttctggttcctcagtgagttggtggctggcaggtgactcccccagcggtgtatgccctttctcagcatgctaggtccatcccaggcctggaggctggcagttgggaacccagcttccccccacaccttcccaaagactgctctgagcacctccacaccccactggctctgtccccagcaaactgaatccggctcctctccacttttcaacactgaaagattaaaaaggtgaggttgcggggagcagagtttttccccagtacctccttttccaaaccagactctgcagaagccccagagaatctgactaactcatgcctgtccagtctacagcaaaaatgtttattgagtgcctattgcatacaggcacaatcctaggcaccagcaaatacagacaatagaccaaagtccctgccctcgagaagctttcattct

SEQ ID NO: 9754 - DNA, 733 bp, Macaca Fascicularis
  misc_feature (1)...(733): n = A,T,C or G
aggaacagagtgacctgacnnnnnngacatcagcnnnnnnnnnnnnnnnnnnnnnnntccacacaggaactcatctcctcagcatgcaggggagccctggaggacacaatcgcccaggcacccnnnnnnnnnnnnnnnnnnnnnnnnnnnnntttggacccnnnnnnnnnnnnnnccggcactatgtgggctcagcagctgnnnnnnnnnnnnnnncagannnnnnnnaattccaaggcagtcctggtggtgcctatgggactgctcagcccccacctcactatgggcccacannnnnnnnnnnnnnnnnnnnnnnnnnnntcagagctccttcagcattccctgcagtgnnnnnnnnnnnnnnnnnnnnnnnnnnnnnnnnnnnnnnnnnnnnnnnnnnnnnnnnnnntcnnnnnnnnnnnnnnnnnnnnnnnggtgccctgtccttgcaaaagcagatggaacatgctaaccagcagactggcttctccgactcatcctctctgcgccccatgcacccccaggctctgcatccagcccctggactccttgcttccccnnagctccctgggcagatgcaaccagcaggaaagtcgggctttgcagctaccagccaacctggccctcggctccccttcatccaacacagccagaacccgcgattctaccacaagtgacgatcagattatattttcnacatcatgccccctgccccactgtgggtgaggatacc

SEQ ID NO: 9755 - DNA, 746 bp, Macaca Fascicularis
  misc_feature (1)...(746): n = A,T,C or G
atagccattcatttacaatttccagatttgagctgcctcgaggcaatccatattagcnctgcataagattatatacaaagctgtcactcacaaaaggctggatgtgctttcatccaactggaaggctttattcttccaagttcattcgtactcaaagaggccagtattttgccatccttgcacttctgttatcagggcccaaataatgttggccagctaccaactaagttgtattttaataaagattccatgggttgaacaagccacattgcagaaaaagacctgcccctaacctgggttnnnnnnnnnnnnnnnnnnnnnnnnnnnnnnnnnnnnnnnnnnnnnngaaaatagttccattctatgacactcgtctcctcctccagggaggactgttctaaccggtaatcttggccctattcattacattctctgcttgtcattctgctaatttatgaagatagtttattannnnnnnnnnnnnnnttctcatcttgtaaataatgcttaacataaacctgtacttacactgagatccaaaatagtcatgtttctgcagtattgtgtagccaacttaaacctgtgctttcatgtttaagaaatgagaaattgtgccaaagatagcagaagagtaaataagtactcagtattgaccacctacatctgaaatctacaacataatgatactgaattgttatgtaaacatcataaatagtaaataatgattctaatgtgaattttaaaat

SEQ ID NO: 9756 - DNA, 737 bp, Macaca Fascicularis
  misc_feature (1)...(737): n = A,T,C or G
agtactttgccacaggaagtgcagatgctttggttagcctctgggatgtggatgagttagtgtgtgttcggtgcttttccnnnnnnnnnnnnnnnntaaggaccctcagtttcagccatgatgggaaaatgctggcgtcagcatcggaagaccattttattgacattgctgaagtggagacaggggacnnnnnnnnnnnggtacagtgtgagtctccgaccttcacagtggcgtggcaccccaaaaggcctctgctggcatttgcctgtgatgacaaagacggcaaatatgacagcagccgggaagccggaactgtgaagctgtttgggcttcctaatgattcttgagaggggattgtagggagaggaggccctggcagaggtcttccttcatgtggttagtttggtctgttctcttggagttggtgggcaccctaaatatttgtaaattggtacaaattgtaaannnnnnnnnnnnnnnnnnccattccagttcttttgctttttctgtgtattagctctttccattctttgctcccagcgtgagttaactcgtgtggactctgcagtgtaggtagtgcccccagcatacctcgtcctctnnnnnnnnnnncttctctgcttttgggtacatggtagactctgtggcgtttgatacaacttggacaatacttagtttggagggaggggaatggaaaggtatggaaaattttttaaataattaaaaatatatatata

SEQ ID NO: 9757 - DNA, 727 bp, Macaca Fascicularis
  misc_feature (1)...(727): n = A,T,C or G
cggcagtacgtctacaatgttgccaaggnnngcgatgagggccactnnnnnnnnnnnnnnnnnnnnnnnnnnnnnnnnnnnnnnnnnnnnnnnnnnnnnnnnnnnnnnnnnnnnnnnnnnnnnnnnnnnnnnnnnnnnnnnnnnnnnnnnnnnnnncccatgggccgctttcttcgagatgccaagctgtatgagataggggctgggaccagcgaggtgaggcggctggtcatcggcagagccttcaacgcagactttcactagtcctgagacccttcgcccccttttcctgtacctagtagcctttcnnnnnnnnnnnngatgtggcggctctcccaccctgcctgcagcaggccctcctgnnnnnnnnnnnnnnnnnnnnctctggcctctggatgaggttgagttctccacaacagctcccaagcatcatggccctcacagccgggccagtgccaggactagtgttccgtgacttaaaatggactcagcaggaagcatattgtctggggattgttgggacaggttttggtgactctgtgtccttgcgctctaacttctgagcccacnnnnnnnnnnnnnnntctgggggcatgcagatacccgcctctttctcttgggtgagcctctggcaggacgatctctctgctcaagcacagcagaatcatggccccnnnnnnnnnnnnnnnnnnnnnnnnnncaggttaagtatccctaatcctaaaat

SEQ ID NO: 9758 - DNA, 688 bp, Macaca Fascicularis
  misc_feature (1)...(688): n = A,T,C or G
cattgcaaatattttacccattcatctgccttcttttgctttggtgttgctgagtcaagtatccttcttgcagaggcattatgttnnnnnnnnnnnnnnnattttcttctctctttttttttttaaggattatacttactcagctgttaagagtaggcaatttcttcagttcttccacaagaaatcaaagcaacagcattttgatgtggagcaatacaacaagttaaaagaagaccttgctaaggtatactacaaatacatcttatagctggtttgtttgggagcctgaacttagtatcagggaaatacaattggtggctcatcctcacaaattaaatcttggtcctagatttctgtgtgttgtaggattgccaccacgcctgccaccatgcctggctactttttttgtatnnnnnnnnnnnnnnnagttttactacgttgtccagaccggtctcaaactcctaacctcaagtgatccgcccacctcagcctcccaaagtgttaggattacaggtgtgagccaccatgtctggccaagccttttaaaaaaatgtattttatttcatataatcattctataggaaaaatataatgcttttaaaaaatttttgcggattcccttatatttnnnnnnnnnngagaaggctaaggaatgttctttcagctagtttataggacagtgnnnttg

SEQ ID NO: 9759 - DNA, 682 bp, Macaca Fascicularis
cagtgattgtatgtattaggagtcacagcttgccgtgtggcagatctggattcttatacactaagatgtgtcttaagaatcgtagtgcgtggttcattcctttatcaaagaacagaaagttatgactactctacagggtagataatgttttggtacttgtgtttgccacagccctgttcctcaaagctgaagtgatagatttctctttgacttccaagacctagcaattataaggcaccttgaagtaaattgtttatgcctggaaatgcagggagggcgatagctttgtaaattggtttacatttttctccttgaatttgtctagggtcgcagcgcttccgaatcatttaatgacattgtcggatatcttttacatttcaattgcaatccatgaaattacatttagaagattcttagtactaaactgtagtcttctccatgaattacccattagaatagactggcagcaacggaatatgcagaaagtaagcctttagcttatagtttcatccctaccccttatgcctgcctgagtctgtacagggatgtgtgtgtgtgcgtgtgtgtgtgtgtgtgtgtgtgtgttagagaggaagagaaagagcagaatgtctgtatactacatgctgctaaggtagtaaataaatcagtaatgcaatattgtgggtccaaaactactctt

SEQ ID NO: 9760 - DNA, 698 bp, Macaca Fascicularis
  misc_feature (1)...(698): n = A,T,C or G
taaatgtgtgtatagnnnnnntnatcagtataacattgatttataattaaatgtgggtgaggaagaatgtgtggagtannnnagaaattttgatcttaaaacccttttcagaaacttaaagctattagaaattaagttatattaatagccttctaaacagcattaagtttccaatcttaatatatctatataaaatatagtgtcagaaagtaacatcatcaatacagtgggtctgtaatggaaatctgtgtcaatgaacatgaacggagttcctcaactacaagttgaaggataattaaacttttcattaggagtgttcagctacatggattcatggaatggtggttcatagtaagtgatggtaatctttttattcatgggtgtaaaccatttataacttagtgctcaaaagattaatcttttgattatataatgtcccatgaattatagtttaccaatagttctaaaacatgctaacctaaccttttccttctaatttaacttcattcgagatagtacctctcactcacagatatttatttggttatcaagtgaaggtaggtgtgtctaaaagtgatcttttgaatcctgtctccctagaggtaatagtatctagagtttaccgagaacattttatgattgtaataaaaggaagtagtgacttatggaggttttgtttcttgaattttacttttgct

SEQ ID NO: 9761 - DNA, 732 bp, Macaca Fascicularis
  misc_feature (1)...(732): n = A,T,C or G
ctcagtgcgtgatagccagccggaagatggatgtttgaaagctaccgcagaacaaatttcttctcaaactggaaataaggttcatgcaattcagtgtgatgtgagggatcctgatatggttcaaaacactgtgtcagaactgatcaaagttgcaggacatcctaatattgtgataaacaatgcagcagggaattttatttnnnnnnnnnnnnnnnnnnnncctaatgcttggaaaaccataactgacatagttctaaatggcacagcctttgtgacactagaaattggaaaacaactaattaaagcacagaaaggagcagcatttcttgctattaccactatctatgctgagactggttcaggttttgtagtaccaagtgcttctgccaaagcaggtgtggaagccatgagcaagtctcttgcagctgaatggggtaaatatggaatgcgattcaatgtgattcaaccagggcctataaaaaccaaagagtgtgtttggggcagagaagtctgttctggaaccaatcctgacaatgctaaatgttgttaaatttgatggtggagaggaagtacttatttcaggagaattcaatgacctgagaaaggtcaccaaggagcagtgggacaccatagaaggactcatcaggaagacaaaaggttcctaagaccactttggccttcatcttggttacaaaaaagggaatagaaatgaaacaaatnnnntctcatctt

SEQ ID NO: 9762 - DNA, 697 bp, Macaca Fascicularis
aagaaaatctggggattgataaacgtgtgactagattcgtccttcctgttggagcaaccattaacatggatggtacagccctttacgaagcggtggccgccatctttatagcccaaatgaatggtgttgtcctggatggaggacagattgtgactgtaagcctcacagccaccctggcaagcgtcggcgcggccagtatccccagtgccggactggtcaccatgctcctcattctgacggccgtgggcttgccaacagaggacatcagcctgctggtggctgtggactggctgctggacaggatgagaacttcagtcaatgttgtgggtgactcttttggggctgggatagtctatcacctctccaagtctgagctggataccattgactcccagcatcgagtgcatgaagatattgaaatgaccaagactcaatccatttatgatgacatgaagaaccatagggaaagcaactctaatcaatgtgtctatgctgcacacaactctgtcatagtagatgagtgcaaggtacatttcccattcatggatatcgagacctgtatatagtagtgcatgctcgatttcttaagaaaaaaaaaacaaaccataaagccctgcatgtattattgtcacatttattttcctaaagaatcatgtaacccaagcttctgtgagtcccagatcatctaattctgtgt

SEQ ID NO: 9763 - DNA, 677 bp, Macaca Fascicularis
  misc_feature (1)...(677): n = A,T,C or G
cccccacctccatanntcagcctttgcctaccctaggaatgagcttggcctccaacatcccttgcctgctgccattagaagagggggccnnnntctgcannngagccccccatccctgtgccacctgggtgtggagcccatggaacactctggtccgcctcattttaaaccaaaaaactgctccttcaccctcaccctgaggccccaggggagaggacccatgggttggtgcccaggggttgccttgggacctcggatctcctctggggggcttggctgctgctgttgctgctctgtacttgcctctcgtgattctgtttgttacccatgttcacttcccccaggagaccccctctcccctggggcatccctctgccttggaatccctgtagcccagcagccctgcccctccccagcatcccagctgggccagaaagagccaactgtgccaacaaggactgggccctgcccggctgcccgcctcagggatgggcacctcatgcctgtctcgccacctcctgtgccaatgtcctacactccacctgggggtggggtgcagcttccacttactgattagaagacaccactgcccaccctttccccctccctgtctggtgtcctgtgcccccatctgtctgtctatatttgtctgtactcccctaggagaagtatttgcc

SEQ ID NO: 9764 - DNA, 986 bp, Macaca Fascicularis
  misc_feature (1)...(986): n = A,T,C or G
cagcattgtgagagtgatacccttaagtgtttgggtttatgtttttagttttgtttgggaaacagcagttgcacagagttacggtgtagtgctgctgccgttnnnnnnnnnnnnnnncaccaccagctctatcagggatgctcctgagcttggcggacatacttagatcctaacgtgccagtgagacctggctgtggagagtagcactgnnnnnnnnnnnnnnnnnnnnnnnnnnnnnnnnnnnnnnnnnnnnnngaagagagtggagcagacagtgaggagcgagcctgggggtcggctggggacagccgtatgtgctagctgggagtggagggggatatgtttaccaaatgcctgccctgccatcctcccaggtagtcagagtgagctacatcctgccccgccttcatttccatggaaacatggcagctagggcacggggtacagcagcagccaaattcttccccacctcccctgctttgaaaaaaagtttggaaccctggtccctatactctgcagtcagaagtgggactgagccatacatgcccttgaattcctccctgtctggccctccctctccagcaagtggggttttctttaacttggcagtgtgcagaggagaagtggtaacacccccaccccattcccctgcatcggagctcagtattcctgcagggtaagaggtaggaatcttgctgggacgagcagagccagaagtggcaataaaaaacgtgttgacctgggctacgctggactccatgaattttccattctggcaactggaaggggaggagtagaagggccctgcagaggacggcaccggagactcctaaacgccacacacctcccccttgctgccccccacacgcgcgtctccttcaaccgatgcattgccaccctcccacagcctcgccctcagctctaaattaggtcgaaagagtcccagttccgatctaggaacagcataattttgttccaaaacctga

SEQ ID NO: 9765 - DNA, 731 bp, Macaca Fascicularis
  misc_feature (1)...(731): n = A,T,C or G
cccagagtgtgagctgnnnnnntccccnnnaaaagctgactcactgtgagtgaccttgggcaagttcccaaacctccttgtgcctcagtttccccatnnngaaaaaatggggccacctcttgccagcagtagcagggctgcccacgcccctttctccccatgccccatccagcacttgggcgcctcatgcctctgcctcagtgggcctgtgggagcccactggagcccagcacnnnnnnnnnnnnnnnnnnnnnnnnnnnnnnnnnnnnnnnnnnnnnnnnnnnnnnnnnnnnnnnnntgctgcggggctggcggatgccctcttttctatatttatttcataaaagtctcctgcgggagcggaaatgcagtccggcctagggctcccagccctgactgtcctcctgtgagggcctgaagctgggccagggcccgttgcggcggagcccccgctcagcagcccacccggcccctnnnnnnnnnnncccgtgcgtggtctttctcctccnnnnnnnnnnnnnnnnnnnnnnnnnnncaaagccctgtcagacagactgggcccttccaaggtcaagccatgtgtctgattacannnnnnnnnnnnnnnnnnnnnnnnnnnnnnnnnnnnnntcactgggtgtcacacactgagagaagtcctattgtaaagaaacggaaaaagtcacaaaaaagtttgtataaagacatatttttgtactacatggggactc

SEQ ID NO: 9766 - DNA, 724 bp, Macaca Fascicularis
  misc_feature (1)...(724): n = A,T,C or G
gagatagagcgcacagagnnnnanngaagaaaggggcnnnaagccccaccaaattccagcatcaacccctcagaatccagcagcttcccaacatccncntccaccacatggtcatcgttcccaggcacctagtcatcgtcccctgcctcctggacaccgcgttcagcaccagccccagaagaggcctcttgctctgtcgggcacannnnnnnnnnnnnnnnnnnnnccgcccctccccagacctcgagttcagccaaaacctccccaaggggcagcagaaaactcattgtccccttcctctaattaaaaaagatagaaactatcttttccaattaaaaagcnnnnnnnnnnnnnnnnnncctgatgtgcacacccatacttccatcaggtgttttctacatgcagaacattgtcacctcctgagnnnnnnnnnnnnnnncacctctgcatcttcgaactcagccatgtggtcaacacctggagtctttggtctcctcagagagctccatcacaccagtaaggagaagcaatataagtgtgattgtaagaattgtagagcaccgagcacannnnnnnnnnagatctcttttcccctctcagatcatgtgtagatgtgataaatcaagtgattggtgtgcctgggtctctctacaagcagcctatctgcttaagagactctggagtttcttatgtgcgcnnntggacacttgctcaccatcctgtg

SEQ ID NO: 9767 - DNA, 741 bp, Macaca Fascicularis
  misc_feature (1)...(741): n = A,T,C or G
agcngggaaattnagactccatgtgttgagatcaagaaagacgannngccagnnngcagcaagcactttggagagtgaatctgtgcagagagtaacgcggagtgtcaagaggtgtgcagaaaatccaaagaaggctgaggacattgtgtacgtcaagaaaataagaaccagaagtcaccgggacagtgaagatatttaacaaaaaaaaatcgaactgggaaaaatataataaagttagttttgtgataagttctagtacagtttttgtcataaattacaagtgaattctgtaagtaagactgtcaatctgcttaagggaagaaaactttagatttgctgggtctgaatcggcctcataaactccactgggagcactgctgggctcctggactgagaacagttgaacactgggggctttgggaaggagtttggaccatgctttgctctcagctttgcggaatgaagcnnnnnnnnnnnnnnnnnnnnnnnnnnnnnnnnnnnnnnnnnnaactgtgaccctnnnnnnnnnnncattgtttnnnnnnnnnnnnnnnnnnnnnnnnnnnnnnnnnnnnnnnnnnnnnnnnnnnnnnnnnccagcactgagcaggcacttggtaaacatgaatgagagggtgagtgcaccgatgaatggagcttttaagatctgtctccaatggctaggcccagggcatttgctccccacattaaggcaattggacatctgcacaggacagtcct

SEQ ID NO: 9768 - DNA, 439 bp, Macaca Fascicularis
  misc_feature (1)...(439): n = A,T,C or G
gcatcacagccacgggtgcacctccaggnnnnnnnnnnnnnnnnagtgactgtggcctgtgcttgtttgtactctcagacttgtttaatgttaggcatttgtttgtagcattaggccaatatgtattaagctgagccagacgagtaagtccataagncgtatttttggcgtttaaaaaatgagtccaactgctcaactgtttggttgaaaaccttgctcattttttaatgcaaaggctaagtgtcgccccctttctctgcttccgggctgggccttgctaagggccaaggaaagaaaaacattttttagggggcagccagtccaaatgccaaaagaagaccaattcttgccccccttgtatgaaatttgacattttggtacttttttttttttttttttttggncgaancnnnatttntgtgtgtttcnannnaccata

SEQ ID NO: 9769 - DNA, 1282 bp, Macaca Fascicularis
  misc_feature (1)...(1282): n = A,T,C or G
gaaagagaaaatggagacattgaggatgtaatacctatgttcncccagctttccaggtccatcatctctaaattactaaatgaatcaggaacaaaggtccagaaaactgagnnnnnnnnnnnnnnnnnnnnnnnnnnnnnnnnnngtgaggcttctaaaggctactatctcactaaagctttgactggacatnnnnnnnnnnnnnnnnnnnnnnnnnnngtagagaatatgaaatgccttcaattttccaagaatgatattattagtgacacaaaagactattttatgtcaaagactcttggcattgggagactgaaaaggccctccttcttggatgatccactgtatggtatcactgtgagcctttcatcagaagaccaacatctgaaactcaattctccagagaaaacaaaagcagatgagcaggagactaaagatgcagcagaagaatgtaaagaaccctnnnnnnnnnnnnnnnnngtgtgcttttaagaaagttggtaattaagttaaattacatttttgattgaattatttgaattcaatgaatgcattgtagagactattctttactgattttgacatttggagtcactctttgtggattatagttccttgacactttcgagacttggagtgtaattgttcaagggtttttgctcattaaaatttccgggaccattgtttataaatttgtcgcaatcttacaatgtgaggattcattataaaaactgacattttaatgtatacttgtcagggtaaaacttgttgaagtgctgtgattgtcctgtattcaattttgtatgtttcgcctctactgggattcagacagatcatggtggtcactgggaatttttgctgtggccatgcttttccttcttcccacctgtgtcatgcctgtgaaattggtacaacctgctataagatgaaatgaattgccgcaacaaagcaatgtcagaagagcctttactatnnnnnnnnnnnnnnnnnnnnnnnnnnnnaggagtttgactgaattatttgatatattactttgttaataatagtcaacagtagtttcttattttctttcagagtttgggccttttagattgcatcaaataaaaatgagctacttaaaagaaagtctgcagtactattttaagaaagatagtttagttacaagtcagtaacttagactcacgagaaagtgttatgttgacattccgtaagatgagttggcattagaattggaagtccagttgtgtttctgaatgaaaaaaatgagcaggctnnnnnnncc

SEQ ID NO: 9770 - DNA, 760 bp, Macaca Fascicularis
  misc_feature (1)...(760): n = A,T,C or G
ccgtgggtttttgctttttttcnnnnnnngatgactttgaacattcccaaatattggagcctctgtggcctcagatgnnnnnnngtggagggagacccagcatagccaggccagtatggagcacctcacgcacagccctnnnnnnnnnnnnnnnnnnnnnnnnnnnnnnnnnnnnnnnnnnnnnnnnnnnnnnnnnnnnnnnnnnnnnnnnnnnnnnnnnnnnnnnnaaatccnnnnnnnnnnnnnnnnnnnnnttgcacatcatctctgtgcgtgcagtgatgtggagccctggggctgtgcannnnnnnnttgctgtctggctcagcagatccggaaaggggaggatattgttgaagagcaacaaccactcaccctcatcatgtagtagtgagaagtccagactgctcacaggaggaaaagtggggtacagaccttgttccatactacacttgtaactctcaaagagtgtggcaagacgggcacaannnnnnnnnnnnnnnnnnnnnnnctttgtgccctttgtggagatgttcttgtcagccagagccaggaagagctgactctgtggggctgtgctcagcatctcaaacttgatggtggccacagagagaacaccaaagatctctgtccnnnnnnnnnnnnnnnnnnnnnccccaccatgcttcagtgctgaggccttgcacacctgggcatgccggaacttgtagtactcaggggcagtnnnnnnnnnnnnaggtgcaccagctactttcacagg

SEQ ID NO: 9771 - DNA, 724 bp, Macaca Fascicularis
  misc_feature (1)...(724): n = A,T,C or G
atnnnntcctaannnnttagnnngctctccagaaccctacttacagttgaccaaactgcttaaagtagaagaatcaggactggcaggagatatgagggccagtgtagagattaaacagaataatgagtacacaagtttttgtctatccctttccttaaaatataagaagtacagaagctcttgggaaaaatagactacataaaaaataaagtgaacagtgagttgttagcaagcctttttagaaaagaaagcatttacttgcctgtctgtaaggtggaaatttcatcagtttgtaaacgataagaaatgtagacctgctcttgatagaaatgcttagaaacactttagggggggaaaaaagctccttccatatactgtgacccatttgttaagtgacatctatagtttatcagcttttaaggataaaaaaggacatcttaaaagttggatatttaggatatttaaggatattcctgtatgagctctccatatctttcttgagaaactggttaaaaaaggaataggggttgagtgttacaaagagactagtctgaagattcctgtataaaagcaaagctaacaagcaatgaagatgtgaagcaaaatactaatctaattgtgtaaagaaaggatattttaataagttctttctgcttgctgctaagagtttgctaaactgtcatgaattattctggttattactaaagtttctatgaaacactta

SEQ ID NO: 9772 - DNA, 750 bp, Macaca Fascicularis
  misc_feature (1)...(750): n = A,T,C or G
agagccagagctggaacccgagnnngaagcagaaccagnnnnnnnnnnnnnnnnngaaccggacccagagcccgagcccgacttcgaggaaggggacgagtcggaagattcctgaaggccagaactctgactggccgtgctccgcccatcctggataggacctgggatgctnnnnnnnnnnnnnnnnnnnnnnnnnnnnnnnnnnnnnnnnnnnnnnnnnnnnnnnnnnnnnnnnnnnngagggtccaccgggacctgggctctctccacgattctggctatttgcccagaaacagagggtgggtacctctgagtcccagggacctgggcagccccaagcctaccacaagcatcatccagtcctcagccctaatctcgcccttaggagtccaggctgcaccctggagatcccagactaatccccttagtgggacaaggacctgaccctcatgcctcacatacacaacccatttcccctcatgagccacttggcagcctgtgtaggtaccagctcaaccccatgcaagtccctgggctgaacatggagcaaggggagggtgaattctctccacgtagggagggcttagagctcacagccttgggaagtgagattagaagaggggaacagaaagggaccttgggtagacagaggccacacacatcattgtcattactgttttaattgtctggcttccctctgaactgggagctcagtgaggactctgaccagtaacttacacaaaaggcgct

SEQ ID NO: 9773 - DNA, 455 bp, Macaca Fascicularis
cttcaccagagtggatgaggatgaggagatcatcgtgaaggccatgagtgattactgggttgttggaaagaagtctgatcggcgggagctctatgttattttgaatcaaaaaaatgcaaacctgattgaagtaaacgaagaggtcaagaaactctgtgcaacgcagttcaacaacatcttcttcttggattgactgacggctcaccgaaagcatatttaaaagacactcggcaaacatttgggcatatgcaagttactggtcatatgacggactgcattcaggacaagggaaaagcaatacttgctttgaagaatcacatttctactcagtctcctgatctcctgaggtttttagattttaaatatttatgtggaattaattaaaggtagttgagtatatctctatcattccattcttttgacattatgtgaatattttactggaaaataagata

SEQ ID NO: 9774 - DNA, 592 bp, Macaca Fascicularis
  misc_feature (1)...(592): n = A,T,C or G
tgtgcggcaaggtgtttaatgctcactataacctcannnnnnnnnnnnnngtccacaccggagccagaccgttcgtgtgcaaagtctgnnnnnnnnnnnnnnnnnnnnnnnnnacgctctgcaggcacaaaattatccacacccaggaaaagccgcataaatgcaaccagtgcggcaaagccttcaaccgcagctccacgctcaacacgcatatccgcatccannnnnnnnnnnnnnnnnnnnnnnnnnnnnnnnnnnnnnnnnnnnnnnnnnnnnnagggaactacaagaaccacaagatgacccacagcggcgagaagnnnnnnnnnnntaccatnnnnnnnnnnnnnntccaccaggtctacaacctaaccttccatatgcacacccacaacgacaagaagcctttcacgtgcgccacnnnnnnnnnnnnnnnnnncagaaactttgacttaaagaaacatgtgcgcaaactccacgacagcgtgggccctgctgccccctccgcaaaggacctgaataggacagtgcagagctgagagctactgccttgccctcccttccctccctgtaccacctgaaaacagatcac

SEQ ID NO: 9775 - DNA, 698 bp, Macaca Fascicularis
  misc_feature (1)...(698): n = A,T,C or G
agagtgacagctaataattccaggaatctgacctgaaggcagatggagggggctgtctgactgtggtcaccgccacagtccaggatgaagaggagtacagggtcctgtgagctgtttgaccactgttctaaggctatgtgtgcccaaaagcacatgagcgtctatgttgggagtaagtttgtatcctgtgttgatctcagaaagaatgtgaatgcttaagattttgaaagtatataatattttatacttttggagagagctttaagagtccctggaaatactttttaatttttttaacttaaaattcaagagactgaatcacttttctcgttgattaaatgtaaacatgattgagaaacctatagtaaatgaaatttgtgagatgttttctcaaatatatgctgcgcctgtacttatatacagtctttcaagatacaaacaggacagaaacatttaaactagtattaaagatagcttaccaaagcatttttgttttcttaccttgaaaacacagaactgttaattccttggtttannnnnnnnnnnnnnnnnnnnnnnnnnnnnnnnnnggctataggaggttttaagatttatgtttagttcggtaggtgaggtctttgatattttgaattttaactccttttatgatacatcacagtaacctcatttttgaagtatttgtactttaatgttctttc

SEQ ID NO: 9776 - DNA, 761 bp, Macaca Fascicularis
  misc_feature (1)...(761): n = A,T,C or G
tgatgatgaggaaanncagacgaggaagaaaagccagacgtggaggggaagacagaatgcgagggaaagagagaggatgagggagagccaggtgatgagggacaactggaagatgaggggagccaggaaaagcagggcaagtccgaaggtgagggcaagccacaaggcgagggcaagccagcctcgcaggcaaagccggagagccagctgcgggccgccgaaaagcnnnnnnnnnnnnnnnnnntgccccggaaagcaaaaagaaaaacggacagggggacagacgattcccccaaggactctcaggaggacttacaggaaaggcatctgagcagtgaggagatgatgagagaatgtggagatgtgtcaagggctcaggaggagctaaggaaaaaacagaaaatgggcagttttcattggatgcaaagagatgtacaggatccatttgccccaaggggacaacggggtgtcaggggagtaaggggtggaggtaggggccagaggggcttacacgatatcccatacctttaatgcctttggccttccattctgacttctctgatgagaatattgctggccctgctttccctggtaggtatttgccaggcccaatgctttaaccttaagctgatactttgctttagatgtcaatctcgttaccagcagccttttgacccaactacagtgctctatattttagtagaggattttcacccatgtgcatggaaaagatgttcatggtacatgtaaaaaataaaaaa

SEQ ID NO: 9777 - DNA, 480 bp, Macaca Fascicularis
ctctccacccctcctccatccaccccgaggaccctggggctcagtggaggcaggcccctgctcccctcccctctgatcctgcccagcccgggggaaggagaaaggaggggaggaagcgggttctcaccctctcgggagtgggcacgggagccctcctccccgaccctgggctgcttcctgggggctctccagacccctctctaggaccaagtcactcgttgtgctgggagtgtggattccagcaaaagagctggaaaaaagtgagactctccacagaccccctatgggggaccccaactcaaggccaaggactgggcgtatcggatgctcataacacccctggcctggcccctttactgagaagactccttggatatttcccaagaatcccccacatacacccctcacaagccacccctcctgagaggcagggggccctctgccccctccccatgtattccccacctgtgttccgtttga

SEQ ID NO: 9778 - DNA, 761 bp, Macaca Fascicularis
  misc_feature (1)...(761): n = A,T,C or G
cagggnntacccaggggcctctnnnnngggggcctaccccgggcaggcacccccaggggtttatcctggacaggcacctccaggcgccnnnnnnnnnnnnnnnnnnnnnnnnnncggagcatctggagtctacccagggccacccagtggcgctggagcctacccatctnnnnnnnnnnnnngtgctcctggagcctaccctgccactggcccctatggcgcccnnnnnnnnnnnnnnnnnnnnnnnnnnnnnnnnnnnnnnnnnnnaggagtggtgcctcgnnnnnnnnnnnnnnnnntgggcacggtgaagcctaatgcaaacagaattgctttagatttcaagagaaggaatgatgttgccttccactttaacccacgcttcaatgannnnnnnnnnnnnnnnnnngtttgcaatacnnnnnnnnataataactggggaagggaagaaagacagtcagttttcccatttgaaagtgggaaaccattcaaaatacaagtactggttgaatctgaccannnnnnnnnnnnnnnnnnnnnnnnnnnnnnnnnncagtacnnnnnnnnnnnnnnnnnnnnnnnnnnnnnnnnnnnnnnnnnnnnnnnnnnngacatagacctcaccaacgcttcatacaccatgatataatctgaaaggggcagactaaaaaaaaagtctaaaccttacatgtgtaaaggctttatgttcactgtgagtgaaaatttttacattcatcaatatccttcttgtaagtctaata

SEQ ID NO: 9779 - DNA, 603 bp, Macaca Fascicularis
  misc_feature (1)...(603): n = A,T,C or G
cttctttttagatcctttaagaacaggaaagataaaaattcaagatattttagcatgcagcttcctagnnnnnnnnnnnnnnnnaagggatgaggaactgtccaaggagagtcaagaannnnnnnnnnnnnnnnnnnnnnnnnnnnnnnnagtttatggactataagacctacttggactttgtccttgcattagaaaacagaaaggaacccgcagctctacagtatattttcaaactgcttgatattgagaacaaaggatatctgaatgtcttttcacttaattatttctttagggccatacaggaactaatgaaaatccacggacaagatcctgtttcatttcaagatgtcaaggatgaaatctttgacatggtaaaaccaaaggatcctttgaaaatctctcttcaggatttaatcaacagtaatcaaggagacacagtaaccaccattctaatcgatnnnnnnnnnnnnnnnnnnnnnnnnnnnnnnnnnnnnnnnnnnnnnaatgacagtgaaaactctacagacctcgatgatacatgatctctgaaagactagactgtcttatattaagagatacttgaatgctgcatgtaaagcc

SEQ ID NO: 9780 - DNA, 728 bp, Macaca Fascicularis
  misc_feature (1)...(728): n = A,T,C or G
tgcccgggctggcatgcacanngcagtgcgcatacagctcccgnnacaccgaaccgtctgtggaccagggccccggggcaggcatccccaatgccctggttctcatcagcatccgtgagccttatcatcctcatcgccctcaacgtcctgcttttctaccgcctctggtccnnnnnnaggacagcccacacctttgagtcctggcacagcctggccctggcnnnnnnnnnnnncccccagacggccacagagtgggccgagatcctggcgctacagaagcaattccacagnntggaggtgcacaagtggaggcagatcctgcgggcctccgtggagctcctggatgagatgaagttctcnnnnnnnnnnnnnnnnnaaggcatcacagnntcagatcctcccttagacacccagccccggcccgaagacagcttttcctgaggtccccagccacgcagctgttcccccacatggacagatggacacacagagcctcggcggccactgctggcacggtgtgagcgccaggcatctcccacccgcccctccggacggcccgacctggggctgtgcagacgtgggggccacggaaccgagatgcactttagaccagggagctggcccggccnnnnnnnggccccccactaacttattttgcccggctgaggttgtggggggcgcctcctggggtgcacggttccctcagctctgggtttaatgtattatat

SEQ ID NO: 9781 - DNA, 724 bp, Macaca Fascicularis
  misc_feature (1)...(724): n = A,T,C or G
cccaacagtnnnccaacagttagacattgaggggcttcactgttagcgggcacgtaacagaaagaagactaatacacgcccctgccctgtcccgtccccctcccccgagccattttcttgctgtgctctctggtgcccttgagttggtctccctggctgctctgcggggtcttcactggctttggggtgaatgcgaagtgctggtgagcagtggnnnnnnnnnnnnnnnnnnnnnnnnnnnnnnnnnnnnnnnagtcacctgccagccctctggagacagagcctcaggccgggatggggaggccccactactcccacctgcatggtgggcacggcctggcttataccaaaggcattgacggtttctccaagtagggatctgcaaagcttgaattgtcctcaannnnnnnnnnnnnnnnnnnnnnnnnnngatgtgaatcttacattccttttcatcatttcctatgtaaaaatgaagagtgctgggtttttgttttaagaagcattatgaaggccagacgtactcatttttctcctgcaagtgagctgggagaggcccctgttaggcccgtttcctgagcagtgctgtgctgctcttcttgatggggcttcgggctaggggggaaagcgggtcagaggtggggggggcctgtggctgccatgcgggagcccctgcgccatctctgactctttaagggagtcaggaatagatgtgtgaacagtc

SEQ ID NO: 9782 - DNA, 769 bp, Macaca Fascicularis
  misc_feature (1)...(769): n = A,T,C or G
tcagacacgctcacagaanctgaannnnnnnnnnnnagccagcaccacgtggagcagnnnnnnnnnnnnnnnnnnnnnnnnnnnnnnnnnnnnnnnnagnnncctgggcggcctgaggaggnnnnnnnnnnnnnnnnnnnnnnntatggcatctccggagagctggctatgcgccctgttgccagcttgtctgggggccagaagagccgagtggcctttgctcannnnnnnnnnnnnnnnnnnnnnnnnnnnnnnnnnnnnnnnnnnnnnnnnnnnnnnnnnnnnnnnnnnnnnnnngctctgggccgtgccctcaacaatttcaggggtggcgtgatnnnnnnnnnnnnnnnnnnnngctttatcaggctggtgtgccgggagttatgggtgtgcgaaggaggcggcgtcacccgcgtggaaggaggattnnnnnnnnnnnnnnnnnnnnnncaggaacagttccgccgcgaaggcttcctttagggnnnnnnnnnnnnnnnctcgcccaggacatggactggtctctcagacccctgggccaccacataggccaccaactccaggccgtggacttcccccaacttggggacagccttattcccaaatgtctctctccttttnnnnnnnnnnnnnnntgnnnnnnnnnnngagcccatccaagggttggtgaggactggtttcccgggggccggcggtctgggggtaccctctggggttataggtttccccactgccccagctctgactggacccccaagtggctgct

SEQ ID NO: 9783 - DNA, 695 bp, Macaca Fascicularis
  misc_feature (1)...(695): n = A,T,C or G
agtaattggcagcaacactgtagtagaggccagagggcggcgagttcggggtcgactctannnctggggcatcgtggaagtggaaaacccagggcactgcgactttgtgaagctgaggacaatgctggtacgtacccacatgcaggacctgaaggatgtgacgcgggagacacattatgagaactaccgggcacagtgcatccagagcatgacccgcctggtggtaaaggaacgcaatcgcaagtatgaccagaagccaggacaaagctggcagggggagatcccaagcctagccttgggtgagaccaagccctacttttgttcttctataggccctgggcttaatctaagtgggtgctggagtcctcctagccttatcaacccttttctccccttagcaaactgactcgagagagtggtaccgacttccccatccctgctgtcccaccagggacagatccagaaactgagaagcttatccgannnnnnnnnnnnnnnnnnnnnnnnnnnnaggagatgctacacaaaatacaaaaacagatgaaggagacctattaactggctttcagccctggatnnnnnnnnnnnnnnnnntnnnnnnnnnnnnnnnnnncccctccnnnnnnnnnnnnnnnnnnnnnnnnnnnngctactgccacttcgccttacatccctgctgactgcccagagactca

SEQ ID NO: 9784 - DNA, 786 bp, Macaca Fascicularis
  misc_feature (1)...(786): n = A,T,C or G
caacaaagagggnnnnnnannttggatgccactttagacnnnnnatcgtaagaagtgnctggaatacccgttctatataatatcaacagaactttgtggtccagcaggaaatccgaattgcccatgtgctcttgggcctcaggaagaggttgaacaaaaataaattattttaattcaacgggtgctttacataatgaaaaaaccacttgtggcagacgatgggcatctaacatcatcttctaatgtgttggagattttcatttcaaatatattttttaaattactctattttccaaatcacgtaatacatttttctcgaaaataccttactgtaaaaataactgtcgcatacacatgtgtgaagtagctagaacatactgaatttttttgtactgttggactctattcagtgtcatgtcctatgtctgttgaagttatcaaggagataattctagaatgaaaaagaaaatcctcctgttggaaacaaaagactttttacatgtgcactatgacaaagaggagtttcagagacgtctttgaatcctcgtcagcctggagaccagcaccagaggaatctacaaggcaaactcccatatnnnnnnnnnnnnnnnnnnnnnnnnnnnacagactcaaagctctttttctttgttttgttgtttttctaaacatttactgttctttgttgatgctgtataagccagggagttctaagatgccagctctttgagatttgctcattcccctgtatttccacctgtattttccacatatattatatatatctgc

SEQ ID NO: 9785 - DNA, 769 bp, Macaca Fascicularis
  misc_feature (1)...(769): n = A,T,C or G
aacgctcaatgagancntttgagagaagaggttgcagtgacctgcacagtgttccaaacacagcccgcgacctcacagccccaaccagaaggtgccaatgaagcagtccccacccccgtggtggatgcagatgcacctgcgtcctatccnnnnnnnnnnnnnnnaccccttccaactggctcacccatatacgcccatgtgttggcggcagctcccccagnnnnnnnnnnnnnnncgtcacactatgacctgcgccacctcttcatgggtgtggtctcattgaggtccccctcaggagaagcgttgcacccccggaaaacacgctcagtggtgcagcctagtgttggtgctgctgctgggccagtggttcctccatgtccggggagggtcagacacttcaaggtctaggctagacatggcagagatgaggaggtttggcagagaaaacatagccaccattttgtccaagcctgggcatgggtggggggccttgtctgctgaccacgcaagtgtcacatgtgatctacattaatatcaagtcttgaatccctacttcctgtcattcctcacaggacagaagcagagggaatggtggttatgtttgatagaaggcattaggttgacaacttgtcatgattttgatggtaagccaccaggattgtgttctctgcctctggctgaccttacgaaaaccattgcaactgtgactttgaaaggtgctcttgctaagcttatatgtgcctgttaataaaagtgcctgaaatacctc

SEQ ID NO: 9786 - DNA, 755 bp, Macaca Fascicularis
  misc_feature (1)...(755): n = A,T,C or G
agcatgagnnnnnatcaggtgcggataaaagatgtaaatctggagattacggccaagcccgtcccattaaactcaggagtcagattccaggtttatgtagaagtttctaaaatgaaaatcaatgttactgaaattcctgacacactgcctgaagatcagatgagagacaaactagagctgagcttttgtaagtcccgaaatggaggtggagaggtggaccacgtggactatgacagacagtccgggagtgcagtcatcacgttcgtggagactggagttgccgacaagattttgaaaaagaaagaatatcctctttatataaatcaaacctgccatagagttactgtttctccatacacagaaatacacttgagaaagtatcagatnnnnnnnnnnnnnnnnnnnnnnncagtgcttctgacaggaatggaaggcattcaaatggatgaagaaattgtggaggatttaattaacattcactttcaacgggcaaagaatggaggtggagaagtagatgtggtcaagtgttctctagatcaacctcacatagcatactttgaagaatagacttaacagaatcatgaaaactatagctttttaacgcagattactgtaaatgtttgacaaaaataaatatgcttttccttaaaaaaatgaaaactttaatttttatcatccatttatttttagatacaaaacttatttccatgtgtctcaatcttcattgtttcaaatnngtgcttgctgcatgtttt

SEQ ID NO: 9787 - DNA, 720 bp, Macaca Fascicularis
gacacagcagcagttgtccaggtgggcataagcaggaaccagagccacagcagccccagcgtcagccccagcagaagccacagtccttctggaagccagacccgaagccacagtagcagtgccagctcagcggaaagtcaggatagcaagaagaagaagaaaaagaaggaaaagaaaaaacacaagaaacataaaaagcataagaagcataagaaacatgcaggcactgaagtggaattggaaaaaagccaaaaacacaaacacaagaaaaagaagtcaaagaagaacaaagataaagaaaaggagaaggagaaagatgaccaaaaagtgaaatctgtcactgtgtaaaaggacagatcttaaaaattgacttaattactaagtcatctgtattaaattttgttataatgtaaagagattcaagccttgtaaataatgacatggaaagaccctgtgctgcacttaaaatattgctgcttgattatttgatttttacatcagagctttataacacgaacttttgtacagaattgtgagttgtgaccatgtaacatgagaggttttgctagggcctattatttttaaccaccattaattagttggggtggagtttactgtaatgtgaaattttcacatttgaatttttttaattgcctggcaaaagctgatataagttctaaaatatcagcagaatgatttgctgaattcattacaaccccg

SEQ ID NO: 9788 - DNA, 582 bp, Macaca Fascicularis
gggccagcgccacaaggactggagcccggcccaggcccgccacgcagtgcacagccacgcagctgccgggggcctcacagaacttggccttcaccaggctcagccagtcttccactaccttgccgggcgggggcgccccgtcgtcaaacggccagtccacaactgtgatgccgtccttctccagcggcgttttgtcataggtcacttcacacacgcgcaccacggtggtggccccatacttcttcaggtcctcgatgaaggtgctgagcgtggcgttggtggggttgtgggtgatgaggaagcgcatgtgtttgtagctcacctccaccggggccgggcggttcatccgagccatggcgcctcccgacaggcccggcagggcagaaggggctgcacagaaggctggggacacgtcctgagaagtccccacgtaccccccaaaaatgaggagaacaagatccctgtgcttgtccaagaaaagcgagatttaaaaaccctcccccataccccgcacaaattttgttcaaatatttaggtgtgggggaggaagttgcttcagtattcggataatcaaaaaagaaa

SEQ ID NO: 9789 - DNA, 761 bp, Macaca Fascicularis
  misc_feature (1)...(761): n = A,T,C or G
gcccctagacctanctggggacaggctgnnncagcctgtctccagggctgctgcgtcccagcccccagcctgcctccagcttggcctctcgtccgttggctctgcagggcagcggtgaggcaggtttctgcnnnnnnnnnnttttggaagtcacctaccctgaggaggggcacctttttaacacagccgagctagtcccaacacgtttgcaaatcttcccctggtggcctacttccttaccccctaatattggtaagatcaagcaacggcttcaggacatgggttctttcctcctgtgatcattcaagtgctcatgcacgaagactggcttctcactgtttcaacctcaccagggctgtctcttggtccacaccctgctccccattagtgccgtatgacagccccatcaaatgaccttggccaagtcagggtttctctgtggtcaggttggttggctggttggtgggaagtagggtggaccaaaggaggccccatgagcagtcagcnnnnnnnnnnnnnnnnnngcgcctccatcctagtgggtgttgctgtttctcctggccctgggtgggctagggcctgattggggaagatgcctttgcagggaggagagggtaagtgggatctaccaattggttttggcaaaacagtttctaagatttttttgctttatgtgggaaacagatctaaatctcattttatgctgtattttatatcttagttgtgtttgaaaacatttttgatttttggaaacacatcaa

SEQ ID NO: 9790 - DNA, 706 bp, Macaca Fascicularis
tctgactgtgattctgcatctggtcaagggcaaatcaaagcaactaggaaaaaagagaagaaagaaagattgaaaccagcaggaaggaagatgtctttcagaaacaaaggtaacgtgcagaatatacacaaggaagataaacctttaagtctgagtatgcctgtaattacagaagaagagaatgaaagtttgagtggaacagagttcactgcctccaagaagaagagaaaacactgaacaaagagcctggtgtagtttttaattttgagttttctgacagaagaaaagaatgatattttgtgtattgaacaggaagactgccagtattaaaaataatccttctgggaaactgtaggttatttcttggaaattccaatacatagttctagaataaaagtacacaaaattagaataagaattctttaacattttctttaatgatatgcataaatggagataaaacttgtatttagtatgtaatataaaaaattctgttatttgcagattgttactatttcctgtaacgttttgtgatactatactgtccgaatccagtctggtaatactatcctattttatttaaaatatattttattgaaatattaatgtttattacatgcaaataactaatcattttgtatctacagtctgataatggattttttaattttgtatattctattttgtatattgttaaatgcaataa

SEQ ID NO: 9791 - DNA, 740 bp, Macaca Fascicularis
  misc_feature (1)...(740): n = A,T,C or G
actgcacgctcctatgtgactgtcctatatatttggggaccaggtggtccacctgcagcctgggggaggacgtcgctataatgaacacgctgcctgggcttcagggggccactctggtggccaacatggcatccaggacaccctccaagtgcacnnnnnnnnnnnnnnnnnagccgtgcagctccagcaagcactggtactcgcctctgctccgctccctgccctcagtctgnnnnnnnnnnnnnnnngactgtatcaggccaccctgcgcctccctnnnnnnnnnnnnnnnnngcgtctccaccagcagcaggccggcccctggcttnnnnnnnnnnnnnnnnnnnnnnngtaacttgtggactttgtcgtctgaccagttgtgcaggatccggcacaggacatatagctcagcgctggggagggggtccnnnnnnnnnnnnnnnnnnnnnnnnnnnnnnnnngctgcctgtggtccggcggnnnnnnnnnnnnnnnnnnnnnnnnnnacgtccgggaggtcaaacacagtcacctggagacgagggtactcgcgggccagctctcgggccagtgcacctgtgcagcctgcggggaagcaaatacacgctctgcggccaggtcgtcctggtgcctacggaacgctgacgactctccaagctcaacgggggcannntcatgtttgagtgcatgtcactggctccggtagtacgcgtcctnnnnnnnnncttccaccttct

SEQ ID NO: 9792 - DNA, 723 bp, Macaca Fascicularis
  misc_feature (1)...(723): n = A,T,C or G
agcaggcctcccagcccannnnngagaaggcacagcagaancncacgnnnnnnnnnnnnnnnnnnnnnnnnnnnnaaaggaaggatgaactggagcagaggatgtcggccctgcaagagagcaggcgggaactgatggtccagctagaagagttgatgaagttgctgaaggaggaagagcaaaagcaggcagctcaggccacagggtcaccacatacatcgcccacccatggaggcggccgnnnnnnnnnnnnnnnnnnnnnnnnnnnnnnnnnnnnnnnnnnncccacccactgtccgcaggactcactgagcggagttgggggagacgtgcaggaggcctttgcacaaggcacgaggaaggtgcagaggaagaagaagagacaccatgtcatcaatggtgaaggagctacattcaggttagcagaggagccggacacagaggaagctcaggcacagaggacgaggagcaagctggcgccgacatggcgaaggcaaggtcttcccccagaggcacattcctctccatctttccaccgcacacctggaccaggcttgcaggctgccagacgtcactccacccgccagggagaggggagccagagccggtgggaagcggggaggggctgcgtgacacagctggtgggcctccccctgcacagccctgcatgtactagcaccttcatcactcccctcagggcatggtctcatctccgcatcagga

SEQ ID NO: 9793 - DNA, 877 bp, Macaca Fascicularis
  misc_feature (1)...(877): n = A,T,C or G
gcttccaggttctacnntagctcatccccaccccagcccaactgctctgcctatagctgnnnnnngtgnnngagacaactnnnaacccnnnaaaacccactgaccagaggcaaaaggcaatggggctgagggtagttttccttggtcacagacaactagtggtggctttgagaaagggaggacctctgggctttaattccatctccttgtcttttttctttgtttttagagacagggtcctgctgtctcccaagctggagtgcaatggtgcgatcatggctcactgcagcctcaaactcctgggcttaagccatcctcctgagtgatcccatttcttaatcagcatagccccaagaaggctggggctatttaccnnngtagaaaaaggagcttacctcccacctttggtcctaagtccctgcccctcccctgcacaccataactaggtaacagtttgataactagggaagaaagcagaacagttaagcagccaccacatccccgctggctgggggcctcactccaggaaggggctggactggccgtccnnnnnnnnnnnnnnnnnnncactgtgtagatggggagatcgaggccagaggcagcaccctggtgaggaagctccagtcctgctgtctacccagcccattttgcctccatggtgcctctggaggcctctgggcctcctctaacggggnntngtgggcaccaagagccaatggagtagacccctggctggtaagggccaagtcccaccggttgcttctgggaagnnnnnnnnnnnnnnnnnnnnnntgtnnntgtggttccatggggtgccctccactgccctctgttcagtaacagggcctnctnnnnnnnnnnnnnnnnaacaaaagct

SEQ ID NO: 9794 - DNA, 1253 bp, Macaca Fascicularis
  misc_feature (1)...(1253): n = A,T,C or G
cccagcaccatgtagtgcattcagttttgtctttctaagggtatggtcgatatgcctgcaggagtttctgtagcaagacacagaatagtgttctgatcagttgccaaagaatctaggaaagtagttgtattttgtgcaagctaatttaaaaacatgatgggctgttttaagaccagagtgggagttcatgagaggacctatactaccgaaagagcccaaacgaccaaatccatggataattgcttcacagcctcggccatcctggctcagccctcaatttagtataatatgcagttcctgtgcctccagactatgcagctcatcaccctaggttctacaggaaannnnnnnnnnnnnnnnnnnnnnttcaaaagtgtgctgcctagaaacagacctgcattcaacaactgcaatgcagggttggaccatgaatgatatgctagaatagaaaaaagagacgtgttttttttcaattgagagcctctatgtgcaaggtgatttataatcatatccagtttaatcttcacaatatccaatgaagaaggtctcattatctccatgataaagatgggaaactaaggctcagaggggttaaatcaactgtctgttgtcacacgatgaataaatagatgcagtgagatacaaagctagatttgattcaaagcccttactttcttaattaaactatgatgtgcatttatttttctgcaccttcctttcttccacaaacacatattgatagatgcaagagactcttatttagaaggtgtgggggacaagaaggatacaaggtaagtttcagtggagctcagaggacagggagatataattgtggcacttaggggagatgacatttgctttgggcagagacagccggccaggacacatttcccgtataattttacgaagttaaatttataagctagcattaagtaaagtgaagtccagctcccttgctaaaaataactagaggtaataattggtattcaagtaactcatttacagtcataatgtgtcgtgaaaatttaatcttaaaaatggaattttaaactatgtgtgcgtgtgaatttctttaatgtctaatctagcttcataatttccatgatacaaagatcttttctcaggtggatttttccctttgttccttctgctctgatagacaaaatcattttaggactattaaagaatgttttggaataaatcatcctttcctcaatgaatgggatgtctaatgtattcaaaatcacccaaaa

SEQ ID NO: 9795 - DNA, 691 bp, Macaca Fascicularis
  misc_feature (1)...(691): n = A,T,C or G
caccaagtatttccaaatcnnnatnnncagctgtgaaggcaaaaattggaacatcactggaatggggtggagcatctgaaccaaagaaatttgatgactctgtgagacttagaccaagcaagagtgtaaaactccgaagtcctaaatcagaactacatcaagatcgttcttntccccnannntcctctcccagaaagaactctagagtcctnnnnnnnnnnnnnnnnnnnnnnnnnnnnnnnnnnnnnnnnnnnnnnnnnttctactagctgtcctgacaccatggaaaattcaacatcttcaaaacagacactnnnnnnnnnnnnnnnnnnnttcacacggagtaagagtttgaaaatnnnnnnnnnnnnnnnaaagagtatctgtaattcttgcccaccaaacaagcctacagaatctgttcagtcaaataactccagctcatttctgaattttggtttnnnnnnnnnnnnnnnnaaacccaaaggaccaaggaatccaccaccaacttggaatatctaataaaactccagatttgtaagcatatgggctgcaagtacacctgcaaataaaactactggaatactgctagctaaaatnnnnnnnnnnnnnnnnnnnnatcaaatatgaagatatgctaatgtgttaatagcttttaaaagaaaagcaaaatgtaagttttgcattttca

SEQ ID NO: 9796 - DNA, 720 bp, Macaca Fascicularis
  misc_feature (1)...(720): n = A,T,C or G
cgctcgacccggctgcgtccagggtctctagtccccccactagagactgagaaggtgcctcgcaaacgagcaggggccccagttggtgggggtcctgggctggcaaagcggggccgcctacagcccccaagtcccctggggcctgagggttcggtagaggagtctgaggctgaagcctcaggtgaggaggaggaaggggatgggaccccacgccgacgtcctggtccccgccggcttgttgggaccaccaaccaaggggaccagcgcatnntncgcagcagtgcccctccctnnnnnnnctggccnnnnnnnttagttacagaggccgcaaggccaagacgtgagttgggctgcccctccntntnaggcttttcancgttgtgccgctccctccatgaccaggcctgattttgttaaccactacttgaagtcttgagggggaaagcctccagggagacataggggccttctccattattcccaccaaagtagggggtaggcaactggttgtcaaggaaaaggggatcatcacagtccccctccccttcaccccaagtggatgggcagtgttaagggtggcaagatagtctctgtccccacccccttgtacttgattccccagctgtatttcacagccccccacccttaggggaaaggggaggggcttctctacaatgaggtttttttctttttttctttttttcaaatttttttttttta

SEQ ID NO: 9797 - DNA, 741 bp, Macaca Fascicularis
cgccaccagcaccagcggggtggagtggttcagtgttattagtgtctataattaaaattaagtgggctgaaaaagaatggagctccagataccagcactgtatatgaaatacaaaagctggggaagtggggcctgccttacaggtgtggctgactctgagcccaggcctgcaggggtgggggcggtccctcagaatcccagaggcagccccaacctcagaacccaggataggaaatgggtgtgtttagtggggaaagggacagggtgtgggtggcagggccagcatgcagccccctccctctcccctcctctcccgtggtgagcccagcatgggcaccgggccacctcagccgtgttcccggggctgggaggacagctctggcccttcctaggcctagcctcaccccaagctaaatgtaacccagttggactctgttaaaggaagcagtgttttgggttcgattctgcctctgtagctcaaagggggcggcccccagagtcctgtgcgttctgccaaaagctatgccaagtccatagctttgccaaatgcacggagctctgccattccagtgtggtgcaggccttgccaagggtttatctgcatgcgtctcggtgggcttgtcctgcatgggagttgtgttcctgtgcaaggggtagccttgctccaggacaggatgactgtcttccctgttcttagggacaagtcccaagatgccagaaaggcagtctcccaaggcccac

SEQ ID NO: 9798 - DNA, 768 bp, Macaca Fascicularis
  misc_feature (1)...(768): n = A,T,C or G
ggcagggcccatttcagaaatgttaatggacgggacggtcctgtgcaagctgataaatagtttatacccaccaggacaagagcccataccgaagatctctgagtcaaagatggcttttaaacagatggagcaaatctcccagttcctaaaagctgcggagacctatggtgtcagaaccactgacatctttcagacggtggatctatgggaagggaaggacatggcagctgtgcagaggaccctgatggctttaggcagtgttgcagtcaccaaggatgatggctgctatcggggagagccatcctggtttcacaggaaagctcagcagannnnnnnnnnnnnnnctgaggagcagcttcgccagggacagaacgtaataggcctgcagatgggcagcaacaagggagcctcccaggctggcatgacagggtacgggatgcccaggcagatcatgtaggatgccgcatcctgtcnnnnnnnnnnnnnnnnnnnnnnnnnnnnnatggtctctacgaaaaagaaatagttagtcaccttctgacctgctcctttttctcaaagccttctgtccctggtttttgcaagtgctgcatttctgctnnnnnnnnnnnnnnnntactgctgccacctcctgttcatttagaactatgcaaagactccgcttcccttttcctgagctcctcgggccccaaagtctctgtttgattatttatttatttatttatttgccaaaaattctcctcttcaacattaggtgcattctataag

SEQ ID NO: 9799 - DNA, 762 bp, Macaca Fascicularis
  misc_feature (1)...(762): n = A,T,C or G
ttacttcatagaaaagtgaaggtaacaagtcatttcgactcaaaggccagtcagaagggaagaggcagcatnnnnnnnnnnnnnnnnnnntggtctgggagttaggacgtgtggctccacaccttctccnnnnnnnnnnnnnnnnnnnnnnnnnnnnnnnnnnnnnnnnnnnnnnnnnnnnnnnnnnnntaggccatgctggcatcacttttgcagaaggaaacagggcagaaagtatagcagggcagccttaggtttgtctgtcagtggaattttcacagaggtccaagggctagtcgctagcctgagtgacaactgaggtgtgagggctgggaacacaagcgggtatgggaaccacctgnnnnnnnnnnnnnnnnnnnnnnnnnnnnnnnnnnnnnnnnnnnnnnnnntatctatatatatatgtgtacatgtgtgtatatagatatcatacaaacacacataaaaccgatatgatatatttgcttttagatcccaggcagggggagccttgggattaggagcacactgtactttaggaagttcatagccatggccttctactgggtgtttatagagttctttcatggccctctcttccaaacgcaggtaacctacaggggtcatttttattataagcaacattgcctagtaacagcnnnnnnnnnnnnnnnnnnnnnnnnnnnnagnnatttaattctactcattcatnnnaaaaacaatgaattgagggctcattaaattgnnnnnacacatctctca

SEQ ID NO: 9800 - DNA, 676 bp, Macaca Fascicularis
  misc_feature (1)...(676): n = A,T,C or G
agaaattgtgcaggaatatgataggcatttgggagctgtcaacaccatcgtttttgtggatgagaataggagatttgtgagcacatctgatgataaaagccttagagtttgggnnnnnnnnnnnnnnnnnnnnttcaagtatatagcagaacccagtatgcactcaatgcctgcagtgactttgtctccaaatggaaaatggctagcatgccaatcaatggacaaccaaatcttaatttttggagcacagaacagatttagattaaataagaaaaaaatttttaagggccatatggtannnnnnnnnnnntgtcaggtggacttttcaccagacatgagttatgtgatttcaggagatggaaatggaaaattaaacatttgggactggaagaccacaaaactctacactcgatttaaagctcatgataaagtgtgtataggtgcagtgtggcatcttcatgaaacttctaaggtcataacatgtggttgggatggtctcattaaattgtgggattaattagattaatccttaaactagctaggatcatttttgatccattgtcatatttaatgtatttaattattaaatgtatcagatgataacttgatttacagataatgttgatgacactgacccattgtgtaaaaaaagaaactgtaaannnnnnnnnntttc

SEQ ID NO: 9801 - DNA, 721 bp, Macaca Fascicularis
  misc_feature (1)...(721): n = A,T,C or G
tataataattacggctatnnnaatgatggcnnngatgacagaatgagagatggaagaggtatgggagnnnnnnnnnnnggtggagctggtgatgcaagnnnnnnnnnnnnnnnnnnnnnnnnngtacatatgagagggttgccttttcgtgcaactgaaaatgacattgctaatttcttctcaccactaaatccaatacgagnnnnnnnnnnnnnnnnnnnnnnnnnnnnnnnnnnnngagaagcagatgtagagtttgtgacacatgaagatnnnnnnnnnnnnnnntctaaagataaaaataacatgcaacatcgatatattgaactcttcttgaattctactcctggaggcggctctggcatgggaggttctggaatgggannnnacggaagagatggaatggataatcangnaggctatgnnnnnnnnnnnnnnnngggaatgggaaacaattacagtggaggatatggtactcctgatggcttgggtggttatggccgtggtggtggaggcagtggaggttactacgggcaaggtggcatgagtggaggtggatggcgtgggatgtactgaaagcaaaaacaccaacatacaagtcttgacaacagcatctggtctactagactttcttacagatttaatttcttttgtattttaagaactttataatgactgaaggaatgtgttttcaaaatattatttggtaaagcaacagatt

SEQ ID NO: 9802 - DNA, 720 bp, Macaca Fascicularis
  misc_feature (1)...(720): n = A,T,C or G
tgccaacacggctcgatgctggacatacttgaccggggtcatcctagggaaaacactatnnnctgagatcccagatcatgagtttttcacagcatatggtcctgattatgtgctggaannnnnnnnnnnnnnnnnnnnnnnnnnnnnnnnnnnnnnnnnnnnnnnncaaatcctcaactacatcaaagggaatctgaagcatgtggtctagttgacagaaagagatcaggtttccagagctgaggagtggtgcctataatgaagacagcgtgtttatgcaagcagtttgtggaatttgtgactgcaggggaaatttgaaagaaagaaattacttcctgaaaatttccaaggggcaccaagtggcagctggnnnnnnnnnnnnnnnaggcaggcaccccagagtcctcaactgggcctaggggaagagggagatatccnnnnnnnnnnnnnnnnnnnnnnnnnnnnnnnnnnncacannnnnnnnnnnnnnnnnnnnnaattatttttaagtgaattggggaggggagtatttttattgtcttaaatgaaacagatcagaagctggatgacagcagtcaccagtttgtagggcaggaggcagctgagaggcagggtttggtccnnnnnnnnnnnnnggtggagctctgggagagagggtactgatcagcagactgggaggtggggagaagtccactggtgttgttttagtgttatgtatct

SEQ ID NO: 9803 - DNA, 888 bp, Macaca Fascicularis
  misc_feature (1)...(888): n = A,T,C or G
ctgagctgcagagaaaaggcnnnnnnnnnnnagccgatgtagcttctctgaacagacgcatccagctcgtgagggaagagttggatcgtgcccaggagcgtctggcaacagcttgcagaaagctggaggaagctgagaaggcagcagatgagagtgagagaggcatgaaagtcattgagagtcgagcccaaaaggatgaagaaaaaatggaaattcaggagatccaactgaaagaggccaagcacattgctgaagatgccgacnnnnnntatgaagagnnnnnnnnnnnnnnnnnnnnnnnnnnnnnnnnnnnggaacgtgcagaggagcgggctgagctctcagaaggcaaatgtgccgagcttgaagaagaattgaaaactgtgacgaacaacttgaagtcactggaggctcaggctgagaagtactcgcagaaggaagacaaatatgaggaagagatnnnnnnnnnnnnnnnnnnnnnnnnnnnnnnnnagactcggnnnnnnnnnnnggagaggtcagtaactaaattggagaaaagcattgatgacttagaagacgagctgtacgctcagaaactgaagtacaaagccatcagcgaggagctggaccacgctctcaacgatatgacttccatataagtttctttgcttcacttctcccaagactccctcgtcgagctggatgtcccacctctctgagctctgcatttgtctgttctccagctgaccctggttctctctcttagcatcctgctttagagccaggcacacactgtgctttctattgtacagaagctctngcgtttcagtgtcaaataaacactgtgtaagctatttctgtttgctattctttttacttcttatttattgacattttagattcaac

SEQ ID NO: 9804 - DNA, 690 bp, Macaca Fascicularis
  misc_feature (1)...(690): n = A,T,C or G
aggttgcttgnnnnngagtaggagnnnnnnnnnnnnnnnnggctgagcgtggcctgagggacaggccgtgggtcccgggatgcccctgcctgagcccagcgagcaggagggtgagagtgtgaaggctggccaggagccatcccccgannnnnnnnnnnnnnnnnnnnnnnnnnnccccaggaagcccagaaagttctccnnnnnnnnnnnnnnnncagcctccaaagacagcaccaaggtggcgggggccaaacgcaaggnnnnnnnnnnnnnnntgtccctgggggtgcccggccctgccacccttgccaaggccctcctccagatccaccccgaggcccagcgggccattgaggcagcccctcaagagcctgagcagaaacgcagcaggcaggacccaggcgcagacagaacagaagacagtgcattagcagcggggcctcctgaggctgctggggagaactccgccccctgcnnnnnnnnnnnnnnnnagtccctgtaacgttgacgacnnnnnnncctcccaggccaccaatccggccataggctcttctctgtccgcagggcttctggggcccaatcggtgaatctttgctttcaacattgtgtaatttctttctttcttttttttttagatcaagtataagttacttttgtaagcagaaaagtactttcaaacaagaataaaag

SEQ ID NO: 9805 - DNA, 791 bp, Macaca Fascicularis
  misc_feature (1)...(791): n = A,T,C or G
acagaccctgtaagaagtaatgccccagttgtcccncactcctaatgccaggcagagaagacagcctnnatagacttaatctgctttttgtcccatttgaaaaggtaccaggaggaaattttttaagggatcatctgtatcatagtgcccactctggacctaagtctagtgtctccatacaattggtgcagagaaataaggtgtaaatggtgctttgttcctgctggttccaagctcagaaaccaagactagctttgtaggagagaatgagagcctgcacgcttctctttggattggctgaggagtggtgggagcagggggctgatagaaaacatccagacacacacatataagcannnnnnnnnnnnnnnnnnnnnnnnnataaagaaacagacttnnnnnnnnnnnnnnnnnnnnnncattaggtaccaccggcacttacaaaatgtgcggactgaatcccagagaacactggcagaagtatacagtgtatggattgtatcgcttccccaatgtttgtaaatccacagtatttggaaaactgccttcattttccagtgtgggaaaaactcttgctacctgtattacttgannnnnnnnnnnnnnnnnnnnnnnnnnnnnnnnnnnnnnnnnnnnnnnnnntgcttttctaatgttatactatttacctatcagtgtattactgcaacttgaatcactcttttactgttgttggatataaacttatcctgtaccaatgtatttattaacacttgtattttattattgagcatatcaataaaaatataaaa

SEQ ID NO: 9806 - DNA, 713 bp, Macaca Fascicularis
  misc_feature (1)...(713): n = A,T,C or G
atcannnntnnnactcagtcnnnntcagtacttctacccggaggaactggatcagctcctttgtggcagtaaagcagacacttgggatgcaaagacactgatggaatgctgcaggcctgatcacggttacactcatgacagtcgggctgtgaagtttttgtttgagattctcagtagttttgataatgagcagcagaggttatttctccagtttgtgactggtagcccaagattgcctgttggaggattccggagtttgaatccacctttgacaattgtccgaaagacatttgaatcaacagaaaacccagatgacttcttgccctctgtaatgacttgtgtgaactatcttaagttgccnnnnnnnnnnnnnnnnnagatannnnnnnnnnnnnnnnnnnnnnnnnnnnnnnnnnnnnnnnnnnnnnnnnnnnnnnnnnnnnnnnnncaagaaatgcagtgtctgcctgttacagcaaaagaaacaaatcatgatttcttttctaatgtatcacctgagtcaaggaaacatgttacgccttcttgttgtaggaaaaacggcttgcagattataaagagacatttggttgatattcattaatggccccatggacttaaagtgatcaggccctaaaacgttgttgtgatgaggtttctttagcaagttcttgtttaaattatcatttatttgatgagtgaagtttttaacatgc

SEQ ID NO: 9807 - DNA, 720 bp, Macaca Fascicularis
  misc_feature (1)...(720): n = A,T,C or G
aagctgtagtgccagtgggatcagggcagctggggaggctgggcggggtatgcctgagggtagagggggcccagggactgagccggttacagtggcggcggcagcagtgacagcagcagccacagtggtgcccgtcatctcggtggggtctagtttgtacccgggtccaggactggggcatggccactcccctggcctgcacccctacactgctctacagccccacttgccctgtagccctcagtacctcactcacccagctcaccctgcccaccccatgcctcacatgccccggcctgccgtcttccctgtgcccagctctgcatacccacaggtgagaccagtgttctgctgggggggggtgagacgtgggaaaatactgggaattcatagggggttggggtggggtactctgggagtataattgggctgtccaaaagtcctggtgaggtggtgggagtctgggggacccagcccaactaaaataagaaatgacgttcgggcatgnnnnnnnnnnnnnnnnnnnnnnnnnnnnnnnnnnnnnnnnnnnnnnnnnnnnnnnnnnnnnnnnnnnnngagaccagcctggccaacatgcggaaaccccatctttactaaaaactagctgggtgcatgcctataatcccagcttcttgggaggctgagatgggaatcacttgaacctgggaggcagaggttgcagtgagccgataccgtgtc

SEQ ID NO: 9808 - DNA, 733 bp, Macaca Fascicularis
  misc_feature (1)...(733): n = A,T,C or G
catcatatcatgcctccagtgtnnnttggactgagccagaatgtgattttcctgatgaaaaagactcatactgggaattctagggctgccaaatcattttatgtcctatatacttgacactttctccttgctgctttttcttctgtattgctaggtacaaatactagaattatacttgaaaatacagttggtgcactggagaatctattatttaaaaccactctgttcaaaggggcatcagtttgtagtccctctggttcccacagagtactttgacaactccaaggaaacatcagaattactaatctagcgagtgtcatttattctggaatttttttctaagctgtgactaactcttttcctctctcaatataatttttgagccagttaatttttttcagtattttgctgtcccttgggaatgggccctcagaggacagtgcttccaagtacatcttctcccagattctctggcctttttaatgagctattgttaaaccaacgggctggtttatcttacatcagacccttttctggtagagggaaaatgtttgtgctttccctttttcttctgttaatacttatggtaaactctaactgaacctcactgacattaaatgattcacttgaaatatatacagaaattgtaatttgcttttttttttaaaaaaagggggctaaagtaacactttcctacttatgtaaattatagatcctaaattcatgcaccccg

SEQ ID NO: 9809 - DNA, 780 bp, Macaca Fascicularis
  misc_feature (1)...(780): n = A,T,C or G
gctgtgatgagtgtcctttcaggggcaggggtagaagcactggggtgggggcggaattggggttactcaatgtaagggattccttgtggttgtgttgggatccagtgcagttgtgatttctgtggatcccagcttggttgcaggaattttgtatgattgggttnnnnnnnnnnnnnnnnnnnnnnnnnctgggctagaacgtgannnnnnnnnnnnnncctacctgaccgagtcacgttcttggatcctcagaactctttactcttgtgggggtgggggtgnnnnnnnnngtggggagcggtggctgagaaaatgtaaggattctggaatacgcattccatgggactttccttccctcttctgcttcctcttttcctgctccctaacctttcgccgcatggggcagcannnnnnnnnnnnnnnnnnnnnnnnnnnngctgccaggctcctgtactactgccttgtacttttcattttggctcacagtggattttctcataggaagtttggtcagagtgaattgnnnnnnnnnnnnnnnnnnnnnnnnnnnnnnnnnnnctgggaccccgcggttgggagaagggagtagtccggccttccaggtggcatgagaggcaatgactcgttacctgccgcccatcaccttggaggccttccctggccttgcgcagaaaagtcggggatcggggcaagagaggctgagtacagatgggaaactattgtgcacaagtctttccagaggagtttcttaatgagatatttgtatttattccagaccaa

SEQ ID NO: 9810 - DNA, 750 bp, Macaca Fascicularis
  misc_feature (1)...(750): n = A,T,C or G
cagcagtgtaatggagaaattcctaccaatgggcaatcaaaaaagccagtgtgagaagaaaactgatgagctgtcaactgtcaaaactcagggggaaggcggaagcattagtttggatgtaggcccttattcagtcattttctccaaggccttggaaacaaacatnnnnnnnnnnnnnnnnnnnnnnnnnnnnnnnnnnnnnnnnnnnnaaaatgtgcctgttgtaagtttggttaaaacttttatcttagtattgaaaatatatagcaagtttcaagtcattactgagttacttgttactcttacagaattaagaaaaatagcacagtataacatatttaaattcatgtacaggtgcattctagttacatgtacatggtagttaaataaaagtcataattaagtcattatgactcagagtactttataataaaccagatgccatgaggctctgttgaggtagtagaatctcaatgggactccagagagtaagtcttttttgctgttttcagctctgtcacatgctcagttcgtgacccagggaaaagactctcgctttgccatnnnnnnnnnnnnnnnnnnnacagttgctggcatttgcacatccacaatgtgttgattaactttaacaaagggattggtggagataaacagatgccaaacctgacctatttcttaaactttatggaataaactaaatttaggatttctcatcattcatatatgatgctataagggagaagagattat

SEQ ID NO: 9811 - DNA, 712 bp, Macaca Fascicularis
  misc_feature (1)...(712): n = A,T,C or G
cagatatagctggagctacatcctgcttcctttgggcctggggctgtgcttggcttgaaatctgtgtcccctgcccccactggcactttgtccagtcatcaggacccttggctcagatttagggtagggtaggaatggggtacnnnnnnnnnnnnnnnnnnnnnnnnnnnnnnnnnnnnnnnnnnnnnnnnnnnnnnnnnnnnnnnnnnnnnnnnnnnnnnnnnnnnnnnnnnnnnnnnnnnnnnnnnnnnnnnnnnnnnnnnnnnnnnnnnnnnnnnnnnnnnnnnnnnnnnnnnnnnnnnnnnnnnnnnnnnnnnnnnnnnnnnnnnnnnnnnnnnnnnnnnnnnnnnnnnnnnnnnnnnnnnnnnnnncaatatcctgagttcatgatccacccgcctcagcctcccaaagtgctgggagcctagatgttcttctcacatcctctagagtttgttcctgtcagccaccgtgacatggccaccgtgcccggccagttttcctattttctgaattcagagttgactcctctgggaaactggagatgagaatctgcccagtgctctgctgtctggccaccgccttttgaattttagtgttggcactaggagtaccattatctttcccctccttctgacccatttgatccatcagcacaatagggtcacaaccttaacttttcgtttctaatctcatttactctgtctttagg

SEQ ID NO: 9812 - DNA, 782 bp, Macaca Fascicularis
  misc_feature (1)...(782): n = A,T,C or G
gctaacagagacnnnnnccagaaacagaccatgctggagagtctcagcacagaaaagaactcgctggtcnnnnnnnnnnnnnnnnnnnnnnnnnnnnnnnnnnncacctctggaagtagtagtaatgggtcctcgattaatatgtctggaattgacaatggtgaaggcactcgtctgcgaaatgttcctgttctttttaatgacacagaaactaatctggcaggaatgtacggaaaagttcgcaaagctgctagttcaatcgatcagtttagtattcgcctgggaatttttctccgaagataccccatagcgcgagtttttgtaattatatatatggctttgctccacctctgggtcatgattgttctgttgacttatacaccagaaatgcaccacgaccaaccatatggcaaatgaaccaagcccagttgttgcagtgattggttgtctttttgtagacttgggatctgcaagaaggccagttgcctaaaatttctgagaacagtgcacaagattattttatcactataagcttttaactttttaagttattatacaagtattctacctaaatcttcctatttcctttaaatggtaagagtttctaaaacagacaataatttaacaagctcnnnnnnnnnnnnnnnnnnnnnnnnnnnnnnnnnnnnnnnnnnnnnnnnnnnnnnnnnnnngtttatctctgtacagaccatctgtatgttaggtgacattgattatgggttataatcagggaaactaattgtatttaggacaaaaaaaaa

SEQ ID NO: 9813 - DNA, 742 bp, Macaca Fascicularis
  misc_feature (1)...(742): n = A,T,C or G
agtagagaagggtattctaaccactgagaagcagaatttnnngctatttgacatgactactcatccagtgaccaatacaacagagaaacagcgcctagtgaaaaaacttcaagatagtgtactagagcggtgggtaaatgaccctcagcgtatggacaagcgaacactagcactcctggtgctagctcactcctctgatgtgctagagaatgtcttctcctctctgacagatgacaagtatgacgtagcaatgaatcgagccaaggacttagtagaactggaccctgaagtggaagggacaaagcctagtgccacagaaatgatctgggctgtgctggcagccttcaataaatcttaaagnnnnnnnnnnnnnnnctccttttcccctgctggctggtgactgtcagagaccccatcactgagttttgtgtgatgagatgttttcatcatttttgtttccttttcttgaatcagacttgtgatttggggagaacaacttcagggcttctccatagaccttgaccattataagcagaccttatttctccctacacctccactccataggtaaataaactgggtgaacccacacgtacccaatgaacattttcttccatttcttggtttannnnnnnnnnnnnnnnnnnnnnnnnnnnnnnnntatctaaatgggattttgagttatccagctatagaatgtgaatgagataaaaagcgaaccgtctattatgtttttctaagt

SEQ ID NO: 9814 - DNA, 654 bp, Macaca Fascicularis
  misc_feature (1)...(654): n = A,T,C or G
gcctggcgccagtgcgcgtagtgattcnnnaaggctccatcctggacnnntcgcccgaggcggccgtggtgggcggcaacgtgctcacgtcgcagcgcgtggtggatgtcatcctgggggcctttggggcctgcgccgcctcccagggctgcatgaannnnnnnnnnnnnnncaacgcccacatgggctactacgagacggtggcaggcggcgcgggcgcgggtcccagctggcatgggcgcagcggcgtgcacagccatannnnnnnnnnnnnnnnnnnnnnnnnnnnnnnnnnnnnnnnnnnnnacccggtcatcctgcgccgcttcgagctgcggcggggctcggggggcagaggccgcttccggggcggcgacggtgtcacccgcgagctggtctttcgcgaggaggcgctgctgtcagtgctgaccgagcgccgcgccttccggccctacgggctccacgggggcgagcccggtgcccgcggcctaaaccnnnnnnnnnnnnnnnnnnnnnnnnnngtgaatttgggcggcaagacgtcggtgaccgtgtaccctggggatgtgttctgtctccacacgcccggcggcggtggctatggggacccagaggaccccgccccaccgccggggtcacccccgcaagcaccgg

SEQ ID NO: 9815 - DNA, 771 bp, Macaca Fascicularis
  misc_feature (1)...(771): n = A,T,C or G
gctttgatgaaacattagcnnnnnctgggagactcannnnnnnnnnnnnnnnnnatagtgtccttagcaatgaagagataagagagactggaggagcagagtcttgtcacatccgggggaatattgttggatggggagtcacagagatccagccacatggaggagctcagtatgtttcgtaagtgttgtgaaactccacgtgaagccaaagaaagaaactcacacttaaaatacatgccagttgggaagnnnnnnnnnnnnnnnnnnnnnnnnnnnnncttgagactaatgaaggagagagttgagatcannnnnnnnnnnnnnnnnnnnnnnnnnnnnnnnncagttgaaggaaagacattggaaaaagcttttgaggataatgttactagactttatgccatggtgctttcagtttaatgctgtgtctctgtcagataaactctcaaataattaaaaaggactgtattgttgaacagaaggacaattgttttacttttctttggttaactttgttttgnnnnnnnnnnnnnnnnncattggaagaataacaaaataagatttgttgtccactgttcattgttattggtgtgtaccttattacaaaaaaaagattatgaaaacatatttatactacaaggtggcttaacaactataaatgtagtttnnnnnnnnnnnnnnnnnnnnnnttttttgagaagatagtcatataagttatattgtaaaagggatttgtattaattttattaagactatttttgtaaagctcta

SEQ ID NO: 9816 - DNA, 515 bp, Macaca Fascicularis
  misc_feature (1)...(515): n = A,T,C or G
caccccaccccattcagacacacggatattgggtctctgtgcggacggtgacaacgtttacaagcaccacacttacacatccacacacgcacacgggcatccgcgaggcgacttctcaagcttttgaatgggtgagtagtcgtgtatttagtttttgcactgtcttactattcaaggtaagaggatacaaacaagaggaccacttgtctttaatttatgaatggtgtccatcctttccccatccttgcttcctgcccctcacacccactttcctcctcagagcagcgaaactgccccctcctgcccgccctcgcctctcgttgaggcagatttttactgtgaggtgaacgtggacctctttctgtttccagtatgtggtgatgatgtctgtctgntngagtattgtggccgcccccggaccagcgatgactgatgaatattatgagcttcttattgatctcggggtccatctgtgatatttctttgtgccannaaagaaaaaaaaagagtggatc

SEQ ID NO: 9817 - DNA, 701 bp, Macaca Fascicularis
  misc_feature (1)...(701): n = A,T,C or G
gaccacttgattacgtcagccagaactaaccctggatgggctatggcagctgaagcggactcctcacttagtgaataaccccagaaagctggctnnnnnnnnnnnnnnnnaattctgtcctcactgatgggggttctgtgtctgcagaaatattgtttcctgtatttcatagctggggaatggggaaagaagtctgcagcaaaggggtctcactctgttgcccacgctggtctcaaacttctggactcaagtgatcctcctgcctcggcctctcacagtgctgggannnnnnnnnngagccactgcgcccaggcaacaatccgctccgaggaaagcgtaagcaggaagacctcttaatggcctagcaccaatcaaaaaatgactcctgattgggtttggaaagggagagaagagatgtctgaggaaggtcatttgctttcagcttatggcatttcctagaattttgctgaagcaagaagaaaaactcagagaacataaaatcaacttttaaaattgtgtgctctcttcttcacgtaggctcctgttatgaacaaagtacagtaaaattctaagccctgttcagagactttttgaatcacaactgcagctcattgcnnnnnnncagagtctgttaacatggatatcaaataccgtatcagtcactataggctctaagaatcacatgcagtctcactccataa

SEQ ID NO: 9818 - DNA, 740 bp, Macaca Fascicularis
  misc_feature (1)...(740): n = A,T,C or G
cannnnnnnnnnnnnnnnnnnnnnnnnnnnnnnnnnnnnnnnnnnnnnnnnnnnnnnnnnnnnnnnnnnnnnnnnnnnnnnnnnnnnnnnnnnnnnnnnnnnnnnnnnnnnnnnnnnnnnnnnnnnnnnnnnnnnnnnnnnnnnnnnnnnnnnnnnnnnnnnnnctgacctcgtgatccgcccgtctcggcctcccaaagtgctgggattacaggcttgagccaccgcgcccggccgagccaggaggattttaaaggggtcagtggaggtcctgagggattannnnnnnnnnnnnnnnntgggagtatctgaaaggggcccgtggtctggagaagtgagtaaacctctgaaggacccagtggctatctccaaagggtcaggggtccctgaggggatcagggtgcttccagccattgtggaatccctaatgggggatctgttgctatgggggagccctcaggaccccattgccttccccaggtgggcttccccatccccgggggatggttcctgagcggctgcccccatggctccagcgctacgtggacaaagtgtctgacctcagcctctttggaggcctcccagctaaccatgtccttgtgaaccagtatctgcctggggnnnnnnnnnnnnnnnccacacaccctcagcccgtgtccccccactcagacatctgagccatgctggggcagnnnancctgtacccaccctcactcattnnncagccacatctcccaagc

SEQ ID NO: 9819 - DNA, 728 bp, Macaca Fascicularis
  misc_feature (1)...(728): n = A,T,C or G
tcagttnnnncatgacaatgtaatttgtgtaactgttgaatctggaaattgatcagcattaaagggcacatgaagnnnnnnnnnnnnnnnnnnnnnnnnncggagcctgttaaaggtcactcagatgtgatgnnnnnnnnnnnnnnnnnnnnnnnnnnnnnnngannnnnnnnnnnnnnnnnnnnnncactgtggatctggaaagtactggaaaatgtgatacttagaatacttcggctgctaaggaaacttnnnnnnnnnnnnnnnntagctgagccaagtgagtgagtttgcagatagcaggtggtgagctcctgcttgctggaggtggnnnnnnngggccattcccgcctggcaacagcaccgtcctgcagggagccacttggcagaaggatgcnnnnnnnnnnnnnnnnnnnnnnnnnnnnnnnnnggcaagggccctttctcaggggatgtagcttttttaaaagatttggtaacacttggaggatttgctaaaatgagcctcagaagggaaatcggttttctaacctgtgactttttgaaatgaattattcctttcagtctttatttttcaaagaaacaatgtgtattgaagtacctagatttgtttgataatcaacaaatctttcctttttaaatgaacatattctgaatgtggtttctgtcttaggccaggaggacagagtttactttcatattttccctgtaagtaagagggcttatta

SEQ ID NO: 9820 - DNA, 930 bp, Macaca Fascicularis
  misc_feature (1)...(930): n = A,T,C or G
gcccccannnnnnncagagggcaatgccatcagtagcagtgtggtgnttcaggcagagctctggccaggctgtgccagcgtgtcctggaagcatcactaaggaagagagagtttattcagtcaactggcccaaggcagcgagacttctaccccatagccccctgggctggggcttactgggggctgatgattctggacacgaacaagagccaggtagaggagaaaggcttctcccacaccccagccccctgctgtcccctgaagcccaggactgtgttgtatgctttccatccacccaccttaccctatagcatcttgcggcccagaaaccagagccatttgtctcagaccctaaatcaaaggtcacaaacctcaaaacagagaggggagagagcaatgannnnnnnnnnnnnnnnnnnnggggagggttgtggcaggtgttctgaggctgagaggacacatatatgcgtatttcctctatacacatcaccccccttctgtaatcttaagccatgactagcctggtgatgtgttagtttgtgccgagttctaccccctcatgtgctgcttatgaatactgaatgtgactggttgaaagctggtagaattcatccctcttactgtagatagcactgcaaatcgtggaattttttttttgttttttgctgtgtttccagatgaaatatctataaatatctatacattatatatatagatgtgtgtgtgtgtgtgtgtgtacattgggtcctcccatgtgtggtggtcctccggaggctgtctctttggtcaaggtgaacttttaatgtttattattttcttctccgcacaaagagcctaattctgtgtattctggtggctgctgtcatgagatgacaaaatgtaaaacaaaactctagtcaacgtagaaagagttaactgtgatatatatag

SEQ ID NO: 9821 - DNA, 686 bp, Macaca Fascicularis
  misc_feature (1)...(686): n = A,T,C or G
tgcacatagncatgggccgcaggagagcacacaaccctgcgtccagggacacagccctactgggtgacctcagacctagtcctttacccttgtgtgaaggacacaccccacagaaggctacggggaggactgagaggaccaggctggaggcagccaagtaacgtagtcatatcatcgagttctgatctggtggcatctggctgtgcaaggaagacccggctctgccccccaagtcttgtggacaccacagggaacatcctggacttcaaaagccagggcaggccaggcgcannnnnnnnnnnnnnnnnnnnnnnnnnnnnnnnnnnnnnnnnnnnnnnnnnnnnnnnnnnnnnnnnnnnnnnnnnnnnnnnnnnnnnnnnnnnnnnnnnnnnnnnnnnnnnnnnnnnnnnnnnnnnnnnnnnnnnnnnnnnnnnnnnnnnnnnnnnnnnnnnnnnnnnnnnnnnnnnnnnnnnnnnnnnnnnnnnnnnnnnnnnnnnnnnnnnnnnnnnnnnnnnnnnnnnnnnnnnnnnnnnnnnnaatgggagtgaaactccgttccccctgcccccccccaaaaaaaaagccagggcaaaggacctggcgtggccacttcctcctgccccagcccaacctctgggaacaggcagctcctatccgcaaactgtgttcacccttnntaaaaataa

SEQ ID NO: 9822 - DNA, 735 bp, Macaca Fascicularis
  misc_feature (1)...(735): n = A,T,C or G
gaactggaactgaacnnnnnnctgcatgcttgaccaaagcagtgatgagggtggccagtacctgcagtgtgcatggtaggtttaaagaaaagggaatgtgttctgctgtttcctttgtccttgggctgctcaagctggacagtaggtaaccactgttttcaaggaccagcccaacttctctggcttggttcggagttcgtttcatccctagctgtgagtgccttttggtctggaaagttggcttgtctcataatacccacagctaggacattctctctgtaattatgaattgtccttgttttccattaaaagagaatgtctctgatcactagagttggtcggtgttggattatttccactgtgagattcttaaaactttttcgcttcataataaaacaactcatgttagagaccctttcaacatgaaaggtttgtagttgagacattacatatattttattgtttataataaaaatcatctatacaaaagtcctgggtgttaatattttgcacaagatctgttnnnnnnnnnnnnnnnnnnnnnnnnnnnnnnnnnnnnnnnnatgttctnnnnnnnnnnnnnnnnnnnnnctagggagctgtgttctttttgttcatttcgttcttatttccctgaagcaagagacnnnnnnnnnnnnagtgcaaagacttcagaccaattctttgtattacacttggttgcctcttggctatataacttctgagtgcaaatca

SEQ ID NO: 9823 - DNA, 752 bp, Macaca Fascicularis
  misc_feature (1)...(752): n = A,T,C or G
gctccaatcatnnnntgntnnntcaagctgtgatccagaaagattttgtgcccccagatgcctcttgataggagaggcaacactctccaaataggtgggctcttcagnnnnnnnnnnnnnnnntcaggtgacttgttagagcactaacttggtcagagccaagtcctggtnnnnnnnnnnnnnctttcgctctgtggttggggcggtgagaaccactgaggtccactgatgagacttggagatctgaatccggtctctctctgttttaatgtgacttaggtgctgtcaacattagcaagataatggaaatcatgccaccagtgggtgcttacctcccagctaggcacgcaggagctggtggttggcaggggaaggaggcccagtgagccgggtcccttaggtcagggagagtgtgtcctctttgccnnnnnnnctacccctgagggccttgtggcagtgccggtgttgggggggtgtctgggctactgagtacccactcggtcatggcggtgctggcctcttgggtgagtgagcctgtgatgcccaggaggtggtgttggctgcagcgcacacaaatactgagtggtgctcttttgttacagacttagcaacaaaggtctgtgccctgggcatggggggctgtagtgtagctatggctgtgcatttgtgaaatggcttagctttccatgttgctgagaggaatctggacatggtcccgggcatctgaatgatctgtaggggagggagtcaaa

SEQ ID NO: 9824 - DNA, 737 bp, Macaca Fascicularis
  misc_feature (1)...(737): n = A,T,C or G
agtatcatgannnnngtcactacagatgttgggagcaagggctaggatcactttttaaaaaatcaccacttgtggctggcccagagtgcggttgtacatcctcctcacctcataacgcagctaccaaggaagagtggttttcctaagaagacattgctggagttgacgttcttctgtccaaacaaacaaacaaaaactaaatacacaaacccccagaaacccacaatacatacatgctaaggaaaaactaacacccttctgtccactcagcaataagaaggatctcttcccacctaccctacctacttctacccccaacccccttccccattaatgtgagtaatgaattagcctggccacaggtggtcactgtaggctaatggaaaatacccaagggagggcaaagccccccatcagatgcatgaatgtttgcgaatgttgactgccactgccccacacactgtgtctttatagaattcccctttgcccaccccctccctgtctccacctggacacaacttgctcaaaggctggtgacttgtgggccattcatctacaaccaagtcctgatggagcaagaggcccatacctaggggatgcaagaacgacccatttctaaaatgttaccagtcccagccaatcttatggtgacattacagttaaatttcccaattgaaaacaagcaaacagacactcaaactggtcctgtaattgttgctagactttatgtgtgacaa

SEQ ID NO: 9825 - DNA, 679 bp, Macaca Fascicularis
  misc_feature (1)...(679): n = A,T,C or G
aagtcttagagctgcagaggtgaagaagagagactagctcagcccctgtcctcatgtagcttacatccagtggaggttgtttgggtgtcagagaaaggtggtggctttttccaggcaggctaaaggagggaggtcacaatgtgtactttatgatgagatctatgatataactgggataacaccaagggccccattgaggtattccttcccctcgcaggactagccacatgctgtctctctgccctggcctcttccaccccatgcctagtcagagtctttttttggggtgagcaaatggatagtgaggcaggagaggaggggttggaaggaggtggaggttggagggatggggagctgtggaggccgacaggannnnnnnnnnnnnnnnnnnnnngtggcctcagcccctcgtccttccaggtagagaagccagtctgcggcccaccnnnnnnnnnnnnnnnnnnnnnnnnnnnnnnnnnnnnnnnnnnnnnnnnnnnnnnnnnnnnnnnnnnnnnnnnnnnnnnnnnnntgaccccctatctggatctgacacctgaatcnccactccaggaaaaacgaatgtactnnnnnnnnnnnnnnnnnaactgcccttggttcnnnttggggnnnnnnnnnnnnnnnnnngagaccctcaactgctcctcctgcggctacacag

SEQ ID NO: 9826 - DNA, 761 bp, Macaca Fascicularis
  misc_feature (1)...(761): n = A,T,C or G
gagggacagaaaaatgnncnnngtgacttttaactgtgatgacccagaaaatgnnngagaaagataccaaagaagaaatcctnnnnnnnnnnnnnnnnnnnnnnnnnnnnnnnnnnnnnnnnnnnnnnnnnnaaaatctgaaacgcgtggccaaggagttgggtgagaacctgactgatgaggagctgcaggaaatgattgatgaagctgatcgagatggagatggagaggtcagtgagcaagagttcctgcgcatcatgaaaaagaccagcctctattaagatcagtgtcttctttttctactgcaagcacatgtaactagatttagtgcctgccattgtgtgaannnnnnnntttgagaatacaaacttttcccccactgacctccctttatcactttaatagtgaccttgagtctattttagctgtttggaagtgttctttgatattacagttctttgtaaaatgacctgcgaattaccctaattctcaaaagcaaaacaagagcacattagcatgaagaaaaagatcttaaagctttgagcacctgccattttgccttgcattgtttccctcttatcatgcatttccacatatccacaaacacaggacgactttagacaagcacatgttacacttgtgtcaccacaagcagtcattcttgagtggcttcagtttttatttgacacttgagtttagttttctctttaataaaacccagtgaagtcttgcactggcatttggatgtgtgttaatgctat

SEQ ID NO: 9827 - DNA, 736 bp, Macaca Fascicularis
  misc_feature (1)...(736): n = A,T,C or G
ttgtttttttaagcnnntttctgagtttttctggtgtttctaaaaagccaattatttttaagagggttgttgtggtgggggggaagggggttagtttaaagttttgattttttatgtgtggggataattggggataatttggagggagggtgtttaaagccaatcgattttgtacatgtttgaagatgttgctgtggacctcagcccgatggagggggccgaggagagtagcctgtttcggggaggcggggcacgggggctggggtcaggagaagccccgggggggaagtggaaccaagagatttnnnnnnnnnnnnnnnnnnnnnnnnnnnctggtcaggaggaggctggagggtggtggtgccggctgcagacttgcggcagnnnnnnnnnnnnnnnnnnnnnnnnnnnnnnnnnnnnnnngcccccgtgggtggggtcttgggtgggcagagcaatcaggggacggtgacgcttggcctccctgaatgcctcgagctccttggcgagcatgcgaccccggcgggcacgcaggagggcaggcaggcccctgcgcagacgctgggtggactgcttccaggtgtcatatcggaagaacttgcccacggggtatctggggaagttgtccggaagcacggtcggnngggtcgacacgtccctctcggacttggcgggggtagnacagtacgtctccaggnnngccanntcacnnntgnnnnaacagcactcctcaacg

SEQ ID NO: 9828 - DNA, 742 bp, Macaca Fascicularis
  misc_feature (1)...(742): n = A,T,C or G
gcagccagcccgctgggctggaggcctcagaggaggagcgccaagtgggnnngcggctgcgggnctgccacagcaagccagtgacgcaggtgacctggcatgggcgtggggactacctggccgtggtgctggccacccaaggccacacccaggtgctgattcaccagctgagccnnnnnnnnnnccagagcccgttccgccgcagccacggacaggtgcagcgagtggccttccaccctgcccggcccttcttgttggtggnnnnnnnnnnnnnnnnnnnnnnnnnnnnnnnnnnnnnnnnnnnnnnnacnnnnnnnnnnnnnnnnnnnnnnnnnnnnnnnnnnnnnnnnnnnnnnnnnnnnnnnnnnnnnnnnnnnnnnnnnnnnnnnnnnnnnnnnnnnnnnnnnnnnnntgacctggatcttnnnnnnnnnnnnnnnnnnnnnntgagacaccacaagaaggctctgcgggctgtggccttccacccccggtacccactcttcgnnnnnnnnnnnnacgacgnnnnnnnnnnnnnnnnnnnnnnnnnnnnnnnnnatgaccttctgcagaaccccctgctggtgcccgtcaaggtgctgaagggacacgcactgacacgagacctgggagtgctggacgtcgtcttccaccccacccagccgtgggtcttctcctcgggggcagacgggaccatccgcctcttcacctagctgtcccgcctacgtgaggccggggcggt

SEQ ID NO: 9829 - DNA, 680 bp, Macaca Fascicularis
  misc_feature (1)...(680): n = A,T,C or G
gctgcacaagtgtgacannnnncagtccaaggaggcagggcagcgcctggcgacggccatgannctgggcttcagtaggccgtggccagaagccatgcagctgatcannnnnnnnnnnnnnnnnnnnnnnncggccnnnnnnnnnnnnnnnnnnnnnnnnnnnnnnnnnnnnnncacggagaatgagctgcacggggagaagctgggctggccgcagtacaactggacaccgaactccgctcgctcagaagggcccctcccagacagtggccgcgtcagcttcctgggcctggacctagatgcacagcaggcccgcgtgggccagtggctgctgctcttcctgggcatcgccctgctggtagccaccctgggcctcannnnnnnnnnnnnnnnnnnnngccaccaaagcctccaccagcacccccaggggccccagttcggctccgaggtggagctgagacactcctgaggtgacccggctgggtcagccctgcccaagggcctcccaccagggactgggatgggaacactgatgggcgactgaggacataccccagccccccctgctcctcccgccctgtccctgtcgcccttccctcccagtcctccagaccacnnnnnnnnnnnnnnnnngcccccttctcccagtacacggctgcctaacactgagccccacctct

SEQ ID NO: 9830 - DNA, 684 bp, Macaca Fascicularis
  misc_feature (1)...(684): n = A,T,C or G
atgcataagttnnnntgcactcttgcacttacttaatacaaataaatgttttttaaagcttttgtagtatgtttttatgagttaacatcctaatgaggtaggtattaagtaatgtgctgtcatgagaaaaattgagacttccaagaaaactggagaccaactgtgggttggtttggggatggaataggtgtagctnnnnnnnnnnnnnnnnnnnnnnnnagatggctgggcgcaatggctcacacttgtaatcccaacactttggaaggctgaggcaggagggtnnnnnnnnnnnnnnnnnnnnnnnnaagagttcaagaccagcctgggcaatatagcaagaccccatctccatttttttaaatgaatttttaattttaaaaaagtacaggatagagctgttggggtggcacagtggcccaaagagcagcttcagagataattccttggttctatgatcactttttaactccaannnnnnnnnnnnnnnnnnnnnnnnnnnnnnaacattataggaaagaaaaaagtcttggttgtgaaaaactattgcatttgggtaaaataagtgaccatgcttctgttctgtaatactatgtgatccgtggttgttgtaatggtgatcatggagagcaaatatgaacttggcctagattttaaatgccctagaatttgtggtagtgccaa

SEQ ID NO: 9831 - DNA, 581 bp, Macaca Fascicularis
gaccaagagacccagggagaagcggatggggtgcgatggaccccgcggcgtcccgagccccacgccctcctctgtccccgtgccgtccacgtggggcactgagggggcattagggccagttcacttctccgcctcgactctgcccccctcagcctggcccgcccttcctaggttctcggcctgcgagccggagacagacaatggagagaactggagaggccgagcggctaccaggcctcaagtggaaggccattttccctcctcttcctcagttgtcctgggtgggggtgctgcgaggaatggagaaaccaggccctttgggtttagagggtcccagagagggaagggaaataggggcccttttctcttttagagttttcttttattcagcccaccttttgactctccccgcccaccccaatccatttttttttccggcttccgggtcccgtcctttcttagagctcgagtcgttccttcccctcctggattccgggtagcagaggtggcccctgtgccccgcagagccccgcaggaggcgggtgcccgtttatcccaggcctgggcgtggtggaggaagg

SEQ ID NO: 9832 - DNA, 756 bp, Macaca Fascicularis
  misc_feature (1)...(756): n = A,T,C or G
caaagtgcnnnnnnnnnnnnnnnnnnnnnnnnnnnnnnnnnngccccctccacagatccgcatnnncaagaggcccaccagcaacnnnnnnnncagcagccccaactccaccagcaggcccacccttccggtcaagtccctagcacagcgagaggccgagtacgccgaggcccggaagcggatcctgggcannnnnnnncccgaggaggagcaggagaaacccatcctcgacaggccaaccaggatctcccaacccgaagacagcaggcagcccaatnnnnnnnnnnnnnnnnctttgggtcctgatgggtcacaannnnnnnnnnnnnnnnnnnnnnnnnnnnnnnnnnnnnnnnnnnnnnnnnnnnnnnnnnnnnnntcctgggtcgtctgccacgggttgcactgccgtggcagacagctggacttgagcagagggaacgacctgacttacttgcactgtgatcccccttgctccgcccactgtgaccttgaaccccatgcactgtgacctccccccttctcccccttcccactgtgattggcnnnnnnnnnnnnnnnnncccaagtcaatggaaagggaaagggtgggggttaggggaaggttgggaggacccaccaaggactcagagannnnnnnnnnnnnnnnnnnnnnnnnnnnnntaaagccagtgccagcaataacagtttatcatgctcattaatttgggatttcaaaacacaaatgaaaactcacacccacccacccccaagtgc

SEQ ID NO: 9833 - DNA, 687 bp, Macaca Fascicularis
  misc_feature (1)...(687): n = A,T,C or G
tgcccatggcctctgccctgaccacccccagtcaggaggccccacaggaggggcaaagggcagagccatcaggtgtgccgtgtcctgggatcctgtgggggttgaacctggcatctaccagacctggcaccggtagatgccagtaaaatcctcaggtgaggtctggctacaggctgcgggccacgggccgctcaccactcacaccttccttggctttccttccatccaccccccccctnnnnnnnnnnnnnnnnnnnnnnnnnnnnnnnnnnnnnnnnnnnnnnnnnnnnnnnnnnnnnnnnnnnnnnnnnnnnnnnnnnnnnnnnnnnnnnnnnnnnnnnnnnnnnnnnnnnnnnnnnnnnnnnnnnnnnnnnnnnnnnnnnnnnnnnnnnnnnnnnnnnnnnnnnnnnnnnnnnnnnnnnnnnnnnnnnnnnnnnnnnnnnnnnnnnnnnnttgacctcgtgatctgcccacattggcctcccagagcactgggattacagccgtgaaccactgcacccagcccccatccaccactttttaagcaaacccacacaaattgtgttttctatgatacctgtctgtgactttcggagctgggggttcccctacccccttttcctggtgttaaacttttctttttataccagtggatctgggcccaagacattatccacactggaaggg

SEQ ID NO: 9834 - DNA, 718 bp, Macaca Fascicularis
  misc_feature (1)...(718): n = A,T,C or G
ttgacatgaataaagggcacgaaggccaggccagggcctgggcctcttgtgctaagagggcagggggcctatggtgctattgctttaggggcccaccaggggcaggggcctgctcccagctgccacgctctattatatggagcgaggtgttggggaaggnnnnnnnnnnnnnnnnnnnnnnnnnnnnnnaggagaagagactgaggggccatgacctctcctgaggcccccagcctgagaccgtgtaactccaggtagaagttgagctggtccctcagctggggnnnnnnnnnnnnnngtggaggggagggccttcacgcccacccacaccnnnnnnnnnnnnnnnnntagtccatcagcacaatgaagaaggagactcacataccccctgctccccgtggtagagacacctgagagaaaggggaggggtcaacgagagaacaggagtaggtcatatcagtgcccccccaaagtagagagcaataagagcccagcccagtacagtcctggctgtgttttcctacctggtgatcggaagtgtccggtttgctttgctgcccatttgcctcttgagtgggcagccctgggcttgggcccctccctctgtccctcagtgttggctctgcagaagctctggggttcccttcaagtgcacaaggggctaggctgctgtccctgagtcctccttctgtacnnnggggctggnnngacctggggc

SEQ ID NO: 9835 - DNA, 654 bp, Macaca Fascicularis
gtaaaacagatttttgccccccaaaacttctgttttataatatgtaatcttcatgaaaagaaagggctcagaaaaattaggatatgattttggttggttttaaattactgtaagttttagattctaaggttcaggatttaaaaaatttgatttaaatgaagaaattgatttttctctctgcccctccctgccattcatattttctgcataacactgttaataatatcaacctccacagccccttattttattatttccaataattccaagttcatatagaactgataatgtagcaagccccaagtatgataataggcagactattcccaactttctgtctagtttccagccattgaagtgaactgctaaaaaaagaaaaataattgaaacgttgagagagatggttgtgtaagttagtcctctgctgtttacttctataggagctgatccatttataaatgcagttttaataaaccatggaataccaaggcacaacatatcaaacacattggatcccacgatgttagacatagccatatctcctttccctacaaaagaaaagcatattgttaaaatgtgcttaccaatactgtattttattaatcttcataagaaaagaaacacccgacaccttcttctgcccccgcctcacta

SEQ ID NO: 9836 - DNA, 642 bp, Macaca Fascicularis
gaaacaacatcaaagtgataccttgcaattagaagaggtgagaaaaaccaaagaggtcatggaggaagaattgcatgcacaagccctcatcctagagtcaattaacgcaaacctttactatacccaggtggaactccaaaaagagaaagctatagtgggaaatttggagaaaatgcttcaaaccaagtgtggtgaaactgaagaaaagtataagtacaccatacagatcctgatggaagagaacattcatttgaagcaaaaggtaatttttaagaatgaagaaatgtatgaagaatattttgggagattggcctttatcactgtttttaaggatgattttgacactgtggaagatggtagcaagaaaagacaagaattataaacataaagtcgctttccattgttgaagatggttggcacaccatttttgtaggccccggaaactcccggcagggtttttttcagaacatgtgtataatgagtttagtttttgggttgctttgactctatttttgcttttttttgagtgggtgaaaatgtttgaattttcatttgaatttcacagcttatcacggacgcttcattgaaaaatgatgctctccgtactgggaggtgagctttctttgagttttgtactatttt

SEQ ID NO: 9837 - DNA, 752 bp, Macaca Fascicularis
  misc_feature (1)...(752): n = A,T,C or G
ggagtgtgtcaannnnnnntgggtgannngngtttctccgttcaaggagctnnnnnnnnnnnnnnatgatgcttttattgggaggaaaggagnnnnnnnnnnnnnnnncgtgagctatgtggggccaaagtcttagcccacagcttnnnnnnnnnnnnnnnnnnnnnnnnnnnnnnnnnnnnnnnnntatagtgtctgagctcatgctagaaagaatcaaaaagccagtgtgggtttttagactgtaataaatgaggcaaaggatttctattccagtgggaataaaacctctctagtgagttgtgggagatacgttgtatgttagacagaaccttaaggagtccttgtatgggccacggnnnnnnnnnnnnnnnatatactgtgattttcgtaaagaaactctnnnnnnnnnnnnnnnnnnctcccctgctgctggagatgccagagctgtgttgtcatactttatacccacaaaacaaggcacatttccccctttttctctttacagccaaagagagatgactgccaaagggggaacactaaggagtgggtgnnnnnnnnnnnnnnnnnnnnnnnnnnnnnnnnnnnnnnnnnttgacttccgaggttcatagctcctctctgcccttccaggcctggaaccttgggtgactatctttcattctttatcctttgtcttgagtgagtgggtcagccccaaaggaactgataagtaaatggcaagttttaaaggaagagnnnaagtacagcaa

SEQ ID NO: 9838 - DNA, 646 bp, Macaca Fascicularis
  misc_feature (1)...(646): n = A,T,C or G
tagcatttttacctgcagaaannnnnnnnnnnnnnnnnnnntgttggtcatatggtaaatctaaatgtgcatctcactggtataattatatgtagcactgtgctgtgtagatnnnnnnnnnnnnnnnnnnnnnnnnnntttattaaaatcagaaagtatgagattctattatgttaagggaaatccaaattcccattttttttttttttttgtctttttgggaaagatgtgtggtggtaaaatgtgttagtataaaaatgataatttacttgtagtagtcttttatgattacaccaatgtattctagaaatagttatgtcttaggaaattgtggtttagtttttgacttttataggtaagtgcaaaggagaagtagtttcatgaaatgttctaatgtataacatttaccttcagcctctgtcaggatggaacgagttttgaataatcaggaagtatatctatnnnnnnnnnnnnnnnnnnnataataatttgaagtctaaaagactgcatttttaaacaagatacnnnnnnnnnnnnnnnnnncgtagcaaaaagatatttgattatcttaaaaattgttaaatacctttttcatgaaatttctcagtattgtaacagcaactcgtcaaacctaagcatatttgaa

SEQ ID NO: 9839 - DNA, 765 bp, Macaca Fascicularis
  misc_feature (1)...(765): n = A,T,C or G
cggaggcctnnngcgttgcnnnnnnnngtctccgccacccacttngcgttttaggaatcaattaccagcagtttctccgccactatctggaaaattacccgattgctcccggcagaatacaagagcttgaagnnnnnnnnnnnnnnnnnnnnnnnnnnnnnnnnnnnnnnnnnnnnnnnnnnnnnnnnnnnnnnnnnnnnnnnnnnnnnnnggtggacctcgatattttaacctttacgatagctctgactgcatctgaagttatcaaccctctgatagaagaacttggttgtgataagtttatcaatagagaatagttacgtggtgacactacttcaagagaacctctgcattccagttataccaatcctgcaacttnnnnnnnnnnnnnnnagagtatattgtgataagacagtgcacaggtggaggggaaaaaaggggggagggggaagcttatcttgaaaaagcatcacagaagaaatagaaaaaaatgtccaaagcattataactgtaacattatttgagtttgtgattgatctacatttttccccctgcattatggaaaatgtctctcaacattgctnnnnnnnnnnnnnnnnnnnngttttataaaactgagacttgatgaaaaatcaccaatactagagtccatgagnnnnnnnnnnnnnnnnnnnnnnnnnnnnncagaataagacgttaacgctgagttattgggactagaaggctatgaaaagaacttgaaattgtcggnnntatgtgctctct

SEQ ID NO: 9840 - DNA, 772 bp, Macaca Fascicularis
  misc_feature (1)...(772): n = A,T,C or G
caccatagagaagactgaacaccagaaaaatttacttgcatgactatcatgttatctttttagacaataattgcttgtttttcttcccaagtatttatgcgctgccagttgagccgattacagaaagggcatgccacagatgaatggtttctgctcagctcccatataccattaaaaggtattgaaccagggtccctgcgtgttcgagcacgatactctttgtaggccctgtagtaactagcttgtcagtgttgaaataaaatctctcacactttaacttttttaatggggctgggtgggaaaattttcagtgataagtgtggnnnnnnnnnnnnnnnnnnnnnnnnnnnnnnnnnnnnnnngggaaaatgagaaaaactgtgaatatcttgtaattctgtctagagcctagaagcaatgtacttaactaggaccacgatggaggatttataacttttggcttcttccactcagcttttgtaaaatctcacgtcatgaattttattcctttcactccagaatgagggaaaaaacaaaacaaaacaaaacaaaacaaaaaaccccacaaaactcaagcctacagtttgaagaattgttagagagatgaatatgcacatagtaagcattgccttaaagtagatgtaattataatggtacttacctttctggaaagtacagcctgggatgtactgagactgaggaggtgtgtgtatctgtgcaatttaattagatttaggacacttgaattactcggaattccttcaagccagtt

SEQ ID NO: 9841 - DNA, 478 bp, Macaca Fascicularis
  misc_feature (1)...(478): n = A,T,C or G
tacattgatgggctggagagtagggtggcagcntgttctgcacagaaccaagaattacagaaaaaagtccaggagctggagaggcacaatatctccttggtagctcagctccgccagctgcagacgctaattgctcaaacttccaacaaagccgcccagaccagcacttgtgttctgattcttcttttttccctggctctcatcatcctgcccagcttcagtccattccagggtcgaccagaagctgggcctgaggattaccagcctcacggagtgacttccagaaatatcctgacccacaaggacataacagaaaatctggagacccaagtggtagagtccagactgagggagccacctgaagccaaggatgcaaatgactcaacaaggacaatgcttgagaagatgggagggaagccaagacccagtgggagctagggaccgtgatgcaagcagatgagatgtgagatggaacaca

SEQ ID NO: 9842 - DNA, 727 bp, Macaca Fascicularis
  misc_feature (1)...(727): n = A,T,C or G
aaatacttacaggggcagcagcggaacaggttcctatagaaccatacaacatcccattgtnnnaggccgaagtcatacaggaagggagtgatgttactcttgttgcctggggcactcagnnnnnnnnnnnnnnnnnnntagcgtccatggcaaaagaaaagcttggagtatcttgtgaagtcattgatctgaggactataataccttgggatgtggacacagtttgtaagtctgtgatcaaaacagggcgactgctaatcagtcacgaggctcccttgacaggcggttttgcatcggaaannnnnnnnnnnnnnnnnnnnnnatgtttcttgaacctagaggctcctatatcaagagtatgtggttatgacacaccatttcctcacatttttgaaccattctacatcccagacaaatggaagtgttatgatgcccttcgaaaaatgatcaactactgaccatatagaaaagctggaagattataactagatatggaaatattttttctgaatttttttatatttcctcagacttacctctttttgaaaagagagtttttattaaatgaaccatcatgatattggctgaaaagttctacattctattattgtattgtaacacatatgtattgatgatttccattaagagtttcagattaactttgaaaaatattccacttggtaatcttataaattctgtttaattacatctgtaaataaaaactctc

SEQ ID NO: 9843 - DNA, 765 bp, Macaca Fascicularis
  misc_feature (1)...(765): n = A,T,C or G
ggtcaatgtctacatcaacctcaataagctctgcctcacggtnnnnnnnnnnnnnnnnnnnnagccnnnnnnnnnnnnnnncttccgcccagccggaggtgcggtgctgcacagccctggggccatgttcgagtggggctctcagcgcctggaggtgagccacgtgcacaaggtggagtgcgtgatcccctggctcaacgacgccctggtctacttcaccgtctnnnnnnnnnnnnnnnnncagcttaaggacaagatctccgtgttctccagnnnctggagnnacagacccttctgatcacagcacccaggagcttgtctccaggaaggcagcccgtcccctcatacccgccccagagcaccagccagcaccaatgccaggctgctatttatctctctgtcctacccccgcccctgcctaacacatttgcactgctgggaatggacactggaagcaccaggaggaagggaggctagtctggtagggtagtggggaggtccggaaggcggggccgagggcgtcccacattcccaaccccgcccttctggtcaccatgggaatctttggactcaggacagggccaggcccagggctctccttcctctccccttcgctgtcccctccccctggagggtggggggtggcactaagctatgagtcccaggggacagtcaggaacggcgcagacaaagccaccccaggagtgagtgcagtgctggttactgtgttccatagccccgatccagggccctctaagaaataaa

SEQ ID NO: 9844 - DNA, 1225 bp, Macaca Fascicularis
  misc_feature (1)...(1225): n = A,T,C or G
gtgtggctgctgtcgctgctccngnnnctgnnngcgctnnnnnnnagccgggacgggcagcgggaaggccaacgnnnnnnncgtctcattttccccgagggcctcacgcagacggtgaagggggcgagcgccgtggcgcaggtggccctgggcttcgcgctgccgctgggcgtcannnnnnnnnnnnnnnnnnncctgggccgcacgctgctggccgccagggggcccgagcgccggcgtgcgctgcgcgtcgtggtggctctggtggcggccttcgtggtgctgcagctgccctacagcctcgccctgctgctggatacggccgatctactggctgcgcgcgagnnnnnnnnnnnnnnnnnnnnnnnnnnnnnnnnnnnnnnnnnnnnnnnnnnnnnnttggccctcgcccgctgcggcctcaatccagtgctctacgccttcctgggtctgcgcttccgccaggacctgcggaggctgctacggggtgggggatgcnnnnnnnnnnnnnnnnnncgccgcggctgcccccgccggccccgcctttcttcctgctcagctcccacggagacccacagtctctcctgggacaactagggctgcgaatctagaggagggggcaggctgagggtcgtgggaaaggggagtaggtggggggacactgagaaagagagagggatctaaagggactacctctgtgccttgccacattaaatcgataacatggaaattagatgcaacccaacaactgttactatttttgagtcaccgacttggaagtgatttgtggcagggcagagccggtgggttaacatcccgcccctgcccgcccctcaaccccagcgcttggctctctgagtggaagacgcttacggcctgggtgggggtggggggctgctgagtctgctaaagctctagccactgacactccctccaccgtcacccggcctcagccaacagaggtgaggtgggaaagctgccaggcaaggaggggcgcgggttcctcttgcaatactgtaaagcagagctttctaacaactagagcgctctccagtaatggctgccttagcaaatacggagttcccgctattggaatgttcagactgtcgtggacgctgtgggcctttgcgtggtgtggggggaggggggagaggggcaagagattcccgttttgggtgggcatttggattacattaccactttacaatcccttcctagtgtctga

SEQ ID NO: 9845 - DNA, 659 bp, Macaca Fascicularis
cagtagagtacagaaacaccccactctcctttagtacatgttgagaaaatgcctttgttgtcatgctccaaatcccacatgggctgccacctgggagctctggatactgaaagcttccttccccagaggttctgctgttgccatcagaggaggatgaccatgcttgaggaggaagaatgggttcaagatcatcatattcatcagaaggggacactaaacagaacccttaacctgttgtacttgccaaaattgagaataagaggtgtgtacaatgcagcaaattaattataatgtaagttaagatttgctttttgcaagttgcaaagttgtatccacatcaggtcactgtaaaaatgtattatcttgtaaaacttatgtaaaaaaaaaaaaaaaaggcaaagatactaaaaattttaagtccaaattttatttttcctacaagtgtttagaaatgcttctgggatttgctaattattatcttgggaacagtattgaaaaaactgcttagtgatattacagctttagtaaacctacctcacagctgggatgagaggataaaatacaactaattttgtaccctatagtgcctagagcagtccaagtgctaaatatttactgactgaaaccaaactatagctactcgggaggctgcaggacga

SEQ ID NO: 9846 - DNA, 655 bp, Macaca Fascicularis
  misc_feature (1)...(655): n = A,T,C or G
gatgtggacannnnnatctcgggacacacacacaaatttgaagcacttgagcacgaaaataaattctacactaatccaggttctgccactggggcatataatgccctggaaacacacactattccatcacttgtgttgagggatatccaggcttctacagtggtcacctatgtgtatcagctaattggagatgatgtgaaagtagaacgaattgaatacacaaannnnnnnnnnnnnnnccgtcttgatgattttttttttcactgtcctattgaaatcacgtaattaaacacttaagagccacaaaattgtatcacttttataatattttgcagtaaaatataataccatcttctctgttaatacataattgctctaagcttcccgtaaactataagaatatatttagtttacagtatatggattctgtgaaaaaatgtccataacacagtaattggtcacttgttaagaaaaatttatccttgtaaatatcttcaaagttgatatttggaactttattccaaaagtagtgcacgtggagaaagaatctagactatcttgtatacacttttttcttctctagtaataaacaattacccttcacttnnnnnnnnnnnnnnnnnnnnnnttaattttaaaaaacataaaaatgagg

SEQ ID NO: 9847 - DNA, 749 bp, Macaca Fascicularis
  misc_feature (1)...(749): n = A,T,C or G
agccgtggtgacctgtaggaatcaccatgtagcagcagcactagggctgtgtnntagagagtgggcctccnncctggagttcgtgcgagtgccgggcagagtgggcttgcagtttgcagggcctggagcccaacttgagtcctcagccagggttgacgagcctatgaccatgttcctctggacactttgtactagcccctccgtcctccgacctattgtgctttcttttgagctggaaaggaaaccgtctaagatcgtcccattagaacctcctcggctacagcgattccagtgtggagagctccctttcctgactcacgtgaaccccaggctccgattgtcctgcctttccatccgagagtcagagcactccagctctctgggggcccttgcttcctcctgttaactgaactgcaaggatggcctgagagtccttccttgctaaaaacctgaaggcctaggtcctggctcctcccctacttgccctgtgattgaaccaaggactccagattcacaaaccactacaccactataatttccctttggtgttctggtgccagcctgccttggcgaaactgtggaaacaagaaatcacggcactattgatattttctctgactggggacaaggcatgtgtattcacaggtggccctgagcacctgggttctgactttgtggctggagctgagggaacaaaagacttgctcgctgtggggatgatggtgacaggcccattgacctgcaatgaa

SEQ ID NO: 9848 - DNA, 720 bp, Macaca Fascicularis
  misc_feature (1)...(720): n = A,T,C or G
aaggcatggacatggcatccctacctccccgaaagcnnnnnnnnnnnnnnngcccaggcacttctgagcacagagagatggaggcctcaggaggcccttctgaagaccgaggaggcaaaggccgcgggggcccaggacctgcccagagagtgcccaaatctgggcgttccagctctttagacggagaacaccacgatggataccacagagatgaaccttttgggggccctccaggcagtggcaccccttctcgagggggccggagtggcagtaactggggtagagggagtaacatgaactctggcccgccgaggcgaggagcttcaaggggtggtggaaggggtcggtagaagttggaaccgagcaccctgaggcctctctggacagtatttaagaacttcttgtggacttaccaagagaaacaaaaggaagcctgcaccattgtagccctcaactcttctgggcacctgaatcccaggaaccctcaatgaggtcttcaagatgaagagactgctgccagctaccagcccagctggccctttcctgtcctgtccaccctcattgccccaactcccatgttgttttgtgaagataaaagctgggatcttttttttttttttttaagtctcacaagacatggggcatctccacaaatttaagttcctgtccatttggaaatttgtttctatgtgtacagttgtcagagaaaaacataaaagt

SEQ ID NO: 9849 - DNA, 764 bp, Macaca Fascicularis
  misc_feature (1)...(764): n = A,T,C or G
atttagtcatttanaaatatgtttgtatttggccatttactgtaatcacatttttatatctgtacaatgacactttttgcagttgtagggtagtgtgtaacactgtccatcttgcatcattgaaactactacaatgatactatcatttaataatattaatattacttgaaatagactaagataaagaaaaggggtctgtatgatgtgcagttttgtgcctttatgtatttgccttgtttgttgaatgtgtgaaaatctgtactgtggtttttcctataatagagagtagagctgtgtattaaattagactgtgtctctctgatacctgtacactactgagaatagcatggttttggccatgtataccaattttcaaagttctaatgacatgccatgtgtttttggttttttacatttcattttaaaatttgagtatcaccacacattaattaatactcctgtagtagataagctgtctttaaataattccannnnnnnnnnnnnnnnnnnnnntactttgaatttaatgttgcgcttgtgcactnnnnnnnnnnnnnnnnnnnnnnnnnnnnnnnnnnnnnnnnnnncttttaagaagaaaaaaagataggacaaagtatttgaagctcttaaaatgtacatattttggttcttctatctcaaattatttaaaatgcataattcacatttttgtaataattctatgcaattttgtggcatgatgtttcttccnnnntgtaattttatgtgctttcatcacaaat

SEQ ID NO: 9850 - DNA, 638 bp, Macaca Fascicularis
  misc_feature (1)...(638): n = A,T,C or G
gggcaagtagaggtgagaacactttccccacctccctccacagacactcctgaggaccctgcatcccacacactgcctggtgtgtccatagatgagaggatcaggcctcagcatttcatctgtgaaagaggtgtggccctgggttagaaaggagggcaggaggcatggaggaactggggggacacccagatggtgcatatggtttgcacacctgagcctgtatggtgaccacttcgctcctcgcccactaccctccaatctatcattccctactctctacggccaaaatatcntgagcaaggntgacaaccccaccccaccatcccaactgcaagcagccagccccaggagttcctctggcccccacaggcatggagctcctagctgctgggtacagctcaagaggggggcagctccctcaggctaagctgctgccgttcactgggccagccctgcttccaacccccacttctctcaaccccactctcccaggcccctttctactcaacgggtgcagccactggtgctttgaagccttttgtttttataagatggtttttgcaaggggaccaggttctcttttcactgggaccttgcaaggaggggagtgctctcctggtttctgtgcaggtgggtga

SEQ ID NO: 9851 - DNA, 731 bp, Macaca Fascicularis
  misc_feature (1)...(731): n = A,T,C or G
cgagaggatgtatgtggctggaccagcttccccaccctcattaggacaagaaactgtccagcacttngctttcagttcaacgcacaaacactcctggggcctcacaggggcagagcttcccctgggcctgcagagagactcctgttagcagcgatgttctcatgccgcaggnnnnnnnnnnnnnnnnnnnnnnnnnnnnnnnnnnnnnnnnnnnnnnnnnnntctgtggccccaacgcattctgctggggctctgccctttccaggttgagaggcctgtgggagaaacagactcccctcctgggtttccacactcaggagtcagaggactggctcctgtgaccagggcccctctcccctggaagggaaaggggtctggggatgggagggtgcaccacagagaggagatgatgctggccatggccatcttctgtgggcctcttcccagacannnnnnnnnnnnnnnctaactcgcctccnnnnnnnnnnnnnnnaggcagcctccagggcaggaaggaccctgtgctccccacccctcatcnnnnnnnnnnnnnnnnnnnnnnttaccctgtgctgtgaatgtaatggtgggccttggccctgcccactctgatttgcattttcatttgtctttgtttacacatccgtgcactgcctgtaagagtcgattgtcacagcttcgactgactttcggatggtagagtgtgtgcactgactnngagtcgaataaac

SEQ ID NO: 9852 - DNA, 744 bp, Macaca Fascicularis
  misc_feature (1)...(744): n = A,T,C or G
tatgcagggggtcgtggctcatnnnnnnnnnnnnnnnnnnnnnnnnnnnnnacacaagtaactattcccaaagatttggctggatctattattggcaaaggnnnnnnnnnnnnnnnncaaatccgtcatgagtcgggagcttcgatcaaaattgatgagcctttagaaggatccgaagatcggatcattaccattacaggaacacaggaccagatacagaatgcacnnnnnnnnnnnnnnnacagtgtgaagcagtatgcagatgttgaaggattctaatgcaagatattttttcttttttatagtgtgaagcagtattctggaaagtttttctaagactagtgaagaactgaaggagtcctgcatctttttttttttatctgcttctgtttaaaaagccaacattcctctgcttcataggtgttctgcatttgannnnnnnnnnnnnnnnnnnnnnnnnnnnnnnnnnnngttttagttccttacaaacagggttgggggggggannnnnnnnnnnnnnnnnnnnttgaaattttgaaacagcagcagagtgagtggattttattttttgttattgttggtggtttaaaaaaattccccccatgtaattgtgaacacctgctttgtggtcactgtaacatttggggggtgggacagggaggaaaagtaacaatagtccacannnnnnnnnnnnnnnnnnnnnnnnntgtgcagaatgtaatgctcttttgtaagaaacgtttt

SEQ ID NO: 9853 - DNA, 450 bp, Macaca Fascicularis
ccaaacctcccttcccttttgtgtcaaagggagtgaggagtaaggaagagagcaagtgagtgtgcgtccctggaggggttgggcgccctctggtgttacaacctcgagacttgtctcatgcctccatgcttgctgatcaaggacagactgcaggaacttggcccatgtgggaacctagcctattttggggggtaggacccacagatgtcttggacagttttggggggagggttttttaattttttaaaaattttgcctccgtttgtgaaaggggagggggaggggaagagtaaacagataacaggtggtggtacctggttgggggaggggggcgtgcactgccatatcttttttttttttcctaattgggggtttctctttctgtccggtgtccggactatcctaattggagtttgaggcccctaagctggcatcaaccccaggccatgc

SEQ ID NO: 9854 - DNA, 740 bp, Macaca Fascicularis
  misc_feature (1)...(740): n = A,T,C or G
gagtgccannnntggcatcaccnnnaagggctggagccgcctcgccattgctgtggcccacagctcccaggtccgcgtcctcaatctggattacaaccccctgggtgaccatgtggcaggaatgctggctgtagctgtggcctccagtcgtacgctagaggtcctagacttggagggcacagggctcaccaaccagtcagctcagaccctgctggacatggtagaaaattaccccacagctttgcggagcctggtgttggctgagaacagcattagcccagagctgcagcaacagatctgtgacctcctctctgagggagaggaggaggaggaagtggcaggaggggctggcgacacccaggaatgggagagagggcgggagcctgctgcccaccagaggggcagcagctcctggatgtgtcccagtgatcccagctctcagatggtgctaatgacgtcaggactaggggacagtctgttggctgagaccgagatgtgactctccactgggcctctgcacaccatttcacttgtctattgtccaagccccttgccccagatatcaggctcaggccctggggcttgggagggaactggggtcaggggctacatgggggctctggcagctcctggcagtgtggtggnnnnnnnnnnnnnnnnnncgtgactgagcaacagccttgggggtgcacttgaacccaaggcaatgcctttgannnnnnnnnnnnnnntgcaacccg

SEQ ID NO: 9855 - DNA, 735 bp, Macaca Fascicularis
  misc_feature (1)...(735): n = A,T,C or G
caaggcaacaagtaacagaaattatatttgtttaaaagcagtcagtactcttattgattcacttaagaaaactcagcctgagaatgttgatgnnaatacctgggcacaagtaatcgccttatacccaactttagtagaatgcatcacctgctcttcttctgaagtctgttctgcacttaaagaggcactagttcnnnnnnnnnnnnnnntgcaaccaccagcatccagagttcaaaatggagaatcttgaccggctacaatatatttgaaagaaggaagatattctaaaaaatgtttgctcctaagtgagtcttctgtgagaaggacatttcttactgcaaataattcttggcagctgtcgttggcctcctttaaattgtacttacctaagttcagtaattcatattacaagcttgcacatcaacaaaggcnnnnnnnnnnnnnnnnnnnnnnnnnnnnnnnaaattaaactgatgggagggataattaacactacaatatacatgctatcatatctccaattggtgatttaaagtgagcttatgtacagtttgtggtgtatgtggttaatgatgtactttttaaaaagaaagaagagatatttcaattcagtcagatttattagnnnnnnnnnnnnnnnnnnnnnnnnnnnnnnnaaaattgtactagaattttatgcaagatggtactgtaacattccatattatctataaccagccttgtaacaaagggaac

SEQ ID NO: 9856 - DNA, 690 bp, Macaca Fascicularis
  misc_feature (1)...(690): n = A,T,C or G
tgtactatcatagagatcacatatgtctaacattaaagctcacaagagannctgagatagggaggtacacttacatttactannnnnnnnnnnnnnnnnnnnnnnnnnnnnnnnnnnnnnnnnnnnnnnnnnnnnaggtcacnnnnnnnnnnnnnnnggggttcaaacctacaaggccttatggccctaggtattactctccatattccatattcggttgaggagcagatccagagaggttaataaacttgtccaaaggcatgcatcgaggaatggcagagccggggggctatgtgacctaaaaactattgcccctctgttttgggatagcccccaactcacacactcctgcccttggccttgaccgccgcatacagattgtttctaccctcttcacctccaacttcattggcatctgcttcagccgctccctccactaccagttctatgtctggtatttccacacactgccctacctcctgtgggccacgcctgcacgctggctcacacacctgctcaggttgttggtgctggggctcatcgagctctcctggaacacatacccctnnnnnnnnnnnnnnnnnnnnnnnnnnnnnnnatgccatgctgtcatcctgctgcagctctggctgggcctgcagcctttccccaagagcacccaacacagcaagaaagctcactgaaatccac

SEQ ID NO: 9857 - DNA, 1278 bp, Macaca Fascicularis
  misc_feature (1)...(1278): n = A,T,C or G
agagataactttagtttgcnnnngtaagtgaaactgagtcatgggcgcatttcagaagagaacgttccatataannnnnnnnnnnnaggactcctgnnnnnnnnnnnnnnnnnnntccagaaactttgccaacctgttagtgtacacacactgaggggagnnnnnnnnnnnnnnnnnnnnnnnnnnnnttattatattcttggtcttcatttctgatcaagtaaatacaccagcagttgtnnnnnnnnnnnggtttttgtacttaattatatggtgatttttttacttnnnnnnnnnnnnaacagaaattgacctccccaccatgtgtttaatatttcactgcttttacttttgtcattttcttgataatcgtaagccttgagagtgtttgtgaaaaagttttatttcctgttatgtatacataagtaaatgaaaattcttcagaaaaagtttgataaattgaattgtggttatgaaactaatttgcattttnnnnnnnnnnnnnnnnaaagctgtgatagattccagatttgctttttgatgttttcctctgctccagctccaagaagtcagcacacctgcattttagctctnnnnnnnnnnnnnnnnggctgcgtgtttaagaatttcattgtttaaccggctggtgtgagaagtcttccgttagcatagagtggaaggagtactattgtttggttggttttggttttttgtttgtttgtttgtttttgcttttattgccaaagaggtgcttgttttaaaagtatgtttaataaaatgaaattctaaagttagaagnnnnnnnnnnnnnnnntttgctctcttggtcttggtagccctattgtatcattgcagannnnnnnnnnnnnatgtgtgtattatatnnnnnnnnnnnnnnnaaacattgtgtatcnnnnnnnnnnnnnnnnnnnnnnnnnnntaaaatgcagttaccagacccatcactttaaatccttaaagttagaagctagcaaattttctgtagtgcagaatgtttattgctgtttttgtgtttgaatagtataatgtttgatgcctctcttctnnnnnnnnnnnnnnntcattgactgtgaatctgtatattattctaatggatacagataatgatcttttctcttgtgaggtatcttcatttnnnnnnnnnnnnnnnnnnnnnnnnnnntaagagtctctctgtatgatgaactacatggaaaagacttctgtggacataattctgactgaaacccatgaagtgacttcagtatgagaatgtta

SEQ ID NO: 9858 - DNA, 702 bp, Macaca Fascicularis
  misc_feature (1)...(702): n = A,T,C or G
gtggggatccatgcntgcaggagaggtggagtcaccctgggacacagggtctttgtgtgtggagatgggccaatcggggtggtctctttgctcgtggccaaggcaatgggagcagctcaagtagtggtgactgacctgtctgctccccggttgtccaaagccaaggagattggggctgatttagtcttccagatctccaaggaaagtcttcaggaaattgccggtaaagtagaaggtctgctggggtgcaagccggaagtcactatcgagtgcacgggggcagaggcctccatccaggcgggcatctatgccactcactctggtgggaccctggtgcttgtggggctgggctctgagatgaccaccatacccctattgcatgcagccgtctgggaggtggatatcaagggcgtgtttcgatactgcaacacgtggccagtggcgatttcgatgcttgcatccaagtctgtgaacataaaacccctcgtcacccatagatttcttctggagaaagctctggaagcctttgaaacatttaaaaagggattggggttgaaaatcatgctcaagtgtgatcccaatgaccagaatccctgatgtttattggctttgccctcatccgcacagtatcgggatctcagggcacaatggctggacaggggtgggctttcatgcagaactttctctcttgaatgtaagaat

SEQ ID NO: 9859 - DNA, 750 bp, Macaca Fascicularis
  misc_feature (1)...(750): n = A,T,C or G
cataatatgtatctccaggnnnnnntgcctgtaatttttatttatttagggagttacataggtgatgggggaaattgttaactacctttaattttcctgggaagtcaaggttacatctcgcagaggttgttttgagaaaaaagggcccttctgagttaaggagccataattctgtgagtgatcaaaagaaagaaaaaagaaactgttacagtatgattcagatcatttaaaaaagcaaaatcaagtgcaattttgtttacaaatggtgtatattaaagatttttctatttcagatgtactttaaagagaaatattagcttaactcttttgacatctgctattgtgacacatcccattgctggcaatgtggtgcacactccaaaacttttaactactgttttgtaagcctccaagggtggcattgcagggtcctaggcaatgttttgcttgcctttatgcagagaggtgctccaagttccaagattgtgcttgagcaccatgctagaggaactgtaatgcttcagaagtggtagcttatacaaannnaaacnnnnnnnnnnnnnnnnnnnnnnnnnnnnnnnnnnnnnnnnaggccctggactgctgctcattctttaggatggactgttctggtatctggtattggtttagannnnnnnnnnnnnnnnnnnnncaaggtgatgggattcatttgaagcactctatttctgttttaatggttttatccaattttgccttcccaaagatttt

SEQ ID NO: 9860 - DNA, 966 bp, Macaca Fascicularis
  misc_feature (1)...(966): n = A,T,C or G
ccaagctgaanngtcagaaccaaattgcagtgggatgagatccgggagcgattgtttgagcaggtcatgaggattgggctggacnnnnnnnnnnnnnnnnnnnnnnnnnnnnnnnaccacggcctcccagggtacaatgcctggaggcgcttctgtgggctcccgcagcccaacacggtgggcgagctgggcacggtgctgaggaacctggaattggcgaggaagctgatggagcagtatggcacgcccaacaacatcgacanntngatgggcggcgtgtctgagccccnnnagcgcaatggccgcgtgggcccactcctcgcctgcatcannngcatccagttcaggaagctccgggatggtgatcggttttggtgggagaacgagggtgtgttcagcatgcagcagcgacaggccctggcccagatctccttgccccggatcatctgcgacaacacgggcatcaccaccgtgtctaagaacaacatcttcatgtccaactcgtatccccgggactttgtcaactgcagtacacttcctgcattgaacctggcttcctggagggaagcctcctagaggctaggtaagggggtgcagcagtgaggggtatatctgggctggccgattggaaccacggagatctccttgccctaggtgagcccagccctgttctgggtgcagctgagaaaatgaatgactagacattcatttgtgtgctcatgtatctgcaaagtatataaattggcatttcatgtgtgtgtgttgtctgaacatggggagtgtttcatgggttatgtgtatgtgccatttatgtgagtgtgtgtttgtgccgatgagaatactgagtatgtggaaggcagcagaacggactggtgaggcgcacagctcaggaattagactgcctgggttccaatcctggctctgtggcttgctagctatgtgaactgagcaaattaccctcataaa

SEQ ID NO: 9861 - DNA, 738 bp, Macaca Fascicularis
  misc_feature (1)...(738): n = A,T,C or G
caccnnntgcaccagcagacagaggcagtgctgggagagtgtcgggtgcgtttcctctccttcctggccgtgggcagagatgtccacacatttgcattcatcatggctgccggcccagcctccttctgctgccacatgttttggtgcgagcccaatgctgctagcctctcagaggctgtgcaggctgcgtgcatgcttcgctaccagaagtgtctggatgcccgttcccaggcctccacttcctgcctcccagcaccccctgctgagtccgtggcacggcgtgtagggtggactgtccgcaggggtgttcagtcgctgtggggctccctgaagcccaaacggctggggacccataccccatgaagaagcctctgccttccctccacctgcttgtgtcgggccccagggaactacagggtgtgggtcaggtaggggtctagaggctattcctaggccttaggcctcccaaatatgcccctccccagtagctagggttccctgcctaggagctggggagggagagatctaatcccttcaaggaagtcataacactggtgtggtaacaagaggagcaggaagcaaggccagccctggctctccatccccatgtgtttcaggtggaacaggaggaactggcccaggccaggcctcatactcctgggacccagcaggggcaggaggaagggactggtccaggcatgggtcccttccctttgctccgtgggcacctctactgta

SEQ ID NO: 9862 - DNA, 736 bp, Macaca Fascicularis
  misc_feature (1)...(736): n = A,T,C or G
gcaacannnnnnnnnnnnnnnnnnnnnnnnnnnncactgagatcggcccgcggatgacattgcagctcatcaaggtccaggagggtgttggggnnnnnnnnnnnnnnnnnnnnnnnnnnnnnnnnnngacagaggaggagctgcaggccannnnnnnnnnnnnnnnnnagaagnnnnnnnnnnnnnnnnnnnnnnnnnnncagcaggcccagaacgtgcagcgcaagcaggagcagcgggaggcccacaggaagaagagcctggagggcatgaagaaggcacgggtcgggggtggtgatgaagaggcctctgggatcccttcgaggacggcgagcctgggattgggtgaggaggacgatgaccaggaagatgatgacatcgagtnnnnnnnnnnnnnnnnnnnngaggcgcctagtgaagacctgttccccgaggccaagcggaaacggcctgccaagtctccaggccggaagnnnnnnnnnnnnnnnnnaggcaggggtcgtctttgtgnnnnnnnnnnnnnnnagcccaaggacaagccccaggggtcccagaccaggcgggagcccagaggggcttcccgggatggtgggcgaggccagggccggggccgctcacggaagagagtggcctgagcccaagccgcaccggagcannnnnnnnnnnnnnnnnnccagattggggcccgagagacatggccctcggtttcctttcgtaaaggagtcgtgtcccccac

SEQ ID NO: 9863 - DNA, 156 bp, Macaca Fascicularis
  misc_feature (1)...(156): n = A,T,C or G
gtaagatgactggccccacggactcttgttaacagtcacttaggagtcagttctcagtgataaagcgtgcactgtgcagcccgccatggccgtgtagaccctaacccggagggaaccctgnnnnnnnnnnnnnnnctggggcaccnnnaaagcatc

SEQ ID NO: 9864 - DNA, 773 bp, Macaca Fascicularis
ttccaaagctccaaaaaaagatgttattaaaatgctggtgaatgataacaaggtgcttcgttatttggctgcactggaatcccccatcccagaagacaaagaccggagatttgtcttctcttactttctagctactgacatgatcagtatctttgagcctcctgttcgcaattctggtatcattggtggcaagtaccttggcaggactaaagttgttaaaccatactctacagtggacaaccctatctactatggccccagtgacttcttcattggtgctgtgattgaggtatttggtcaccggttcatcatccttgatacagacgagtatgttttgaaatacatggagagcaatgctgcccagtattcaccagaagcactcgcgtcagttcagaaacatgtccgaaagctagaagcgcctgcttcagaatcagaaagcaagcaaactgaaaaggatccaggtgtgcaggaattggaagcattaatagacacaattcagaagcaactgaaagatcactcatgcaaagacaacattcgtgaggcatttcaaatttacgacaaggaagcttcaggatatgtggacagagacatgttctttaaaatctgtgaatcacttaatgtcccagtggatgactccttggttaaggagttaatcaggatgtgctctcatggagaaggcaagattaactactataactttgttcgtgctttctcaaactgacctgctgatgagaaaatgcaagacaatttctgatactggaattatgcttgaa

SEQ ID NO: 9865 - DNA, 651 bp, Macaca Fascicularis
  misc_feature (1)...(651): n = A,T,C or G
caggagacctgcctcntctctccaannnnnnnnnnnnnnnnnnnnnnnncgcttcatgtacctactctgcaggactgaggagtttgctgtgtggtgtgaaaaccttaggggtggggatcgggnnnnnnnnnnnnnnnngtgacagacttaaccgttttgtatgaagttcgtttgccttatcaaccttactgtttgatagtttactgtgtctaatttcgccgcccgtactttttaaaccatgtctctagtgatccctgaaaagttccagcatattttgcgagtactcaacacnnnnnnnnnnnngcggcggaaannnnnnnnnnnnntcactgccattaagggtgtgggccgaagatatgatcatgtggtgttgaggaaagcagacattgacctcaccaagagggcgggagaactcactgaggatgaggtggaacgtnnnnnnnnnnnnatgcagaatccacgccagtacaagatcccagactggttcttgaacagacagaaggatgtaaaggatggaaaatatagccaggtcctnnnnnnnnnnnnnnncaacaagctccgtgaagacctggagcgactgaagaagattcgggcccatagagggctgcgccacttctggggccttcgtgtccgaggccagcacaccaagac

SEQ ID NO: 9866 - DNA, 457 bp, Macaca Fascicularis
ctccaaggagccaggccaattggaggatgaagaagaggagccttcatcattcaaggccgacagtcctgctgaggcctcccttgcatctgaccctcatgaacttcccaccacctctttttgccctaactgtattcgcctaaagaagaaggttcgggagcttcaggcagaattagacatgcttaagtctgggaaacttcctgagccccccgtattgccaccacaggtactggagctcccagagttctcggaccctgcaggtaagttggtttggatgagattattgttggagggcagagcacgcagtgggctgtgtggagggtagcctaaagctctctgtggaaaccaccttctgggagacctgaggagtgtaacatggaggcagctacctccatgggtgggagcccaggtcctcagtgtctctggcaggcccgtcggcagctctgccaggtactctgtg

SEQ ID NO: 9867 - DNA, 733 bp, Macaca Fascicularis
  misc_feature (1)...(733): n = A,T,C or G
gcaccagaccgannncagcgtgggcttcgacacnnnagacgaccnnnnnnnnnnnnnnnnnnnnnnnnnnnnnnnnnnnnnnnnnnnnnnnnnnnnnnnnnnnnnnnnnnnnnnnnnnnntgccctcgagagggacgacttcgagatcgttgtcatcctcgagggcatggtggaagccacgggaatgacatgccaagctcggagctcctacctggtagacgaggtgctgtggggccaccgcttcacgtcagtgctgactctggaggacggcttctacgaggtggannnnnnnnnnnnnnnngagacttttgaggtgcccacaccttcatgcagtgctcgagagctggcagaggctgcggcccgccttgatgcccatctctactggtccatccccagccggctggatgagaaggtggaggaggagggggcgggggagggggcgggtggggaagctggggccgacaaggagcagaatggctgcctgccacccccagaaagtgagtccaaggtgtgaccagcttcctccggacccctgtggcagaccgggggccagacacaggtacatggggaactgcatatcggaggagaaggaggaggaggaggagaaggcaggcaaagcccctggaaatgtgctaacgttggaaagtccccatcccccagaatctcaagtctagaatccagtatggaagggaggggtcnnnnnnnnnnnnnnntggagggnnggccaggtgaa

SEQ ID NO: 9868 - DNA, 835 bp, Macaca Fascicularis
  misc_feature (1)...(835): n = A,T,C or G
tggtcattgtnnnngatgccagtctnnnagatgcaaaaaaagagnnnnnnnnnnnngtggtggttctaccaggaggtaatctgnnnncacagaattnnnnngannnngctgccgtgaaggagatactgaaggagcaggaaaaccggaagggcctgatagccgccatctgtgcaggtcctactgctcttttggctcatgaaataggttttggaagtaaagttaccacacaccctcttgctaaagacaaaatgatgaatggaggtcattacacctactctgagaatcgtgtggaaaaggacggcctgattcttacaagccgggggcctgggaccagctttgagtttgcacttgnnnnnnnnnnnnnnnnnaacggcaaggaggtggcggctcaagtgaaggctccacttgttcttaaagactagagcagcgaactgtgatgatcacttagagannnnnnnnnnnnnnnnnnnnnnnnnnnnnnnnnnnnnnnnnnnnaaacaatggtaggttaatgtgttcagaagcggctgtcactactgcttttgcggaagtatagttgtgaactcacaactacacagagatttctcagcctacaaannntgtctatacatttctaagccttgtttgcagaataaacagggcatttagcaaactactgatcattccttgttttgtccctcatttcttttgtgaaattaaattccatatcaccttcatttgtagctcttaactgtccctatagcactgaaatagaagaacagtgaacacattttacacagcaaggaggaaaggcatacaaggagaattttaagaggcttattattttctctgctta

SEQ ID NO: 9869 - DNA, 741 bp, Macaca Fascicularis
  misc_feature (1)...(741): n = A,T,C or G
caggaaggatgacnncnnnnnattcnnnnnnnnnnnnnnnnnnnnnnnnnnnnccaactggtttctattacagcagtccccacaacatcaaagaaccaccacaagtcaatagatttgagtttaattagaaaaatgtggtgtttcctttgagtttatttcttcctaccnnnnnnnnnnnnnnnnnnctggtgacttgtcccttcctagacacctggttgattgtcctgatccctgctcttagcattccaccaccatgtgcctcgcccatttctaatttcattgtctttcttcccacactcgtttcttccccatgacnnnnnnnnnnnnnnnggagagtgctcaactgggaaggagaatgtagaagtagccctagggatcctttttnnnnnnnnnnnnnnnnnnnnnnnnttctagcttcattgtaaacaatctaggaaataagcccagctgctttctagaaataagtgtgaaggataaatttttgttgttgacctatgaagatattagagtttaccttcatnnnnnnnnnnnnaaatcaatgtataatctagatnnnnnnnnnnnnnnnnnnnnnnttgaggaccaaccaaaatannnnnnnnnnnnnntcaattgacaaattttggcctttctttaataagacttaatatgtacatagttttttcaaatattaaagatcttttaactgttggcagttgtgatttacagaatcatatttcatatgctgtgtagtttataaga

SEQ ID NO: 9870 - DNA, 732 bp, Macaca Fascicularis
  misc_feature (1)...(732): n = A,T,C or G
ctccttggggctcccgnnnnnnctaatcccnnnggactgtggatgaagccagacagaagggcagctccaggtagggggtcaggttccacagagggcacccaccaacagaggccagtttcaaagtcagctgaggggctgaggggtgggccccatggtgaacacaggttgctgcaggctctgacttctccctggggtaaccaccctcgcctgggcaggggcagccaaggctgggaaatgaggaggccatgcgcggggtgggccagctttctttggggcgtcagtgagaactctcccagttgccctcggtgggatttccacctggcttttagctgcagagagggaagggaaagtctgaggccagcatgagggcaggccttggaacctgagtccccaatggcagccctgtcccatctgtggccacgctactcgctcctctcccaacaactcccttcatagggacaaaaatggcaattgtaggccaggcacgnnnnnnnnnnnnnnnnnnnnnnnnnnnnnnnnnnnnnnnnnnnnnnnnnnnnnnnnnnnnnnnnnnnnnnnnnnnnnnnnnnnnnnnnnnnnnnnnnnnnnnnnnnnnnnnnnnnnnnnnnnnnnnnnnnnnnnnnnnnnnnnnnnnnnnnnnnnnnnnnnnnnnnnnnnnnnnnnnnnnnnnnnnnnnnnnnnnnnnnaagcggaggttgcagtgaactgagattacaccactgcactccagct

SEQ ID NO: 9871 - DNA, 705 bp, Macaca Fascicularis
aatgaaagtgtggaacagttacctaacctatttcacatgagcgttttgtatacaactattttgatctacacttgatgtctgagcagtaaacagaaatagctaaatgtggctcacgaagtatctcttggtttcttattcagcagcagagttggtgactttgacaactggactgcagagaaacatgttgatcaccttttaatttttattggctgtctgccaaatataaatacagatgcaaaattcagtaatgggagatctataacccaacatgggtcactactcgtgaaatgtgactttctcccaccagtaattgcaattaggtgataatacctaattatgtttcctaattaaagataaattgctacttgattaaaaatcctgcccttcacctttgggaacaaaggttaagagacacagttgggtgaactctcaaatttattggcatttacacaaagccccaaccaaggaactgaagttttcatcatgtgagagcagcacagcccaccatttaaaaatatttgtatatctttctgcaaatatgactctggatagtgaaaattgaaaaacatatgccaaccccgagcaagggaactcctcaaaaaatcatgcagcggaaccttgtcaggtagagaagcccgtgcatgaaagaatttttttaatgtcttgttttgcgtgtgtgttttttgtttttgttttttaagaact

SEQ ID NO: 9872 - DNA, 542 bp, Macaca Fascicularis
  misc_feature (1)...(542): n = A,T,C or G
cccccccccccactcccgtccttgggtagggtacagtgaggtggggtgttgggtggcctgctgctcctgctgctttcgcctagagtcccggcctgggcaatcacgtggcggtcactcctggatgtgctgtcctatccagcctctcacagctgccacccgggtatagacacctgggaagtggggccggccgcagccatagccccagctggtgaccccagttnnnnnnnnnnnnnnnnnnnnnnnnnnnnaggccaggggtcccccagcgtcaccctgttggggagagaagcgggggttcagagtctggtacctcccctacagcagcccttgggtcattggcccccgtaggggtgaccgtagtgagtggcttcccttggaagctgcattttcactatctggaaaatgggctcaatgcaaaggtggcagacattgatggacacccgccacgtggtcccggagtggaatggggcctcccgctgcagcctctgcctgctctgccgttgaggcccaggggtgggatgcggtgggtacccaataaacgg

SEQ ID NO: 9873 - DNA, 751 bp, Macaca Fascicularis
  misc_feature (1)...(751): n = A,T,C or G
cacaggatgaggtgnnngagttccctggagtcactgctggacacagggatttagacagcagagccatcacactggttacaggctcttctnnnnnnnnnnnnnnnnnnnnnnnnnnnnnnnccaccagccaggccacccagactgaacctgtctggtcagaggctggctggggggactcagnnnnnnnnnnnnnnnnnnnnnnnnnnnnnnnnnnnnnnnnnnnnnnnnnnnnnnacaaaggctttgccaaatgggaaaatgagaagcccagggtgcatgctggtgtggatgttgtagaccggggcacggagttcgaacctgaccaggatgaaggagaagagaccagacaggatggtgaggatggctgacttcaggctgcggaaactgaaggcaataatgtgggctttcggaagggcaagatgagacactctgaagaaagctgtgactctcaggaagnnnnnnnnnnnnnnnnnnnnnnnnncactgccttgggacactgtgggatctccatgtttggactatgggacagagaattgaccctaactatgaactatttatttcctgctcccctatccctagttaagtgccacaaagactgtgttatgtagtcagtacttttttcatgtatctttctctagagccatttatatacgggtgaaacgaaagcttttttgcatgtacttgatactcattctgtaaactcaagacttcgctttttttgtgagaatatcctttcaatacttttataaac

SEQ ID NO: 9874 - DNA, 776 bp, Macaca Fascicularis
  misc_feature (1)...(776): n = A,T,C or G
accnnnnnnnnnnnnnnnnnnnnnnnnnnnnnnnnnnnnnnnnnnnnnnnnngannnntcaggtgctgaagtccacaggggatgtggccggagggcgggccctgtacgaggggtatgcggcagtcactgatgcgcccccggagtgcttcctcaccctcagggacacggtgctgctgcgtaaggaatctcggaagctcnnnnnnnnnnnnnnnnnnnnnnnnnnnnnnnnnnnnnnnnngcttctggaatacgaggcctcggctgctggcctcatccgatccttctccgagcgtttcccagaggatggacccgagttggaggagatcctcacacaactggccannnnnnnngcccgattctggaagggccccagtgaggccccnnnnnnnnnnnnnnnaggaagacgtgtggcctctcccctaactccaagaaaccannnnnnnnnnnnnnnctccattcgtgtgtgtttttaggggctaggggagggggaggggcaggatcttggaccttggtactacctcagctgagggtggtgacactaaccccttccatttgtcagcactttccagcttgccaagtgcttcccctctgtgatctcatttcatctgcactgccatacctggagtgagcaagacagggctcaccatcctgtctaccagatgaggaaatggcagttctgagaagtcactggtctagattccacaggtggcacgtgacagctagggttcaaaatgttctcacctnnnnnnnnnnncctcacataattaattttataa

SEQ ID NO: 9875 - DNA, 527 bp, Macaca Fascicularis
  misc_feature (1)...(527): n = A,T,C or G
aatatccgtgaagaagctaaagnnnnnnnnnnnnnnnnnnnnnnnncgatacttccctgggtttgactggttcttcnnngatcctattacaagcagtggaattaaatttgcaaatgacgaaaatgtgaagcacatctcctgtcccctactcatcctgcacgctgaggacgacccggtggtgcccttccagcnnnnnnnnnnnnnnnnnnnnnnnnnnnnnnnnnnnnnnnnnnnnnnagacttcaaagttcagtttgtgccctttcattcagaccttggctacaggcacaaatacatttacaagagccctgnnnnnnnnnnnnnnnnnnnnnnnnnnnnnnnnnnnnnnnnnnnnnnnnntcccagcatgtgatcagagccggtgtgactgaagccaataggtgacacagtcattaaagagcagcagacaaaactaacccaaaggcagctgaaagtggannnnnnnnnnnnnnnnnnnnnnnnnnnnnnnnnnnnnnnnnnnnnnnnnnnnnngaactgccctgtgc

SEQ ID NO: 9876 - DNA, 672 bp, Macaca Fascicularis
gtggagattcttaagtggaagataggtactgctcagaacaaagctacttggaatcagcacaacatgaagcttttcgtgagggcttgcaggccgctgctgagtggcagtttacagaagaggtcgcggggtgagcctcttaggacagaaaacagaaggcagcagtgcacctgccacccctttgttggtgcgagctgctccttgagcctaaaaagtaggctttattcatcccttctgttcatttaccaacctgggggattgatatgaccagggaaaacattcctaaaccaggaagctgcactagccgatcaggcttggtaaggtctcggccacagctgggtgctaggagtaccccctcgataggcacagcacaccactgtcctttcgctgcactttcttcctgccttaggtaggtgggcttgcccaccatagtttgcttttgtcgtggtttggcaaggttagaagacctcgacctctctgtcttgctgggaagtgcttactctctgggccactgctgcagaagatggtggtacttgtcatgggtttggaagacacagccatctgcagtagaggcagcctatcccattgcaaggagaggaacttaatggagtaattattctactcttctttttatatacagaacatgtttatttaaatattctaaattggattttc

SEQ ID NO: 9877 - DNA, 739 bp, Macaca Fascicularis
  misc_feature (1)...(739): n = A,T,C or G
atctggttaggtgtgatgtgtgtatatgcnnnnnnnnnntgtacgcatatattctctacataggtatgtatgatatattcatatatacctgcagtccacttgattatcagcaaaatggtnnnnnnnnnnnnnnnnnnnnnnnnnnnnnnnnnnnnnnnnnnnnnnnnccttactctgaagcctgtttctgatctggagccacagtctgtctgccagttcatctcagtcctcgagaaaggccctttaaatatgtcacttccccattttcctttaaccatgggttttgggagnnnnnnnnnnnnnngagaaagatgactgcttccaccagggtggaggcttccaggtctgcatgatggggcccattcctggccagagggtggctctgggagcagttgtgccacaggcttgctggggcagaactctaacacttgcagaaacagagcttcatggcttgcttaaattatttagctggaatattttgaagtgtcagataatgtgatgtatannnnnnnnnnnnnnnnnnnnnncattgtttttgcattatctgtattagtgtttcccattgctagcccaaataatcaagaccagactgtttcttgtcactnnnnnnnnnnnnnnnnnncctttccactggatttatgtttatttctgctgctgtgaaaccccaaagtaatgcagtaggttttcattgaaaattgtttaattctattactattattgataattatttattgtaata

SEQ ID NO: 9878 - DNA, 759 bp, Macaca Fascicularis
  misc_feature (1)...(759): n = A,T,C or G
agctcagtagtgaagnnnaagccctcgagctatgggttcgtgtcccgggttccgtgcattcgtggaaagcggcgtagccgtgtgtgtagccgtgcgtgcgtgtgatggttctgtggttgcagggaggggaaacggtctgttatacataaccctgtatatatgtacaccaacatgaaacttttatttaacnnnnnnnnnctggtaaatatgatttttgtagctttttgtaaattatttaaagtgatgtaaaaaatatttttggaaaacaccgttgttcgattttgtagggtgttcctaactgcagtctctgtgttatgcatacaagtcttcgattagaaaacatttggttcttatcatcgcagccagnnnnnnnnnnnnnnngatgctttttagttggttattggtgagaatgccggcggtgactgcagtggtagcctgaggaaggccgagctgccctccctgggaatcgctcagatgcccccgagatgtccgttgggaagctcccaggacagcactttttatacagaggacacccccttggccccacagtccttggaggccagagcacacctgaaaactgcaattacannnnnnnnnnnnnnnnnnnnnnnnnnnnnnnnnnnnnnnnnnnnnnnnnnnnnnnnnnnnnnnnnnnnnnnnnnnnnnnnnnnnnnnnnnnnnnnnnntctgcagcccagccctgggcctgggtgggttcatgtccaatcttgttcaatcactagatgattctaacatcga

SEQ ID NO: 9879 - DNA, 977 bp, Macaca Fascicularis
  misc_feature (1)...(977): n = A,T,C or G
attttagctttggcttcagggagtgacagccatcacaaatagccatatnnngctctactnnccaacataccaaattctacactgttgttatttcatgagaagtgaatattgcagattggggggattctggttgttaaggaacttacactggggagctttactcttctgtgtcaataacgtgactacgtgttctccagattagccacacgtgcaaacatcagtgtccttctagctttagccaagagagaaaccagtcccagggaatgaatggtggtctccccactcccggcagcactttgggcagcccataagctatgcgagaacgtgaacactcacctgtctgggctcaccttgctccgtcacggttctcacctgccacataaacaggaagaagccagtgaccggaacagctctagccaataacaagtcagaatagaaatgttctttatattaccagaaaacatgggcttggcctaagttgctgtgtcctaacnnnnnnnnnnnnnnnccccaccaaacccccggtactaagaagccatgagccttttggacattcaccttttccttgaccatctggagtctggggcaacttaaggaggcaccacacagtggtgtaggcacatttccacacgtaggtgtccctggcttttgtggccaaagctggtgttatggtcaacaacgggccagggcctgtgggacactgactttgaaagtggcaaaatggagttttcacaggctgtgcgggaacaggacagctcgcttcatctaacaatctgtttccttaaaaaaaaaaaaaaaaaagacagaaaaatatttcataagctggtgtcagtggacagtttaagcacttaaccatttctctttcttcttatggatgtgaactgtgctgtggataaatcatttgtatttcttgaatgttctctatgattaacagttattaagtcggttgtgtatatgtgtaactaatgtaactgcct

SEQ ID NO: 9880 - DNA, 751 bp, Macaca Fascicularis
  misc_feature (1)...(751): n = A,T,C or G
catgacttnnnnnnnnnnnntnnnnnnnnnnnnnnnnnnnnnnnnnnnnnnncaggggtcatcgcctcctaccgtcgttgcctgccccagatccagctctacggccccaccaacgtggcccccatcatcaaccgtgtggctgagccggcccagcgggagcagagcaccggccaagccacgaagtactcggtgctgctggtnnnnnnnnnnnnnnnnnnnnnnnnnnnnnnngagactcgcactgctatcgtgcgtgcctcccgcctgcccatgtccatcatcattgtgggcgtgggcaatgctgacttctctgacatgcggnnnnnnnnnnnnnnnnnnnnnnccttgcgctgcccccgaggggtgcctgcagcccgagacattgtccagtttgtgcccttccgagacttcaaggatgctgccccctctgcactcgccaagtgtgtcctggctgaggtgccacggcaggtggtggagtactacgccagccagggcatcagccctggggctcccaggccctgcacactggccacaactcccagccctagcccatgactgctaccctccggaccgacactccctcagcctctcagtgcctgtcctgaccctcgtgactccagtgaccaatgcctccacctcttggaccagctgtgccccctgggttctggacgtgagtggtgggccctgctcctatctctccaaaccccacacctttaatgctgtggcccctcagtgacttccttgggtgatc

SEQ ID NO: 9881 - DNA, 721 bp, Macaca Fascicularis
  misc_feature (1)...(721): n = A,T,C or G
acatgcagtccannncgaagtgaagctgannngattgcagagttgagtctnnnnnnnnngctgagcctgtccctctgccagcagacccaatggaactgaaaaatatggagnnnnnnncagtgaaggtcaaggggtgctttgaccactccaaggagctgtatatgatgccccggaccatggtggaccctgcccgggaggcctgggaggctggccgcatctcctcctnnnnnnnnnnnnnnnnnnnnnnnnnnnctcccttccactgcactgacctgggaaccaccatcctggttaatagagggnnnnnnnnnnnnnnnnnnnnnnnncctgaaacccggcagannnnnnnnnnnnagggagaagtggaccnnnnnnnnnnnnnnnnnnnnnnnnnnnnnnnnnnnnnntttgtccccgagaacaannnnnnnnnnnnnnnnnnnnnnnnnngggacctggaannnnnnnnnnnnnnnnnaggcgcagagcccatnnnnnnnnnnnnnnncttccagagcacagtccctggaggacccattggagggcaaaccagagttactctgaggaacgnnnnnnnnnnnnnnnnnnnnnnnnnnnnnnnnnnnnnnnnnnnnnnnnnnnnnnnnnnnnnnnnnnnnnnnnnnnnnnnnnnncctggtnnnnnnnnnnnnnnnngctaaagccctgtccctgaataatgaagtaaaaagactgcctttat

SEQ ID NO: 9882 - DNA, 716 bp, Macaca Fascicularis
  misc_feature (1)...(716): n = A,T,C or G
cgccccgcgctgccagggctgccagggtcccatcctggataactacatctcggcgcttagcgcgctctggcacccggactgtttcgtctgcagggaatgcttcgcgcccttctcgggaggcagctttttcgagcacgagggccgcccgttgtgcgagaaccacttccacgcacggcgcggctcgctgtgcgccacgtgtggcctccccgttaccggccgctgcgtgtcggccctgggccgccgcttccacccggatcacttcacatgcaccttctgcctgcgcccgctcaccaagggctccttccaggagcgcgccggcaagccctactgccagccctgcttcctgaagctcttcggctgacagcccgctcggctcgccctctcccccggaggcggcgccctcccggtaaagcgggtcctgcagacccagaggcctggctttcagagtgtgaggccccacccactggagagccccgcccctaaggtactctgagtcctcagggnnnnnnnnnnnnnnnnnnnnnnncagacctaaacccacacgcccacaaagtgaatcgcacacagacgagagctcccgtgcgagcctccactctctattcccacccttgagggagccccctgactgggggagggtccttgcaattnnnnnnnnnnngaggccaggccaggacgtccttgctccctgcaccctcactgttctgtgcactttttct

SEQ ID NO: 9883 - DNA, 676 bp, Macaca Fascicularis
tttgtttaagtcccagtgatgaaaactataaggcggcttcctcaaaggaagttaacactgacgaatccagtgcagccagtgttttccatatgaggtgataaaatctttatcacatccagctggactgtcctgtatgttagtctgagtctttggaacagttatttattcctttttattaattgtatggttgttatgcagccatggaaggaaaaagctgaacatcaaaatcatcaacaatatacctgaaagacaaaatacagtaaaataaaaaaacaatctttaaggaagttcataatcactaggagggtatatcttaaaattatatacaattatatacctagctgtttggaaagctatgcttaaagaattggttacatcaattctacgtgaaacatgttagatatttaaatctaatattctcagattattttttcttcaactgtgaatccttaaaaacagtatgcatttggcaaaaccaataggatctaatgaattcaaaggataaaccaaatccaaagatgtatagttttagttctggctctgttactgacttgctaagtgagaaaccctagacttgggtcttcattttcttctctttaaaatggtaacactctcccttccctccgtgccccagggacatacctggagaataaagcaactgaaagcatttggagtt

SEQ ID NO: 9884 - DNA, 760 bp, Macaca Fascicularis
  misc_feature (1)...(760): n = A,T,C or G
tcaaacaggnnnnnnnnntgaagtggtnnnnnnnnntcgnnnnnnnnnagcttactgcagttttacagtattcctnnnnnnnnnnnncaggtagattatcagagctgtcagcactacctctccccgctgaaaccagcagttcatggcttcctgtggattccctccctccctggagtgttgagggggtcgcacctgccagacttccaggggacgatggaatacccagaacgctccttctgaagaaatggggcctggaggnacagcacaggggaagggcccggcaccctttctgggtcccttctggttccctgtgggctccatgaagagtccattacttcctttcttccttcacattctacaggcagatgcttttcttataatctaattacatctttttcatttgttatgtattacaaaccatcacacttagaaatacttccaggaaatgctttaagtgtgaattaataagaaatggggtagatagaaaagaaatttatcgttgattggctgggcgcggtggttnnnnnnnnnnnnnnnnnnnnnnnnnnnggccaaggcaggtggatcatgaggtcaggagattgagaccatcctgnnnnnnnnnnnnnnnnnnnnnnnctactaaaattacaaaaaattagctgggcgtagtggcgtgcgcttgtagtctcagctactcaggaggctgaggcaggagaattgcttaacccgggaggcagaggtagcagtgagccgaggtcgcgccactgcactccnntct

SEQ ID NO: 9885 - DNA, 752 bp, Macaca Fascicularis
  misc_feature (1)...(752): n = A,T,C or G
aagcatgaaatnnntagcaccagctggtattgcagatgcaccactttctccactgctcacttgcatacccaataagagaaagaattattttaaaattagannnnnnnnnnnnnnnnnnnnnnnnataagcacagctcctccttcttnnnnnnnnnnnnnnnnnnnngttcatggctagctgtatagcttctgtctgtaaacttgtattttcaagaatccttggtattgaatttttagaaatgctcacataattgttgggagtgattcattcctccacgatatgcctcctctctccgatatcctgctaactgtagccgnnnnnnnatttgagatgacaggacannnnnnnnnnnnnnnnnnnnnnnnnnnntgagtctgaatgctctgaaatcaagcatatggcacagcgcttgagacttttgggtttgtgtcctttcttctatggctgtctcttaattctggagaggtctggttccactggctggtttgcagggattgattcttannnnnnnnnnnnnagaaagaagcaacaagaaactatactgaactcaaaagtttttaggagaatcatgaannnnnnnnnnnnnnnnnnnnnnnnnnnnnnnnnnnnnnnnnnnnnnnnngaggttgcatatttggtgagtccgttatataaaataatgttcttattgtaaatatgatacttttcataatctattttaccatgtatgtaacattcaaactgacaaatattatactgacttatgaataaa

SEQ ID NO: 9886 - DNA, 769 bp, Macaca Fascicularis
  misc_feature (1)...(769): n = A,T,C or G
gagagatnnnnnnnnnnnnnnnnnnnnngnnnnnnnnnnnnnnnnnnnggacannnnnnnnnnnnnnnnnnnnnnnnnnnnnnnnnnnnnnnnnnnnnnnnnnnnnnnggggccgcatggtgnnnnnnnnnnnnnnnnnacgcgagatcaccctgggcagagcaaccaaggataaccagattgatgtggacctgtctctggagggtcatccctttttcctttctgcttccacaggtgtcatcnnnnnnnnnnnnnnnnnnnnnnnnnnnnnnnnnnntgaggnnnnnnnnnnnnnnnnnnnnnnnnnncggccagtgctgtgtggctccaaatggcgcctcagcaacaactctgtggtgnnnnnnnnnnnnnnnnnnntcgtcttcctcatcaaccaggacctcattgccctcatccgggccgaggctgccaagatcacaccacagtgaggagtggtggcaggactcgtgggccctctccggcctgtttcgcctgccactccagcccccttgagctgggaannnnnnnnnnnnnnnnnnnnnncccagattgggcagtgggaggctcagctgcgggccattaatttgagcctttgagggaggataggtctggccgttgtgaagccagcagaggctgagaacctcgggcttccctagagccagagcccctcccgctcttcctctctttaaaaacaaccctaccccacattgccaccttcactcccgtgtctccagcagattagcctcagactcttcctttatttgttttc

SEQ ID NO: 9887 - DNA, 655 bp, Macaca Fascicularis
  misc_feature (1)...(655): n = A,T,C or G
tccccacaggctctccttgtggggtcccaggtcctgctgccaagagcccctcgagagaagggctgaacnnnnnnnnnnnnnnnnnnnnnggtgaggtggtacnnnnnnnnnnnnnnnnnnnnnnnnnnnnnngcccaggcaccccagtgcccgctgggcctggcatggggacagggaaccnnnnnnnnnnnnnnnnnnnnggagcagctggacactgggcttcttggcgaacnnnnnnnnnnnnnnnnnnnnnctggtgggcgtttgccacctccccaccaccagtcactgcctcacagagccccgcacgcctgcagccgctccttggaggcctgtgcccgtcgcgggccagggaggagagtgggagcagagccctcctgcctgnnnnnnnnnctgagacttcagagacccatcagaacctggtgccacgcagccctgcccgtggagggttccttttacacaccgcgaggcccatacctaagctttcgtagtagccctcgtccggggaagttctgcaatcctttaggaagacactgctcttgttacagattgtgtatttccgtaggcttcttagtagcagctttgtacactgaggacactgtacccaggaacctgtgcatgccacccaccgcctggacaggcagtcaccctcctc

SEQ ID NO: 9888 - DNA, 852 bp, Macaca Fascicularis
  misc_feature (1)...(852): n = A,T,C or G
atgccatgaannnnnttgactactacacagagannaagnncntacaggagaaggcagncctgggcgccaacgatnnngagaagaatttcttaaccacagccatccgccctcatggcattttcggcccaagggacccacagttggtacccaccctaatcgagacagccagaaacggcaagatgaagttcgtgattggaaatgggaagaacttggtggacttcacctttgtggagaacgtggtccatggacacatcctggctgcagagcaactctcccgagacttgacattgggtgggaaggcatttcacatcaccaatgatgagcccatccctttctggacattcctgtctcgcatcctgacaggcctcaattatgaggcccccaagtatcacatcccgtactgggtggcctactacctggccctcctgctgtccctgctggtgatggtggtcagtcctgtcatccaactgcagcccaccttcacacccatgcgggtcgcactggctggcacattccactactacagctgcgagagggccaaaaaggccatgggctaccagccactagtgaccatggatgatgctgtggagaggaccgtgcagagctttcgccacctgcggagggtcaagtgagggacactggaggctgggctctctcgacacattccccagccagtcactccttcccctgtggagtgaagaaataacatccttcgaatgagtttgctctgagcctgtgactcctcctgctaggcagagagcgcaccctactacttccatgacaacaaaggcagtaaaaacagatatttcttccttcatggaattggatttggatttcttgaagcaggcagct

SEQ ID NO: 9889 - DNA, 854 bp, Macaca Fascicularis
  misc_feature (1)...(854): n = A,T,C or G
tgtgaagaccttctctctgcctctcttgcctgcacaccctatatatatttgagctaaaaagcgctgtgtatatttcaccccgtaggccccgttccacaaacctccagcaacatgcagaggaaccataacattcttaaaacgagagctcgtctccttctcaaatgtttccgtggatgagaccacaagcagctcctggtagacgaagaggaagacaaacctacagtcgcttccaaactctagagttggaaaaggaatttctttttaacccctatctgaccagaaaaagaagaatcgaggtttcccacgccctagccctcaccgagagacaggtaaaaatctggttccaaaacaggagaatgaaatggaaaaaggaaaacaacaaggacaaatttcccgtttcccggcaggaggtaaaggacggggaaacgaaaaaggaagcccaagagctggaggaagacagagcagaaggcccgacaaattaacttccacctttaaaattttaccacagactattaaaactaatgatcaccgtatgctgtggacaccacctattttctttgttgcaaaggaccttacctgtgtttcaagctaccttcatgtcactgctcttgaggcttctgcgctttgagagggatttgggtgtttaaaaaagtttctagtatcacatagaagcagtccttgagctgtcctatggaagggtaatttgatactgaccttgtagctatatttttataatggtttttaatgtctgaactggtgatttgcctgaacaacgtaaacttcctaatgattagcacttaataattgaatataaaatgctttattaatcaaacannntgcacttgaacgtttta

SEQ ID NO: 9890 - DNA, 688 bp, Macaca Fascicularis
  misc_feature (1)...(688): n = A,T,C or G
aaagggcacagttnnnaggaaaagaaaaagaatgtaaaactatactgaccagttttcagttttaaagggtcgtgagaaactggctggtctaatgggattgacagcaacattttccattgctgaagtgaggtagcagctctcnnnnnnnnnnnnnnngttaagtcaaggatggggaannnnnnnnnnnnnnnnnnnnnnnnnnnnnnnnnnnnagcttgagctatgtgttggaagtgccctggttttaatccacactcaaagacggtacataatcctacaggtttaaatgtacataaaaatatagtttggaattctttgctctactgtttacattgcagattgctataatttcaaggagtgagattataaataaaatgatgcactttaggatgtttcctatttttgaaatctgaacatgaatcattcacatgaccaaaaattgtgtttttttaaaaaatacatgtctagtctgtcctttaacagctctcttaaataagctatgatagtnnnnnnnnnnnnnnnnnnnnnnnnttaaagcacatttgtttaagactatgtttttggaaaatatgctacagaatttttttttatgctacaaataaatgagatgctactaattgttttggaatctgttgtttctgccaaaggtaaattaacaaaagatttattcgaggaatccccattgaat

SEQ ID NO: 9891 - DNA, 810 bp, Macaca Fascicularis
  misc_feature (1)...(810): n = A,T,C or G
gcnnnnnnnnnnnnnnnnnnnnnnagannnngaggaggaagacagcttgggccagacnnnaatgagtgcccaagccctcttggagggacttttggagcttctgttgcctagagagacagtggctgggnnnnnnnggcgtctgggggcccgaggaggaggcaaagggagcagcaaggggcctgggcgtcccagttcccctcagcgcctggaccggctctccgggttggccgaccagatggtggcccggggcaaccttggcgtgtannnnnnnnnnnnnnnnnnnnnnnnnnnnnggctgaagggtttggggtgtcagaccgtgggaccccacaatcccacacccccaccctccctggnnnnnnnnnnnnnnnnnnnnnnnnnnnnnnnnnnnnnnnnnnnnnnccctacccagagaggagaagcagagtcgccaggagatggtctggtggatgtgatgtgggaatataagtgggagaacacgggggatgccgagctgtatgnnnnnnnnnnnnnnnnnnnnnnnnnnnnnnnnnnnnnnnnnnnnnnnnnnnnnnnnnnnnnnnnnnnnnnnnnnnnnnncccccnnnnnnnnnnnnnnnnnnactccaaacgcattgactttgagctctacacctgagcctgctgggggcnnnnnnnngtgggtcattctttcctggactttgtggagaaggcaccaagtgtctcaggcagtgaggaaattggaggnnntnnncagtcaatttccctttcccaataaaagcctttagttgtgtattggggccttggctgtgctgacggccagaagccagg

SEQ ID NO: 9892 - DNA, 713 bp, Macaca Fascicularis
  misc_feature (1)...(713): n = A,T,C or G
cttagaggggttaataagttgtccaggatcaccacttacaactgactctttcnnnnnnnnnnnnnnnnnnnnnncagtgcttggagctaggattttttctttttattgacatttctattttccttctggaatccattcctcataaggccccttgtgtgtcttctttgtccacgctgtgagaggtctgggaatatgagcttccctttgctggcacttggctgctaactctccccactccctttcagagacggtgtgcaannnnnnnnnnnnnnnnnnnnnnnnnnnnnnnnnnnnnnnnnnnntggtggattnnnnnnnnnnnnngagggacaccatcaagcacnnnnnnnnnnnnnnctcggccaagggtgagggcaggcctccgggtctgaaatccctgttactctctgctaatagagaccnnnnnnnnnngtcaaacccgnnnnnnnnnnnnnnnnnnnnnnnnnnacactaccaggaggaaaacactcttacactcgtctgtcaggtttcagaggtcaaaggctctggcataaggatggccaacaggtgactatgcccagcaggcccagcacatgcccatctgttgttgactgggcttgttttggtcctgccttctgttgttgactgggcttgttttggtcctgccttcnnnnnnnnnnnnnnnnnnntggnnagaaagacgcactgaataaagggggctgcccttcttt

SEQ ID NO: 9893 - DNA, 746 bp, Macaca Fascicularis
  misc_feature (1)...(746): n = A,T,C or G
taatgtgtttnnnnntcnnnnnnnnnnnnnnnnggnnnnnnnnaagttgaagacactaacggaaggtttggaagcctacagccgtgtccggaaaaggaacagaaaaagtggaaagctaaataaccatttagaagctgctattcatgaggccatgagtgaactggacaaaatgtctgggactgtacaccannnnnnnnnnnnnnnnnnncaaatgagaccccccaaacccaagaggagnnnnnnnnnnnnnnnacagagactactccactaatgcgcagtgtttaataaaggaacatgcacagatgtatctgtatataggtattgatatagccactgttatatcaatatttagactatggcagatannnnnnnnnnnnnnnnngtgctaaaagaaacagtgatacaaaagttttttgatcaggaaggataatgaatgctggaaaaaccaatcaaaatatttgtgtgatgagagtgataaatggtcaagagattactgagaaactctttttctataatactaaattgtgattataagaaatagtccaaatgtttctgaagaattttcaatgttgtatatagaaaatacagaatttcatggtgatatcagaaatgtaaatattgtacaatattgtcatgtacaagcgtacctaatgcacactttatcttttattgtacaaagaaatagtgtacaaaattctttggtttctatggagtacacctaccagagactaccagtgtaaagtgnt

SEQ ID NO: 9894 - DNA, 776 bp, Macaca Fascicularis
  misc_feature (1)...(776): n = A,T,C or G
catttatagacgagctcaaagcaactttagaagattcttctgtagaaatatgagtccttcctttattatcattccaactttcagctgtagtctccttgaatacttcatgaggagggacatnnnctgatatgagaggatgatgttgcaattggctcttnnnaaatcatgtgacattttgactgacttgnnnnnnnnnnnnnnnnnttttaattataattattgtgaagtggagagcctcaagataaaactctgtcattcagaagatgattttannnnnnnnnnnnnnnnnnatctctgtttcctttttagaattnnnnnnnnnnnnnnnnnnnnnnnnnnnnnnnnnnnnntttctggaacattcagtctagaaagaaaacattggaactgactgatctctgtggtttggtttannnnnnnnnnnnnnnnnnnnnattatctttttcannnnnnnnnnnnnnnnnnnnnnnactgaacatgtgtagatacttcacctcccggtgtcctatcccacaaaatgggcttcctgcctggtttttctcnnnnnnnnnnnnnnnnnnggtcccctgtgtttgtagagaactcccttatgcagagttttggttctagttnnnnnnnnnnnnnnnnnnnnnnnnnnnnnnnnnnnnnnatgtatttatatttggatcagatacatatttattaatgtacagtcactgctagtgttgaaaataaaaatgttacaaatacctgttatcctttgtagagcacgcagagttaannnntgaatatagcat

SEQ ID NO: 9895 - DNA, 721 bp, Macaca Fascicularis
  misc_feature (1)...(721): n = A,T,C or G
gagacnnnnnnnnnnnnnnnnnnnnnnnnnnnnnnnnnnnnnnnnnnngctgnnnnagcctgggtgggggctgggcctnnnnnnnnnnnnnnnnnnnnnnnnnnnnnnnnnnnnnnnnnnnnnnnnnnnnnnnnnnnnnnnnnnnnnnnnntgaaggcccgatcctgcgagaaggaagtggtctctgcccagcctgccaccttcctggcccgtagccctcacgtgggtgtgcaggacgtggaccatcccccaccctggggctgggtatggccacagaccagctcccaacacaaccaaccctgctcacccccctctcaccaccgccagggcatctgttgtgctgatcggcgccactgctgtcctgctggcttccgctgcgcagccaggggcaccaagtgtttgcgcagggaggccctgcgctgggacgcccctttgagggacccagccttgagacagctgctgtgagggacactactgaagactctgcagccctcggtaccccactcggtgggtgccctctgctcaggcctccctagcacctctccccaaccaaattctccctggcccccattctgagctccctattaccatgggaggtggggcctcaatctaaggccttccctgtcagaaaggggttgtggcaaaagccnnnnntacaagctgccatcccctccccatttctgtggaccctgtggccaggtgcttttccctatccacaggg

SEQ ID NO: 9896 - DNA, 1112 bp, Macaca Fascicularis
  misc_feature (1)...(1112): n = A,T,C or G
ttgaaagtcnnnatnnnnnnnnnnnnngtttttcttgtgtgaaaaatgaacttttgcctagtcatcctcttgaattatcagaaaaaannnnnnnnnnnnnnnnnnnnaaaatgaatttttccacactgagaaacattcagggtctatttgctccactaaaattacagatggaannnnnnnnnnnnnnnnnnnnnnnnnnnnnnnnnnnnnnnnnnngctcaaatctttcattggatattttgaggggtaatgatgagactattggatttgaggatattcttaatgatccatcacaaagtgaagtcatgggagagccacacttgnnnnnnnnnnnnnnnnnnnnnnnnntgtagtagtgtgctgttcacggaaactnnnnnnnnnnnnnnnnnnnnngtcgtctttgtactgtaatttgatgtacacaacattaaaagtactgacacctgagaatttctgctcaagtagcatcagtgatcatttaaaatttgggggcatctttggtttacagccatgtgacaattaaaagcactaaagggggatcatgttaaagctcttaaattatattaaaacaatagcctttgtctttaaaaaaannnnnnnnnnnnnnnnnnnnnnaatgatctacaggtttcaattcaacctgttttctaagttttctgtaaacttagttttgaataagcataagcatttgagtctgtaaactttgtagtagcatctttcagaataaacatttttaattgatttcagtggcaactcttcaaattgagtacaatatgagatatatcagtatcgtccattaacactcataagaataacatttactgtctcagtgctattttagggttatagctattctttgattcagggttgaaaagtagaagttctaaagttttgattttggtctggtctttaagtgaaaaattaaagcaaccggtagatgtaggttaaacttttacttcatagacttattatgtaattaccaagcaacactgttcaagaaaagtaaaactcattttttcttgttgttaatttatatattacaagataccataagatgttctgtatgaagttggtatatacaaatttacatttttagaacattagtgaat

SEQ ID NO: 9897 - DNA, 791 bp, Macaca Fascicularis
  misc_feature (1)...(791): n = A,T,C or G
cnnnnnnnnnnnnnnnnnttggggccctacctagagggactgacttttgtccattgacacaaaccccttttagtactgttttgagttttgtcattaaaacagccacgtttgtattttataatttatgagagaatgaagccagtttgaatcttcatgaatgaacactttggattttgttgtagtttgattctaggctagaaccagtccatgctgtttttattttttatctccgtaattgtagaatcatgtttactcaacatttttccccagctgcctcagtaactgggcactcggaggccttggcacgggttctggaggacagacagcaattctatgagtgctcactgagatacttgctggagacctcagaaaacacaagtgccttctccacggtgcaattcagacttcagtgatctccagtggtcaaaagactaaatttacccttaatatcagacgacatttgtattttagtgaagaaacaagttcttgggtggggaatctatgtttcactcaaatttatatgtttggaggaaaaaagcctttttttttgtaaaatatttaaatttatataagaaaatgttagaaaaaaatatgggggagtgtatataaaactcgctttattgcatggggcaggggaagtccaggcctaatactcttaaagtttaagagttgggtccttttttcttcaatacaactgtgctgtaccttgtaaagtattttatctgctgcttatttgtggaatgaaacctcaaacaaacccaaagggggagggtagggcagggtgggcagat

SEQ ID NO: 9898 - DNA, 730 bp, Macaca Fascicularis
  misc_feature (1)...(730): n = A,T,C or G
cagaatgatcacaaggcggtgatgaagcaggtggaggaggccctgcaccagctgcacgctcgtgacaaggagaagcaggcccgggacatggctgaggcccacaaagaggccatgaaccgcaaactggaccagagtgagagccagggccctccacaggccttcgccaaagtgaacagcatcagccctggctccccagccagcattgcgggtctgcaagtggatgatgagattgtggagttcggctctgtgaacacccagaatttccagtcacttcataacattggcagtgtggtgcagcacagtgaggggaagcccctgaatgtgacagtgatccgcagcggggagaaacaccagcttagacttgttccaacacgttgggcaggaaaaggactgctggggtgcaacattattcctctgcaaagatgattgtccctgaggaacagtaacaggaaagcatcttcccttgccctggacttgggtctagggatttcctccttgtcttctctccctgaagcataaggatctggaagaggcttgtagcctgaacttctgggtggtggcagtgctgtggcccactagtgtaatctccctggattaagacattcttaaaaacttatgcttggcctctttcgcaaattaggccacggccctgaataggaattccctaaataggaactgtgggcaagtgggcggaagttattccggnnnggtactggtgtgatgatgatga

SEQ ID NO: 9899 - DNA, 745 bp, Macaca Fascicularis
  misc_feature (1)...(745): n = A,T,C or G
caaaccctnnnnnnnngcaggccttgntacagattcaacagggtttacagacattagcaacggaagccccgggcctnnnnnnnnggtttactcctggcttgggggcattaggaagcactgnnnnnnnnnnnnnnnnnnnnnnnnnnnnnnnnnnnnnnagtgaaaacacaagccccacagcaggaaccacnnnnnnnnnnnnnnnnnnnnnnattcaacagatgctacaggctcttnnnnnnnnnnnnnnnnnnnnnnnnnnnnnnnnnnnnnnnnnnnnnnnnnnnnnnnnnnnnctcagtgcaatgggatttttgaaccgtgaagcaaacttgcaagnnnnnnnnnnnnnnnnnnnnnatatcaatgcagctattgaaaggttactgggctcccagccatcatnnnnnnnnnnntgtatcttgaaaaaatgtaatttatttttgataacggctcttaaactttaaaatacccgctttatttcattttgactcttggaattctgtnnnnnnnnnnnnnnnnccaatatgatgcattttaaggtggagtacagtaagatgtgtgggtttttctgtatttttcttttnnnnnnnnnnnnnnnnnnnnnnnnnnnntttaaggctactgnnnnnnnnnnttctgcatttattgtaattttttaaaaacatcaccttttatagttgggtgaccagattttgtcctgcatcnnnnnncatttatattgcttaagtgacgcatgcagtag

SEQ ID NO: 9900 - DNA, 792 bp, Macaca Fascicularis
  misc_feature (1)...(792): n = A,T,C or G
ttccccagcaggacatgtacgagtcaagcacanctgtgcgccagggaaagacaaggctaattgggcccaactgccctggagtnnnnnnnnnnnnnnnnnnnnnnnnnnnnatcatgcctnnccatattcacaaaaaaggaaggattggcattnnnnnnnnnnnnnnnnnnnnnnnnnannnnnnnnnnnnnnngacaacggaagttggattggggcagtctttgtgcgttggcattggaggtgatccttttaatggaacagattttattgactgcctcgaaatctttttgaatgattcnnnnnnnnnaggcatcatattgattggtgaaattggtggtaatgcagaagagaatgctgcagaatttttgaagcaacataattcaggtccaaattccaagcctgtagtgtccttcattgctggtttaactgctcctcctgggaggagaatgggtcnnnnnnnnnnnnnnnnnnnnnnaggaaaaggtggagctaaagagaagatnnnnnnnnnnnnnnnnnnaggagttgtggtcagtatgtctcctgcacagctgggaaccacaatctacaaggaatttgaaaagaggaagatgctatgaaagaaaaaaaaattcctaaaactgtggaatgaatcacttagacatgtgaccctgcagcagtttgcttctgttgtccacnnnnnnnnnnnnnatgtgcctgacactggtcttgcagtacaactggacgccaaaacaaggtggaggatgtcctgaatgaagatgttttcacctcacngtataacagagacagcca

SEQ ID NO: 9901 - DNA, 761 bp, Macaca Fascicularis
  misc_feature (1)...(761): n = A,T,C or G
caagtataccccagaggagattgccatggcaactgtcactgccctgcgtcgcactgtgcccccagctgtcccaggagtgaccttcctgtctgggggtcagagcgaagaggaggcatcactcaacctcaatgccatcaaccgctgcccccttccccggccctgggcgcttaccttctcctatggtcgtgccctgcaagcctctgcactcaatgcctggcgagggcaacgggacaatgctggggctgccactgaggagttcatcaagcgggctgaggtaaatgggcttgcagcccagggcaagtatgaaggcagtggagaagnnnnnnnnnnnnnnnnacagtccctctacattgccaaccatgcctactgagtatctactccataccacagcccttggcccagccatctgcacccacttttgcttgtagtcatggccagggccaaatagctatgcagagcagagatgccttcacctggcaccaacctggcttcctttctcttctccctccccctctctcattgctgcacctgggaccataggatgggaggatagggagcccctcatgactgagggcagaagaaattgctagaagtcagagcaggatggctgggtctccccctacctctgccagctcccacaattttcccatgatggggtagcttctccttgggctctccttcttgcttgccctgtctcctgggatcagagagtagtacagaagccctgactcatgccttgagtacataccatacagcaaata

SEQ ID NO: 9902 - DNA, 740 bp, Macaca Fascicularis
  misc_feature (1)...(740): n = A,T,C or G
aggcagcacccccgnnnnnacagtgaccatgatgaccgctgggagacaaaagagggggcagcatccccagccnntgaggctccacagcccacttcccctgtggagacatccacgcagctacccaagatcccagctcctgcccaccagcctcccgaagacaagggggaagagaacgagggggaagaggatgaagaatgggaggacataagtgaggacgacgaggaggaggaggcgatcgaggtggaagaaggtgatgaggaggaagaaccagcccaagaccaccaagccccagaggccgcccccactgggagcccctgtagtgagcaggcccacggagtccccnnnnnnnnnnnnnnncccccgccggagccccaggcccctggcacgccttccagccctttctcaccactcagcggccaccagtccgtgtccgattggggtgaagaggtggannnnnnntctccccggaccacccacccggctggcgccctctctccgggtgaggcctggccttttgagactgcatgaagctggctctgtgtgtgtgtgtgtgtgtgcacaagtgcgcgtgccctggaggggtgtggctgatgggggacccttgggggctgggccctgggacccagtgtgtcctatagccatggtggctgttggttgggggtcagcccatgctcttctgtacggtcatgnnnnnnnnnnnnnnnnctcctcccagagcctgccccagcccttcgagcccc

SEQ ID NO: 9903 - DNA, 748 bp, Macaca Fascicularis
  misc_feature (1)...(748): n = A,T,C or G
aagaggctgtatttgagaacctggacaaacctggagagacccaagtgatttcatatgaaatgcttcatgtcacaccaccaatgggcccaccagatgtcctcaagaccagtcctgtggctgatgctgctggttgggtggatgtggataaagaaactctgcaacacaagnnnnnnnnnnntgtgtttgggattggggactgcaccaaccttcctacgtcaaagaccgcnnnnnnnnnnnnnnnnnnnnnnnnnnnnnnnnnnnnnnnnatttctctgattatgaagaatcaaacaccaacaaagaagtatgatggctacacatcatgtccactggtgaccggctacaaccgtgtgnnnnnnnnnnnnnnnnnnnnnnnagcagagccgctagaaaccttcccctttgatcaaagcaaagagcgcctttccatgtatgtcatgaaagctgacctgatgcccttcctgtattggaatatgatgctaaggggttactggggcggaccagcaattctgcgcaagttgtttcatctgggtatgagttgaggatggctcagcacttgctcatttggatggcttctgggccaaaactgcagtcactgaatgaccaagagcagcacgaacgacttggaacctatccttgtaaagagtttcttgatggataatggtgactaaatgcctcccttttcagtacctttgaacagcaaccatgtgggctgctcatgacgggcttgattctttgggaataataa

SEQ ID NO: 9904 - DNA, 755 bp, Macaca Fascicularis
  misc_feature (1)...(755): n = A,T,C or G
tgaagtatgaacacnnnnngaaagaatcatgaaaacaaatggatgttggtgaagatttagaaaatgaagattttgatagtcgtagatacaaatttttggatgatgatggatccatttctcctattgaggagtcagcagcagaggatgaggatgcaaaacatcttgaagataatgaatgtgatatcaaattggcaggggatagtttcatagtaagttctgaattccctgtaagactgagtgtatacttagaagaagaggatagtactgaagnnnnnnnnnngtctaaaaagagagctacaaaagctaaaaatactggacagagagccctgaaaatnnnnnnnnnnnnnnnnngtcaaaggcttttatcttgagaacatgatgtctggagttaaagnnnnnnnnnnnnnnnacacatctgtaccattcttgagtgatcgcttaggaatgaatgtgnnnnnnnnnnnnnnnnnnnnnnnnnnnnnnnaattgagaaccaggcagatccccaccacctacaatcaaaaggaccctaaagcaaattggttgaagaaattagatcccaaagatnnnnnnnnnnnnnnnnnnnnnnnnnnnnnnnnnnnnnnnnaaaaggagatgacagaagccaaagtaattatgggctgacaggannnnnnnnnnnnnnnnnnnnnnnnnnnnnnnnnnnnnnnnnntttgactccagctttttaggggatctaaagtgaccnnnnnnnnnagtggaagaaatcacaaca

SEQ ID NO: 9905 - DNA, 1026 bp, Macaca Fascicularis
  misc_feature (1)...(1026): n = A,T,C or G
gcattgggaccagagcatttctagcatttgttgttgttttactcacctaacccttagaaaatgaatgttagaaggtgcctgccgaggtgggacagagtgtttactcgggnnnnnnnnnnnnctgctcagccctgagagtcccttcctgccccacagatactggcactttaaaaaggaannnnnnnnnnnnnnnnnnnnnnnnnnnnnnncccagaagatggggggagttctgtcctgcccttctgtgtctgtgtgacctcacccagcctaggagggaggtgcattcagggtagatttgcctctcattcaaagttctggggnnnnnngcagnnnnnnnnnnnnnnnggtgctgttggggagacttcctccagaccaggaacaccggaaggagacagagcctgnnnnnnnntcccacgccaggccctgggccagggtgatgggactgagaattcggccacaaccaaattgatgctggctggagccagaggccagaaagcctggctttgttgttcccatgtgggagccctgtcctcagccctcctgtccccttgannnnnnnnnnnnnnnnnnnnnnnnccacagctcctggacttcaaattctatatattgagagagatggagagtatatcggagatattttggaaaggaattggnnnnnnnnnntgtcagattggaatcttcttgaaagtttaacgtttttattaggagatttaaaaaataaaggtctacaatatgtttagggttttttttttttctttttttttctttcctgtttactgcacaaactgaccacatggcatgtctgccaggatggagggtgtccatgttctctgtctttagggaggtgatcaaggaggtggggggaggtgtcttttttttctttgagtcccctcctttctagcagnnnnnnnnnnnnnnnnnttgactgggctgtgtttgttcctctgtcccagcttctgttctagaaaataacattgttaggggaaatcagcctagtgtcagtgtcttggttgaggggaaaaaata

SEQ ID NO: 9906 - DNA, 749 bp, Macaca Fascicularis
  misc_feature (1)...(749): n = A,T,C or G
tcaactgcattgagaagagttacaagtccatctttgttttgtctcccaactttgtccagagtgagtggtgccattatgaactctactttgcccatcacaatctctttcatgaaggatctaataacctaatcctcatcttnnnnnnnnnnnttccacagaatagcattcccaacaagtaccacaagctgagggctctgatgactcagaggacttatttgcaatggcccaaggagaaaagcaaacgtgggctcttttgggctaacattagagccacttttaatgtgaaattaacactagtcactgaaaacaatgatgtgaaaccttaaaaaaactcaacttaagaaaccatatttacttggatgatggtgaacagtacggttctaagtaacctccattatcctcatgcctttgggaaagacttaacaaaaacaacgtttcatctggggaattgggnnnnnnnnnnnnnnnnnnnnnnnnnnnnnnnnnnnnnnnnnnncgatctcttctggtttagtcattatgtctcaaattgaaacagtctcttttgagtgaattctcagtttttcagcccctctccactctgctttcccaaatggattctgtgtgaccaagagtttatatggcttcatggcagcaaggaaacagtcaacctcagcatcacatgcactggtcctcagagtgccctgtgaatcctattggtttctnnnnnnnnnnnnnnnttctcttcaagtttggggctggggaagaaa

SEQ ID NO: 9907 - DNA, 747 bp, Macaca Fascicularis
  misc_feature (1)...(747): n = A,T,C or G
gccattagggaccttacnccnngctatgatgatagccagcctgataagaaagctgttcttcccaccagtaaaagcagccaaannnnnnnnnnnnnnnnnnnnnnnngaggcgtggccacgatgcgcaccagtgggacagagcccaaaatcaagtactatgcagagctgtgtgccccacnnnnnnnnnnnnatcctgagcaattgaagaaggaactgaatgaactggtcagtnnnnnnnnnnnnnnnnnnnnnnnnnnnnnnnnnnnnnnnnnnnnnnnnnnnnnnnnnnnnnnnnnnnnnnnnnnnnnnnnnnnnnnnnnngcctannnnnnnnnnnnnnnnnnnnngttaagcaatatttttaagggccaaatgattcaaaatgttacaggtatttatgtgttttacaaagacctacattcctcattgtttcatgtttgaccttcaaggtgaaaaaagaaaagatggccaaacccaacaaactaacattcctactaaaaagttgagtttggacatattttgaatttttataaatgaagattcttaaactaacttaaaaaaatagattgtaattgatgtgccttaatttgcataaatcataaatatatgtcctctctgtaattgttttaatgtgtgcttgaaatatccagaannnnnnnnnnnnnnnnnnnnnnnnnnnnnncatatgtaggatagccactttttaggcatacgtacatttatatttcnatcanncctataaagaaa

SEQ ID NO: 9908 - DNA, 773 bp, Macaca Fascicularis
  misc_feature (1)...(773): n = A,T,C or G
atgaacgaggggtacattggagtgggtgcttgtnnnngctnnnncagannnnntggtcaagatgaagttggctgatgcagcttagcttggttttgcttattcaaaagagaaaataactatacatggaaatgaaactagtcttgttttagcaactgaaaattgtacttggtcacttttgtgcttggggaggcccattttctgcctggctgggggcaggtctgtgccctccctctgcctcccgctgtgtcctaatgtgcatttcctgttgtacacacaagagccaggctccattctccctccctttccaccagtgccacagcctcgtctggaagaaggactagtggtcccagaagaacccgtttctgctctgcgtagacagcaggcctggcactgggaagtgggggtgagcccttcacagctttgcccctccccaaggctgccagcctgcctcccatgcccaagcgagagagcagggacaggctactgtccttccctgtggaactgctgagaaatctagcaccttgcatgctggatctgggctacagggaggctctttttcaccctggcctccagtgcccaccaggaggatctgcgtgcggtgcacagcccaccagagcactacagccttttattgagtggggcaagtgctgggccgtggtcgtgccctgatagcatctgtcccaggcagtggctgtgtggaggaggccatactccctgagctggtcactggggccaccaccctgaccaccactgtgcccctcattgttactgac

SEQ ID NO: 9909 - DNA, 786 bp, Macaca Fascicularis
  misc_feature (1)...(786): n = A,T,C or G
actgccccttctatgctgcttccaaaagtgagagtgtgtgtaagatttttaccttcctttctaaagttttttttttttttttcttaaagtgagtcctgttcttcctatttctttcagcagaaatgaaatcccaggtaagtataagtattcaagtatttgatcagtaagtcacagttatctccagtgcattaaataaccttcatcaagaaacaggttataggtaaaatctctgaaggaccatctgtgtattcaagtagttatattttagatattctggacttggtcttgaagnnnnnnnnnnnnnnncctcaatagtagcaaactgcactgctatttggtttggagtacaaattagacttataggcctcctggaacttgagttattaaagtcataggaataaaattatgggatctcaacagagtcgagggtttgaggcttaaacgagccaacatatgaatatatgttttgtctcgctgtactgcacttacgctatccagtcgcaggtaattttttgtcnnnnnnnagtgttctagattatgtctttccaaagcgctgaggctgtgcacctattctgtatttgcagctgatgcctgaatgtatcctagctgacaaattattgattaataagaacttgcatttcnnnnnnnnnnnnnnnnnnnnnnnnnnnnnnnnnnnnnnnnnnnaaaggtaattctgaaccagaattacatgttaannaacggtgtaccttttaacaatgtaaatcacnganatatccgtgaagggatttcttaatttatttttta

SEQ ID NO: 9910 - DNA, 707 bp, Macaca Fascicularis
  misc_feature (1)...(707): n = A,T,C or G
aaatcatcctcnnnnntaatcaattcagagatttctttaagtatgtggagttgtnnnnnnnnnnnnnnnnnnnnnatgcctttgctacttttaaggatttactannnnnnnnnnnnnnnnnnnnnnnnnnnttcttagaacaaaattatgacactatttttgaagactatgagaaattgcttcagtctgagaattatgttactaagagacagtctttaaagctgctaggggagctgatcctggaccgtcacaactnnnnnnnnnnnnnnnnnnnnnnnnnnnnnnnnnnnnncctgaaactcatgatgaacctccttcgggataaaagtcccaacatccagtttgaagcctttcatgtttttaaggtgtttgtggccagtcctcacaaannnnnnnnnnnnnnngagattctgttaaagaatcagcccaaactcattgagtttctgagcagctttcaaaaagaaagggcggatgatgnnnnnnnnnnnnnnnnnnnnnnnnnnnnnnnnnnnnnnnnnngagacttgaagnnnnnnnnnnnnnnnnnnnnnnnnnnnnnnnnnnnnnnntcattcgtctcatttgtccagtttgtacaatgtgatatgtcannnnnnnnnnnnnnnnnnnnnnnnnnnggaggtgcctatttttttctgttgtaattgttctgcgtagatggaatataaacattgaaggaaaaaaat

SEQ ID NO: 9911 - DNA, 780 bp, Macaca Fascicularis
  misc_feature (1)...(780): n = A,T,C or G
gaannnnnnnnnnnnnnnnnagaaggaaaaagttacaaaggaaatgcaaagaagcctcaggaggaagacagtcctgggccttccacttcatctgtcgtcgtgaaacggaaatcggacagaaagccattgcggggaggtggttataaccctttgtctggtgaaggaggtggaagctgctcctggagacctggacgcagannnnnnnnnnnnnnnnnnnnnngctaaaaatcttgttagtgtcgcttttgannnnnnnnagatgaatccttaaccctcgattcaattgccttacgcacgcttttcacagtgactagccaaggggaggtggggttgatttctgttcctaactacacctgcatatgtcagggctccagtcagcaaaaggtatagatgttgcctctaggcattaggtcattagtcacattccacttggagacagtgattgcattcattgannnnnnnnnnnnnnnntagttggtaggtaaaggcctctagatgatgagcagtcttgataaaagagtcctagtaatgttcttttgaaattagaaattcttgctgctaggacagtctctgtgacaggttgcgttgaatgatgtcttccttatcaatggtgagcccaccagtgaggattactgatgtggacagttgatggggtttgtttctgtatatttatttttatgtacagaactttgtaaaaacaaaactatttaaaaaacgagaataacatttttagcatctttattcaaggagatttatggacttgaatttgtctatcaaaca

SEQ ID NO: 9912 - DNA, 739 bp, Macaca Fascicularis
  misc_feature (1)...(739): n = A,T,C or G
cgatcagatcaatnnnnnnnnnnnnnntcagtagcagggggtggaacagtgagtgtcagtgtcagatctagaaggcctgatggacagtgcacagtaactgaagtttaaataaaaatgtcttcagctccatgctcaaggttgaaaaggttacctgtaaatttctgcccacataacattatactcatccctagtagtgcattttgggagttggggtgggaaggggtatgggaaggatagacccgtaatcaaaatgtctaacatgtctctgttgagaaatttatttaatgtaaggaacttgggtgttaatagttgagagctgtttagtaataacccagttttctcgaggtctgtttactttatagtttttaaaaacttctgtagttcttttggccagtgtgtttgtattatctgtgcattaatggtcctcatctgactcctgcattgtgtcttatttttctgcatggattggcataagaccattactaaaatttggcacctgtgagatgtttgatattatgagcaggaagcataatttaatgtaagaatagatgtgaatttgggatttcaaaatagatgaataactactattttatagtaaagttattgatacggaaatgaaaacagccagtaacttatgtttcagaatgtttgtaacacacttcatggcgttcccataggctttgctgtctagtcttatagtttgaggtttttctggtcagcatttttctttttgattaca

SEQ ID NO: 9913 - DNA, 756 bp, Macaca Fascicularis
  misc_feature (1)...(756): n = A,T,C or G
tgacannnnnnnnnnnnnnnnnnnnnnnnnnnnnnacagctgagacnnnagatcccatnntttactcaggcacctgcttaccataaatgaccatgttattgcgtattgccatggacttcagcacccagataagccaaaaacagagacagggaagaactcattgatgatcacactgttgccttggaacccatgcagaagtaaactcattagccactttgctcagagaagtgtttgacatggtctgatcctagttacatgttggctgtaatgttgagaagtcagtccaaggaggtatgttcttccacgacagccttctcagcctctgccgtttcctttgaggaaggtagaagcgaatttgtatgtctgcagagtctttaaatacctcagattttattaatgggaaatacagtacccttccttccactgcatctggtaatttatggtgaaattgtggttccgtgaaccagctattagtctcatcttcttaactccctcagtcatcatcaaattctttgatcttctctggctctcacagaagaatcctttacacatgaaaacaatgggactggaaaatcttgtctcttagaaaagaaattaatcacaactatctctcttgcctaaaagataaatgtatgtaaacccaaggaaaggggaatttagtttctccacatgtcatttcggtctctaaactccctgttggctttttaatgcaattttaattgttgaaataaaaaagtcccaagggtgttttgttac

SEQ ID NO: 9914 - DNA, 777 bp, Macaca Fascicularis
  misc_feature (1)...(777): n = A,T,C or G
gctggggcctggcatggaacatgagatnngcgagctgtcccgcgggccccggcaccccgcccagnnnnnnnnnnnnnnnnntcgctctgccatggtgccgtgactgtactgtgcccgtgcgtgacctggactgtggaccctctgctgctccacctctcccctacccactggctctgtctgctctcctgccaccctgctggccgggagcccctccccggggagttcttggtgacgtccttcccgggcctccttgtgtttttgcctcattcctactgtcgcacaggtcaccagggtggactccctacaatcagcaaagcaaacagagagcctgtgggaggggctgacagcagccgccggctgtttaggggatgacggaggtgacatcaggcggagaagagtgcagcctcacagtgactttttcagaggtgacggagatgatgnnnnnnnnnnnnnnnttccaagacgaaggacggaagcggcggcaggccggcaagaccatacctcggtgaggggcaggtggacacccgtnnnnnnnnnnnnnnnnnggggaattgtgtggccagctgtctctctgggatgggtcaggaggcctggaggcttcccggggaaagaggtgtggagaaggagagaacatggcccaggccctttccttccccctgtgctgacagcattgctgtaggggtggcctgctgccctcccctggccctcatgttcccccggggctggggtccgcctgcctgtgctgtgcttgcgnnnnnnnnnnnnaaaccaccatgg

SEQ ID NO: 9915 - DNA, 816 bp, Macaca Fascicularis
  misc_feature (1)...(816): n = A,T,C or G
tnnnnnnnnnnnnnnnnnnnnnnnnttcnnngggtagcacannnctgaatgtaaatcatgataaaatggatatttgggaaacttactnnnaagctgtgatttagggtatatttctacttctggactgcctaaatatcaagggctgaggctttcgaattttgaatattcgttgggtttcatattaagaagcctgtggtctaggaatggtatgcagtgtttctcttcatgataaacactttgaatattttttttgagtttttgtttccttttctgaagctatgcctnnnnnnnnnnnnnnnnnnnnnnnnnnnnnnnnnnnnnnnnnnnnnnnnnnnnnnnnnnnnnnnnnnnnnnnnnnnnnnnnnnnnnnnnnnnnnnnnnnnnnnnnnnnnnnnnnnnnnnnnnnnnnnnnnnnnnnnnnnnnnnnnnnnnnnnnnnnnnnnnnnnnnnnnnnnnnnnnnnnnnnnnnnnnnnnnnnnnnnnnnnnnnnnnnnnnnnnnnnctgacctcgtgnnnnnnnnnnnnnnnnnnnnnnnnnnnnnnnnnnnnnnnnnnnnnnnnnncgtgcccggccagctatgcctctttttaaatatttttaatcacattgataaatctatccttcaccacctctggttctactaaagttgatttttattttatctgtaagcctttacaactatttttaaatgtttaattatatttgattaaacacttaactggattttggaataataaaactcgtnnnnnnnnnnnnnnnnaaagcaaagctcctttaattattaataactttgcaaactaagcattgtttatgat

SEQ ID NO: 9916 - DNA, 733 bp, Macaca Fascicularis
  misc_feature (1)...(733): n = A,T,C or G
cagcggatggctctcgggcgggagcgtaggcagtggctctgagtgatgagccggcagtgggcgggggaccaggcacctagtcggagggactgggagcccgcactggggaactgctggacgcaggccctcgggcaggagcatctggcagagcagggaacgccgcaggctccctcctttgcagggagaggtggggcctctgcagccatcctggactggccagggtggaagcggggctgggtctcacttgcctggtggtggtccctggctccaccttgcctgctgcagcccgggnnnnnnnnnnnnnnnnnnnnttccgcctatttgctgctggttccccgggcagtgcgtgggcagcggggggctgtgggcaggaccacgtgggccgtgatcgtgggttgccgagatgaccggagcgctatggcttagctgaatggagcgaggcccctcaggccgtggacgccctcgggaggggtgactggcttgtgtctgggcctgagtgacaggaacgtgtcattgcccccgtcttctagaggctgccggctgggaagacagttatcagggcgagctgtgctctgagtctcaggttctgcttctgtgaagaacgtggtgctgtgggcgagggccccggcgcggacaggagcccctgcagggtgcgtttctgctcgtcagccgccccgggtagcggatgggctgggcgatgcagctggacgcacatctcnnnnnnnnnnnnncg

SEQ ID NO: 9917 - DNA, 725 bp, Macaca Fascicularis
  misc_feature (1)...(725): n = A,T,C or G
cataaccccacctaacataaggacaagtcaatttgtcagtagcttcttctggcttgaaaccccctccctggattttagcccacttaccatgcataacagacaagtcccatattttgtcagtagatgcctttttctcccccccctccccggcttaagccttaagtgccaaatcacaagagaaaagcagtaacagtttacagaagcaacttagtgccttgtaatctaactttgtcactgtgactacattacctcttcagcgccagagggcacccgtgggcctccctcccggagcctctgcccatgggggggtggagacccggaaccagcagccccctccactggcgacacaactgcaccttccctcatttcagtctcccgcacacttattcctccccttttcccggcggcacgtctccccctgtcccctctccccggccccttgaaagagttgttgccagactagggttttgggggaaatctgtcttgacattcaaaacctttttcttcccgatctgaatccctgttgactaatcttgcctgggtttgtgtaggtctgcaggaaggaannnnnnnnnnnnnnnnnnnnnnnnnnnnnnaagtgggactttgtgatttaattttttcttttttttttaagtggggaggaaggggaagctagatggactaggagagacttgattttggtgctaaagttccccagttcatatgtgacatctttttaaaaa

SEQ ID NO: 9918 - DNA, 696 bp, Macaca Fascicularis
  misc_feature (1)...(696): n = A,T,C or G
cagaacacacagccgcggnnnnnncgtcacgcaagacnnnnnnnnnngacgtcactattcnnnttggtgatggnntcacgtggccatgtagatgtcacgcggccatgtagaggtcatgaagagatttagcgatggcgtcgcgcagatgcgcacgtcgcacacagacatggggggcgtggcatgacgtcacaataagatgcagcaatgacgtcacgggccacgttgacgtcgcacgtcatgtcaatgtcacatagaggcggcgatggcatcacacagatggtgatgatgtcatacacagacacagtgacaacacacaccgtcacaacgtcacctatagatatggcaccaacatcacatgcccgcatgtcctttcacacactctttctacccaattctcacctagtgtcacgtccccccgaccctggnnnnnnnnnnnnnnnnnnnnnnnnnncccacccccacccgcacagccctgggccccagcacctcccctcctccagcttccttgcctcccagccacttcctcacccccagtgcctgtacccggaggtgannnnnnnnnnnnnnnnnnnnnnnnnnnntgagtgtgagtgcttccagcccccgcttggggccctgatccgggggtgagggtcacctgctgtcgggaggggagccattccttctccgcccactcccagccctgcctgggcccgt

SEQ ID NO: 9919 - DNA, 721 bp, Macaca Fascicularis
  misc_feature (1)...(721): n = A,T,C or G
ggcacctcagctcctgggaacccacatgaagcctaggantnntgagccagggagactcagcaagctggccctccctcttcattgcctctatgaactggagccttgccagctctcacagtgacccagggtgctgctgcctgctactttatctcaggggagattggagtcnnnnnnnnnnnnacgatttggacgcctttcttgtactgttgacatcagatctgggctggtgccaccagagccaatgaggtccttgtgactcttgctgcccccagcatggctctgctggctccagctggatgacccatctccnnnnnnnnnnnnnnnnnnntctgttttgcagatgacccgttggcttcctgaccacctggccgcccactgctatgcgtgtgacagtgccttctggcttgccagtaggaagcaccactgcaggaattgtgggaacgtattctgctccagttgttgtaaccagaaggttccagttcccagccagcagctttttgaacccagtcgagtatgcaagtcttgctatagcagcctacgtcccacgagctccagcattgaccttgaactggannnnnnnnnnnnnnnnnnnnnnnnnnnnnnnnnnnnnnnnnnnntgggcagtggccaagctgctgttcctatgacaggcccacacagcctgggcagaccaagaggcccgtgcactttggaatgggggcatggaaccacctgtacagag

SEQ ID NO: 9920 - DNA, 745 bp, Macaca Fascicularis
  misc_feature (1)...(745): n = A,T,C or G
tatgtatttaatttaatgatcattatatatgtgggggttaatacgtnttnntgtccctttaaagtcnnnacatgtaattgtagctgtataatcattatnnnnnttttgcaccttaagtcttagaaattaagatgttccatcgtgaggatgagagaggtcctcagtgtttttagtctggttgtagggaaggactcaagtcctggaatgtcctccactggtctactgagttgcagtcacactgttccaatggattatttgctttcggttgtaaattttattgtacatatggttgatttattatttttaaaaatacagactaactgatgtaatgtttatgtgtaagttgcaccaaaaatcaaggacaaaaataagtgtgtttgtttttacaggtgtgaaagtcacagcttgtaaataagtgttgtacgtattaaaccttttccagctctccaaagcgatgtatttttgtacatatgaaatagtactcttaatttcctgggcaagcgtgcttggaattgaatttgacaannnnnnnnnnnnnnnnnngaattgggtccagcagcgggtggccctagtgtgaatccccgtggatgtgcaagtagtggagagaaggagcaccgaggttcctgcccaagcaacggtgcttgcgggaggcagtggggcgtgggaggaaggaggcacagnnctggggaaannncgacnnnctgtcatttnnnagtattctctgtgttgtcttttagctcattga

SEQ ID NO: 9921 - DNA, 820 bp, Macaca Fascicularis
  misc_feature (1)...(820): n = A,T,C or G
catgatgactgtgnnncntnntgcattggggatgtttcaaanccggaaagatatagtggagacaacataatctacaaaccaccagggcattctgctccggatatggtgtacttgggagctatgacaaattttgatgtgacttacaattggattcaagataaatgtgttccccttgtccgagaaataacatttgaaaatggagaggaattgacagaagaaggactgccttttctcatactctttcacatgaaagaagatacagaaagtttagaaatattccagaatgaagtagctcggcaattaataagtgaaaaaggtacaataaactttttacatgccgattgtgacaaatttagacatcctcttctgcacatacagaaaactccagcagattgtcctgtaatcgctattgacagctttaggcatatgtatgtgtttggagacttcaaagatgtattaattcctggaaaactcaagcaatttgtatttgacttacattctggaaaactgcacagagaattccatcatggacctgacccaaccgatatagccccaggagagcaagcccaagatgtagcaagcagtccacctgagagctccttccagaaactagcacccagtgaatataggtatactctattgagggatcgagatgagctttaaaaacttgaaaaacagtttgtaagcctttcaacagcagcatcaacctacgtggtggaaatagtaaacctatattttcataattctatgtgtatttttattttgaataaactgaaagaagttttgggtttttaattttttctccccgactcaaaatgca

SEQ ID NO: 9922 - DNA, 739 bp, Macaca Fascicularis
  misc_feature (1)...(739): n = A,T,C or G
gatggcctcaccagcctacacaccactgaccaccacagccaaagtccggccaaggaaactaggattttcacactttggaaacataagaaaaaagaagtttgatgaatcgacggactacatttgcccaatggagcctnnnnnnnnnnnnnnnnnnnntcatagggtctacagtggctaccgggacctcagcccccttgatgcccctgaactggatgggctggaccaggtgggacagattagctgatgcccttgtcacctgccctctgtgcaccctgagagctcacagtaacactgtgtcaccatataactgcacctcacccctgcacatgtgcatgactcgcagagaacattccagcaattgtgtacccctgggccagtctctctttgaactctgagggtggccaggatctggagctgcatctctaaggggccaggctttggggaccattgtcaaaggtggactcagcaggaaagacacttaaagacacctttacatttctagtaagtcttgatgttcatcttcagcaccagtggaaacacatgaacttcgatgcaggtccagagaccatggacactcccacgaggctcagctctcaggcaccctctatgcttcagttgagggaaaagctcaagtgccttaggcccgtgggccacagtcttggctgagatcaaagggatgagccacagggacttctgccacagtgacaatggaattgtgttgtgcctnnnncagaggtgg

SEQ ID NO: 9923 - DNA, 580 bp, Macaca Fascicularis
  misc_feature (1)...(580): n = A,T,C or G
gctgggaggggtgaggtgtagatatacttcctctcttctcgtggagccttactgaagacaggatcgtcgttcttgtgtttatcagctgagaagggcagtctcgccatcttaaagacctgccctccagccccttcaaatgccacacctcgcaggaagcactctctccacaactgttcagagaaccctgaccagagaagctcccgcacttctcatattaactccgattgtgctgagggggaggggaggagtacacaaagcaggaggtgggtggggaggctggggtcacacagcccaggaggggcacgccgggccaggtgctccgtaagcacaggctccctcctccctccctccccccagtgcaccaggctctggtggggccggtcccaccgcagagttcagaggcatcaagtccaaggacagaactgcaagagtatggacacgaaacaccaaacaaattgggggtgggctcccggccatcctggtgagagggnnnnnnnnnnnnnnnaagccatttctggcttctcagcctccagggtatgggctatgagcagccgtggggagccggggtttctggggcggc

SEQ ID NO: 9924 - DNA, 1127 bp, Macaca Fascicularis
  misc_feature (1)...(1127): n = A,T,C or G
cgagacagcatatggtnnnttcagataaaaaaggaagtccagtaaatnnttgtttgtggctnntgctgttacaccagtgaagagtgttttagaaaaacagaccaacaatcctggtatcagactatttcagtatgatcctcgtgattataaattattggatatgttgcagtattacttgaatctgacagaggcaaatctaaagggagagtccatctggaagctggagtttancgngacccagacttatgtcattnaagatttgcagccagaaagtttatacggattagctaaacaatttgcaatcatagacagtaagcagtttataaaatactacaattacttnnnnnnnnnnnnnnnnnnnnnnnnnnnnnnngataagacatgtaaggcctttcagatttgtgcaattatgaatcttgataatatttcctatgtagattgcctcaaacagctttatataaaacacagttactagtatttcacagtttttgttaatagaaaatgctgctctgattctgagatcaatttgtgggaattttacataaatctttgttaattactgagtgggcaagtagacttcctgtctttgcttttttctttctttgatttttctttttttgatacctaaatgtagactatctttatcattctgaatatgtattatatattaaannntgctcattaatagaaaaatggatgtannnnnnnnnnnnnnnnnnngtttatataattatacctaatttatacccttgttgaaattgtcatttatacaataaagcaaattctttatctctaaatacgatgaagttttcttaacatgataattttagttaaaatctgtgtgttaactgaggtccaagttgtttacctctcatatgtagacagaggttaccactgtttacatgcactatctattcatgggaaaataccatgatcattaggaccatgctcaaacatcacagggcatgtattgcctagctttcttcattctgtgagcctttggcattgataacttttnnnnnnnnnnnnnnnnnnnatacttattgcaactgtagtactaatataaggcctgggtcctagtctagtgcctggtacctagtaaataattgttgaaatgaatgaaagct

SEQ ID NO: 9925 - DNA, 1002 bp, Macaca Fascicularis
  misc_feature (1)...(1002): n = A,T,C or G
ggtgnnngtnctgatgnttccagggctcagatgtgtcccaaacatggcacagactttttggaatataaatgtcgctactgctgttcagtggctgtctttttctgttttggaacaacacatttttgtaatgcttgtcatgatgattttcaaagaatgactagcattcctaaggaagaactaccacactgtcctgcaggtcccaaaggcaagcagttagaaggaactgaatgtccactccatgttgttcatccacccactggggaagagtttgctctgggatgtggagtgtgcagaaatgcccacactttttagaacactcagatcctttgtctacagagagaaaagttgccttcatcccccaagaggatgcggtaaagtttaaactctgctcaggataaggacgggaccatttttacatccatgaaaatgaaccattcacagtacaagaaggatgccaaataccatgtacataattcttgctatggaaagtttccccattattttggtttatcttcttttgaacaaatgacatcaaacttgtgaggtgtttgcatgtggccattaccgttattggcctgtgaagcattggacatttatagataattgatataaaagaatcgccatgcccatgggctaagaacgatgctggctttcaagcaaaaaagaaaaataatcattgtttattgtatactgcctttttgtaatcctgtacaattgcatcacgggtggggataaaaagaggaatattctggtttatttcctagactgttatttaaaaaaaaaaaaaattgtgttaggacagcatataaatgtaataagtatcacactgtatataaagatatcaatgtttgtcctgtataagaattactaaattacaaatgcaatttcatttaaacttctaggttaagtttgagcctgaaattttaatgaagtgcaatactgagtgtgcctcattatcttgcagctgtaaacatattggaatgtacatgtcaataaaaccac

SEQ ID NO: 9926 - DNA, 349 bp, Macaca Fascicularis
gagattggtagtagaagggtagaggtgatgatgagcggggggataagcagtacttacatcactcaaaagacgactttgaaaagggagtggtgaaaaggtctcaatcatttattgattgaattaagaaatactagctaattaaaagtccgagtctaaacagcacagattttttcttttggcttttaaattgtgttttaaaaatagagacgggggctgggcatggtggctcatgcctgtaatcctagcactttgggaggccgaggcgggcggatcacgaggtcgggagttcgggaccagcctggccaacatggcgaaaccccttctctattaaagatacaaaaaaaaaaaa

SEQ ID NO: 9927 - DNA, 1150 bp, Macaca Fascicularis
  misc_feature (1)...(1150): n = A,T,C or G
catgctatcaacaggggcatcttcaccgannnnnnnnnnnnnnnnnnnncggggctgttgggcacgggcaacgggtccacctcttccagtcccaacattggcgtcctggggattaccaaggtgggcagccggcgcgtnnnnnnnnnnnnnnnnnnnnnnnnnnnnnnnnnnngcaccatcggcaagttcacggccctcttcgcctcgctccctgaccccatcctgggaggcatgttctgcactctgtttggcatgattacagctgtggggctgtccaacctgcaatttgtggacatgaactcctctcgcaacctcttcgtgctcggattttccatgttcttcgggctcacgctgcccaannnnnnnnnnnnnnnncctggagccatcaatacannnnnnnnnnnnnnngatcagattcnnnnnnnnnnnnnnnncacggagatgtttgtgggcgggtgccttgctttcatacttgacaacacagtgccagggagcccagaggagcgtggtctgatacagtggaaagctggggctcatgccaacagtgacacgtcttccagcctcaagagctacgatttccccattgggatgggcatagtaaaaagaattgcctttctgaaatacattcctatctgtccagtcttcaaaggattttcttcaagttcaaaagatgagtttgcaattccagaagacactccagaaaatatagaaactgcatctgtgtgcaccaaggtctgaaaaatgacttccaggaaaggaagcatggtatacaacaggaaaagaaaatgacatggggaaccagaagacctaagtctgaaatcccagccctgcccctaactaacttctatgtaaactcagataagtcatctttctctgggattcaattttttgcatcaattaaaaaaaaaaaaacgccatgggtggggggagataggccaaagtctgagtcttagagactcgtaccaatgttatgctatgtctctaaatctttactctcctaagcagacctgtcagcatctaggaagaacagctagaaattttcctctgtggtattttagactgcaagttgataaaaataaaaagaaatgaggacaggttccagggcctgaaatgtaggtatgctggaaggcttttacattgaatttgaccc

SEQ ID NO: 9928 - DNA, 458 bp, Macaca Fascicularis
  misc_feature (1)...(458): n = A,T,C or G
cgcgaaggtgctcggtccttccgagaaagctaaggccgcgttggagtgagggcctnnnnnnnnnnnnnnnnnnnnnnnnnnnccggcagcgccagccccacacttgcccgcgctatggcctccgtctccgagctcgcctgcatctactcggccctcattctgcatgacgatgaggtgaccgtcacggaggataagatcaatgccctcattaaagcagccggtgtaaatgttgaannnnnnnnnnnnnnnnnnnnnnnnnnngccctggccaatgtcaannnnnnnnnnnnnnnnnnnnnnnnnnnnnnnnnnnnnnnnnnnnnnnnnnnnnntgctgcaccagcaggaggtcctgccccctccactgctgctgctccagctgaggagaagaaagtggaagcaaagaaagaagaatccgaggaatctgatgatgacatgggctttggtctttttgacta

SEQ ID NO: 9929 - DNA, 760 bp, Macaca Fascicularis
  misc_feature (1)...(760): n = A,T,C or G
gcaggcagtttgcatgagtgtttctcacttgagcacgctannnaggctgncttccaactcactctattctgcttttactcctgttttggatttttctctttgcacgtttgaaatattttatgggaatgtattagaactcttttcttctaaggattgagacttccaggggactgccatcttacctgagtgtctcctctccattagggagaaggaagcagctagctgtgtccctagctgcaggaagcccctatttttttccaagtaggaagccaccaatctcccccagggagcaccagggagggacatggatgtgctcctgccacagggcccttcctacctttggatctgtgagaaggtgaatacacagcagcaggcagagtaaaatctgctgggactgcctggagatttgtcaggagttgcagacaaataccttggagcattctgttatttttggaaagttcaaataggccaggacaaggaggttgctgactgtactgacaggccctaagtcgttttctccgaaaactatctattcaattgtcagggactggtcttgaggaaagaaagaaagaaaaaaaacgttccctagaattcagtttccaaaatctctttttaaaggtgttacacacacacgcacacacacacatacgatcattaaaaagcatatgatcattaagaagaaaagtgaaatatcttaaaggatagttttaccacagtcctttattgaatcaatttttctacatttcagagcaagtataga

SEQ ID NO: 9930 - DNA, 740 bp, Macaca Fascicularis
cactgtgggaaaccgcagctcagcccaggcccagctggggagaaggcgctacctgcctgggaccctcttctctggaaacctaatcctccctcatttcctctgggcaggactctctggccttctgtggcctgtaatgccaggccatgtgcccccctgccctctagttctccttccaagtccccagcccaaccagtggtgccaggcagcttgccacttgggagggcaggaaccaggaattccacacccttgtgtcaggcccggagcccacccttcacctcccagcccctctagacagcgctggctgccggacaccctcttcacttgtgtgtgtgtagtggaaaggacaagacggtgcagtcggctgcagactcccagtcgggagtgtggccagtctgcctgctgctgtgcggtggctccagaaccacctcattcctggttttgtttggattttgtcatcttgtttttctaacaatggagaaaaagaattgattcttgttaatgacacagaagattgccttaccctcgtgagcgtgagaagccataagagactgaattctgtggctcagcacgcaggactgacccacagcccaggcagcgggtgtgtggagacggggccccgtcctgccaaggggcgccaggatcagagccagtacctggtgagcgggcgcggagcccacaggattcagcagcatggacagtcactcttgcactactccttctccaagccagaaaccacaaca

SEQ ID NO: 9931 - DNA, 747 bp, Macaca Fascicularis
  misc_feature (1)...(747): n = A,T,C or G
tagcnnngaagtnnnnnnnnnnnnnnnnnnnnngnnnggaggctggacagtgctgcaggcacgtctcgatgggagcaccaacttcaccagaacatgnnnnnnnnnnnnnnnnnnnnnnnngaacctcagaagggaattttggctggggaacgataaaattcatcttctgaccaagagtaaggaaatgattctgagaatagatcttgaagactttaatggtgtcaaactatatgccttgtatgatcagttnnnnnnnnnnnnnnagtttctcaannnnnnnttacacgttggtnnnnnnnnnnnnnnnnnnnnnnnnnngttacgtttcaacaaacattacaaccatgatctgaagtttttcaccaccccagataaagacaatgatcgatatccttctgggaactgtgggctgtactacagttcaggctggtggtttgacgcatgtctttctgcaaacttnnnnnnnnnnnnnnnnnnnnnnnnnnacagaggtgtccgtaatgggattttctggggnnnnnnnnnnnnnnnnagtgaggcacaccctggtggctacaagtcctccttcaaagaggctaagatgatgatcagacccaagcactttaagccataaatcactctgttcattcctccaggtattcgttatctaacaggacaattaattccttcagcattttagaatatgccttgtttcatatttttcatagctaaaaaatgatgtctgactgctaggttcttatgctacac

SEQ ID NO: 9932 - DNA, 738 bp, Macaca Fascicularis
  misc_feature (1)...(738): n = A,T,C or G
aatgcagatcaatgtatcnnnctnnngtgcactccccaannnnncccccgccccctgtggtgtgctgctttctagatgagcatgtttcggagcaggcccatcttggacactctgtgctttcaccaaggaagtgagatctgaccagccacaatccagccgaaagaggatcatagatatttgctctgatcagctagatgaaaatgtaacagaatggatttagcccactgctctgttttatccaactgagtctctgaccagcaattagtgcataattattacagcaaaagtaagaaatgaaactagcaattatgtaaatgaatgtgttggcctcttaatacctgttactagtgaacttcctgtgaggaagttagttttttgttttgatgaaatgctttggttttttaaatcttaattctgctgtccacatcctcccaaagtgtgcttacttcatttgtttaatttaaatgaaccttcctccttgtatgtatgaggtgacttggtgggtggggtgggtggtttttgtttttgtgttttttctttcttagggcatctgtagacctcaaaggacctttcctttaggtcatattcctcagaaagtcttcaatcttcccttgtttttgtttgtttgtttttcttaaagaatattttcaaagcttaaatttgtatattaatttaggactatttagaagtataggctgtcattggcggcagcagtatattctgaaatgtctcatagat

SEQ ID NO: 9933 - DNA, 766 bp, Macaca Fascicularis
  misc_feature (1)...(766): n = A,T,C or G
gaagaaaaagaagaagaagcacaagaagaagcacaaggagtgagagcagaaagagtgtagggggtggttgagagtaaggaaccaggagccttgttccttgagactcctggaaagactcaatagtgagaatatagcctcccaccccattaacttnnnnnnnnnnnnnnnnnnnntcccctnnnnnnnnnnnnaggtttgggagttagaggtcaaaagcagctgcctgaatgagttgttgttnnnnnnnnnnnnnnnnnnnnnnnnnnnnnnnnnnnnnnnnnncacccattcatttgcccaactnnnnnnnnnnnnnnnnnnnnnnnnnnnnnnnnnnnnnnnnnnnnnnnnnnnctggattcctnnnnnnnnnnnnnnnnnagagccacagagactgttgtggaggtgagttcgactgtagttagagaagagtgattggacccttcctattggtctgtcctgggccgattagtnnnnnnnnnnnnnnnnnnnnnnnnnnnnnnnnnnnnnnnnnnnnnagcaggagggggaacatggtgagaagtggtgctcacttttcccattcctcctaacatagtnnnnnnnnnnnnnnnnnnnnnnnnnnnnncagctagaaaagtctgcagtgtgacttaacttgtgtattgcattccagcagatgactgaaccagacagcgaagccaagatcattgttctactttgtatttactactgtnnnnnnnnnnnnnnnnnnnnnnnnngtccttgcttaaattcctgtcactaa

SEQ ID NO: 9934 - DNA, 745 bp, Macaca Fascicularis
  misc_feature (1)...(745): n = A,T,C or G
agccggagggnnnnnnnnnnnnnnnnnnccccagggaggaggaggccggtggctctcagagcagctccagttnntcggtgccaggcgagagcctcccnnnnnnnnnnnnnnnnnnnnnnnnnnnnnnnnggggtggtgcgggtaccacaccagcctcggaacccactcctccggccccccatgaggaacaccagcagagggagaccaaannnnnnnnnnnnnnngacagccatcagtcccaggaatccccaaacccggaaaacatagcaaaccccctagaaggaaatgtaacgaaagaatcaatcagtagtaaaaaaaaggannnnnnnnnnnnnnnnnnnnnnnnnnnnnnnnnnnnnnttgtagcacctggaagtattcaatcctcagatgacctagaagaagacactagcgaccactgcattccttccaggactagnnnnnnnnnctccagcatttacattcgacgacatactaataggtcttcnnnnnnnnnnnnttttagctatgttcagttgaggaacgcagcagatctggatgacagaagaaaccgaatgttaaccaggaaggccaacagctcaggagaagccatgtcactggggagccacagcccgcagagcgactctctnnnnnnnnnnnnnnnnnnnnnnnnnntgatgtattttattctcttcctgtggctcctggtgtactgcttgctgctgttcccacaactggatgttaacagactctgatacgtgtgtcg

SEQ ID NO: 9935 - DNA, 646 bp, Macaca Fascicularis
  misc_feature (1)...(646): n = A,T,C or G
ccaccgaccgcctggccgtgccgcctttcgcccagcgggaccgcttccaccgcttccagcccacctacccgtacctgcagcacgagatcgacctgccccccaccatctcgctgtcggacggggaggagcccccaccctaccagggcccctgcacnnnnnnnnnnnnnnnnnnnnnnnnnnnnnnnnnnnnnnnccgggagtcggtgcgcgcaccccnnnnnnnnnnnnnnnnnnnnnnnnnnnnnnnnnnnnnnnnnnggctgggcggcccgtgcccccccagcagtaannnnnnnnnnnnnnnnnnnnnnnacggcagcggcgggcgcatggaggggccgccgcccacctacagcgaggtcatcggccactacccggggtcctccnnnnnnnnnnnnnnnagcagtgggccgccctccttgctggaggggacccggctccaccacacacacatnnnnnnnnnnnnnnnnnnnnnnnnntggagcaaagagaaggataaacagaaaggacatgctctctagggtccccagggggccgggctggggctgcgcaggtgaaaaggcaggacactccgcgcttcttagaagaggagtgagaggaaggcaggggcacagcaatgcgccgtgtacccctcccctcccacctc

SEQ ID NO: 9936 - DNA, 1451 bp, Macaca Fascicularis
  misc_feature (1)...(1451): n = A,T,C or G
tcccttggatnnnnngatagtaaaattaatagccataaagtcttagacnnnnnatttgaagttaacatttcttatttgaaaagnnnaaatttnnnnnnnnnnnnnnnnnnnnnattaaataatttatagctccaaaaacaaaaatatacttgtatatgtcacagaaaaaatgcaaaatttataatagagttacattaaccttgttgtttacctttcactgatttcttacatggtataaattaaagttcaggcatttatggggagcaaaggccctcccccaccaccnnnnnnnnnnnnnnnnnnnngggagtgggagaagtgagtctgtgccaagatagtactgagtcctcagatgttgtatactgtaaattnnnnnnnnnnnnnccaatgcagcaaannntccagctataccttacaagtttggtcattttgaagcttgacgttttagtttgccattatgttaaaaacatctaaataggtgttagtttctcaggagtagattgttagtgttgacttttcctgtaaaacaaacattgttcttggcctgccttgcattgtatactagacttcattgttgcctctcatgcttcttgagttacttaatgatttatgctagccatggaaagctatcagtaacagttttcacgcttataccaaagaattaaatctgatccttaatatctgatattttgctggtacttgtactgataagtgattattggaagtcagtcacagaatttgaaaataaattctagtctctccttagctatttgatgcttttcatataggccaagaactcattgcaaaacatttttgcaagtatgaatgcctgtatttggtctaggaacagtacattttagtctgatttagaattactggtagcttattttaaagcaaggaaaagcagctgagctcgagtttgctgtctttagaacggtttgtgaaaatatggtataaaagtgttttcattttcctgttcttacctattgtatagnnnnnnnnnnnncattttttgggaaaaccttaaaaattgccccaaatactgacattgagtgcatcaaataacaaattgtctttggtatattaaacttttattcttcatgcatctgtaatttaattttaagtataatgttttgcctttggtacaactaaattaaaactcttggtggtcacatgtatataaacaaaacaatatgctttgttgaaggaaaattttctttattggaatgtggttgtaatccttgttcagttcttaagttttggtttttttaaaaaacaggatgcaacttaaaattttctttgcatcaaggtatatgcaaaacattgatgcagtgcatcacaaaacggaagtttgtatttaatgaggaggtgctttacactgtactttttggtgttttttggaaaagttacatttagatctattctgaagctgttcattttaacaaataaaa

SEQ ID NO: 9937 - DNA, 776 bp, Macaca Fascicularis
  misc_feature (1)...(776): n = A,T,C or G
tggctagcatggtgncgggggtgagatgccatattgattagaaggcagcaaagaaccagtaccaggaattgacttgaccattccccttacttttcatctagagaaatcttggattcagcccatttattgctaagacaccttttcactgacgttcttaccagctcagccaaatctccactctgctatagcagaagcaataatgttgctttaaaaagatttcttgactatgccttttcttagaaaggttgatagattagttggaacttcagatcatcagatcagtctcagattcgtttcttggaattttatatttgacagtatttatactataccaaactcatttgcagttcttaggtttgttggttaaaacatttttttaaagcagtaagtttatagaaaatgttttcatttaatggaaggctggggaatgtccagcatcagcccctatggcatgcattcccagtggctttctccatctcagcctgaaacctttggttcagggcttaggggagaacaggccacatggcaacagccacatagtcattgccttcaacacagagccacggggtgaatggatgtacttctgtgtccccaaacagcaatagtcatgcccttgtccaggctgggatctaattgatacaataggtcgttgactccctcccagtagagctatctaggtttgtctggaaaatttcccaccatggcttataggcaccacacctcatgtactcctgatggcttggatctctgtattcagcctttgtccagtccaataa

SEQ ID NO: 9938 - DNA, 782 bp, Macaca Fascicularis
  misc_feature (1)...(782): n = A,T,C or G
gacccagctccatgccagagcaggagctccggttggttttggactctgcaccctctctcctcttcaggggccagacttggcagcatgtnnnnnnnnnnnnnnnnnnnnnnctcatgtcttccccacacctcttcttgccagtaagcagctttggtgggcagcagcannnnnnnnnnnnnnacctgacagcttctcctgctgtttccttcctctctcttnnnnnnnnnnnnnnnnnnnnnnnnnnnnnnnnnnnnnnnnnnnnnnnngcagacacgctctaaggaggcctgctgataaagggctcagccttgccgtgtgccgcttctcatcactgcacacaagtgccaggctttgccgccaccaccaagcacttctgtgatcctgaagggnnnnnnnnnnnnnnnnnnnnnnnnnnnnnnnnnaccagcagacacactgggcatggaccccacaaagcaggtacacccaaaacatagtctgtggctggaacctggtttggtgtttaaaagagaagaaacactgaagatgtcgtgaggagaaaagccggacgtacgttgggcttcacacttatcttatggcttggtagaatctttgtagtgtgtgggatgtctgaaggtcctatttgaggttttcttcattactttgctgctttgtatgtactttcctaccctaagaggaagttttctgaaataagattttaaaacaacaacaacaaaaaacacttgaatgattaatatttcagacnnnnnnnnnnnnnnnccttcagtctgtcagttgaattc

SEQ ID NO: 9939 - DNA, 766 bp, Macaca Fascicularis
  misc_feature (1)...(766): n = A,T,C or G
ctttatgtttggcagaagctgaatgtctgtgtctnnaagcagccagccatcatgcccggtcagtcatacgggtggaagacgggtcttgcagttacaaagacttcagtgagtcccggaacaatcggttctccaccccagagcaggcagccaagaaccgcatccagcaccccagcaatgtgctgcacttcttcaacgccccgctggaggtgaccgaggagaacttctttgagatctgcgatgagctgggagtgaagcggccatcttctgtgaaagtattctcaggcaaaagtgagcgcagctcctctggacagctggagtgggaatctannnnnnnncccctggagacgctgggcttcctgaaccattatccagatgaaaaacccaaatggtccatacccttacactctgaagttgtgtttctccaccgctcagcacgcctcttaattaggtgcctaggaagagtcccatctgagcaggaaggcatttctctttcctttatgccattttttgttttttgtttttgttatttgcaaaagatcttgtattcctttttttgttttgttttgtttttttaatgctaggttcttagaggcttaaccttaatggaaacgctgaaagtctgcagggggagggagaagggaactgatatctcccaagattaaccttcacttttaaaaaattactgtacatgtgatttttttttttttctttttcctgttcattcatttgtgctgcccaatgtactcttggcacacacattcaaaaa

SEQ ID NO: 9940 - DNA, 782 bp, Macaca Fascicularis
  misc_feature (1)...(782): n = A,T,C or G
acagacacagcannnganntcnnncagcggcagatggtgttcggnnnnnnnncgccattgacttgctgaacttcgtggccgcccaggagcgggaccagaagtgaagtctggagcgctgggcactgtggagcggccccaccaccctggcccgcttctcctttgctttcctgagccctaaacacacatgggattggtaactgcctcgcctggtacccgttatccctgcagacggcaaggagcatccgtctcctctcattaacacatggcttcctaaatggccctatttacggcctgtgagatgaaatgcgcttttctctaatgtaacttcctcttaggatgtttcactaaggaaatactgagagaagtcggccaggtaggaagaacacgagcaatgactgggcagagtggattaaaggcaaaagagagaagagtccaggacggggacagggaagcaggcagggagaagcccgggtggctgggcatcctccacgggtagcgccgtctgctggagactgagctggtgggagcagtttgtgtgtttggggttttttaatcgaggtgaaattcaacttacctaaaaatcaatcaccttaaagtaaatgatcagcggcatttagtacatccagaaagttgtgtagacaccacctctgtcacgttccggaacattctctcatcaccgcaggaagcaatcatttccccacccgtcttcctcctcccctggcaactgctaatcgcctttctgtctctattgtctaaaataggttctcccnntgttctggacg

SEQ ID NO: 9941 - DNA, 636 bp, Macaca Fascicularis
aacaaacagcttatggtttactaccttgtgggtttcatgccctttccattagccatgatatagaggacatgactagaacagtgtgttaaggagagaagtacctggaaaatcttttcaaaggtgatagttggttctgtgcttctccagtcagtcaaggtaggtctggaaaagaagttggactagctacttaaattctctcccccacttctttcccactttggcagatgctgagggttggaaaagcaaaagcagatgtgtggcccaaaactgctccaaagaaagatgagaacagcttagttcctcctgcccctgtggagagcgatggggagagtgataattcagaccgtgttcctgtgcccagttttcaaaattccttcagccaagctattgaagcagccttcatgaaactggacacaccagctactgcagatcccctctctgaagagaaaggaggaaagaaaagaaaaaaacagaaacagaagctcctgttcagcacctcagtcgtccacaccaagtgacactactggcccaggctaccttctccatctggtttttggtttttgttttttacccccatgcttttgtttggctgctgtaatttttaagtatttgagtttgaacggattagctctgggg

SEQ ID NO: 9942 - DNA, 768 bp, Macaca Fascicularis
  misc_feature (1)...(768): n = A,T,C or G
tcatcaagcaaggntgtgagttgagaacactgtgcacaagtggatttccatcaccgaggccctagctttcttccactgttgtctgaaccccatcctctatgctttccttggagccaaatttaaaacctctgcccagcacgcactcacctctgtgagcagagggtccagcctcaagatcctctccaaaggaaagcgagggggacactcgtctgtttccactgagtctgagtcttcaagttttcactccagctaacacagatgtgaaagactttttttatacgataaagaactctttttttaagttacacatttttcagatataaaagactgaccaatattgtacagtttttattgcttgttggatttttgtcttgtgtttctttagtttttgtgaggtttaattgacttatttatataaatatttttttttgtttcatattgatgtgtgtctaggcaggacctgtggccaagttcttcgttgctgtatgtctggtggtaggactatagaaaagggaactgaacattccagtgcgtgtagtgaatcacgtaaagctagaaatgatccccagctgtttatgcataaataatctctcnnnnnnnnnnnnnnnnnnnnnnnnnnnnnnnnnnnnnncgtttggctacaccatgtgatttttctgtagaagatggcacttatagccaaagcccaaagtgacatagaaatgctggtttttcagttttcaggagtgggttgatttcagcacctacagtgtacagtcttgtattaag

SEQ ID NO: 9943 - DNA, 751 bp, Macaca Fascicularis
  misc_feature (1)...(751): n = A,T,C or G
atgctcngggcaataactggtttaatgctggtagtgtcaaattttgaagtgttaattttgtcttaaaaccttccagtaagtgaaatgcaacctagttttatcaccatatccaccagcaggcatggataattattttaacaatgctaatatttgagttttgcagtatattatggaatatagtccagttaaatctttggtttcagtatgtctgaagaatacagtgagaggttaatttttgctcaagtggtaccacttaaaggcatgtattcttttagtatgtaaaatgaaatagtaccttgagtttaaatagaatgcattttaggcattgtagagacctgaaatagtacattgttgaaatccatgaagcaattagtttctcattcagaaatgtgcacactaatatttagtttttgctttctcgtggataatatttaagcacttactctgcagtttcctggaagtggtgtgtcaacttgcagtgatactattcaggatggtgggaaatcccccgaaatatgtatgtgtgggcttgcttagattactatatttcatagttaatcttttgtctcttgcagtgctcgtgatgtgtggggcacacggaaggcattgctgtagtcagtcattttggttttcttctatagccattttattattttagtgtattggttatgaagataatattatctgtttgtaaattgctactttgtattttatgcatgctctgtaatttgatttttttttttttttaagc

SEQ ID NO: 9944 - DNA, 739 bp, Macaca Fascicularis
  misc_feature (1)...(739): n = A,T,C or G
tacagggtcntnnncnnncnnaagtcaaacagcaggacatggtctgcgggggtctttgctggaannnnnnnnnnnnngccaggcctcggccttgccaacaggtcagtagggaaatgtggcagacgccctcgaggcatgttaacactgcgctttagnnnnnnnnnnnnnnnnnnnnnnnnnnnnnntgcccacattttggtggagttagtttnnnnnnnnnnnnnnnnnnnnnnnnnnnnnnacaggnnnnnnnnnnnnnnnnnnnnntggaaatgtcaaatggaggcaggaaataggctagggacgagctgaagggctgagcacagcagtgacgctgggtcagcaggtcgcctgcccagcgggcccccaggagagggcttgggcgccccggcagccccccaatccccaggnnnnnnnnnnnnnnnnnnnnnnnnnnnngaggagagctctgtgtgcatgnnnnnnnnnnnnnnnnnatttctattttctgaaactggaagcagccttgatgtgttttgaaggtgtgtgccaaatgcttcagacggaggtgctgaccttggttggtttctnnnnnnnnnnnnnnnnnnnnnnnnnnnnnnnnnnnnnnnnnnnnnnnnnnnnnnnnnnnnnnnnnnnnnnnnnnnnnnnnnnnnnnnnnccagccccccgtgccccctcccaactcaacatgcactcattcagtccattgccttaacacaagcctgatggaaccatttct

SEQ ID NO: 9945 - DNA, 736 bp, Macaca Fascicularis
  misc_feature (1)...(736): n = A,T,C or G
gttaaagtatgtacatgggtaacaaaaagttacttttaaagatccataaagggctgtaggctaattgtggtgtctagtaagtagcataatgagatgcgaggagttgggactttgcgtgttttgcgtattttcgtctgcattcagcttcttactctgggtttgtactcgagtgttatttctttacaaatgcccttgtaattaccactctgaagtctgctgactgtgtctcttgaacatacttnnnnnnnnnnnnnnnnnnnnnnnnnnggtaaattttataagtttctgctctactaactgtagatatttatgactctgcgagttatctatttttataaccacctgtggtccattgttcattttaattcacatttcttacaaagtgtggtaacagggagggagacacctannnnnnnnnnnnnnnnnnnnnaacttcagccaatctgtgaatgtaaaaactacactgttgccttgctnnnnnnnnnnnnnctataatgtggaacaactatccgaatgaaatccaccctaggagatggagtcaaactaaacttgtggtttttcatttaacttttgactataacatggccccatggcatccacaccaagaggggtgttnnnnnnnnnnnnnnnnntgcaaagggaactttagcttttccactggttcttatctgctagccttttacatacatgtgtactatatttgtttacagactgtaggtggatatataatttaaaa

SEQ ID NO: 9946 - DNA, 756 bp, Macaca Fascicularis
  misc_feature (1)...(756): n = A,T,C or G
agctccagaacgcaaggaggtggtgcannnnnnnnnnnnncacgagnnnnnnntcatcaactcccgcacccagggcttcctggcgctcttctcaggtgacacaggggagatcaagtcagaagtccgcgagcagatcaatgccaaggtggcagagtggcgcgaggagggcaaggcggagatcatcccnnnnnnnnnnnnnnnnnnnnnnnnnnnnatnnnnnnnnncgagagcttttccttcctcaaccgggccctggagagtgacatggcgcccgtcctgatcatggccaccaaccgtggcatcacgcgaatccggggcaccagctaccagagcccccacggcatccccnnnnnnnnnnnnnnnnnnnnnnnnnncgtctccaccacnnnnnnnnncgagaaagacacgaagcagatcctccgcatccggtgcgaggaggaagatgtggagatgagtgaggacgcatacacggtggtgacccgcatcgggcnnnnnnnnnnnnnnnnnnnnnnnnnnnnnnnnnnnnnnnnnncaagcctggtgtgccggaaacgcaagggtacagaagtgcaggtggatgacatcaagcgggtctactcactcnnnnnnnncgagtcccgctccannnnnnnnnnnnnnnnnnnncaggacgccttcctcttcaatgaactcaaaggcgagaccatggacacttcctgnnnnnnnnnnnnnnccctgtccnnnccctgttttctaccagagttctgacactgact

SEQ ID NO: 9947 - DNA, 633 bp, Macaca Fascicularis
  misc_feature (1)...(633): n = A,T,C or G
gccaggattgtgnncatggannacgccatggactgcttgatgtctttttcagatttcctctttgccttccagatccagttttactactcagaattcctggacagtgtggctgccatctatgaggatctgctgtcgggcaagaacccnnnnnnnnnnnnnnnnnnnnnnnnnnnnnnnnnnnnnnnnnnnnnnnnnnnnnnnnnnnnnnnnnnnnnnnnnnnnnnnnnnnnnnnnnnnnnnctgttctaccagtgtctggaaaacctgtgtgatcggcacaagtannnnnnnnnnnnnnnnnnnnnnnnnnnnnnnnnnnnnnnnnnnnnnnnnnnnnnnnnnnnnnnnnnnnnnnnnnnnnnnnnnnnnnnnnnnnnnngaatcaacnnnnnnnnnnnnnnnnnnnnnnacaagggggatctgnnnnnnnnnncagcaatggacgaggagctggaacggctcaattccattaagggggagaacccgannnnnnnnnnagggccttgcaccatcaagggtgacacctgcgacgcaagtaccaggaggacataaccgctgtggccttctgttggagnnnnnnnnnnnnnnntggtaggatggagaagggtgggccagaagatgatttcacttgca

SEQ ID NO: 9948 - DNA, 733 bp, Macaca Fascicularis
  misc_feature (1)...(733): n = A,T,C or G
gacnnnnnnnaatttataggacttnnncnggcatgtaggtatgatattcgaagagtttccttgacgaagggtaatgacccaagaagtagtttgttttttttgctttttttttaaaaaggagagacagggtctcactctgttgcccaggctggaatacaggggtgtgatcatagctcactgtggcctctttcaactcctgggctcaattgatccttccaacctcagcattctgagtagctgggatcacaggtgctccccattacaccctgctaatttaattttctttgtagagacagggtcttgctatgttacctaggctnnnnnnnnnnnnnnnnnnnnnnnnnnnnnnnnnnnnnnnnnnnnnnnnnnnnnnnnnnnnnnnnnnnnnnnnntgcctctgccctcaagtagcaattttattagcaaactgtaagcctaaagtaatggttaaaattctcactgtgatattaattactaagccctgaacctgtgcccttcagctttaccatggcagtacttctgtagtagagcgagcacgggtttcggaatcaggcccgtgtgtgaattctgactctatcttccatttaccaaatgactttgggcaaagtacttaacctttctgaggttcccttctctgtaaaagaataaaatatttcagtcttatcgtatagatgatatataagagagcacgtaacaaatgttagatctctcaaatnnnttttnntaacccaaa

SEQ ID NO: 9949 - DNA, 683 bp, Macaca Fascicularis
tatccagctattggacctactgctatacttgtgatactgggtagcccagactttgaaggtgctttgtgaggtttggactcatgctgagaaacccacaggaaagcactgtccaggtaggattagaggcttcccacttaagactatttctgagaaatcttaggttttatcactactatggtttcccatatttacttgggactgttctgagtttctttttccagcccttagcttgggttagaaaagtgggcatgtaactgaacaatgcattacttctaccttaggtttaggagtaatataccaggaaatctaagcttatggaaacatgttttccatttttgcttggagtccatttttctatgtgtacatacttttttatccacgtatgtgtgcatgtcaagaaataaaagaatcacacaacaaggagatttttagcatgatactggaaataaattgtccaggctgacaagtattaattgcctattgaagtaaaagataacagaattgtcaggcagaaggtgtttcacattttgataattccctttgatgtcagaaacaagctcaggtactagctgggctttaggttgcatctggatttattccatgagcaaatacagatgtgtttgagaagaccaaggcctttcacatcctttaaatgtcccactggaagaatcaaatagtttagt

SEQ ID NO: 9950 - DNA, 778 bp, Macaca Fascicularis
  misc_feature (1)...(778): n = A,T,C or G
aggaggagcagtgggcagtgaagttgcagtgtgcaggtcctggctgggtctngccatttactgcaggtggctttatctacgtagcaacagtgtctgtgttgcccgagctgctgagggaggcatcaccattgcagtcacttctggaggtgctggggctgctggggnnnnnnnnnnnnnnnnnnnnnnnnnnncatctcgagtgaggcgtgggataaactactcctgccccaaacttctacccctaactccaggtcagtggtgtgtagaggttgggggccctggccagggacatctgccaaaggaaggaactgtagactgggagaatggttactttggcattcgggccttcaagggctggcagtcttagaggctggagcagtgagaatgagaggccagagggatgatagtgttgggcaccccttgaccatgttggggccatgaagaaggttggaagggagagggggnnnnnnnnnnnnnnnnnnnnnnnnnnnnnncacctgttctcggagaaccaagttgccatacagaaagttctccaaggtccagttccctttctcccaccannnnnnnnnnnnnnnnnnnnnnnnnnnagtcctggacagagagggtaacaggaggagtcggggataannnnnnnnnnnnnnnnnnnnnnnnnnnnnnnnnnnnnnnnccgggggatgggggtgggagagggttagttggtaatctcatggcctgattttttttgtttctattccttttatatcactgttccactcgagggggaggggtggcaacc

SEQ ID NO: 9951 - DNA, 749 bp, Macaca Fascicularis
  misc_feature (1)...(749): n = A,T,C or G
gtggcagaaaataaaggactgttgaagaggcagcnnnnnnnnnnnnnnnnnnnnagaatgctnnnnnnnnnnnnnnnnnnnnnnnnnnnnnnnnnnnccctgtcgtcccccagatcagtgccccgcagtccaacaaggagagnnnnnnnnnnnnnnnnnnnnnnnnnnnnnnnnggtatagggctcaaggaataagtgcaaataaatttgtggactccacgttctatcttcttttggacttgatcaccttttttgacgagtatcatagtggtcatattgatagagcttttgatataattgagcgcnnnnnnnnnnnnnnnnnnnnncaggaaagtgtggaagagagagtggctnnnnnnnnnnnnnnnnnngatgaaatcaggcacaacctctcagaagtgcttcttgccaccatgaacatcttgttcacacagtttaagaggctcaaggggacaagtccatcctcatcatccaggccccagagagtcatcgaggaccgcgactctcaactccgaagtcaagcccgaactctgattacctttgctggaatgataccctaccgaacgtctggggacaccaatgcgaggctggtgcagatggaggtcctcatgaattaagtgccatgctttggggacatctgggtcggcacactgtcagtacatcaggcacatgggcccactagggtggggtttctggttttgtttccgttgtgttttgttttggtttctgtattatgtatttgcaacacc

SEQ ID NO: 9952 - DNA, 747 bp, Macaca Fascicularis
  misc_feature (1)...(747): n = A,T,C or G
tatttctctgacagtggacttcttgaagtgcacatataataaataaatagaaaatatatctttgttcatggtgatgcctacaagaaatgtttacatacaaacactctatacatctaactcccgaaaaaggaccagctatttcggcaacagaaaaaagacaagcatttcagaggagcgttgctttccttaaagaccgaactcacttaagtcttacacacagaaataatgaggacaatttcctaagcaataagaaaatttgtgctaccaagaaaatgcctagatattggctcttggtgaatggtttaggaaagaaagttttaggtacagatcctgtatggtgaaacatatgtacaactctgagaactttcaaatagatatcttttttaaatgaactnnnnnnnnnnnnnnnnnnnnnnnnnnccacctgaaagtgatcacatcctaagtggttcacagtgtgagacccttgcattaaaagagtgaaaactcaacaaaaccgtggacaagaaggacatgaggtcattttaactctcctttccatcaccgctaatctccctggaagaggtccttcctgtgagtctggcctttgaagcagccatatctttaaaagcagagccctatggtcacctcccagcagctgaaagatgtttggtgggaaagacctccctggcagttgactcccacctggggaatggactcttggaccgagtctcatgggtgcagttgggggtggagggagccaggcag

SEQ ID NO: 9953 - DNA, 732 bp, Macaca Fascicularis
  misc_feature (1)...(732): n = A,T,C or G
tttcatttatcacagannntnngaatacctgtgaaaatgcatagtggaggacagttctacaagtatctacatatccaaagaatatggaaagtcttcagtttgctttctgggtttcggacttgtttgggagctcacccctttctcctgtttctcacttttggaataggaanntctatnntatgcctgtctcgtattttggaaatacacaactagtttggnnnnnnnnnnnnnnnngctgaagaaggattttgcctcagcatnnnnnnnnnnnnnnncatatatgagttttgtggtattgagatgacactttggagtttgagtttaaacattaggcttcatgctggaattaactgagacacttgaggcctttaggatgagatgaatatattttacatgtgatgacatggattttgggggccggaggtgtaatgttttggctgagagcgtatgccccctcagattaatatgttgaaaccttacccccacccccatccccgtattgtgatggtatttggaggccctgtctctggtggtttttaggactggaggacatcatgaagatggaggcctcgtaattgggattagtttcctgatacgagtccctagagagctannnnnnnnnnnnnnnnnnnnnnnnnnnnnnnnnnnnnnnnnnnnntttgaaccaggaagcaggcccttacnnnnnnnnnnnnnnnnnnnnnnnnngatattggacttcccagcctccca

SEQ ID NO: 9954 - DNA, 719 bp, Macaca Fascicularis
  misc_feature (1)...(719): n = A,T,C or G
agggccgagacggctagcttcacaccacccttccccgctgtggcttggtgtcannnagaggctgcagagtggctgtgtcgggcgttagacggagcacacaggtggctgcagcccagtccaccttcccagcatcctcgaggtgccctggccctggtgctaggcacgtgggggacggaggtggctgggacgtgagctgtgagacttgttgatgacaggtgctgacaccattgttgggggtgggcacacggcccttcggagcctgggcggcctggcctcacgggcagactcgcagacagggcagggagcgtccgggacagtgccaagagtggggtgtgtgatttttgcaggcgtctgtgatgggtctctttagggacaaatgccaacaagggacaagacagggcaccttccgccagcgcccctccatgtgctgcgttcctcttccagatcaccccctagatgcctacacaatatctttaaagtaacacagaagtttttattttgttaaaaagtatagcctacttacacgcaagatgacatatatagagtttaattttacagtccctccgcaggggagcggcctccagccttatcctccaccgctcggatcatgtgtggtttcagtcagttcttggtgtggtctcatacatagagctccctgtctggtttctttttttctttcttttttctttttctnnnnnnnnnnnnnnncttaaagacag

SEQ ID NO: 9955 - DNA, 774 bp, Macaca Fascicularis
  misc_feature (1)...(774): n = A,T,C or G
acaagatgctgaagtatgcgcttaaggagcgctggaaccggcggcacgagcccgccttcgacaagtgggtcannnnnnaagccaactggatgactnnnnnnnnnnnnnnnnnnnnnnnnnnnnnnnnnnnnnnnnnnnnnntcatctgccttggaaacagtttcgctcacttgccagactgcaaaggggaccagagtgagcannnnnnnnnnnnnnnnnnnattgcaagcatggtgcgagcagggggcctgctggtcattgatcaccgcaactacgaccacatcctcagcacaggctgtgcacccccagggaagaatatctactataagagtgacttgaccaaggacatcacaacatcagtgctgatagtgaacaacaaggctcacatggtgaccctggactatacagtgcaggtgccgggggctggccaggatggctctcctggcttgagtaagttccggctctcctactacccacactgtctggcatccttcacggagttgctccaagcagccttcgggggcaagtnnnnnnnnnnnnnnnnnnnnnnnnnnaagccttacaagccaggccaagcctatgttccctgctacttcatccacgtgctcaagaggacagactgagtgtggcctcagctcccacaagcctccacccaggcactgctaggctctgtcttgaagatcgggaccagcagccccacaccagggccagcctatagagcagactacagctggggtgcagggatgtgggttccgcagaggaaggtaaacaata

SEQ ID NO: 9956 - DNA, 1041 bp, Macaca Fascicularis
  misc_feature (1)...(1041): n = A,T,C or G
ttttagatgaccactcaacataatnnnnaagaatggaatttnnnnnnnttgacagacnnnnnnnnnnnnnnntaaatacataatgttggtatattgaagacgaaattaaaattgtccttcagttttgaggccatgtgtaaagtttaaccatattgtaaaatatctattccgtattagaaatagctagttgacagcttatacttctcaaaattcatattgttatgtacacaaactaagtttctatatgtgaagttagtgagtctttttgtgttactccaaaataaaggcaatgatttattttttcccagtgccaatacaattttgagctaagcactcaaggtggatacttcnnnnnnnnnnnnnnnaatcagcannnnnnnnnnnnnnnnnnnnnnnnnnnnnnnnnnnnnnnnnnnnnnnnnnnnnnnnnnnnnnnnnnnnnnnnnnnnnnnaattagaatagttaatattcatccataaaccattattatgtgtacattattgttgctattgtgataatagagaattttatttatttttatgccagcttatattgtgagaacacatttagtcagtttgggttttatcaatcctgttaatgcttgtccttggaacatctttcgcgtattcaaggtttgtagttgaaaagtttactgtaaaaaaatcaaaaacaaaaaaatgtattgtttttacagannnnnnnnnnnnnnnnnnnnnnnnnnagtaagatttgaggttgtaagcaaactaagttagtgtaatttggcttcatatatgtaatgtgaggtattaatgtaattcatatattaaagcaaaaattgttcacagcaagctgacaatagaatcaagtgcaggtgagggtttttctttcttttttttttaaacactcgctgggttttagattatttgaaaacactgtaggggatgaaggggagatgactacatgatttgcttacacatgcatatttaccagccctgtggaccctagattttgtaacttgatattatccatgcattgatttgtatcccatttccttttgg

SEQ ID NO: 9957 - DNA, 743 bp, Macaca Fascicularis
  misc_feature (1)...(743): n = A,T,C or G
gggccacgggcaaggnnnatcacccgcactgnttnnnnngcgtggtctgtgcccgccccctggagggcacctccttcattgtggaccaggccaaccggccccactgtgtccccgactaccacaagcagtacgccccgaggtgctccgtctgctctgagcccatnnnnnnnnnnnnnnnnnnnnnnnnnnnnnnnnnnnnnnnnnnnntggacaagaacttccacatgaagtgttacaagtgtgaggactgcgggaagcccctgnnnnnnnnnnnnnnnnnnnnnnnnnnnnnnnnnnnnnnnnnnnnnnnnnnctgtcggaagtnnnnnnnnnnnnnnncccagagctgagtgaggacaggccctcttcaaaccgcagtccatgccccatcgtggaccacccacactgagaccacctgccctcacctcagttattgttttgatgtttagcccctcccattcccgaccccactctagcatcccaggtgccctgacccagggcccaagatggcctagggatgcagggtccccaccctggggtctagtcctcgcccatcctgnnnnnnnnnnnnnnnnnnnnnnnnacaccccacctgagcggggnnnnnnnnnnnnnnnnnnnnnnnnnnnnnnnnnncccacgctctcggccagcccccggagcagcctttgtactctgcttgcggaggcttgggagatgccctgaccctccaggacattcccaccctcccccgtgctgccagg

SEQ ID NO: 9958 - DNA, 116 bp, Macaca Fascicularis
  misc_feature (1)...(116): n = A,T,C or G
agggccgagtttannnnnnnnnnnnnnnnngggcttggctcggagaatgctgccgggccctgcaactgggatgaagctgatattggacngtgggccaaagcccggatccaggcggg

SEQ ID NO: 9959 - DNA, 761 bp, Macaca Fascicularis
  misc_feature (1)...(761): n = A,T,C or G
gggtcagatacgaccgggagcagagnnntccctacctnnnnnnnntgctgtccaatatccgcttgccnnnctgccggccccagttcnnnnnagacagannnnnnnnnnntgacctggtgcgttgctgccacaaatgcagggacctggtagatgaagcaaaggactaccacctnnnnnnnnnnnnnnggccccacctgccagctttcagaacccggccacgctgctgcacgtccatcgctgggcttatctacgccgtggggggcctcaacnnnnnnnnnnnttccctgaatgtggtggaagtgttcgacccnnnnnnnnnnnnnnnnnnnnnnnnnnnnnnnnnnnnnnnnnnnnnnnnnnnnnnnnnnntggctgtggtgaatgggcttctctatgccattggaggatatgannnnnnnnnnnnnnnnnnnnnnnnnnnnnnntacaacccggagacagacacgtggaccagagtggggagcatgaatagcaagagaagtgccatggggacagtcgtgctggacgggcagatctacgtctgtgggggctacgatggcaactcttccctcagctccgtggagacctactcacctgagacgnnnnnnnnnnnnnnnnnnnncccttggggnnnnnnnnnnnnnnnaacagnnnnnnnnnnnnnnnnnnnnnnnnnnnnnnnnaagcttcttgagggtagannnnnnnnnnnnctttttcccctatagtactttgtatatannnngatatttaataacccttgg

SEQ ID NO: 9960 - DNA, 937 bp, Macaca Fascicularis
  misc_feature (1)...(937): n = A,T,C or G
agactgttggacagtggtgtgtattgagggcatgaattggaatgatagtctcatacagaaagcagtgagattaagatgatccttattttttctaaatttttcaatcagatgaaagtgatacgattgaaatgaaatcacatatttcatgctcagaaattctattttggtatgtttgtattagcctttaaaaaaaaaaacacttcatttcagaattgttcacaattttatttcttaggtttttagagttcaggatttcatttattaatttcttcttgcttttttggtggaaataggctttgttgtaaacattaannnnnnnnnnnnnnnnnnatatagaaacaagagttttgttaaataataagnnnnnnnnnnnnnnnncctatactataaaatgctctatagggagacaaagtgtttcttttttcttttatgtttaccatatatgtggagtgaaagataaggctcttggatgtgtaacatactcaaaagctgttatactttctcnnnnnnnnnnnnnnnnnnnnnnnatgtgctggggtttnnnnnnnnnnnnnnnnnnnngctgctggaacnnnnnnnnnnnnnnnnnnnnnnnnnnnnnnnnnnnnnnnnnggaagcaaccttcattaatgcagataagtaagtggtgactttttgannnnnnnnnnnnnnnnnnnatttgtaaaaaccattgtttttggatataaagctaataagcactttaaaaaggaaaaggcagcctttactattttttctggttgagtcattgctctttagacatagcatcagcaatagatttcaaagatgagtattaagcgctaccctaaagtatgtacatttttcattttgtcacattgaaaaattatttgcatagttctgaatgctgagaggcagcttatatgtattcacaagaatatctttaagtgtttttttgac

SEQ ID NO: 9961 - DNA, 776 bp, Macaca Fascicularis
cagtcatcagagcacatctgcatgtcattcatgtgtaccaagcaggcagtgggcagctcatgttcatgaacaagtaccatggacggaagctgtcggtgcagggcttcaaggaggcacttttccagttcttccacaatgggcggtacctgcgccgtgaactcctgggccctgtgctcaagaagctgactgagctcaaggcagtgttggagcgacaggagtcctaccgcttctactcaagctctctgctggtcatctatgatggcaaggagcggcccgaagtggtcctggactcagatgctgaggatttggaggacctgtcagaggaatcagctgatgagtctgctggtgcctatgcctacaaacccattggcgccagctctgtagatgtgcgcatgattgactttgcacacaccacctgcaggctgtatggcgaggacactgtggtacatgagggccaggatgctggctatatcttcgggctccagagcctgatagacattgttacagagataagtgaggagagtggggagtgagcttgctagctgcttcagtacttgagagagactctgtgtcccaggcacagctgcgctgtgtcagggaggaggccggtatggccaggtggtggctcctgcagcctggagctgatgtgcagtggcctctgtgagccccagcctgagccagccctagctgcgcttggagtctttatttattttaactatttcttcaacattccacatttgatgatgatacctctttcttccatgagtgtctatgtc

SEQ ID NO: 9962 - DNA, 857 bp, Macaca Fascicularis
  misc_feature (1)...(857): n = A,T,C or G
ggtccaaagattgacatacagattaaagatgcgattgggcggtaccaccagtgtgcgaccatccagctggattttcagttgcccatcaggtttaatnnnnnnnnnnnnngccacgatggtgangataagaaaaggccagtgattgttcatcgagccatcnnnnngtcagtggaaagaangattgctatcctcacggaaaactatgggggcaaatggcccttttggctgtcccctcgccaggtaatggtagttccagtgggaccaacctgtgatgaatatgcccaaaaggtacggcaacaattccatgatnnnnnnnnnnnnnnnnnnnnngatctggatccaggttgtacattgaataagaagattcgaaatgcacagttagcacagtataacttcattttagttgttggtgaaaaagagaaaatcagtggcactgttaatatccgcacaagagacaataaggtccacggggaacgcaccatttctgaaactatggagcggctacagcagctcaaggagtcccgcagcaaacaggcagaagaagaattttaatgaaaaaattgcccagattggccccatggaaaaggaggagcagtgtttccataacattgactttatactctgaaaatgtcaatttatgttgaacttgaaggagtttggcagagtccgagtaggtcaacctgcaggcgtaactatttttgacctagtcagtttttaaacaatgtgcatttgaaggagttaattaaaagagccaataaaatgattttactcattcagtatctgagtgctagaaatgctttagtataatgagggagaacttttttgtaaatttaatgcaattgaaaaagttttaaatt

SEQ ID NO: 9963 - DNA, 517 bp, Macaca Fascicularis
agttccggacccgtggttggggagccccctggccctgccccgctgacgctggactcgtaccaggccccgggccccggggatggagggaccgccagcctcgtgggcagcaacatgttccccaatcagtaccgcgaggcggcctttgggggcggcctcctatcccccgggcctgaagccacgtagccccgcgatgccagaggaggggcactgggtggggagggaggtggaggagctgtgcaatcccaaccaggatgtctagcacccccatccccttggcccttcctcatgcttgtgaaatggacatattcaagccttggcgagaagctccgttgcacgggtttccccttgagcccattttgcagatgaggaaactgagtccggagaggaaaagggacatggctcccgtgcactagcttgttaaagctgcctctgtcaccacatgtgggggaaccttctccagtaggattcggaaaagattgtacatatgggaggagggggcagatgcccggcccttcct

SEQ ID NO: 9964 - DNA, 602 bp, Macaca Fascicularis
ggagactgccctctccccactccatgctggggatggattttctgtcttcctccttgtcccatgaaggacaagccccccaactctggggactactaggtcacttgggaactacctgcatcttcagtccccttgaacttctgccctctgttcagggctgatgcaagccccacaggctgggggaatccggttgtctgagggatgagccttcagcctccctttgtaatgctgctcctctccactgcccaggaccgtgggttgggtgcagacacctaagaggagagacttccttgggacgctcatcccctgctatacctccccttcctcctgcatctccccttctttccttccccctcacaagggagaaaacttagtacttccagcccctctccttggagtcttcatggtctaggggtaggggccccactggcctgagcatgccattttggggggagggtggttgtgcctacttgtcctttggcagaggggatgccaggaccatggacatgaggcctgcgcatccctgccagctcacacagcctgtcccaccatccccccttccttggctactttgacatgtgcctgctcctggcattcaataaaac

SEQ ID NO: 9965 - DNA, 696 bp, Macaca Fascicularis
  misc_feature (1)...(696): n = A,T,C or G
acaggctcatttcgtgaaaacagctgactatgatgtagacagctcctgattggcaaaagttcgatggtgtattcagaactaaatnnnnnnnnnnnnnnnnnnnactgacaacatttgnnnnnnnnnnnnnnnnnnnnnnnagtggtaagagctgtagttagcaaaattgacaccctctttannnnnnnnnnnnngtnnnnnnnnnnnnnnngttgaaacttttgattttctgtttgacgatgctagtcagtgttcacttcttacagcttagccaagaatttttatctcaatgcagaagcttattaatgaaatccacttaaactatacacaacatttcaagaggccctgttggtaaaannnnnnnnnnnnnnnnnnnnnnnnnnnnnnnnnnnnnnnnnnnnnnnnnnnnntaatatctgattacaatgatgaattccgttgtattgtatgtgcgaatatannnnnnnnnnnnnnnnnnngggacttggttttcgtccaaggatgttggcagtaggcacttagtttacctcaggaattgcaatcatgtaagactagatttggaaaaaatgccggagtatataattttggatactgatataaaatcatcaggatggaagttaaacagaattgtcacatgtagtccatnnnnnnnntgtatgcattattctgtaatttgtactgaggcaactttttata

SEQ ID NO: 9966 - DNA, 669 bp, Macaca Fascicularis
taaaattgcccatgggcattataaacaagctagtgtatacagtttttcaaatatcttcaaagaagagattatatatgaatgtgataaaggctacgtcctggtcggacaggcgacactctcctgcagtaattcacgctggtcagctccagcccctcgatgtaaagctctgtgtctgaaaccagaattagtgaacggaaggttgtctgtggataagaatcagtatgttgagcctgaaactgtcaccatccaatgtgattctggctatggtatcgttggtcccaaaagcatcacttgctctgagaacagaacctggtacccagaggtgcccaggtgtgagtgggagacccctgaaggctgtgaacaagtgctcgcaggcaaaagactcatgcagtgtcttccaaacccagaggatgtgaaaatggccctggaggtgtataagctgtctctggaaattgaacaactggaactacagagagacagggcaagacaatccactttggataaagaactataatttttctcaaaagaaggaggaaaaggtgccttgctggcttgcctcttgcaaatcaatacagatcagtttagcaaatctactgtcaatttggcagtgatattcatcataataaatatctagaaatgataatttgctaaagtttggtgctttgagat

SEQ ID NO: 9967 - DNA, 740 bp, Macaca Fascicularis
  misc_feature (1)...(740): n = A,T,C or G
caaagcagtttgtgcctgctgtagaaaagggtttttagatgcctgcgagaagggccctctttctggtcacaagctctctgggctccggtttgtcctgcaagatggagcacaccacatggttgattcnnnnnnnnnnnnnnnnnnnnnnnnnnnnnnnnnnnnnnnnaaacaagccttggcaaatgcaacattatgtattcttgaacctattatggctgtggaaattgtaggtccaaatgaatttcagggacaagtaattgcaggaattaaccgacgnnnnnnnnnnnncactgggcaagacggagttgaggactattttacactgtatgcagatgtccctctaaatgatatgtttggttattccactgaacttcggtcatgcacagagggaaagggagnnnnnnnnnnnnnnnnnnnnnnnnnnnnnnnnnnnnnnnnnnncacacaagaagacatcattaataagtatttggaagctacannnnnnnnnnnnnnnaaaaaaggaaaagccaagaactaactttgcnnnnnnnnnnnnnnnnnnnnnnaactgaatttgtgtggtcttgatactttgatggattccagtggaataaattcaggctgctgaaacaagaaattctgagcccaggaagcgggctcttctttcttcaaaagaagcccttcttattcatattcaggagcttctgttatattcaaaggtaattctatgtctatctccaattctattgattggtttt

SEQ ID NO: 9968 - DNA, 758 bp, Macaca Fascicularis
  misc_feature (1)...(758): n = A,T,C or G
ccaacattnnnnnnnnnnnnnnncacttacgtatgaaaatcccagaaagatctggagctggaacagaggattctgcttgtattccatgggcttnnnnnnnnnnnnnnnnnnnngttaaggatctctacagtggannnnnnnnnnnnnnnnnnnnnnnnnnnnnnnnnnnnnnnnnnnnnttcaatcccataaagaaactggaatttgcccttctatttctagtttttgatgagaatgaatcttggtacttagatgacaacatcaaaacatactcnnnnnnnnnnnnnnnnnnaaacaaagatgatgaggaattcatagaaagcaataaaatgcatgctattaatggaagaatgtttggaaacctacaaggcctcacaatgcacgtgggagatgaagtcaactggtatctgatgggaatgggcaatgaaatagacttacacactgtacattnnnnnnnccatagtttccaatacaagcacaggggcgtttatagttctgatgtctttgacnnnnnnnnnnnnnnntaccaaaccctagaaatgtttccaagagcacctggaatctggttactccactgcnnnnnnnnnnnnnnnnnnnnnnnnngaatggaaaccacttacacannnnnnnnnnnnnnnnnnnnnnnnnnagacaccaagtctggctgactgaaataaattggtgataagtggaaaaaagagaaaaaccaatgattcataacaatgtatgtgaaagtgtaaaatagaatgttactttag

SEQ ID NO: 9969 - DNA, 753 bp, Macaca Fascicularis
  misc_feature (1)...(753): n = A,T,C or G
aagtactcattgtnnatgcgcatgaggaannnaggtcnnnnnacggatccttgaagaatgtggctgtagatgaactgagcaggcagggctgcacggtcacagtgtctgatttatacgccatgaactttgagccgagggccacaaggaaagatatcactgctgctctttctaatcctgaggttttcaattacggagtggaaacctacgaagcctacaagcaaaagtctctggctagcgacatcactgatgagcagaaaaaggttcgggaggctgacctagtgatatttcagttcccgctgtactggttcagcgtgccggccatcctgaagggctggatggatagggtgctgtgccggggctttgccttcgacatcccaggattctacgattccggtttgctccagggtaaactagcgctcctttctgtaaccacaggaggcacggctgaaatgtacacgaagacaggagtcaatggggattttcgatacttcctgtggccactccagcacggcacattacacttctgtggatttaaagtccttgcccctcagatcaattttgctcctgaaattgcatccgaagaagaaagaaaagagatggtggctgcatggtcccagaggctgcagaccatctggaaggaggagcccatcccctgcacggccccctggtacttcgggcaataactctgtggcacgtgggcatcacgtaagcagcacactaggagacccaggcgcaggcaaagagaagacggtg

SEQ ID NO: 9970 - DNA, 757 bp, Macaca Fascicularis
tatgtgctgacgggctgtggaccagccacaaatgaaagtcctggaatagattatgtacaagcaacagtaactagtgtcttggaatatctgagtaattggtttggagaaagagactttactccggaattgggcagatggctttatgctttattggcttgtcttgaaaaacctttattacctgaggctcattcactgattcggcagcttgcaagaaggtgctccgaagtgaggctcttagtggatagcaaagatgatgagagggttcctgctttgaatttattaatctgcttggttagcaggtattttgaccaacgtgatttagctgatgagccatcttgatgtagctgatctctcagggatagaagatatttctcatgaaggcagcctaactctgaggaaagcagtgccaattcaagtacagattgcaacacatcttcaacactatgtgaagggttcacatcttaacctatgcaattcagattgatactcagaatataggttgtattgatttgaatatctgaaatatcaatggaaaatcccactcaatttttgataaacagtttgaacagttttctgtaatcaagcagcttgcatagaaattgtatgatgaaattttacataggttcttggtgctgttttgttctttttttgttttttgttgttttgttatttctttatatacatagaaaattttattgaaagtatgttttggttactaaaattttatttgagtcctaacaaaagacaatggatggcc

SEQ ID NO: 9971 - DNA, 762 bp, Macaca Fascicularis
  misc_feature (1)...(762): n = A,T,C or G
ctgccgagagcccnnncatccaggcagccaagcacaaagaaggggagaggaggccaccagcccggaggctgcagcccagaaactctacctcatccannnnnnnnnnnnnngccctccttgaaccgacctttgattggtttctgcttcaacccccaaaatgttatctccacttccccctcacccaaagaggnnnnnnnnnnnnnnnnnnnnnnnnnnnnnnnnnntttttgttgcttgggcggctgttggtagagtgggcagtgcccatgccatggggtgctctgtgggctcctccaggagcagggaggggggaggggaggggcggggggcacaggagctgggagccccgtctccagggaaaggagaggggggttaagatgcacnnnnnnnnnnnnnnngctacttgatcttgctgaaagtgtttctaaagatagcaccactttttttttttttttaaaaaaaagcttttatatgttaaaaaaagtatcatgcaccaactgtgaatannnnnnnnnnnnnnnnnnnacccggggaggggtcccgagaggctccccatgcaacactggaaatgactgttccagagagcgggcagacctggcagagcgcccctggcacctgagaccgccacccattccactcctgccagaagcgaccctctgtggccgatgggccatgcaggccccttgcagccaactcagccagtgttgggactnnnnnnnnnnnnnnnggggctggaggggggcagtcgggactctgatcttt

SEQ ID NO: 9972 - DNA, 727 bp, Macaca Fascicularis
  misc_feature (1)...(727): n = A,T,C or G
atgtgatatacnnnnncccctgntngagnngnnnnnnnnnnnnnnnnnnggtcagaaaattaattgttttggatccaaagaaacggctgactnnnnnnnnnnnnnnnnnncatccgtgggtcacaggtaaagcagccaattttgtacacatggataccgctcaaaagaagcttcaagaannnnnnnnnnnnnnnnnnnnnnnnnnnnnnnnnnnnnnnnnnnnnnnnnnnnnnnnnnnnnnnnntgccagcagcagccnnnnnnnnnnnnnnnagagccacaaggctagccgagacccttctccaatccaagacggcaacgaggacatgaaagctattccagaaggagagaaaattcaaagcgatggggcccaagccgcagttaagggggcacaggctgagctgatgaaggtgcaagccttagagaaagttaaaggttcagatataaatgctgaagaggtccccaggatggtgcccaaggcagtggaggatgggataaaggtggctgacctggaactagagaagggcctagcagaggagaagctgaagactgtggaggaagtagcagctcccagggaagggcaaggaagctctgctgtgggcttagacgttccacagcaagatnnnnnnnnnnnnnnnnnctaaaccagcttccttcnnnnnnnnnnnnnnnnnnnnnnnattttatgtactttgtccttcagcaaggaaggtgtggaagcatgata

SEQ ID NO: 9973 - DNA, 638 bp, Macaca Fascicularis
  misc_feature (1)...(638): n = A,T,C or G
tgttccagatgcagagttacaccaggatgcaggtggcacgcnnnnactaacttcagacannnnnnnnnnnnnnnnnnnnnnnccaggcgggcagggttnnggcaggatgcaggtggcacgcggggactaacttcaggctgatgagtgtggggtacggggcagcagaggcagccagccagcaaggaggggccgctgagcaccagggccgtggtggaggctgctgtgggaaggccaggccacgaccagaaatcggnnnnnnnnnnnnnnnnnnnnnnnnnnnnnnccaggccccgcagcacttcagtccatatccccagccccactcaccttccttcctcttccctcttctaggacacaggctgtggaccttcaggtgcactgataatggggctggaggggcccccacacctctcagccccactaatacagaaacccactacccgtgagctagaaggtgctcagcggccagggggtctccactgcctgtaacgggcggccttcccgtctgtgcacagcgaagccatgtgcagggcgcccccctnnnnnnnnnnnnnnnncatgccccagggcacggaggggtgaagccagtgcttgggctctgctgctgggagtcttgttgtgtctgcgtgcgcctgtga

SEQ ID NO: 9974 - DNA, 683 bp, Macaca Fascicularis
ttgggtaggaaacctagcctacgagaaacgggtccgtgcggtcacgcctgactgcctgtctccgggtcaaggctgccaggaccagctccagccctccgccagagaaggttgtcctttcccctcggaactctggcttccctaaagcggacgcgcctccttccaggcctcacctcccgccggctccgcccggcccggcccggcccatctcgtccccacctcggcgcccacccattgtcccctcgggcagtcaccgagcgcatatcccgagctctcgattggaacgcctccccatcactcagccacactcgggctggacgcctcactcccgtttccgagccataaaaggtctagggccgcttcccccaagccagcaggtaaagccgcggcggcgggagggagaccgggaggggccgcgcgcccctccgggcaaggggagcggcgggggggcggggggagcgcaacacaccacaaccctcccttgccgtgcgaccgcgcccggcccccaccccgcaagtcctgatcacaatgccggagccgccgagccaccctcgtcatcctgcccggggacggccccggggcagttactaccgcgaagcacggagggcggggcggggcgggccgggcctcggggagaggtggggggatgtgaaaggtcccggatgttgctgaacgggagccccttc

SEQ ID NO: 9975 - DNA, 1216 bp, Macaca Fascicularis
  misc_feature (1)...(1216): n = A,T,C or G
gtctacattaaattacaatattaacaatctctagacacaacgaacttaaaatataagaaataaaaatagaaatctgtttggtctttcttagaccacatatcatggaactcataaatgaaaattctcaaagatagaaatgactattaaagagtgaggnnnnnnnnnnnnnnnnnnnnnnnnnnnnnnnnnnnnnagactcttttaataatttagcacaaaatcaaattatataaactcggtatattccagaaaatattgctttaaacacttaggccatgatcaaaattcctttgnnnnnnnnnnnnnnnnatgaaacatgctattatgtaaaatataaagtacttttaaatgttatcnnnnnnnnnnnnnnnnnnnnnnnnnccttctaacatcactactgaactttcctttcactgttcaacctcatgtatatatacacaacacaaaaccaggtaccaacaaaatccttttaatctttccacaaaataacctctgcttcacaacatcaagactttaagtctccataaactttttacagttgacagcagagaacaaggatcctccctgcgcatgactgtaaaaaccaaaccaaactttattattgcaatcatacaaatactgcaattaaaaaaaatcaaagnnnnnnnnnnnnnnngcaaaaaaacagggactgccagactcaatcttagaatggaaacacaaacacgctagccccaaaccctaaaacagagattcacaagcaactcagctgaaatgaacagacgcagcagggcggacaccatggccttggcacgtcagggagctcactcagaaacctgacttacaaaaaatcannnnnnnnnnnnnnnnnnnnnnnnnnnnnnnggaaacacagagaggccagtggctaggatgcaccaccattcgccagctttgaaccctggctctttctcatgctcccccacgaagggcccttgttttcaatctaaatgctggtcatctgagcgagctgtcttcagggatacctaaggannnnnnnnnnnnaaaaaatgcagcatctagggtcttcttcattgtgcattcatgatcacacacaagaacaaaccaaactttcnnnnnnnnnncacaagaacaagaccttttaaaggaacttctctttagcaatatcttcttgtccaatctcaaagttattttgcacagagtaacagaaacaaatttaatgcctannngaactaga

SEQ ID NO: 9976 - DNA, 216 bp, Macaca Fascicularis
ccagaagctgggtttctttaaattagggctgccgttttctgtttctccctgggctgcggaaagccagaagatttttatctagcttatacaaggctgctggtgttccctctttttttccacgagggtgtttttggctgcaattgcatgaaatcccaatggtgtagaccagtggcgatggatctaggagtttaccaactgagacattttcaattcttc

SEQ ID NO: 9977 - DNA, 759 bp, Macaca Fascicularis
  misc_feature (1)...(759): n = A,T,C or G
atcagagtactctcnnnngatctgcaaagtgtagatnagcgataaccgaaaaacaggagttcatttcatccaaaacaaacactggacttcctgcggagtgacatggctaattccaaaatcacagaagaggtgaagaggagtatagtaaagcagtatctagatttcaaacttctcatggannnnnnnnnnnnnnnnnnnnnnnnnnaagaaggggaggtgtcagctagcacaaatgctcggaacaaagcnnnnnnnnnnnnnnnnggaggaggcagccctaaaaataatacagcagcagagacagaagatgatgaaagtgatggggaggatagaggaggaggcacttcagggnnnnnnnnnnnnnnnnnnnnnnnnnnnnnnnnnnnnnnnnnnnnnnnnnnnnnnnatgaaagtgttgacgtcatggatgtcatcgctatttgctgtccaaagtacaaagatcgaccacaaattgcaagagtagtacagaaaaccagcaatggcttcagtgttcagtggatggcaggctcctacagtggctcctggactgaggctaagcgccgtgatggccgcaaactggtgccttgggtagacactattaaagagtcagacattatttacaaaaaaattgctctaannnnnnnnnnnnnnnnnnntaataaagttgttcagactttacgatccctgtatgccgccaagnnnnnnnnnnnnnnnnnnnnnnnttgtacatgcagccaaatttacaggaattttttaaaa

SEQ ID NO: 9978 - DNA, 747 bp, Macaca Fascicularis
  misc_feature (1)...(747): n = A,T,C or G
ccagagggaccaagcgctgagaccaaagttgacnnncnnntagggctgtcctgcctggggccccacttgaagaaggcaggacagaggcaccgaggccagggagacgcccagtgaggcagccctgggccctcctccggcctcttcaccagggcacccacccgaggaacctccgaannnnnnnnnnnnnnnnnnnnnnnnnnnnnnnnnnnnnntgtggacagaactcagaatgaaactgcaacccacctgcccccagccctgcccctcaccctgatgcgaagctggagaggggcgtgatgcagggccctgatgcccccacccacctcggtccagcgcggccctgcccaggaggcggcagccgggcgcaccctcgccagccctgctggagtttgctgtgggcactgaggcgcgggcgcccttccaaagcacatactcaccgaatgtttacagactggctgtcctggcagggttttcaattgcacatgttttttatactttccttttttttttttttttataatattttttacaaaaaaagattttatacaagcaatatatatatggatttctataatcactcgatgtgatacagtataaatatgctatggtttgtttgttatgaacagatagccaccagttacggccgttgtgtgtaactcctaagtactgtagtctctgggtgtcgggggtggccagggcgggggcggggtgcatttccatccttgtaaacccttcatagtactcagt

SEQ ID NO: 9979 - DNA, 712 bp, Macaca Fascicularis
  misc_feature (1)...(712): n = A,T,C or G
agtgtcatgtcattttgcaaatgtatnnnnnnntccattgatttatgctgtctaaaacattctttttagagtcaacattgttcgatagaacaatgaaccagcacaaccaaaagataccaaagtcttgtcaaattaaaataaaattaaataaacaaaattgaaaatttccctcaaatctcctataaattattaataaccatgaggtagacaacttaaacaattttgagcctcctctgaactctggaaacctacctttctgatgtatgatagaatcagtatcataggttagatgttccttgtaatcagagtatttctactcaaatgttattaccaattcgtaagcatctactgtttctgctatcagagaccnnnnnnnnnnnnnnnnnnnnnnnnnnnnnnnnttttgtgacgtatttttgttttgtttgaaaaataacagctcgccannnnnnnnnnnnnnnnnnnnnnnnnnnnnnnnnnnnnnnnnnnnnnnnnnnnnnnnnnnnnnnnnnnnnnnnnnnnnnnnnnnnnnnnnnnnnnnnnnnnnnnnnnnnnnnnnnnnnnnnnnnnnnnnnnnnnnnnnnnnnnnnnnnnnnnnnnnnnnnnnnnnnnnnnnnnnnnnnnnnnnnnnnnnnnnnnnnnnnnnnnnnnnnnnnnnnnnnnnnnnnnnnnnnnnnnnnnnnnnnnnnnnnnnnnnnnnnnnnnnnagtga

SEQ ID NO: 9980 - DNA, 691 bp, Macaca Fascicularis
  misc_feature (1)...(691): n = A,T,C or G
aagcccctctttctagccttttctactactatgcttggtcaaggtttgtgccctactacagaacagggctaaattagccatcaccactgaaaactcagctgaattttttnnnnnnnnnnnnnnnnagcatttttccatctgtttggggccttttcctctttttttccattctccccaggtattttatctggcttcaaaattaggaggattatttttcagattgtttttattcagtgtggccgattcctcatctgattcaggctgtccagtcaggcccctcccattttaggagctggagccttcatttatgaagagattctcatctatgaaatggatcctcatttgtaaatcttttttcttccattttcacaaagctgtaaagaaataatccatctcaaccttacccttttctctggagtcagtggggtctttcctcactccatcttacacaaacctgagctggaagctcaactggttttgttccctgtttgaaatattgtgatctccctcccttgaaagaaaaaccaagaaccagaggagtagactgactgaagatacaactcctggnnnnnnnnnnnnnnnnnnnnnnnnnnnnnnnnnnggggtttgtagagaaaggtgacaaatttcagtacctctggcatgctgtcccaggaaactagggctcccactaacttatgaggtttttaaa

SEQ ID NO: 9981 - DNA, 760 bp, Macaca Fascicularis
  misc_feature (1)...(760): n = A,T,C or G
caaaaaaggacgtaaaatttacagtcaatatatgagggtttttttccctccataagtttaactttaaaactgtatttaaggaatcaaatcttacaaaatcctggaagattttggtaatgatgttgataatttcagggaaattaatcaagtacctatattgatttaaaagtatattttactcaatagtttgaggatcttgccatggaagatactagcccagcctagcagaaaagtgcaatatgtatagcatactttgacattttaaacgttatagtccataaccatnnnnnnnnnnnnnnnaaactacatgaagttatttataattaagtcacagctaatcaggcattttgaaagcttaattggattcaaaacccataatgttggaatttggtaaaattttaacattgatttttactgtgaaaagttttttataagatatacacaccctagtttaatgttgtgtcttggtgtggatttacaaatttactacaggtattctgaaccaggaacacaatcaggtttcaggccagtttgatactggctatccttaattctaatacgagagtaggacatcatactaaatgttatgtcagtgggactgtactgtctgtggaacttagcaaattaatcattttcttcagacttgaaggagagtaagaaataaaatttggagtcataggatattgatgtacaatttaaggattaaacatttttaatcaattgtggatgatggcttattaaattaaatgttgacttccta

SEQ ID NO: 9982 - DNA, 747 bp, Macaca Fascicularis
  misc_feature (1)...(747): n = A,T,C or G
aagcgtggccggcaggcagaagaagaatgtgcccatcgaggaagcccccttcctaaaaagaggaaaggacggcctcctggacacatcctgtcaagcgaccgggcagccgccggnnnnnnnnnnnnnnnaaaatcctgtgaaccaattcgcnnnnnnnnnnnnnnnnnnnnnnnnnnnnnnnnnnnngaatctacnnnnnnnnnnnnnnnnnnnnnnnnnnnnnnnnnnnnggggatggggggcaccagaggaagaatctacatcaagcacccacacctctttaagtatgcagctgacccccaggacaagcactggctggctgagcagcatcacatgcgggcaacagggggcaagatggcctacctcctcatcgaggaagacatccgggnnnnnnnnnnnnnnnnnnnnnnnnnnnnnnnnnnnnnnnnnaagctagaagaattgaaatcctttgtcctaccctcctggatggtggagaagatgagaaagtatatggagacactacggacagagaatgagcatcgtactgttgaagcacctccacagacctgaggccaggtgccctggccacacttggcagccctcctccaaagccctcttcttcacacggctgaggccaccgctgggactgctcctagatgnnnnnnnnnnnnnnnaagctgtgnnnnnnnnnnnnngtagtgactcactgcacagcacccccagactggcatgtgnntctatatttgtaaaattatgggataagaa

SEQ ID NO: 9983 - DNA, 725 bp, Macaca Fascicularis
  misc_feature (1)...(725): n = A,T,C or G
ttggtgcacagagaccagaatcagcccgccgtgatgatgtggtctggccaaggagcctgcgccctacctggaatctgccgactactacatcaagaattttactgccttgatctaggacagattatcagaggtgggcacccttatcctctcttnnnnnnnnnnnnnnnnnnnnnnnnnnntttgtcttatgtttggatgctacattttggttagaatttaatgatcatgtctctcatcaagattacccacatgatcactctaaggctgttgtaagcctaactgacaagtattccatatgtcaagatgttaagtgcaatgcaaaataagatgcaagcatcaaatgagactgagagagaaatgctagaaaccttcacctttactgcctttcttgatgataaccttgcatcctgtgagggaaacagtgttacagtgatagaaaggtaaggttctgaaatttgaagagattggaggccaggtgtggtgnnnnnnnnnnnnnnnntcagcattttgggaggccaaggtgggtggattgcttgtacccaggagttccagttgtgctgggcaacactgtgggaccttgtctctaaaaataaagataaaaaaaaaataactgggtgtagtggctcacatctgtagtcccagctactcaggaggctgagatgggagcatcgcttgaggaggnnnnnnnnnnnnnnngcggtgatcgtgccactgcactccagcct

SEQ ID NO: 9984 - DNA, 717 bp, Macaca Fascicularis
  misc_feature (1)...(717): n = A,T,C or G
agctcgacacaattgtccctttggaatcaaccaaagcctacaacatggtggacatcatacactctgttgttgatgagcgtgaattttttgagatcatgcccnnnnnnnnnnnnnnnnnnnnnnnnnnnnnnnnnnnnnnnnncgggaggactgttggaattgttggcnnnnnnnnnnnnnnnncctcaggatgcttggatattaattcatctgtgaaaggggctcgttttgtcagattctgtgatgcattcaatattccactcatcacttttgttgatgtccctggctttctacctggcacagcacaggaatatgggggcatcatccggcatggcgccaagcttctctacgcatttgctgaggcaactgtacccaaagtcacggtcatcacgaggaaggcctatggaggtgcctatgatgtcatgagctctaagcnnnnnnnnnnnnnnnnnnnctatgccnnnnnnnnnnnnnnnnnnnnnnnnnnnnnnnnnnnnnnnnnnnnnnnnnnnnnnnnnaaccttcttccacacgtgcccgaatctgctnnnnnnnnnnnnnnnnnnnnnnnnnnnnnnnnnnnnnnnnnnnnnnnnnnnntgcaaatattccattgtaaacaattcaaaggaaaagaaaccaagaactgaattattgtctgcccattcacatcccattcctgccttttgaaatcatgaaacatgggaattcaaatac

SEQ ID NO: 9985 - DNA, 713 bp, Macaca Fascicularis
  misc_feature (1)...(713): n = A,T,C or G
aaagatgtcactccttgtttttaaactgtggtccatctccagactcttaccatttacagacagacagacagacacacacacacacacatattttgggacaagtggggggtccaagaaagtacttagtaaatgagtggtgttttctgtgagctaatccacaacctattaccacttcctgaatcagttattatttcttcctcttttttttctaccagagaacagactaacagcttaacccttcacaacagttcttgttagaatcataggatgtgtggcccagaggtaagaatagaatttctttcactaaagaacacaccttttgtagatgaccgcttctcaactctgttttgatannnagtaattccgaagcatgtaagacaaaaaaaaatgaagacactcaatctagaacaaactgagccaggtaggccnnnnnnnnnnnnnnnncattcctcagccccgggctcaaaactccctgagcctagcacaaacacatcccatcctcccatcccaccaccatatatctctcaaactccctgagctcagtacaaacaccacctggaaagtctccgataaggagacagccgtacaagnnnnnnnnnnnnnnnngaatttctttgttcccctacaactttcgggctataaaaagcaaacgctcgcattgttcggggccctcttgtatactgtgtaaaggagggaccaagttcgaacttgta

SEQ ID NO: 9986 - DNA, 734 bp, Macaca Fascicularis
  misc_feature (1)...(734): n = A,T,C or G
gtagagcaaaacnnnggctccctcacagccatnnnnnncagagagcacccttgcagtgagagtgagttcctcgcaggtgtgtgcgtgtacactcaccctctgaattgctgccactgccaaagaagtgggctccaggtgaaggccagtgccacgtcactctggctggccttctgagtagtttcnnnnnnnnnnnnnnnnnnnnnnnnncnnnnnnnnnnnnnnnnngccagaaggcttggcgttgcagagtgctagagccagtacggaacttgccgacttgattgttttacagcagaggagagaggatcacagagggaaagtgattcacccaaagtcacannnnnnnntcatggctgagctgagaccaggactaagcttcctgacccccagttcaccatgaaaagggttctggcaataggttcaannnnnnnnnnnnnnnnnaatcctacacccacattccctgcaactcctcatctccctgatcttccagacaaactacctggatgttgcccttaaaccatttctagctgttaaccctgtccagaaaaatgattgagtgatagctgagaagtggaaagtgtgggatttttggcaggtgctctctttcctctgctccccgtgccattctttctcttcctcctctctgtgatggtatgtccagcctcactctccctccctggtgctgtatgcgtttcccctgttagctacatttgtgatcacatacccttctttta

SEQ ID NO: 9987 - DNA, 684 bp, Macaca Fascicularis
  misc_feature (1)...(684): n = A,T,C or G
gagagaggggtgctgctggcatacctggaggcaagggagaaaaggnnnnnnnnnnnctcagaggtgaaattggtaaccctggcagagatggtgctcgtggtgctcctggtgctgtaggtgcccctggtcctgctggagccacaggtgaccggggtgaagctggtgctgctggtcctgctggtcctgctggtcctcggggaagccctggtgaacgtggtgaggtcggtcctgctggccccaatggatttgctggtccnnnnnnnnnnnnnnnnnnnnnnnnnnctaaaggagaaagaggagccaaaggacctaagggtgaaaacggtgtcgttggtcccacaggccccgttggagctgctggcccatctggtccaaatggtccccctggtcctgctggaagtcgtggtgatggaggcccccctggtatgactggtttccctggtgctgnnnnnnnnnnnnnnnccccaggaccctctgtaagtaaatcactccaaacatgtgtcttcatttactctagccaaaagacctggcttctggttgaaaactggtaagaaactcttcatgaaaacacatcactaatatttactattactctcnnnnnnnnnnnnnnnnnnnnnnnnnnnnnnnnnnnnnnnnnnnnnnnnattatattttataatatcagttttagnnnnnnnnactcat

SEQ ID NO: 9988 - DNA, 987 bp, Macaca Fascicularis
  misc_feature (1)...(987): n = A,T,C or G
aatgatnnnnnnnnnnnnnnnnacggaagtgctacagtaccagcttcaannnnnnnnnnnnnnnnnnnnnnntgtgtttgctaggaataatacatgaatgacttgcnnnnnnnnnnnnnnnnnntaggtcagcctacgcttggctggaaaaaacccactnnnnnnnnnnnnnnnnnnnnnnnnncactatagatggttatatcagctaagtgttcctggaacataaaaattnnnnnnatcaaatttgaatacaggaatgaaatcacaggtacttgggggggatatcattctagagcacgcaactgcaaagaaaacagaaagttgactgttagtttgtatagctttttagctaggaaaaaaaggctttggtacagtaatttcatctttannnnnnnnnnnnnnnaattgggaatgttatctgcttgattgttgctgacttgatatgattcattagaaatttatatcttaagtactcaagtacttcttgaatctctgtattttactataaaatgtatgtaattatttgttttatgaaatttagaacttgaacattgctgaattggaccactttttatttttaaatattgagtttaaatattttataactggttttgcactgaaaaaattaacatttcagattgacaacagnnnnnnnnnnnnnnnnnnnnnnnnntaatattattgagcaatgaattttttatttccgcatggaaagttattgatctctatggctgtaaaatatttctttatagcgttattaaagtgtgtcttaataaaattaaatttgggatacaaagtatttattttacaatgggtgggcgggggaagcttttccagaaagtttccaannnnnnnnnnnnnnnagttgaaaaaactctccttagtgcttattttctaacttaaaattcacctggaactttaaattggaaaggattcttttaattgtgggttataggctataatactgttgcatcnnatttctgtaag

SEQ ID NO: 9989 - DNA, 740 bp, Macaca Fascicularis
  misc_feature (1)...(740): n = A,T,C or G
gagccctggcgccctagaggcctgnnnntgnnntggccagactgtgccagagcctctccctgctcacccctgaactgatggnnnnnnnnnnnnnnnnnnncgggtctcctggcaggtgccccccgggtggccccaggttcgaggtggccaagggctcctgagcgtctctccccggctttctagggacagaagatgagcctgtcggtcctggagagtatggggttccgcgtgggccaggctctaggcgagagactgccccgggannnnnnnnnnnnnnnggaggagctggatgtcctcaagttcttgtgcaaagacctgtgggtggccgtgttccagaaacagatggacagcctgcgcaccaatcaccaggggacctacgtcctgcaagacaacagcttccccctcctccttccgatggcctttggcctgcagtatttggaggaagcgcccaaggtaagttccaggtgctgattccgaaatcctaagcctgccccgcacccgccgagctgcactactgcccccagtctcaccggcctcaggagacggcggctgcattgggccccaggccgctgcatttgggggtggtgttggggctagtgctggggatcccaggccctagggttcacatttactcaggaagtgggtatcaaagcgaggtgggggtgtcacaggaggcaaaggggtcccagctgcggtcaggactggggtgggattcctgcctgcccactgcccagaggctt

SEQ ID NO: 9990 - DNA, 744 bp, Macaca Fascicularis
  misc_feature (1)...(744): n = A,T,C or G
ggnnnnnnnnnnnnnnnaannnnnnnnnnnnnnnnnnnnnnggaacaacagaagagaataaagaannnnnnnnnnnnnnnnnnnnnnnnnnnnnnnnnnnnnnnnnnnnnnnnagaccaagtgnnnnnnnnnnnnnnnnnnnnnnnnnnnnnnnnnnggacggcggggcgctgcgaggagaagttattcctnnnnnnnnnnnngcgacgggaccagtgtgtcttgatgatgagaatgagtttcctcctataatcnnnnnnnnnnnnnnncagaagggcaaaacgaagcagtcatgatgagaagcacacctcagaaatcaggacatccccctatcaggtggttttggagaaaacaaggaaggtggaagaatggagtgcaattgtgtgagcagaaaggggggcaggaatcccggnnnnnnnnnnnnnnnnnncacaggacctggttaactcctcaccaagcttcccnnnnnnnnnnnnnnnagtgggcgtgnnnnnnnnnnnnnnnnnnnnnnnnnnnnnnnaatatgttcaaaccatagtgtaaatgctaattaaccatattggtatataaccagaattttatattaaaaggggcctcctttttaaatatatgctatgtaaaaaatgtacttataggaacatctctttgaattgtatttcttgtatattacatacttaagagaaactattttagccnnnnnnnnnnnnnnnnnnnnnnnnnnnnnataaatcatttattactggg

SEQ ID NO: 9991 - DNA, 761 bp, Macaca Fascicularis
  misc_feature (1)...(761): n = A,T,C or G
gtagccacagaatacttattcattcatttcccagatcatcatgaaggacacttancnnngttgcgaagctctttggtgaataatagaactcaggccaaggtagcggaggagctgggcatgcaggagtatgccataaccaacgacaagaccaagaggcccgtggcccttcgcaccaagaccttggcggaccttttggaatcatttattgcagcgctatacattgataaggatttggaatatgttcatactttcatgaatgtctgcttctttccacgattgaaagagttcattttgaatcaggattggaatgaccccaaatcccagcttcagcagtgttgcttgacacttaggacagaaggaaaagagccagacattcctctgtacaagactctgcagacagtgggcccatcccatgcccgaacctacactgtggctgtttatttcaagggagaaagaataggctgtgggaaaggaccaagtattcnnnnnnnnnnnnnnnnnnnnnnnnnnnnnnnnnnnnnnnnnnataattttccccagatggcccatcagaagcggttcatcgaacggaagtacagacaagagttaaaagaaatgaggtgggaaagagagcatcaagagagagagccagatgagannnnnnnnnnnnngaaataaaggagggcatgcaagtgtggagtatttacttgctcagtactgtgactgttgtctattgagacctagcctagtttcctacagacaatgaatgaagtgtgctcatg

SEQ ID NO: 9992 - DNA, 861 bp, Macaca Fascicularis
  misc_feature (1)...(861): n = A,T,C or G
ctgtgtgatgccaccagatttgactgcattgctaaacaatttgacatacagctgttgactcacaatgatccaaaagaactgctttctgaagcaagtttccaagaagctcttcaggaaagcattcctgacattcaagcgcacgagtgggtgccactgtggctactgcgatactcggtcattgtgaaaagtagaggaattatcaaatcaaaaggctacattttacaagctaaaagaaggggttcttaactgacttaggagcataacttaccggtaatttccttcaatatgagagaaaatggagttgtgtaaaaatctagttactgcctgtaaatggtgtcattgaggcagatagtctttcgtcatatttgacagtatgttgtctgtcaagttttaaatacttatcttgcctccatatcaatccattcttatgaaccactttattgctttccttaaactattgttttctaattgaaattgtctataaagaaaatacttgcaatatatttttcctttatttttatgactaatataaatcaagaaaatttgttgttagatatattttggcctaggtatcagggtaatgtatatacatattttttatttccaaaaaaaattcattaattgcttcttaactcttattataactaaccaatttaattacaattgttaaaactgaaatactggaagaagatatttttcctgttattgatgagatataacagaataactggagtagctgggatttactagtagtgtaaataaaattcactcttcaatacatgaatggaaacttaaatttttttatgtgtccttgcttatagtttagctgtaataanntaaccatgtattcttgtaccgtat

SEQ ID NO: 9993 - DNA, 704 bp, Macaca Fascicularis
  misc_feature (1)...(704): n = A,T,C or G
tgcagagcctcatgnnnnagtcaccacccacatgactggtgggtaaagtgaggcacaagagattnnncatgcacctatagttgtatggtctgcagtgaggtagccgatgccagagctgtgtcctccctccatagaagccaggagaaaggccagactggtgacctgttgaagcctttgtcttttgacgttgaattccattcgcccactgccatcaagacagctnnnnnnnngattccgctgcatggtctcttacaggaacctggagtgccgagaagtcctgctgtgtttggtgccatcatctcttactttgaacagttttttgaaactgttggaatttctctgggcaatcaacagtgtgtttcaggagacggcagcgaggccaccttgcgtggtgtggtggaggagctggtgcggttccggcagaaggtccggcagtttgcgctggccaaggccgaggccacgggggaggcccgacggcagcnnnnnnnnnnnnnnnnncccctgctggaggcatgcgacaccctgcgccaggacctgactgcccatggcatcagcatcaaggacagaaacagtacaacgtccacgtgggaactgctggatcaaaggacaaaagaccannnnnnnnnnnnnnnnngatgcagcacagccatgaacctgctcacgacaagatgcacctgtgctttatgttaaaggctttatgttaa

SEQ ID NO: 9994 - DNA, 742 bp, Macaca Fascicularis
  misc_feature (1)...(742): n = A,T,C or G
gtatcacnnnnnnncaccaatcactccagatggttttgggggaaccattctcttctggtgggctttggggtatccccaccagctttcccttcaaaatagcaccttacaccccatctttgactcagttcccctcacccaaagatcccagcctagggatggggtacagggactttaaatagtccctaatccctaatttgcactagttaaccctggtcaggggtccctgtatttcnnnnnnnnnggggagatgaagaaatgtttgctcctaattctctttgaaaactgggcctccctgctctgtgattggataaacatttcccatcccacccacctccccccagaaaatagctcacaaggggagagccagtttgggggagcaaatttgacaaatgggaattagaggagtgcagttttaaaaggnnnnnnnnnnnnnnnnnnnnnnnnnnnnnnnnnnccagctactgtttttggggccaagatggctgccctannnnnnnnnnnnnnnnagggcaagatcatggcttttggagggaggtgagtttagggagggccaggaccatcctcctacccctcataccctcccagcatatacaaagggggaggtttnnnnnnnnnnnnnnnnnnnttcaccacagaggagtcactccttcattcctcctctgtctctttgcacttttcttggtcttggccacagcctgagtgatgaatttcctactgaatgtaccaagtccaattttaaggg

SEQ ID NO: 9995 - DNA, 622 bp, Macaca Fascicularis
ttccagttagtggagttttaaaggctctgtttgctggagaagcaaggaggttagaatgtattttttgttctaagcatatgcactatttagagtcctagcccctcatgttcagctgtgctgtgtttctactgaccaaacaggagagccagcagcacttccagcgtttgggaatggaagagattacttctgtagtggataattgcagcctcatagcccctgtgcagcgttcgtcatgggactcagtgactcatggatatagcatcagccatggcaggaatgcacaggactgtggcatttgcagcatcaaattgccctagtgccatgttaggttatgagattgtaaattattcgctcccccgtcctcccctcccctcgttttcagtggcaatagaggacccttgtgttttttgtttaatttgcatattatgtgtaaaatactttatttgaaagaaaagtgatgacgctgaatgtgtacgtctgtgtgggtgctctgtccctgcggtctgtcatagccagtcagacttgatcactgacaccccgtacaacatgttgcataggtaagatcctcaatatggtgttctccgcatggctgttagggactgtatatcttgtaaaagaacac

SEQ ID NO: 9996 - DNA, 726 bp, Macaca Fascicularis
  misc_feature (1)...(726): n = A,T,C or G
cacagcaggacagnnnnnccccccagcacctggttccnnncagnnnnnnngannnnnnnnnnnnnnnggaagcaaatttgagtacagaggcctgaggatggggatgggnnnnnnnnnnnnnnnngcaaaggnnnnnnnnnnnnnnnnnnnnnccctatccccaggttctggagatgagcatcggggctccggaagcccagcaacacctggcccggagtgggcacctgggtaccactgccaccttctctgttggctccactggcctcgtggtgtatgactaccagaggctcctgatcgcatacaagccaacccttggcacctggtgatacatcatgaagacagctccggagagcatccccagtcttgaggcgctcactagaaaagtccagaacnnnnnnnnnnnnnnnnnnnnnnnnnacctctaagctggaccaggtggaggggcgagannnnnnnnnnnnnnnnnnnnnaggggacctggccttcctgggcatggccgtgagcaccctgtgtggcgaggtgccgctctactacatctaggactcctcaagtgnnnnnnnnnnnnnnnngccccacgggggacaggaaacgcccagggcaaagggtnnnnnnnnnnnnnnnnnnnnnnnnnnnnnnnngcttctgcccacaacgcagggacaggccccggagaaattggagtttgggtagaggatgggagcgggcagaggtggtgcccaggggccc

SEQ ID NO: 9997 - DNA, 784 bp, Macaca Fascicularis
  misc_feature (1)...(784): n = A,T,C or G
gcaacaacgatggggagaacctgtcggcgccattgcagttccgctctaaggaggtgtccaaaagcaacgtggtggacgacatggtgcagagcaacccagtgctctatgcgcccggcgaggagcctgaccactgcgtggtcatcaagtatgtgccgtacgtgggcgacagcaagcgcgcgctggatgagtatacctcggagctgatgctgggcggaaccaacacactggtgctgcacaacacatgcgaggactcgctgctggccgcacccatcatgctggacctcgcgctactgaccgaactgtgccagcgtgtgagtttctgcactgacgctgaccccgagccacagaccttccaccccgtgctgtccctgctcagcttcctcttcaaggcgccactggtgccaccgggcagcccggtggtcaatgcgcttttccgccagcgcagctgcatcgagaacatcctcagggcctgcctggggctcccgccacagaaccacatgctactggagcataagatggagcgcccagggcccgtcctcaagcgagtcggacctgtggctgctgcctgccctgtgttgaacaagaaaggaccggtacccgctgccaccnnnnnnnnnnnnnnnnnnnnnnnnnnnnnnnnnnnnnnngaggaaccccagatgcccaccacctgaggccctggtcacacagcttcccagctgttcctccccgctgccccccaagaccccaccttgctaggcccccacaaaagacaataaaggcgcnnncactcttagccctcctc

SEQ ID NO: 9998 - DNA, 665 bp, Macaca Fascicularis
actgccccaggcacccagattggctgaaaacttctgtgtctgccatttggctactggggacatgctaagggccatggtggcttctggctcagagctaggaaaaaagctgaaggcaactatggatgctgggaaactggtgagtgatgaaatggtagtggaactcattgagaagaatttggagacccccttgtgcaaaaatggttttcttctggatggcttccctcggactgtgaggcaggcagaaatgctcgatgacctcatggagaagcggaaagagaagcttgattctgtgattgaattcagcatcccagactctctgctgatccgaagaatcacaggaaggctgattcaccccaagagtggccgttcctaccatgaggagttcaaccctccaaaagagcccatgaaagatgacatcactggagaacccttgattcgtcgatcagatgataatgagaaggccttgaaaatccgcctgcaagcttaccacactcaaaccaccccgctcatagagtactacaggaaacgggggatccactccgctatcgatgcatcccagacccctgatgtcgtgttcgcaagcatcctagcagccttctccaaagccacatgtaaagacttggttatgtttatctaatgttgggtccaagaaggaatttcttcct

SEQ ID NO: 9999 - DNA, 700 bp, Macaca Fascicularis
  misc_feature (1)...(700): n = A,T,C or G
ggggctttaaatgtcacatttgtnnnnnnnnnnnnnnnnnnnnnnnnnnagtttagttacctctgagccacccatcaccgccaaagtgtgggggaaggatnnnnnnnnnnnnnnnnnnnnnnnnnnnnnnnnnnnggcttagattgaagtgtgtgtggtgggggtgcagcttagaggaccccctctgaaaggggtggagaccctgctgagaacaacactaccgcnnnnnnnnnnnnnnnnnnnnnnnngttggactgagtcgagggtctgcnnnnnnnnnnnttcagcttaagaaaatgaggttgtcagtttccagtgacgctgacatccaccagactgatttctctgatgttgcacttggctggcttatgcctctgagatccatgcacggctgtatttttttcagttgtcaccgctcctccctcctgctatgaaacgnnnnnnnnnnnnnnnnnnnnnnnnnnngggaaaggcgatatttatgaagggcagaagaggcagccccaagaacctgaagactgcaggctgctannnnnnnnnnnnnnntttggaaggacagactcttgctgagtttcagggctgaaatgcctggcgaactccattnnnnnnnnnnnnattgactgagtggctgcttagcatgggccacggagcgaggctcgggtcagctggtcannnnnnnnnnntttcatgctggcaagtc

SEQ ID NO: 10000 - DNA, 626 bp, Macaca Fascicularis
  misc_feature (1)...(626): n = A,T,C or G
gtagccaggaaagagcggggctggcggacggtgtggccctcccgtgagttcnnnnnnnnnnnnnnnnnnnnnnnnnnncagcatcatgtagaagcacttgtggagcatcaaaatggcaaggttgtggtttcggcatccactcgtgaatgggctattaaaaagcacctttatagtaccagaaatgtggtggcttgtgagagtataggacgagtactggcacagagatgcttagaggcgggaatcaacttcatggtctaccaaccaaccccatgggaggcagcctcagactcgatgaaacgactacaaannnnnnnnnnnnnnngtggtgtggttctacgggaacctcagagaatctatgaataaatgaataaatggaagcattaattgttttgaacatgtaaatataaaactgtcannnnnnnnnnnnnnnnnnnnnnnnnnnnnnnnnnnnnnnncagcttggaagttttacagcaataatgttgcagtggaatattatttgtagttaaggtcatcctcctcccctttctgtttttttaaaatcaagaactacattcggcccctgtcttgggcttcagaagcatctaagaaaagcagtcatcaattataattaactttctaaaggg

SEQ ID NO: 10001 - DNA, 752 bp, Macaca Fascicularis
  misc_feature (1)...(752): n = A,T,C or G
tgcagactgctnnnnnnnnnnnnnnnnnnnnnnnnnnnnnnnnnnnnnnnnnnnnnnnnnnnnnnnnnnnnatgcctgccatcatgtgacatggaattggtgccagggccgccacgtggccttcagaggaatccacaggcccccacctaagacccctcaattgtacggggaagtcgagggcccatggcttgagtccaccatgcagagatgtggccgggcacccaccttccttccctcctctgtccctgccttggccaccccacgccggaacccactgccgtctttggaaggcagggccttggccatgtcctgggtctcccaactcccacctgaccccagcctctccggtgtcctccacgtggctgccctggggagcgatcccagcggatggctccgggccaccaagccgtacctgtgcctgagactccggatggacgacacagtcaccacgtcgctcttcctgtgcgctcttggtgagacacagcttgagaacagaagggcgtcgggggaacctgccgcaagcagcagagacagcacaacccccggggcccggccgcctccctctctcgggatgcaacttcttccccactcggatgggctttaaattattcccataggggccaannnnnnnnnnnnnnnnnnnnnnnnnnnnnnnnnnnnntaatctgtatataacttgtaattttttctaattcatttcttttcttattttatttcctccttaacagtatttttggcattagacattctta

SEQ ID NO: 10002 - DNA, 746 bp, Macaca Fascicularis
  misc_feature (1)...(746): n = A,T,C or G
atgaatgnnnctannnttnnnaagcagagnnntaggtgagacaggatgaagcagaacagannngcccannntannnnnnnngcnnnnnnnntccaagtggacagagccaagcccgggcatgagctctggcaaagcaaggccccagattctccatttttgcctgtggaaaggagggtccctttacagactttttttccttttttttttcccccaaaatctcttaaaatgaggaatctcttagcagactttggagttccccattatgccacattctgaccatgagacgcggcttgcagtgggggtgaacgcacataggaagggaccactgatgcccagctctactctctgctttctatttatttattttgggggtgggttggggagtcagaagaacctggaggacnnnnnnnnnnnnggnnnnnnnnnnnnnnnnnnnnnnnnnnntgtaaatatggaataagaacaaacagttctaattaattcctnnnnnnnnnnnnnnnnnnnnnnnnnnnnnnnnnttgagtcaannnnnnnnnnntgttacccaattagggaaatacatttgttaataaaatnnnnnnnnnnnnnnnnnnnnnttggtgtgccttattaccctttccatnnnnnnnnnnnnnnnnnnnnnnnnnnnnnnnnnaatttatgagcgactagcgtataccacaagaacagttcactgatttcctacaatccttcagggaactcgggtggaaatggtggctaataaa

SEQ ID NO: 10003 - DNA, 755 bp, Macaca Fascicularis
  misc_feature (1)...(755): n = A,T,C or G
ctgagcatgttttnntatcacatatgttttccttatgacactggtttcgacatgtaaaatgtgtttgaaaacctgctttgtagatgcagagagaagctgtaggaaacccagtaccgccccnnnnnnnnnnnnnnnnnnnnnnnnnnnnnaaggcacagcacatcgcatgatgaacagttgttaataaaagctgttgctggaaacttgctttagtaacagctcaagaagcttggagttcatatttcacaaatattaataaatataagtccaagagctgtcagcctaatctgtaggagcagaacctctgaccaaaaggcatatgggtttaggttggttctttgatgtcatatgtctctaatggggctgcaagtgaccttgtgcttgtacactgctgctgcggggctccgtgcctgccggtgaagagctgcagatgccgagaagccagcaaagacaggcccgctggaaaaaacagttctttcattagtatttctcgggaggacccaaaagttaaggtcagcttgttcgctgtaatttctggaaacagttctctcagaccttcctgaattcagatcatctcagaagtctggagggaaatctgacgaaaccttcatttgagggaactgatatgagtgtatgtccacctcactggtggcaccaagaaacttatttccttgtattaagtgcacttcttgtatttctagtaagatgactttccnnnnnnnnnnnnnnnttatgttctggctttaaaggtcaaa

SEQ ID NO: 10004 - DNA, 832 bp, Macaca Fascicularis
  misc_feature (1)...(832): n = A,T,C or G
cttgtggtattcagtatagacaagaggatatgcctttcacctgtgaaggtatcacnnnngatatcatcatcaatccccatgccatcccctctcgtatgactattggtcacttaattgaatgccttcaagggaaggtatcagctaacaagggtgaaattggtgatgccactccatttaatgatgctgttaacgtgcagaagatttctaatcttttatctgattatggctatcatctcagaggaaatgaggtcctatacaatgggttcactggtcgaaaaatcacatcacaaatatttattggccccacttattaccagcgattgaagcatatggtggatgataagattcactctcgtgctaggggacctattcagatcctcaatagacagcccatggagggtagatctcgtgacggtggcctgcgttttggagaaatgnnnnnnnnnnnnnnnattgcccacggagcagcccagtttttaagnnnnnnnnnnnnnnnnnnnnnnnnnnnnnntcaggttcatgtttgcaatctttgtggaataatggcgattgccaacaccaggacccatacatatgaatgcaggggctgccgcaataaaacccagatttctttggtgcgaatgccttatgcatgcaaactattgtttcaggaacttatgtctatgagtattgcaccgcgaatgatgagtgtttagctattttagaagactcaacaagataaaaatatcttggtgtcttgtttctattgtgtggcttttaaaaaatgacaaataatgtactgtgttgtgataaaaaagttagtttatttgtttaatgatatgcatgcttttct

SEQ ID NO: 10005 - DNA, 1010 bp, Macaca Fascicularis
  misc_feature (1)...(1010): n = A,T,C or G
agcaaannnnnnnnnnnnnnnnnnnnnnnnnnnnnnnaaggtgttcgnngaaaccattctttgtaagtatagcttatcaaatagcctagttggatatgtagatgacatgtggtgtaccgtgtttcactgtctcagttgtgttactgagaatgagcatttgattatttttttctggtctctgtctatgtggctatcttgtaagtcaatcaatttctatatagtccagatggattaaacttctcatttcttttaaatatgtatgaataataaaacaaggaagnnnntagcattccatttaatcaagagcaagttgtactcaaagcattcagttaaagtatatctgtgtgtggaactaatttcagataatagaaaatattagttgaaatgttttaagaattaggcatgaaaaataaatttgagaaattttgtttcctcacatatatttttaaatcataagagttattttctatctgatgtaaaattagtttataaatcttaatcagcttctagatgtttattagcttttatgtcatgaaatgttggagtctcagggttgctgattgtctgctaatgggaaaaattgagtaagtctttaaaatagtttgcagccttctcccacaggagacaagtggaacgataagtgtgattttagatcttttttgtccatagttgttttcagtggagtcttccattctatatcttaccctaagatctggttcttccctccccatccccatcccagcccccacccgccagctcacactaatagatgattcttaattgccaaatgtgttagagtttgtatgtcctactcctgggccttacatgtcgcctgttggggcttaagaccaggttaataagtagnnnnnnnnnnnnnnnnnnnnnnnnnntagaaaattttatagacatttctgttaaagaaatatatcgattttatgtttttcagttctgttactgtaaataccttgtacctgttcatggattattttattctaaagtatttgtcaaat

SEQ ID NO: 10006 - DNA, 793 bp, Macaca Fascicularis
  misc_feature (1)...(793): n = A,T,C or G
gatcagtgcaannnnngnnnnagtggagaacttgagcagcagaagtacgnnnnnnnnnnnnnnnncnnnnnnnnnnaatttcttttggaaannnnnnnnnnnnnnnnnnnnnnnnnnnnntcatttgatgaatacagttcagaacttaaannnnnnnggnnngaatggagtcctgtgcacaaannngagaaattttggagagagaatgccgtgaggttaaatgagaagaactatgaactcttgaaaatcttgacaaaacttttggaagtnnnnnnnnnnnnnnnngtattnnnnnnnnnnnnnnnnnatgttggagaatatgtgcggcatnnnnnnnnnnnnnnnnnnnncatcgagcnnnnnnnnnnnnnnnnnnnnnnnnnnnnnnnnnnnnnnnnnnnnnnnnnnnnnnnnnnnnnnnnnnnnctnnnnnnnnnnnnnnnnnnnnnnnnnnnnnnnnnnnnnnnnnnnnnnnnnnnnnnnnnatccgagcagccccagaccgctgccgcccgaagctgagcctgcctctggccttcccctccgcctcgatgcagaaccagtagtgggagcactgtgtttagagttaagagtgaacactgtttgattttacttggaatttcctctgttatgtagcttttccccatgctaatttccaaacaacaacaacaacaaaacatgtttgcctgttaagttgtataaaagtaggtgattctatatttaaagaagatattactgttacatatactgcttgcaatttctgtatttattgttctcnngaaataaatatagt

SEQ ID NO: 10007 - DNA, 716 bp, Macaca Fascicularis
  misc_feature (1)...(716): n = A,T,C or G
aggaactcatgtcgggaaagtgaacantnnngntgtggaaagtgggaaaaaggagtattctttggacacaagaggaaaattcattcttagtattgcatatagtcctgatgggaaatacctagccagtggagccatagatggaatcatcaatatttttgatattgcaactggaaaacttctgcatacgctggaaggccatgccatgcccattcgctccttgaccttttccccggactcccagctccttgtcactgcttcagatgatggctacatcaagatctatgatgtacaacatgccaatttggctggcacgctgagcggccatgcctcctgggtgctgaacgttgcgttctgtcctgatgacactcactttgtttccagttcgtctgacaaaagtgtaaaagtttgggatgttggaaccaggacgtgtgttcacactttctttgatcaccaggatcaggtctggggagtaaaatacaatggaaatggttcaaaaattgtgtctgttggagatgaccaggaaattcacatctatgattgtccaatttaaacatcaaagtctccaggcttatgctgcaaagagaatgtacggattgatcatgacattccttacctttttaggcttgtttaaaagaaatatagcatttattgtagcaaagacttaaattttatagatacaatataaatcttttcatgttttattgggaatgctgtca

SEQ ID NO: 10008 - DNA, 753 bp, Macaca Fascicularis
  misc_feature (1)...(753): n = A,T,C or G
gggtcagtgccagtggcggcagccccccggnnnnnnnnnnnaccgcaagagcaacatcnctgnttacgaagtcgatggcaaagannnnnnnnnnnnnnnnnnnnnnnctgtgtctgctggccaannnnnnnnnnnnnnnnnnnnnnnnnnnnnnnnnnnnnnnnnnnnnnnnnnnnnncatcctgaatgaggtggaccggcagggggcccacattgtcggctacttctccaaggagaaggagtccccggatggaaacaacgnnnnnnnnnnnnnnnnnnnnnctccctaccaacgccgtgggtacgggaagttcctcattgctttcagttatgagctctccaagctggaaagcacggtcggctcccctnnnnnnnnnnnnnnnnnactgggcaagctcagctaccgcagantactggtcctgnnnnnnnnnnnnnnnnnnnnnggacttccggggcacactgtccatcaaggatctcagccagatgaccagcatcaccnnnnnnnnnnnnnnnagtaccctgcagtccctcaatatggtcaagtactggaagggccagcacgtgatttgtgtcacacccaagctggtggaggnnnnnnnnaaaagtgcccagtataagaaaccacccatcacagtggactccgtctgcctcaagtgggcaccccccaagcacaagcaagtcaagctctccaagaagtgagcggcctggcccccagcctgtaaatatgtatagacctgttttgtccttttttta

SEQ ID NO: 10009 - DNA, 719 bp, Macaca Fascicularis
  misc_feature (1)...(719): n = A,T,C or G
agttaaaacaaaaagggaaatgtcctaggttttctttgtgcttctcatttttcctttgttgattgaattcctgtgatttttttgttctcttctctgaaatgctttacagtgcatggaatctccnnnnnnnnnnnnnnnnnnnnnnnnnnnnnnnnnnnnnnnnnnnnnnnnnnnnnnnnnnnagcaaaaaaggaaaacaaagcagcaaaaacaacccttcgtcttttctctcatctcacctttctgtgttgattactaatcatcttagatattattgctagtggatgtatggtagatgggttgaagcttttctgataattattacacaatttaaaacaatatatatttaaaataaatatatacagtcaatatattgagccatgttaacctgccaatgagatctgtgaaaaaaataatggcctcatttttccctttttaatttcttttacccttttgtgaagcagctatatgtggcatacatgtatttaaagaaaaaaataggtgtagagtgtttttttttacacttttagcatgtggtgttgaagtattactgtagatcaagtttgtcttccgcactaagatgtgaggaaattgtgatttgttctctccaccacaaatgaactacacatttattatcttctatcattttgaaacactgcagtttaccatgggacaccgtatatatttcctgccacaccgtaaatnntntttaaatacat

SEQ ID NO: 10010 - DNA, 724 bp, Macaca Fascicularis
  misc_feature (1)...(724): n = A,T,C or G
gnnngatttccagcaggtcctggctgggtgggctcttgagttccgtactggaattgagtgtaaaggtgggaagagaactgggctgactccagnnnnnnnnnnnnnnnnnnnnnnnnnnnnnnnnnnnnnnnnnnnnnnnnnnnnnnnnnnnnnnnnnnnnnnnnnggtggttcagcccctcatccaaccccttcacaaccttgggccactgcctgggacccagcagacattgcccaagactcctagtgcactcactcttgtctgcgcccgccttcctcctgggaccacactacttcactgcccaggactcctaatgcactcgctcttgtctgcgcccgccttgctcctgggaccacactacttgaatcaccgtctgatttgcttcgctggcagagttgggtcaagtgccctctcctttgccttgagatgaaagtcaagagcacagggaccaggccttggttaggctgagctcccagcaggataccgcctgcagaaaggacctgccctgacagtgacccttccccagattctcaagcagatgcccaagggaggttcccacagaaccagagtgcctgaggcttcctgcttgagaacctgccccctggatcttggacacttacagattgagctgtatgaattcagtgggtctcactccagagggtcagaacgtttgctttagttttttatctgttttgttccttgagtcagtgctgttgatgacgag

SEQ ID NO: 10011 - DNA, 755 bp, Macaca Fascicularis
tggtcacataaaagtaaaggtgttggctggtcagtgtgccgagacctctccagcttctcattcatcatggcctctcaaagtcgggaaacaagctgatttcttgccaagaggtctcccaggagatatctgggaaatgtgaagttcatatctttaaggagcattgttggtcagcatggtcgatgaagtaatgatgagagagttatggaatgttgctaaaacatagggcttgctggtacctatgtgactaagaaaggggcatgatgtaagggaaagggcctcaaattattgtgaatgtggacattctcgttaatattcttttgggctaatagtgacatagtgtgcagaggtgttccagggatcatgggggatttcctagcactagtatgcttctagttttagataactccctcctttattccctggccccttgtattttccttatcttcctctttcaagacccctatcctccccattttgcctatctgtaggctggggcctgtgtctttgtcattgtctggttcttagagtcccagactttgggagaccagctccaggtggcatcctccctgcctctctgtcttgtaatgagatgtagtatttactcttaacataggatcatttggaacaggagttctgaggaggagagagtgaggattttgctattgactgacttgaacgatggcttctcctcaagctgtaggctccagagcttcctaacctagtaaaatgtcaagaacagacaggggagatattag

SEQ ID NO: 10012 - DNA, 725 bp, Macaca Fascicularis
  misc_feature (1)...(725): n = A,T,C or G
acacacatttacgtgcacactcacatgcacacacacgcacacatatacactcttctctaaccagtggaagcaaagccacccttcgggaagaaaacgtcaccttgccatagattctatttcaacagtgggtacacccctaacagagccagtgccaacaaannnnnnnnnnnnnnnttagggcccgtgagggctcatgcagcaacctccacattcccacnnnnnnnnnnnagaattttctgagannnnnnnnnnnnnnncctttctttctaccagccctgcaagtttcctcatggacgcttgcgaggggcaggctgcaggtttcctgcctatagtgagatcggatgtggccaagnnnnnnnnnnnnnnnnccagagaatttgcacaaaggtccctctgtacagagacnnnnnnnnnnnnnnnnnnnnnnnnnnnnnnnnnnnnnnnnnnnnnnnngcgcacgttggtttcttggtcgtcctttgagtgataacttctcccnnnnnnnnnnnnnnnnnnnnnnnnnnnnnnnnnnnnngtatttccattcctgggtttctgcaccatcagtgggcacttgttattttcccggagccttctcctggtggctgtatgtttgtttannnnnnnnnnnnnnnnnncnnnnnnnnnnnnnnnnnnnncaccttagatgtggtatttattttctnnnnnnnnnnnnnnnnggagggaaagcagagaaactggga

SEQ ID NO: 10013 - DNA, 1003 bp, Macaca Fascicularis
  misc_feature (1)...(1003): n = A,T,C or G
agggaaagtannnncaaaatgttggctttgattttcactgtttatcctgactgtattttatctattcatttagtgaaatcacaccagaaggaagaaggattactaaattagatcagattttgctaaatggaaataatataacaatggtaagacacattgaaagtgttttgtttagatgnnnnnnnnnnnnnnnnnnnnnnnnnnnnnnnnnnnnnnnnnnnnnngtgctgcttaactaaatgatcatggcccagtgnngcgtaagatgggaagggtgttctctgtggtcagggccctaaagctcagctattgaagaggcattgggtctaaaggttagtttgcttcgaatttttaatcgctgttgagatagtaagtattaattgatgatgttggaaattgtgaatagatattgacaatctggagaaaatgggaatgtggagcgcaggggacaggcaaaggtggcttaaggaagagcaagggatttttagatgacatggttgttgtgttactaataaactctttttcctctttatgcagctggttcctggaggagaaggacctgaagtgtgaatgagttttcttgacttagctagattctgttttgtcttttaatgacaagaaaatggaatttttttcccccaccttctaatgtttaaatcccataaagctaagtttcccgttaaagggaagtgctttgaagatgtgtacccatttttgtaagttaatcatgattatcctggaaaaagaagaaaagagcttcttctttgaagacgaaaataaaggtgtttttggttaattgtcattttatttattgtannnnnnnnnnnnnnngaacaaagattgtggttattttgccacttacttttctgtcattatatgcttatttgctttctcatttacatgaccatttgattctcaaacaaaagtcgttccaaacaaaatgatgaactttgatttgaacaggttgcattaaacaactgaaatgatcacnnnaaaataaata

SEQ ID NO: 10014 - DNA, 751 bp, Macaca Fascicularis
  misc_feature (1)...(751): n = A,T,C or G
tgaggaagcggagnnagtggatgaggttnnnggggacagtgctgtggtagccagtgatggcgcccagaccttggcccttgccgggtgccctgccccatcggggtaccccaaggctggacacagtgagaacggggttgaggaggacacagaaggtcgaacggggcccaaagaaggtacccctgggagcccatcggagaccccaggccccagcccagcaggacctgcaggggacgagccagctgagagcccgtcggagaccccaggccccagcccggcaggacctgcaggggacgagccagctgagagcccgtcggagaccccaggccccagcccggcaggacctgcaggggacgagccagccaaggcaggggaggcagcggaggtgcaggacacagaggcgaagccttctgccaaatctgggaaggcttaaggaaaggattccccaatggcatgttggctctcctggccctgctgcaggggccggggcctccggagctgctgcgggctcccctcaggctctgctccgtgacccatgacctgcagtgctggcctcccgtggtggccactgtagcggccaccggaaagtgcgaggccctcagggaaggccaaggcctgcagaagcctcctggcctggctgcgtcttccccacccagctctcccccgcacccctgtctttgtaaattgacctttctcgggtggagagggtggggggcagggctgcttttcttagtctggtgccaagcaaggcctt

SEQ ID NO: 10015 - DNA, 668 bp, Macaca Fascicularis
  misc_feature (1)...(668): n = A,T,C or G
atcattacacaggcggcatgaagcaaaaatatactgtgaaccaatgcaggcggcagtctgaggattccaccttctacctgggagagaggacatactatattgcagcagtggaggtggannnnnnnnnnnnnnnnnngaggcagtgggagaaggagctgcatcatttacaagagcggaagtaattctccagactctgattcccaatttcagctgtaattttaggtttccttttcagagaagtaagaattacaccaaattttagagaaaaaaaagttgcattaaacaataacaacaaaaacaacaacaaaacacttcctaggaacttgtcctcattcatttctgcttctctcaatttcctcaagggaaaatttccatttacctcctttgatcctttggagtcttgctttcttttctgctgcagtgtcttctcacattcatgtgccctcatgtgtcatttgttttcaaacttaacaaaagttaatttccaaattcagagcagaaatactattccccttagcaacagtttgttgcttatttttccttcagagttttcattgttagtctaacagttagtcatttcacattcttaaaactgttatgtatggaatattttnnntgcttgaaggtgatatagcagatacagtctctaccctccaagaacttataca

SEQ ID NO: 10016 - DNA, 437 bp, Macaca Fascicularis
atgagtttccctaagtgaagtagcaataggctgtaatcaagaaaatatgccatttacagggataagataaatgaaataatacatacttcggccagcaggtttttctgtctcacatacataagcagcaattcattgcagatacggaactgattctgtggtttagcttgattgacatcttttggaagtttctgatagtgtgctttcctttctttcctatgtttttcaaattcctctgtgtcagggttttttggtgtcagttaggttttgtccatcagattatgagaccccaggcatcattttgaggatgtgggttatacacatggagtggttctggaattatcagttcgcttggccaggccagtttgtggaagcacaggcaagactgttcttttctggtgattctccaagccactttaataccctgcaatgtaattgtc

SEQ ID NO: 10017 - DNA, 764 bp, Macaca Fascicularis
  misc_feature (1)...(764): n = A,T,C or G
gcccctgaggccaccgnntacgatgtgcgnnnntgatgcgctcccccagcntgtgaagaaccagggcacagcggacttcctccccaaccggcnnnnnnnnnnnnnggannnnnnnnnnnnnnaccaacattaccnnnnnnnnnnnnnnnnnnnnnnnnnnnnnnnnnnnnnnnnnnnnnnnnnnnngaaggtggctgagggccacaagnnnnnnnnnnnnnnnnnnnnnnnnacctgtgacttcggcaacctcaagcgctatgcatgcacctctcatacccagggcctgagcccaggctgctatgacacctacaacgcagatatcgacnnnnnnnnnnnnnnnnnnnnnnnnntgcagcctgggaactacatcctcaaggtgcacgtgaacccaaagtatattgttttagagtctgacttcaccaacaacgnnnnnnnnnnnnnnnnnnnctacacaggtcgctnnnnnnnnnnnnnnnnnnnnnnnnnnnnnnnntcctgatctctgggagggacagatggccaatctctccccttctaaagcaggccctgctcccctggcagcctcccgctgaggggcccagtcccccaacccaccggcaggggcatccctccctgccggcctcagggagcgaacgtngaaggaaaccacagggattccggatgccagaccccattttatacttcacttttctctacagcgttgttttgttgttgttggtttttattttttatactttggccataccacagagctagatgcc

SEQ ID NO: 10018 - DNA, 645 bp, Macaca Fascicularis
  misc_feature (1)...(645): n = A,T,C or G
gaagtattgccactcannnnnnnnnnnnnngagcagaacatgacagaatggccagacagtggaccaagagatacgctannnnnnnnnnnnnnnnncaattcttacattatttgtcacagaagagagctgcttatgattctgaaggggtcagggagggtgggagttggtaaagagtagggtatttctataacagatattattcagtcttatttcctaagattttgttgtaacttaaggtatcttgctacagtagacagaattggtaatagcaacttttaaaattgtcattagttctgcaatattagctgaaatgtagtacagaaaagaatgtacatttagacatttgggttcagttgcttgtagtctgtaaatttaaaacagcttaattttgtacaggttacacatatggccatttatgtaaagtccctctaagactacatactttttgtttaaaacaaaattggaatttgttttcccttcttggaagggaacattgatatttaacagagtttttagagactgtcatctcatatatataaaatggacacgtggctgtaagacaccatataggagatgagtaatgtgttttattttatatgccaatctactttgtttaaaaaaggtttaaatcaggacttgtgaaaa

SEQ ID NO: 10019 - DNA, 1131 bp, Macaca Fascicularis
  misc_feature (1)...(1131): n = A,T,C or G
gagcaaggcaaccgatcgccaggcccgnnnnnnnnnncccaggagannnnncgcccacttccacctcttctctgttttggacaagtgacaaaccattttgccccctcactcttctttgttaactgttaaaccaaaggaaagcacaaatgaaggaaatcccgtgtaaagcgttgagaaggaaagaagcctggagcagcctctccggtccacaaccagggcttaggtccgcaggcccatctgcggtccccagcgagcatcaaagggacgctgtgtgtgctacaagtgaccccgaaaacacaaccacagccgtcacatggccctcctgaagtcggggcaccctcctcagcaccaaaatggccccccactccttcgtgtcctcccactgtctccaaatcggacgttctttctagctgagatttttatttttccagatctgtagtgccatgaagcaattcagtctttgacttccagtggcagacctgggtgatcgggaacaagcgtgtcgtacccccggctggacatggccaagacacgaggcattccacggcggcaggctgaccnnnnnnnnnnnnnnnntgatnnncagccgtcatcattgggttctgttttgacagctttgctgtcccgtagagactgcgactgggaccaggtcaacccagccagaggggtgtcaccgggagccttttctttttttctttctttctttttttttttcctccttaagctgctgtcgatccaaaccatcggcatcatcatttcttttgaattaaaaccaacatannnnnnnnnnnnnnctctccccgggaatctctaacatgctctgtttacannnnnnnnnnnnnnnnnnnnaaacaaacaaagctcatcttaaagtccaaggatttttatgtccacattttccctgtaggccacacggacatgaccaggccctgggggtgggtctggacaagatggtagagcccacgggttaccccatcgagcggccacctcagaggagatgccacctgtcatcaaaagactaaattgggaaaagaagcctcctggcttggtgcagtggctcacaccnnnnnnnnnnnnnnnctgggaggccaaggcgggcagatcacttgagctcaggagttcgagaccagc

SEQ ID NO: 10020 - DNA, 807 bp, Macaca Fascicularis
  misc_feature (1)...(807): n = A,T,C or G
tatgaagggctgannnnnnnnnnnnnnnnngannnnnnnnnnnnnnnnnnnnaggtggnnnnnnnnnnnnnnnnnnnntcggaggannntgnnnnnnnnnnnnnnnnnnnnnnnnnnnnnnngtttgagaaggaagtgaagaactcctttatcacggtgcttattgaggttcagaacaagcagaaggagcagcgagaactgatgaaaaagaggcggaaagagaaagggnnnnnnnnnnnnnnnagccggatagagaagggaaaccagatgcctctcaagcnnnnnnnnnnnnnnnnnnnnnnnnnnnnnnnnnnnnnnnnnnnnnnnnnnnnnnnnnnnnnnnnnnnnnnnnnnnnnnnnnnnnnnnnnnnnnnnnnnnnnnnnnnnnnnaaagcctcccctccgtcagtggaagacctaggataatgagaaggtgcnnnnnnnnnnnnnngactacattttaaaagtgctctgcccgacctaaccttgccctttggagcagcctcgctgcaggaggtcactgaacaagagtcattccatcacagggactgcatgacaccacgtaacctccgacgtgtatttaaacgtgtatagcttaacccggattaaacatgagcaaacgcgcggggtcctttgctgttggcttctagtgctagtaaccattggatgcatgatggggcagggccggtgatggtgcctccccttgcggtgtcgggagaggggaaggcagccgctttcactgctcattatgtagtttggctccagccctcaaaaacagcttatactgtaagactaattttgaaataa

SEQ ID NO: 10021 - DNA, 761 bp, Macaca Fascicularis
  misc_feature (1)...(761): n = A,T,C or G
tgactgacagtgcatgcnnncatgtggatgagcgtggctgtgggnnnnnnnnnnnnnnnnnnnnnnnnnnnnnnnncgtgtggatgagtgtgaccgtgggaatgactgtgtgtggatgagtgtgaccgtgggactgactgtatgtgtgcgcacatgagcacacannnnnnnnnnnnnnnnnnnnnnnnnnncgtgtgagtgtggctgagtgtgagcacacatgagcttatgggtgtgcaagggaggtgnnnnnnnnnnnnnnnnnnnnnnnnnnnnnnnnnnnnnnnnnnnnnnnnnnnnnnnnnnnnnnnnatatgggtgtccaggggctggaacccaagaagctgagagccagtgctggagaaggtccccaaggggaaaggggcgtccttgggcttcggtgccttcagggtctcagggtggccctggaggccgaccgcagtcccactggggcacagaggctgctctgggtttggctctgctaggcagaccccatttccttggtgaactccgctctgggtccacgtcccccttgaccctgaacacttttggctgcccgggaaatacctccttatggccggaatgttgctccacacgcggacagcattctgtagggatccgccacggacatctgggatggtggtgggctccatctgggggtgggagggtcggccgtgggtcaggggtaagtgccccccatgggccccctggcctcagccgctgatggccctgagtggtcaacggactttctagcccgactg

SEQ ID NO: 10022 - DNA, 929 bp, Macaca Fascicularis
  misc_feature (1)...(929): n = A,T,C or G
ctggcgaccgctggntnnnnncggctgcccacaccctgtatcccaaggaacatgaggcgcaaagcaacgcctccttggatgtgttcctgggccacacaaatgtggaagagctcatgaagctggccaatcaccccatnnnnnngggtcannnnnnnnacccagactangtcnnngagtcccacaattttgagggggacatctccctgctggagctggaaaatagtgtcaccctgggtcccaacctcctccccatctgcctccctgacaacgagactttctatgacctgggcttgatgggctatgtcagtggctttggggtcatggaggagaagattgctcacgacctcaggtttgtccgtctgcccatagctaatcgaaaggactgtgagacctggctccggggaaagaataggatggatgtgttctctcaaaacatgttctgtgctgggcacccgtctctaaagcacgatgcccgccagggggatagtgggggcgtttttgcagtaagggacccgaacactgatcgctggatagcaacgggcatcgtgtcctggggcatcgggtgcagcaagggctatggcttctacaccaaagtgctcaactacgtggattggatcaagaaagagatggaggaagaggactgagcccagaattcgctaggtccaaatccagagagcagtgcgagaaaaaaaaaaaactgaccagttgttgatnnnnnactaagagtctctattaaaatcactgatgcagaaagacagtgtggaaattctctttcctatagtcccattgacgtactttacctgaaacaacccaaagaggcccttcctttcttccgaggattgcagaggatgtagttatcaatctctagctgtcactttccttttccacttttataccattgggtcattgaatataacttctccaaaaaa

SEQ ID NO: 10023 - DNA, 727 bp, Macaca Fascicularis
tagtttccattttggggggtttaaggattttttttttctgtttgaaacagttttatactttctgatgtatagtacttgaagttcttaccagaaaattactttggagttttgaagcctttattaatactacttttaaagaagcagttgttttattgtcattgttttttttttccccaagcatattttcttctatttctgtttatatatatatatatacacacacacacatatatatacatgtatatatatgtacatatatataatttccaattcaggatattgccctgccatccatgaaaactgttctggcaccaaaagtaatgacaaatgttaagtgtaataatagaaaagtagagcaaagagccattcagcttcagtctttacgtaccatgaataaaacattaaaacatcatatggagaagtttacatggtgattgttcacctgcagtactgtggactttcaacattttgtcctcttttcagtgaaacagagtaaaaatattcatctaccattactgttatttgctgattttgttttattttttgatggtaatattctatccttatgacactattgcaaccaaattggctttaccatcttggctttagtaggtatagaaaacaatggattaccatctttattgctgtaatgtgttaagcattatatgctagtagaatctagtttaattgtttcaggtggaaagtattctttgagtttccatattga

SEQ ID NO: 10024 - DNA, 751 bp, Macaca Fascicularis
  misc_feature (1)...(751): n = A,T,C or G
cagcgtgtgtgtgtgtgtgcgcacgcttttgtacactgagagagagagagagagagattgcacgcatgngtctctgtagtcatgtggccaggtgggactatgtagataacagattgctcgtgtctgatttggtacatgggacgatgtagataacatgttgctcgtgtctgatttggtacaagcatgtttgttttcctctgtgttcatgtgtgtgtttactcaacaaatgtttactggacacactcagagagagggagtgtgcatacttgtgtgtgtgttgctatccagcacctggactgggctcccagaagagctggcattgtgtctgagcagagcggggtccccctaaaacttgggctgtcccagggcccaccagcagctgacattgcctcctctcctgtcctggcagtagcttctgggctctgaaggtgccggagagagtgaggctgggcaggggtctgcggccctttctcagggacacaccctgatagcacaatctccctggggccctgcccacctccaggcctctcccaccccagaccctgccccgaccctggggagagaggggatctgcaataggagggggcctgagcctgccctggctgctggcccatactgcctgggcacccctggtgctgaggactgtgccaggccatgcttgctgtgactccgcccccaccccctctccccccgcatgtgggtgtccccactcccccattgtggggtctgtgtagccttcgctctagacata

SEQ ID NO: 10025 - DNA, 764 bp, Macaca Fascicularis
  misc_feature (1)...(764): n = A,T,C or G
agatnnnccaggatgttccaaatcccttgggtcctagtgttatgttccaggctgccaacctgtgctcaggatgcatccctgggatccagcccccatgaaagctcctgttgggatggtgtcatctacgttttgaaccagtgtggtatggtccttgggagccctgctctgagcttgccacactgctgagagcacccactgtcctgaccagagtctcagtggtcctgacccccagtgtgggcaggggctgggcaggagggtggtgtctgccatgggttcagaggaccccacctcnnnnnnnnnnnnnnnnnnnnnnnnnnnnnnnnnnnnnnnnnnnnnnncagaggactttggcctactgctgaagagcctgtccatgccattttcctactgccatagacaccctaagccgagggccccttgaggcccagacccagcctgcccactggtgccagagacggagcggagtgggcctggatctgagggatgctacctctccctccccacttgaggaccctggggagagatgggggcggggaaaatggaggtgtgaatttggggtaagaggaagtgagatctccgcttgcaggtcagcccctgccaagcagggcgggctggcttgactcaggccatgtgagatagagggcccagcccggccccgcccacagatcccctgctccttttgtgttctgttgtaaatcacttggcaagactgtattttaggaactgctgcctaacttccctgtgttctgttgagaggcgcctgt

SEQ ID NO: 10026 - DNA, 997 bp, Macaca Fascicularis
  misc_feature (1)...(997): n = A,T,C or G
catggagacttgttatcagatgaaccggcagatggagacggggctgagtcccgagatcgtgcacttcaacctttatccccagccgggccgtcgggacgtggaggtcaagccggcagacaggcacaacctgctgcggccagagactgtggannnnnnnnnnnnnnnnnnnnnnnnnncaggggaccgcaagtaccaggactggggctgggagattctgcagagcttcagccggttcacgcgggtcccctcgggcggctattcttccatcaacaacgtccaggatcctcagaagcccgagcccagggacaagatggagagcttcttcctgggggagactctcaagtatctgttcttgctcttctctgacgacccaaacctgctcagcctggatgcctannnnnnnnnnnnnnnnnnnnnnnnnnnnnnnnnnnnnnnccctgcctagggggggggcctgctggcgtggggacttcgggtgggcggaggcgcctggctgggtctgtggcattttccaaaggcccacgtggtgccggcggccactgagtggcccgggctctgagctggctctgggctcccctcgtctctctttcatcaggacaccgtgaggctgagtgagagccgcagtctttgtgtggggcggggtgggccgggcccctggagcctctgcctgcctcctccagaaaacacgaatcatgactcacaagtactgaagcctgagcaggtctctgtgggccgaccacagtgggcttcgaggtggtccctggtactgtggtgaccgagtggacagcccagggtgcagctctgcccaggctcatgaagcctcagatgtccccaacccaagggtctgcaggggctgctgtgaccccacaggcccgaggctccagggctggctctggtgtttacaagctggactcagggatcctcctggccgccccacagcgggcttggagggctggacggcaagtccatctggctcacaggcccctccagtggaatg

SEQ ID NO: 10027 - DNA, 655 bp, Macaca Fascicularis
  misc_feature (1)...(655): n = A,T,C or G
tccgggcagcgcannnnannnnnnnnnnnnnnnnnnnnnnnnnnnnncgcacctaccacaagcggctggtggatnngagccgcaggcatgaggagctgttggctgcctacaggagtggcccaagacagacactgnnttacgctgacagggcacctgggaacccccaagctatttttggcgcagccagcttggacctgnnnnnnnnnnnnnnnnnnnnnnncactgacttcagccatcgggaggaccagcacggcgggcctgaggcactgctctcataacacagaagggacccggtggagcctcccaggggggaacatcagagccacagggcctggacgctgcgtcctgggcccagatccaccagaagctccgggacttctcccgcagcacccaggcagagctggaacgggagcnnnnnnnnnnnnnnnnnnnnnccacggtggctgaagagcaactttctgagctacaggagtacgtggaccagcacctgggcaggtacaagcaagaaatcctgaggctgaggaagctggcaggttcagggaacccctggaaagtgggggctgtgcctccagccaanntccagcatccaaggaccggcagccactagcccgtctccaaggaccagagcagagcccannnnnnnnnnnnnnnagcc

SEQ ID NO: 10028 - DNA, 696 bp, Macaca Fascicularis
  misc_feature (1)...(696): n = A,T,C or G
gcagtttaaagacacccacannnnnnnnnnnnnnnaaaaaattaancttttgttttaacaaaaaatagagagggacagaataatttaaaatatactaaaatgtgtagacatattcaatacactgaagagttttattttccggtaacatcagtggtaaaggaaatggtaaagttttggataagaaccttagagaggacttactattttgggtcagttggccaatcttaaaatgtggggattttaaagaccatcttgttcagatttattcccagagacattatcagtaaactaaaatacaaagtatattcaaaaaagaaatggtcagtgtgtttatcagtggactactctcattaaaagtgaggcttacataatagaaaaaatatcactctaggaattataaggggaagaaaggaaaactgtggggctagaggagtagttcttctagaaaatactacagaaatttctggttaaaaagtactataacatttcctactttatgttagtgttcagctttatctgaaaatcctcagtgatacatattacattttttccnnnnnnnnnnnnnnnnnnnnnnngcaattataattcttttttaggtttgtcattatatcaagccaaaatctatgctgctatacaggggaagtctaatcctcttgtctacgnncacgctnnnnatgtctgaagnagtgcttgtgt

SEQ ID NO: 10029 - DNA, 823 bp, Macaca Fascicularis
  misc_feature (1)...(823): n = A,T,C or G
atgagccaagtcnnnnnnnnnnnnnnnnnacgatggcccctggtttaatcactttggaaatagttccctttcgagtggcggcttacaacaagaaaaagaagcgtatggactactatgacnctgaacaccatgaagactttgaatttatttcaggaacacgaatgcgcaaacttgctcgagaaggccagaaaccacctgaaggtttcatggctcccaaggcttggactgtgctgatggaatactacaaatccttggagaaagcttaggctgttaacccagtcactccacctttcacacgttactagtaacaagaggggaccacagtctctgttggcatttctttgtggtgtctgtctggacatgcttcctaaaaacagaccattttccttaacttgcatcagttttcgtctgccttgtgagttctgttttgaacaagtgtaacacactgatggttttaatgtatcttttccacttattatagttatattcctacaatacaattttaaaattttgtcgttttatattatatttatgcttttgtctcatgattttttcaagctgttgtattagttgtaaccagtagtacacacattgaatcttgctttttttccccttgaaaaaaaaaaaaattaccaaacaataaacttggctagaccttgttttgaggattttacaagacatctgtagcaattagatttttttttttctacattgaaagtagaaactgcctcctttcttctttccagtcagctattgatcttttcagctgttgcaatctaaagtattcttatgatctgtgtaagctctgaatgaacttactcaa

SEQ ID NO: 10030 - DNA, 746 bp, Macaca Fascicularis
  misc_feature (1)...(746): n = A,T,C or G
ggattgttacacttcttcgatgggagcattcaaaactaacaagctgagattatattgtctgacaattcaagtattttagttttagaaaacaatttcctatttaaagtaaaaagcaaacaatgnnnnnatctgattgctaagaagtttacatctccattacaattgtgtctgcatcaaacggagagtccttcgtcctcaggatgattgttactggctgagaacatactggcctgtgttccgaatgcctgattggaaaagacctccccatcatctaccatactacgggacaaaccagtatctactcaaattcccacttccagaatgagaggactcatcaggggtttaggagtttgcaaagccttcaaaatacatcgtgcttgaatttggactcttctgaaacagaataactgacaaatgctcaaaaaacaaacttgtttaacttttactgaaaaggctctcagtgaaaacttcttttgaactctactagtaagggagaatattagtttttcttcccctctacaccagaaaaggtagttttctctctccttttttttttggcatgcagcatatacaaaattgtaatctagaattgaaattgtaaaatataataatcctcttaaagaaaatcagtccatgaacnnnnnnnnnnntccttccatggaaaacataatctaaacttctttaaaaattggacatattttaagtctgtattcgaatatgagntgcatacaannnttgctactaga

SEQ ID NO: 10031 - DNA, 877 bp, Macaca Fascicularis
  misc_feature (1)...(877): n = A,T,C or G
aaatgcaggtatttcagaatctagaactaggcatannnnnacataatactaggaaaattatgagaaaggggaaatttttggttaaataggagtaaggttcaaacacaagaagtacatgttctgttttattatgctcgatagaagacattttttttcacttattggtcctacccagcttaatggggtggggtttttttgtttgttgagacaatctgttctttgtaaacatttttagttggaaaaacagcatctgtgttttccccatactctacattttagagagaggaatcttgtttttgtgtgcaacataagaaaattgtgaaaactaatagccaaaaaacctttgagattgcattaaagagaagggataaaggaccagcaataatatcttgtaaattgctttttctaaaatctgagattatagttttccttagtgagtaatttataaggatgggaacctttaaatgaagttaatgggcctttaaaaaaaagaaaaggaaacacccatacctgtagttggaggatgaagaccggagatgggtttccagtgtcaggttatactaaaactaagccaaaaagtctgaatgtagcatgtaatggttctcttctgtggtccaaggctgtaaaatggacaaccttgtcacacctccccagtgctgtgttacaacgtgagggtggatgctgtcagtaacccagagggaccaggccttcctaggttttcctaggcagtcagctgttaaccactcacatggtaaatatcaaaaccacacctgctccaggactaattagtgaaacctgcttggaattaaaggcttcctctgggtgcctgctgaacaactgagctcatgttatgagcatgtggtggtttctctgtgcc

SEQ ID NO: 10032 - DNA, 703 bp, Macaca Fascicularis
  misc_feature (1)...(703): n = A,T,C or G
tggagcttgccctggnnngtgannnnngagtggcagcntnnncggccatcatgggactgattgagaccacgcgagggctcctcccgggggcaggagggactcagaggctgccacgctgtctgggggtggccctggcgaaggagctcntcttcacgggccgacgacttagtggaacagaggcccacgcactggggctggtgaatcacgctgtggcccagaacgaggagggtgacgccgcctaccaccgggcacgagcactggccnnnnnnnnnnnnnnnnnnnnccccattgctgtgcggctgggcaaagtagccattgaccgaggaatggaggtggacattgcatctgggatggccattgaagggatgtgctatgcccagaacattccaacccgggaccggctagagggcatggcagccttcagggagaagcggccccacacatttgttggtgaatgacccccactttaaccttcagcttgggagatgcatgccctgaagagcaagatccagaaggaagatttgtggccggactgccttcattatttcacctctccaggcttcagtttattcacaaggatgatgnngagatcaaaagacaggagtgatgcctagaaccaaggtgctgatcctaccacctactgctgccttccttagcttcaccnnnnctagaaataatcacgagggttgggtttgctttggaa

SEQ ID NO: 10033 - DNA, 739 bp, Macaca Fascicularis
  misc_feature (1)...(739): n = A,T,C or G
atgnnntnatagcccaaggctgttccagagccctgaaagaagtatactaaatgtagagagctggctgaaagactgaaaatagaagccacttatgaatcagtgtgttccatcagctacnagaaataaaggaatttcagcaagatgaagctctccaactgccaaaagacatagattatttgactatcagggatgtgtctttgtcccatgaagttcgagagaaactacattttagtcgtccgcagacgatcggggctgctagtcgtatacctggagtaacacctgctgccatcatcaatctgctgagatttgtgaagaccactcaacaaagacaggcagctatgaacgaatcacccaagactgatcaatgcttacgtaatgcagatagacttcaagagagacagttatagctttcaattcgtaaaagatttttaaagagcatgtaaataatttgatcaatatacaagagtatagataaaagaattatttagcacatgttaaaatagctttattaggttactgtgggtttgccattaatttacgaatgggatagaaattataattgtgcttttttgtgtatatgataaaactagttgtaaacaatttgtattctttctttaaggagctctaatacaataactttgtgcagtgttcatcaaagagagaaatagtgaacctaaaactaaacctggaaaaaaactcaacatgcagatttgcctactcatagggactttgcctgtta

SEQ ID NO: 10034 - DNA, 293 bp, Macaca Fascicularis
ggtggcagcaggctcagcctcgagatgcagaacgacgccggcgagttcgtggacctgtacgtgccgcgggaatgctccgctagcaaccgcatcatcggtgccaaggaccacgcatccatccagatgaacgtggccgaggttgacaaggtcacaggcaggtttaatggccagtttaaaacttatgctatctgcggggccattcgtaggatgggtgagtcagatgattccattcttcgattggccaaggccgacggcatcgtctcaaagaactttgactggagagaatcatggaa

SEQ ID NO: 10035 - DNA, 790 bp, Macaca Fascicularis
  misc_feature (1)...(790): n = A,T,C or G
ccaggcggagaggaaggatgatagtcatccagtccacgtnnnnnnnnnnnnnnnnnatgctgagancctcgtgtgtgtcaaagagcccccagcctacaccttccgggactacagcgccatcctttacctcaatggagacttcgatggcggaaactnnnnnnnnnnnnnnnnnnatgccaagaccgtgacggcagaggtgcaacctcagtgtggaagggccgtgggattctctnnnnnnnnnnnnnnnccacatggagtgaaggctgtcaccagggggcagcgctgtgccatcgccctgtggttcaccctggaccctcgacacagcgagcgggacagggtgcannnnnnnnnnnnnnnnaagatgcttttcagcccagaagagatggacctctcccaggagcagcccctggatgcccagcagggcccccctgaacctgcacaagagtctctctcaggcagtgaatcaaagcccaaggatgagctatgacagcgtccaggtcagatagatgggtgactagacccacggagaggaactctcccgcgctctgagctggccagtccctcagggctgtggagcagtgagcctacgtctgccactcagccgaggggaccctgctcacagccttctacatggtgctactgctcttggagtggacatgaccagacaccgcaccccctggacctggctgagggctcaggacacaggcccagacaccccaaggggcctnnnnnnnnnnnnnnnnnnnnnnnnnnnnnnnnttaannnnnnnnnnnnnnnnccaaagnntaa

SEQ ID NO: 10036 - DNA, 829 bp, Macaca Fascicularis
  misc_feature (1)...(829): n = A,T,C or G
ttgagcagtgggcnnnnnnnnnnnnnnnnnnnnctgannnnnnnngtggtccagggcaaagagtgtgtgtcatcgacgagattgggaagatggagctcttcagtcagcctttcattcaagctgtgcgtcagacgctgtctaccccagggactataatccttggcacaatcccagttcctaaaggannnnnnnnnnnnnnngtggaagaaatccgaaacagaaaggacgtgaaggtgtttaatgtcaccaaggaaaacagaaaccaccttctgccagatatcgtgacgtgtgtgcagagcagcaggaagtgaagacacgtgcgttcctgcctcccttgaaggagtgcccagttcaagaggagcccaatggagccctcctgtcgaggctgtatgcctatggggttatagaaccttgtgggcttttctagagaaaactcaacagctgttttccataaaatgtttaaaagatcaaattagccttaatgctggattgtctgtacaagatgaacaatccattgtggcttatttatgcttaaagatttctcgtttatttcctcttgcagtcatgcacatgatttgggtaaattatgagatgagaaatggttttcagagtattagatggaattcgcccctgttgaagtttataaatgtgttcaggggaagggggaggaaagagttcactgcctaatcagttttgcatgtcatgaaaattaaattcctctccaggtgtagcttcagtctcatgcaacttaaagtgataacagttaatttgattttttaaaaaatattattccaaaaggaaaccattttaggttatctctgccagctct

SEQ ID NO: 10037 - DNA, 768 bp, Macaca Fascicularis
  misc_feature (1)...(768): n = A,T,C or G
tgtgcagaggaacaaagcataaatatcaaattcannnntgacatagcttagacagaaaaactgnnngttcaaagaccagaagtgtactcacattaccagaaaatgagtttgtctatggggatacatgaacaccatacactaaggagcctaactccaaagcctgcgttctcatcctagtctgatattcacctaagtttccggatcccttttgttagctgtaaaatggaagtggttggactgatggtgtctgaggttctttcccacactgaaattctaaattttgacacttagcaatcatagggctgataatacacagttactgacttagcctaaacaacctggtgcatcaaaatgtattcacctttcttttgtaaagagaccatcttctatcttctttccacctttctctatgttttatgaaaccaactgttgacatacaaatcatgattgaaggagaacctgtccaatgtgttttatgtacacacatccctatgttgctatgagaaaagtgacagtaactgttttctttttggtgctatgacagtgtgagactcaggttgtctgtagagaatgaaagaagcagtgacccacgtgactgtggcattttcggcacttgtcattactttctgcttgactggaggttgagactcagccatgtttccatcttcagtttctgaagactagttatatattccttactcaaaatatattcataatatataaaagaagtatatctatgattttaaaattttactaccaaagaatgca

SEQ ID NO: 10038 - DNA, 749 bp, Macaca Fascicularis
  misc_feature (1)...(749): n = A,T,C or G
accacagagtagtgaatccacttcccaaatcagggcaagggccacctggcatcacnnnagaaaacaaaatccaagagtaaagctcacgtcaacacgccaccccttggctcccggcagcctagaagcctgagttcaaacacagtgaagacgcataaagacaatatactgggcacacggagagcattctaaggaatcaaaagacttcccaaaaatacgataatatactctaggctccgaattccagttttacctacgtaagattgaggaaattcttgagtacttaagaagannnnnnnnnnnnnnnnnnntaagaggaatattcaatattaactagcttgaagtctgacctaaccagaagaggcgcctgtcccctgcagccacaccctgccctgnnnnnnnnnnnnnntgtnnnnnnnnnnnnnnnctccccctggggcagnnnnnnnnnnnnnnnttaaaagaggggaaactgtcatcctggacaggaagtgagatgctatcatcctggacaggaagtgagatgctatcatcctggacaggaagtgagatgctatcatcctggacaggaagtgagatgctatcatcctggacaggaagtgaggtggcttcagttcacgagaagggatctgagttagacatcaccagtggaaattgattggaatagaaagttaaaggaaatagaaccctaactattctcctatcaaatcatatatgttgacctgtctaaattataaaccnnnnnnnncttc

SEQ ID NO: 10039 - DNA, 796 bp, Macaca Fascicularis
  misc_feature (1)...(796): n = A,T,C or G
gccccctccccaattggttccgctgacataggaattttatgatatgatnnnnnnnnnnnnnnnnnagcctttaggatgacttngtnnccctcccactaggggaatcctccctatgccttaaaactgccgagccccactccatgtaataggattcctgggcttcctcaacgggactgcggcccctcagtccttaactggaaagtgaccgtccactgccccctggagcccatctggacacagcacagtnnnnnnnnnnnnnnnnnnnnnntctgtttccatgcctggggaggggttcctcagtgcaggagttggggccaggctggggctccgagctgcttgagggggtcaaccttggaccaaagttgccttaagcctgtggtaaaagggcttcagggaaggtcagtgggccacctgctagaagctgccagctgcccggctggcaatggtgtgtcttggccccaaccctgccctggggnnnnnnnnnnnnnnnnnnccttctcctctctcctttggtgtttgttcctgtagccactgggctaatctccccctagcttcaagctgtacatagggcctcccagtgcaaatcctcctgcccattctgtgcccccttagaagcctgcgtgtgcatagagcgccccctaccttccagttaactcccagttctccctgagcttggtatttatcgtgtgccaactctgactctgaggtgggcagtgagggaagcagccccgggcctgcttgcttcctgtccccgaaatgttctttcttctgaaagtaaatatacatatataaataa

SEQ ID NO: 10040 - DNA, 711 bp, Macaca Fascicularis
  misc_feature (1)...(711): n = A,T,C or G
gcaaacagtgtccagtggggttgggggcccatccccannntgggggaccccatgcannnctgatgggccccggggctgccgttttgctgggcagtggttcccagagagtcagagctggcacccatcagtgcccccttttggagagatgagctgtatcacctgcagatgtggggcagggnnnnnnnnnnnnnnnnnnnnnnnnnnnnnnnnnnnnnnnnnnnnnnnnnnngggaaggagagtcgatgctgttcccgctgcacagcccgccggcggccagccccagagaccaggactgatccagagctggagaaagaagccgaaggctcttagagagcagccagagggccacatgaccaagaggatggggcctgagatgggcaaggggtggcatcgaggaccttcttgcattctcctgtgggaagcccagtgcctttgttcctctgtcctgcctctactcccacccccgctacctctgggaaccacagctccacaagggggggaggcagctgggnnnnnnnnnnnnnnnnnncactccaaatcctgccctgccaccctcggcctctgtcctggaagccccacccctttccttctgtacataatgtcactagcttgttgggatttttaatttatcctcactcagcaccaagggcccccgacactccactcctgctgcccctgagctgagcagagtcattatggagagtttgtat

SEQ ID NO: 10041 - DNA, 783 bp, Macaca Fascicularis
  misc_feature (1)...(783): n = A,T,C or G
gagnnnnnnnnnnnnnnnnnnnnnnnnnnnnnnnnnnnnnnnnnnnnncctgaccctgttccggactcatagccagcctatttagccagccctgcacataaatacactctgctgtattggctgtgctntcctccgcgggagatgtggaagaacttggggtgggggagtgcgtttgtcacttggttttcactaacaatgatattgtcaggtatagggccacttggagatgcagaggattccatttcaaatgtcagccactggcttcatccttagttttcccaacttgggacctgataggagcaaagtctctctccgttctccaggtccaaggcagagatcctgaaaagataaggctattatcccctgcctccttggtcactgcctcttgctgcacaggctcctgagcccacccccttggggcacaaccggccatggccacagtagctcaaccaagccgttgtgctgaggtgagagcctgctgtgtgccaggctttgtgctgagtgccgtacatgtattagttcctttactcctgaccacattgtacccatttcacagagaaggagcagagaaattaagtggcttgctcaaggtcatgcagttagtaagtggcagaacagggacttgaaccaagccctctgctctgaagaccgcatcccgaatttctaccctannnnnnnnnnnnnnnnnnnnnnnnnagtgggtcccgtccaccatccaggtgagcttggatgttagttctccaccctcgaggtgtacgctgggaaagtttgggagcactgctt

SEQ ID NO: 10042 - DNA, 930 bp, Macaca Fascicularis
  misc_feature (1)...(930): n = A,T,C or G
tgggaagggagcgagagggctctttccacagcaacaaccncntcctggatgcccagctgctccaaagagctggagctggganntgccaggaagactacaggcagtacctggccaaggtgaaatggcatgtggagaagcagaggcaagagctgagggagaatgagagtaactgggcatacaaggcgctcctcagagtcaaacacttgatgcttttgcattatgagatttttgtttttcttttttggtgcagcatactttttttaattatttttctgttcatctttcattatatttaaatctctggaccctggagcacttctaacatatcaccccatggagtcattgttctaataatcaccaattcagactcggatcctcatggtctgtggagcagctgcgtgctgtctgtgcagctcccatttccccttctaccttatagacttggagctgtgtgcctccactccaaggctgcctggctgctgtaaacattatcccactctctctgcnnnnnnnnnnnnnnngaacgggcctgagatcccatgcaggtccatgataagtgagtaaaagtctgcagaggtggggatggaagatctctccttagatagaacctatctttgtccctggcattgtggggtctgggtgtgacgctgggactgtcagcagctttgtgctgccaacctgaggttgaaggcagtacctcagagcagcacagagagtggggccacctgagccctgagccaccagccctgcagcctgccccatctctgcatttccagttgtgtagccaataaatttcctacttatttaaactatttgagctccaggtctcttttacctgcattttaaaacattcaaagtaatgaaaatttctccacattcctttttatcctttnnnnnnnnnnnnnnnnncagtctacatgcttccttgag

SEQ ID NO: 10043 - DNA, 779 bp, Macaca Fascicularis
  misc_feature (1)...(779): n = A,T,C or G
atgacagtcatggaggctgtggacctgctggatgggctggtggacgagtcggacccagatgtagatttccccaactccttccatgccttccagacagcggagggcatccggaaggcccacccagacaaggtccccaacctaccctgtccatccccctcccagactggttccaccttgttgggctcctgcacgacctggggaaggtcctggccctgttcggggagccccagtgggcggtcgtcggagacaccttccctgtcggatgccgtccccaggcttccgtggttttccgcgactccaccttccaggacaaccctgacctccaggatcctcgatacagagtacatgtaccaggtgatgaagtttaacaagttctcgctgcccccggaggcnnnnnnnnnnnnnnnnnnnnnnnnnnnnnnnnnnnnnnnnnnnnnnnnnnnnnnnnnnnnnnngtgcagccagcaggacctggccatgctgccctgnnnnnnnnnnnnnnnnnnnnnnnnnnnnnnnnnnnnnnnnnnnnnnnnnnnnnnnnnnnnnnnnnnnnnnnnnnnnnnnnnnnnnggctcatnnnnnnnnnnnnnnnnnnnnnnnnnnnnnnnnnnnnnnnnnnnnncccaagctgctgctggacccaggcctggccctccgcctgtctggagaggtctggccctgggcagacagccgccatcagggttcaccttggtgggggaccccactcacccccttagggtcgccacccctcgggcaacttgtgcctggcggcaata

SEQ ID NO: 10044 - DNA, 674 bp, Macaca Fascicularis
  misc_feature (1)...(674): n = A,T,C or G
atcatgattacaattttttcctttgcagatgccttcctgggggatactcttccccaccctaaagggtcgcctgcaacttaggcggattgggtctctctgctgtgtcgttctctcatgagagaccctctgaattgtatagcannnnnnnnnnnnnnnnnnnnnnnnnnnnnnnnnnnnnnnnnnnttttgtcagaaaaatgtggaggctccatattaatgcattattttttaaaacgttttgataactcttaaagcatcatttgcacctgtgtgggaactttgcctgctgcagagcatcgtggccgagctgcagctgggagcctgctttctgccagtaatgaggttnnnnnnnnnnnnnnnnnaaggaaagtatgtcctagcttagcnnnnnnnaagagaaaaatggaatatcagagttacggttgtcagtgaaactgctttgggttttaacctcttagaggaagaaaaaaggttagggaannnnnnnnnnnnnnnnaaggtgatgtgtttgcctctcagtctttcattcatagcctgctagtgaaaaggaagtaaatgagattcttttgtgtaactttgtagtctctttgtattaccaaatatttggggtgttgactcctgtgtgttttgcaagaatgtttggtaagcctgggtaaagagaagtaactgcagtg

SEQ ID NO: 10045 - DNA, 1138 bp, Macaca Fascicularis
  misc_feature (1)...(1138): n = A,T,C or G
gtcaagctcctcactggaggccttatcncttcgtggagcccactaggtgccgacccctcagaatataaccctcatgcctggacccctgagagcttctgatcccagctattagggacagaagaagccttcaaatctggaaggtgctgaatgccctgctgactgggaaagtttcagggcactgatggggtctacctggtaagtggagggcctgaggaaacctgtagcttcaatcatgtatggtaaccgggtgcctgagccccaatctgggttgtgaggaaataggggagaggtagcctgggccacatcccagcctaacatgtgtgaggttcattttaggaactaacctcattagctataaggatcatgcagaggcagcaaagccgggtgcgatgagctcagcctttactcattcacgtacaccatcacacttcacttctaatctgtgtattgcttttttgctttttaaaagttaagtccattttaattacccaaataatgcatgaattcattctccttttgagaaattagattgttaaagatagtctcattcagctatcaaccactccccctcttgatcttttccctcttagtggctgttgtttgttgtacttccatttgagactttgttttaatgcttgtacgtacantaatatgaannttggaaatattgtgtgtttaatacaagtggtatatnnnnnnnnnnnnnnnnnnnnnnnnnnnnnnnnnnnnnnnnnnnnnnnnnnnnnnnnnnnnnntaatgtagctcaatacatcttctgtaattgctgtatagattgccatcatatgattaccacattttacttacgcatttctcttattatggacattaagactgttttnnnnnnnnnnnnnnnnaaaatactacacaggagcatccctatgcctgtgtgaaagtgtatgtgtgaaagtttacctagggttgattcctagaagtggaattgcaaagtcataggatatttatatattggtttttaataatacttccaaattgccctcctgtactatttacttagtatttttcttgaggttgatctgaggtctaacattgttatcctatatcattttcatcccaagtagtgatatctgtgaaatcacaggtttgatgtgtgctaattat

SEQ ID NO: 10046 - DNA, 727 bp, Macaca Fascicularis
  misc_feature (1)...(727): n = A,T,C or G
atacaagcagaacgannnnnnnnnnnnnnnnagcgagcagnannnntnnnngaaagacatactgcgccgcagcnntggcaccggggccgggctggctgagaagagcgaccgctgctcggcctgctgatgccacgtaccaggcaacctcccatcccgcccccgaccctgccctgggcgagcccctccttctcccctgccggtgcacaggcctctgcctgctggggattactcgatcaaaaccttccttccctggctacttcccttcctcccagggccttccatttgaggagctggaggggtggggagttggaggccacctatgccagtgctcaaggttactgggagtgtgggctgcccttgttgcctgcacccttccctcttccctctccctctctctgggaccattggggacaagagatgggatgctccgacagcgtctccaattatgaaactaatcttaaccctgtgctgtcagataccctgtttctggagtcacatcagctgggagggatgcgggtaagtggagcggagggcgggggtactgtggacatgtgggtggagaagggagggtggcgagcactagtaaaggaggaacagtgcttgctggccacaaggaaaaggaggaggtgtctggggtgagggagttagggagggagaagcaggcagataagtggagcgggggttggtcagggccgcctcttcctctagtccccaaggcctctctctg

SEQ ID NO: 10047 - DNA, 389 bp, Macaca Fascicularis
ggctcttctatgccttatgcagggggtcaccgctggagaagaaccaccactgtcctggatgtgtcccaagcttggagcaaatcgttcctcttggatctcccagccctattacagaaatcattcctgggtttctgtccctttgaggctcaccaggtgtagttggctttgttatttgggggtattagcccttctactttgtttctcacccaccctgtaccctcttatgtgtgtctttgctatcccccttccctcccaccattcatgtgcatgagcaaatgtgcaactaaaccgtgggactttgcagtcaaatgaagctgagcttcccacatcccgttgttcggtttgccatgacgatgatgtggggtttccagcggtgtgtctgtcatcac

SEQ ID NO: 10048 - DNA, 733 bp, Macaca Fascicularis
  misc_feature (1)...(733): n = A,T,C or G
tacacatataatactttttttggtagttaagtgctaattacatatatgtaatactttattaannnnntgaaatatttggtaactaaaattttcttttttgaaaattaataaatctagatacatattaatgttgatatgactaaaaacaagaagaaactgaaatttcttttcatcaacatgtagagctgctattttactatttggagaatatgatgtgaaaattggaccccaaaaggtttccttgtgttttcattgtaaaataccatcatcagtgagagtcttgaggtcactaacattatcaccttctggagagagagttactggannnnnnnnnnnnnnnnntttttttcatgtgtttggtttctcgttcaagtgacacgcacaaacaaaaaaaaacacacaaaaaaacaaaaaaaaccccacaactttcagggcacctattgctctaaatgcatnnnnnnnnnnnnnnnnnnnnnnnnnnnnattgaaaaaagaaaataaaaccaccttctttctatagccattaaagcaaagtttactgttctaacaaatttgtattttattttgcattgccacacatctgcttatttaaaaactacatccctttgnnnnnnnnnnnnnnnnnnnngtaggtattactgcttgatgtttgtgtgttctaattctaagagttctttattccagatcatatagagcagttaaggcaactgtaacagcatncanncaacataat

SEQ ID NO: 10049 - DNA, 759 bp, Macaca Fascicularis
  misc_feature (1)...(759): n = A,T,C or G
tatatagctcagtttgacttctcaaaatttcaatgggttggggtggctgcacncttaggnnnnnnnnnggaaatattacagatggagattacattgtttttctgacctggttcaagaccagannnnnnnnnntagggtttttnnnnnnnnnnnnnnnnaatgtatcttcagaacttaacatattactagatgtgatacagattttcctttctgtgaaattgaaaattcacaaaaattcacagcttaaatttcccatcagtgactggaggaatttttttcaggtgcttcctatattaccatccctcatgcatattaactctttagaattttaggttaagtaatctctatagaannnnnnnnnnnnnnnnngagttttggagttctgtgaccccctgctttcctctgcccctcccttcccaaggcattgaagctgaacnnnnnnnnnnnnnnnnnnnnnnnnnnatggcattgggagaaattttagagagctttcaaactctttattttcatgttccacatggtctaattttaacataaatggtatgccttcacactggattgtaaaaggcatgtgatttttgagattttattttgtgatgtattnnnnnnnnnnnnnncaaagggaaagaggtattaatgtgcatcaccctatcttgtttttgaagccagggtagttgtatgattttgttannnnnnnnnnnnnnnnnnnnnnnnnnnnnnnnnnnnnnnnnnncaggaacttatatgaatgtactataa

SEQ ID NO: 10050 - DNA, 729 bp, Macaca Fascicularis
  misc_feature (1)...(729): n = A,T,C or G
gaggacagacgttgaagtataccacgcccatttcttcagcagacccaactatcatggacattcaggtcccgacaccagnnncagacgcagtctacacagaactccaggccacccctccgaccccaacctggcctgctgatgaaacaccacaaccccagacccagacccagacccagcgaccgacaggagaggatgggcctctagtgacagatccagagacacacaagagcaccaaaacagctcatcccactgaagacaccacgacgctgtctgagagaccatccccaagcacagacgtccagacagacccccagaccctcaannnnnnnnnnnnnnnngaggatgaccccttcttctatgatgaacacaccctccggaaacgggggctgttggtcgcagctgtgctgttcatcacaggcatcatcatcnnnnnnnnnnnnnnnnnnnnnnnnnnnnnnnnnnnnnnnnnnnnnnnnnnnnnnnnnnnnnnnnnnnnnnnnnnnnnnnnnnnnnnnnnnnnnnnnnnnnnnnnnnnnnnnnnnnnnnnnnnnnnnnnnnnnnncnnnnnnnnnnnnnnnnnnnnnnnccagagagggaaggcacagacgatgaagctggagccagggctgccggtccgagtctcctacctcccccaaccctacccgnnnnnnnnnnnnnnnnnnnnnnttggggactgtccctcaagttatctcctcngtcagacaaaaa

SEQ ID NO: 10051 - DNA, 722 bp, Macaca Fascicularis
  misc_feature (1)...(722): n = A,T,C or G
aaatacgtgctntccggatgtattagaaatgcatgagctccaccgagtctacaatgaaagtctgaaatttaactgcaaggaattagaagcatatttgcaatcattgcagcttcttctttcttctgctcataaaaggaggaacacttagatagagggcaaatatatctgaaaacctaatttctttctttttttgataaggaaatcttttccatctccatcctaacatgcacaacccgtgaagagaattgtttctatagtaactggtctgcgatcttttgtggccaagagaatagcaggcaagaattagggccatgacagaatttccacgaagctctgagaacatgtttgtttcgaatgtctcaggttcctctttgtcctcattgtgtacgatctgtccccatccttcactcctcccaaagctcacaccaattggtttggcacaggcacggagctggtccctagttaagtggcatttatgttaacaaaaaaatagttcagaatatcagcctttttcattgtgtcatcaaaacagcttaagaaggggactactgccaatgtcctctagtctgacctccacccagggaggacccatggcaggccttttcaactttctgattcatgagaatgaccttgtgcagcttttcccacctcctaaagtgttttctgcatctgttccttcctttggacctcacaacaaatcctgtgaagtaactgagacatct

SEQ ID NO: 10052 - DNA, 672 bp, Macaca Fascicularis
  misc_feature (1)...(672): n = A,T,C or G
acaggaaatatggaccggcaccattatgagatgttcaccaagttcggggatgatgnnnnnnnnnnnnnnnnnnnnnacgccagagggttcggacgacactcccatgatgaaatctccatcctctcgcctctctnnnnnnnnnnnnnnnnnnnnnnnnnnnnnnnnnnnnnnnnnnnnnnnnnngcccaacccgactacagactcagcnnnnnnnnnnnnnnnnnnnnnnnnnnnnnnnnnnnnnnnnnnnnnnnnnnnnnnnnnnnnctccttgccttagatcgaaggctccaaaccatcctaaggacagtggaggggtgcatagtgnnnnnnnnnnnnnnnnnnnnnnnnnnnnnnnncccagtggaacaatcggccccagactctgggcgggctaacttgacaagctaagggctggaagagtccagtttcagaaaatacacctggagccagagcagcagactcgagtgcagaccctgcttcttcacctnnnnnnnnnnnnnnnnnnggtcaagtcagctaggaaggaagcaggatattttctcaaacagcaagtggggtccacagaacttgatctttactccggtgcactgcttctgttgtgcattgccttgctccgtttttcccaaaaagcactggcttcatcaaggccacagacgatctcctgagtgc

SEQ ID NO: 10053 - DNA, 802 bp, Macaca Fascicularis
  misc_feature (1)...(802): n = A,T,C or G
tgcccgaccgatgatgcagagannnnnnngatccaacccctagaaccgcgttgggtttgtgggtgnnncgtgtgcagccgctccgcccagctgggttgggttctctccattcccctttctagctttaactaggaagatgtaggaaggtcggtggttttttttttttttacatacagaattttaaataccacaactggggcagaatttaaaactgcaacnnnnnnnnnnnnnnnnnnnnnnnnnnnnnnnnnnnnnnnnnnnnnnnnnnnnnnnnnnnnnnnnnnnnnggaaccgcaagcaaactctcggctgatggctgcacagtcagatgtctcggggcagaggggccgagcacggagcgattccattttttgactgttgtttttcatagtttcatctttctaaggtgtgtctcttttccaatgagaactcatttttgcaagccaaaagttgatcaattgcattcatttgaagaaactgtacctttttagtacttgctgaagaatgattcggggtaaatcacgtactttgtttagagaggcaaggggtttaaccgaatcacgtagctggtctcatacgcagacagcactggtgaagtattgaatgcaggttccaggtggagggaagacgtggacaccctctccactgaaccatgcagaaatttttaaaagctatacaaaacattgtaagaagacattggccaactctttcaaagtcttttattttccacgtgcttcttattttaagcaaaatatattgtttgtttcttcctaaaaaaaaaaaaaaaaaaaaaaaaaaaagg

SEQ ID NO: 10054 - DNA, 754 bp, Macaca Fascicularis
  misc_feature (1)...(754): n = A,T,C or G
ggcagagttttggggacctggcccttctccnactgggctccnnnnnnnnnnnnnnnnnnnnnnnnnnnngtgctcagtgaagatgaaatgtgcagttttgaaatgttgggttcccagagagagtcatgctgggggagaaggaagtaggccagaagtccaggactgcactgtggtgtgagggtggcttggctttgtctaagatgnnnnnnnngcatgatcaccagagggtgtgggcagggctctgggggtggggtgggtgtcaggaccaggctgctggggcctcatgtgggagagaggtgaaaagtgtcccccactggggggctggcagtgcatgtnnnnnnnnnnnnnnnnnnnnnnnnnnagannnnnnnnnnnnnnnacccaggggctcatcccctcctccggtttcccagacaaatccagacaccagcctctagggtggccttgagaggagagggccaggctgtcctgggtgtgagagaactagatagagcctcccaaccctgatttagaaatgcattccttattttgtctagaaattaataaatggactagcttgttttgacaggtttatttcacatcctatgaatgtatgtaaataaactgtacataggtccatccacataaaatatcttttaataacatatcaacatttgtgtaaatttgaaatttaaaaaannnnnnnnnnnnnnnntacatatgttacaattatgtatattttctttggtccttcataaaaatatattacttgcca

SEQ ID NO: 10055 - DNA, 757 bp, Macaca Fascicularis
  misc_feature (1)...(757): n = A,T,C or G
acttnnnnnngcatcggtnnnnnnnnnnnnnnnnnntcactcgtgtgacggcagacatttctctggctaagcgctcagttctcaacaaccccagcaaacacatcatcattgagcgctccaacacacgctccagcttggctgaggtgcagagtgaaatcgagcgaatcttcgagctggcccggacccttcagttggttgcnnnnnnnnnnnnnnnnnnnnnnnnnnnnnnnnnnnnnnnnnnnncctcgctggcccccatcattgtttacatcaagatcacctctcccaaggtacttcagaggctcatcaagtcccgaggaaagtctcagtccaaacacctcaacgtccaaatagcggcctcggaaaagctggcnnnnnnnnnnnnnnaaatgtttgacatcatcctggacgagaaccaattggaggatgcctgcgagcacctggcggagtacttggaagcctattggaaggccacacatccgcccagcagcacgccacccaatccgctgctgaaccgcaccatggctaccgcagccctggctgccagccctgcccctgtctccaacctccaggtacaggtgctcacctcgctcaggagaaacctcagcttctggggcgggctggagtcctcgcagcgggacagtgcggtgccccaggagcaggaacatgccatgtagtgggcaccctgcccgtcttccctcctgctctggggtcggaactggagtgcagggaacatggaggaggaagggcagagctt

SEQ ID NO: 10056 - DNA, 727 bp, Macaca Fascicularis
  misc_feature (1)...(727): n = A,T,C or G
ccgggccaaaaatcccagccnnnnnnnnnnnnnnnnggannnnnnnnnnnnnnnnnnnntatggggagcggcccccagcatttaggagctagatggtcatcgagacnnnnnnnnnnnnnnnnnnnnnnngttaggaagatataaaggaagacagcgagtaacaggaggcaattccacggccaaacaggtttannnnnnnnnnnnnnnnnnnnnnnnnnnnnnnnnnnnnnnnnnnnnnntnnnnnnnnnnnnnnnnnnnnnnnnnnnttataataaagttcctattggggaggggttggggaagtgctggccagttggaactgtttgnnnnnnnnnnnnnnnnnnnnnnnnntggttagggtcattgggctctgttgcggttnnnnnnnnnnnnnnnnnnnnnnnctgaggnnnnnnnnnnnnnnngctttgtttcttgagaacacagccatcaaggttgtaaaatggcatcactattgttagtcctcacagaagagacttcatactttttctgtctctaatacttacctatgcttctcctagtctgtccacttcctctggtctctttgacatcacaaaggggagatggtaatggtggggacgagaatacagagttgtttttgttgtggtcttgttattttgttttttactctcaaacctctgtcttctggaatcccaaagtctagaagaagagcatgtaaacaagtaactacgaaaactgatgcat

SEQ ID NO: 10057 - DNA, 891 bp, Macaca Fascicularis
  misc_feature (1)...(891): n = A,T,C or G
gagcctgatgacccacagactgtgcctggcccctccctggtggggacagtgacactacaaagggagctggggtagttaaaggctcccggggcttctataaggaagccaagcagctgccttccttttccctggggagaggtaggaaggaaccaggccctcacttaggtttggaggggcagataagagcactgctgaccatctgctttcctccaagggttgctgtgtctagggtgaagtaggcaaaacgttgcccttaaaactgggtcctaaagacggttccagccttgtccttcctgtgtgctccctgagagccattcctgtcccttacacattccagggcagggtgggggtgggtagccctgggggttcccctccctcttgtgcaccattaggactttgctgctgctattgcacttcaccagaggttggctctggcctcagtaccctcagtctcctctccccacattgtttcctgtgggggtgnnnnnnnnnnnnnnnnnnnnnnnaaccacaggaactgatgtgtatataactatttaatgtgggatatgttcccctattcctgtatttcccttaattcctccttccaaccttttttaccccccccccccccagttgcagtatttaactgggctgggtagagttgctcagtctttgggggagattagggacttatcctgtgcttgtaaataaataaggtcatgactctaccctttttcagttgttaacttgtatgcacgaaaatacgaggaagggaatgtgtagccccacgaaggggtaagacacaaagacagcaaggctgaaactatggctctttatttttgtgtggataattcaaacaaagtcattagtagtctttgttcagtttttctaaaaaagaaaaaaccctca

SEQ ID NO: 10058 - DNA, 143 bp, Macaca Fascicularis
ggtgttacccaataaaacacttggcaccaatccaaggtgattttgtgaccaatgacttttatcataaacagcagcttccaccattcctttaatacagcgtcattgtctgggtgtccgtaaatgttttcactgtttctataaaa

SEQ ID NO: 10059 - DNA, 688 bp, Macaca Fascicularis
  misc_feature (1)...(688): n = A,T,C or G
aatccaggttaccgaggagannngcacnnnnntccagagnnncgggtactcttgcgaatgccgtggcctgatcaatgtcaaaggcaaaggcgagctgagaacttactttgtctgtacggacactgccaagtttcaggggctggggctgaactgagggctcctgctgggttctgaaaaggctgggaagccaatctccttccctgaagcaagcccaggagaagactccaccccacgccaatcccagaggcatgcagagggtgtggccgcctcctggcagatggctgtgcatgttggcttctttggacccccactgaaggatttctcagacacatgcagcaccagattctggctcaaagcagccactgagccattgtgcgcaggggaggccagaacctctgtgcccggtctgtaacagtttccaggcaagctggagaatgttcactggttcagggctgactttgagatctttgttccctgaggtgctatggaggcgactttagcacatgatgaaaacagacgcccacctcattggcctgtgggcatgcaaaagtgaggtctgtttttctagacaccaagggggagtaagctgagctgtctggcacggattggagactccctctccctggtgggcccagcaatgagagtgtttctcacagccgcattctggtaaatgaagctgaaaggggtg

SEQ ID NO: 10060 - DNA, 708 bp, Macaca Fascicularis
  misc_feature (1)...(708): n = A,T,C or G
agaaggagcagctccaggctcatgccaccagtgtggnnnnnnnnnnnnnnnaactcctcaggcagcaaaaaatcaaacatcccatcgtcggggatgtcaggggtgttgggctcttcatcggtgtggatctgatcaaagatgaggccacaaggacnnnnnnnnnnnnnnnnnnnnnnnnnnnnnnnnnnnnnnnnnnnnnnaannnnnnnnnnnnnnnnnnnnnnnnncctgggaggaacatcctgaagtttaaacccccaatgtgcttcagcctggacaatgcacggcaggtggtggcaaagctggatgccattctgactgacatggaagagaaggtgcgaagnnnnnnnnnnntgaggctccagctctaagctagccctgctctgcctaagtgtactccagaagaaactcatctcattcaaatacatgctattgagaaggcgaccctgacctccctcttacagataaagtctcagaggctttcagaggctcaggatggggggcctgcctgaggccataatgctacccacccgctcctcctaaccactggtctgttgggatgacccagatgtctgcatcccctcaagtcagtcaatttcctttttgtccactgagggtgggatggggtaggctggggtactttcaatgctcctgcttaaataagttagaccagaccagtgtatttctaaagaaaatcctgacacgcac

SEQ ID NO: 10061 - DNA, 738 bp, Macaca Fascicularis
  misc_feature (1)...(738): n = A,T,C or G
agaggatgtctacagtgctttcgcttnnnnacgtgatgtttttgcagatgagttcatctccttccaggaaacacactaaaggacttgaagaaggctgttacctgctttgtaaaagtgaagccatacaagtgactacgaaagacatcctagttacagagaaaggaaatactgtgttagaatttttaataggactctttaaaccttttgtggaaagctatcagataatttgcaagtaccttttgagtgaagaagaggaccacttcagtgaggaacagtacttggccgcagtcagaaaattcacaagtcagcttctcgatcaaggtacctctcagtgttatgatgtattatcttccgatgtgcagaaaaatgccttagcagcttgtgtgaggctcggagtagtggagaagaagaagataaataataactgtatatttaatgtgaatgaacctgccacaaccaaattagaagaaatgcttggttgtaagacaccaataggaaaaccagnnnnnnnnnnnnnnnnataatcggcaagtagttatggaaaattcggtcacataattactgtcatcgaaggactcattacaacaaacagggaagtaaaggaagagaagcatcctctcgtactccctgagactccgagaacagtggacgcagagggaagagannnnnnnnnnnnnnagtcagtctactcttccccaccacagtggttaaaaggcatttgtatccaacactatgcgt

SEQ ID NO: 10062 - DNA, 775 bp, Macaca Fascicularis
  misc_feature (1)...(775): n = A,T,C or G
ccacaaggacnnnnnnncatgagcgccttcacccggnnnnnnntcagtnntaaccgcaaccagagtgccaaagtgatccgtgcagacccacaagggtgccggaggaggcatagnnccgagaccttnnnnnnnnnnnnnnnnnccacccgggtgggcaacacagtgccctttggagccggggcagcaatagggggtggtggcggtagcagcagcagcagcgaggatgtgaaacgtcacagctctgcnnnnnnnnnnnnnnngtggctgaggcctggggaacttgggggagcccccaaggagccagcccaactgtgtggggctgctgggggtttggagaatggtcttaactacatagatctggatttggtcaaggacttcaaacagcgnnnnnnnnnnnnnnnccctcaaccgcagcctcccccacccccaccccctcatcnnnnnnnnnnnnnnnnnnnnnnnnnntccacccgccgccgctcaagtgaggatttaagcgcctatgccagcatcagtttccagaagcagccagaggaccttcagtagctcaactggacatcacagcagaatttcgcagtacttgtggccccctctctgcagagagtaaattgagagcccaagaagcagggcaaaaagagcctctcagactcggtcatnnnnnnnnnnnnnnnnnnnnnnnnnnnnnnnnnnnnnttttagttttgaaactnnnnnnnnnnnnnnnnnnnnnnnnnnnnnnnnnnnnnnnnnnnngttttttgtttttgtcatcttg

SEQ ID NO: 10063 - DNA, 729 bp, Macaca Fascicularis
  misc_feature (1)...(729): n = A,T,C or G
agtgccannnnnnnnnnnnnnnnnnnnnnnnnnnnnngggttcaacactgtggttggagaaaagggtgttctcctctcaggtgggcagaaacagcggattgcaattgcccgtgctctgctaaagaatcccaaaattcttctcctagatgaagcaaccagtgcgctagatgctgaaaatgagcaccttgttcaagaagctctagatcgactgatggatggaagaacggtgttagttattgcccatcgtctctccaccattaagaatgctaatatggttgctgttcttgaccaaggaaaaattactgaatatggaaaacatgaagagctgctttcaaaaccaaatgggatatacagaaaactaatgaacaaacaaagttttatttcagcataaggaaacaattactggtaaataacatgaaagactttaatgcaaaacagtgttacagaaaaaaaaaagagactgtatgaaacacgtaaaccatatatcaagttatttgaaaaatacctatttttttccaaagtgtgtaaaatattgttttgaaatgtacctgttctcaagatctttttattcagagttttaaaaattgtaactttttaaatgtctatagcactgaagttattttcaggttctgtattttcttttattgtggaatactttaatcaatatagcatggcacctcattttcttttgcctactgttaaagattaaagctattgtcaaatgacaac

SEQ ID NO: 10064 - DNA, 716 bp, Macaca Fascicularis
  misc_feature (1)...(716): n = A,T,C or G
tgtggctgtatcgatggcccaacccttggcaggaatcacaatgagccacaccaccactcccatggtgacttacccnnnnnnnnnnnnnnnnnnnnnnnnnnnnnnnnnnnnnnnntgatggggctaatggacactcccctggtatagcctcccagggctggggtcaaggggcccttgcccacttgcctagccctccccagccctgtctgaagggctcccttgagaactaggacaagagactacaagcagtatgtcctgaggaggggttgggttggtgtgttttctctcacctcccttttatgagggtcttcttgtccatcttcaagcctcacagtgggggcttgcaaaggaatgcagactgaagccagcagagaggaaggactgactgaagggctgtgtcctcttacgggaatttgggaacatccctcgtcttgtcctctcttctgcacagcacaggttccagcactggttttggaagaaaaaaataccctgcccagagggaaagccaggaaagattgggaagtgggtgattaggagagaaggcctgacaggagccttcaaacaatttgggtcctagttggttgggttggacaataaaggaattgcttctgggccctgggaaggctgggaccgtannnnnnnnnnnnnnnnnctagggaagcattcattaccctagtttggcnnnnnnnnnnnnnnggcagggcccactacttcca

SEQ ID NO: 10065 - DNA, 747 bp, Macaca Fascicularis
  misc_feature (1)...(747): n = A,T,C or G
annnnnnnnnnnnnnnnnncgggaagaccatgtggcaaaggcagtggcacatcacacaacagctgcattcatccgggtcgtgggctcnnnnnnnnnnnnnnnnnnnnnnnnngagggcccccgcatggtcnnnnnnnnnnnnnnnnnnnccaaggagaatgcacctgccatcatcttcatagatgagattgatgccattgccaccaagagattcgatgctcagacgggagccgacagggaggttcagaggatcctgtnnnnnnnnnnnngnnnnnnnnnnnnnnnnnntcagaaccccaatgtcaaggtgatcatggccacaaacagagcagacacccnnnnnnnnnnnnnnnnacggccaggacggctggaccgtaaaattgaatttccacnnnnnnnnnnnnnnnnnnnnnnnnnnnnnnnnnnnnnctatcaccagcaagatgaacctctctgaggaggttgacttggaagattatgtggcccggccagataagatttcaggagctgatatcaactccatnnnnnnnnnnnnnggaatgnnnnnnnnnnnnnnnnnnnnnnnnnnnnnnnnnnnnnnnnnnnnnnnnnnnnnnnnnnnnnnnnnnnnnnngaaggacgagcaggagcatgagttttacaagtgacccctcccgtccctccaccatnnnnnnnnnnnnnnngggcttctctcacacccccagcacctctgtcccaaaacctcattcccttttttctttacccagg

SEQ ID NO: 10066 - DNA, 761 bp, Macaca Fascicularis
  misc_feature (1)...(761): n = A,T,C or G
atggcacaaatagatggtcnnnnnntaggagcaaagaggagggcnnnnntagaagggacaaagccaatgaccccgttccagattcagtnnnngaatgctgttggagatttattggatctgattccctcactctctcccacaaaaaacagcagcctaaagttttttaagagatgggacatgggacattgctccgctcttattaaggttcttcctgggtttgagaacatcctttttgctcactcaagctggtacacgtacgcagccatgctcaggatatataaacactgggacttcaacatcaaagataaagataccagcagtagtcgcctctctttcagcagttacccaggtaaatgaatttaaagaaacatctgagcactctgagtgctattcccggataaagccttagtgactcagtgttaactgcaatgggagaagaaatgtttaatggctagtatatattaacaatcaatctgattttcagagtgcttttgaagaaatatagctcaaatacttttatttaatagaatgacataaacaaggttactagaattgccaaatagaagacacttcgtaaatgtaaacggctacatctaaatttatttcaacaaatgccaactgagtatgtatcatgtacaagacactttgctaggctctgcagcagaagcaatgaagacatggctgatcctgcgctcaggtacctccttgagggcctgtagtgtttcttttatttactgcaatatctacagcacttaacctta

SEQ ID NO: 10067 - DNA, 724 bp, Macaca Fascicularis
aagcgtgcttactgctctgttgtcaagtggcctggctttacttggagccctgatttgctttgtcacttctggagctgctctgaaagatggtcctttttgcatgtttgacacttcatccttcaatcagacacaagcttggaaatatggttacccattcaaagacctgcatagtaggaattatctgtatgaccgtttgctctggaactccgtctgcctggagccctctaccgctgttgtctggcatgtgtccctcttctccgcccttctgtgcatcagcctgctccagcttctcctggtggtcgctcacgtcatcaacagcctcctgggccttttctgcagcctctgtgagaagtgacaggcagaacctcctgggccttttctgcagcctctgtgagaagtgacaggcagaacctcctgggccttttctgcagcctctgtgagaagtgacaggcagaaccttctgggccttttctgcagcctctgtgagaagtgacaggcagaaccttctcgttcaagccggggtgttttcatcattggttgcctgaatcctttctacaaggagtgggtacaaattacaaacaaactttccctttgggtatctctggagaaataatgacaaaaaaattcactgcatgtcggttgaatgacagaatgcattttaaatcacattgtaaccttccaggtgatccatggataggacaaataactaagtctttataattgt

SEQ ID NO: 10068 - DNA, 683 bp, Macaca Fascicularis
  misc_feature (1)...(683): n = A,T,C or G
gcagtgaggtggataggtcacctggagtcnnncgtctgtgttcttggaggcttaaattgtaaaatacgtcccttatggaatcctaaattcctctaggtgtttttggaaggcgcatttgagccttgtgagctaaaatagaatggatttaatatttcctannnnnnnnnnnnnnnnnnnnnnnnnnnnnnnagtcaccggcctggaactcagccttgattcactgtctgtcttcnnnnnnnnnnnnnnnnnntatgttgtctgnnnnnnnnnnttgctatgtgggaagtcgggggggacctgatctcctgcttggnnnnnnnnnnnnnnnnnnnnnnnnnnnnagtgctttattgtcaccaagtgaactgcagcacaaccatctcctctccacaagccnnnnnnnnnnnnnnnnnnnnnnnnnnnnnnnnnnnnncctgtgttagaggaggaaaagcgatgatgacatggaagtctccaagcctgtgccatccacctgccaaggaaaagcacaaggtgctatctacttttctctccaggatttagattatcatttannnnnnnnnnnnnagtgaaacctcacctgtgtgggcgtgaaagtcggttggcgttgtttttgattcagctttttggatggctgattgttttcactgtgctgtgggaatgcctctgtattttttcccctc

SEQ ID NO: 10069 - DNA, 718 bp, Macaca Fascicularis
  misc_feature (1)...(718): n = A,T,C or G
tgacttgctgctattgtttaaaaaccccacttagtttcttccttcagatttctaaagtaagcctcagaatttccaaaccaatccatccacagctgtttctgggctggtttttaaagtagttgcaacagaatcatgaggctttccctttttttatcaaatacaaaacacatttttaaaaattctgcacacccagtgatcatcttttgtgcgggaaagcaggatggatgattttattcatccttttagtaaagacacaaaacagatttttctcaacatttgtacagttctgaaaaaacctggtcaccaaaatgttttctctgcnnnnnnnnnnnnnnnnnnnntccagttaggggagctggggcctcattttctcccagaattgtgggcttcactggaagtgaaggcgcaggaatgactggactgtccaccctagccctgcctgcctgtggttttggccggggagcaagccatgaggtgccctggcacatgcacaaactgatcctttgtgtgacagtcttgtatggaaaacagatgctgacagaattgtagactaccatgccacacaaaaaggctaaatatctactccaatgggtttccagttcagtttgaagtcaatcaaatttttgtattttcggtgtctccttgattggttttgctagtaattctgtaaattgtacatttgcaatatgaggtttttttccttttgtacaatttgaaa

SEQ ID NO: 10070 - DNA, 631 bp, Macaca Fascicularis
  misc_feature (1)...(631): n = A,T,C or G
ggggaacctggaagccgtcttgaatgccttggataaaattgtggaagaaggcaaagaccgcaaagagccggcctggcgccccagcgggatcccagagaaggatctgcacagcgtcatggcaccctacttcctgcagcaacgggacaccctgcggcgccacgtgcagaaacaggaggctgagaaccagcannnnnnnnnnnnnnncctggcagggcggaggcaggtggaggagctgcagctacaggtccaggcccggcagcaggcnnnnnnnntgcgaaacccagcggtgcagagtccagcaaaggtgcagcctttgtgtccaagcaggagggcagcgcggtggtgaagagacccaggcgctacctgtatcaatggctgggagccccagccccctacccagatcccctggagcccaagagggaggtgtgtgagctcaatccggnnnnnnnnnnnnnnnnnnnncacatcggcttccaggaggcctatcggcgcttctacggcccggtctagggtgtcgctccgctggcctggccggcaaacccagttctgctcctctccaggcccccttctttccccttccccttgcccttgccctgacctcccagccctatggatgtggggtccccatcat

SEQ ID NO: 10071 - DNA, 674 bp, Macaca Fascicularis
  misc_feature (1)...(674): n = A,T,C or G
agtagggtgtgaagctgggaccggatcatgtattnnnnnnnnnnnnnnnnnnnnnnnnnnntgtctccttcacaatcaggtgtnnnnnnnnnnnnnnnaggactgtttttctctttaagacaccattgttttcccctattttaaaagtgatttttttaaggacagaacttcttccaaaagagagggatggctttcccagaagacactcccggccgtctgtggatttgtctgtgtgcaccttttggctcttctagctgactcttctggttggacttagagtttgcctgtttctgctagctccatgtttagtccacttgggtcatcagctctaccaaactgagcctggccaagctagggggacagacccttgcagtgatgtccatttgtctagattctgccagtcatcactggatgcatctcctcgcggctgccctagcaaggggagacgttgtggtggctatcagacatggacagaaactgacttagtgctcacnnnnnnnnnnnnnnnnnnnnnnnaagatcacccagctgtattttcagttttcttaccatgcttaggactgcacacaagtgagcagacgccaccaacttcctttctgcatcaccagtgtcgtcagcagagaggacagtgcaggctcaaggtcggtagtgaagtcaggttcggggtgcgtggg

SEQ ID NO: 10072 - DNA, 759 bp, Macaca Fascicularis
  misc_feature (1)...(759): n = A,T,C or G
ttttgacacagccaaatccaancngtcacagaataatttcgccctgggttacaaggctgcagacttccagctgcacacacatgtgaacgacggcactgagtttggaggttctatctaccagaaggttaatgagaagattgaaacatccataaaccttgcttggacggctgggagtaacaacacccgttttggcattgctgctaagtacaagctggattgtagaacttctctctctgctaaagtaaataatgccagcctgattggactgggttatactcagacccttcgaccaggagtcaaattgactttatcagctttaatcgatgggaagaacttcagtgcaggaggtcacaaggttggcttgggannnnnnnnnnnnnnttaatgtggtttgaggaannnnnnnnnnnnnnnnnnnnaagtgaagagaaatgaacccactgtgttttggccttaaaattcttctgtgaaatttcaaaagtgtgaactttttattcttccaaagaattgtaatcctccccacactgaagtctaggggttgcgaatccctcctgagggaggcgcttgaaggcatgcctggaagttgtcatgtttgtgccatgtttcagttcagttctgcagtgttattaaatgtgttcttcagcgacagtgtagtgtcatgttagaggagacgatctgaccctccagtttgtacatcacgtcctgcatgtcccacaccattttttcatgaccttgtaatatattggtctctgtgctata

SEQ ID NO: 10073 - DNA, 789 bp, Macaca Fascicularis
  misc_feature (1)...(789): n = A,T,C or G
tcaagtttagcctccctgtagatctnnnnnnnnnnnnnnnnnnaaacatcaaagatgccttttgataagagtgccctaannncagacaagctccttgctcagtagagatagatgtgttagtcttccagcataggagcaaggaatcaaaggtggggttnnnnnnnnnnnnnnnagaccctgctcaggcagttggccaaatgagtgcaaagtctgttttccccaccaacttagcatctcggaaagatgtgctggagagaccctcttggtaagaaggttctaccagannnnnnnnnnnnnnnnnnnnnnnnnnnnnnnnnnnnnnnnnnnnnnnnnnnnnnnnnnnnnnnnnnnnnnnnnnnnnnnnnnnnnnnnnnnnnnnnnnnnnnnnnnnnnnnnnnnnnnnnnnnnnnnnnnnnnnnnnnnnnnnnnnnnnnnnnaagacattcaacttgaggctcctgttagttgagctatcttctttcacttgaagcaggtttgagaggccaaggccagaatttaagttccttttatgaatagatttccttttcttcctgaccccaaggtcagaggagactgtatattccatttctgcctctaagactaggaataggaatatctgaaacaacatttctaagggtggtgaccacaggttgattttaatacgagccttttttcttgtagaggtaagaagtaaaatcttcctgacaaggtggtcctcacggcacagacaatgggctttctgtttatgaggggtgagaaccgtgttcgttnnntatgttcttagcaaga

SEQ ID NO: 10074 - DNA, 785 bp, Macaca Fascicularis
  misc_feature (1)...(785): n = A,T,C or G
agagaccatnntnnnnttttcaaagactctggacacagatctggatggagtcgtgacgtttgacttgtttaagtggttgcnnnnnnnnnngtttgcatgaggcagggactcggtcccccttgccgtgctcccctccctcctcgtctgccaagccatgcctcctgccacacaacaccaggccannnnnnnnnnnnnnnnnnnnnnnnnnnnnnnnnnnnnncctcgtcctcctgtcccctctcctcccannnnnnnnnnnnnnnnnnctctgggcagagctgtgtggcccctgcctgcgccagctatgggctcgggatggactccctgggccccttccattgccaagccaggaaggcagctttcgcttgttcctgcctcggnnnnnnnnnnnnnnnccccagcatnnnnnnnnnnnncctctccttacttcagaggccacccactcagcagcaccggccgggccttgcctgcagactaaactgtaaccactagctctacacggtctgcagtccaggcatgtggagccgcctcctagctcggggaggccccggggctgggaacgcctgtgccttcctgtgccaaagccagtgccccctcnnnnnnnnnnnnnnnnnnnnnnnnnnnnnnnnnnnnnnnnnnnnngggcggtcggccttccctccttcgctccttttttatattagtgattttaaaggggactcttcagggacttgtgtactggttatgggggtgccagaggcactaagcttggagtggggaggtcccatgttccatatagaggaacc

SEQ ID NO: 10075 - DNA, 749 bp, Macaca Fascicularis
  misc_feature (1)...(749): n = A,T,C or G
ctaggacccatnnngaacctgagcgagcccagcgcccccgaggggtccacagtgaccgtgagctgcatggctggggctcgagtccaggtaacgctggacggagttccagccgcggccccggggcagccagctcaacttcagttaaatgctaccgagagtgacgacggacgcaacttcttctgcagtgccactctcgaggtggacggcgagttcttgtgtaggaacagtagcgtccagctgcgtgtcctgtatggtcccaaaattgaccgagccacatgcccccagcacttgaagtggaaagacaaaacgagacacgtcctgcagtgccaagccaggggcaacccgtacccccagctgcggtgtttgaaggaaggctccaaccgggaggtgccggtggggatcccgttcttcgtcaatgtaacacataatggcacttatcaatgccaagcgtccagctcacgaggcaaatacaccctggtcgtggtgatggatattgaggctccgaagtcccactttgtccctgtcttcttggcggtgttagtgaccctgggcgtggtgactgtcgtagtggccttaatgtacgtcttcaaggagcataaacggagcggcaggtaccatgttaggcaggagagcacctctctgcccctcacgtctatgcagccgacagaggcaatgggggaagaaccgtccagagctgagtgacgctgggatccggggtcaaagttggcaggggcttggctgtgccctca

SEQ ID NO: 10076 - DNA, 838 bp, Macaca Fascicularis
  misc_feature (1)...(838): n = A,T,C or G
acggcagaagcttcaccacagaagcgaaatgggcacaccacagggagaaaactggttgtcctggatgtttgaaaagttggtcgttgtgatggtgtgttacttcatcctatctatcattaactccatggcacaaagttatgccaaacgaatccagcagcggttgaactcagaggagaaaactaaataagcagagaaagtttcaaactgcagaaattggagtggatgggttctgccttcaattgggaggactccaagccaggaaggaaaattcccttttccaacctgtatcaatttttacaacttttttcctgaaagcagttcagtccatactttgcactgacatactttttccttctgtgctaaggtaaggtatccaccctcaatccaatccaccttgtgtgttcttagggtggaatgtgatgttcagcagcaaacttgcaacagactggccttctgtttgttactttcaaaaggcccacatgatacaattagagaattcccaccacacaaaaaaagttcctaagtatgttaaatatgtcaagctttttaggcttgtcacaaatgattgctttgttttcctaagtcatcaaaatgtatataaattatctagattggataacagtcttgcatgtttatcatgttacaatttaatattccatcctgcccaaccttcctctcccaccctcaaaaaagggccatnnnnnnnnnnnnnnnnnnnnnnnnnnnnnnnnnnnnnntttaaattttgagacagtataaggaaaatctggttggtgtcttacaagtgagctgacaccattttttattctgtatatttagaatgaagtctggaaaaaac

SEQ ID NO: 10077 - DNA, 707 bp, Macaca Fascicularis
  misc_feature (1)...(707): n = A,T,C or G
cttgagtccttgaacgtctctgtggctgnnnnnnnnnnnnnnnnnnncatttgcannnnnnngaagggtttccccacagaaagggaaagaaggcaacttctccaagacccgcaagaaccggtctgaaggactcagcgtggctcagcacccagggctgtcttcaggatcagagaaagagaggcaaaatgagagctgacgtggactgtccacagtgttcacatgctggagtcagggacggccgcacctgtctccgcctgctccagtgtgcaggagcctctgcctgagtgtgcaccaggcccatgtttattgaccacggtctcgtgggggaaggggactgcggtggagaccagaggaagctgtttcctgttgtgatgttggacctgtagtaggacatggtagtttgttaatttccatgggaagccatgatggcctagcatggagagactctcctcccaggccctgtctggaagttgaggggaagtctagacatctgcagggaggcaggcagcccagcccaggggacccgttcctcttgaaccagtcattgcctgtggcaaatgtgtgtgtgagaatgtagggtgtggagggcaggaccctgacgtggggtagacagtgcacacgtcaggcccacacacggccccaccctggggccttgagcacaggtctcatctttctgtgcctctggactgtgcacctacctcacgggg

SEQ ID NO: 10078 - DNA, 684 bp, Macaca Fascicularis
  misc_feature (1)...(684): n = A,T,C or G
tgtacaaccccagcaagatctnnnncgtgacgacccnnnacatcgtcagagccaacannnttgttgcagagctgaagggtttnnnnnnnnnnnnnnnnnnngtccctgtcattggtggccatgccgggaagaccatcatccccctgatctctcagtgcacccccaaggtggactttccccaggaccagctgacggcgctcactgggcggatccaggaggctggcacggaggtggtcaaggctaaagctggagcaggctctgccaccctctccatggcgtatgcgggcgcccgctttgtcttctcccttgtggatgcaatgaatggaaaggaaggtgttgtggaatgttccttcnnnnnnnnnnnnnnaacggaatgtacctacttctccacgccactgctgcttgggaaaaagggcatcgagaagaacctgggcattggccaaatctcctcttttgaggagaagatgatctcggatgccattcccgagctgaaggcctccatcaagaagggggaagatttcgtgaagaccctgannnnnnnnnnnnnnnngggcagccagtttccttaatttataaaggcatcatgtcactnnnnnnnnnnnnnnnnnnnnnnnnnnnnnntaatttgctttggtgannattactgtattaacatnnnnnnnnnttcnnnnnnnnnnnnnngct

SEQ ID NO: 10079 - DNA, 751 bp, Macaca Fascicularis
  misc_feature (1)...(751): n = A,T,C or G
gtagatcagagagaannnnnnnnnntctgtctctatgaaattggttggtgcagcatgatagagctcannnncaaggatgcatttgattcctttgagaggctaaaaaacgagtccaggtggtcccagtgctattatgcctactnnnnnnnnntttgtcagggagccactggtgatgtggacggnnnnnnnnnnnnctttaaagaagttcagaaactcttcaaaaggaaaaacaatcaaattgaacagnnnnnnnnnnnnnnnnnnnnnnnatttcggaagcaaaccccaaccaaagcactctgtgtgttggcgtccattgaagtgttgtacttgtggaaggctcttccaaactgttccctccccaacctgcagaggatgagtcaagcttgccatgaagtggatgattcatctgttgttggattaaagtatttgcttcttggtgccatacacaaatgtctaggaaactcagaagatgctgttcagtacttccagcgagctgttaaagatgaattgtgtcgtcagaataacttatatgttnnnnnnnnngcctgttacgaacttggctgtcttctattagacaaaccagagactgtaggaagaggcagaactctacttcttcaagcaaaggaggatttctnnnnnnnnnnnnnnnaaaacagattgcatgtccnnnnnnnnnnnnnnnnnnnnnnnnngagggaattggttcctcagtgacagacccggaacacccgctcttccctccccaccc

SEQ ID NO: 10080 - DNA, 490 bp, Macaca Fascicularis
cacccccctcccccatcatgtctcacccgtcagtgattctatgttttgtaacgggggattctctgcctttttgtataaaagaacaagcaaacagacccccgcccgctgcaggcgcccacagccatcccgtttgagctgctagcagctttttttttttttcctgaaggtgggacagtcacttcctcctccctccccacccctgtcgcatccatgtgcgacctggaggactggtcagaaccattactgtgaatgagtgaagatcctggagaaccctgggccccaggccagctcccagcgctgggggacagtgaacggcaatgtgttaatgttacgatgtttttaaaagacaaaaaaaaaaaaaaaacctcaaagttttttttaagtgggggaaaaacatccaagcactttaattccattgtaccaggtgaactgacggagctcagaagttttcctttacaccaactgtcaatgccggaattttgtattctgt

SEQ ID NO: 10081 - DNA, 665 bp, Macaca Fascicularis
gaccccatttgatatcagagatacacatacatcaattgagggtagtcaatataagaagacagtcccagaagtaaaccctcacagtgaatcagaattcacataggaaagaaacgagatgaagatgaatgcaggaagatttgtgtccaaaaggcaaccttccgagtatatcgaagaattcacacaggcttctcttctcttttcagagtactatggataggcctgaatgaagtcataccctattagatagctcccacacatcacacaggctggtaatctcttcaccagtaccagtttcattttattccgggcacacagtccaaatttctcaatatccttttcatccacgtcggtctttgtgactggctactaagatgtggatgtccatcccagtctgaaaaataagagactcccctaacaaattaccagggccctgtcacaacaaaatggatatcatttttaggacaaacttggtgccgtgcttgaatgcagcatggtacaagataagtcagcgtgcctgaatgaatatatgcagcaaaattctcttctgcatctttcccagttgaacatgatgtgagcaaaatttaagcttatacagtagtccctccttatctgcatttccactttacacaatttccattacccatggtcaaccgcactttaaagtt

SEQ ID NO: 10082 - DNA, 741 bp, Macaca Fascicularis
  misc_feature (1)...(741): n = A,T,C or G
aggaaaaactcttgtagtacctagtcagatggtagatgagctgcctgcagctgcaggagcatctctatatagtacttagaagtagtatgttattcctggttaagcaggcatnnnnnnnnnnnnnnnnnnnnnnnnnnngccatctcagattctgtctaaaggggttttttgggaaaactttttgtttattgccctgagaaggtctaccccagggagaatctgagacatcttgcctacttttctttattagctttcgcctcatccatttcttttatacctttcatttttggggatttgttatgnnnnnnnnnnnnnnntttatgtaaaaggattattactaattctatttctttatgtttattctggttaaggaaatgttgagggcaagccaccaagttacctgggttggggttagagagattggccagcaaaaactgtgggaagatgaactttgttattatgatttannnnnnnnnnnnnnnnnnnnnnnnnncttagtgcagaagtatacttacatatcagacatatccaacggaaatactcaaattttgttaagaagttgaactatgactggagtaaaccatgtatcccttatcttttannnnnnnnnnnnnnnnnnnnnnnnnnnnnnnnnnnnnnnnnnnnnnngtggattgttctagtactgtattgggcttcttcgttaatagattatttcatatactataattgtaaatattttgatactnnntgtttataact

SEQ ID NO: 10083 - DNA, 610 bp, Macaca Fascicularis
  misc_feature (1)...(610): n = A,T,C or G
gaagtaannnnnnnnnnnnnnnnnnnnnnnnnnnnnccctgttacagctgtgttggggataggaagtatannnnnnnnnnnnnnnnatatatgcttttttataaagcagatttttaaaatatagtaagattcattttttccctagaaagtgattctcttataaaaaatgtaagtggagtttaaggtatataaaatcgttgtggaaggtgattaaaaatcaaaattcttttaagtatcaattttttataaataatatataaaaatttttcatccaaagcaatctttcactttatattgtcaagaaggtaggtatattggtggctgaggtctcctgaaattgctaaagggaagtttttctgtggtaatgctcttatggatataaacctcagttaaatggaatatctatgggatgtgtggttctggttaactaaaaattaaccagtaaacactctgtagtaaccattacacaaaatacttctgccttaaaaaatatgatatgccagagatgagtgtttcttgacggtggagacctttcaaatgacctttctgttgaactgaacaattnnnnnnnnnnnnnnnatagaaaggacaagaaacagaactgtttact

SEQ ID NO: 10084 - DNA, 736 bp, Macaca Fascicularis
  misc_feature (1)...(736): n = A,T,C or G
cataattaggagacgatgaggccnnncctccattnnnagaccaaacagctgtgcctgctgagagagacggaggagagccaacaggagttgaagggtttgatgaaaagctgttgttagtgtgatctggagaatagatnnnnnnnnnnnnnnnncccagagcatcnnnnnnnnnnnnnctgccggctgccccgcttcctctatttgccattatactgtctgtcccgttggcaggaggcgtacacgaagaggtgctgtaatggtttgtgccactacgatggaaagtggacatcggaggaagactggaattgatgtctgctgaggagtgtgatggatagctcaaacgttcatgtggatgcaggctacagtagctgctggactgtggaatatgagaagagttgcccaacattcctgcatagccaggctgattcatcccactggaggagctccaagggtcannnnnnnnnnnnnnnnnnnncatgaagaaggagctagggaaagtgctggtttctggtttggaggaaggatagcctggtgagtccctannnnnnnnnnnnnnnnnnnnnnnnnnnnnnnnnnctgaagatggcaaacctggaggaacttttcgaactttctttgtctgtacctccatggcactactgtgaagaggcctccttcggggattattgctagaatacnnnnacnnnnnnnnnnnnnggtttggtgggcgaaagggttcctgggttgcccatatcca

SEQ ID NO: 10085 - DNA, 737 bp, Macaca Fascicularis
  misc_feature (1)...(737): n = A,T,C or G
cttgattgcttagactactgacttgttaagtctactgtatataacatctaatatatatattacggnnnnnnnnnnnnnnnnnnnnnannnnnnnnnnnnnnnaactaagtattggagtggattttcttctgctttcatctatacttgtcaaaaaatatattagaccaaaatgtaaaatgtaagtaataattctcatgactcagcttagtaagtcctagaagaaattggtgttaatcatttctattcatttgtnnnnnnnnnnnnnnnnnnnnatttttttccttgtagtctcattcagttctgtaccattttaatttccacctttactaattaattaccaatatagcacgttacagagcatcttaacctataataccagaagtgcattttaaggcttaccactaaagactctgacccacttttcctgtttcttaacagaatggaaaatgaaatcattatttccattccttcatgagctacaaaactttttaattaattaaaaaaaaaactttgtaattgactggagnnnnnnnnnnnnnnnnnnnnnnnnnnnnnnnnnnnnnnnnnnnnnnnggagcgttaaggtcaaagtactacatagttgttggtccctccatactttgttttcccagcctcgtcataatgtgaatattaatgtttaaaaaaaaaaaaaaccctttattatgttgtatttacaacactaaggttacatgattatagactactctgccataaaa

SEQ ID NO: 10086 - DNA, 731 bp, Macaca Fascicularis
  misc_feature (1)...(731): n = A,T,C or G
tcatcagtcccaccctgctggcagagtatgnnnacgtgctgagagttggggggctggtatataccannnnnnnnnnnnnnnagctacacgactggatgtgcactcatttcgaagagcacccgctgtttgagcgtgtgcctctggaggacnnnnnnnnnnnccccattgtgggacatctaggcacctcaactgaggaggggaagaaagttctacgtaatggagggaagaatttccnnnnnnnnnnnnnnngaatacaagatcccgtcctccaggcagtgaccccccaaaccagcctacctggtcactgactgcttactctaccttagctggacctcgtctcccaggaactagagaaaagagcaggagtcctgggtcttcccagttgagactgctggagctgagacacagtactctctcaaagaaggtggggagctgcccagggcagaacccgctggtgttcatgactacccctggctcttctcaccttgtccctccactgccaacagaaaacaaagcagctgactgagatggtcaaaggactttggaccatagggaatctttggaaggctatggggtcttgctctcccttctccttgtgagatctctcctcagctagaatgaggaatgtagtctatctaaactnnnnnnnnnnnnnnnttagcacttctgtttgctttgtggatcctgggataacatgtatatgtgtatacatgcccactctgctattctca

SEQ ID NO: 10087 - DNA, 622 bp, Macaca Fascicularis
gcaagcgcatggagaaagacctgctggagctgcagacgctcatcgacgtgcattttgagcagcggaagaaggaggaagaggagctgattgccttgaaagagcgcattgagcggcgccggtcggagagagccgagcaacagcgcttcagaactgagaaggaacgcgaacgtcaggctaagctggcggaggagaagatgaggaaggaagaggaagaggccaagaagcgggcagaggatgatgccaagaaaaagaaggtgctgtccaacatgggggcccatttcggcggctacctggtcaaggcagaacagaagcgtggtaagcggcagacagggcgggagatgaagctgcgcatcctgtctgagcgcaagaagcctctggacattgactacatgggggaggaacagctccgggagaaagcccaggagctgtcgaactggatccaccagctggagtctgagaagttcgacctgatggcgaagctgaaacagcagaaatatgagatcaacgtgctgtacaaccgcatcagccacgcccagaagttccggaagggggcagggaagggccgcgttggaggccgctggaagtgaggacgccgccccggacagtggcctgctcttaccca

SEQ ID NO: 10088 - DNA, 705 bp, Macaca Fascicularis
  misc_feature (1)...(705): n = A,T,C or G
cgatgggaacacaagacccgcaagctgagcagggccttcgggtccccctacctgnnnnnnnnnnnnnnnnnnnncaccatcctgctcttgaacttcctgcgctcacactgcttcacgcaggccatgctgagccagcccaagatggnnnnnntggacacccccgcggcctacagcctgggccttgcgctcctgggactgggcgtcgtgctcgtgctctccagcttctttgcactggggttcactggaaccttcctaggtgattacttcgggnnnnnnnnnnnggcgagagtgaccgtgttccccttcaacatcctggacaaccccatgtactggggaagcacagccaactacctgggctgggccatcatgcacgccagccccacgggcctgctcctgacagtgctnnnnnnnnnnnnnnnnnnnnnnnncctcctgtatgaagagcccttcaccgctgagatctaccggcagaaagcctccgggccccacaagannnnnnnnnnnnnnnnnnacagctttgctgaaggcctggccggcctcctggcctgccccaagtgccaggccctgcgcagggtgagaatggtgcctgctgctcagggctcgcccccggcgtgggctgctccagtgccttggaacctgctgccttggggaccctgnnnnnnnnnnnnnnnnnnnnnnnnnnnccaactcacacatcccatcacc

SEQ ID NO: 10089 - DNA, 677 bp, Macaca Fascicularis
  misc_feature (1)...(677): n = A,T,C or G
aagtaaagtgtatcccatatgcagtgtgcngggagtctcttgnnnngcgtaatgtgcggcagctggaagaccttgtgattgaggctgtgtatgctgacgtgcttcgtggctccctggaccagcgcaaccagcgnnnnnnnnnnnnnnnnnnnnnnnnnnnnnnnnnnnnnnnnnnnnnnnnnnnnnnnnnnnnnnnnnccctgcaggaatggtgtgtgggctgtgaggttgtgctgtcaggcattgaggagcaggtgagccgtgccaaccagcacaaggagnnnnnnnnnnnnnnnnnnnnnnnnnnnnnnngtgaggttnnnnnnnntaaaaaaaccattaaagttacaacggcagcagcagccgcggccacatctcaggaccctgnnnnnnnnnnnnnnnnnnnnnnnnnnnnnnctcctggcaccaaccagcgtcagcccagcaagaaagcctcaaagggcaaggggctccgagggagtgccaagatttggtccaagtcgaattgaaaggactgtcgtttcctccctggggatgtggggtcccagctgcctgcctgcctcttaggagtcctcagagagccttcctgtgcccctggcnnnnnnnnnatcctaggttcatgacccttcacttcccctaaccccaaacatagatcacaccttctctagggaggaggc

SEQ ID NO: 10090 - DNA, 738 bp, Macaca Fascicularis
  misc_feature (1)...(738): n = A,T,C or G
gacagaacagtacccacaaggcctgggcnnnnnnnnnnnngagctgggggctgagggcctnnnnnnnnnnnnnnngacctgcttnnnnnnnnnnnnnnnnnnnnnnnnnnnnnnnnnnnnnnnnncccagctgcgttctgtgctgctctgtggcattgaggcannnnnnnnnnnnnnnaacacaaccctggaccttctggaccgggggctgcaggtccacgtggtggtggacgcctgctcctcacgcagccaggtggaccggctggtggcgctggcccgcatgagacagagtggtgccttcctctccaccagcgaagggctcattctgcagctggtgggnnnnnnnnnnnnnnnnnnnntcaaggagatccagaagctcatcaaggagcccgccccagacagcggactgctgggcctcttccaaggtcagaaccccctcctgcactgaactccaaccctgccttgagcgaagaccaccttcctgttgcccggacctcagtggaagcgcgnnnnnnnnnnnnnnnnnnnnnnnnnnnnnnnnnnnccaccaggagtgccgcccccttgggggggggaggtagggtgctgcccttccattggacagctgctcccggaaatgcaaataagactcctgaaagctgggtgggaattggctgagccgaggtggaggcggggctcggccccgggccacttcacggggcgggaaggggaggggaagaagagtctcaaactgtggac

SEQ ID NO: 10091 - DNA, 674 bp, Macaca Fascicularis
  misc_feature (1)...(674): n = A,T,C or G
ctgtcttggaggcagttagttatctgagacttaggtgacacagcaggaaacggttttacagattgcaaaaattaatgtaactcttcaagacaatttctctacaaagagaacaattcagttgcagatcaagaggagccgaaaccccatgtacatgtgggacttaattatttagggagaaaaaaagaatatctattagtactgaaattcattaatagtgaaactcaagtgtattttttttttcttgaagaaaacagaaaagtccttttaagcaataacttcattattcttcctgtgactaaaaagacaaaaaagatgccgttagtgggtaaagggtccctttctgaggggcgttctggtttggaagtgtctcatggtggagcatgatcggaagcgcaaggctggccgtgttttgcatgtggccgtgccttggggacatcaggtgcaaagagagatccatcagttcctaannnnnnnnnnnnnnnngagagacacaacctgtctcatgctctgtcactgcagaagacgatgaaacggattctcagagaaggaaggggcagcaggggtgtcatgcctggtcccggctgggagaacagaggcccaggtggatgccaggggctcctgagcccagccagccagtctggaggggtgtggacggctgccctgtgttggtgggg

SEQ ID NO: 10092 - DNA, 672 bp, Macaca Fascicularis
aagaagagcgtggcggagagcatgctggacgtggccctgttcatgtccaacgccatgcggctgaaggcagtgctggagcagggaccgtcctctcactactacatcaccctggtcaccctcctcagcctctctctgctcctgcaggtggccatcggcgtcctgctcgtggtcatcgcacggctgaacctgaatgaggtagaaaagcagtggcgactcaaccagctcaacaacgtggccaccgtcttggtcttcttcaccgtggtcatcaatgttttcattacagccttcggggcacacaagacaggcttcctgactgccagggcctcaagaaatcctctcaatacaacccgggacccaggtactgggcctggaactcctacctccttcctccgtgatctgccaggctcatgggcactgtccacagcccaggagagcttctgaaaggacggtagagctgcccttgctccctacccacagcacctgagttaaaaagtgatttttttgttattggtctgagggatttccatcttagtctggagtcctgagctcagatgcaggtactgccagccatacctccctggtagcaaccctggacctaaggcatgtctgtcgaaggccaagtctgcccagcttaaggactctggttctgactctaccctactgctctaggcc

SEQ ID NO: 10093 - DNA, 738 bp, Macaca Fascicularis
cgccatcagagggtgggctactggagtgtggcaccagcacgggagctgccatcaacttcgccctggagcagctcttcaagaagtccaagcccaacaagaggaagttaatgatcctcatcactgatgggaggtcctacgacgacgtccggatcccagccatggctgcccatctgaagggagtgatcacctatgcgataggcgttgcctgggctgcccaggaggagctggaagtcattgccactcaccccgccagggaccactccttctttgtggacgagtttgacaacctctaccagtatgtccccaggatcatccagaacatttgtacagagttcaactcacagcctcggaactgaatccagagcgggcagagcaccagcaagtgctgctttaccgactgacgctttggacaaccccagcgcttgatggggcacgcacggggcatcaaggcttgggcagggcgtggggagacagatgtctcgttgttattttttgccatcgtgctttttcatactccaaaacttggagttagaaagatgatcacaaatgtatagaaagagccaaaaggctacatcatgttgaggggcctggagattttacattatgacaattgttttcaaaataaatgttcagaatacagtgcagcccttaccacagacttacatagagcttttgtgagatttttaagttgcttctcatgaggactctgtaaccctcagcaagtttcatttttcttgt

SEQ ID NO: 10094 - DNA, 723 bp, Macaca Fascicularis
  misc_feature (1)...(723): n = A,T,C or G
gttggaaggatactanntgattactacagcccagccatgctgnnnnngaagaccgaccaggaggtcctcggggagctggtgcgggcnnnnnnnnnnnnnnnnnnngccctgannnnnnnnnnnnnnnngctgtggacgctggtggtgtcccgctggttcatctgcctgtttgtcgacgtcctgcccgtnnnnnnnnnnnntcggatatgggactgtttgtttaacgagggctcgaagattatcttccgggtggccctgaccttaattaagcagcaccaggagtttattttggaagccaccagcattccagacatttgcgataagtttaagcagataaccaaaggcagtttcgtgatggagtgtcacacgtttatgcagaaaatattttcagaacctggaagcttatccatggccacnnnnnnnnnnnnnnnngagagctgcagggcccggctgctggcacaggggtgagtgtgcctgtctcctgcgttgctcgtctccgcacagacagcgattctcctttccagagttgacactggaccagctttcactgctttcctttttagtgttgtaaatacttgacatcactacactgtagttgtgaattttttaaaagaacagtttaaaaccaggtcattctaccagcttttgattagttatgaagtcatactttttaaagaaaactttttacctgagatatcaataatatataaaatgtgagatgtg

SEQ ID NO: 10095 - DNA, 744 bp, Macaca Fascicularis
  misc_feature (1)...(744): n = A,T,C or G
gaatctgaccgacctacgccactggaaacatacccacctcagcctcaagaaccagactgtgcagagggcattgcgccccaatctttagtcctgnnnnnnnnnttnnnntaatattttacctcatttgtgttccacctctagattacttcagtttttttttcctttaaaattagttactgccactcaaatgtatttacagagaaaatttggccagactcagtggtgnnnnnnnnnnnnnnnnnnnnnnnnnnnnnnnnnnnnnnnnnnnnnnnnnnnnnnnnnnnnnnnnnnnnnnnnnnnnnnnnnnngcaagaccccattttttaaaaaaaaaaaaaaaggaaacttgatgtgattcccatagaggaannnnnnnnnnnnaagttgccatagatagaagctatcggttaaaaaaaaaaaaaaaaacgataatataatgaagtacatgtttcattttagagaaataactattactttagacctttccgaatctgagaaagggaggctagcatgtgttcaaggttagcacacaacagttagaatttcctcaaatcagaagaattggaagataccccccttttgaaatggccctgctgtgtcggtttccctgtggccttgtgaactgtatacatctcannnnnnnnnnnnnnncactgggaagtcactaggaggcagtaaaatttttgctgagcctctgctgtataccaggggctaactcaccatgcacattctaggaactgggcc

SEQ ID NO: 10096 - DNA, 623 bp, Macaca Fascicularis
gacccaggcccccccgcagcgggcccgcaccccggcccgcactcctgaccgcctggccaagcaggaggagctggagcgggacctggcccagcgctccgaggagcgacgcaagtggtttgaggccacagacagcaggaccccagaggtgcccgctggtgaggggctgcgccggggcctgggtgcccccctgactgaggaccagcaaaaccggctcagtgaggagatcgagaagaagtggcaggagctggagaagctgcccctgcgggagaataagcgggtgcccctcactgccctgctcaaccaaagccgcggagagcgccgagggcccctaagtgacagccacgaggcactggagaaggaggttcaggctcttcgggcccagctggaggcgtggcgtctccaaggggaggctcctcagagtgcgccgagatcccaggaggacggccacatccccccgggctacatctcacagtgtaaatactcctcactgtggccaatgctgcatttccagcacaaagtccctggacacagagctgggaagagatgtcacactatccaataggatttccaccatgcagatacagtcgatgtgattgaccccaagagccatgcataataaaaca

SEQ ID NO: 10097 - DNA, 746 bp, Macaca Fascicularis
  misc_feature (1)...(746): n = A,T,C or G
aaataccacatcattgtccaactggggaacatgagcaaagatgccagcatcaaaattaccacagtttcattatcagcacctgatgccttaaaaatcataacagaaaatgaccatgttcttctgttttggaaaagcctgggtttaaaggaaaagcattttaatgaaagtaggggctatgagatacacatgtatgatagtgccatgaatatcacagcttacnnnnnnnnnnnnnnnnnnnnnnnnnnnnnnnnnnnnnacctgaagatgnnnnnnnnnnnnnnnnnnnnngtcnnnnnnnnnnnnnnntttggcagtcagatctgtggggagcctgccatcctgctgtacgatgannnnnnnnnnnnnnnnnnnnnntctgnnnnnnnnnnnnnnnnnnnnacggatgttgctgccgtggtggtgcccatcttattccnnnnnnnnnnnnnnnngggggtggggtttgcnnnnnnnnnnnnnnnnnnnnnnaggctgcagagcagcttcaccgccttcgcaaacagccactacagctccaggctggggtccgcaatcttctcctctggggatgaccnnnnnnnnnnnnnnnnnnnnnnnnctatgataactggatttnnnnnnnnnnnnnnnnnnnnnnnnnnnnnaaagagctttcctcactagaaaccaaatggtgtaaatattttatttgataaagatagttgatggtttattttaaaannntgcactttgagttgcaatatgta

SEQ ID NO: 10098 - DNA, 1092 bp, Macaca Fascicularis
  misc_feature (1)...(1092): n = A,T,C or G
accagccagannngctccccatcccaagatccccgcagccccttggggnnnnnnnnnnnnnnnnnnnnnnnnnnnnnnnnnnnnnnnnnnncnnnnnnnnnnnnnnnnacgagaacgaggaaccagcctgtgaggatgcggatgaggatgaggatgaggacgactatcacaatccgggctacctggtggtgcttcccgacagcactccggccgctagcactgccgccccatcagctactgcactcagcacccctggcctccgagacagtgccttctccatggagtccattgatgattacgtgaacgttccggagagcggggagagcgcagaagcgtctctagatggcagccgggagtatgtgaatgtgtcccaggagctgcatcccggagcggctaagactgagcctgccgccctgagttcccagaaggcggaggaagtggaggaagagggggctccagattacgagaatctnnnnnnnnngaactgagggcctggtggaggccgagtctgtcctggaaccaagcttgtctgggacggctggagctggacagctggaagtggctctggggtcctcacatggcgtcctgcccttgctccagcctgacaacagcctgagaaatccccccgtaacttattaccactttgcggttcggcctgtgtcccccgaacactctgcaccttctgacgcagcctgacaacaatgacctgccctggccccagccctgctctnnnnnntagaataaaggcctgcgtgtgtctgtgttgagcgtgcatctgtgtgtgcccgtgtgtgagtctgaatcagagatttggagatgtctgtgtgtgtgtctgtgtctgtgtgtgtgtgtctgtgggtctccatccttcatgggggctcagccaggtgctgtgagtgacagcagacagtggctgggacaccccccttctgaatgaggccttctgacttgggctggcactgctgaggctcaggacacatcgccccannnnnnnnnnnnnnnnnnnnnnnnnnnnnnnnnnnnnnnnnnnnttcgccatccgtaggccaagggatgggacctgatgacctgggaggactctcttagttctta

SEQ ID NO: 10099 - DNA, 644 bp, Macaca Fascicularis
ggtccacgcaccccgggaggggcctttcacctgtccccattgtccccgccacttccgccgccgaatcagctttgtgcagcaccagcagcagcaccaggaggagtggacagtgtccaactctggagccccagtggcaccagcgacgggcagaggggacttgtcattgccccctccacccacccccacgaccccactcctggatccttcaccccagtggcctgcagacctcagcttctccctctgaacttcaagtctccaaagatcagaatctgggggagggagcgcgtgcagggaggggcttgatctccacgttttctcaggagtagttcaggcatccccatatcttctcctctccccttgtgaagaggacccagatctggcttctttcccaaggagggtgttgggtgttcctcgtgtccctgtccttgaaggacctccttcgccagcctcgtcaccatgctcttcccagtgccagcctctgccgagatgccgtgccaccctcagcagccagattgtaacaccagggagagttggatgcagagccccacaggtgggaaagttgcctgtggaagggagccttttgctacaatttgtaacttattttctaaagtctattttgtaacaatttatttaagttaaaaaaa

SEQ ID NO: 10100 - DNA, 248 bp, Macaca Fascicularis
cccccaccctccacacacagttccatgacccagcgggcctccaggggcatcgggtgctggtcctcctccctcctggcctcgacccctaagggcttcgcccctcccaggggcctgtaactaagtcgggtcctgccaggcagggggcctgtgttctgtgccccttgggggacaggaaccggcaagttcaggtggggtggggacagcacagactgttccaccgttctgcatattgttgcttctaccacaaa

SEQ ID NO: 10101 - DNA, 714 bp, Macaca Fascicularis
  misc_feature (1)...(714): n = A,T,C or G
cagnngcatnctccaggnnnnngttcccaggcagcagctgtcagcgttcagacaactcctcagaacatgcccagccggtcgggcctgccccacatgcactcccagctggagcatcgccccagccagaggagcagctcccctgtgggccttgccaaatggtttggctcagatgtgctacagcaacccctgccttcgatgcctgnnnnnnnnnnnnnnnnnnnnnnnnnnnnnnnnnnnnnnnnnnnnnnnnnnnnnnnnnnnnnnnnnnnnnnnnnnnnnnnnnnnnnnnnngcaggaccctgcttcctcatctcgggttggtttatgggcttttactttggagcactctgtgtgaagctatttggtggaacccatgcacctggtgtggtccgcattatgatggaaggatcttaaccagtcgagtggagtgtacattgaatacaggatgcacaatgttgtcaatcctggaaatggtctttcttttttgtaagatatgtgaatgaagtgttggtgtcctcaccaagaggtggcacctaagggttctgaggaaataaatgtatagacccttatgtacagacctgtgtataaacaacttttgtatatacatataggatagcttttttgaacttatacagctgtacataaaagtagctgatattagttaggcctgtgtcaacagtttggatttttttcacttgtacatttgggattttc

SEQ ID NO: 10102 - DNA, 734 bp, Macaca Fascicularis
  misc_feature (1)...(734): n = A,T,C or G
ctcagttcatccnnnnnnnngcccttcaggagcagcccggaaggaatccaagcaggagtttcatctgtacgggggcactctgtaggccctgnnnnnnnnnnnnnnnnnnnnnatgggagacagaggaaggccagaaggttctctctgcacagctgcctcttgctgtccctgaggctggcctgccccattccccaagggagttcctctggagtggtggggaggaacaagctgcagaagggccaaccccttgcaacagggcagctctcacctcctgcacccagctctcctgatcacagctgcatgccgacattgtcccaccaggacccacaatggcccgagccctctnnnnnnnnnnnnnnnnnnnggctaggagtgggaagggcctggacacccacagaggccccccgtgtcatcactccttggcacccaccaacttccggcacacactggcagagcgaggcgctgggaagtcaccccgcagggtggaggtctcctgttggctgcacttgctctaaagctgctttgcctttatgttcaaacagattcagaccccctgtcccacccagggtgagggcatagagtttctccttcccaacacagacccagagaacagcccttccctgccaaaaagcctttctgcaccttcctgactgtcctggnnnnnnnnnnnnnnnnnnnnnnacaccccatggccatgtaactctcctgtccacatatgataataccatgctgca

SEQ ID NO: 10103 - DNA, 768 bp, Macaca Fascicularis
  misc_feature (1)...(768): n = A,T,C or G
accaaagacatgtttataatggagatagatgccgnnnnnnnnnnnnnnnnnnnnnnnnnnnnnnnnnnnntaagcagtcttgctcatgtatctaaagctgtgcagttccttgtgcaaaccaccatgaagcgcctcctagcacatcgatccctcactgaaattcttctagagaggaagagcatcgcccaggatgcaaaggttgccttggattcagtgacctgtatttggggaatcaaagtggagagaatagaaatgtgggtaggaaattaactaggaagaatagtatgataaaggaaaatattctggtttcattttaaatttttcatttgaaaaattattttcattgagtactatagccatatcagcataaatttgtaaaaaagagaaacaaattatctaatatcttacagccataacacaatcactataacatttggacaaattactctgattgttttttctctatgcagctaaaaaattgttttagataaaatttacgtgacatttcccattttaggccaggcgcannnnnnnnnnnnnnnnnnnnnnnnnnnnnnnnnnnnnnnnnnnnnnnnnnnnnnnnnnnnnnnnnnnnnnnnnnnnnnnnnnnnnnnnnnnnnnnnnnnnnnnnnnnnnnnnnnnnnnnnnnnnnnnnnnnnnnnnnnnnnnnnnnnnnnnnnnncagctactagggaggttgaggcaggagaatcacttgaacctgggaggcagaggtttcagtgagccaagatcatgccactgtgctct

SEQ ID NO: 10104 - DNA, 734 bp, Macaca Fascicularis
  misc_feature (1)...(734): n = A,T,C or G
tgagcccgcgcnccgggacannntncagtttgtgcccttccgggagctgaaaaatgcatcccctgcagcgctggccaagtgcgtgctggccgaggtcccgaagcaggtggtggagtactacagccacagaggcctggccccgagaggcctggacgtccctgccggagaggtcagcccaggctgcaccccatgaagacgtggagggtatggggaggggcagtgagcagtgggtccgtggagcctcggtctccagcacctttggggtctcttaagctccctccgacctcccagaagcctccagtccccgccaggccccactcccagtcctcctgggatcctgctggcttgggcccgggtctggggcccccgaggccgaagggtgataaaatacaggcctccatgcctggccctgcctgagccaggtggctggagggagatcgtgaaggacttggaggggcctgggagctcatccaggggagaccctgccccgacgagaaggggcacggactgggggctctgctttgcatctaatctttgtgggggagggccagcaaggcagcaccccagcccccgagaaagcccagggtgcccagacaccctgtccccacagttagcctccttctgtccctgctcgtgcccccacccccacccaccttgtgttttttgccgtccagcctctgcacccaggtccgtggggtctgcggggtctggctggcctgtgggttctgccgggg

SEQ ID NO: 10105 - DNA, 840 bp, Macaca Fascicularis
  misc_feature (1)...(840): n = A,T,C or G
cagnnnnnnnnnnnnnnngactgacatgccaagtatcaataggcagactgcggcctcacttcttggatgtttgtgatccagattggtcaaaaatcaactgcagcgatggttacattgaaaactacatatgtcgagggaatgcagaaaaagttaaggaaggcaggttgtccttctactcaggccactcttcgttctccatgtactgcatgctgnnngtgnnnnnnnnnnttcaagccaggatgaagggagactgggcaagactcttacgccccacactgcaatttggtnnnnttgccgtatccatttatgtgggcctttctcgagtttctgattacaaacaccactggagtgatgtgttgactggactcattcagggagctctggttgcagtattagttgctgtatatgtatcggatttcttcaaagaaagaacttcttttaaagaaagaaaagaggaggactctcacacaacttnnnnnnnnnnnnnnnnnnnnnnnnnnnnnnnnnnnnnnnnnnnnnnnnnnnnnnnnnnnnnnnnnnncccaggtgaagctggcctgttttctaaaggaaaaggattgccacatggcaagaggatgcatctttcttcccagtgtataagcctttaaagactgctactgctgctatgcctcttggatgcccacttcgtgtgtacatagttacctttaacacagtggttatctaatagctctaaattcatttaaaaaactccaagccttccaccaaaacagtgccccacctgtatacatttttattaaaaaaatgtaatgcttatgtataaacatgtatgtaatatgctttctatgaatgatgtctgat

SEQ ID NO: 10106 - DNA, 760 bp, Macaca Fascicularis
gaaagctattgtacaaatatcactcttcaggtttagtttatagagccatggctatggattcttagctctgtaaggaagtacttctataaattcttaggtttagagatgataccatctgggtacctttgcttgaaccgtgcaaccacatctgggtctagcaggtggatcccatccagttggtttccaagggtgatccagttgggttgcacattgtgtggtcgtccaaataactcaatcttgcgagtgccgggagatagtctttcaatcatgccatagatttcatcgggtttatgactggtggaacgaacctaggaaataaaaagtagctgctttttaagttacacaagattgcaattctagccccttctattatgtttatgatctaaatgagaaaaatctgggatgagaatacacccaacatgaataactgataccaacagaaatgtggaagctttggacgcctgggaagcacatacctcagctacgatcacatcacaatccagaccctggttgaagccttggggatttcctttgacaccaacctgctcaccacagataacagattaccttatgaaaccaccttttgaactttttctcagtaagaaatcaaatgattcttcttttgtgctccacctattgaattgggccccactgctgctcaccaagcagtgttccttcccatggttcaaccagtgacctgtacggcctgtccgaatgatgcgttgcagttgatttgtcttcacccaaataatttcatcta

SEQ ID NO: 10107 - DNA, 699 bp, Macaca Fascicularis
  misc_feature (1)...(699): n = A,T,C or G
gcccagggccngnnnccactnntgtctnnnacgacaccttggctccccacttccgcgttgactggtgcaatgtgaccctggtggataagtcagtcccggagcctgcagatgagatgcccaccccaggcgatgggatcctggagcatgacccgttcttctgcccacccactgaggccccagaccgtgacttcttggtggatgctctggtcaccctcctggtgcccctgctggtggccctgcttctcaccttgctgctggcctacgtcatgtgctgccggcgggagggaaggctgaagagagacctggctacctctgacatccagatggtccaccactgcaccatccacgggaacacagaggagctgcggcagatggcggccaaccgagaggtgccccggccactctccaccctgcccatgttcaatgtgcgcacgggcgagaggctgcctcaccgtgtggacagcgcccaggtgcccctcattctggaccagcactgagggctcggccagtggttccaggtccagccctgacttcatcctcccttctgtgtccactcggcaagcagcacatcccacctgctgattccagctcctggcccgcctggaacccaggctctaaacaagcagggagagggagtggggcggggtgagagtgtgtggagtaaggacattcagaataaatacctgctgctctgctcac

SEQ ID NO: 10108 - DNA, 680 bp, Macaca Fascicularis
  misc_feature (1)...(680): n = A,T,C or G
gaccttttaatttccccttagaatatttatcctaaataaatacagaaaaatgcagggaaaagcgtggtggacgaatgcattgcatttttaaannnnnnnnnnnnnnncttcctgtgttctcctgcatcatggcagacacttttgattttatgcgttcttcagtgatgttaacaagaacttgtaacagtgggaaaaatacagcattgttttcaaggaattcttttttaaagggattttatgagaatggatgcccttgtttctctttgcaggaacaagcatatcatgattgacttggggactggcaacaacaacaagattaactgggccatggaggacaagcaggagatggtggacatcatagagactgtgtaccgcggggcccgcaaaggccgcggcctggtggtgtcccccaaggactactccaccaagtaccgctactgaggcacctcagtctnnnnnnnnnnnnnnnncgtcctggagccgtttttgtgcggaaatgttttaagctatttaaagcctttggaaaatacaggaagctcgagggctggaggacctctgagatnnnnnnnnnnnnnnnnnnnnnnnnnnncaaaataaacaagcacgtggtgagaggagcaggcctacttgtttgttctcaggaaacttgatgaatacatgactgatatttcctagtcaaa

SEQ ID NO: 10109 - DNA, 454 bp, Macaca Fascicularis
  misc_feature (1)...(454): n = A,T,C or G
gaaccaacaacaggcaatgngagaggaatgctgaaaacttcaaaagctgaagagttattagcagaagaaaaatcaaaacccattccaattatgccagccagtccacaaaaaggtcatgctgtgaatctgctggatgtgccagttcctgttgcacggaaactatccgctcgggaacagcgagattgtgaggttattgaacgactcattaaatcatattttcttattgtcagaaagaatattcaagacagtgtgccaaaggcagtaatgcattttttggttaatcatgtgaaagacactcttcagagtgagctagtaggccagctttataaatcatccttattggatgatcttctgactgaatctgaggacatggcacagcgcaggaaagaagcagctgatatgctaaaggcattacaaggagccagtcaaattattgctgaaatccgagagactc

SEQ ID NO: 10110 - DNA, 798 bp, Macaca Fascicularis
  misc_feature (1)...(798): n = A,T,C or G
taactgaaatggaacaagattaccaaccagtagatgaaagtgatgctttccatgacaaccttaggtctcttgacaggaatctgccctcagacagccaggacttgggtcaacatggattagaagaggattttatgatataaaagagaattttcccaccttgacaccaggcaatgtatttagcatannnnncgtaccatggttagatgatcaaccttgggacaaaggattttatagacatttttaaacatctgaaaaagaagcttaagttttatcatcctttttttcctcatgaattcttaaaggattatgctttaatgctgttatctatcttattgttcttgaaaatacctgcattttttggtatcatattcagccaacatcattatgaaattaattagattcccatggccataaaatggctttaaagaatatattttttttttaaaaaatggtttgagaagcaaattggcaggtaatatttcgtacctaaattaagaatctgacttggattgtgaattacagatatgccccttttcttataaaaacaaaacaaaaaaatagtgaagcacagtgaatttgtagagtgggggtatttgacatattttacagtgtggagtgtactatatactattacctttgaatgtgtttgcagagctagtggacatgtttatctacaagtacaattgctgttacataacaccccaaataactcccaaattaaagcacagttgtgctctcaatacctcatactgctttacctttttttcctggatatctgcgtattttcaaatgtactat

SEQ ID NO: 10111 - DNA, 701 bp, Macaca Fascicularis
  misc_feature (1)...(701): n = A,T,C or G
agagcattnnnnnnnnnnnnnnnnnnnnnnnnnnnnnnctcaactccagtagccccccactcctctcaggtctcagtgccatgccatcttggggcagggtgagagggcagcggcagcagggcgcccgctctggaggtcctcaaaaaaggccctcctctgtggctggcggcctctgacctttccctgggctccaatggaagnnnnnnnnnnnnnnnnnnnnnnctgcaacctccccagtcactcctgctgcactaaggacttaggatccttttatcacaaatcgggattctctccctcaccccagttctgtctgcttaaactggaatacacaggagcccttcctgacctgggtggtgtctcccagcttccccgcccagcctgcctgccccatagttggtgagatgccgagtttggtctgagttgtgaccccttcagcgtagatgcccggcaggctggggttggcccctggagggtcaggggaccatcttcttgttccctcttttctcattcctccaacttcctcccctccttcaattatttttttgtaaagttgatgccttactttttggataaatatttttgaagctggtatttctatttcttttggatttttttaaaagtaaggttgttttggggggtggagttagaaccttgatgataatttctttcgcttggtgtaggttttaagatttgttttgtgg

SEQ ID NO: 10112 - DNA, 765 bp, Macaca Fascicularis
  misc_feature (1)...(765): n = A,T,C or G
accccagtaccgtagctacttcatggagtgccttgtagacgcnnnnnnnnnagaccacttgaccaagaaagacctgcgagggcagctgaaaatggtcgnnnnnnnnnnnnnnnnnnntttccagtgtggaattatgtgcctgagaaggttnnnnnnnnnnnnnnnnnaactggaaagaaaaagagaagaaagtcagagtgaaataaaagacgtgcttgtttggagcaatgatcgagtnnnnnnnnnnnnnnnntcaattggccttaaagaatatgcaaacaatcttatagagagtgnnnnnnnnnnnnnnnnnnnnnnnnnnnnnnnnnnnnnnnnnnnnnnnnnnnnnnnnnnnnnattacagatcccgacgcagaacacacaggctcgtgctgtcttggaaagagaatttaacaaccttttggtcatggggactgatagaaggtttgatgaagatgatgataaaannnnnnnnnnnnnaccttcatggagaaaaaagtttagaccaaaggacattcgcggcttagctgctgggtcagcagagactctccctgcaaacttccgggtcacttcttctatgtcttccccctcaatgcagccaaagaagatgcagatggacggtatgtgatgggtcgcgctaacctgccacttgctgggagcatgagcagctttttgtctggaacattaataatgatctaaaacggcccagttaatatgttacaaggcacttgagtatggttgcatgtnnnnnnnnataaatgtttt

SEQ ID NO: 10113 - DNA, 755 bp, Macaca Fascicularis
  misc_feature (1)...(755): n = A,T,C or G
tccagatgagaagctctgaacaaacctggactgaaatataaaccagtgactaaccaggttgagtgtcacccatacctcacgcaggagaaactgatccagtactgccactccaagggcatcaccattacagcctacagccccctgggctctccggatagaccttgggccaagccagaggacccttccctgctggaggatcccaagattaaggagattgctgcaaagcacaagaaaaccacagcccaggttctgatccgtttccatatccagaggaatgtgattgtgattcccaagtctgtgacaccggcccgcattgttgagaacattcaggtctttgactttaaattgagtgatgannnnnnnnnnnnnnnnnnnaccttcaacagaaactggagggcctgtaacgtgttgcaatcctctcatttggaagactatcccttccatgcagaatattgaggttgaatctcctggtgacattacacaggggattctctttcttcgctgaagtgtgactatctccactcacgtcctattttagccaagcttatctgagatcacagtgaacttcgtcctgctgtagaccagaatcgaggtgctgttttagacatgtatttctgtaagtgcaactaggatcagaatatcacaggaaaacatggcttgaataagcagatgacaattttttccacttctctgatctgaacaaatgtttgttaagcacaagaaactctgccaacactaaggatgtaaagatcaat

SEQ ID NO: 10114 - DNA, 994 bp, Macaca Fascicularis
  misc_feature (1)...(994): n = A,T,C or G
acagctgnnnnnnnnnnnnnnnnnnnnnnnnnnnnnnnnnnnnnngtaaaggagtccccaacatgctgcgccgcgttcgggagtcnnnntttcgcatggtgccgcgtgagtgccctgggcctgtgggagcgggaggctgaaccccagcagcagcagcagtccctgcgtctcccctctgagcgctggcggccgggcaggcgctctgtaacttgccgtacacacctttctcgttgaatattcctgaccgcccttgagctggtcatattatcctcccgatcttacacggggaaaactgagttacagaactgaaatgactggcccaaggtcactcgggtgannnnnnnnngttcctctgaggtcatctttatcgagttcttaccagtggtgaaatgctttgaattaaacttgcagcagatagtgatgatagttgcacggccttggatatgctaagaactacttaagtgtatactttaaagaatacaacaggactgagacctttttttttcttctatatgtcttatatatgtgctctgtttactctcttaatttttaaagagtttgtnnnnnnnnnnnnnnnnnnnnnnnnnnnnnnnnnnnnnnnnnnnnnnnnnnnnnnnnnnnnnnnnnnnnnnnnnnnnnnnnnnnnntgagcaatgcatctggatgacggttccctgtctctgaaagacctttttctggaagaggagtctgcattgtagtgtctcaaagacacaataaacttcctatggtctgccctgttgtgattttacatttttgtgagtagaatcctgtgtgaccactaaatattcaagttaatgaagcgcgcctcctcagcatgagtctttaagttttgcctggtcttggattttggtgaaagagcagagctcgccctttgttccataatctacaagaaagtagctgcagctactcctgcagctaaccatttgtgggtgacatgggctatggggagtgctggttcttggccctctgctcc

SEQ ID NO: 10115 - DNA, 524 bp, Macaca Fascicularis
  misc_feature (1)...(524): n = A,T,C or G
gagcgggcatgccggcnnnnngccnnncagccgtccggacggcgcctccccagcccggggacggccacgctccgtccctcgccaacggccgagcttgtgattatgagcnnnnnnnnnnnnnnngcgccccccgccagcccgcccccggttnnnnncctcccgcgaagcccaatcgcgaggccgcgagctgggccatccacccacctgcctgcccggggctgggctgggatcggaggccgtgagccccccacccctgcagaccctccatgcactggctccctcgcccccagccccggggcctgagccgtcccctgtaagatgcgggaagtgtcagctcccggcgtggcaggcaggctcaggggaggggcacgcatggtccaccagggctgtgggccgtggcgcattttccgactgtttgtccagctctcactgccttcctcagttcctggtcccccaacccatccgccannnnnnnnnnnnnnnnnnntagagagtgagccccacgccgccccagggaggaggcg

SEQ ID NO: 10116 - DNA, 741 bp, Macaca Fascicularis
  misc_feature (1)...(741): n = A,T,C or G
tggnnnnnntagggccctaacagctagaatcaaagatgggaccacagagccctgtagcaggaaatgggaagcgggggaggggcaggagctcnnnnnnnnnnnnnnnnnnnnnnnnnnnnnnnnnctgtcttagtaatagaccaatacatggctctacttagcaaagtttttatactgaaacttgattactactgccctttataatttccnnnnnnnnnnnnnnnnngcagtttccctcttggtcctagttttgtgcacatttttttttttttaatgtggttcagattaattatatttctctcactttcttagctggtcctattttttcacattctggcatgtggctatcaagttagattgctctaggcatcctattgtcatggtaactactgaacnnnnnnnnnnnnnnnnnnnncacatcagtataataaatgatggaaagcggttcctaaaaattcatccctttcataagaggggaagaatgagtgcctgatattgttaatacctccctttctacctcaggcctttgcaaattgatgttcggagggtcactggagtgagagggaggaggggggcgtcttggaaatttccatttctcttttcaagcccgaaataggaatgactcttgctgtttgtcagatttgctgaaaattgctcctcacaaagaacatttttttgtacatgtaattgtaaatacaggtttagtacgttaatgttctgtagttctgatgtgataataat

SEQ ID NO: 10117 - DNA, 714 bp, Macaca Fascicularis
  misc_feature (1)...(714): n = A,T,C or G
tgtgagtttttcaaatgtgtgtacagatttttgtnnnnnnnnnnnnnnnntaattaactnnnnnnnnnnnnnnnnnnnnnnnnnnnnnnnnngaatgtgcaggggacctgcctcaggctcctatnnnnnnnnnnnnnnntatagccnnnnnnnnnnnnnnnnnnnnnnnnnnnnnnnnnnnnnnnnnnnnnnnnntttggactgtggcctggccagagccccttgcatatcccccactgtcaggggcagccaggactgttcccatcctcctggaatgtgggaaccttccttatcccgtgcccacatcccctctccaataaagcacctgtgtcctcagcaatggcctgccatgtgctgttgctgggatgtttgtactaagtgtgggtattggttttttgagcaagggggtgaagaatatgggaaattaatagtggtggcgtctcaggggaagacattccttggctcctctgaggggatacagcctccagtgggagactggcattgttgtgtgggttcaggaggtgggggaagactannnnnnnnnnnnnnnnnnnnnnnnnnnnnngtgtggctccatccctggtgctcggccacacctgggcccaggagaggnnnnnnnnnnnnnnnnnnctgttttcagatgagctgtgnnnnnnnncctgccaggttcatnnnnnntgtggcggccggagcccctccactctctgtggggcc

SEQ ID NO: 10118 - DNA, 741 bp, Macaca Fascicularis
  misc_feature (1)...(741): n = A,T,C or G
acagtgcccccctgcagncttcccctctacacacacacgacacnnnnnnnnnnntaacattgagctgcacggacaggagccttgagctggcgcatgggaattgagcgccacgtcgggctgttctgggtatccccccggcaggnnnnnnnnngcctgtggttccctgatctgactctcagggctgcctccccgannnnnnnnnnnnnnnnnnnnnnnngcctgtgtagccagtttggggagtgggctggaggggcgtccagcagctcccgctggtgtgtcagcacgtcnnnnnnnnnnnnnnnntggtgacccgacagggtggcacagccccttccacactctgtcctgtcttcctgggtagatgccctggtggagggctcagtactgaatggtcttccgtccccagcaagggggtgcagcccagggtcaggcccttcggagccagggcagaggttgcagggtggccggagctgctgcactctcccctcagagcacttcatcgacttgcgcctccctctgcccttggcaccctgggcgggaaagggttgatgctcatcatttattgaagggaagccacttaatgagtcagacctaaaagggggtgggggacattttcttctctcacctcacccaagaaagaggtcgtcacttttgctgtggccagggccccacttccctctgtcagatatgtacaataatttaacacagttgcctgaaaaaaaactttgtaaatcattgtag

SEQ ID NO: 10119 - DNA, 771 bp, Macaca Fascicularis
  misc_feature (1)...(771): n = A,T,C or G
gccaagaccaaggacctccagaacgtgtagtgttattaggagagttcctgcatccctgtgaagatgacatagtttgtaaatgtaccacagatgaaaataaggtgccttatttcaatgctcctgtttacttagaaaacaaagaacaaattggaaaagtggatgaaatatttggacaacttagagatttttatttttcagttaaattgtcagaaaacatgaaggcttcatcctttaaaaaactacagaagttttatatagacccatataagctgctgccactccagaggtttttacctcgacctccaggtgagaaaggacctccaagaggtggtggcaggggaggccgaggaggaggaagaggaggaggtggcagaggtggtggcagaggcggtggttttagaggtggaagaggaggtggaggtggaggcttcagaggaggaagaggtggtggtttcagaggaagaggacattaagtgaaacagttgacagacatcaccagttgacttctgtattaacctgcatgatctgtttctactgtggattggaaacttggttctttagcaagtcttgaagatcttggtcattttatgacaatggatcaaaaatgttagcatcatgcaaagcaacggaatagtgaatcttgctctagaagagcatgaacaaatctttctaatgttttgtacagtgcctggcactttgtgggtgcctaataaatggacgggagttttcatttgaagcatannnaatttaannnnnnnnnnnnnnnnatgg

SEQ ID NO: 10120 - DNA, 908 bp, Macaca Fascicularis
agcagccagctgaccctgccggccgcacagtgcccagccagggagtccgtgacatgccacgtggagcactacaacacgatcccagccaggatgtggccgtgccctgcgtttccgaaaccaagccttgcttatgtgacaaaccccgactgtcactgcgccggccggccctcgaggacctgctcctaggttcagaagcgaacctcacgtgcacactgaccggcctgagaaatccctcgggtgccaccttcacctggacgccctcaaatgggaagaacgctgtccaacagtcacctaagcgtgacccctgtggctgctacagtgtgtccagtgtcctgcccggctgtgccgagccatggaacaatagggtgaccttcacctgcactgctgagcaccctgagttggagacccaactaactgccaccatctcaaaacccggaaacacattccggcccgaggtccacctgctgccgccgccgtcggaggagctggccctgaacgagctggtgacgctgacgtgcctggcacgcggcttcagccccgaggatgtgctggttcgctggctgaagggaacagaacagctgccccgtgacaagtacctgacttgggaatcccggaaggagcccagccagggcaccaccaccttcgccgtgaccagcatactacgcgtggcagccgaggactggaagaagggggacaccttctcctgcatggtgggccacgaggccctgccgctggccttcacacagaagaccatcgaccgcctggcgggtaaacccacccacgtcaatgtgtctgtggtcatggcggaagtggacggcacctgctactgagccgcccgcctgtccccacccctgaataaactccatgcttccccaagcagcaaaaaaaaaaaaaaaaaaaaaaaaagg

SEQ ID NO: 10121 - DNA, 700 bp, Macaca Fascicularis
  misc_feature (1)...(700): n = A,T,C or G
actnnntccacannnacaacatnntcatcgccacactgcgggtggccctgcccagcgtcatgcgcttctgctgctgcgtcgccgtcatctacctgggctactgcttctgtggctggatcgtgctgggaccctatcatgtgaagttccgctcgctctccatggtgtccgagtgnnnnnnnnnnnnnnnnnnnnnnnnnnnnnnnnnnnnnnnnnnnnnnnnnnnnnnnnnncagcagggccgcagcagcctggtgtggctcttctcccagctctacctgtactccttcatcagcctcttcatctacatggtgctcagcctcttcattgcgctcatcactggtgcctacgacaccatcaagcatcctggcggcgcaggcgcagaggagagcgagctgcaggcctacatcgcacagtgccaggacagtcccacctctggcaagttccgccgcgggagcggctcagcctgcagccttctctgctgctgcggaagggacccctcggaggagcattcgctgctggtnnnnnnnnnnnnnnnnnnnnnnnnnnnnnnnnnnnnnttggactgcggagacccccgcccccaccccgcttatttatttttagggtttgcttttaaggatcggctccctgtcgcgcccgaggagggcctggacctttcgtgtcggacctttgggggcggggagacagggtggggagggtg

SEQ ID NO: 10122 - DNA, 757 bp, Macaca Fascicularis
  misc_feature (1)...(757): n = A,T,C or G
tggagtatcaagtcttcttgatgatatttaagtctgcaacatttgatatggaaagctggatgtgttaaaaaaaataatgccacccaaactacctatagtagcagaagctatctnnnnnnnnnnnnnnnaatagggagagaagaccatgagatgaatcaaatcctcatttaacaaacacctagaaaataatttatctaaaaaaaattattgcagcaagataatggaaatttcccaaactggnnnnnnnnnnnnnnnnnnnnnnnnnnnnnnnnnnnnnnnnnnnnnnnnnnnnnnnnnnnnnnnnnnnnnnnnntattttctccaggaatatatattgatattctaagtgggatgtttatatttannnnnnnnnnnnntgtctgtagggtcaaaatatctgggagcccttaagagccctttctatttgctttgtctggtgcctgtactcctgggaatggggcttccgcctcctgtctttctcctgcctctggcctggnnnnnnnnnnnatgtcaggccattgggtaaagaactgttggtctcaagctctatcaactctctcccactgaagatggnnnnnnnnnnnnnnnnnnnctcccagatccaggggtgtagttcatcacccctggggaaaccacgagctcccaagtttccttggcattgctagactgttttcctttgccctgcatcctctcctcctcccgccttcttctccatctgcagctctctttcctctgtctgcacccagcctcatctctg

SEQ ID NO: 10123 - DNA, 688 bp, Macaca Fascicularis
  misc_feature (1)...(688): n = A,T,C or G
gaannnnnnggaccgggtgccggtgatagtagaaaaggctcccaaagctcggataggagacctggacaaaaagaaatacctggtgccttctgatctcacagttggtcagttctacttcttgatccggaagcgaattcatctccgagctgaggatgccttgtttttctttgtcaacaatgtcattccacccaccagtgccacaatgggtcagctctaccaggaacaccatgaagaagacttctttctctacattgcctacagtgacgagagtgtctacggtctgtgaagctgctgtccctgagctggaggggggtctcattctacaaagagagaggtggcccccttttcttgacctcctcctccttcaagctcaaacaccacctcccttattcaggacgggcacttcttaatgtttgaagttttctctccagcctctcttcggaggggtaatggtggagttggcatcttgtacctctcctttctcctttcttcccctttctctgcccgcctttcccatcctgctttagacttcttgattgtcagtctcttcacatccagtgattgttttggtttctgttccctttctgactgcccaaggggctcagaaccccagcaatcccttcctttcactaccttcttttttgggggtagttggaagggactgaaattgtgggggaaaggtaggagg

SEQ ID NO: 10124 - DNA, 893 bp, Macaca Fascicularis
  misc_feature (1)...(893): n = A,T,C or G
caccaactnnnnacaagggggcctgtgncnnncagccatgcctcatccctgtcatacaccnnnnnnnnnnnnnnntaagccagacccggctcccctacacctgaagttncgctgccagcagctccccaggcttttccgagaggcacatggttctagcctggacctggatgggctccatgagaatgagttgcctccaccctgtcccaacagctgacagccaggagccatcctcccagctgcaggcctttgtgtgccatcttgtcctgcttcctcactgtggacccctgtctgggccaccctagtgtgctaggctgagcagtacagtgtgaacagggccatggtgtattctaggccacagcccagcactcctctggctgctctcaaaccatgtttcatcctcagccttcctcccaccaacttaatcccctgtggtgagtaccgtggaaccccagcccatctcactatcatactcagctttccctgatgacccatcccagcccccgaagctctataccaagaccacagctactgcacaccaccctgaaacagccacagccaaggtaggcatgcatatatgaggtcttccccatactctccaggggttgagaggtttggccacatgagggagcagaggacaatctctgcagggctgggagtgggtagggactgaaggtctcaataaaccttcagaacctgaatgaactggcttcacacacacaaacatatttgcttatttccccaaatgtaggcacctggctcctccttgctcccctactgatggtgtcctaccccgaactccaaaaattacacctggagtcaggtgcagaagggaaccttgtatttcacaggcctcattttgatggcaaaaagacagtgtaataataacataataa

SEQ ID NO: 10125 - DNA, 592 bp, Macaca Fascicularis
  misc_feature (1)...(592): n = A,T,C or G
aaagggtttgatngtcngnnnnnagcaaaggcacagggctgttttgtnnnactactcagggaaagatgttggtacagaaactttttaacaagtttattgtcgaaagtctcacactttcatcattatccttgatgcattcacctcccggcactcagaatataagtgagatcaacttgagtccaatggaaatcagcacgtaccgaatccggttgaggtgaacctgactttcacatttagattgagaatcattggcttttatacctttcttggtttgacgtgcaataaagaagcacattattttagcttctggctactgtgagaagataaattctgtgattctgtgattttttttttcttttaccactacagtaagaaaaaaaaaaaaaaagccatgctatcggtcaagtttctttttttttaaacttcctcccatgaactacnnnnnnnnnnnnnnnttgatgcaacaaatgaaggaatatttaaagacagcctctcaacagattgtatctcaggttaaatgctaactaattatgtctgtgttgggggttgtgaagagattcttaaaatatctgtgtgctgatccttcattagt

SEQ ID NO: 10126 - DNA, 736 bp, Macaca Fascicularis
  misc_feature (1)...(736): n = A,T,C or G
tgcatgaagaagagtgagcggcggcgnnccgacaggtcagcccagctgtggtcccagctgagagatgaggacttggagacagtgcaggccgcataccttggcctcaagcacttcaacaaacccgtgagcaggtccagccaggcgcacgacaaccacagcttcacnnnnnnnnnnnnnnnnnnnaccagcaagctgnnnnnnnnnnnnnnnnnngtggacaaggaccctgggatccccagagctctgagcctcagtggctcctccagctcgccccaagcccaggtgatgnnnnnnnnnnnnnnnnccagacagcccctgcctgcctctgggctggccacaggaatgccacaaaatgccagaagcgtacgccctaggattacggcccagtcaggctagcacccactctccacannnggaggccagactcaccccaccagccagtcagctgcaactccacgtnnnnnnnnnnnnnnnnnnnnnnnnnnnnnnnnnntggaatcagcttccaggtgtagggatcccttggggggccgagctgacatccaaggctgaggaccccagcgggagtgttctgttccgacatatcctggctgtaacgagttttatagttatggactacttgaaactannnnnnnnnnnnnnnnnnnngctgtggcctcccactaactagtattcttttaaagagactgggaaatgttttaagcaaatctagttttgtataataacataagaaaat

SEQ ID NO: 10127 - DNA, 764 bp, Macaca Fascicularis
  misc_feature (1)...(764): n = A,T,C or G
gagcaaagggtacangnctatgnnttnnttntnnnnggttcatcagtctttatgaccagtattctgaagtttattcccatgccagtgctatatggagtgtttctttatatgggtgcttcatctctaaagggaattcagttctttgataggataaagctcttctggatgcctgcaaaacatcaaccagattttatatacctaaggcatgtaccacttcgaaaagtgcatctcttcacgattattcagatgagttgccttggccttttgtggataataaaagtttcaagagctgctattgtctttcccatgatggtgttagccctggtatttgtaagaaagttgatggacttgttgttcacaaagcgggaactcagctggttggatnnnnnnnnnnnnnnnnnnnngaaannnnnnnnnnnnnnnnnnnaaaaagaagaagaacaaagtatgctagctatggaagatgagggcacagtacaactcccattggaaggacactatagagatgatccatctgtgatcaatatatctgatgaaatgtcaaagactgccttgtggaggaaccttctgatcactgccgataactcaaaagataaggagtcaagctttccttctaaaagctccccttcctaatcactctagaagctgattccccaaagcatnnaagccgaaaagagaagaaagctgactcagggaaaggtgttgacagggagacttgtctatgactcgatcttcaatttattttttacatatatatgagaaga

SEQ ID NO: 10128 - DNA, 751 bp, Macaca Fascicularis
ctcaaagcaggtttgggaccaggtcccctggagaggtcagaggggcctctgtgggtgctgggtactccagaggtgccactggtggaagggtcagtggagccccagcaggaagggcgggccagccaggccattcttgtccctgggttggggaggcaaggagctagggcagggaccaaatgaacagaaagtctcagcccaggatggggcttcttcacagggcccctgccctcctgaagcctcagtccttcaccttgccaggtgccgtttctatcccgtgaaggccactgcccaggcccccggtgcgccccctagtggccatagcctggttaaagttccccagtgcctccttgtgcatagaccttcctctcccacccccttctgcccccgggtccccggccattcagcggggctgccagagaaccccagaccctcccttacagtagtgtagagccccctccctctttcggctggtgtagaatagccagtagtgtagtacggtgtgcttttacgtgatggcgggtgggcagcgggcggcgggctccgcgcagccgtctgtccttgatctgcccgcggcggcccgtgttgtgttttgtgctgtgtccacgcgctaaggcaaccccctcccccatactgactccttctataagcgcttctcttcgcatagtcacgtagctcctaccccaccctcttcctgtgtctcacgcaagttttatactctaatatttatatggcttttttcttcgacaaaaaa

SEQ ID NO: 10129 - DNA, 685 bp, Macaca Fascicularis
tgtggggagaaaagtgcaaccagaggtgacagtgtacccagagaggaccgcactcctgcaccagcataatctgctgcactgctctgtgacgggcttctatccaggggacatcaagatcaggagttcaatctgaatattcttggagaaagatgctgagtggcattgcagccttcctacttgggctaatcttccttctgatgggaatcatcatccagcttagggctcagaaaggatatgtgaggacacagatgtctggtgatgaggtctcaagagctgttctgctccctcagccatgctgaggtcctcactgaagcttctctccctggagcctgaagtagtgatgagtagtctgggccatgggcgaggtaaaggacatccatgaggtcaatgttctgggaataaccctcttccctgatccttggaggagcctaaactgattctggagctctgtgttctgagatcatgcatctcccacccatctgcccttctcccttctacgtgtatatcattaaccccattgccaaggacactgtccagaaactcccctaagaccttactccttccagccccaaatcatttacttttctgtggtccagccgtattcctataagtcatgatctccaaagctctctgtcttccaactgcagtctccacagtcttcagaagacaaatgctcaggtagtca

SEQ ID NO: 10130 - DNA, 661 bp, Macaca Fascicularis
gctgtgtttcactgcctcctgcccacagacccaggcccgccggcccggacccgtcccagcctcccctccccaacccatgcagcccccagggggatagcccatgggcccctgtggatcctccctccccaagtggacacatggctgtgcaggccaggaggcccacagatggactgagtgctgggaaggggcggctgtgaggggtatcatccccctgagtctctccctgaaggggagcaccgggcgagtgcatgtgctactgctgctacaggcctgtctatctgtttgtctgtctgtgtgtctgtgacagtcagggaaggatgcctctgagctgaggtggggtgagacagaatgggagagattagggcatggcgtggaggggcccaaggagcaggggctgttgacaagggccttaccaggagggattaggacactgaccattctagaaatgggtttcaaatggcacaacactttctattccacaaaagaccaaaagccagaggccccaggctctgtgctgatgaacagcctggctgagccctggccctggcaggttgagggaccatttggggctccctccttccctgtcagggctggggatgctctgtctgggaatgagggagttaaccaggtttggtgcaggagcaggggcaaggggccactg

SEQ ID NO: 10131 - DNA, 693 bp, Macaca Fascicularis
ggcaggtggcactaatcccatagcatttgtgtcaccactgaagacggtacaaagtgcctcgggaacgccaggcgccgagccatggcctctgcacgggaatgggggtgggacaaatcctcagagatccaggaaacatttgggctggttcctgagagaagggctctaaggcaggcaggtgggaagatcccagaaattttggcttgaaaaccatttcaaggtgtgcaggggtgggaagaggttgtaaagatcggttgtcaaggccttgcgtggtctgctcgcacgtcaggaccagggtgctctgttctatagtgaatttcagatcctcctctagaggcccaggcccttgagtctaggccctgacttcagcaggtggtgatgctgtccagcctgtggcttcggaacaccatcatggcacatttgaaatacaggaccaaggccacgttcattccacagaagcacttcagtaactccataggacacttaaaattcagaggctaggcggggtggctcacgcctgtaatcccagcactttgggagggcggatcacatcaggccaggagttcgaaactagcctggccaacatggcgaaaccccggctctactagaaatacaaaaattagccaggcatagtggtgtgcgcctataatcctagggacttgggaggctgaggcatgagaattgcttgaacccaac

SEQ ID NO: 10132 - DNA, 747 bp, Macaca Fascicularis
agtaattgctcacattgtgcagtatgtgagcacatgtatgtgtacagtatgtgagtatgtgtacagaccatgtgaaagggaatgctggtctagctaacatggtatgtttgtaggcgaatctctagcagaaggaagccaaaatatttttttccttttgaaagtttttaaaaaattatttcatggatcttttttttaattaatacgtgtgcattgttacaatgtatgttggatgtcttttgactctaaatgctttttttgttatcagagattgtgtactatttttatttttaataaatgtaacttccctttccttgttttagatttactttgctcttcattaatcttattcctgatgttctaaaacatcagtcatcaacaaaacatgtttcatgcttcagatattttactgcttgtgtccttattgttggatagctttaaacagagttgatgtacttcaaatgtagcttgttgatacttaaggcatcttcttggaatgtgacttttgaagaaaaaaattactcaaagcaaaccaagagttaacaaacctaacataacctgaggtttaatattgtactgtcatattttttagagctataacttttgattatattaaactgcctccagctgtactatgtaaaacagatttacttttcaaaattacaatatacctgctttgttctgtatgtatatgtttaacttatgaagtggactcttagaaggatttgaaatggactctggccacagaat

SEQ ID NO: 10133 - DNA, 992 bp, Macaca Fascicularis
  misc_feature (1)...(992): n = A,T,C or G
ggtggagctgctggccttgctggatgtgggcgctctctacaccttcagcnnnnnnnnnnnnnnnnnnnnnnnnnnnnnnnnnnnnnnnngccccggggccacgcacccacagactannnnnnnnnnnnnnnnnnnnnnnnnnnnnnnnntgtacaatgggcggccgactatgaaccctacgtggtgnnnnnnnnnnnnnnnnnnnnnnnnnnnnnnnnnnnngtggnnnnnnnnnnnnnnnnnnnnnnnnnnnttgtnnnnnnnnnnnnnnnggaatatgnnnnnnnnnnnnnncctgaggccttcaccatccatctgccccatgctccaagcctggacatctcccgcttccgctccagccccacctatcgtgactgcctccaggccctcaaggatgaattccaccaggacttgtcccgccaccatggggctgctgccctcaaatacctcccggccctgcagcagccccagagccccgcccgagactgaggctgaggctgggtgggcactgccccttgtcttagcattgggcagacaccagggcaacccggcctgccctccaccatccctgctatttaaattatttaaggtctctgggaagggctggggcggagcatctgtggggtggggtcttccccttgctgctattgtttggcnnnnnnnnnnnnnnnnnnnnnnnnnnnnnnnnggggctggttcccccatcttcaatcgttcatccctttttcataatgaaagttttaaaaaatcctttttgtgttcctccttggtttgggggagcaggggcactctggggctagggtgtcagtgcataagggaggtgctacatccagctggggtcacaggagggcctgggcccttaagggcaagcactcccccaaccctcagacagccagtcagggagggcagaggctgggaatggaatgtgtcctgcccaccctcccctgccccaaacccaacaccaagaggctgagaggctttattggctttat

SEQ ID NO: 10134 - DNA, 562 bp, Macaca Fascicularis
  misc_feature (1)...(562): n = A,T,C or G
ccaactgcagggccccggcacagggnnngacaggtgagatagggagaggtggaggaagcgatctggcccagggcctcagagctgtgagatgatgctgggtgccagactgcaggtgaggcctgtgccatctggttccacattcagggccttcactatgccatcctgtaccaccatggagaacctgccggaaagaagggcccagccagctgcctcagcctgggcttggaggctgggcatagagacaggtggtgaagagccaggggccgaagagaactccagagaggactccccgacagaggactctccccacagaggactctcccccacagaggactctccccacagaggactctcccccacacagaggactctccccacagaggactctcccccacacagaggactctccccacagaggactctcccccacacagaggactctccccacagaggactctcccccacagaggactctccacacagaggactctctccacacagaggactctccccacagaggactctctccacagaggactctccccacagangactctctcca

SEQ ID NO: 10135 - DNA, 711 bp, Macaca Fascicularis
  misc_feature (1)...(711): n = A,T,C or G
agagagggcgctgccacccctgncccgcccgnnnaccnnnaagctggagcccaaggaggaatcacccacccggatcaacggctctatccctgccggctcatgcttggagccctgcgcccagcacaacggctcagagcccgccagccccaaacgggagcggcccaccagccctgcccccaacagaccccccaaaagggtgaaggccgaggcggtccccagctgaccagggtgcttggggagggtggggctttttgtagcaactgtggattcttttcctctcgtggtctcactttgttacttgtttctgtccccgggagcctcagggctctgagagctgtgctgtaggccaggggttgcaccggacctccatggtctctccctgggctctaggggcctttggtggggtttggagaagaagccacaccccagagctaacagctgagcccctgccacaccccatcctctgacttggagtgttgtccagaggtgcggctgggccctccctggtctccagcttaaacaggagtgaactccctctgcccccagggcctccccactgggccccccacaccccaccctacccctcctccatggaccctgcaggaggggagacccgcctcgaagtgggggacacagtagnnnnnnnnnnnnnnntttggggctggagggagacgtgggtccaccaggcttctggaaaagtcctcaatgcaa

SEQ ID NO: 10136 - DNA, 715 bp, Macaca Fascicularis
  misc_feature (1)...(715): n = A,T,C or G
ggtgagctgagactctgagagcagttagagtgggtgcgggtctgaaatggggactcctcctagcagctattgtgtacgcgaagnnnnnnnnnnnnnnnnnnnnnncaacggccacgtgtgagcaggccagcatcacacggctcgctgtgacccgtcccgggactgagatgggcctgggtctgctccttgtcctgtgattaaagtcctctcctgacagtggagagcaaagccacacagaggtgctcacaggaattcctcttggcgactaggnnnnnnnnnnnnnnnntttcctttgcaggaaagaccccagcgagattctttcattcacctcctccnnnnnnnggggactggccctggacatcaaaggagggattatgnnnnnnnnnnnnnnnncagcccacagccccgttcaagtcttggtgcttctctttcccagaggctggtcccagccaggcacgcacaaaaggcagattctcataaacgcggcctcccgccctggatctggagtggagctgctctgggatttcgagttcttctgcacagatgactaaatatatccgagagacgttggaaaacctgctgaacgttttacgttggtctgctcagcannnnnnnnnnnnnngatatttctgtaattcgggacgtcacaccactcctgtgtaccaagaccagtgggcgccgtttgatgtagaagagcaggacgagactctacgat

SEQ ID NO: 10137 - DNA, 830 bp, Macaca Fascicularis
  misc_feature (1)...(830): n = A,T,C or G
catgcacagaggcagggcagtgagctcagctgnnnnctgacatcgctatttgatctcaggcctcttccttcacaagtagctcttgcccctaccccacgccagctaatgcccactctgtccctgctctgcatgtttccttaggtgtgaagtttgaagaggcaaactaattttgaaagccactattttgaaaccattccgaggcctgagttcccataggacacactcacgtgggcaggtacacgttagtcaacaactggaactgtctcttggatccctcagctgtggtttcgtggctggatgacggaacactgtgcgaagagaggtggtgggggacaggaagtagcgcttcatgcttactacatcctccaaattgtctttgcnggaggagaaaaccgtactgggccaaaagatcaggacaatatgacttgagtccacaaggatacaaacacctgagtagctgggcagcccttggcagggtctaagccaggaagtgaaaatgatctggcctagatttttaagggaactctaggaagaggcctacctttttaaaatcctgtctctttatcttaccataagaggctgaacctctcttcattttttggaagggccacttgtgttttctgttttgggaacttcatttttctactgggttgttgatctttgcaataatttctaggagctgtttatgttttgaggtaattggtcctttgttcgtatgtatgagatggaagtctcattttccagtttatctttttgcttatgatttttttgactttttattataaaataaaacagtgttacatcaaaccacacagaacagtgaatagctt

SEQ ID NO: 10138 - DNA, 759 bp, Macaca Fascicularis
  misc_feature (1)...(759): n = A,T,C or G
agagttacagagggtnnnnaagcaccgtctcttgatatctgcacagactattttgggtatttccgggcgggcagttcctttgcatgtttcgggagaggtttgttgatttggggcttatatgtcaggcctttggtttgcgtcttattttaggggttgtttgggggcctgggtggtcggcctcacacgggaaggggatgggtagtggatggggtttctgttgtatcttgtgggcgggtgattttgcttttgtttttgtttcacattcttccccctccacaagccaaagttgtttcatttggtttccactgtgtggactgtgctggagcnnnnnnnnnnnnnnnaaaattgggggctaggcaagccccaggttgcagacatgatgaannnnnnnnnnnnnnnttctggttcctgcacaacctcagaggggcaaaaaccctccccaggaaggaggagggtgttcaggagtcacacttttggagagaaggcagctcccagtctgctgnnnnnnnnnnattctgcatgtgtnnnnnnnnnnnnnnnnnctggaagccttacgtatgaagcgtggagaagcagccattgccccnnnnnnnnnnnnnnnnnnnnnnnnnngccccttgggtcagactggannnnnnnnnnnnnnnnnncccctnnnnnnnnnnnnnnnnnnnnnnnnnnnnnnnnnnnnnnnnnnnnnnnngtgccaggagccaacctggtcttcccgaggggcagtgccccnnnnaagacagaagt

SEQ ID NO: 10139 - DNA, 726 bp, Macaca Fascicularis
  misc_feature (1)...(726): n = A,T,C or G
cagctgcatagannnnnnnnnnnnnnnnnnnnnnnnnnnnacagggggccnnnnnnnnnnnntgcgctcctgggacctgcgggagggccgnnnnnnnnnnnnnnnnnnnntcacttcccagnnnnnnnnnnnnnnnnnnngccccactggggagtggctggccgtgggcatggagagcagcaacgtggnnnnnnnnnnncannnnnnnnnnnnnnnnnnccagctgcacctgcacgagagctgcgtgctctccctcaagttcgcctactgcggcaagtggttcgtgagnnnnnnnnnngataaccttctcaacgcctggaggacgccttatggagccagcatattccagtctaaagaatcctcgtctgtcttgagttgtgnnnnnnnnnnnnnnnnnnnnnnnnnnnnnnnnnnnnnnnnnnacaagaaggccacagtttatgaggtcatctactaaacaagaactccnnnnnnnnnnnnnnnnnctgggagaaaccgactcggctctgacagggagacccccaggcgaggggccctgaggatggcggaggatgggccgcaggcagccgcgcgttcggggctgcgctccggccggctgagagggcgcgtgccccatcacgatctggacttctgggcctagattgatgtgtctcacagactcggatgggttctgctcctcctcctccccctgaacaatgctggcagttgctacaaatagattatgga

SEQ ID NO: 10140 - DNA, 757 bp, Macaca Fascicularis
  misc_feature (1)...(757): n = A,T,C or G
gtgtgggtgtgtgagtgtannnnnnnnnnnnnnnnnnnnnnncagccctagannnnnnnnnnnnnnnnnnnnnnnnnnnnnnnnnnnnnnnnnnnnngggccannnnnnnnnnnnnnnnnnnnnnnnnnnnnnnnnnnnnnnnnnnnnnaagaattgctctctcggtaccagacagtttgacatcctccacccttagaaaaatgacattgttttgttactgctcctacccaccaagggggtaaagaaggcgagttctgagtgttggatgagtcagtcgcgtggaagggcgtggagcgtggcgctctaacttcctgccgtctgccaccacaccacgcgtgtttaaccctcgcactttctccactgtggagacggctggggcggcgccccacagtgtgtattcctgtcctctatgttagagtgcatcataagcacatttactgtgctatctatatctctatataaaagtgttttataaaaccccagaataggagcgcgacgcatgattggtgtttgaggcgtttgccagctgggacaaactgcgtttggagctgtggttaagctgactaaggagacggtggctcttaccattcccacgtgcccagggctgttcagnaagattttaatggtgagttgtcctcgtttaccgggacagtatgcatgaaggcgtgtacaccannnctgtcgcctcacnngcaagagagaggcaccagctgaagttcccctgactgaagagagcctgtggccatgtaaaaagag

SEQ ID NO: 10141 - DNA, 748 bp, Macaca Fascicularis
  misc_feature (1)...(748): n = A,T,C or G
nnnnnnnnnnnnnnnnnnnnnnnnnnnnnnnnnnnnnnnnnnnnnnnnnnnnnnnnnnnnnnnnnnnnnnnnnnnnnnnnnnnnnnnnnnnnnnnnnnagagcaaaactctttcaaacaaacacacaaacaaacaaacaaacagaaaactaagcatgtgaggagtttggcctgggtggtggagcttgtgagctatgagctggaatctgagtgaaggctgggctggtggaaggagttcactcaagctcccaaggtattctgtcctccaggactctgaaccacctgggaggagaagcaattgtggcaggcctaacacctcttctttcccaaaccccaggagcaggttctgtgtgttacaaccattgaggtcacattcttgaagtgcattttggggaagtcattattttggctgcagcagggactaatgtatcagtctattagaattcagaaaaaggtaagcaaacaaaaaaggtgttggaattattctcttctagcattttgaaatgtacaattggttaatgttaactagagccaccatgatgtactgaagaccaggcaggtcttattctttttatctaactgtacatttgtacccattaacctaatgctcatagcatcaagaaaagatcaatatttaaggtgacaaatatcccaattaccctgatttgattatgtgaatgtgttggattatcatatctactcctaaaatatgcacatctaattgtatcaatgaaaataaagacaaaaat

SEQ ID NO: 10142 - DNA, 695 bp, Macaca Fascicularis
  misc_feature (1)...(695): n = A,T,C or G
aaggagattgcatatggnnnnnnnnnnnnnnnnnnnnnnnnnnatagtagnnnnnnnnnnnnnnnnnnnnnnnnnnngcttcctcatctgtgaggattaggaaatgaggattaggtttccctggcctacttcacatatgatatggaagcatgaaatgaaataatatccatgaaagttatcttgtcgtggaagtannnnnnnnnnnnnnnnnnnnnnnnnnnnnnaatgatgttatgaacatagtaagaaaggnnnnnnnnnnnnnnntttattagttcatgtgtcagttgtgtaaactaatcaccatgagtatgtgaaacattgttattttcagggagagtttgtgtccatgggtgttatctctgatggcaactcctatggtgttcctgatgatctgctctactcattccctgttgtaatcaagaataagaccaggaaatttattgaaggtctccctattaatgatttctcacgtgagaagatggatcttactgcaaaggaactgacagaagaaaaagaaactgcttttgaatttctttcctctgcctgactagacaaggatgttactaagtgcttcaaagctgaagaatctaaatgtnnnnnnnnnnnnnnntaccaatttaatagtaatgctcnnnttaaattacnnnnnnnnnnnnnnnnnnnnnnaaagattatgtgcttcttagtacagg

SEQ ID NO: 10143 - DNA, 704 bp, Macaca Fascicularis
  misc_feature (1)...(704): n = A,T,C or G
gagagcacagtggggtgcgccaagcccgtgctttagaaccgtatcacagcgcccctcacaacagccctgtgaggtaggtgaacaagcccacttcccacatgcagacaccgaaggctcaacagctcccctaggcctcggggttcctgtggggtgggcaagggtccagcccgcgggtctgacccnnnnnnnnnnnnnnnnnnnnnnnnnnnnnnncgggtctctactcaaggggaggccccgggtccagagtctctgggtccagcctgtcccgtgggaataggtgcagggcgtccccgtggctgtggagggatttcgagctggaggggggctggggtcccacgtccgaggtccgttcccacggaggaatccaggtgatggcttcggcccaaaccacgaaggagacgagaggcccgccaggaagaagacttgggtccagggtggtgggccccatcggggcctcttccgcggcgtccnnnnnnnnnnnnnnngctgacccagccaggccacggcccacgtgcctttgtgagagcccttccacggagtagagcgagtcaggaagcagtgggttgaagaggaaattggaggtgaggaaggaagacagcaagtgtagacaggcctttcaagaagcttggctgatnnnangagagcccgtggacnnnggctgcctggagtgctgttggagaataataagacgannnagacag

SEQ ID NO: 10144 - DNA, 679 bp, Macaca Fascicularis
  misc_feature (1)...(679): n = A,T,C or G
gagagagtctgnnnnnnnnnnnnnnnnnnnnnnnnnnnnnnnngaatcccagctctggccctgtgtgcaacagtaagggactcccctgtccctccctgcttcttccctggagtgcccactccttgagctcannnnnnnnnnnnnttcttgtttcctgtcacctgtgccttgcaaacagcaggtgcctgctgatgctcactgaatgaacaagcgatgcaggaaggcaactaacacccacagtgctcctgctgagctcagccagccctcactgcccggatgtacggcaaaagatccctctaatcttcaaattcccaccagtgaccctgannnnnnnnnnnnnnnnnnnnnnnnnnnnnnnnnnnnnnnnnnnnnnnnnnnnnnnnnnnnnnnnngactcttcannnnnnnnnnnnnnnnntcacatgtccactctgggcctgttaccacaagccccctaagnnnnnnnnnnnnnnnnntcattattcactttttcctttattcattcttttttctcagtcatgaccatttggagacagcttaaatctcctgctagnnnnnnnnnnnnnnnggggtgatgagagtgtttatatttttagttagtgccaatggctgcagcccacatcagaagtattcatgctgcacaattctgtaatttactaaccatttttcctatgaagcc

SEQ ID NO: 10145 - DNA, 654 bp, Macaca Fascicularis
aaataccatatgaaggagatgaaataagcatgatgctggtactgtccagacaggaagttcctcttgctactctggagccattagtcaaagcacagctggttgaagaatgggcaaactctgtgaagaagcaaaaagtagaagtatacttgcccaggttcacagtggaacaggaaattgatttaaaagatgttttgaaggctcttggaataactgaaattttcatcaaagatgcaaatttgacagccctctctgataacaaggagatttttctttccaaagcaattcacaagtccttcttagaggttaatgaagaaggctcagaagctgctgctgtctcaggaatgattgcaattagtaggatggctgtgctgtatcctcaagttattgtcgaccatccgtttttctttcttatcagaaacaggagaactggtacaattctattcatgggacgagtcatgcatcctgaaacaatgaacacaagtggacatgattttgaagaactttaagctactttatttgaataacaaggaaaacagtaactaagcacattatgtttgcaactagtatatatttaggatttgtgttttacagtatatattaagataatatttaaaatagctccagatgaaaacaatatatgtaaattataagtaa

SEQ ID NO: 10146 - DNA, 745 bp, Macaca Fascicularis
  misc_feature (1)...(745): n = A,T,C or G
cctagcgacctggaccttgtcatgtcagaaggattgggcatgcggtatgcgtnnnnnnnnnnnnnnnnnnnnnnnnnnnnnnnnnnnnnnnnnnnnnnnnnnnnnnnnnnnnnnnnnnnnnnnnnnnnnnnaacatgtcctaaagacttttggacccattccagagttttccaggccaccnnnnnnnnnnnnnnnnaggacatgtgcatgaaggtnnnnnnnnnnnnnnnnnacttggctgccaggaggcagtggagggacgagtgcctcatgagacttgccaannnnnnnnnnnnnntgcagccccagtgaatttcttnnnnnnnnnnnnnnnnnnnnctcattggaggccctgtttgggaaccctggannnnnnnnnnnnccctctgtgacacagggagcagcccatggagatcctaagctggctgtcttgtgtgcagcccaagtgcggtggtgcaggccggtggtctgcccgtcgctttgggtcgtagccctgggcctggcggcacagcagcacttgcgttctcggggctatcgatttcctgccacctgggcagataacctggagattttcactttttcttttcagcttgattacgtatgactatattttacagccagtgattgtagtttcatgttaatatgtggcaaaatatttttgtaattattttctaatccctttctgagtactctgcggccctgcctttatgaggcacctcccttcgttttgctaacgcttatcgaa

SEQ ID NO: 10147 - DNA, 693 bp, Macaca Fascicularis
  misc_feature (1)...(693): n = A,T,C or G
acaacatgtccagtgcgagtggtctgancatggggaagatcgaggagatggagaagatgctgaaagaggctcacgcagagaagaaccggctcatggagtcgagggagcgggagatggagctgcggcggcaggccctggaggaggagcggcggaggcgtgagcaggtagaacggaggctacagagtgagagtgcccggaggcagcagctggtggagaaggaggtcaagatgcgggagaaacaattttcccaggcacgacccctgacccgctacctgccaatccggaaggaggactttgacctgaagacacatattgagtcatcaggccatggtgttgatacctgcctgcacgtggtgctcagcagcaaggtctgccgtggctacttagtcaagatgggcggcaagattaaatcatggaagaagcgctggtttgtcttcgaccggctcaagcgcaccctttcctattatgtggacaagcatgagacgaagctgaagggagtcatctatttccaggccattgaggaagtgtactacgaccacctgcgcagtgcagccaagagcccaaacccagccctcacattctgcgtgaagacccatgaccggctgtactacatggtggccccatctgcagaggccatgcgcatctggatggatgtcatcgtcacaggggctgagggctacactcagttcatga

SEQ ID NO: 10148 - DNA, 690 bp, Macaca Fascicularis
  misc_feature (1)...(690): n = A,T,C or G
tgctgagatgccaatcacgttaaacannnnnnnnnnnnnnnnnnnnaaagaaacagtctttaacagaaaaaaggtattgaaatattaaatggccaccaagtttactttgaagcccatttttggctgtnnnnnnnnnnnnnnnnnngcatgataattttttaatatttctttttgtgannnnnnnnnnnnnnnnnnntgtaggattactacaggttaatgtgagttgaggaagagaatctttctcgaacaatactacataccttttattatattacaaacctaagtgttttatatcctggagtcaaggaacaaattaccttaggattatagtattacatgccataaaatactatgctttattggtcccatgttttgnnnnnnnnnnnnnnnnnnnnnnnnnnnnnnnnnnnnnctatgtatatataagaaccatattttccacaactaaaatgtgcattattttttccaaagttttatcattgctatttatttttacctttgtttttgaacattnnnnnnnttcattttgtatgtatgcttaatacatgtctgtcatatacaatactgaatttttactgtatagtaattctggaaagagcaaataaatgaagattgttttnnnnnnnnnnnnnnnnnnnttgaaagtgtatttttggtatgaagctggttttctgtnnnnnnnnntaattt

SEQ ID NO: 10149 - DNA, 858 bp, Macaca Fascicularis
  misc_feature (1)...(858): n = A,T,C or G
tcagaagtacacggactnnnngcannnntacgtgaacagcacacttaaggaactgaggagnnnnntnnntgtccaggacctggtggattccttaaaatttgcagtcctgatgtggctcctgacctacgttggcgctctcttcaatggcctgaccctgctgctcatggctgtggtttcaatgtttactctacctgtagtgtatgttannnnnnnnnnnnnnnnnnnnnnnnnnnnnngacttgtgaggactcacataaatgctgttgtggcaaagattcaggctaaaatcccaggcgctaagaggcacgctgagtaaactgatttcccaccggggactggacacaaacaggaatgtctggagtggtaacagctctcttcttactcgttactgcaaattgattgttcccctcctccccccagtaccataatcttagagacaannnnnnnnnnnnnnntttttaggctgttccttgtatcttaggatatttgagtcacttgtgtcaaccactaaagtatagagaaaagtgtattagatgtggtttttaattttgtgttgctaaaaaaagtgcatgatggtgagagcccaagttctctttccctcctcagtgttcttctcttctctgcaatgcttctgtnnnnnnnnnnnnnnnnnnnnnntaggccnnnnnnnnnnnnnnnnnnnnnnnnnnnnnnnnnntcgcttatatgtccttgggttgctggttggattaatctttaataacaatatatagaattgtagactgatgttttagcatttttccaacacacacaacgtaaaaataaaaacagtcgaccgtacttatggtaatcagttttgtataacttaaaataattaaa

SEQ ID NO: 10150 - DNA, 758 bp, Macaca Fascicularis
  misc_feature (1)...(758): n = A,T,C or G
gtcccgggcacttgcccaagtggttacagacatgggacttcctgcctcgatggatgcactcnntgaagnnnctggaccgtctcatcacccgtgccaccctatgctgtgccaggcctgagccccgctcacccccgctaccccctnnnnnnnnnctggaggagttacccccttccacgccctccccccgccttgcactgcctgctcaccacaatgccacccgcctctaggtggtgggcccagactacagcctggaatggggaaggcctggggtggaaaggcaggggagggagggtgtgtatatgtgtgtgcatgtgcctgtgccaccctgggtgccagtctctccttctgtagctccgcaaaggtctgggcttgtnnnnnnnnnnnnnnnnnnnnnnnnnnnnnnggtnnngtctgcatgtgcacctgtcatgtgtagacgcttgtatttgtgtgcaggtgtgccagcccatgcacacatacacagacacacctgtgggaggctttgtgcaggttgcaggatatctgatacgacttcaggtcctctgcacgtgtacacatgactaggatagacaggagtgagggtgggtctgagtatatgactgtgcagctgtttgtgcatagatgttnnnnnnnnnnnnnnnnnnnnnnnnnnnntccctgccaccttccttcctccaagataccctctcctcatcctcacccaggtcttcagcaccactacagttcccttcccaacacttgccnnnnnnnnnnnaaaa

SEQ ID NO: 10151 - DNA, 758 bp, Macaca Fascicularis
  misc_feature (1)...(758): n = A,T,C or G
aaccagnnnnnnnnnnnnnnntgtgtgtgtcnggtacagcactgaccaattgacatatggnnntntgcctccctttatatggacactgttgatgccggcaatattgctacttcgcttttttgcaaatgcattcactttgacaccatacaatggaacagaagcgttggtatggcnnnnnnnnnnnnnnnccgaatctctcaatcctctgatcaaatatcnnnnnnnnnnnnnnngctttggaagaaattacattatgacccagaagatggacctagatgaagacactgctgaaaaattttatcaaaagttactggaactggaaaagcacattagggtcactattcaaaagacagataatcaggctgggcacannnnnnnnnnnnnnnnnnnnnnnnnnnnnnnnnnnnnnnnnnnnnnnnnnnnnnnnnnnnnnnnnnnnnnnnnnnnnnnnnnnnnnnnnnnnnnnnnnnnnnnnnnnnnnnnnnnnnnnnnnnnnnnnnnnnnnnnnnnnnnnnnnnnnnnnnnnnnnnnnnnnnnnnnnnnnnnnnnnnnnnnnnnnnnnnnnnnnnnnnnnnnnnnnnnnnnnnnnnnnnnnnnnnnnnnnnnnnnnnnnnnnnnnnnnnnnnnnnnnnnnnnnnnnnnncaaaaaatatgtatatttaatatatatatatataaaaaacaccagaactgacaatgatactctggaacattgcaaaccttcttgtacattctggggnnnnnnnntttctatcatg

SEQ ID NO: 10152 - DNA, 673 bp, Macaca Fascicularis
  misc_feature (1)...(673): n = A,T,C or G
gcccatccttgnnngcnnnnnnnnnnnnnnnntcgtgctggggctgctttctggctttctggtctggagacgatgccgcaggagagagaagttcaccacccccatagaggagaccggcggagagggctgcccagctgtggcgctgatccagtgacaatgtgccccctgccagccggggctcgcccactcatcattcattcatccattctagagccagtctctgcctcccagacgcggcaggagccaagctcctccaaccacaaggggggcggggggcggtgaatcacctctgaggcctgggcccagggttcaggggaaccttccaaggtgtctggttgccctgcctctggccccagaacagaaagggagcctcacgctggctcacacaaaacagctgacannnnnnnnnnnnnnncagcatttgcacagggggggggtgtcctccttcctagaggccctgggggccaggctgacttggggggcagacttgacactaggccccactcactcagatgtcctgaaattccaccatgggggtcaccctggggggttagggacctatttttaacactagggggctggcccactaggagggctggccctaagataccgacccccccaactccctaaagaggggaggagatatttatttggggagagttggaggggaggg

SEQ ID NO: 10153 - DNA, 586 bp, Macaca Fascicularis
  misc_feature (1)...(586): n = A,T,C or G
tgatgggagcccccaggaggggtcagatgctggaaggggccgcattctggggagcgaggtgagacacagcggaccaggcgatgccttcaagcctggagtttccatttccagctggaataggcaaccacccccatttcgtgttttccattcccccgttctggnngtgccnnnnnnnnnnnnnnnnnnnnnnnnnnnnnnncctccggagagtgggcttggtcctaggcccnnnnnnnnnnnnnnnnnnnnnccagnnnnnnnnnnnnnnnaccagggccctcagggaggggaccctgcggctagagcgagctaggccctggctttgcccatcatatttgaaagaatatgtgtcccttgagcctgaggggagtggcaggaggagtgggaccaggctgggagggcagagccagcagctgccatgtcctcctgtcctcacccccaccccaggccccagccctttagcccttcaccctgtgctctggaaaggctaccacatactggccaaggtcaggagcagtaagaatgagccagaaccagccccttggctttgtgtgagcatttcctcctgttgaagtgttgtgcggca

SEQ ID NO: 10154 - DNA, 816 bp, Macaca Fascicularis
  misc_feature (1)...(816): n = A,T,C or G
gatggccaacctgggaccccagggataaaaggagagaaagggcttccagggctggctggagaccatggtgagttcggagagaagggagacccagggattcctgggaatccaggaaaagtcggccccaagggccccatgggccctaaaggcggcccaggagcccctggagccccaggccccaaaggtgaatcgggagactacaaggccacccagaaaatcgccttctctgccacaagaaccgtcaacacccccctgcgccgggaccagaccatccgcttcgaccacgtgatcaccaacatgaacaacaactacgagccccgcagtggcaagttcacctgcagggtgcccggcctctactacttcacctaccacgccagctctcgagggaacctgtgtgtgaagctcatgcgtggccgggagcgcccacagaaggtggtcaccttctgcgactannnnnnnnnnnnnnnnnnnnnnnnnnnnnnnnnnnnnnnnnnnnngctggagcagggggagnnnnnnnnnnnnnnnnnnnnnnnnaagaactcactactgggcatggagggtgccaacagcatcttctccgggttcctgctctttccagatgtggaagcctgacctgtgggctgcttcacacccaccctggctcccccttccagcaacgctcactctacccccaacactaccccttgcccagccaatgcacacagtggggcttggtgaatgttgctgagtgaatgagtaaataaactcttcaaggccaagggacagtggtgtaattcaactctgtgtccaagcacctggcacaccagaaatgcc

SEQ ID NO: 10155 - DNA, 736 bp, Macaca Fascicularis
  misc_feature (1)...(736): n = A,T,C or G
attatattacatgggtatcgtcatcagaattaaagagtgagtcattgaaaattgtcttaggtgtcagtagcatagtaattctcacagtgtgggtacagtaagtaactggatagaaaagaataaattttcaaatttatatttgtgattactttttttaaaatgctaactttgctgaatctatattatccctttttggaattttttaggtactaaatcagaagtactgaatatagataacccagacttggctaaatatccacttttttccaaggctagaagatatgaatgttcccttgaagctggtgatgtattattcattcctgctttatggttccataatgtaatttctgaagagtttggagtgggagtgaatatcttttggaannnnnnnnnnnnnnnatgctatgataagacagatacctatggaaacaaagatcctacagcagcatcaagagctgcacaaattttggacagagccttgaaaacactggccgaattaccagaggaatatagggacttctatgcacgacgaatggtcctacacattcaagacaaagcctacagcaagaactctgagtaaataatgaagtgaatgcaatgtacatcaacactttagtaaggtataacgatataaattattttgttaaaataggaaagatacatcagatttacagattatgtaagtacgaaggggtatttgtgtgcattctacttgatacagatgntataataaaga

SEQ ID NO: 10156 - DNA, 542 bp, Macaca Fascicularis
caaaccgtatcctctattcttcacttcggggtcagaactttgggggtgtggaggaggcgtggctcgagggacgggtaatgccggcttccaagtgatgccctcctgccactcccctgcgatttataagggaattttaatttttatagtgaatctcaagggatcgtcccatccttgaccacagggacaagaggggccgcctcgccccagccccgccccacatggagctcagggggaagcagggaagggggcaccctcgccccagcctcaccccacatggagctcagggggaagcagggaagggggccccctcgccccagccccgccccacatggagctcagggggaagcagggaagggttcccaaaagagccctgcggaggctaggagtggttcttgatgctcacctgaagcccccagacgctgctaggaggagggggcccctcctgggcccccagtactcctccgcttgccgctgctagcgcacccctgcagtccagcgtgcatccgccccacgcacgccccatgctgtgttcctgggccctg

SEQ ID NO: 10157 - DNA, 736 bp, Macaca Fascicularis
  misc_feature (1)...(736): n = A,T,C or G
ctcatgtcacttccagaggagctgcccntnnngccctgcacagccttggttgagcatatgacggagacgtacttacgtctgacagccccccagcccagccccgctggagggagcctggggcctgctgccgagggggacggggctggctccaaggcaccagaggagacccccccagccaccaagaaggccgagcccagcgaattgaaatnnnnnnnnnnnnnnnntgggatctgtcccctgaacccattcctggtgcccctggagcttctgggtcgggcagccacccctgccaggtgaggggcatggcgggcaggaggcacaccaggccccctgccctgtccctcggttctgctcggctggcactggctctttccgaggatcccgtcgtgtgggaatgtccctgagatgacgctcagctgtggggcctctgagacgccccacactttgggggtttcagaaatggaacccccgttgtacgggggttcggtgggggttacgggactccactcacaagccttccgacctccaggacaggcggacagggctggcctcccccagtccccaagccccactgtgccttgttgtctgctgggggccacagctggcactgcacaccgtaaacgctctcacacgtttccccttcctgtacctcatcttcactttcttcagctgaccagtggtggatacnnntacctgctgccagctccttccccttcccgggggtattctgtgacca

SEQ ID NO: 10158 - DNA, 698 bp, Macaca Fascicularis
cccacttcagagttgagtcattttctgaggatgaatggaatttactgtatgttgcagtaactcgagccaagaagcgtctcatcatgaccaaatcattggaaaacattttgactttggctggggagtacttcttgcaagcagagctgacaagcagcgtcttaaaaacaggcgtggtgcgctgctgcgtgggacagtgcaacaatgccatccctgtcgacaccgtcctcaccatgaagaagctgcccatcacctatagcaacaggaaggaaaacaaggggggctacctctgccactcctgcgcggagcagcgcatcgggcccctggcgttcctgacggcctccccggagcaggtgcgcgccatggagcgcaccgtggagaacatcgtgctgccccggcacgaggctctgctcttcctcgtcttctgaggccaaggcgcacattctccgcagtgcagagcagcttgccgaggaccccgcgtgaagaaagccagcgagggggctcccgctccctgagactctgggttcacccacagcactttctgaggaagaggacaccagcccaagctggacctgccatttctccactccctacagacagccagtctccacttgcctccgccccagacgtatctggtcggggaagtgggggatgttcttttgataaaaaaaaaaaaaaaacattttatgtatttaaacttc

SEQ ID NO: 10159 - DNA, 649 bp, Macaca Fascicularis
  misc_feature (1)...(649): n = A,T,C or G
cgctgtgtttgatatcatcacagatgaggaattgtgccagatacaggagtctggctcctcgttgcctgaaacacccactgaaactgattctcttgacccaaatgtggctgaacaggacantacatcaacctcgctaacgcctgaggacactgaagacatgcccgtggggcaggatgcggaaatctgcctgctgaagtctggagaactcatgatcaaagtacccctcacagtggatgagattgccagcttcggggagggtagcagggagctgttcgtgcggtccagcacctacagcctgatccccatcactgtggccgaagcaggcctcaccatcagctgggtcttctcctctgaccccaagagcatctccttcagcgtggtcttccaggaggctgaggacacaccgctggatcagtgtaaggtcctcattcccacgacccgatgcaactcccacaaagagaacatccagggccagctcaaggttcgcacgcctggcatctacatgcttatcttcgacaataccttctcaaggtttgtctctaaaaaggtattttatcacttgacggttgatcggcctgtgatctacgatggaagtgatttcctgtagcttcagcacctcggtaacttcacttcatccacaggaaacact

SEQ ID NO: 10160 - DNA, 959 bp, Macaca Fascicularis
  misc_feature (1)...(959): n = A,T,C or G
gcgagaaactcgccaactcngncttcagggaggcgggctccaccagcgacagcccctcctctcccgagttctttctgtgagtcgtggccggtcccggcccccgcccttgccccagcccggactccctgtccatgtccccagtcccacactaccccggaccctgtccctgccgcggccccaaccttgacctgtttgacttgagcgagagggaggaagggcgcgcgggccgcgggcgacgggctggcgcgctggcgggcaggggaccttggctaaggcgagagtagcgcacgccagcgccgcctcctagactcgagcagagcctgagagagagacgagagggtgggaggtcccagagtaacttctcttcaggctggagggcggcgaggcgtagtcccgagaagtcaccaaggccatctggagactcctggctttctgaactttgcgcgttaagccgggaccgctgctttgcggcccggagcgtagtccgcgccaggaagagagcaacgaggagaggagagggactctggcgtcccggcaggcgaaaggcgaggctgagcgaaagaaggaaggacagacggacctgtctgtcagagttcggagaacactggctctcagccctgagacacgggcctcagttaggacgttcggcgcccaaatctcatcagttttattgcctgctcgattatatagaaaaatacaaaaatctgcattaaaaatattaatcctgcatgctggacatgtatggtaataatttctattttgtaccattttcttgtttaactttagcatgttgttgatcatggatcatactccccttgtttctttgggtgagaagggatcgcagtttggaaactccggtgctgcgtgcggggtttcagtcccagctgtaggcttgtaaatacccgccccgccaaaccgcatagagaacatggcagcaagctgagggtctttgtttgggt

SEQ ID NO: 10161 - DNA, 753 bp, Macaca Fascicularis
  misc_feature (1)...(753): n = A,T,C or G
tcagggtttgtagaggnnncagggggcanccgctgcagnnncagcnnnnnnnnnnnnnnntcttgcagcaggggcgagcgggcacaggctgcgagctgcccttgggtggtggtagcaggggtcaaggtgcaagtctccccctgcacccctcccccagcttgcgccttgtcactccctctccctccagcatgggcctgcnnnnnnnnnnnnnnnnnnnggcggccctgccccagaccctcttgcagatgtcctggtttgacttggaactaggtggccatctttccaggctttggtggccaaagagcagtccaggtggatggaagtggctgtcccctcctctccagcccctgcccacccaccggtggaggtgctaactagcagggacgtggcataggatgggagctgggtgcgagctgtttggggtccattctttgtccctcagcctctcagagtccggccagcccttgtgttcccgtgccccccactttcctcctccccactgcagtgaggcaatagtccagggtggggcctggcctccctgccctgattgggcactcaggaggtgaggcctggggggcttcctgcccactccttgcccacctgcctgcccccgggcagcacgggagggagagcagggcgagcacgcttgttggtttcagatgcactttctgcttgcgatgccgtatctgtgcgttccttcatcctggtcctggctttatggaacaccatgtttttagcatgtttttaaataaa

SEQ ID NO: 10162 - DNA, 600 bp, Macaca Fascicularis
  misc_feature (1)...(600): n = A,T,C or G
aggattccagtggaatgacactggtgatgcttgccgccgcgggagggcaggacgacctcctgcgactcctcataacaaaaggcgcgaaagtgaacggtcggcagaaaaacgggaccaccgccctcattcatgccgcagagaaggtttgtggcttctcgtgcatccgtttcagagctttcattcctgccgatggactgagaggacctctttggtagtgaaatacagcaaccacacggccacatagcttttttttttttttaannnnnnnnnnnnnnnnnnnnnnnnnnnnnnnnnnnnnnnnnnnnnnnnnnnnnnnnnnnnnnnnnnnnnnnnnnnnnnnnnnnnnnnnnnnnnnnnnnnnnnnnnnnnnnnnnnnnnnnnnnnnnnnnnnnnnnnnnnnnnnnnnnnnnnnnnnnnnnnnnnnnnnnnnnagnnnnnnnnnnnnnnnnnnnnnnnnttcgaactcctgacctcaagtgacccacccgccttggcctcccaaagtgctagtattacaggagtgagcctctgcgcctcgtctgctctagttctactttctaatagtattttattattgtcatattatattatgaaataaca

SEQ ID NO: 10163 - DNA, 760 bp, Macaca Fascicularis
  misc_feature (1)...(760): n = A,T,C or G
gaggtaatttagtttgtggctggacattcagtgaagtctnnnnnnnnnnnnnnagataactgactggctatatataaggaatgaatctggctttagggttaaatcatttaaggtccttttataggcaggcactagtaattaaaactgaaaactaagtaagtttatttttgannnnnnnnnnnnnnnnnnnnnnnnnnnnnntaagtagtacttaattggaagaaaaaatcatgatgcttagacaataaatataaataaatgctatataaggaaactcacctatttgaaattatggctatattatttttattttctagattccaaaaatacaaacactagttcttccaacatagtactttgatagtctgtacattgacgtgtatggactaaatccagggtgaaatcaatgttacagaatttaagggtatgttaactaaatgatagcatttctaagatattttgaatattaggtcatttggcatttttcagtaagtaggatacttctcatgttttgaaactatatgaatatggaaaaaaatggcttaagaccagtgtctgtgtaccacattgtatggtcgactctctgggataactgttttcatctacagaattgaagttttgcttttatgaggtcttatagtggaactaggaatcactgttttgagagaacctgcatatataccagtcattatctgtttgatccttatacagttttaacttagatttattctagttaagccataagttcaacgtgtaaact

SEQ ID NO: 10164 - DNA, 971 bp, Macaca Fascicularis
  misc_feature (1)...(971): n = A,T,C or G
atgcgcacacaaaggagaaataccagctctgcctnnntgcacattcacaggaagtgagattcgtgtgagggatgacaagatgcctttggcgcaccttgcaatagctgttgaagctgttggttgggcacatccagatacaatctgtctcatggttgcaaacacnnnnnnnnnnnnnnnngatcgctcttttggaggaggaatgaatttatctagcaagctggcccagctcacttgtcatggcaatctttgccatagctttcagtctttcaacacttcctacacagatacaggattatggggactgtatatggtttgtgaaccagccactgttgcagacatgctacatgttgttcagaaagaatggatgcggctctgtacaagnnnnnnnnnnnnnnnagtcgcacgagccaaaaatctcctgaaaacaaacatgttgttgcagcttgatggttcaactccaatttgtgaagatattggtaggcaaatgttatgctataatagaagaattcccatccctgagcttgaagcaagaattgatgctgtgaatgctgagacaattcgagaagtatgtaccaaatatatttataataggagtccagctattgctgctgttggtcccattgagcaactaccagattttaaacagatttgcagtaacatgtgttggcttcgtggttaaaaannnnnnnnnnnnnnnnnnntgaacacatgtatttataaaactgagatctagaaaaaaataaaaatgaacatgtatatacatctggaaatttgaatgaaatactgtatcatactttcaaaggataaaaagactacccctctgaaggttgttttgtattaatggtcagtctttgttctctgagaaattatgttggaagcagcatactttcaaattattaccataagtataattttaagaatgaaaatgtttacagtattttcagttttattataaaaatgcacatacaaca

SEQ ID NO: 10165 - DNA, 744 bp, Macaca Fascicularis
  misc_feature (1)...(744): n = A,T,C or G
tgacggatcaannnctgtagcaactgagnnntgnnnnnnnnnnnnnnnnnnnnnnnnnnnnnnnnnnnnnatggcagagcagctgaaccaggagcagcagcaggttcctggaaaaccaggcactttcacttggcagggcctgtcgactgcacatggttaaaataaacctgtattggacccagtagtgccttttaaggtgaaaggaatggtaaatctgtaccttcaataatatgtcctaccttttggcccctacctaaaagttactttttttccatctgtatataaaattattatgatgtatattgtgtacataaatataaggccatgattattgatttatataatagaattgtatagaattatttttgcacaattttgtcataaattagggtggtaatgaactgaactactgtatgtgcgtatgttgaattctgcttgtcattaaggtgaataagtgtcttaaccgtcctgtaaaaccagattcccctttgttacatgcacattttccattgttacctccatgcaaaagaattcatttagtaggtacatctattgtagctgtgattattccagtttctgtgtgacacaatcagatgtcctatttcatgttatttgtagctactgatacagaaatgaagggaactgtaattgcttgtattcttgtaagccatacattaaatgttacacctttctgcttctatttttattccaatgaaggcatttaagttactaatttatataact

SEQ ID NO: 10166 - DNA, 710 bp, Macaca Fascicularis
  misc_feature (1)...(710): n = A,T,C or G
tcattcgaagaaacccacttgctnnnnnnnnnnnnnnnnnnnnnnnngtgtgcagcctgcgtcaccnnnnnnnnnnnnnnnnnnnnnnnnnnnnnnnnnnnnnnagctgtgttcttcttaggatgttgcttcttgattttctttttttaaggggtgggtcagnnnnnnnnnnnnnnnnnnnnnnnnnnnnnnnnnnnnnnnnnnnnnnnnnnnnnnnnnnnnntcttgcctgtgaggactgcggcctttcgctgtcactcgtccttaccatttctgnnnnnnnnnnnnnnnnnnnnnnnnnngaggtgccacttcctagcaggagcaaggcctgtgtggaagaaatgctgctccttgccaccagggctgaagacgcgagcccgtcctcgtgacgcaggcgccgccctgctgccggagccgggcttcggcggtcttctccagtgaggggctgggctgggaagtcctgcgtttcagttgagcgtatgagcgtcaagtcctgctttctcagtagccccattgctgggccccaccattcatcctgtctgaaggtcctgggtttggtgtgaccggttggcggctggtgggtgggatttccaagtgggggacggcactctccagcagcctggggatggccgtgtccacaccgaccaggcctgtggagagtgctcagcctaaccttagaacacatttgtaactgaatacagtgtttt

SEQ ID NO: 10167 - DNA, 727 bp, Macaca Fascicularis
  misc_feature (1)...(727): n = A,T,C or G
cccagatggggtcacatcctcagaacttctcagcctggtagcacaagtggatgcttgaagaaactcagtcttggagctcagactgcaatggagatgggatgtgggtgggactaccaaggggctaaggtccattgtgagggtgaggaagggcttctagaagtcacaaacatcccaggtccctggtggggagaatgaagacactgcccaagagatgtgaagccactgagggctgtgcagggtcaggatctcactggggactgcctcccagtgcgcannnnnnnnnnagagttggagggaaacagccatggtgggggtcagtcacctggctctcaggaatggtctccccaacttgggaagcactttggtgcaccttttctccttgcatcctcacaaccacccagtcaggccactcaggtcttaacagcagacgacactcccaatatcccatctaggaagactgatttgactgagaattcaagcattctcaggcctggattagagacaggaatctgtccccacttccttccttacatgcccagacatggagcctgggatggcaaaggaaaattggaggcactttcttcccctgagccattttccctgcatcccctgcccataagccttcactggcctctgatcaccctcgtggttgactgcagctnnnnnnnnnnnngctctcatgccctccactgtgctcaactcccaggggaagagtgaatactcgtta

SEQ ID NO: 10168 - DNA, 649 bp, Macaca Fascicularis
  misc_feature (1)...(649): n = A,T,C or G
cgcgccggggcccgcgcccacttggcngnnggaccccacgcggnnagaggaagagcgcgccgccgccggcctcaccgtggcgctcatgcctgtgctgaatcaggtggccgggctgctgggcagcggcgagggcggcttgatcgagagctgggcggaggccgtacgcctgggcctcgagggctgccagcgcctttaccccgtgctgcagcagagcctggtgcgggcggcgcgccgcaggggcgccgccgcccagccctgaactagaagcgtgagcaacgacggacgcaagccgaggaccgtgctgccgccgtccctgaaaagacccgcgccgtcggcctccagcctgcgtcgagataagcagccggagccctggagagcacctgggtaggccctagcagagccaaggcgccggatagctgtggtgttggaaagggttttacaaacctcgttannnnnaactttacttgagccggctcttagcttcgacccagttgaggaaacctgtgagcgcatcctgactcccaagttggaaactttagctggacttacctggaagctggtacctagagctgctgtcattcaggccagccagtgaccccctccgatataactgggcgannnnnnnnnnnnnnnncaagacgactgtgcc

SEQ ID NO: 10169 - DNA, 664 bp, Macaca Fascicularis
  misc_feature (1)...(664): n = A,T,C or G
caggcgggccgggaccctcgccgggcggtcggtgtgggcgtgggtgtgggtgtcggggtgccttccccgctcaaccccatctcgccactcaaaaaacccttctccagnnnnnnnnnnnnnnngcccaagttccctcgcgcggccccgctcacttctaagtcctggatggaggataacgctttccggaccgataatggtaacaatctgtnnnnnnnnnnnnnccggagtaggccctatgatacttttaacttgnnnnnnnnnnnnnnnnnnnnnnnggatatgataaggannnnnnntgagcctctgaaaggacgcatggggataaatttccatcatccaggaacagataatattatggcacttaacattgggaagctgagattcaaaaggctatgggaattggccagggtgacatggagctaggagcagaacctcttgcctcgtggttgagggtggtaacttttgctttagatacttaattgttacaagtgcttacattattattattattattatttactgccttaacgcaaacatgcaaattcggtgtctttgggaaaatagtttttctgttgttattatttgtcacnnnnnnnnnnnnnnnnnnnnnnnnnnnnnnnncttttcctgaaaaatagaatagtaaacctagtctacatggccc

SEQ ID NO: 10170 - DNA, 761 bp, Macaca Fascicularis
  misc_feature (1)...(761): n = A,T,C or G
agatatccaagactttatgaggaagaaaggcttcggtgaggacttcaagcagttggagtccttctacannnnnnnnnnnnnnnnnnnnnnnnnnnnnnnnngcaagggctatgtggtgtggcaggaggtgtttgataataaagtaaagattcgaccagacacaatcatacaggtgtggcgagaagagattccannnnnnnnnnnnnnnnnnnnnnnnnnnnnnnccaaggccggcttccgggcccttctctccgccccctggtacctgaaccgtatatcctacggccctgactggaaggatttctacatagtggaacccctggcatttgaaggtacccctgagcagaaggctctcgtgattggtggagaggcttgtatgtggggagaatatgtggacaacacaaacctggtccccaggctctggcccagagcaggggnnnnnnnnnnnnnnntgtggagcaacaagttgacatctgnnnnnnnnnnnnnnnnnnnnnnnnnntcacacttccgctgtgagttgctgagnnnnnnnnnnnnnnnccaacccctccatgtaggctactgtgagcaggagtttgaacagacctgagccccaggcaccgcggagggtgctggctgtaggagaatggtagtggagccaggcttccactgcatcccnngcgggggacggagccccttgcctgcgtgcccctgtgcttggagagaaaggggctggtgnnngcgctcacatccaataaagagtaatgtggcnnnttcta

SEQ ID NO: 10171 - DNA, 720 bp, Macaca Fascicularis
  misc_feature (1)...(720): n = A,T,C or G
atgggtcgagaaggcagagaannngagaaaggtgccaagggggaaccaggtcctgacgggcccccagggaggacgggtcccatgggggctcgagggccccctggacgtgtggggcctgagggtcttcgagggatccccggccctgtgggtgaaccaggcctcctgggagcccctggacagatgggccctcccggccccctggggccctctggcctcccagggctgaagggagacgctggccccaagggggaaaagggccacattggattgatcggtctcattggccccccgggggaagccggtgagaaaggagatcaggggttgccaggcgtgcagggaccccctggtcccaagggagatcctggtccccctggtcccattggctctctgggccatcctgggcccccaggtgtggcgggccccctgggacagaaaggctcaaaggggtctccggtgagtacaccctacttccgtgggcttacatatcccagctccccatcccctccactctaccagaaccctccacgcctctgccttcattcatttatttattcctgcaatcatgcctttgacaaatatttattcaacacctactgttgtatttcatcagatccaaaatgccgtcaattataagatgtaccattattttacaaactgctaggaaagaaaacagttctgccaagtaaactatgacttgccaannnntgttaagaagctgat

SEQ ID NO: 10172 - DNA, 782 bp, Macaca Fascicularis
  misc_feature (1)...(782): n = A,T,C or G
cagagaccagttggnnnnnnnnnnnngatccagcaaagaatggatggatcactgaattttaaccggacctggcaagactacaagagaggtttcggcagcctgaatgacgagggggaaggagaattctggctaggcaatgactacctccacttactaacccagaggggctctgttcttagggttgaattagaggactgggctgggaacgaagcttatgcagaatattacttccgggtaggctctgaggccgaaggctatgccctccaggtctcctcctatgaaggcactgcaggcgatgctctgattgaaggttccgtagaggaagggacagagtacacctctcacaacagcatgcagttcagcacctttgacagggatgcagaccagtgggaagagaactgtgcagaagtctatgggggaggctggtggtataacaactgccaagcagccaatctcaatggcatctactaccttgggggctcctatgacccgaggaataacagtccttatgagattgagaacggagtggtctgggtttcctttagaggggcagattattccctcagggctgttcgcatgaaaattaggccccttttgacccaatagactaaaggagtgggagtgggagcactctggcttctttgctagaaaagtggagaggaaataagaaaggtaaagcgttgagattctctacaatctaaaaaattcctaggtgctattttcttatcctttgtactgtagctaaatgtacctgagacatattagtcttgaaaaataaagtt

SEQ ID NO: 10173 - DNA, 738 bp, Macaca Fascicularis
  misc_feature (1)...(738): n = A,T,C or G
tcagagatactctcatgaacttgtccaggggaccagagaggaaggatatgcagaccctgctatggctgctcaggatgcaatggtcctatgggaagcctgtcagcagaagacgggggagcacaaaaccatgctgcaaatgatcctgtgcaacaagagctaccagcagctgtggctggtttttcaggaannnnnnnnnnnnnnnnnncaagacatggtagatgccattaatgaatgttnnnnnnnnnnnnnnnnnnnnntgttggnnnnnnnnnnnnnnnnnnnnnnnnnnnnnnnnnnntattttgcttatagattatatagtgcaattcatgacttcggtttccataataaaactgtaatcaggattannnnnnnnnnnnnnnnnnnnnnnnnnnnnnnnntaaggaaacgatacaaagagcgatatggaaaatccctatttcatgatatcagaaattttgcttcagggcattatgannnnnnnnnnnnnnnnnnntgtgctggtgatgctgaggactactaaaatgaagaggacttggaggattgtgcactcctctttctagatacttccannnnnnnnnnnnnnnntaaatttgtaccattcatggcactataacaaaattatacaatcatattttctcttctatctttgaaatnnnnnnnnnnnnaagaaaactatgagtgaaagtatatgatactnnnnnnnnnnnnnatcctgaatttnnctactatctaatc

SEQ ID NO: 10174 - DNA, 730 bp, Macaca Fascicularis
  misc_feature (1)...(730): n = A,T,C or G
aatccaaataactcagaacaaactaataacagacaggaaaattagagactgaaccccacttgaggaaaacttcctcnnnnnnnnnnnnnnnnnnnnnnnnnnnnnnnnnnnnnnnnnccagcagccctttccaagactctcttgtcttctagggatcctcaatacaaaacaacccaactaatccaggatatgttcgaaacagtcagttttcccctcaaaaggcaggaaggcccacttcaaacctccaggaacacaacccgcgccatcccagtgttaaacttggtgcttccgttttctgcctcaatccgagtgctaacataaaatcctggcagacaacaatctttcttcttcaagaaaattaacatttaatggtataatcccaagaacatgttctacttatttacttggaaaaatagaagctagggaccactctttatcccatggcagtctattctatgagagaaaacaagaacaatcattgtcatgactttgaaaaatagaacctttaaaaatacttatattggtaagtttaaaaaaataccaccagttaaaaacattggctctacnnnnnnnnnnntgttaatggggggcttcctttttctacctgtattggttcaacttctggtgagactgtannnnnnnnnnnnnnntagaagctatggcttttagggaattaaagaaaagcagcaaaatataattgatttggaaagattttggataagtgatctgg

SEQ ID NO: 10175 - DNA, 669 bp, Macaca Fascicularis
  misc_feature (1)...(669): n = A,T,C or G
taaaggaaaagtcaacgctttctctattttttttttttttttgagacagggtctcactacattgcccaggctgctcttgaattcctgggctcaagcaatcctcccaccataccgcagcctcctgcatagctgggactacaggtgcaagccactatgtccagctagccatccttacctgttnnnnnnnnnnnnnnnnnnnnnnnnnnnnnnnnnnnnnnnnnnnnnnnnnnnnnnnnnnnnnnnnnnnnnnnnnnnnnnnnnnnnnnnnnnnnnnnnnnnnnnnnnnnnnnnnnnnnnnnnnnnnnnnnnnnnnnnnnnnnnnnnnnnnnnnnnnnnnnnnnnnnnnnnnnnnnnnnnnnnnnnnnnnnnnnnnnnnnnnnnnnnnnnnnnnnnnnnnncaaactcctgacctcaagtgatccatctgcctcggcctcccaaggtgctatgattacaggcatgagccactgcgcccggccctccttgcctgtttttcagtctcagctgatttgcagagtatttcttccccacaccgccccccaccaaaaaaaaaatagctgaagcctatttatttgaaagtccttgtttttgctactaattatatagtatacaatacattatcattcaaaacaaccatcctgcttataacatctttgaaaagaaaaatat

SEQ ID NO: 10176 - DNA, 773 bp, Macaca Fascicularis
  misc_feature (1)...(773): n = A,T,C or G
agacaaagctgnnntgattcacagttttgtatgtagctgttngacgtagtcttttgtatttccctgccgaagtgaattgttggagaatgtaaaccgcctccgnnnnnnnnnnnnnnncctaaggccccagctcgctagcctcgtgctgggnnnnnnnnnnnnnnnnnnnnnnnnnnnnnnnnnnnnnnnnggacggaaggacatttgacttttatttttgtatttaattgacatgaatgtaaaggggacagctcagggttgttttggagcctgttgactttgtnnnnnnnnnnnnnnntttcttttctaaatgaaactccatgtagcaannnnnnnnnnnnnnnnnnnnnnnnnnnnnnnnnnnnnnnntattagagtttaataggtaagctctgttacactaggtgttagagttccagaatgttcttttgtttgctaaaccttgaagaaacatgtgcctcagcctagatgttttgtcttctcttttctgcnnnnnnnnnnnnnnnnnnnnnnnnnnnnctgcgcctttccgggggcggnnnnnnnnnnnnnnnnnttgtgatgtcacagtgcaaactgcagnnnnnnnnnnnnnnnnnnnnnngtataaacgttttcagggaatgcagaaggtattaatgaagagacaaaacctttattccatgtgctttgcttcattctgtacatagctctttggctcgtgaacctaattgtaaactttcaggtatttttgnnnnnnnnnnnnnnnnnnnnnnngtttctgtaattagaaa

SEQ ID NO: 10177 - DNA, 723 bp, Macaca Fascicularis
  misc_feature (1)...(723): n = A,T,C or G
agcacttcnnnccagnnnacaagtcacagcctggtgctgaggctctcctcaccagccacccagggagtagtcaccncnnncagcctcccgcctgccccacacggaggctctaactgtcctctttctccacatcatttgcttggctctttctacacctccctcttgnnnnnnnnnnnnnnnnaggctggggcgagtccctcagaaattccaccaggctgtcagctgacttcttttgcctgctgctgtgnnnnnnnnnnnnnnnnnnnnnnnnnnnnnnnnnnnnnnnnnnnnnnnnnnnntgccatcagctggaccagccnnnnnnnnnnnnnnncagacattccacagggcctgggtgcctgggaggtgaggcgtggtgtgcggcttcacccagggcagnnnnnnnnnnnnnnnnnnnnnnntcgcttccccttcccgacagctcctgccaagcccagtgtgcttcctgcagcnnnnnnnnnnnnnnnnnnnaagagacccaaggcaccccctgaagccaacaatacagggtccctctctgctccccagcagctcctgcccccannnnnnnnnnnnatatactgtaaatgaaactttgtttgggtcaagcttccttctttccacccccagactttgnnnnnnnnnnnnnnnnnnnnnnnnnnnnntgtggggcttctctccttgatgcttctttcttttttaaaagacaacctgccataccac

SEQ ID NO: 10178 - DNA, 726 bp, Macaca Fascicularis
  misc_feature (1)...(726): n = A,T,C or G
atgaagcaccggcgaagtgccctnnnnntcactgtnnnnnaggggagaatctacgtccttggaggctatgatggtcacacgttcctggacagtgagaagtgttacgacccagatacagacacctggagcgagnnnnnnnnnnnnnnnncgggccggagcggagtgggcgtggctgtcaccatggagccctnnnnnnnnnnnnnnnnnnnnnngaactgtacctgttgaggcacttttgtttcttgggcgaaaatacagtccaatggggagtatcattgtttttgtacaaaaaccaggattaaaagaaaaaannnnnnnnnnnnaataacccatcttccgggaagggaggccgcgatgcctcagtgttaaaatgacatctcaaaaagaagtccaaagcgggaatcatgtgcctctcagcggagccccaggagtgtccaagacagcctggctgggaaagggggtgtggaaagagcaggcttccaggagagaggcccccaaaccctctggccctgggtcccacccacccagccagccacgccggcagccctcaccttgtgatttgttcttggatacctgggagggggccaatgggggcctcaggcggaggccccctctggaaatgtggttcccagggatgggcctgtacatagaagccaccggatggcacttccccaccggatggacagttattttgttgataagtaaccctgtaattttccaaggaaa

SEQ ID NO: 10179 - DNA, 693 bp, Macaca Fascicularis
  misc_feature (1)...(693): n = A,T,C or G
acgtcagtnnnnnnnccaatgtcatgattcacgtcgtacagtactgttttggacttgtctactatgtccttgttggcctaactgtgctaagccaagtgccaatggatggcaggaatgcctacgtaacagggnnnnnnnnnnnnnnnnnnnnnnngtggttccatattctcgggannnnnnnnnnnnnnnnnnnnnnnnnnnnnnnnnnnnnnnnnnnnnnnnnnnnnnnnnnnntcaggaaaaataaagcaggagtggtcattcactgtaaccacaggatcccatttggagagtggtttgaatatgttttttctcctaactacttagcagaactgatgatatacgtttccatggctgtcacctttgggttccacaacttcacttggtggctagtggtgacaaatgtcttttttagtcaggccccgtctgcctttctcagccaccaattctacaaaagcaaatttgtctcttacccgaagcatagaaaagctttcctaccatttttgttttaagttaacctcagtcatgaagaatgcaaaccnnnnnnnnnnnnnnnnnnnnnnnnacagtgaagtatggaacccaaagtactgtttcggcagagctgtttaaaactctccgttccatttctataccccacaggttnnnnnnnnnnnnnnnnnnnnnnnnnnnnnnnnnnnnnnnnnnnnnaaa

SEQ ID NO: 10180 - DNA, 723 bp, Macaca Fascicularis
  misc_feature (1)...(723): n = A,T,C or G
cagtggaagcattacttgannncaaacatctnnnatgacacggtnnnctggtgccacttcacntgnnctgggaagcagaagtcaatgagttccaacgtcagcgtgtaccagcctccaaggcaggtcttcctcacactgcagcccacttgggtggccgtgggcaannnnnnnnnnnnnnnnnnnnnggtgcccgccgtggagcccctggacagcctcaccctcagcctgctccgtggcagtgagactctgcacagtcagaccttcgggaaggcagcccctgccctgcaggagnnnnnnnnnnnnnnnngcagcatggctcacagagaggacggccaccacaacttctcctgcctggctgtgctggacttgatgtctcgcggtggcgaagtcttctgcacacactcagccccgaagatgctggagatctatgagccnnnnnnnnnnnnnnnnnnnnnnnnnnnngtnnnnnnngtgtcagtgttgctgttcctgttcgtgacatctgtcctgctctnnnnnnnnnnnnnnnnncactggcgccagcggcggatgggcacctacggggtgcgagcggcttggaggaggctaccccaggccttccggccatagcatnnnnnnnnnnnnnnnnnnnnnnnnnnnnnnnnnnnnnnnnnnnnngtgactcctcagggttgaggtccagcgctggccgaaggactgtgacaggcagcagggactcgggac

SEQ ID NO: 10181 - DNA, 751 bp, Macaca Fascicularis
  misc_feature (1)...(751): n = A,T,C or G
gtnnngacattactaaataaagaatnnnnnagctgcttataaagtaaatttactttgaattgtaaataacatgaagaaacctttataaagattgttcaaatgggactcagtctgactaggcttgctttgatgtttgttagtatgtgggctggctacatttgattccctggtacatatttcttctgatccatcaaacttcnnnnnnnnnnnnnnnnnnnnncccttggctaactggttttgtctgcagagaatctttgtacttcttgctatagaatgattnnnnnnnnnnnnnnnnnnnnnnnnnnnnnnnnnnnnnnnnnnnnnnnnnnnnnnnnnnnnnnnnnnnnnnnnnnnnnnnnnnnnnnnnnnnttaatgtcatggattgagtgtgctggagacagttaacatnnnnnnnnnnnnnntaggctgttcagtaaatacttgctgaatgaataagtgaatgannnnnnnnnnnnnnntaaagactggattcatatggtgtagataacaggattgccaagaaaggaggcagctaatttaggtgatgctctccaccagcatccacctgcctccctggggccaaggtgtacctacaagtctttatcaactgccctgccttcctcatttccctaggttttactaaatacatgaaatatccctctgagattnnnnnnnnngtatatgtggtnnnnnnnnnnnnnnnnnnnnnnnnnnnnnnnnnnnncttcagaaattccctatttaaaactc

SEQ ID NO: 10182 - DNA, 633 bp, Macaca Fascicularis
  misc_feature (1)...(633): n = A,T,C or G
cagcacatggaaggccatgggttgggaaacagaaaatnnnntagtgaacatgttcagggcatcacatgttggtaaattagctcaggcattggccagggaattgtgatttgcatgtagctggaccaggttatgccagtggttttgtgaggtgaggctggagcgtatgaagagggggatnnnnnnnnnnnnnnnnaagcttagactgggagcctaagctgggaagagactggatgaggccttggtactggaagacgagataaggagaataaaaaaggagtgtagggtggaagagttgggtgagggggaaatggaggcaggagtatccacacccctgtatactgcctccccccagatcgcagatttgacccagaagatctttgaccttcggggcaagtttaagcggcccaccctgcggagagtgaggatctctgcagatgccnnnnnnnnnnnnnnnntgggggcccgggctaaggagtccctggacctgcgggcccacctcaagcaggtgaagaaggaggacaccgagaaggaaaaccgggaggtgggagactggcgcaagaacatcgatgcactgagtggaatggagggccgcaagaaaaagtttgagggctgagtcttcctacctactgcccc

SEQ ID NO: 10183 - DNA, 721 bp, Macaca Fascicularis
  misc_feature (1)...(721): n = A,T,C or G
aagcnnnnnnnnnnnnnnnnnnnnnnnnngcnnnnnnnnnnnnnnnnnnnnnnnnnnnnnnnnntatgatctgaaaacccagtggatgactgaaggtgttaaatgcgctataatcattaagaatcctgtgttctgtgttattgttctttttctttttagtgtnnnnnnnnnnnnnnnnnnnnnnnnnnnnnnnnnnnnnnnnnnnnntttggtctgcattcaattgtaccattcagaatggactgtttgtacgaagcatgtataatgcagttatcttcttnnnnnnnnnnnnnnnntttttgcttctcctacaaaacataacttgcaannnnnnnnnnnnnnnnnnnnnnnnnnnnnnntcttcattgataagagtcctataaataagataaatgtgaagacaaagctttattctttagtgttaaaatacagtatatttaataactnnnnnnnnnnnnnnnnnnnnatattaaaattgttttatgtaaaaagtgtttatcctcagcaccaaatacataaatgtatcagccactatttataaacnnnnnnnnnnnacactcctcagaatattcttctaagtattttgatgaagtaactttgtaattatttgaacattgttttaatcattaggaaacactgatgaactgcaagtcttcatgattctgtcatattatgaaacacctgtaggtgtgttgnnnataaaggcatannnnnnnnnact

SEQ ID NO: 10184 - DNA, 1458 bp, Macaca Fascicularis
  misc_feature (1)...(1458): n = A,T,C or G
ggaacgactttatctgtccaaannnnnnnnnnnaggaattgccagaaaaatgcccaaaactcttcaggagctgcgtgcccatgagaatgagatcaccaaagtgcgaaaaactactttcaatggactgaaccagatgattgtcatagaactgggcaccaatccgctgaagagctcaggaattgaaaatggggctttccagggaatgaagaagctctcctacatccgcattgctgataccaatatcaccagcattcctcaaggtcttcctccttcccttactgaattacatcttgatggcaacaaaatcagcagagttgatgcannnnnnnnnnnnnnnnngaataatttggctaagttgggattgagtttcaacagcatctctgttgtcgacaatggctctctggccaacacgcctcatctgagggagannncactggacaacaacaagcttaccagagtacctggtgggctggcagagcataagtacatccaggttgtctaccttcacaacaacaatatctctgtagttggatcaagtgacttctgcccacctggacacaataccaaaaaggcttcttattcaggtgtgagtcttttcagcaacccggtccagtactgggagatacagccatccaccttcagatgtgtctacgtgcgctctgccattcaactcggaaactataagtaattctcaagaaagccctcatttttataacctggctaaaatcttgtaatgtcattgctaaaaaataaataaaagctagatactggaaacctaactgcaatgtggatgttttacccacatgacttattatgcataaagccaaatttccagtttaagtaattgcctacaataaaaagaaattttgcctgccattttcagatcatcttttgaagctttctgttgatgttaactgagctattagagatattcttatttcactaaatgtaaaatttggagtaaatatatatgtcaatatttagtaaagcttttctttttgaatttccagaaaaaaataaaaagagtatgagtcttccgtaattcattgagcagttagctcctttgagataaagtcaaatgccaaacactagctctgtattaatccccattattactggtaagcctcatttgaatgtgtgaattcaatacaggctatgtaaaatttttggtaatgtcattattttgaaaaaataaatttaaaaatacattcaaaattactattgtatacaagcttaattgttnnnnnnnnntaaacacaattttatgaagagagaagacattgctttgttgacaataacagtatatcttttcaagttctcagctatttcttctacctctctctgtcttacatttgagtatggtaacttacatcatctatgttcaatgtaagcttataaagcacaaagcatacatttcctgattggtctagagaactgatgtttcannnnctcctctgc

SEQ ID NO: 10185 - DNA, 599 bp, Macaca Fascicularis
  misc_feature (1)...(599): n = A,T,C or G
cannnnnnnnnnnnnnnnnnnnnnnaggaactgaacattgtttgtaaggctgtnnnnnnnnnnnnnnntgtgcagccagacactgtggccccaatctggaacctgcgaggtgcaatcagcaatgcctggcatcgtgtccatgtctttgtcgccccatgagcatggaaaagagccacctcaacccctttccccacccattagcctcactgcttcagaaaaatctttcccacccctcaacttcttggatcacaactctggcttcctaagccatacccaagtacacatatagcacatttcacccagggcccctccctctttggacactatgttacatatccctcttggcctttgaacctgtgccaggaaatgtgagctgttacagcaaggggctagaagtgagataagtaattctggagacaagcactattttgttttcgtaccccacctccatttctcatgcctactgccatcaaggccttgttttacttttctttttggattcttcagagaaatgtgtgtggcatgtgtaagaaaanntgtatatactattatctctnnnnnttgcaaagttgtgaggagagcaaagggcacaaccatct

SEQ ID NO: 10186 - DNA, 900 bp, Macaca Fascicularis
  misc_feature (1)...(900): n = A,T,C or G
cagcccagaagagcctcgacactgtgaccccggcagccnngaggnnnctggtcctgggtggtaatcagctggtgatcatcgtgggaactgtctgcgccacaannnnnnnnnnnnnnnntcnnnnnnnnnnnnnnnnnnnnnnnnnnnnnnnnnnnnnnnnnnnnnnnnnnnnnnnnnnnnnnnnnnnnnngaagaagactaatccagggataaaagaagaaccctgctattttgaaagctgtgaaggggagaaaaacatttactcctcaataattatacgggaggtgatcgaggaagaagaaccaagtgaaaaatcagaggccacctacatgaccatgcacccagtttggccttctctgaggtcagatcggaaaaactcacttgaaaaaaagtcaggtgggggaatgccaaaaacannnnnnnnnnnnnnnnnnnnnnnnnnnnnnnnnnnatctcagcgcagtggagactcccctgtgtgtcctgggccactctaccagtgatttcggactcccgccctcccagctgtcctcctatctcgttgtttggtcaatgcatgaaggtggagagtttggagcctggcagagagactagacagctctggaggagcaggctctggtgaggggaggggagcatggacttggcctccagagtgggacactggccctaggaaccaggctgagctgagtggcctcaaggcccccactggatcagaccctcctgttggcagtgttcttagggtatgagttactgggaagaatcagagataaaaaccaacctaaatcattcctctggcacattatttctaaataagggtggtttgtggaaatcgtccttttttttatgccttggttgatgggggaagtaaagtcctggtgaggaatttacagttagaaactt

SEQ ID NO: 10187 - DNA, 717 bp, Macaca Fascicularis
  misc_feature (1)...(717): n = A,T,C or G
gtgtactaactactagtgctgcatttaannnnnnnnnnnnnnnnnnnnnngaatgtttttcatactgcattgagccctcagagtggagagtctcccccgctccagttactggagtgggagaggaaggaaagaacagcttttttgtaaaggggcagnnnnnnnnnnnnnnnnnnnntttatctatactcagtaatgaggatgagggctaggaannnnnnnnnnnnnnngaagccagagaacgcaacgtaaaannnnnnnnnnnnnnnnnnnnnnnnnggtggggctcatgccccgaatccctcactccctcaagaatctgaaccacaagagacaaaaacaacctactgggctctctcctaccctgccctcctcccttttttttacccctctcttttttattttgtttttcnnnnnnnnnnnnnnnnnnnnnnnnaaataccaggggactggggtgcaactctttcttatgataggtcattagtgctttaagcaaaagatattnnnnnnnnnnnnnnnnnnnnnnncaattaggaaaaaaaaaaattaagttccctgcggacatgtaactttgccatcagttttgatgtggaaacactgtgatatataaaatgttgttggacaacagtagttttaagagtaaaatatgaaacgtttaaaaagttccaaaaaaagctagctctgtcctttacttattgagacactttaactttttccttt

SEQ ID NO: 10188 - DNA, 846 bp, Macaca Fascicularis
  misc_feature (1)...(846): n = A,T,C or G
atgatgacatgtgaggctcagcccagaccagtgtgaatgctctgtcagcagatgtgctgggtcgatgtcaggtgtttgaagagacccagattggaggcgagaggtacaatttttttactggctgccccaaggccaagacatgtaccttcatcctccgnngcggtgccgagcagtttatggaggagacagagcggtccctgcatgatgccatcatgatcgtcaggagggccatcaagaatgattcagtggtggctggtggcggggccattgagatggnnnnnttcaagtacnnnnnnnnnnnctcaaggactattccaggaaaacagcagctgttgattggggcgtatgccaaggccttggagattatcccacgccnnnnnnnnnnnnnnnntgnnnnnnnnnnnnnnnacattctcaacaaactgcgggctcggcatgcccaggggggcacgtggtatggggtggacatcaacaacgaggacattgctgacaactttgaggccttcgtgtgggagccagctatggtgcggatcaatgcgttgacagcagcctctgaggctgcgtgcctgatcgtgtttnnnnnnnnnnnnntcaagaacccctnctcaactgtggatgctcccccagcagcaggccggggccgtggtcgtggccgcccgcactgagaggcaccccacctgtcacatgactggctggctgctgggtgcacctactctccttggcttggttacttcattttacaaggaaggggtagtaattggcccactctcttctcattggaggctatttaaataaaatgtaagacttcggaaaaaaaaaaaaaaaaaaaaaaaaaaaaaaaaaagg

SEQ ID NO: 10189 - DNA, 780 bp, Macaca Fascicularis
  misc_feature (1)...(780): n = A,T,C or G
tgaagctttttaatgaaacagcnannnngcagatgnnngagttacaggccttaaaggtaaagctggagatgaaagaagaaagagtccgattcctagaacagcaaaccttatgtaacaatcaagtaaatgatttaacaacagcccttaaggaaatggagcagctattagaaatgtaagaagaagcaagtggccagatnnnnnnnnnnnnnnnnnnnnntctcagaggaagccacttaggatatcnnnnnnnnnnnnnnnnnnnnnnnnnnnnnnnnnnnnnnnnnnnagcaatttctacagtagaattaaggacagtttatgctgaaatggcaattcctcatttaagcaannnnnnnnnnnnnnnnnnnnnnnnnnnnnnnnnnagcctcacaggtggataattgaggcctacaagagaggggggcctaggagcttggattgaccttctagtcaaccacctgattccagcacaccattataatccggagactaaaccaacaaccagaggatctaaaaggtcacattcagnnnnnnnnnnagaaaatcttcattacagtacagcacaagtgttccgtacaagaccattgaggagccannnnnnnnnnnnnnnnnnnnnnacacattctgtcccatcctggttgggcttctgtacctccttattaatttatgaacctgaagttgcttgaagtgttttgggcttaataaatggggtgaaagtataggtagcagtaacacctacatgaaacaatacaccttggagctttaaattactttttttaa

SEQ ID NO: 10190 - DNA, 716 bp, Macaca Fascicularis
  misc_feature (1)...(716): n = A,T,C or G
agaaaaatgagnnnnnncannnnngcntnngtggtagtggagcnnnngtcatcagcaagaccctgacatatccactggacctcttcaagaagcggctacaggttggagggttcgagcacgccagagctgcctttggccaggtgcgcagatacnnnnnnnnnnnnnnnnntgccaagcaggtgctgcaaaaggaaggtgccctgggcttcttcaagggcctgtcccccagcttgctgaaggctgccctctccacaggcttcatgttcttctggtatgaattcttctgtaacgtcttccactgcatgaacaggacagccagccagcgctgagcgcagggaggaccccaggtctttcnnnnnnnnnnnnnnnnnnnnnnnnnnnnnnnnnnnactgagaggtgctgtctggcccttccctgcgggcnnnnnnnncccagcagggtnnnnnnnnnnnnnnnncccagctgggacaccaccagaaggtccagggctctccccatgagaggatcagagggaatgcaggacgtggtctacggtgaaccaacgacacagcgagaaggnnnnnnnnnnnnnnntttctcctctgaccccagcccacactccaaaggaaagagatgccgtcctacacctgtcagccctgtctgcccggagaacagaacgctcctggtctggatggggctgctgcttgagtgcagagggctgcagtaggccctttgc

SEQ ID NO: 10191 - DNA, 603 bp, Macaca Fascicularis
  misc_feature (1)...(603): n = A,T,C or G
atatttcacataaagagtatcagtgtatctgtagtggcnagaagatacnngccagaagataaaaaagagagtgagagaaaaagcccagtcagtggtgcgcaaacttatttcctttaaatgtctcatggatgtaggacagtgacttgtttcaagatgcctgtgagataggtcaagatgtatagaatgttacttatgaacaaaatataattgtttatggtaaattcgtgtactttagcatatggggagttagttcatagtcaaagtcaattaatatttcttataggaaacttttgctttttgtggcaacatttttatagcttgtgagagttcctttttttatttaaagatttcaacgcagtatttttgcacagttgtgaccgtgtgtggtggtgtcactgtaaccaaagtatatgcaccagcccttgcgcatttattgtttctcgcgattttgcgcatttaaatgtccaaatgcaaacctttgtgattttctgtggaggacttggcagcacagcatgcccccgtgacacgcgtggtgtggtatgagctgtgaccaagagcaggcctcgtgctccacggagtctcgagttgctctgggatagggga

SEQ ID NO: 10192 - DNA, 733 bp, Macaca Fascicularis
  misc_feature (1)...(733): n = A,T,C or G
cagcagcggtggcggcagtggtgagggtgaggnntgcgaggaggccagggcccaaggtggggccaaggcctcaagctctcaggacttggccatggaggaggagaaagaaagcaggagctcagccagtccagccttacctacagcaggaaacggcacgagctagactccattctgggaccatctccaggagtccacaagatgctttattctcctatgtcccaattctcagaactcagatgtggatggaccaaccagtgggaaactgccccagcttctcccaccatagggggccggacccccatcaccagcccaggatccaggggctgcctctgacctcatagggagcagagagcagaactccgcagcccagcccagcccagaggagtgtcacctcccacctttggagaggaatccttccctcccctggacagagttgctgacaggctgcttaagtggcctctccatatcctagctgagcctgaatccgactcctgagggttggggctgcacttatttatcgggggagacagctgtctctcccacctcctccccacatgggaggagagcctgaggcccaagcaggacctgggggatccagcccctagctgctcgggggtgggggaggttggtggaccatggagtccctggtgctgcccctcaggtgggacccaggtgttctcagctgtaccctctgccgatggcatttgtgtttttgatatttgtgtctgttact

SEQ ID NO: 10193 - DNA, 701 bp, Macaca Fascicularis
  misc_feature (1)...(701): n = A,T,C or G
gagcccagatctcatgtgcnannnnngaaannnnnnnnnccagagaggaggggttgacctggaggcaggaaaaagttggcttggatccatgtctcatcaataaccttaccacatgcttaggtcccctctatgcagtcatcagacctttggcaatgaggtgttcactacctcacaaggcaaagtgttgtatatttagaaattacgtatatagtggttagctcacattgcccctcaagagacaggtttccaggtgtcttcactgtagtgggtattcattgtcttcagcctccnnnnnnnnnnnnnnnnnnnncctctgcctagaagcaaggccagcggtgcctttacgggaccaatcatgtggcgcgatttacggattctttatcagttttacttgctttaggtttctggaagttatacattcgtgttttgattggaagaaagaaatcctataaataatttgggaaaaattatagtgtatgtttcccatccagaaacaagcattcgtatttattggagtattatattcctgcgaaaatttttctaattttcttcacgtattacacaattttgttactgtagttttttccattatatttttatagttgattaatgcttttacatgggaaagttattttttattacatatttgtataactagtcaccttactgaatgttgttaatttgttgttaattttcaatag

SEQ ID NO: 10194 - DNA, 692 bp, Macaca Fascicularis
  misc_feature (1)...(692): n = A,T,C or G
tgcaggacaccagtgnnnnnnnngggtaccagctggacctgcccaaggccaacctcctcttcaaaggnnnnnnnnnnnnnnnnnnnnnnnnnnnnnnnnnnnnnnnnnnnnnnntcccaccccnnnnnnnnnnnnnnnnnnnnggnnnnnnnnnnnnnnnccgcaagaacannnnnnnnnnnnnnnttggcctcaccatcggctgagccctcctggcccccgccttccacgcccttccaattccacctccacctccacctccccctgccacagaggggagacctgagcccccctcccttccctccccccttgggggtcgggggggacatcggaaaggagggaccccgccaccccagcagctgaggaggggattctggaaccgaatggcgcttcgggattctgagtactaggggcagcgtgcccagtgggcctggggtcccgggaaggattccggaattgaggggcacgcaggattctgagcaccaggggcagaggcggccagacaacctcagggaggagtgtcctggcgtccccatcctccaaagggcctgggcccgccccgaggaggcagcgagaggagcttccccatcccctgtcagtccaccctgccctgtccactttcccatctactcctcggtataaatcatgtttataagttatggaagaaccggggacatttacagaaaaaaaca

SEQ ID NO: 10195 - DNA, 573 bp, Macaca Fascicularis
  misc_feature (1)...(573): n = A,T,C or G
cattcacttcatgannnntgaannnnngcaggagcactttaacnnncagagacggtacaacccaagctcccacgtcctnnctggagcttgcgcaggagctgtagctgccgcagccacaaccccactggacgtttgcaaaacactgctcaacacccaggagtccttggctttgaactcacacattacaggacatatcacaggcatggctagtgccttcaggacggtatatcaagtaggtggggtgaccgcctacttccgaggggtgcaagctagagtaatttaccagatcccctccacagccatagcgtggtctgtgtatgagttcttcaaatacctaatcactaaacggcaagaagagtggagggccggcaagtgaagtagcagtgaaggaagccaggggtttattaccccaccccacaccacccactacctgaacaacagccaaggaaagaaaggagatgttcaaacaaaccacaaacagtgtgttgacggcactctcagcccttggcccgtgtgatcactgtctctgaaacaccgaccacctccctctgcagccagcgtgtagcttcagtg

SEQ ID NO: 10196 - DNA, 703 bp, Macaca Fascicularis
  misc_feature (1)...(703): n = A,T,C or G
accgccaccaccgacacccagcgcccgccaagtgcccgagccaggggagcgcagccggaccatgcctcgcaccgtgcctggctctaccatgaagatgggctccctggagcgaaagaaattacggtattcagacctggactttgagaaggtgatgcacacccggaaacggcattcagaactttacgacgagctcaaccagaagttccacacttttgaccgctaccgcagccagtccacggccaaggataagcccagccccggggagcgccccagcttgtcccannnnnnnnnnnnnnnnnnnnnnnnnnnnnnnnnnnnnnnnnnnnnnnnnnnnnnnnnnnnnnnnnnnnnnnnnnnnnnnnnnnnnnnnnnnnnnnnnnnnnnnnnnnnnnnnnnnnnnnnnnnnnnnnnnnnnnngacagaggtgtgagtgccacgctggactgcccactgcatataaatatatatatctctctattttcacactccactttggaactacccaggagccagcaccctctcccctctcccgagggctgggcagggaggcgccgtnnnnnnnnnnnnnnntggggagccagacacggcttggcctaggggcccagggcccttccttgnnnnnnnnnnnnnnnnnagccactggaaccccatctnnnnnnnnnnnnnnncgtccctgtcccgggctggggaggggggaggggaa

SEQ ID NO: 10197 - DNA, 749 bp, Macaca Fascicularis
  misc_feature (1)...(749): n = A,T,C or G
agtannnnnnnnnnnnnnnnnnnnnnnnnnnnnnnntgctgcatgataatgataggataaacaaaataccactgtcttcaagaaacattatcttaggtttgtttgtttggtttgagtttgatttggcttttatattttttaaaatcccttttgctaccccatctggttttataaactaagtttcttagcatttgttaaaattaaggggtttgtttggaataatatatattttttatgcttttgcctttcttacctgattgatatttcattcacctttgattgttttttaaaagtttatttttacagaatatatttagtacctttcttaaggagtaactgaannnnnnnnnnnnnnnnnnnnttaaataaaagaacaggctcaatggtcttcttgtggaatggtttacacgtctgcatgtgcagtagttgtgtctggaatcctagaattggcactttctgcctctctgctctaaatgtcacaataaattatacttgcttaaagtaaatataatgatttcttcttttccnnnnnnnnnnnnnnnatagagatgttgtgtttgtttcatttttaatgatgacttcaagattgatgatctgatccagtaactgtggaggtagctttaacttggttctgtgtaaatagtatgtattttcttataatatttcacattttaagatgcttggtttacattaaattatggtatttaactttttatgtttatactaggtagggtctttcttatatttct

SEQ ID NO: 10198 - DNA, 713 bp, Macaca Fascicularis
  misc_feature (1)...(713): n = A,T,C or G
ttttttccatactcagaatgaaaaactggatattacgtttttgttttggggtttttttgtacaaatttagctaatagctacaggctgagagaattgtaacatagcatgacaaattttgtgttgacttgaaaggaatcacaccattattccttagaagtaattacatgtgctgtaacacatttgagacagggttggactcccatttctcatcaagagaaattatttagcccttcctggcgctgtacagtcatcttttattctatttcctctttgctgtttgtagtagagacattttgaatgaaacttggcactgcttgattcaaaactgtggaaaccagatctgtttagtctcctgtttgtatgcgtttgctaatggtagctaaataaccagtttttgttgtaaatgcaccaattctgaaggcactttatgtactacatggaggtcatgtctggttttgtttttatttttttatcatgaacattaaatgtgatgatgatttcttttccccgcacacatctnnnnnnnnnnnnnnnnnnnnnnnnnnnnnnnnnnnnnnnnnnnnnnaaaacctggatgtaaagctgagcctacagacctgtcctcaccaactgttttgtgatttctactcaactacaaagcatttatttaatgtacnnntaatcaaactgaggttctgttcccaannacncgttgcactgcttcgataccgtgt

SEQ ID NO: 10199 - DNA, 757 bp, Macaca Fascicularis
ccaccgagcccagatcccgagacctgtcccccatcagcaaaggcttccacaccatcccttccactgacatctcgatgttcaccctctcccgggacccctcaaagatcaccatggggaccctcctcaactccgaccgggaccacgcttttctacagttccacaattccacacccaaagagttcaaagagtcactgcataataatccggccaacaggcgcaccacgcccgtctgaactgacctctgacctctgccccacgcccagcacagccttgggggaagtgtacagagatgtcgctgaggttgcatggcatggtcctcgtgatggtattactttttacaaagaatgaaaccaaatggactcagccctctcccacatttgcccctcaccctccaagtcctaacccctccatcctccctaacttttcaagccaatcccttcatgtcattcctctctctgtgtatctgtgccagatgttttcctttcttccttctttactggaaggacctccacattcttccctccttggaagaggactttactaaaagtcacgggtggtggccaggggggatttttgaatctccatcaggcgcgttcatagttgtccccattgtctacccacacgaatcctcaggaaaccaaccaccgcccaggtggcctgagggaggcattcacctttatgtgttagaaaaacatgaccagaaatcaaagatgtcagagccccgaagcagctaatgtaataagcactcatgtataaa

SEQ ID NO: 10200 - DNA, 917 bp, Macaca Fascicularis
  misc_feature (1)...(917): n = A,T,C or G
catagagaatagtatnncnttggactcaanntgaaatacaagccttacattgccttatgctttatttctttataatttttatgtatatatagatgagagttnnntaatggttgtgagcactgtgtggaattttacacctgnnnnnnnnnnnnnnnnnnnnnnnttggggtgtttgatttcannnnnnnnnnnnnnnagtgtacannnnnnnnnnnnnnnnncaaccgtggcagctcccactggctcccctgctctgccccaaagggctcttgagcctctgggaatggggggggccaagannnnnnnnnnnnnnnnnttagcaccctttaaaagagctgtgcccccgttctcagtgctgcctttgcatgggcctggcccggctggcactcgtcagtgactccaacccacctgcttgctgcatttgggatgaaacgaccccacaggtcaggtgaagggtggggcatgggcatcggccaggattgctgttgcctttttctcaggagctacaaagatctcttcctgttactaagtgatcacaccccagcagcctctcgctcacaccagggccctgcatgtcagatggcatggtctgcaggggtagctctgtgccttagtggctcttggcaggacactgagggcctgcctgtggtgtgcctggctctgccactcccaggaggggaagggctgctcagctcaaagtgtcctgttcggtagagcaagtgtcctctgacaactctgtccccnnnnnnnnnnnnnnnccctggggatggtactccacacacgacaaagatgcaggggccagggaaccccagtgcttggtgccctttgtccagggttaaaattggcctgtggggtgtggtgtgaaggcaggttgcgcgggtgtcaactgatgtatcttttccttaaggttattataa

SEQ ID NO: 10201 - DNA, 742 bp, Macaca Fascicularis
  misc_feature (1)...(742): n = A,T,C or G
tgcacaagcagaaagatggcactgagttcaaaagcannnacagcctggacaagctctaccccgaatctcagggctcggacaccgcttggagggtcccggatggtgcaaagcaagctgacagtgacatccctctaaatcgcttgannnnnnnnnnnnnnnnnagtagtggtcctggggggcagaatgtgaacaaagtgaattccaaggcggaagtcaggttccatttggcaactgccgactggatcgcagagcnnnnnnnnnnnnnnnnnnnnnnnnnnnnnnnnaacaagatcaacaggttaggagagttgatcctcacctctgagnnnnnnnnnnnnnnnnnnnnnnnnnnnnnnnnnnnnnnnnnnnnnnnnnnnnnnnnnnnnnnnnnnnnnngcgagacacccaaggagccaacaaaagaagatgttaaacttcagagaatcaggatagaaaacatgaatcgggaaaggctgagacaaaagannnnnnnnnnnnnnnnaaagacaagcaggagagttgacatggactgaaatcaccctctgcagctgggagggctcgtctgggtgtcagggcagctgcagctgagaggcctttcacaccataaggagatttccttttttctttttggctgttaatgcttgtctataacattggagccatcacaagaacgttcatttggaatgaaggttacaggcactggttgcaaaagtctttataggcagtcaccatatgtcaaacc

SEQ ID NO: 10202 - DNA, 794 bp, Macaca Fascicularis
  misc_feature (1)...(794): n = A,T,C or G
ttaaaagcnnnnnnnnnnnnnnnnnnntagatcagaccngtgtattangtcagnnnngtgtatcacataagtgtgtgagtgcagtgcagatgagcaccatttagttatatgtgctaggcaaagctccaacacagttgatgtgtagtctcatggtagatttgtgcacactgtaagcaaattgcttagcttctctagacatcagtttccacatctgaaaaataagaagatgagagtacacggttgttatgaacaaatgacttaatgcttttaaagcacgttgcatgacatctggaacacggnnnnnnnnnnnnnnnnnnnnnnnnnnnnnnnnnnnntgatgttgctgtctgctcaattcaatgcatgctttctttattgtcctgacagttgtgcggtcacaagttaatnnnnnnnnnnnnnnnnnnnnnnnnnnngtggtgttagaaaccgtttcagctcttattgtaaatttgagtgcttgttgttttttatatttgtgatgannnnnnnnnnnnnnnnnnnnnnnnntgagaggtttgacttttaaataattacttattttttctgattgtggttcagtttaactgaagaatatcctgagattgtaagaaaagcatttttttaaaggtatcacttgtgatcatttatctttctaaattatatttttaatactgttcgaccaaagtgatgcggtggttaccatgactccctaatttcatgtgtttttgtatttatgaaaatggttttattgtcatttattgacagtatacaaagtaaaatgnnnaaatgtaaag

SEQ ID NO: 10203 - DNA, 721 bp, Macaca Fascicularis
  misc_feature (1)...(721): n = A,T,C or G
gtattataactacacatacagatgtaaccttggtatcaatagcagctgtttccnnnnnnnnnnnnnnnnnnnnnnnnnnnnnnnnnnnnnnnnnnnnnnnnnnnntgaggtgtgtccctatacggcatggtggcagagggttgccacgtatgtgagcgtgcagggacgagtgtggcgcagnnnnnnnatctcaatgtcnnnnnnnnnnnnnnnnnnnnnnnnnnnnnnnnnnncactgtggctgccgtggctgctctggctgaggctagcgctctccaccctggactctggacttcgcaggttcctgcctgtggcgccacccccttcctgggagcagcgagcagtgccccaggcccaagttggagcacgggtctctacggggaaggcttcgctgtccnnnnnnnnnnnnnnntaaaaataaaatctttaaacctctcgggccccacgtctattctttcagagcattggcctgtggaacccggcagggcggcaccaggccccagggaccagatgccccagtccccttgtggtgtgtgaggtgacacgcaaaggtactggagctggaagacccaaggtgacatgcgaaagtggctggagctgcccttggacctgccgggagtgcaggcaccnnnnnnnnnnnnnnnnnnnnnnnnnnnnnnnnnnnnnnnnnnnnnnnnnnnnnnnnnnnnnnnnnntcttccccnnncaggaggtgacacca

SEQ ID NO: 10204 - DNA, 728 bp, Macaca Fascicularis
  misc_feature (1)...(728): n = A,T,C or G
aagtgtgtattattattactcgtgacttttatagcaaagtaactgtttataaatgctgagatgtggtgctccagccctggtcttttattccccagtcgctcctgctgtgttagtgctttgcatgctcctatttccctcttaggctacttctggacagggctatctcccttgcttctccctttcaccccactcctgctatctgcctcacctggtttgcctcttcactctagcacctgatgatcctgacctcatccatttgatcccccagtaacaagaaaagccatgtcaaacgtaccgctttagatctggacagtgaatatgctaagggcccagagcctgaggttgtnnnnnnnnnnnnnnnngtttactcttttcagccacccactactataatcctgggcagatgcttaccattaccttataagagtgtgtgggtgggtgagcaggcagttgggagctcctgatgcaggagtggtgagcaggggagtctgactggtgctggcagggcatgagaggtatcctacattttggaatctcacactctagctggttgggatgtgatctgatgggnnnnnnnngtgtggatggagacttattaacagaggctgggacagaagtcagtaacggagaggaactggactggggaagtcatccannnnnnnnnnnnnnnnnnnnnnnnnnnnnnnnnntagnnnnnccttagtnnnnnnnnnnnnttttgctctaca

SEQ ID NO: 10205 - DNA, 739 bp, Macaca Fascicularis
agggtgaccttcagaaaggccaggaccaggattgatctaacctttccctttaccagagacaaagctatcaccagactgaaccctaaggtcaagcagtcacccactgcctttgctgggagcagaagcccatagtaacaagtgacctgcccctcacactcaagatcccagatagagctggaggagtcgtagggcattactggtaggcaggaaaactgagggtcgaacaaatggaagaatgcagtgatcatagaccaaaaacacacggataattaaccccaggtgtccacccaggccaaagttcttcctgctaccccacagtgggtgtccaggcagagtgaagcctgagttagaccctctaacactttcttaatggcccagagggtgtcctctgcctccccaacagcagtctcctggtgtaccctcagatgatggggaagctgagggcatagtgtgatttggtgggacttgttcatgttttgtagtgtgggctcaacagtgccaaaggaaacactagaggaaagttagtgaaacatgccagctagcaggaccagtaaaggcataatcgggcatttggcaaagcatgtttttctaactcagcgataggttctaataggaaatttttaaaaatgtttttaaaacagtgttatagtgccacttccctggtatggaataaataacatgcattcttttttcaatatactgtcatattcggatgtcattaaaataaatggatgagtca

SEQ ID NO: 10206 - DNA, 986 bp, Macaca Fascicularis
  misc_feature (1)...(986): n = A,T,C or G
gggggaaganctgcaggaaagaagnncacaagagggcagcagcggagcaggacgtgccctccaccctggggcccatnncccagggtcagnnnnnnnnnnnnncggcaggcagctcccaagaccacctgcccccaggtgcagccacccccaccccagggcagggggaagagcaggaggtctactacgcctccctcagcttccaagggatgaggctccgggagcctgaggaccaggaggnnnnnagcagcaccgagtactcagagatcaagatccacaagggacagcccccgaggggcctgggctttgggcttcagttggagaaggagnnnnnnnnnnnnnnnccaaagtgaagagttctccatggaaacaggacaccagcaagtgcgtgggagtcatgctggtgtgannnnnnnnnnnnnnnnnnnnnnnnnnnnncatccccaatgaagagcttgagtttgaagattagactcnnnnnnnnnnnnnnnnnnnnnnnnnnnnnnnnnnnnnnnnnnnnnnnnnnnnnnnnnnnnnnnnnnnnnnnnnnnnnnnnnnnnnnnnnnnnnnnnnnnnnnnnnnnnnnnnnnnnnnnnnnnnnnnnnnnnnnnnnnnnnncggccgccctttttttttttttttttggtagagacggggtttcgctgtgttnnnncgnnnntggtcttgaactcctgggatcaagcaatctgcctgctnctgcgtaccaaagtnnnnngattacagacgtgagccaccgtacctggctgaagattatactttcaattcacagcgagtttgaagatgacactttgaggcatcgtgtctatggttcattactacagaagcttctctggatgtgtaaagcacaggaaaccaggcagaggaggcacagggcgctctccagaacgagaagccagctcctgggattgctatgctgcaaccgtcattccgccattgataaccattctcctccttcagaagagggagag

SEQ ID NO: 10207 - DNA, 775 bp, Macaca Fascicularis
  misc_feature (1)...(775): n = A,T,C or G
acaggcnnnnnnnnnnnnnnnaccagcgataagcacaggnannnacttttcagttcttgtttgtttgntgtttcccaaagtgctgctaaaaatagcaacaacaataggattccaaccaggagccttaggtgacagccaggaagagatctgaagatcagggccgccacaatgccaaatcatttctaaaggaagctgaaaaatgggactgtcttttgcccacttcgttgtgttaaaaggggacatttgtccaaactccccaactgagttctagaagctcctgacaaggaggcagcctccagccttgaccaggcctcccagttccctggaaccgnnnnnnnnnnnnnnnngcctctcataaacgtttcagggaggccagttctgcagggtgtcagctccaggacccacagggccagaaccggctgggagagttggttatttgagatgtggtaccgcttcctcacgagtctccgacaggtcatgtaaagggtatttttttgtggcttgctgtgttgctgaaatcatcatatgcaacagctgggtactaggactagcatagctcaaactatcctgccaaacgctctcatctgatttttcctcccttctcccccaacctcccatcaccctgagtcacctgtaaattcatttgtcatccaaagcggaataacaaattgtccctagcaaaaccgctgaacgctttataattttgtggtgtatttttgtcagnnnnnnnnagaggctgaagtattttttggtgtaattcttgaaattttctgac

SEQ ID NO: 10208 - DNA, 1450 bp, Macaca Fascicularis
  misc_feature (1)...(1450): n = A,T,C or G
cagcccctgtgcagcgtgcgctgaccgcattaccaaaacccttagcaagaccaagaacctgcgtctgctcattctggtggggcgactcttcatgtgggaggagccggagatccaggctgctctgaagaagctgaaggaggctggctgtaaactgcgcatcatgaagccccaggacttcgaatacgtctggcagaattttgtggagcaagaagagggtgaatccaaggcctttcagccctgggaagacgttcaggagaacttcctatactatgaggagaannnnnnnnnnnnnnnnnnnnnnnnnnnnnnnnnnnngcctcacgtcttcctgttgccaccaagagacagcagtgacatgtatagccatctgggacatgcctgtcttcctaataccattnngagctggacaacatttgacaccaaccaatcatactggacaaggcccttagaggacttgaaatatacttctcatgctgtaattcatttaggctgtgcctctctctctaatgctgctcttgggaaggacgaaagcgacctgcaaggagagaaatgcaaccatccatgggctccagtcaactatgggactgaaggtcctaattgctcaaccaagggggctgcttaacacaaacagcctcagacccaaggtttagatttctgaaatatgcagtttatgttaagttgggtattttttaaaaaaagaaaaacagcaacattaataaaagaagtggtgtgtttcccccgtggccagatttttaagaaactcgaacatttggaagttgccacagaccagtgagccagttccagacacggggacaccccaggctatgaaccaagctgtggttaaaccaggacttgcctagacaatgtagaataactctcccatacagatttcttacgacaatcaaatgaaggcctttcccttctcagaaggcaagtaatctggcagaaggtggaacaaaaagcatgagaaatctatggtagccacatcccaaatgccagttaaaaagcaactagcttctttattagagaggagcgggtgaaaagtagtagtttaatgttcagatatacactcatttaaaagtattcaatacatgatgtttgatggtaatggcagaatgatgtcaagtctctctttttttttaaaggtttgtttgagtcctatgtggaagcaaaaannnnnnnnnnnatttctgggtgtttgccaaactctaactaggtttnnnnnnnnnnnnnnnnnaccctgattaccaggacatgcctcctttcnnnnnnnnnnnnnnnnnnnnnntcgtnnnnnnntgacccaagactactatcagcaaatgaagaagtgctttatcacattcctgctgagtcccagaattccactgacagccagtcctggatgagactaggttctgtttaaagaatcaaggctcaaacgccacgaaaaaaaaaaaaaataataata

SEQ ID NO: 10209 - DNA, 1332 bp, Macaca Fascicularis
  misc_feature (1)...(1332): n = A,T,C or G
agaatgaatagatttgtctttcntnnnncaccttcnnnccaaaacatgacataaacaatattttttgcacttgtgatccttggcccctttccccattctcacactatccatcactctggacaaaggatgatacaggtgttattagcaagcaagaggtactgaggtgatcaaacagttttagggtggaagccattcccagtttgagtcttcatcctgtaagcccccaggggcagtccctactttattnnnnnnnnnnnnnnnaaatggcgaacatgcctgtttaagggattgctggtcctatagtcaggagctaattgttcaagaagtgttgaacttcaaaaagacaagacagactactnnnnnnnnnnnnnnnnnnnnnnnnnntttcccctatttctcttaatacttagggaagaatctgataggaagaagcgcacaggggtgtgcacaaagaaaatgacatgaatctttattttnnnnnnnnnnnnnnnaggaaaaaattttttctacaatttgcatgagggatttttttaattgtatgtactcatggttttaaaccaaaacgtannnnnnnnnnnnnnnnnnaggagcaaaaaaccaagtcttctgtttatcctgagactttcaacaatgttcccctcctgtgagccaaggaggcaacctgcacaagcttgtaaatggttcgtctttaaaatgtacataagtggaacatttaataaaatgaggggaaatggatttataaacttgttttttttctaggtgaccttgtttaataggctttcacagactgggaaatgctcaagatgtgatgggcnnnnnnnnnnnnnnnnnnnatttgttaccacccatttctcccaccccaccccgcttttttgtttgtttgttttttcatcccccagcacactataatatagtgaactggaaaagtcccttccagaaacagcttggccagctttgtgaacccttgacnnnnnnnnnnnnnnnnnnnnnnnnnnnnnnnnnnnnnnnnnnnnnnnnnnnnnnnnnncattttattgactatggactttgnnnnnnnnnnnnnnnnnnnnnnnnnnnnnnnnnnnnnnnnnnnncttctgtctacaacaacttaatcctactctttggtagttnnnnnnnnnnnnnnnnnnttagcagagctggggttcctgtcctctgcacatgattgactttcttgatgggtaattttttttaagatcgtaataccaacagtggatcagctgggttttggccaggaagttgtctttgtggactctgcctgcatggcttagtagtagaaggaaatttttttttggttttgttttttataat

SEQ ID NO: 10210 - DNA, 770 bp, Macaca Fascicularis
  misc_feature (1)...(770): n = A,T,C or G
gacccccccccccagggggctggcgcgagcaaggcctgcatgagaccctgacagaaggtgggggctctgggaagcacaggnnnnnnnnncnnnnnnnnnnnnnnnnnnnnnnggggtgcccggccctcatccctgcccacacagtgcgtgctcacgtgtcttggccccttgctnnnnnnnnnnataaagggtgcccaagcctctcctgatgcatttgtaaacaagaaggnnnnnnnnnnnnnnnaccatctccctcgtgcctccgagggggtggaagggggtgggcatgctccagggccccccgcgcccctggcccccgggactagaagaggctcccaacccagagtgtccccgtgggaggccggcagaaggtgacagttgacatgatttcttgcaggnntcctcctctaccttggaagcagttagaatccaccaggcacagatggggccgcccttgcctgacggagcttgatgagtagcccttggtctccagttcccaggactgagagcccagctgcccctgttcacccttccccgggcctctgccagcctctggctgcnnnnnnnnnnnnnnnnccacagcaggcctgccagagcttggctggggacccctcccacctctggctccctgatgggctggaggtaacttgtgtcttctagccccttaaggagcccaggtgttttaaggaatgaattggtcacngcatcttgtatcgattatggttctgagaaaagcaaatatcacttttggctgcataaaagaagcatca

SEQ ID NO: 10211 - DNA, 771 bp, Macaca Fascicularis
  misc_feature (1)...(771): n = A,T,C or G
ggcggcggagaagctgcggcaggagatnnacagctcggaggagagagacgagcgactgacacgcannnnnnnngtnnncataatgcgggtggagttctacttcctttcccagtacgtgtcgccggccgactccccgttccgccacatctnnnnnnnnnncggagaccacacgatgggcgcnnngctggaccacctgcggctgctgcgctccaacagctccgggacccccggggccacctcctccgccgtcttccaggagagtcgcttccggcgtcagctagccctgctcacctggacgctgcaaggggcagccaatgcgcttagcggggacgtctggaacattgataacaacttctgagaccctggggatcctcagatccccctgtccccttgtcgagagctcctctgctcctcgcttcaatgattcagggtcagggaggtggctcagagtccacctctcattgctgatcattacccctacacgtctctccacggagcccagactgcagcacagatatccacacaccccagccctgcagtgtagctgactctaatgtgatggtcatactgtcggttaatcagagagcagtatcccttcaatcacaaccccttcccctttctggggtcctccatacctggagactaggccttgggacctggccagctctcttagcgggagagatcgctggcaccatagccttatggccaacaggtggtctgtggtgaaaggggcatggagtttcaatgtcaataaannnncctgatgtcaat

SEQ ID NO: 10212 - DNA, 1132 bp, Macaca Fascicularis
  misc_feature (1)...(1132): n = A,T,C or G
tttgtcctctctggctgtaaaacttgacagtcatgaaaggtaaggcaaattttaagtgggttaagttttaaaatacacatctactcattttctttaaaaagaaaaaataccgaaatacctggggggtattaaaactgggcattttaaattctgtttaaccagagannnnnnnnnnnnnnnnnnnnnnnnnnnnnnnnnnnnagaaaaatagtttccttaaacatgccagcttagttagtgggaatgacctatcattcagcaagtagttgatggtcccccatggccccaaggtctgcaaggctggactgtccacttttcctcctcaccaccagcactggctgctgctactgagaaaggcacagtggactcgtgtgtgtcatgactttaatggttagctacagtatgcatacacatacaaaagaagtaggggagctgaagcccgggaaaaggctacaaaatacagcacagggaccaatacatttgcaaaacgttcaaaacccttataaaaggggctgtattggtcctttcaactttgtcattattcagcttagcctgtatggccattcattggggtaatggggagaacaattaatgagatttggttccctttcctatattcccactgtttttaagtttcagaagagggatgtaggggtgagggtagggggtgggctttaggcctggtctagtttccctttattataaagagctgacccccatctcacgcggctgaggtgtgtaatccccaaaataagtaagatggtacaaatgcagtcagctttggaatgagtttgggtagagaaaaacagaaactcatgggattccaattgtgagcccttcccatgttcccagacatatcaaattctagcacatccacatttttaataacttagtgatttttaaggtcccctgtccacattaaaaaaataagttacataatattcaaactggcatttgctattctttgggacaccaggaatgtcagaggacatggagctatgccctcagacaagtgcatggcatcagctgcctctttattacaaggtaccagtttatgtacttgccttggacacagcttgcacaaagccaannagttccagacaannnnnttctctttcatgtanntanncaa

SEQ ID NO: 10213 - DNA, 780 bp, Macaca Fascicularis
  misc_feature (1)...(780): n = A,T,C or G
tgtccaaaactccacgtttnntgctacctggaaccgagagtctcttctccttcaagtccgtggttctggtggagcccgactgagcaccaaggatcctttgcccaccatcgcctccagagaggaggttgaagctactaagaatcatgttctagagaccttctaccccatatcacctgtcattgatcttcatgaannnnnnnnnnnnnnnnnnnnnnnnnnnnnnnnnnnnnnnnaaggctatccttacccctatccccataccctgtacttactggacaaagccaatgtacgannnnnnnnnnnnnnnnnngatcagctnnnnnnnnnnnnnnnnnnnnnnnnttttggcagtgccctggctcaggcccggctcctctatgggaatgatgccaaggtcttggagcagcccgtggtggtgcagagcgtgggcacagatggacgtgtcttccatttcctggtgtttcaactgaataccacagacctgtcctctaatgagggtgtcaagaatttggcctgggtggactcagaccagctcctctatcggcatttttggtgtctcccagtgatcaaaaagagagtggttgtggagcctgttgggccagttgatttcaagccagagacattcagaaagtttttagctctatatttgcacggtgctgtgtgagctgaggacccctctgaatcctgaaccctcccttgcctctcttccacggaagagagcctgggtcccgtggagcctcagtgcccgtttggcctgctactctcgctgacaataaagag

SEQ ID NO: 10214 - DNA, 697 bp, Macaca Fascicularis
  misc_feature (1)...(697): n = A,T,C or G
cagctcttgttggaggcattccactgtgcagagccctcatcccggcaagtggcctgtgtgcctctctttgccactttgatggcgtatgaggtgtactatggactgatggaggaagagggggnnnnnnnnnnnnnnnnnnnnnnnnnnnnnnnnnnnnccagggccttggggnnnnnnnnnnnnnnnnnnnnnnnnnnnnnnnnncatctgctgcacttctccactcctggtcttgtacttcgaagtctgggtgccttgacgggaccacaacttctggtcctggcccaaagtcctgctggctctcatgtgctcgatgccatcctgaccagcccttctgtgacgcgcaagcagcgccgccgtgnnnnnnnnnnnnnnnnnggacaatatgtggctctggcctgtagtcgccatggcagccgtgtgctagatgccatctggagtggagcagccttgggggctcggaaggaaattgctgctgagctgggggagcagaacnnnnnnnnnnnnnnnnnccctttcggnnnnnnnnnnnnnnnnnnnnnnnnnnnnnnnnnnnnnnnaaagcgacgagaggcttgggaacagcagcagggtgcggtggccaagcggagnnnnnnnnnnnnnnncatacttgaagactgaggctttggatctgggactgcgtgttgatgggggagggcaaaannngggtatccac

SEQ ID NO: 10215 - DNA, 850 bp, Macaca Fascicularis
  misc_feature (1)...(850): n = A,T,C or G
agctgctttcaccagcaaacttgaaggaatgtttaaagacatggaactttctaaagacatcatgattcagttcaaacagtatatgcagaatcagaatgttccgggaaatattgaattaactgtgaatatcctgacaatgggctattggccaacatatgtgcctatggaagttcatttaccaccagagatggtaaaacttcaggagattttnnnnnnnnnnnnnnnnnnnnnnnnnnnnnnnnnnnnnnttcagtggcagtcaaccctaggacactgtgtgcttaaagcagaatttaaagagggtaaaaaagaactccaggtctctctttttcaaacactggtgctgctaatgtttaatgagggagaggagttcagtttagaagagatcaagcaggcaaccggaatagaggatggagagttaaggagaacactgcagtcattagcctgtggcaaagctagagttctggcaaaaaatccaaagggcaaagatnnnnnnnnnnnnnnnnnnnnnnnnnnnnatgatgatttcaaacacaaacttttcaggataaagatcaatcaaatccagatgaaagaaacggttgaagaacaagcaagcactacagaaagagtatttcaannnnnnnnnnnnnnnnnnnnnnnnnnnnnnnttcgaattatgaagatgagaaagacacttagccacaatctccttgtttcagaagtgtacaaccagttgaaatttccagttaagcctgctgatcttaagaagagaatagaatctttaattgaccgggactacatggaaagagataaagaaaatccaaaccagtacaactatattgcatagaatgttgcagcatttggtgtc

SEQ ID NO: 10216 - DNA, 641 bp, Macaca Fascicularis
  misc_feature (1)...(641): n = A,T,C or G
agtgaggatactgcnnnnnnggagaaannnnnnnnnnnnnnntaagtgtttgcnnnnnctatttggggggcagggaactgtcattcattttgcacaattcttgaactnnnnnnnnnnnnnnngtggctcctgaatttaagtctgggacgacatcttttatttttacatgaatctttaaacaattctgtgagcagagtttgtagctgctggattattgtctgtctttatagcaagttccagtaaaccacaannnnnnnnnnnnnnnnnnnnnnnnnnnnnnnnnnnnnnnnnnnnnnnnnnnnnnnnnnnnnnnnnnnnaggagtggggtaaacaagtgtgaccacttaaagctgctcgttagcatggaagacttctccattctatctttgtaaaacagacaggatatgcacttgacatagtannnnnnnnnnnnnnnnnnnnnnnactttgctatttagtaaactagcaaatgatacctgtattttgtttttcatgtactgggcaatatgagtaaaatctgtccctttttctccctttgaaagaggtcnnnnnnnnnnnnnggaaagtcttgcactattgcatatattttggggacacggattttcatagtttccatttttggggggtttaaggatttttt

SEQ ID NO: 10217 - DNA, 703 bp, Macaca Fascicularis
  misc_feature (1)...(703): n = A,T,C or G
aatgatcaggaatgatgcttattagaaaacaaactgcatgacccaggaacgagtggcttagcttaagtaaacttgactttgctcggatcccggatccnnnnnnnnnnnntactctgagtggcttatcctgcatgagcaggagcatgctggccctgagtactgaactttctgagtaacnnnnnnnnnnnnnnnnnnnnnnnnnnncaggttgcgggtgagctgtcctctccaaatccagccagagatgcacattccttggccaggctcagccaacagtaccaaaagtgattttttgagagtnnnnnnnnnnnnnnnnccagttcagccnnnnnnnnnnnnnnnnnnnnnnnnnnnnnnnnnntcttagcttcctattctaataaatgcatggctttagctttcctgtcagaaataannnnnnnnnnnnnaagatgatttctcttctgtaactccctatagccgcaggttctcattctttttcccattatactnnnnnnnnnnnnnnnnnnnnnnnnnnnnnnnnnnnattttttaacaaaatgtttttaatgggaatgggtgggggtgctggtgaaaagaggtgaaatgtggttgtatgagccaatctatatttgtgattttttaaaaacaagtttaaaaggaaatatctgttctgaaaccccatttaagcattatatgaaaacaatgataaagatgtgaaact

SEQ ID NO: 10218 - DNA, 725 bp, Macaca Fascicularis
  misc_feature (1)...(725): n = A,T,C or G
aagaggagcctaggggaacccgcagctggagaaggctccgcgaagcgatcgcaacccgagccaggggctgcggacgaggatcggacggcctaaaactccggactgnnnnnnnnnnnnnnnnnnnnnnnctccaccctcaaatgcacctccagcctttcactcctcggtcctccggaacccacaacctggacacagctcctcaaggnnnnnnnnnnnnnnnnnaaggcgacaagagaggggccccagaagtggcaggagaggatccccgacgaccttagggaaacttcgtgcgatgattgctgcttatgcccgtgttgcctgaagacacggaacttcaccttcaccttttctgggaccttctttgggggagaatggtggacagtgggattctggaaacttgattgggacccccaagggttaaagccacccagcattcacgaagggcacctggagtgcggaagccgannnnnnnnnnnnnnnnnnnnnnnnnnnnnnnnnnnnaaggcagggggtgagacttgactgcttgagggtaggagagtctgagatgtgggggtcctattccactccccgccctgggacagttttcctttctagttttccttcccctgcttcagaggagcatctctgagggttctagctcttttaacaccccttttccccctgctggcccagagggagacccaggactgaactctccaggcctcctcccccagccctgcaac

SEQ ID NO: 10219 - DNA, 739 bp, Macaca Fascicularis
  misc_feature (1)...(739): n = A,T,C or G
aacggagccgtgagcgacgactcccggaggctggggaagttctgcggcgacgcagtcccgggctccatttcctccgaagggaatgaactccttgtccagttcgtctcagatcnnnnnnncaccgctgacggctnnncagcnnnnnacaagaccctgccgcggggcactgccaaagaagggcaagggcccagccccaaaccgggaactgagcccaaagtcaagccgccccgcaagtcccaacctccggagaaaacagaggaaactccctcagcccccgatgcacccgctgtcacctgcccaaagcagtgccgccggacannnnnnnnnnnnnnnnnnnnttgtgccagcagcctggtggtgactgcaacggtgaagtccatggttcgggagnnnnnnnnnnnnnnnnnngtcactgtcagtcttattggtgcttataaaactggaggactggacctgccttctccacccactggcacctccctgaagttttacgtgccttgcaagcagtgccccccctagaagaaaggagtcagttatgtgcagatgggccaggtggaagagaacagaggccccatccttcctccagagagctttgtggttctccaccggcccaaccagnnganncagatccnnnacctaagcaagaggaagtgcccctcccaacctgtgcgggctgctgagtcccaggactgagacccaggccagccccagcccctagccctcaggccctctttcttat

SEQ ID NO: 10220 - DNA, 714 bp, Macaca Fascicularis
  misc_feature (1)...(714): n = A,T,C or G
tgggtgatgcagattgtgctggggatcttgagtgcagtcctgggaggatttttctacatccccaactacaccctcctggtcacctcnnnnnnnnnnnnnnnnnnnnnnnnnnnnnnngtgctagctggagctactgccttnnnnnnnnagaaacggggtggtacctgctgggccctgctgaggannnnnnnnnnnnnnncnnnnnnnnnnnnnnnnnnnnnnnnnnnnnnnnnnnngaatgaagatttccgatatggctattattacgacagtatctgccacatctccacctcgagtggctggatcaccccagcccccannnnnnnnncagaagaagtcagaaggctacacgtgtgtacctccttcctgtacatgctaaaggccttaatccgtacccttcatgccatgctcttgggtgtctggattctgcnnnnnnnnnnnnnnnnnnnncctctgtggctgtactgctggagaaagttcccaaccaaagggaaaagacaccagaaggagatgttggaagtgagctgaatctagcnnnnnnnnnnnnnnnnnnnnnnnnnnggtgcttctgcactgcgcatccctgcatctgactgctggaagaaccagactggggaaaagagactcttcaacatccccagttatcctgcagcatgaccatggccacaaccctgctccagcagcacttgcccattccttacgtcccttccccat

SEQ ID NO: 10221 - DNA, 782 bp, Macaca Fascicularis
  misc_feature (1)...(782): n = A,T,C or G
agaatggatgagnnnaagcaacccagctcccaggtagaagaatcagcaatgatgggagtaagtggctatgtggagtatcnnnnnnnnnnnnnnnnnnnnnngcggtggttccggtacaaccctcgtctcacctgcatctattgcgccaaatctttcaaccagaagggaagcctggaccgccacatgcgccnnnnnnnnnnnnnnncacctttcgtctnnnnnnnnnnnnnnnnnnnntatacccggaaagatcagctggagtatcatatccgcaagcacacaggcaacaagccctttcactgtcatgtttgtggcaaaagtttccccttccaggccannnnnnnnnnnnnnnnnnnnaaaaaccaccctggctgtatacctctggaggggcctcacagcatctccccggaaacaactgtcacatctcgaggacaagccgaggaagagtcaccttcacaggaagagacacttgctcctggggaagctgcccagggctctgtgtcnnnnnnnnnnnnnnnnnnnnnnnnnnnnnnnnnngggctgaccctcttcccctttgagccataagcagccagcatcagagccatgggctgatatttagattcacaaaatgccacatcactaggccagaagacgctcccaagatgttgccaaactggaggatcagcaacatacacaaaagcactaaaggctcttcccttcttattgcccacctcacactttggaaaataatcaagcaaatcaactttctaattcagggatcaacagcctnnntttgtaac

SEQ ID NO: 10222 - DNA, 719 bp, Macaca Fascicularis
  misc_feature (1)...(719): n = A,T,C or G
cgnnnnnnnncctcaccctgctctcggttgtgatcttgatcttcttttacctgtacaagaacannnnnnnnnnnnnnnnnnatgaacctacagaaggcgagcccagtgccatcgtccagatggagagtgacttggccaagggcagggnnnnnnnnnnnnnnnnnnnntaatgactcccgggccccaaggagcttattcctggctccagcgctaacatattgactgcttattatgggaaagttttctctgaagccagggagaagcattgattgatgtgggcaaatccaagctccagccaggtcacagtcccaaatgtcgacatcactgactccagggaccagggacannnnnnnnnnnnnnnnnnnnnnnnnnnnnnnnnnnnnnnnnnnnnnnntggtgtttgtgactggtcaaaaagatggggctatatgaggggannnnnnnnnnnnnnnnnnnnnatcttttttcacaggttgaagggagagaaaagagtgttagggccattggctgctctactctgtcccctacctggttacctagtgatagccccagtggagataatgtccatacaaggtnnnnnnnnnnnnnnnataccacagtaaaaggctaggccaggaggggtaggagactctggagatcttacctcctgataaatgtgctacatcccctaatctgagcccttcctttccgtgttccccnnnnnnnnnnnnnnnnnnnga

SEQ ID NO: 10223 - DNA, 745 bp, Macaca Fascicularis
  misc_feature (1)...(745): n = A,T,C or G
tgaaactttctggnnnnnncttgtgctacactgtactgaatggaaggaattgttgcttgtggaagttnnncagcgtttctggctgtctcagggttggcctcagaacccagcattcctgatatttgcttctaaattagcagctctttttattttattttttgagacnnnnnnnnnnnnnnnnnnnnnnnnnnnnnnnnnnnnnnnnnnnnnnnnnnnnnnnnnnnnnnnnnnnnnnnnnnnnnnnnnnnnnnnnnnnnnnnnnnnnnnnnnnnnnnnnnnnnnnnnnnnnnnnnnnnnnnnnnnnnnnnnnnnnnnnnnnnnnnnnnnnnnnnnnnnnnnnnnnnnnnnnnnnnnnnnnnnnnnnnnnnnnnnnnnnnnnnnnnnnnnnnnnnnnnnnnnnnnnnnnnnnnnnnnnnnnntgggaacctgcaatcctgtacgtggcccagcagctctctttctgatagnnnnnnnnnnnnnnnnnnnnnnnnnnnnnnnnnnnnnnnnnnnnnnnnnnnnnnnnnnnnnnnnnnnnnnnnnnnnnnnngttgattagttattatttcnnnnnnnnnnnnnnngcctcagtttatgtgtaatagaattaaaaacaatagctgtgtataacacctcaagccatgcatgtgtgaggcattttgtatgctggaattctactcttcacttattctattaactattgttgattagttattatttcaaagcacctgtcactggcctcagggag

SEQ ID NO: 10224 - DNA, 767 bp, Macaca Fascicularis
  misc_feature (1)...(767): n = A,T,C or G
cagcacatgcgncnnnangaagnnnnnnnnnnnnnnnnnnnnnnnnnnnnnncaccaacaggatagctgctcagaggccccgggagaaggaaccagattcnnnnnnnnnnnnnnnnnnnnnnnnnnnngcctttgtcctgcatcactgtctggaggtctcnnnnnnnnnnngaagtccagggatggctcccttatccctggcccacgtcctcctcagcctgctctcgacgacagtgaccaacagacaggcagctgggtttcccaggctgtccctctgttgccatcagctcgactggcttccctgagggccagcagggnnnnnnnnnnnnnnnnnnnnnnnnnnnnnnncccagtcaccagcacctgtcgcccctttctcctttgcccctgcttcatcccggctctgtgtgtggaggacaaagatgctttgcgtggctccaggaaaagatgtggctcacgtaggcggcannnnnnnnnnnnnnnntcannnnnnnnnnnnnnnnnnnnnnnnnaattgcttgggagctggggagaactgtcaagaagagccannnnnnnnnnnnnnnnnnnnnnnnnncacatgggggccatggcggggggacccactaaagatcaagatcaaagatcctccccacctcacagacaaggaaactgaggccagagggannnnnnnnnnnnnnnnggctccaggactggtggcaagtttctctggacccctagatttatttttaatatgagatataaaaacagttttcaannnnnnnnaa

SEQ ID NO: 10225 - DNA, 962 bp, Macaca Fascicularis
  misc_feature (1)...(962): n = A,T,C or G
gcagagacatggtttgatnnnnacgactgttcccagnntgtgttaaggacnnnnnncaagttggctgaatttggagcagagttcgagaacgtagaaacaaactatacaagaatatttctttacagtggagaacctacttatctgggaaatgaaacatctgtttttgggccaacaggaagcaagactcttggtttagccatannnnnnnnnnnnnnnnncttcaaaccacatttgtcaactaaagaatttctgttgaatctcttgcaaattttnnnnnnnnnnnnnnnnnnnnnnnnnnnnnnnntgttttacaattttgaatattggtttttacctatgaaattcccttttatcaaaataacatatgaagaaatccctttacctaacaaaaacaaaacactctctggtttataaaacaccttnnnnnnnnnnnnnnnnnnnnnnnnnnnnnnnnnnnctgtttttcagggactgattttacttttgtgaatttcttagcttttctnnnnnnnnnnnnnnnnnnnnnnnnnnnnnnnnnnnnnnnnnnnnntattaacatctcaggacttttctctgggnnaannnnnnnnnnnnnnnnnnnnnnnnnnnnnnnnnnnnnnnnnnnnnnnnnnnnnnnnnnnnnnnnnnnnnnnnnnnaatacagagaattnnnnnnnnnnnnagttatgtaggacctttggacccaaggtcccacagatagatatgatgtgccaagatnnnnnnnataccttcaaaaataaaaaaaataccnnnnnnnncattttcatgatgggagctcttttttctggtatggcagttacactttnnnnnnnnnnnnnnntagnnnnnnnnnnnnnnnnnnnnnnnnnnnnnnntggaaccaagtttagtatagtctgattacagtccattcacataacnnnnnnnnnnnnnnnnnnnnnnnnnnnnnnnnnnnnnnngct

SEQ ID NO: 10226 - DNA, 685 bp, Macaca Fascicularis
  misc_feature (1)...(685): n = A,T,C or G
gccgtgcacaccagggcgttggnntnnnngacccttcccgtcncnagtgagcgcaggacttcaaacaagtgtgaagaggctgtgtggtgagattgtggaactgaagcagcacctggagcactacgacaagatccaggagctcacgcagatgctnnnnnnnnnnnnnnnnnccctggtcagcaccaatgaacaccnnnnnnnnnnnnnnnnncaggtgcgggcgcagcacagagccgaggtggagcagatgcactggagctaccaggagctcaaaaagaccatggccctgtttccacacagcagcaccagccaagggggctgccaggcctgctgactcctgccgagaagctgggccgccccttaagctccctgctaaagcgacatcgtctgcaccttggtccttctttactgagtgtactggctggtaagagttctctcttctgtttgtaattatttaggagttttggaatgtattcagggcctgtagcatggttttctaaagcacttcctaaaaagatatgattactccaagccctttgnnnnnnnnnnnnnnnnnnncattgacatattttgagacaaactgaccattaatcttttatccagtatcctgagatgaagtaaatgcagtgttttactgcctgatgtgagagagagctatgtatgatcattaaagaaaataattttc

SEQ ID NO: 10227 - DNA, 1002 bp, Macaca Fascicularis
  misc_feature (1)...(1002): n = A,T,C or G
gtcattccctgggcaaggggcctggagcagaaggtgggagtggctccccagaaaagcagctgcaggtagaccaggactacctggttgctctgtccctgcagcagcagcagccacaaggcgcgctggggctcaccgacttggannnnnnnnnnnnnnnnnnnnnnnnnnnnnnnnnnnnnnnnnnnnnnnnnnnnnnnnnnnnnnnncggacacgggccctgtcaccgcaggggagaggagccacatctggacgcccagctggggagcgtcggcagaggccgaagcacgagtcagactgcattctgctnnnnnnnnnnnnnngtgccaggctggcctgccccttccagaggctatggctagttggcttgctcccctgcctccatccctgagatgtgctggataacttatttatggactgttggggatcagagcaggcgacaaatgccagggtcagacttggtaatgtccagacttggtaatgtcacgtgctgctgccttctctgcctcccacccaggacaacattaggattggtgggtttctgnnnnnnnnnnnnnnnnnnnnnnnnngtcacacgtatatacagactaaggctcnnnnnnnnnnnnnnnntctggaatgcatctctcctgcttcccatccctgctgcctggatgctcctgatcacctaggcaggcctgtctnnnnnnnnnnnagagcttaatttgggtttctatctctgttatttgtaatgccttcgtggggttnnnnnnnnnnnnnnnnnnnnnnnnncggtggctcacgcctgtaatctcaacagtttgagagactgaggcgggcggatcacctgaggttaggagtttgagaccagcctgcccaaaaaggtgaaaccccatctctactaaaaatacaaaaaattagctcagcgtggtggtgggtgcctgtgatcccagctgcttgggaggctgaggcaggagactcacttgaacccaggaggcgaaagtnnngtgagnnnnnnnnnnnnc

SEQ ID NO: 10228 - DNA, 688 bp, Macaca Fascicularis
  misc_feature (1)...(688): n = A,T,C or G
catactggggagaaaccctattcttgtaattggtgtattaaaagtttcagtcggagctcagaccttattaaacaccaaagagtccacactggtgaaaaacctcataaatgtgatgagtgtgggaaagccttcagtcagagctcagatcttattatacatcagagaatccatacaggagaaaaaccctatcagtgcagtcactgtagtaaaagttnnnnnnnnnnnnnnnnnntggttaaacatcagagaatccatactggagagaagccttatacttgtaannnnnnnaacaaacattttagnnnnngttgtgatgtgataaaacatcaaagaattcacactggggaaaaaccatataaatgtgatgtnnnnnnnnnnnnnnnnnnnnnnnnnnnnnnncttattctgcatcagagaatccacactggggagaaaccatatccatgtaatcagtgtagcaaaagtttcagtcagaattcagaccttattaaacatcgaaggatccacactggagagaaaccctataaatgtaatgaanntgggaaagcttttaatcagagctcagtccttattttacatcagaggattcatactggagagaaaccctatcctcgtgatcaacgtagcaaaacctccagtaggctttcagatcttattaatcatcaacgaattcacactggagagaagc

SEQ ID NO: 10229 - DNA, 1267 bp, Macaca Fascicularis
  misc_feature (1)...(1267): n = A,T,C or G
ttagctgaaattnnntcacaaatgttgctgagttacttgtagatttgacaagaccaagtggattaaatcctcagaccaagacttcccaagattatcaggccttaacagtacatgacaatttggctatgaaaatttgcaatgagatcttaacaagtccatgctcaccagaaattcgagtctatacaaaagccttgagttctttagaactcagtagccannnnnnnnnnnnnnnnnnnnnnnnnnnnnnnnnnnnnnnnnnnnnngtaaaagataggacatgtctgagagctttggagaaaatcaagattcagttagaaaaaggaaataaagaatttggtgaccaagctgaagcagcacaggatgccagcttgactacaactacttttcaaaacgaagatgaaaagaataaagaagtatatatgactcctctcagaggtgtaaaagcaacccaagcatcaaaatctactcagctaaagactaacagaggacagagaaaagtgacagtttcagctaggttttacaggttgtgtctgaattcgtgtattttgacatctgtttagtgatcatgaagttccagaaccagaatcagaaatgaagatgagactaccaagacgagccaaaacagcagcactagaaaaaagtaaacttaattttgcacaatttctcaatgaagatgtaagttaggaaagacgatggaggtggaatcctttaagattatgtccagttatttgctttaataaagttacccttgtcaaaatcagaacaaacctgacgtctttctgaagattttctgctgtgcgcttccacgttactttggcctgtattaaagcattaggacagcgtcagttattatagtccagaaaaaatctgcatcacacagatttatcagaatttgaggtgggcctaggaatctcgtttttaaatactctccaggtgattcttatgaactctttatgtttagaatcatgtcattatggaaactttcaactgtgactagctagtaacttgcatttgagaagcttatgacttagatgggcagaatcaacaaagatgaaaccgcctgaggacatatttaacaagtaacatgtcaagggaaaatgaaggaagtaccacaaattggctaggaggagcttaccaccagtgaggaagaccagtataacgttcaacagttattttgacaatcttattttgtgattcctacagtgaaaacatttttgatgatgctgtctgcctgggaaatctctcttccnnaagtatttgcatatgg

SEQ ID NO: 10230 - DNA, 751 bp, Macaca Fascicularis
  misc_feature (1)...(751): n = A,T,C or G
tacagacannnnnnnnnnnnnnnnnnnnnnnnntaggatccaaatttcgatacagtggccggactcaagctcagaccaggcaagctagtgctctaattgacaggcctgccccacactttgagcgtacagcaagtaaacgggcttcccggagcctcgatggagnnnnnnnnnnnnnnnnnnnnnnncgaagtcctcggcccacttctnnnnnnnnnnnnnnnnnnnnnnnnnnnnnnnnnnnnnnnnnnnnnnnngcctctgctaaaaaaacagtggtccctaaagcacagaaggaaacagtgaaggctgaagtgaaaaaggaagacgagccacctgagcaagctgagccagagcccacagaagcatggaaggatttagacaagagtcaagaggagatcagaaaacatcatgctagcatcagtgagctgaaannnnnnnnnnnnnnntctgtaccagaaccacggcctagtgaatgggataaacgcttatccactcactcccccttccgaactcttaacgtcaatgggcaaatccccacaggagaaggaccccccctggtgaagacacaaactgtcaccatctcagataataccaatgctgtgaaaagtgaaatcccaacnnnnnnnnnnnnnnnnnnnnnnnnnnnnnnnnnnnnnnnnnnnnnnnnnnnnnnnnnnnnnnnnnnnnnnnnnggagacttggacccaggagtcttgctgacagctcaaactatcacatctgagaccacaag

SEQ ID NO: 10231 - DNA, 774 bp, Macaca Fascicularis
  misc_feature (1)...(774): n = A,T,C or G
agcaggcctggcccgaggtgccaccccctagccnnncngcaggctgtccctcactggggaaagtggctntgttccccatctcctcgccagccgctgatccctacacgggcaggacagatgggcagctgcaaacgagtctggagcctctcatctcccatgaggctcagctggggtctttgtcgctcctgccccagttccctctgggtcccctactaggtgctgtcctgattggcccgttgtcatcccaggggtgactcctggtgatgggagtcagcagtttcaaattcttacactccatggctccccttaccatgaggtggagctggcttccttttccctgtcttcagccctccctgtctccaattcctggcctgggctctccttctggacctttctgtgttgtaattatgtacagaggatggggttggcctggggtggggatgctcgcttttgtcttctgtcctttggttctccttccataatgctcctgtacccagtttatttaaggggacatgcactggaataggaaatgtcccccatatcccttcccgcaccctgctgtgcaccctccaaacccaccttgctctgtgttctcaggcccccctgctttgtctcaccaggacccctacctttcaccttgttcccttccacccctccagttagtccctatctgggtaagggtcttcccttgagctccagggggtggaacccaatgtttacattctcttctgtctctgcccccaccccatgcagcgcttgaggaatcagaaaaga

SEQ ID NO: 10232 - DNA, 675 bp, Macaca Fascicularis
  misc_feature (1)...(675): n = A,T,C or G
tgtgaacaacatggtgaatatcgtttaacagatatggaaagaggagaagaggaagaggaggaagaattaataactgttgttccaaaatggaaagctaccaaaatcacggaattggccttgtggacaccagccctccccaaggagccgacctctacggacggacctggccaagagggtccaggagctgagagtacaggagaacctggggaggaggcccaggctctgctggagggctttgagggtgagacggacatgaggcctggagatgaagatgcagacgtcctccgggaggagagccgggagtatgaccaggaggagttccgctatgacgtggacgagggaaacattaattctgaagaagaagaaactagacagttggacctccaggactaagatgaagtgagccgagaggagactgtcataagaatgcttctgttatnnnnnnnnnnnnnnnnnnnnnnnnnnnnnnnnnnnnnnnnnnnnnnnnnnnnnnnnnnnnnnnnnnnnnnnnnnnnnnnnnnnnnnnnnnnnnnnnnnnnnnnnnnnnnnnnnnnnnnnnnnnnnnnnnnnnnnnnnnnnnnnnnnnncaaaaaatgaacaaaaacaaaatgcttctgtcagttaacaatctttattagaggatttttagtctctctttctcagctgtgtgttaag

SEQ ID NO: 10233 - DNA, 775 bp, Macaca Fascicularis
  misc_feature (1)...(775): n = A,T,C or G
gcaggtgcgaggcatgcacannnnnnncagggacaaggagannnnnnnnnnnnnnnnnnnnnnnnnnnncaagagannnnnnnggctgctcatcgagcacgcgctctccttcctaccctttcaggactgcgttgtgcggaccccgcaggggcaggactacgcgggcaagtgctatgcggggaagcagatcacaggtgtgtctatcctgnnnnnnnnnnnnnnnnnnnnnnnnnccctnnnnnnnnnnnnnnnnnnnntgcgcatcggcaccatcctcatccagaccaaccagcttaccggggagcccgagcnnnnnnnnnnnnnnnnncccaaggacatcagcgatgaccacgtgatcctcatggactgcaccgtgtccacgggcgccgcggccatgatggcggtgcgcgtgctcctggaccacgacgtgcctgaggacaagatctttctgctgtcactgctcatggcagagatgggcgtgcactcagtggcctatgcgnnnnnnnnnnnnnnnnnnnnnnnnnnngcggcggtggagggggtgggtggccctgggaggccccaccacacactgcattgggaannnnnnnnnnnnnnnnnnngggacagacgcggtccccgatggcagtgatgaggaggaagtggcctacacgggttagctgcccagtgagccatccccgtccccgccaccctccttctgcctcctgacccaggattgccgaatacaaagatgttaatttttaaaatgttaccagtataatttattttatgcatt

SEQ ID NO: 10234 - DNA, 829 bp, Macaca Fascicularis
  misc_feature (1)...(829): n = A,T,C or G
cacacagcaatgaaaagtgannnnnagcagcagaatctatttttaatcaactaactagtgaaaatctccaatcaaagacaataggactccatgtaactgaatatgaagacaatttgaagaactcctgggtatggaaagagctatattctgttagaaatataagaccgtcttgccatggagtactgggtgtatatggagggatgatttacactggaatcttttactggatattgagaggaatggagccatggactctgaaacataaaggttctgactttgaacggctcaagccagccaaggattgtacacctattgagtatccaaaacccgatggacagatcagttttgacctcttgtcctctgtggctctgagtggtactaatcatgaacatgaccagccggcacatttaaccttaagggatgacagtatacctgtaaagagaaatctgtcgatatatgatgggcccgagcagcgattctgtcctgcaggagtttatgaatttgtacctgtggaacaaggtgatggatttcggttacagataaatgctcagaactgtgtgcactgtaaaacatgtgatattaaagatccaagtcagaatattaactgggtggtacctgaaggtggaggaggacctgcttacaatggaatgtaaactgcagctaaccagtttctttaaagtatggcaagctaactttaaaatgtttagagattaacagatgtcaaaatgtctttctgcatagtactgaacagaatatacacagaatgattatgaaatacaaattttatactatatctaagattgtcccataaaaaaattatgagtattct

SEQ ID NO: 10235 - DNA, 764 bp, Macaca Fascicularis
  misc_feature (1)...(764): n = A,T,C or G
annnnnnnnnnnnnnnnnnnnnnnnnnnnagggcccctggatctcctccctcaccnnnnnctgctgggaacctagcacacctgaatcagctggacatactgctggagtccagtgctttatttctgtnnnnnnnnnnnnnnntcttcctagcatcatggtaggggaggagccgctggattccccagactgcagcctctctggctggtcttcactttcctcagttgatgtaaaactctgtgccttggccatgatgtccttggactccatctctcaagggaccatctgccnnnnnnnnnnnnnnnnntgaccttagcagcaccctggtctgtggagatggacttaggatccagtgnnnnnnnnnnnaacttctgtggagtttgacaccttagagaagctacccctcaaactgcacatatacacacaaacaatnnnnnnnnnnnnnnnnnnnnnnnnnnnnnnnnnnnnnnnnnnnnnnnnnnnnnnnnnnncagaggggagccatgtggggttgctgcagatgccttgaggtgaaatgagggcaggaaagccacatctnnnnnnnnnnnnnnnnnnnncatgtaaactgagatccttggtaccctaaaaagattgccagttttcttcatctttgtcatatggaggannnnnnnnnnnnnggacagtggcctctgagttcttctgcagttttaacattttaggatttnnnnnnnnnnnnnnnnaaaccttctagcatgttgggtggtatagggtatatttttgtctgc

SEQ ID NO: 10236 - DNA, 828 bp, Macaca Fascicularis
  misc_feature (1)...(828): n = A,T,C or G
tcgagtggtgctgtacttgttatgagagaggcagcagcgcagtgtgtggcatttacatggtacccgggctccacagagtaccgagatgttgctctctgggaccacatttagttcagagaatatggggtccttacttgtattcttttatcagctgatttcaaaacatataataataattttcttgttcccttctttaactagctgcctttagattttgataatcacagtcttaaaatactaggaacaagtggatgggaattgtaggcatagatttcgtatcaagggcatttcaagacagaatttttatttcctgtagtaggcttgttggagcaaaggaaatgtgctgctaaaaatcaacttatgccattttgaaattagataaaatacggagtgccatcctgctaggtgtgtacagaccacaaaaaaatttagttgggaaaatacttgtttttccaaattctggcgttttattacaatcaaagaagagaaaaaagcaaggtattttttcccctcagactctaatatattttagatttgtttctgttttatagatttaattcaacacttccacatagatgtttttatattacatgaatttaataataaactaaacttattttttgtctcctgttattgaaaagtaccaaagcttccttctgttttgtttgtttgattttactatagggttttgccttttctagagatacttttcatttaacagcttttgttaagtgtcaggctacactttgctctgtataattattgttttcagatttcagtttttatgtgtttgtctcttaaggcatnnnnnnatctcataacaagtac

SEQ ID NO: 10237 - DNA, 729 bp, Macaca Fascicularis
  misc_feature (1)...(729): n = A,T,C or G
cataccactgtgactgcatgnnnnnatggccnntnntcnnnnngccagccagttggtgtgggacacaacacagatatacagcagatagcggccaacagctttacagacacctctctcatgtacccagaggacacgtgtaaatctggaccaagtacaaatacacagagtggccttttcaacactcctccccctactccaccggacctcaaccaggactttagtggatttcagcttctagtggatgttgcactcaaacgggctgcagagatggagcttcaggcaaaacttacagcttaacccattttcaagcaaaacagttctcagaaatgtcatgattgccggggtgaaggcaagagatgaattgcattattttctatattttttattaatatttgcacatgggattgctcaaacagcttcctgttactgagatgtcttcaatggaatgcagtcattccaagaactagaaactcaaagctactgtagaaacaaagggttttcttttttaaatgtttcttggtagattattcataatgtgagatggttcccaatatcatgtgatttttttttcctccccttacccttttttgttattttttcagactgtgcaatacttagagaacctatagcatcttctcattcccatgtggaacaggatgcccacatactgtctaattaataaattttcaattttttttcaanncaagtatgaatctagctgattgatgc

SEQ ID NO: 10238 - DNA, 390 bp, Macaca Fascicularis
aggagagccagctgtaggggcgggggcgggcagggaggtatttatttatttattcgcaacagacagcgctaaaagagggggaggccgagccaagaggaccccaggagcccagagcagcgggagaaggtcgttgctagcctcagcccaccgggtcgattcctggctggtgtctgctgagggagtggggggcccagacccttctattctcctccgccaaaccacagtgggagctggggcagggggagagccaggaaatcgggggccaaagatgggggtgcttgcatacagtaagcatatgtagtgccttgtggggtatccaggaacaccctcccagcaggggatggggaccttgtcccatgaagccctatcattagattaacttgatccccc

SEQ ID NO: 10239 - DNA, 791 bp, Macaca Fascicularis
  misc_feature (1)...(791): n = A,T,C or G
tggagcagagcaccaaatgatccgccctggagaggctctgggacggggttgcttgtttttgaacagggtgatgggccctgtggttttctagagcaaagcaaagtagcttcgggtcttgatgcttgagtaacgtgaagaggggagcacgtgccccccgcatccattctctctttctcttgacaacgcggctgtcgtttggctgtacgtgctgacagttttgcaacaggcagaggtgtgtcatacagcagtgctgtgcatcagagccagctgaggacgggcttgcctggacttctgtaagataggattttctgtgttttctgaattttttatatggtgatttgtatttaaattttaagactttattttctcactattggtgtaccttataaatgtatttgaaagttaaatatattttaaatattgtttgggaggcatagtgctgacatatattcagagtgttgtagttttaaggttagcttgacttcagttttgactaaggatgacactaattgttagctgttctgaaattatatatatatatataaatatatataaatatataaatatatgccagtcttggctgaaatgttttatttaccataattttatatctgtgtggtgtttcgtaccggcacgggatatggaacgaaaactgctctgtaatgcagtttgtgacgttaatagtattgtaaagttacattttaaaaaaacnnnnnnnnnnnnnnnnnnnnaaatctgtgcacacaacgaacagtcgcatttcagagagttctctccatttgtaagttatt

SEQ ID NO: 10240 - DNA, 689 bp, Macaca Fascicularis
  misc_feature (1)...(689): n = A,T,C or G
annnnnnnnnnnnngggaaggctgactgctgccctcagctccgcctcatcagctatgtgaaggggtatgtgtggagtgatcctgccgccccctgcctgggctcatccagatatctcaaagtcagatgcccctgggtccacgtaggtggtataaacggatgaaacaggcccttgagttgggagcctgcttcactgtgactttacgtctgttgctggagacaaagacatcgtgatgagagaaagttcnnnnnnnnnagtcggtaacagccacttaccttgagaccaacagagtgtggtggggatgggggcagagcacgggtccccatctgacagtggccgctgccatattcagatgtagctaattgctgtggtgtgggaatacaggcctaatgccagaaatctggagaagccagagatacagatttgtatgcgagatgtcctgattttttaagttgttggcagaaacgaattcagaaatnnnnnnnnnnnnnnnnncaaggtgcagggcccagttttggccccatgcnnnnnnnnnnnnnnnnnnnnnnnnnnnnnnnggggccctggctgctctgctattcagggatgctgggcactgctgctgggtggccagggtgtggggcatgcgcccagcaatgtggctccttggccccgctggacagtgtcctgggcccctgacaggcgctggct

SEQ ID NO: 10241 - DNA, 693 bp, Macaca Fascicularis
  misc_feature (1)...(693): n = A,T,C or G
ctgcacctgccggcgcatnnncnggtggtcgggccccagcagctgcatnnnnagnnnnnnnnnnnnnnnnnnnnnnagaagtacaagcctgtcgtgctcaccgacgatcaggtggaccaggcgctgtgggaggagcaggtcttgcagaaggaaaaaaaggacaggctcgccctgagccaggcccactcgctggtgcaggcggaggccccgagatgaaacccggaggcccccgagtcctggcaaactgcttgcctggggtagtgcagctgtgagcgnnnnnnnnnnnnnnnnnnnnnnagacagatgatgtgcaaagtgttttctcactggatttgcgcaagtttggggagcctttctgccccccgtctttgttctttattagctgaagctaattccgagccaccttggtccaggagttgggacagcagaacnnnnnnnnnnnnnnnnnnnnnnnnnnnnnnnnnnnatgagccttttatataagcctttttcattggnnnnnnnnnnnnnnnnnnnnnnnnnnnnnnnnnnnnnnnnnnnnnnnnnnnnnnnttctaagaccacttagattctctttttaaagtttgggttgtggcctggcgtggtgatgcacgtctgtaatcccagcattttccaaattgagnnnnnnnnnnnnnnnnnggccagcccgagtaacatagcaagactccgacg

SEQ ID NO: 10242 - DNA, 712 bp, Macaca Fascicularis
  misc_feature (1)...(712): n = A,T,C or G
agatgcgcaaagcanncannnnnagtgcaacntnnngcccgcacaaggctgcccatgatgtacattgacgactgnctcagggccacnntggaggtcatggaggccccggccgagtccctctccatgaggannnannnnnnnnnnnnnnngagcttcacacccgaggagctggcccaggaggtcctcaagcacgtaccggaattccagatcacatacaacgtggatgccgttcggcaggccatagcggatagttggccgatgaaatttgatgannnnnnnnnnnnnnnggactgggggtggaaacatgattttgatcttccagagttggtgactaccatgttgaacttgccatggttctgaaaccagagttgcccaagccaactgaaagaatctgaaagaggagctcctgtgtcctcgtccactgtcaaaggagaactgtcacgactccaaggttatagactccaaggagcctacattatttggaactgactaattggactaaattttggcagctcatannnnnnnnnnnnnnnnnnnnnggagtttaacatttaagcannnnnnnnnnnnnnnnnnnatggtggggggacttctcagtttttnnnnnnnnnnnnnnnnnnnnnnnnnnnnnnnnnnnnaataaggcttaagtcatcattagtttccatttccttaattaggatgaagtgaccatttctgggacgaagggagt

SEQ ID NO: 10243 - DNA, 740 bp, Macaca Fascicularis
  misc_feature (1)...(740): n = A,T,C or G
ccatggtaaagttttacagcattaccaggagagtgacaagggtgaggagttaggacctggaaatgtacagaaagaagtctcatcttcctttgnnnnnnttatcaaggagacaactcgagagatgatcgctcgttctgctgctaccctcatcacacatcccttccatgtgatcactctgagatctatggtacnnnnnnnnnnnnnnnnnnnnnngtactgtggactttgtgattccatagtaaccatctatcgggaagagggcattctaggatttttcgcgggtcttgttcctcgccttctaggtgacatcctttctttgtggctgtgnnnnnnnnnnnnnnnnntcgtcaatacctatgcactggacagtggggtttctaccatgaatgaaatgaagagttattctcaagctgtcacaggattttttgcgagtatgttgacctatccctttgtgcttgtctccaatcttatggctgtcaacaactgtggtcttgctggtggatgccctccttactccccaatatatacgtcttggatagattgttggtgcatgctacaaaaagaggggaatatgagccgaggaaatagcttgtttttccggaaggtcccctttgggaagacttattgttgtgacctgaaaatgttaatttgaagatgtggggcagggacagtgacatttctgtagtcccagatgcacagaattatgggagaggaattgatttctatacagtgtggcgcgc

SEQ ID NO: 10244 - DNA, 772 bp, Macaca Fascicularis
  misc_feature (1)...(772): n = A,T,C or G
aaaacctgcagttccaccgcttctggtctgtggatgacacgcaggtgcacacagaatatagctctctgcgatccattgtggtggnnaactatgaagagtccatcaagatgcccatcaatgagccagcgcctggcaagaagaagtcccagatccaggaatatgtggactacaacgggggcgctggggtccagcacatcgccctcaacacccaagacatcatcacagcgattcgccacttgagagagagaggcatggagttcttatctgttccctccacgtactacaaacaactgcgggagaagctgaagacggccaagatcaaggtgaaggagaacattgatgtcctggaggagctgaaaattctggtggactacgacgagaaaggctacctgctgcagatcttcaccaaaccggtgcaggaccggcccacgctcttcctggaagtcatccagcgccacaaccaccagggttttggagccggcaacttcaactcacttttcaaggctttcgaggaggagcagaacctgcggggcaacctcaccgacttggagaccaatggggtggtgcccggcatgtaagccccgcccactgccctccccacggaggccccgcccacccgcagacacagccacgccctctgattctggaactcgcccaacttccctactggctgctccccttgggtcccgcccaccagtagactcggcccccaaggctccgcccaccatgaccacacccctcggcgggccgccctctgctccagccctccgga

SEQ ID NO: 10245 - DNA, 758 bp, Macaca Fascicularis
  misc_feature (1)...(758): n = A,T,C or G
gagtatactgcagaggacatgctctatcagtaggtcctgagggcgccaggggctcaactgaccaagtaacacagaagtgggggtgtgtggcctttttgcttaggaaactgcacgtttcggaaagtttgtgtttttctcctactgcccattatttgaagaatagagagcctgtagggatggccttattttggtccacaggactaacgtgaagtcacttgggaaggggagacaggaggagcggcgtctgtgtcgggaccccgggcctgcagacgggtggtgtgctcccaggactggcatgacaggtgtctcctcaccacaggctgtgcccatgagtccctgtgcagaccagtgggcaaggcagctgagccagatctcgggccagtcgtttgtgttcctgnnnnnnnnnnnnnnnnnnnnnnnnnnnnnggtccctagagagcctcatggattgtaactaaagaagaaacggttcctttttgtttttttttaaatgatttttaaataccattttttacaccgttctctcggtacttttttttaagctgagtcagcattgtcttccagtgttaaaggcatccctcacttctgcattgaacttacgtatccatgccaaggaatggaatttcnnnnnnnnnnnnnnncaattaggtgtcaattgatactattttaattttttatgcaatctgataagtagatgagctcagatttaaaaatctcaaaagcacgtttattgtaacaagaattgttatgtattaata

SEQ ID NO: 10246 - DNA, 753 bp, Macaca Fascicularis
ggcatgcagggctcggcaggggcaagaggccccgcaggccctaagggagatcgtggcgtccctggtgagcgtggagcccctggaaatgcaggggcagcagggtctgctggagtcatgggtcctcagggaagtccaggtgccaggggacccccaggattgaaaggggacaaaggcgttcctggagacaaaggagcaaagggagaaagtgggcttccagatgtcgcttctctgaggcagcaggttgaggccttacagaaacaagtacagcacctccaggctgctttctctcagtataagaaagttgagctcttcccaaatggccaaagtgtcggggagaagattttcaagacagcagggtttgtcaaaccgtttacggaggcacagctggtgtgcacacaggctggtgggcagttggcctctccacgctctgccgctgagaatgccgccttgcaacagctggtcatagctcagaacgaggctgctttcctgagcatgactgactccaagatggaaggcaagttcacctaccccacaggagagtccctggtctattccaactgggccccaggggagcccaacgatgacggtgggtcagaggactgtgtggagatcttcagcaatggcaagtggaatgacagggcttgcggagaaaagcgtctcgtggtctgcgagttctgagtcaactggggtgggtagggcagtgcttggcccaggagttggccaggaagtcaaagcttagaccctcatgctgcc

SEQ ID NO: 10247 - DNA, 722 bp, Macaca Fascicularis
tagttatgagccagagttatttcctggtttaatctacagaatgatcaaacccagaattgttctccttatttttgtttctggaaaagttgtattaacaggtgctaaagtcagagcagaaatttatgaagcatttgaaaacatctaccctattctaaagggattcaggaagacgacgtaatggctgtcatgtacccttgcctcccccacccactgtttgtttttttttttttttaaacaaatcagtttgttttggtacctttaactggtggtggtgtgagaagatggatgttgagttgcaggttgtggcaccaggtgatgcccttctgtaagtgcccaccgcaggatgccgggaaggggcattatttgtgcactgagaacaccgcgcagcgtgactgtgagttgctcatactgtgctgctatctgggcagcgctgcccatttatttatatgtagattttaaacactgctgttgacaagttggtttgagggagaaaactctaagagtgaaagccacctctacaattgattggactttttaattttaatgtttttccccatgaaccacagtttttatatttctaccagaaaagtaaaaatcttttttaaaagtgttgtttttctaatttgtaactcctaggggttatttctgcgccagacacattccgcctctccagtattgcaggacagaatacatgtgttaatgaaaatgaatggctgtacata

SEQ ID NO: 10248 - DNA, 990 bp, Macaca Fascicularis
  misc_feature (1)...(990): n = A,T,C or G
acctccatccnntggnnnnnnnnnnnnnnnnnnnnnnnnnnnnnnnnnnnnnnnnnnnnnnnnnnnnnnnnnnnnnnnnnnnnnnnnnnnnnnnnnnnnnnnnnnnnnnnnnnnnnnnnnnnnnnnnnnnnnnnnnnnnnnnnnnnnnnnnnnnnnnnnnnnnnnnnnnnnnnnnnnnnnnnnnnnnnnnnnnnnnnnnnnnnnnnnnnnncacgcccagccgagatgtgtcttatcccaatcctttggcaggcatgcagctccacaggcaatttcttcaagcagctgaagtgtttagctctcccgggttaagagccagataaggagaaatccctttcctaggtttggaatgtgttgtgaaaaagaaatccctggctcctggagctggtgggagacaagattaagcaaacctccccccacgtgtatccctttgaccccaagctctgcctcctccctgaccacccatgccctttcctttaacttctcaaatagataccagggcctaaactgctttacctccccacctactctgtcaggttagggggtgggaggtcacccatctctgaattaaaccaatgcaatgtgagtaaaacaaggtcatgcgggtatgtcgggggtagagagaggggtagcaagttcatgtggcctctttggtcacatgtctcccaaagctctgacccctgccattggaactggacaggagacatgaggtcatgacctgcaggcacctttactgcagctctgcaggcctgggtggggatgggggggaggaagaagtatgcactgcacatttctgagcctacagcatttgctttcaaggcagaaatcttgctctgagcagtcagcggctccagtttaggcccgatgaggaagctctccgtggcctctcccaggcagagcagggaggaggctgacattgccagtctcttctggggcccaaggcaggttgcaggagctccaatcccgtagacagctctgggcctcttgcat

SEQ ID NO: 10249 - DNA, 745 bp, Macaca Fascicularis
  misc_feature (1)...(745): n = A,T,C or G
gccagcagccccnnnnnnnnnnnaagnncggccggaccacccggggcctcaggaagcccgaggtcggcggtgtgatccggaccatcgtgcgggcaggcctggccatgcccgggcccccactaggcccagtgctgggtcagagaggtgtttcnnnnnnnnnnnnnnnnnnngagttcaatgagaggacaaagnnnnnnnnnnnnnnnnnnnnnctgcctaccaagannnttgtgaagnnngacaggacatttgaaannnnnnnnnnnnnnnccactgtttcctacttcnnnnnnnnnnnnnnnggaattgaaaagggggcccggcaaacagggaaagaggtggcagnnnnnnnnnnnnnnnnnnnngtgtatgagattgcctgcatcaaagctcaggatgaggcattcgccctgcaggacgtacccctgtcctctgttgtccgctccatcatcggatctgcccgttctctgggcnnnnnnnnnnnnnnngtcctcagttcagaagaacttgcagctttccagaaggaacgagccatcttcctgtctgctcagaaggaggcagatttggccgcccaggaggaagctgccaagaagtgacccttgccccccttctnnnnnnnnnnnnnnnnnnnnnnnnggaagggggccagttgcaaaggctgtgccccaggggaggaaggaggtcacaccagtatgatgatggttttcgtgactttgaatgatgtatttttgtacatttagctgta

SEQ ID NO: 10250 - DNA, 752 bp, Macaca Fascicularis
  misc_feature (1)...(752): n = A,T,C or G
cagaaagaggagcagctgcccagctatgatctgtatgctgtcatcaaccactatggaggcatgattggtggccactacactgcctgtgcacgcctgcccaatgnnnnnnnnnnnnnnnnnnnnnnnnngggctnncgcttgtttgatgacaagcacggtgacaacggtagacgagagccaggttgtgacgcgttatgcctatgtactcttctaccgccggcggaactctcctgtggagaggccccccagggcaggtcactctgagcaccacccagacctaggccctgcagctgaggctgctgccagccagggactaggccctggccaggcccccgaggtggcccccacgcggacagcccctgaacgcttcgccccccctgtggatcggccagcccccacctacagcaacatggaggaggtggattagcaggtccctggctgatgggggggactgggtttgggacacccaccacagagggccagctccttnnnnnnnnnnnnnnnnnnnnnnnnnnnnnnnnnnnnnnnnnnnnnnnnnnnnnnnnnnnnngatttgggtgtggcgacctctcaggttgggacttcttgttagcttggacccctgaccagtgggctttggcttctctannnnnnnnnnnnnnnnnnnnnnttgattctgttgtaccttcaattctttctgacccgctattataaacattataattttattctaaaaattgtaattttttttgcattttggaagtgattgctgc

SEQ ID NO: 10251 - DNA, 747 bp, Macaca Fascicularis
gcaggaagtccattctggctctggtggatggacagccttgggacatgtataagcctttaacaaagtcgtgtgaaattagatttcttactttcaaagatcgtgatccaggagaagtgaataaggcttattggcgttcctgtgctatgatgatgggttgtgtgatagagagggcattcaaagatgaatatatggtcaatttggtcagagctccggaagttcctgtaatttctggtgccttctgttacgacgtagttttggatagcaaacttgatgagtggatgccaacaaaagagaacttacgttctttcacaaaggatgctcatgctttaatttataaagatcttccatttgaaactctggaagttgaagcaaaagtggccttggaaatatttcaacacaacaagtacaaaatagatttcatagaagagaaggcatctcagaaccctgagagaatagtcaagctacacagaataggtgacttcattgatgtgagtgagggccctcttattccaagaacaagtatttgtttccagtatgaagtgtcagcagttcacaatcttcaacccacccagccaagtctcatacgaagattccagggtgtgtctttacccattcacttaagagcacattttacgatatgggataagctattggaaagatctcggaaaatggtaactgaagatcaaactaaaccaacagaggaatgtacatctacctaataactttctaaaacttaaataagttaat

SEQ ID NO: 10252 - DNA, 736 bp, Macaca Fascicularis
  misc_feature (1)...(736): n = A,T,C or G
gcgctccctctcacggaagggccgagcacgctgccacngggtgctgcagctgctggccctgctgtgtgcactgctgggnnncggccttgtcatcctccacaaagagcagcttggcaaagcccacctggcnnnnnnnnnnnnnnnnnnnnnnntgctggctgtgctgtgggcagggctacaatgctcaggtggggtggggctgctctaccccaagctgctgccccgatggcccctggcgaagctcaagctataccatgctacttctgggctggtgggctacctgctgggtagtgccagcctcttgctgggcatgtgctcactctggttcannnnnnnnnnnnnnnntgcagtctggtacctggctgcactatgccctgtcctcaccagcttggtcattatgaaccaggtgagcaatgcctacatataccgcaagaggatccnnnnnnnnnnnnttcccagcataggggaagaaaggatttgcccctcccagtaggagaaggggatagggacctcttgaactctctcagctgagtcaggggacacctcaggcactgggacagttgggcatttggaggcccatatgtgaattcctgctcatcatgaaggagagcctcccatttccttcccctatatccatcatcccagaggaaaannngnnnnnnnnnnnnnnnnnnnnnantagagtctgcaannactgtctcccctgcaaggcagctcatacttgtactgtatgtct

SEQ ID NO: 10253 - DNA, 743 bp, Macaca Fascicularis
  misc_feature (1)...(743): n = A,T,C or G
tgcaaagcaggttaaacttgctcctttataaacagatgttgggttaatagcatggtttattctattaaagacttatacacccattttnnnnnnnnnnnnnnnnnnnnnnnnnnnnngtagcttcacaatgtttcaagtggcttacttcaagaaatcttgtacttgacaatacacnnnnnnnnnnnnnnnnnnnnnnnnnnnnnnnnctaaagagtcaaagggcccatcttagtattacacagctgacttgagcccttcaaaactggcatcttaaggcccaatcaagatccacatatcctgactttgatctttgtgcaagtgggactgtaagtgcaagactaaaataaattatagcagacttttaagaataactttccattttcaaacagtatacattctgtgggccaaagggctatttcttgaagaggcatgtaaatgtattcatctaatgtttttttccccacgtaaacttgatattcaaggtttaatatttgctcctttcatattttcacacatnnnnnnnnnnnnnnnnnnnacctttcaacatctccataaaattaaacaccttttggagaaaagatccagtattttctgctcaaaggtttcacctacttaaagtggatgtgttaaaaatctatgtgannnnnnnnnnnnnnntttctctcaaaactttccttcaacgccatggannnnnnnnnnnnnnnnnnacacttaaggtactttcccattaatcatctggttat

SEQ ID NO: 10254 - DNA, 702 bp, Macaca Fascicularis
  misc_feature (1)...(702): n = A,T,C or G
cagctcaaagcaaccagctccctgaccacagggctgctcctcagnnncctggtgttattggtcctggtgatgcttggtgccagctactggtaccgtgnnnnnnnnnnnnnnnnnctctgccagctcaagggacccacttgccagtacagggcagcccagtctggtccccctgaacggccaggacctccgcagagggccctgctggcacgaggcactaaggctgagctggctgaccgacccaatccccctacccgccctctnnnnnnnnnnnnnnnnnnnnnnngcccgaagtctcagggaccagccaagcccccacccccaaggaagccactgcctgccgacccccagggccggtgcccatccggtgacctgccaggcccaggagctggaatcccgcccctagcgctaccctccagaccagcgccaccgcctccgacagtgtcctcgctctacctctgacctctctggaggttctgctgcctccaaaccggacttaggacttcaagaggggggcgtgccctctggagtcccctaccatgactgaaggcgccagaggctggacgcggtgtcttaaggctccaggcaccgccacgcgctgtcaagcagcactctagggaccggcggcgtagttgcagctggggtttggggaggggctgggggttggaaggggttgagggaggtccgcacagccttctctgctca

SEQ ID NO: 10255 - DNA, 744 bp, Macaca Fascicularis
  misc_feature (1)...(744): n = A,T,C or G
accagctgcccaagatgctgtannnngagtaccacaaggtgcatcagatgatgcgggagcagtccatcctgtcgcccagcccctacgagggttaccgcagcctccccgggcaccggctgctgtgcttcaaggaagactgccaggccgtgttccaggacctcaagggtgtcgagaaggtgtttgaggtctccctggtgctggtcctcatcggctcccaccccgacctctccttcctgcctggggcaggggctgactttgcagtggaccctgaccagccactgagcaccaagaggaaccccattgacgtggaccccttcacctaccagagcacccgccaggagggcctgtacgccatggggccgctggccggggacaacttcgtgaggtttgtgcaggggggagccctggctgtggccagctccctgctcaggaaggagaccaggaagccaccctaacacccggccagacctgctggctcccaggccctgagaggacaaagatgaccacatctctgctggatgtagggtccgtccaaagatgccccagggaggggcgtcagcccacatagctgacctttggggtcaagaggagtagggatcccagtgtctgaggtggtaacagtggccgcaggccagggtcggcctagacctaggatttgggggtaaagctgctggtgtgagctgggatcaccaggaccagctgagcacccagcaggagacctgcaggcctgcgcctccagaagca

SEQ ID NO: 10256 - DNA, 760 bp, Macaca Fascicularis
  misc_feature (1)...(760): n = A,T,C or G
cagctgaatgtgttgtgtgcagggnnnctgccgtgnnnnnnnacgtcaacatgtacgtnnnnnnnnnnnnnnnnnnnnnnnnnnnnnnnnnnnnntattataaaattgtaaagcctctttggacttctttcatccagnnnnnnnnnnnnnnnaaactcctgtcagtgatagtatggatgctcatgctcctccttgctgttccaaatattnnnnnnnnnnnnnnnagtgttagggaggttacaaatataaaatgtatagaannnnnnnnnnnnnnnnnnnnnnnnnnnnnnnnnnnnnnnnnnnnnnnnnnnnnnnnnnnnnnnnnnnnngtgtttcttttgttaatcgtcttctatactgctatcacaaagaagatctttaagtcccaccttaagtcaagtcggaattccacttcagtcaaaaagaaatctagccgcaacatattcagcatcgtgttcgtgttttttgtctgttttgtaccttaccatattgccagaatcccctacacaaagagtcagactgaagctcattacagctgccagtcaaaagaaatcttgcggtatatgaaagaattcactctgctactatctgctgcaaatgtatgcctggaccctattatttatttctttctatgccagccatttagggaaatcttatgtaagaaattgcacatcccattaaaagctcagaatgacctagatatttccagaaccaaaagaggaaatacaacactgaaagcatagatacttnggagtcctac

SEQ ID NO: 10257 - DNA, 1062 bp, Macaca Fascicularis
  misc_feature (1)...(1062): n = A,T,C or G
ctccaccaccnnnnnnnnnnnnnnctccgggggttcnnnnnccaccggccacccccnnngcagcaccncnggnnttcccaccgcctccatctcaggccgccccggacatgagcaagcccccgacagctcagccagacttcccctatggtcagtannnnnnnnnnnnnnnnnnnnnnnnnnnnnnnnnnnnnnnnnnntcggaccccagccagcagcctccctcctacgggggcccctccgtgccagggtccgggggcccccccgccggtggcagcggctttggacgagggcagaaccacaacgtgcaagggttccacccctaccgacgctagcccgcggcgccgcgacgcctgcacggccgacccaggattccaaacttgggaactcgtgacaatcacannnnnnnnnnnnnnnnagcgactcaaccttggggggcgggggggcgcgaggcttttggagcggctgtgggtgtcgtctggactgaggtttttaaatatttctttctctaacccatcagcacaataaaaaaaagtcactggttcaacaacagggtttaaaaaaaaatgtcttcagctttaattcaaaacttcaggtttctttttcttccttttttttggaaattattttcttgagccttttgttttacggtatattgtaaacttttatgttaaagaaaaaatatacatttacaaattgtgagatttttaagagaaattttctacaatgtatactggcttattttttaatttaaaacagggtttccgtcggcactggtggaggggggtgcgctgttagtctcctcgctcctggctttgggggttgggacttggtggtccagaaactctgggagcttcaagaagaaatctactgagtgtgtttctgttttttgtttaattccttgcttttgtcaactgacctgcttggtagtgtctgaggtgaactgtgggggttgcgcacagccagccacgtggatcccacggcagcgccgaaccggaaccgagtaggaagccgttctccccaggcacgtggcttcagggcgtttcccattgaccagttgacccc

SEQ ID NO: 10258 - DNA, 735 bp, Macaca Fascicularis
  misc_feature (1)...(735): n = A,T,C or G
taaaaaatataggatttgattctacagttcttcttgactttttgatttcatcagaaacctgtnnnnntgaatattttgttagatatttaaaattactgcaaaaggactgggataattnnnnnnnnnnnnnnnnnnnnnnnnnnnnnnnnnnntctaaatatgacataagtatttgtgactgtgtcccctcacttgtccaagaccaaagcaccaaccgaacaataccccatcatttgactgctcctcatagtcacatagatgtgtgtactcggcactcctgggcttccgatgctccctctgaaccacnnnnnnnnnnnnnnnnnnnngggactgacaccatgtgtacttctagtctgtcttccccccgggcctctcaaagtctggtagattacgacagcnnnnnnnnnnnnnnnnnnnnnnnnnnnnnnnnnnnnntagctaacagtaaacagacatctttacaccaacaagcaactatggagattcaggatgcagctgggacaagcagagataaagaagaatttagccttgagcctccatcaaggcctctgtttctgaaagaatttgatactgccttctcctttgattgtgaagtagccccaaatgatgtcgtctctgaagtgggaatattttacacaatagtaaaatgcttccaggaactacaagatgccatctnnnnnnnnnnnnnnnaaaatcttttcccatataatccaactgcacttttgaagttgtaaa

SEQ ID NO: 10259 - DNA, 679 bp, Macaca Fascicularis
  misc_feature (1)...(679): n = A,T,C or G
gattccaaaatgnnnnngaacgatttcatcagtatggatcccgaggtaggatggggcgctgtctacacactatccgaatttacacatcggtttggcagtaaaaacggttaaacttggcctcaagatgtggaactgtggagaaattctaggacatgaacaagctatcccttcatcgaggacagcaaacattatggtacagttggcttggaattatgtctttctcttttaatttgattgagtggaaatctgagtgaatacaaatataaatgaacaacataaaaacttttgttttgacatgtcaaattgaaacttgatatagtgtgtacttgctaagatattcctgtggctcatttgttaaaacacgaggacttaagccagtaatcgtttttgttcagatagaggtgtggaggtagagccaacccctcatgtctgttctggatgttttgtgtctttccagctacactgtaagctccttgagggcagggccatggcccattgctctgtgaatctcaaatgcccgtaaaaggtgcccataaaatgttttcttgaacatttcaatgtgctgttgtttggaaaggggtaatattgtgagctgaatcagcaataagtattagtctttttggactatggtattgttaaaaagtttgcagccctctcagatttgagtgttacttggttt

SEQ ID NO: 10260 - DNA, 767 bp, Macaca Fascicularis
  misc_feature (1)...(767): n = A,T,C or G
gctgccactgctcaagccccaggtgcgctacagctgnnnnngccgggaggacgtcagtggcatcgcnnnnngcgtcttcaccaaatatggccaaggcttctacctgatctcaccctcggagttcgagcgcttctctctctccaccaagtggctggtggagccccggtgtctggtggattcagcagaaaccaagaaccaccgccctggtaacggggcaggccccaagaaggtgccgagccgagccaggaactcagggactcagagtgatggcgaggccctgggcttccacatcccgacctcagtaaggagagagccaggccgaggagggcccaggcggggctccctgacccggcctctaccttccagagaagcagcccggcttggtgatggagnnnnnnnnnnnnnnnnatgannnnnnnnnnnnnnnnatccagagcacactggagggagaccgcnnnnnnnnnnnnnnnnnnnnnnnnnnnnnnnnnnnnnnnnnnnnnnnnnnnnnnntggccttttggaggtccctgccccagccggagaggccggtgcacagggccacaccaggggataggggcgccccggcttccacaatgcagctgctccaggcctcgggagaggagaggccccggcccctggggctgccctttccgggtctcgtctgtctgggtcctttggtcaatgttgcacagtttttattgcccccatccctttttgtagtgggctggggtttaagttatacatggtaactgcctctggggaaaaag

SEQ ID NO: 10261 - DNA, 765 bp, Macaca Fascicularis
  misc_feature (1)...(765): n = A,T,C or G
cccagacttctcttgaacacaaatgcattagccttgtggctagaacatcctcttcctacctctgtctcccctcacttgtcatatgctatgacatgctaacatttcttttgttcatctctgttgccaccacagaaagatgccagaaaaaccggtcagtgttcctccctgatgcttaggtttctgagatagggttctgttacatcctctttgatagcctatttaaaatattnnnnnnnnnnnnnnnnnnnaaatgcattcttccacattgataatttagtaaactgagaacannnnnnnnnnnnnnnnnnnnnataagaggttgcttacctgtggtannnnnnnnnnnnnnnttgaagttgctgtcatgtacattgannnnnnnnnnnnnnnnnnnnnnnnnnnnnnnnnnnnnncactttctacccttgtatgagatttacaaacttttctccagggtgtgtatcatggccagagggatactatagggttggtttatactgcaatatagaggaagaagccatttgatttggtaggtgtgtcagaaggaagaatgannnnnnnnnnnnnnnnnnnnnnnnnnnnnngatacccatgctaaaatgcaattacatcctcatgtttatcccaaactaattttggactttcccactcattagctttgtttcacctttatttcccttgaaggttcaattaagttcaaccatatnnnnnnnnnnnnnncagttgcagtggaatcttgtnnnntnncaaagnagggaccccccc

SEQ ID NO: 10262 - DNA, 698 bp, Macaca Fascicularis
  misc_feature (1)...(698): n = A,T,C or G
gagcttcatggtggagaagggccccaccctgggcagtatagagacgtcggacttcacgaaaagacaactggcagcgcagagtttagcgttcaatttnnnnnnnnnnnnnnnnnnnnnnnnnnnnnnnnnnnntgtggaggaaattaaacaaaaacagaaagcacaagacgaactcagtagcaaaccccagacnnnnnnnnnnnnnnncgtggttccagacggggagacgcacctcgtacagaatgggattcagcttctcaacgggcatgcgccgggggccgtcccgaacctcgcggggctccagcaggccaaccggcaccacggactcctgggcggcgccctggcgaacttgtttgttatagtcgggtttgcagcctttgcgtacacggtcaagtacgtgctgaggagcatcgcgcaggagtgaggcccgggcgcccagacccaaggcgccagcgagggcaccgcgcgccagagcgtgacctgggcaggctggacacactgcccggcaccggcggacccaccaggctcctgggttgagcgtttaaaagcctgaaaggggaagcgaaaaccaaaatgtgtgacccggctttggaggagacccgagactcaggcctgccccggcctcgcgccgctggggccggcgtggatgggccgctcgtgcgctgggtttgtagcttctcttcnnntgttgtctttgg

SEQ ID NO: 10263 - DNA, 702 bp, Macaca Fascicularis
  misc_feature (1)...(702): n = A,T,C or G
gcggccgatgagaagaagaaggggcccaaagtcaccgtcaaggtgtattttgacctgcgaattggagatgaagatgtaggccgggtgatctttggtctcttcggaaagactgttccaaaaacagtggataattttgtggccttagctacaggagagaaaggatttggctacaaaaacannnnnnnnnnnnnnnnnnnnnnnnnnnnnnnnnnnnnnnnnnnnnnnnnnnnnnggggagatggcacaggaggaaagagcatctatggtgagcgcttccccgatgnnnnnnnnnnnnnnnnnnactacgggcccggctgggtgagcatggccaacgcaggcaaagacaccaacggctcccagttcttcatcacaacagtcaagacggcctggctagatggcaagcatgtggtgtttggcaaagtgctagagggcatggaggtggtgcggaaggtggagagcaccaagacagacagccgggataaacccctgaaggatgtgatcatcgcagactgcggcaagattgaggtggagaagccctttgccatcgccaaagagtaggacccagggacctctttctttgagtgaccgtctgtgcaggccctgtagtctgccacagggccctgagctgcactggccccagtgctggcatctggtggagcggacccattcccctcacattccacannnnnnnggactcagttt

SEQ ID NO: 10264 - DNA, 753 bp, Macaca Fascicularis
  misc_feature (1)...(753): n = A,T,C or G
atgaatatnnnnngccnganncatccagnnngcacnnnnntatagctgcccagcacactcgactgttcatgtggtctctttgtagtgtgagtttggagtgtcctattagcctgttctggttaggaatgagtaacggctctttccctcgaccttagtctagtcccagggctgaggattcagctggatccacatggtcttgagggttggcatggggagggggaagctttttttgaatcactttttgatcacataatctgccattttaagagtaagatttgctttatggaatcaattcattaataaaaaatgatattcaagttgcaataccatttcacagtgaaatattttgagtacgattttgttgctagaatagtcatgggcaagagttttatgcaaaatgtttcaattatgttaataaataagacaatgctacaagagtcttgtgtcttgctcaagaaccttctctgtgagttgcagcattaatcactttttcttcataatcttacttgacaggagacaacagttgtaaaaatgtatgtagaacaagcagtttcctgcctggttcagctgatgccacatgtgtaatataaaagtatgtacagccacatccaaggatgataaagggaagaataattagcaaatttgtaaattgtgtctccattttcttagttttaaaacattaaatcttagatcttgataatctgcatagtccagtgttggttaactttggctcctcaatgaaattagtacttt

SEQ ID NO: 10265 - DNA, 701 bp, Macaca Fascicularis
  misc_feature (1)...(701): n = A,T,C or G
gtcaatgtgttnnnnnnnnnnnnnnnncggacanntctggggaggcacatacacattnnnnnnnnnnnnnnnnnnnnnnnnnnnnnnnnnnnntgggcttttttcaaaactccagtagaaggtgcccagacttccatttattnnnnnnnnnnnnnnnnnnnnnnnngagtgtcaggaagatactttggggattgtaaagaggaagaattattgcccaaagctttggatgaatcnattgcaagaaaactctgggatatcagtgaagtgatggttggcctgctaaaataggaacaaggagtaaaagagctgtttataaaactgcatatcagttatatctgtgatcaggaatggtgtggcttaagaacttgttacttgaagaaaaagaattttgatgttgcagtagcactgctaagaggtacatgtggatattttggagttactgaaaaattatttttgggataagnnnnnnnnnnnnnnnnnnnnnnaaatatatatagtaagtataatgaataataagcacaatgaaaaatacaattatattgtaaaattataannnnnnnnnnnnnnntgacatattaatatttgtcagaattaagtcactcaaagtgctatcaagaggtttttcaagtatttttgagtttcatggccaaagtgttaactatttttactacgatgtttggtgtttgtgtggaaataatctg

SEQ ID NO: 10266 - DNA, 781 bp, Macaca Fascicularis
  misc_feature (1)...(781): n = A,T,C or G
gctctgctannnagatnnctcccacctgaccgtgctaactgtgtgtacatatatattctacatatatgtatattaaaactgcactgccatgtctgcccttttttgtggtgtctagcattaacttattgtctaggccagagcgggggcgggaggggaatgccacagtgaagggagtggcagaatcaaattgctacatagtccaaacaaaaaagaaagctttttcaaaaaacatttaattcacatgcagtctcagagactatttagacaaagttgaagttaggagctttcaggatgtgagagtaaaactttaatgggaggggnnnnnnnnnnnnnnnnnnnnnnnnnnnnnnnnnnnnnnnnnnnnnnnnnnttaactcctagcccagcctagcgtgtcctgcccctctggccactgctgcagacacctgccttannnnnnnnnnnnnnnnnactccacagttttgccttaaaggaccttcccaagtctccctttccctgtctggcttctcccttaagaagagagagatacttgtagaattgggtgggaggaatgagcataaactgtccttccatttgggatacgttacattagaaagagagagaataaggagcctttcttatggaagaaatgggagaagagagacagggttattttcagcagagtctagtagtttctctgtaaggcaaaataatctaaaaagactaacctgcccacccactccttatattgctgtgagattgcccctatcttgtgctcttctgtctgcagtgtgcacggcct

SEQ ID NO: 10267 - DNA, 657 bp, Macaca Fascicularis
ggtggccactctaagagagaaacctgaaaaccccatctgctgtcttttctcccatattggcatggatttctgtcttctctaacaccttgtgaccttctctatatcatgctttaaagtgtaataatatgattttttaaaagaaatttattacttgttgcaaaggtctttttaaaccagtttagatttcaagaaaaaataaatggaaatcattggaaattcatttcacattaatggtctgaaaataaaccaaaggacattatgtgtgcatgtgtgtataagtgcacacagaaatatatatacatatgtagactatatacatgtgtgtatatatgtgtatatatacatacacttgtataaatgtatatacacatatacctataatgtgtgtatgtgtatttattgaagaaacagataccatattcatctctaaaataatattcagagaatatcaagatgattctggttgaagaaaaaggccagtggaaattcaggtgaaaatattcagcgattcccattgcatcacctctgtaattttgcagctctctgtataaacattaaatgtcttatatagcagcaaaaatataaaatagttgtccatattttcacaggtgtggtgtaatttataaaattagaaagcaacatatcagcttcttaaga

SEQ ID NO: 10268 - DNA, 717 bp, Macaca Fascicularis
  misc_feature (1)...(717): n = A,T,C or G
agccgctgccgccgcctcatcgtggtgcnttnngacgccntnntgannnnnnnnnnnnnnnnnnnnnnnntccgggagggcctgtgccggctgctggagctcacccgcagacccatcttcatcaccttcgagggccagaggcgcgaccccgcgcacccggcgctccgcctgctgcgtcagcaccgccacctggtgaccttgctgctctggaggcccggctccgtgactccttcctccgagttttggaaagaactacagctggcgctgccgcggaaggtgcattacaggccggtggaaggagacccccagacgcagctccaggacgacaaggaccccatgctgattcttcgaggccgagtcccggagggccgggccctggactcagaggtggacctggaccctgagggagacctgggtgtccgggggcctgtctttggagagccatcagctccaccgcacacgagtggggtctcgctgggggagggccggagcagtgaagtggacgtctcggaccttggctcgcgaaactacagtgcccgcacagacttctactgcctggtgtccaaggatgatatgtagctcccaccccagagtgcaggatcacagggacagcgggggccagggctgggggatcgctcctctgctcagcaggaccacaccccctgccagcagccctgggaccctgggggaaaaggctgtggcctcaggggtgcctcc

SEQ ID NO: 10269 - DNA, 750 bp, Macaca Fascicularis
  misc_feature (1)...(750): n = A,T,C or G
atcagcttcaccttcacacccatctnnnnnncgctgcgattctttccttccacctggtcctgtctctattcttccaaggaagnnnnnnnnnnnnnncctctgatctgcatttcccatcatctttgcctgctcagcctcctgtcnnnnnnnnnnnnnnnnnnnagctaatagtggcttaagaggagtgggcaggtccatgtgcttcccaacctggctcctccttccattcctgtgcattgcctcttttttctggctgnnnnnnnnnnnnnnattccatttcctcaatcacattgccctatctcccttcatgggctctcttttctccctccccacggctgttnnnnnnnnnnnnnnnnnnnnnnnnnnnnnnnnnnnnnnnnnnnnnnnnnnnnnnnnnnnnnnnnnnnntctgtcnnnnnnnnnnnnnnnnnnnnnnnnnnnnnnnnnnnnnnnnntctcccagccttgcaaggaccacactccccatacnnnnnnnnnnnnnnnnnnnnnnnnnnnnnnttgtgcctctaggcagtggaccatggtcannnnnnnnnnnnnnncctaggttgtcctggcccgcttccttaggggagactgttgggtggtgatgggaattgttaggctggaacccaggccacatggatgatgatgattctcccccacaggttcgaacctctgacatgggtggctatgctacttgccatgacttcactgaggctgtcattgctgccttgccccacccatagg

SEQ ID NO: 10270 - DNA, 741 bp, Macaca Fascicularis
  misc_feature (1)...(741): n = A,T,C or G
gcagcctacgtccatgnnnnaggannnnntccccattatggccaaggaggggcagctatatgccatggagttgcagggcttctggatggacattgggcagcccaaggacttcctcactggcatgtgcctcttcctgcagtcactgaggcannnnnnnnnnnnnnnnnnnnnnnnaggccctggcattgnnnnnnnnnnnnnnnnggacccaagtgcccgcannnnnnnnnnnnnnngcattggccccaatgtgagcctgggacctggcgtggtggtcgaagatggtgtgtgtatccggcggtgcacggtgctgcgggatgcccggatccgctcccattcatggcttgagtcctgcattgtgggctggcgctgccgtgtgggccagtgggttcgcatggagaacgtgacagtgctgggtgaggacgtcatagttaacgatgagctctacctcaacggagccagcgtgctgccccacaagtctattggcgagtcagtgccagagcctcgtatcatcatgtaaggggatgcagtggggctggccnnnnnnnnnnnnnnnnnnnagcaaggggagagnnnnnnnnnnnnnnnnnnnnnnnnnnnnnnnnnnttatctgtctggggggcactgggtgaagctgaagctgttggacacctgccttctcatgtggacatcatctggcaggatccctgctgggcacaccccacaaaccctactccctcaagaagggccagggccagggc

SEQ ID NO: 10271 - DNA, 758 bp, Macaca Fascicularis
  misc_feature (1)...(758): n = A,T,C or G
tgagaaactgacagctgccaccttcacagttatnnngctaaagcgtgcacacacacactgagatgccttcccatgaaaaattccgaagatgctcaagagggaggtttcctcgtgagtgaagagaaatgattctcctttgactctggctcctcccaccacaaatgttaccctctttggcttgaaaagcatccaagggtgtacagggagtatggcaaactggacctgttgtcaccttaattgtcatnnnnnnnnnnnnnnnttggactaatatgaaaaaaacattgttgaaaacctaaaaatgaaagtttgtgagtgtttattggttttcttaagagaaatggactattttgctctcatgtgtaatattttctatttaaatttttcttaaatataccagctgttttctttccctgaactcccccaggttctaggacaaatttaataacgtgtaattctcctcaaatacttttgtatgtctcagtgttggcgttttcctccctaaaactaacattaaggctgtgccacgggcatgacttgatttttgttgggcttttgttttcctgcttaaggagaggtgtctttttaggatatgagtgatttattttgcgaaatgaaaattgttcatccaaaacgattctcttataaactattggtaaatgtcacttattcattagtgtttgacataatttttagaatatttattttgaatcaatactttcattatgaaagacttgaagttttgtgtccatccttgcaag

SEQ ID NO: 10272 - DNA, 793 bp, Macaca Fascicularis
  misc_feature (1)...(793): n = A,T,C or G
gtcccatgccctgttggagtcatagccacgagagtgccctcccaacttgtgtgcannnnnnncgccattgtgggactcatggccaatgtgggcggctttctggctgggctgcccttcagnnnnnnnnnaaagcactannnnnnnnnnnnnnnnnnnnnnnnnnnnnnnnngatttgtgcagccagcacagctgccttcttcctcctacgaaacatccgcaccaagatgggccgagtgcccaagaaggctgagtgaagagagtccaggttccagagcaccatcccacggtggcctttcccctgcacgctgtgggggggagaaaaggcggggcctgcttggcnnnnnnnnnnnnnnncactttccatttctgcgccttttccctcacccaggtggnnnnnnnnnnnnnnnnnnnnnagtgaggtcccagtttccccggtcctatgctctatttaaaagataacctttggccttagactccattagctcctatttcctgccttcagacaaacannnnnnnnnnnnnnnnnnnnagcctcctgtacccttcttcttttcctaggccccatcctgtccccatcctaccccatccccacctgaagtgannnnnnnnnnnnnnnnnnnnnnnactaatggcccttgacnnnnnnnnnnnnnnnnnnnnnnnnnnnnnnnnnnnnnnnnnnnnnnnnnnnnctcagactccagggaaagagagnnnnnnnnnnctctcactgtaccactaggnnnnnnnnngtataggtgggaagaaaagatgacttgttataggagataa

SEQ ID NO: 10273 - DNA, 615 bp, Macaca Fascicularis
gcccttcttccatagaaccagaaatggcatctgtggatttcaagacttacgtggatcaggcctgcagagctgctgaggagtttgtcaacgtctactacaccaccatggataagcggcggcgtttgctctcccgcctgtacatgggcacagccaccctggtctggaatggcaatgctgtttcaggacaagaatccttgagtgagttttttgaaatgttgccttccagcgagttccaaatcagtgtggtagactgccagcctgtacatgatgaagccacaccgagccagaccacagtccttgttgtgatctgtggatcagtgaagtttgaggggaacaaacaacgggacttcaaccagaacttcatcctgaccgcccaggcctcacccagcaacacagtgtggaagatcgcaagtgactgcttccgcttccaggattgggccagctagtgggggtggcagaggtctctgcttcattcagccctagctctgtagagaaatgcaaacctcaactctcaaggatatgaggaacacaagttcatttctgttgttgcggagacactgcagactccactgtgctgaggttgaactctttttttgttgctcaagttctaggagt

SEQ ID NO: 10274 - DNA, 688 bp, Macaca Fascicularis
  misc_feature (1)...(688): n = A,T,C or G
gaagcgtnnnnnnnnnnnnnnnnactcgtgactgtgctatggtttctcccgacgtacacgttgatcttgtctgtggcatctgatattaaacgggaggttttaagcatctgccgtgatgatnnnnnnnnnnnnnnnnnnnnnnnnnnnncgggtttgtcgttttgtctgtttccccctcgtgtggtttctgccnnnnnnnnnnnnngaatttgctctgccactcaatgtgctttgcagnnnnnnnnnnnnnnnnnnnnnnnnnnnnnnnnnnnnnnnnnnnnccgctgctctgtgtcgtgtttgctgtggctgcagggagaggagcgggacacgcacctttccaggggcctctgtgctccgcactgtgggtgagtggaccacagcgcacagccacatgccctggctgnnnnnnnnnnnnnnnnnnnnntctcccccgcccgtacgcctggactgagtgagttatcctgcgttgtgtcgtcactggatgggcagtcaccgtggtcataggcctggatggcnnnnnnnnnnnnnnnnnncagggtcactgtgggagccctggggtcaagtgagaagaacgccttgtcctgtgccccaccatcnnnganntgcagcctttgtatggaagcccaactgcgctcctgtctggagaaacggcttccnnnctgtggctgctaggtcggctctggtc

SEQ ID NO: 10275 - DNA, 884 bp, Macaca Fascicularis
  misc_feature (1)...(884): n = A,T,C or G
gcaagtgagtagagaagatcaggacaaggttgcagttctgtctcagaataggacagagaatgcacagaaagctggccattttgacaaagagattgtaccagttttggtgtcatctagaaaaggtcttattgaagttaaaacagannnnnnnnnnnnnnncgggagcaacatagaagacatgtccaagctaaagccttactttcttaccgatggaacgggaaccgtcaccccagccaatnnnnnnnnnnnnnnnnnnnnnnnnnnagctgtggttcttatgaagaagtcagaagctgataaacgtgggcttacacctttagcacaaatagtttcctggtcccaagtgggtgtggagccttccattatgggaataggaccaattccagccataaagcaagctgttacaaaagcaggttggtcactggaggatgttgatgtatttgaaatcaatgaagcctttgcagccctctctgttgcaatagttaaagaacttggattaaacccacagaaggtcaacattgaaggaggggctatagccttgggccaccctcttggagcatctggctgtcgaattcttgtgaccctgttacacacactggagagaacgggcggaattcgtggtgttgcggccctgtgcgttgggggtgggatgggaatagcaatgtgtgttcagagaggatgaattgcttaaactttgaacaacctcaatttctttttaaactaataaagtactaggttgttatatgtgaaatcagaggaccaaaacacagatggaaaccatttcctgtatcacaaaaacccaagtttacagcttgttgtactttaatgtgtaatacttaagtcaaggtacaagacaattccatttaacattgttataaataaaa

SEQ ID NO: 10276 - DNA, 746 bp, Macaca Fascicularis
  misc_feature (1)...(746): n = A,T,C or G
aactatgntnnnnnnaagtggggccannncgtgggctggctgatggctctgtctnnnnnnnnnnnnnnnnnnnggtacatggcctacatgttcctcaccttaaagggctccctgaagcagcgcatccaagtcatggtccaacccagcgaagacatcgttcgcccagagaatggtcccgagcagccccaggccggcagctccaccagcaaggaggcctacatctagggtgggggccgctcgccgacccgacactctcaccccccgaccnnnnnnnnnnnnnnnnnnnnnnnnngtctgaggataccttccatctcaacctacctcgnnnnnnnnnnnnnnnnnnnntcaccacgcagaaaggggaggtgggaggacagttagacccctaggtgggccctgccgtgggcaaggatacccggtggcttccggcacccggnnnnnnnnnnnnnnnnnnnnnnnnnnnnnnnnnnnnnnnnnnnnnnnnnnnnnnnnnnnnnnnnnnntagatcatttttatcccgcgagggagcgtgatgcagcgaggccacatgtgctcctggcttttaaacctgttcctgactgttctcttactgccgaaacccatgactgttnnnnnnnnnnnnnnnnnnnnnnnnnnnnnnnnnnnnnnnnnnnnnnnnnnnnnnnnnnngcattttgtacaatggggacttcccgggaacgcttgctcttaagtaccagaagtcagcggagctctggctttcgtg

SEQ ID NO: 10277 - DNA, 694 bp, Macaca Fascicularis
  misc_feature (1)...(694): n = A,T,C or G
caatacagaaaagaaaacaagaaaatgtttggagctgatagagaagccaaaactcatatcaaggcaaagacggatgcacagaaaaaaagtagtaactagggacagaactatgttagcagcacctttctacactcatgccaacaggaattcttaattttctctgcccaggtcctaaagctaggaccacatcaggcacactatgtttgatctgtgtcagatatacctgcttcttttatcttctatatcaccttacatatgagaaaaccttccttaattaagcttatgtcttattttgtgttttgaatggattttgaaagttttgtttatattgaagctactactctgtagtgattgataaccacatcaagtatcattaaggggccccttgacctttgtgggggcagttgggtggggcacaaaagactcattggatcacttgtatatcttgctgtttccacttaacattaacagcaacaagaaaaatcacctaaaattggtgaaatgaatgaaactactcttgatgaaatatatactagtgagaaataatactaaataaattattcagtgagacaaaaaggtgagttttattctatcttaactgtctacaatacatttgaattgtctggaggagcccttaagtccatattccgcaccttgaggacaccaaatgagnattttatnnnnnncagtacta

SEQ ID NO: 10278 - DNA, 207 bp, Macaca Fascicularis
ggcacagagacacgaggaggagaacactagtgaccctctttccactagttcatagagtgagagacactaaatacccttcccttccacttttaccccgtgttctttgaacatcacttgtgcagagtctgccctcactgaggagcacataaagaggagttttgtgcttagcagtgtaaggtatatgggggcatatgcaaaactctttcc

SEQ ID NO: 10279 - DNA, 735 bp, Macaca Fascicularis
  misc_feature (1)...(735): n = A,T,C or G
atgccggggcatgaagnnncatccaaagacgcgaatcacagcacagcnnnnnaagtgatagagtcagacactcacaggacaaatacaccaaggagatggaagggaagaaatannnnnnnnnnnnnnnnnnnnnnnnnnnnnnnnnntgttgctgtacccctaggtcatccaagagagctacagaagtactccagtgattctgagagcaccagnnnnnctggcagtggtgcattgccaagtgatcagaagctggaggagttgaaggcagaggagccgggtaacttcagcagcaaagtagtgcagaggggccgagagttctttgacagcaacgggaacttcctgtatagaatttgagtcggggcttggcttgtggagatgccttgtgaaacacagctgggcaaggaatatatatggaacagcctggatttctacatatggagaagccaccttggaataggaagaagtgttgagcctggactgtgggaggaaaaaactgcctggatagatttcagacttcctgtagtagtgcccccaatctgacctctgttgatcttcagtactcactcttcttgcttgtactctctgtatgttgaaaacnnnnnnnnnnnnnnntgttgttacaattttctgtgatacttgcaatttatatttgagaggaagtgaaaagtttgccttctgacctcatttccttcttgatcagtgaacacttaacatttttgggacaacttagtcaat

SEQ ID NO: 10280 - DNA, 721 bp, Macaca Fascicularis
  misc_feature (1)...(721): n = A,T,C or G
gagtctttnnnnnnngctacaagagtctaagangaaagccatnnnnnnnnnnnnnnnnnnnnnnngtgagctgcaggctaggctacaagcccaggaannnnnnnnnnaggaagcccagaaagcaaaggaagcagacatagagaagctgaaccaggccttgtgcttgcgctacaagaatgaaaaggagctccaggaagtgatacagcagcagaatgagaagatcctagaacagatagacaagagtggcgagctcataagccttagagaggaggtgacccaccttacccgctcacttcggcgtgcggagacagagaccaaagtgctccaggaggccctggaaggccagctggactccaactgccagcctgtggccaccaattggatccaggagaaagtgtggctctctcaggaggtggacaaactgagagtgatgttcctggagatgaaaaatgagaaggaaaaactcatgatcaagttccagagccatagaaatatcctagaggagaaccttcggcgctctgacaaggagttagaaaaactagatgacattgttcagcatatttannnnnnnnnnctctctattccagaggtggtgaggggatgcaaagagctacagnnnnnnnnnnnnnnnnnnnnntaannnnnnnnnnnnnnnnnnnnnnnnnacccctttttacctgcaatacccctttaccctaataccaagaccaactggcataga

SEQ ID NO: 10281 - DNA, 1152 bp, Macaca Fascicularis
  misc_feature (1)...(1152): n = A,T,C or G
gggaggtcaaggtcaagctcatcgtgcttgtgcctccatccaagcctacagttagcatcccctcctctgccaccattgggaaccgggcagtgctgacatgctcagaaaaagatggttccccaccttctgaatacacctggttcaaagatgggattgtgatgcctacgaatcccaagagtacccgtgccttcagcaactcttcctatgtcctgaatcccacaacaggagagctggtctttgatcccctgtcagcctctgatactggagaatatagctgtgaggcacggaatgggtatgggacacccatgacatcaaatgctgtgcgcatggaagctgtggagcggaatgtgggggtcatcgtggcagctgtccttgtaaccctgattctcctgggaatcttgatttttggcatctggtttgcctatagccgaggccactttgacagaacaaagaaagggacttcgagtaagaaggtgatttacagccagcctagtgctcgaagtgaaggggaattcaaacagacctcgtcattcctggtgtgagcctggtcaggctcaccgcctgtcatctgcacttgcctcactcaggtgctaccggactctggcccctgatgtctgtagtttcacaggatgccttatttgtcttctacaccccacacggccccctacttcttaggatgtgtttttaataatgtcaactatgtgccccttcctccttcattctctcccttcctttcctaccactgctgagtggcctggaacttgtttaaagtgtttattccccatttctatgagggatcaggcaggaatcctgggtatgccattgacttcccttctaaacagacagcaaaaatggtggggctcccaggaatctgcactcaactgcccacctggccggcagggatctttaaatagggatcttgagcttggttctgggctctttccttgtgtaccgaggaccggggccagctgttctagagtagggattagaggctagagcagctgaaatggttgtttggtgatgacactgnnnnnnnnnnnnnnnnnnnncccactctgttctgtcttcccatgggaagtccctctgccctgtcctcctcttgaatacaagccgcctgacattgactgtgtctgtggaaaatgggagctcttg

SEQ ID NO: 10282 - DNA, 757 bp, Macaca Fascicularis
  misc_feature (1)...(757): n = A,T,C or G
cacagttatgaaattatnaaaattattccaaagaatggaatcntgggtagcgaggcaataattaagcagttcatcttaaaagatggaatatttggaacannntagccatcgttcagtgccaaaatgtttgggtttttcacatcacatccgtccttttcatctcatcttcagtgaatcattcctcatgtttgtaattaaagccatatttaccatcataatatgcagtcacccgagctcattttgctctgaagtcagtgatattaaactgttctgtttctaatgtgtcccttaacttggttctagtaaaagcagcaagcagtgatatttaacatacaaactcatcaaattccacataaaatatttaaccacatttttaaaaactcaagtgtcctttacactagctaccttggaagtagtactgcacttttttcaccatgttgtcattgtgttatgctttcttggaatttcctgtttgtaactaccttaaggtccattcataaaccacagaagaaatcagtcttgctttataatcctatctaggttgacatacaaaaatagtattgccccactggatctcttactttataaaccagatgtggcactactgactttggactctttagaatgacttcccttcccactccactcagctgtcattgttgggtgagaacatgctggagggtgaaaccaggacagctggccaagggtggagccaggacattgcattagaatgnnnnnnnnnnnnnnnggaccactg

SEQ ID NO: 10283 - DNA, 776 bp, Macaca Fascicularis
  misc_feature (1)...(776): n = A,T,C or G
agcagatggaaagctgagcagtgacgtcaannnttnntgcctgttgccacagacttttacagacaccagatagaggaggagctcgaccgcagggccttccagtctgtgtttgaggtggttgcnnnnnnnnnnnnnnnnnntcaccggctgctgacttgtttacgaaatgtccacaaggtcaccacctgctgagcgccatggtgggagagactgtgaggcggcagctggggctggagcctccagaaatctgcgccctgtgccctgcctccaccgagccagcttggtccctgtgggcttccgcacatgccgcgggcggccaggcaacgtgcgtgtctctgccatatggcagaagtgctctttgtggtacagtggccaggcaaggagtatctgcagtcccggtggggctgagcctgaggccttccggagagcaggagcagctgtgctgcacgccatgtgggtgaccaggtcctttctcctgatgctcacctgttgggtgttgccaggctgcagctgctcttgcatctgggccggaagtcctccctcctgcaggctggctgtgggcccctctgctgtcctgcagtagaaggtgccgtgagcaggctttgggaacactggcctgtgtcttcctggtggggtgtgcatgccacgccctgtgtctgtatgcacagatgccatggcatgtgctgggccagtggctgggggtgctagacacccagcaccattctcccttctctcttttcttctcaggattttaaaatttaattatatcagaaaag

SEQ ID NO: 10284 - DNA, 1353 bp, Macaca Fascicularis
  misc_feature (1)...(1353): n = A,T,C or G
tacatgtgcccccagaggcctctgtggctgcaagcgcagnnnnnnnnnnnnnnnnnnnnnnnnnngccttgatctctccacacaccaccttaagtggtaggcatgtttagttatcaaaggccccatttgtcaggggtgagagaaaagtcaaaagatagattggggacttgtaaaaggccggggtaaaatgtctcaggcaagcaaaagattgtccccttcaacatatgggtaaaactgagacatccccttgagcccgaggctggaagtggtgtctgccttcaagggttaatccctctttgttccgagcagaagcattctggcatcccagtgaagagcacaggccctcagtgnnnnnnnnnnnnnnnnnnncagcgttagcccnnnnnnnnnnnnnnnnntagcccaagggccctgaatcgtcacacttccctttcctaagcctctgagggtggagattcccctaggagcgcttggccagctgggaaggcagcacccagctgnnnnnnnnnnnnnnnnnnnnnaagtgaatcatgggcatttccctgagagcagtgggagaggccctctgagtcggaggttgagctccggctcctttccaagagagcaatcagtgctgaatcacagttacaacccactggggctggcgggaggtacgttgtatgggactggaagcaagaggttaattcaaagagaaactcctgggatttgtaaccagatgaatcatgatttcaaagacttctgatcaaaaatactnnnnnnnnnnnnnnnnnnnnnnnnattggacctggagatgatctgcctnnnnnnnnnnnnnnnagcttcaaagccccagattcctgggctggggattcnnnnnnnnnnnnntgtcagattttcaactgctcttccctcccctctccagccacatactcaaactctcctgcctcagggcttttgcacgtgctgttccctctgcctagaacactctgctcccaaatatatgtctggttccccgactcactttattcaagtccctgctcaggtgtcaccttccctgagaggcttccctgacctcctgtctaaaatatcaccctcattactctccacccccttactctgttatattttctccttaataggacactgtataacttattttcttattatcttcttctccctctagaagatacatttatgaaaatacaaatgacttttttttttttttttctgctgtaactccagttcctagaatgatttccagcacatagcaagtgttcagtaaatatttgnnnnctgacnncgcaccaaannnnnnaagaaagccatcttgccctctgatctggggtctgttttgttcattactttgttcactcc

SEQ ID NO: 10285 - DNA, 718 bp, Macaca Fascicularis
  misc_feature (1)...(718): n = A,T,C or G
ggaaacnnnnnngaggatcgacgagaacgtgctnngagcccagctggacgttgaggccgcccattcagagatcctcannnnnnnnnnnnnnntcacctccaaccggtggctcatggtcaaaatcttcctcatcctcattgtcttcttcatcatctttgtggtcttccttgcttgaaccctctccactctgaggcactccgttggggtttgggaccctcctaggaaggcaagtggccagtgctgccactgagcctgtgcagggtgcttgggagaaaggccctgtttccctggaactgcaaagaatggccactgcccctgaccccccaccccttgcctctggccaccctgtcctccccccaccaccctcaggcctatgaaacacacagggttctagatttggactctgtgtgtgaagtgactggaagggaacagaggccagctgggggccagtggggtaggttgtctccactaggagacttttataaaccctctccagcctctcccaaaggaaacgttggcagcaaagggagatgatgcctttccccaccttcctgtgagtgaagagaggaagcagccccagggaccaattttcccaattgacctctttcttcctctttcaccatgtggggcagggaaccctgagcccttcagctgcctgcacaacccctgacattggctgctggtgactctcaatctgccaaatgtgctgcagcccgtt

SEQ ID NO: 10286 - DNA, 730 bp, Macaca Fascicularis
  misc_feature (1)...(730): n = A,T,C or G
agagaatgtgatgtgtgatgcaaatgctcaaaannncttaaattgtagctgtctgacctctatggacctcacatccatnnnnngcttcatggacaaagattctacacttggccacactttagccaagctcctcaaccttctcccaggcccaatctgggcacttccttgtaaaatccagttttggcaagaagtctgttaagtcagtttagcaagaacacctaacccccccatatctgttcaacctcagtatctgatcaggctcctcagcctccaccataccccaggtgatgtctggtcacctggcctgccttcagctagaatcctgttaggtcagtttagctgaatgctccctgatatttcctgttggtaatcttccatccactgcccctcaccatgttccctgtctataaatccccacttttccatggtgtattcagagctgagcccagtctctctcgcctactacaagtccccattgctgtggtccctgtagccatcacgatggtcttgaataaagtcttgcttactgtgcttgaataggtagcattgaagactttttttctttgacatcatccatgacaacatgaaacctattgggacagcatgactgtgcagggtcttcagagctcagctttctgaggccctcagcattcttgcttttccgacaccgtgaacctgttcctgttctgtgttgcaagagatcactcaagccagtgttacttaataccgt

SEQ ID NO: 10287 - DNA, 694 bp, Macaca Fascicularis
  misc_feature (1)...(694): n = A,T,C or G
caagaggaggtgggtagatgagagtggggctcggtagcctagcctggcccaggtctctctctccattctttcctgggctcggggcacctgccttgagttaccttccatcatggctacttgctgtggtttgaatgtttgagtcccaacaaaattcatatcaacacataatcccaacnnnnnnnnnnnnnnnnnnnnnnnnnnnnnnnnnnnnnnnnnnnnnnnnnnnnnnnnnnnnnnnnnnnnnnnnnnnnnnnnnnnnnnnnnnnnnnnnnnnnnnnnnnnnnnnnnnnnnnnnnnnnnnnnnnnnnnnnnnnnnnnnnnnnnnnnnnnnnnnnnnnncagctgctccagaggccggggaggccgagctcaggaggcagaggttgcagtgtgctgagacagcgccactgcactcactccagccttggtgacagagtgagactccatctcaaaacaaaaaacaaaaaaaaaaccttaatccccagtgcagtggtatgaagaggtgtgaccttttggaggggatggagtcaagagggcgagtgggattagcactctcatgaaagggtttgagggggtctgttagtcccgcttgcctgtccgccatgtgaggatgcagtaacaaagtgccatcgttaaagccgagaccaacccctcctcagacactgactctgctggcaccttgatcttggccttc

SEQ ID NO: 10288 - DNA, 890 bp, Macaca Fascicularis
  misc_feature (1)...(890): n = A,T,C or G
tgtatgaaaaaaannnttttttaagaaaactcttccttccccctttcccctccataatgtaagaagctttggtggcaggttccagagttcctgggatttctcctcacaggcccaatcctcaatatgcccctggaccttctggacccttgagtccaaaggcagatcctctctcccagggaatccgacacaggaggaaccccttctctggttgagctggaccaggcctgagagcgggagctgtaagaccatagagttttttataaatgtataaatgtatcaagccaaatgtgcagatgctaactggacattctggggaactgggcaccaggagtgccttcatacactgtaccccagctctcttttaaaagagaagtgggagggcacaccgaactgtttggtgtccccaaccacagggagctccagtattctggcttagggtgacacttctgtcgtccttgtgcccctctcagcttttcatccccagctaggaagaaagaatggcactcttggctttggcccaaaattagagttgttagagcaagagagagcttaggaagcatgagggcaactataggtgaggcctnnnnnnnnnnnnnnnnnnnnnnnnntgctggtgcttgtgtgtaaaggggcaagagctgctcctttggcctattccttgaaggactctgatgcagggcgtctgttgctccgctgagtcacctcctccctgctcgctgacatctggggctttgaccctttcttttttaatctacttttgctaagatgcatttaataaaaaaaaaaaaagagagagataggtgtggggacaaaatgcaaacctctttcccttgcctcagaggcttctgggatgtcatcacctccagtttgttggttttgttccaactgta

SEQ ID NO: 10289 - DNA, 1104 bp, Macaca Fascicularis
  misc_feature (1)...(1104): n = A,T,C or G
tagccaatccagnnnnnnnnnnnnnnnnnncattttgaggctttaaaaaatcaatattcctagtggtcatgantttccaggcacactggtgcccttcactgccacagctgctcaccttctccannnnnnnnnnnnnnnntcagaaactggattcctgcacgtccttcggggcgcagccctgcggtgctcaggcacagctctcaggagcgggggcgccttgctgttcgctgctgtgtcatcttctaatgtgagctcatccactgctgctgcagcgtgttaatcaggagtcacagacaagattggggatggtgcgtgtatgtgcgtgtgcatgtgtgtgtggctaaattaagtcatactgtcaaccacatgtgatctcgtgtgaaacagtgtttggaagtgggaacaggtttgtcctgtatgctgatgtgtccagaatttcatttaatgatagacagaaaatgtgtggttactgaaaagtgtgtatcaatacaggatttcttaacagccnnnnnnnnnnnnnnnnnnnnnnnnnnnnaaccactgctcatcagtttcagtagagacaaaaactctgtacatattttggaatctgaagaatcctctataaatcatgtcacttaaatctgtgaaaaacatgtttctttggaggaaaatgtatgcatttataagtgttctgtggaatcagtttttattgtattgatataattgtctctaagtgttgagtgtcttcattgcaatatgaaattcattaaaatgtccatgttccataattattattataaaagctttgtgttattgggagtcttttattatttttacagtttttcatgttttgctttggtgaaacattgtgaatgactatataaatatcacgatgacctagaaattgaacaaatataatactggtcacttgaaaaattttcaggcttaaaaaatcagttgtgttttctatctatctcttatgttaacattcaacaatatataattatgctgcttcatccctcatcaggaccctgaaaactttcaaaagggttaacagtttgacacaatttttggtaaagttcctcagtacaaaaaaatgctcatacnntctcatgcagaagc

SEQ ID NO: 10290 - DNA, 748 bp, Macaca Fascicularis
  misc_feature (1)...(748): n = A,T,C or G
gagatgcacgctgnntatgnnnnnnctnnnnnnctcattggccacagccttggctgtctacacttgctctatttcctgctgcgccagccccaggcctggaaggaccgcttcatcgatggcttcatctctcttggggctccctggggcggctccgtcaagcccatgctggtcttggcctcaggtgacaaccagggcatccccatcatgtccagcatcaagctgaaagaggagcagcgcataacgaccacctccccctggatgtttccctctcgcatggcttggcctgaggaccacgtgttcatttccacccccagcttcaactacacaggnnnnnnnnnnnnnnncttctttgcagacctgcactttgaggaaggctggtacatgtggctgcagtcacgtgacctcctggcaggcctcccagcgcctggcgtggaagtatactgtctttatggcgtgggcctgcccacaccccgcacctacatctacgaccacggcttcccctacacggaccctgtggatgtgctctatgaggacggtgacgacacagtggccacgcgcagcactgagctctgtggcctctggcagggccgccagccgcagcccgtgcacctgctgcccctgcgtgggatacagcatctcaacatggtcttcagcaaccagaccctggagcacatcaatgctatcctgctgggtgcctaccgccagggtccccctgcatccctgactgccagcccagagcccccgcctc

SEQ ID NO: 10291 - DNA, 747 bp, Macaca Fascicularis
  misc_feature (1)...(747): n = A,T,C or G
gatgacccagagggcaatgcccagaggccaggcacctcctgnccnnngccagtgcnnnagggtggagtcccccatgcctgaggacagaaggagctccacaccagggtctctgcacgaggagacaccccacagcaggagcaccggggagaatacttccaggtgctcagcgccagctacaaccctgctgatccaagaggctctggttcgagggggcctgggcaccttggcagctgatgcannnnnnnnnnnnnnnacaggccaggccctggcagatgcctgccaaatggaaccagaggaagtggaggtcatggcaacagagctactgaaaggacgagaggccccagagggcatggctagctccctgggatgcctgaacctcggttcctccctgggcagccttgaccagcaccagggctcccaggagacccttattcctcccaggctgtgatgcccacacagcatcagcatgggcttagagctggcatgaccaacgggggtggggaggttactggggtggagaagggctagcccaccacagcagcctccctctctcgcagcagctagatgcatggcctgaggcggggtggtcaggaaccacctcaaaaagtggggaggaagtagctggacaggccctgcccctcaaccagcaagaggcatgattggannnnnnnnnnnnnnnnnnnnnnnnnngcctagttggtgtctgtgtctgtctggcctagggtcactcccacctgcaggacataa

SEQ ID NO: 10292 - DNA, 745 bp, Macaca Fascicularis
  misc_feature (1)...(745): n = A,T,C or G
aaccagaggccaagatgaatgaggggtttgagtggcaactgaaattataccaggcaatgggatatgaagtggatacctctagtgcaatttataagcaatatcgtttacaaaaggttacagagaagtatccagaattgcagaatttacctcaagaactctttgctgttgacccaaccacggtttcacaaggattgaaagatgaggttctctacaagtgtagaaagtgcaggcgatcattatttcgaagttctagtattcnnnnnnnnnnnnnnggaagtggacctatagcctttgcacacaagagaatgacaccatctttcatgcttaccacagggagannnnnnnnnnnnnnntcttatttcattgaacctgtacagtggatggaatctgctttgttgggagtgatggatggacagcttctttgcccaaaatgcagtgccaagttgggttccttcaactggtatggtgaacagtgctcgtgtggtagnnnnnnnnnnnnnnnnnnnnnnnnnnataagaacagagtggatgaaatgaaaatattgcctgttttgagatcacaaacaagaaaaatatgaacatgatattttatagctttggaagaaacttgcagatgatatgtactgcctttgcttcttatcattcattgcaaattgtttatgctgttaacatttcatttgaaatgggagaagataaagtcacttgatgtaacctggaaactgttttacatggcaatcaaagcctt

SEQ ID NO: 10293 - DNA, 697 bp, Macaca Fascicularis
cagtccccctaaatttggttgcctggaagggtttcatgaaacactcatagccatgaaaaacgtacgtaatacacccctaccccatcactgggatctagcctgtgttaaactcccactgaaatcaccaagtcaatgagggaaattaaaacccattttatccacaggtgtacatttgtgtgcaattatatgtagggggttaaaaatgatgttcagtagaaccccatacataatcaaaattgaagaaaaatcagttgctattttagcataataaggaaatgcaaatttaagaaagaaagaaaattttcattagcacacttccttggtgaataggtattaaaatatatttgaatgcaggacaccccgctgtttggggagcttcacacataaaaggtgtgagttacagccaaattatccggctgttttttgcttctcagtttctaccccttaagagctgatggagataaatctggaaatatttgaaaagcatcacatttggaaattatttgatatcttaccatcttgcacactctttccttatggtgaattacctcaactgccttttattaccgagggtatttgttgggtcacagaatctttatttcttaagagatatttgctgcttctacttaagtcacaatcctttgtcacaggacaatcatttccacagcaaccaactgtgatgtcacaactgaaggga

SEQ ID NO: 10294 - DNA, 618 bp, Macaca Fascicularis
  misc_feature (1)...(618): n = A,T,C or G
gccacacaaatgtggaagagctcnngaagctggccaatcaccccatnnnnnnnnnnnnnnnnnnnnnnnnnnnnnnnnnnnnnnnnnnnnnnnnnnnnnnnnnnnnnnnnnnnnnnnnnnnngctggaaaatagtgtcaccctgggtcccaacctcctccccatctgcctccctgacaacgagactttctatgacctgggcttgatgggctatgtcagtggctttggggtcatggaggagaagattgctcacgaccnnnnnnnnnnnnnnnnnnncatagctaatcgaaaggacnnnnnnnnnnnnnnnnnnggaaagaataggatggatgtgttctctcaaaacatgttctgtgctgggcacccgtctctnnnnnnnnnnnnnnnnnnnggggatagtgggggcgtttttgcagtaagggacccgaacactgannnnnnnnnnnnnnnnnnnnnnnnnnnctggggcatcgggtgcagcagggtctattgtttnnnnnnnnnnngacccctnnnnnnnnnnnnnnnnnnnnnnntctggccctgtctgctcatccttggaaggtgacagcaactgcctgtgtagctcccacatgcacaggggcccatggctcttcac

SEQ ID NO: 10295 - DNA, 560 bp, Macaca Fascicularis
  misc_feature (1)...(560): n = A,T,C or G
tgggaggccaaggtgccagatcacnngaggtcaggagttcaagaccagcctagccaacatggcaaaaccctgtctctactaaaaatacaaaattcagcctcctgagtaggtgnnnnnnnnnnnnnnnnnnnnnnnnnnnnnnnnnnnnnnnnnnnnnnnnnnnnnnnnnnnnnnnnnnnnnnnnnnnnnnnnnnnnnnnnnnnnnnnnnnnnnnnnnnnnnnnnnnnnnnnnnnnnnnnnnnnnnnnnnnnnnnnnnnnnnnnnnnnnnnnnnnnnggcctatttccccacctttcatgtaaggtgccactgaacatgacagcttcttctcatggcaggaaacttgcatcagttggatatccttttgagaaactgaattttgcaaagggccaaacttctccaaactgaacgggctcaggaaatgttccttcacactcagaacattctatttttaagtacattatttattattggcagttcctcagggatttcccttttctctgtattggtcagtgtagttgatgtaaaactgttttgtggatggaaaatatttttatttt

SEQ ID NO: 10296 - DNA, 1010 bp, Macaca Fascicularis
  misc_feature (1)...(1010): n = A,T,C or G
caaggatgattcagaattagaaggacaagtcatctcttgcctcaagctgannnnnnnnnnnnnnnnnnnnncttcagactgtgaagaccagatcnnnnnnnnnnnnnnngagtcggccctggactaccgcctggatcctcagctccagctgcactgctcagacgagatctccagtctatgtgctgaagaagcagcagcccaagagcaaacaggtcaggtggaagagtgcctcaaannnnnnnnnnnnnngatcaaaacagaattgtgtaaaaaggaagttttaaacatgctgaaggaaagcaaagcagacatctttgttgacccggtacttcatactgcttgcgccctggacattaaannnnnnnnnnnnnnnnnnnnnnnnnnnnnnnngnnnnnnnnnnnnnnnctcatggaagcgctggaggataagcgggtnnnnnnnnnnnnnnnnnncaaaaagcgcctcannnnnnnnnnnnnnnnntggagttatgnnnnnnnnnnnnnnnnnnnnnnnnnnnnnnnnnnnnttgccatgcnnnnnnnnnnnnnnncgtctaagaactacattctctnnnnnnnnngtgggagcatctgtatattgttcctgattggtctgatgtnnnnnnnnnnnnnnnnnnnnnnnnnnnnnnnnnnnnaggacaggtagagccaccttgaccaccaaaggaactacctaaaaggtttagtgtggtctcaggactcttgtatagcatccccactcacctcactgcacaatccagacaaacttcccagnnnnagctcctttgtgcctccacnnnnnnnnnnnnnnnnnnnnnnnnnnnnnnnnnnnnnnnnnnnnnnnnnnnnctcctcctcaccgttnnnnnnnnnnnnnnnnnnnnngnnngannnnnnnnnnnnnnnnataagaaggcaaaattgggtttaccagccagtagacaagtctctatcataccaannnnnnnnnnnnnnnnnnnnnaaccaactcacctgacctgcaactc

SEQ ID NO: 10297 - DNA, 656 bp, Macaca Fascicularis
  misc_feature (1)...(656): n = A,T,C or G
caagttctgtgttggcttctgtgagaccaaatagttaatctttaacatagctactacactccaaaattgatgtcaacacagtcattactacaaattacttgttgaaagaatctatcttgaagagaaagaaaattaggaaagaatttaaacttttcctccaaaccatacatttataaatattgtcatatttaaagtgcttgaagggcatgaattctccattagtggaaaagcagtttactattggcaacagaaaaaaactcagcgatagtttaccaagtgctttaaaatttaaaagctatgctgtttggattcacacttgcgcagtattcttcttgtcattacaacaactgcaaattgctttgtactcaccttctctcatgtaaaatctaaagaaaaccccaccgtatccagtgtttgtagtgtttacttcaagtgaatctaaaaactttctaaatttagtttatggtaaatacctcaaaatacctaaaataggtacatatcaaccacttaaaagtgtgaaaattgtttcagattcagtgctttaaggggtcttcatatatattttctttaacagaaccttacttcattccatattaatatcagatatttcaaaataaaaaaaaatatatcagttctatannnngntnannntgtta

SEQ ID NO: 10298 - DNA, 646 bp, Macaca Fascicularis
  misc_feature (1)...(646): n = A,T,C or G
aaaactatattgaaacatagagtgggtcacgcgtgnnnnnnnnnnnnnnnnnnnnnnnnnnnnnnnnnnnnnnnnnnnnnnnnnnnnnnnnnnnnnnnnnnnnnnnnnnnnnnnnnnnnnnnnnnnnnnnnnnnnnnnnnnnnnnnnnnnnnnnnnnnnnnnnnnnnnnnnnnnnnnnnnnnnnnnnnnnnnnnnnnnnnnnnnnnnnnnnnnnnnnnnnnnnnnnnnnnnnnnnnnnnnnnnnnnnnnnnnnnnnnnnnnnnnnnnnnnnnnnnnnnnnnnnnnnnnnagagcaaaactccatcttcagagacgtgtgtgttgtctttnnnnnnnnnnnnnnnnnntttctgctttagcaactataaggtagnnnnnnnnnnnagtcacnnnnnnnnnnnnnnnnnnnnnnnnnnnnnnnnnnnnnnnnnnnnnnnnnnnnngcctaaggatcaatccagtcaaagtggaagcaattagtcctcctagcattccgcttaaggttgaacacgctttaataaatccaaaatatctgggagcgatatccaagccatttataagtactccacccaagcaaaagctgccnnnnnnnnnnnnnngtattaggaaaatgacaatgccgtagaagctggaactcnnntgagnc

SEQ ID NO: 10299 - DNA, 738 bp, Macaca Fascicularis
  misc_feature (1)...(738): n = A,T,C or G
ggcagacaaggtgaaggttccagacatgnngnnatccagtcccgcctggcctacgtgtcntgcgtgcggcagctagaggttgtcaagtccagctcctactgcgagtacctgcgcccgcccatcgactgcttcaagaccatggacttcgggaagttcgaccagatctatgatgtgggctaccagtacgggaaggcagtgtttggaggctggagccgtggcaacgtcattgagaaaatgctcacagaccggcggtctgcagaccttaatgagagccgccgtgcagacgtgcttgccttcccaagctctggcttcaccgacttgnnnnnnnnnnnntcccggattgagccccccacaagctatgtctccgatggctgtgctgacggagaggagtcagattgtctgacagagtatgaggaggacgccggacccgactgctcgagggatgaaggggggtccccggagggcgcaagccccagcactgcctctgagatggaggaggagaagtcgattctccggcaccgacactgtctgccccaggannnnnnnnnnnnnnnnnnnnntgcctgaggacctcgccaggggtcacccccttccccccgcccctggactgggctggggatggccctgtgggggtagctcactccccctcctgctgctatgccttgacccccggggctcacacactggaccgacctgccctgagcggggatgccgtgttgcactgatgactgaccatcc

SEQ ID NO: 10300 - DNA, 697 bp, Macaca Fascicularis
tcccttcagttgtgacatcacagttggttgctgtggaaatgattgtcctgtgacaaaggattgtgacttaagtagaagcagcaaatatctcttaagaaataaagattctgtgacccaacaaataccctcggtaataaaaggcagttgaggtaattcaccataaggaaagagtgtgcaagatggtaagatatcaaataatttccaaatgtgatgcttttcaaatatttccagatttatctccatcagctcttaaggggtagaaactgagaagcaaaaaacagccggataatttggctgtaactcacaccttttatgtgtgaagctccccaaacagcggggtgtcctgcattcaaatatattttaatacctattcaccaaggaagtgtgctaatgaaaattttctttctttcttaaatttgcatttccttattatgctaaaatagcaactgatttttcttcaattttgattatgtatggggttctactgaacatcatttttaaccccctacatataattgcacacaaatgtacacctgtggataaaatgggttttaatttccctcattgacttggtgatttcagtgggagtttaacacaggctagatcccagtgatggggtaggggtgtattacgtacgtttttcatggctatgagtgtttcatgaaacccttccaggcaaccaaatttagggggactg

SEQ ID NO: 10301 - DNA, 729 bp, Macaca Fascicularis
  misc_feature (1)...(729): n = A,T,C or G
caaaggcacctgcannnagtcagcgccagctacaggccccgaggagnnnnnccgcnnnnnnnnnnnnnnnnnccaccgnnactccatgnnngagctggggctccgcagtgcccccgagccgcccccagagtcccccggccagcctaacctgcgcccagatgatagtgccttcggtagccagagcaccccacgcgtcagcttccgcgaccctctcgtgtctgaaggaggtccgcgccggaccctgagtgcacccccggcccagcgccgcaggccacgcagtcccccacccagggcccccagccgnnnnnnnnnnnnnnnnaatcaccatcaccatcaccaccaccaccaccgccacccaagcagacgtcgccactatcagtgtgacgcgggatcagggtcagactcgggatcttgctccagctcgccctccagttccagttccgaatcctcagaggatgatggcttcttcctaggagagcgcatccctctgcccccgcatttgtgcaggcccatgcctgctcaggacaatgcaacggagaccttcaactccccatctttatcgctccccagggactctcgccnnnnnnnnnnnnnnnnnnnnnnnnnnnnnnnnnnnnnnnnnnnnntcgtggcttgaaggcaggccttcctggaggtggctccattctccagtcagagtagacgatgaggcccatgcccctcacccccacaccccgcccccacaaccca

SEQ ID NO: 10302 - DNA, 1160 bp, Macaca Fascicularis
  misc_feature (1)...(1160): n = A,T,C or G
cacacagtgatcagagattgcgccctcagcgaactaagcaatatgtnnncctgtccannnngctttgtctcctggcatctggtttggtggtnnnnntcctgtttccgcattcagtccttgnnnnnnnnnnnnnnnnnnnnnnnnnnnnnnnnnnnnnnnnnnnnnnnnnctcccttgtaattctcaccatcatggccaccctgaaaannnnnnnnnnnnnnnnnnnnnnnnnnncagnnnnnnnnnnnnnnnnccagattcagtacatgaacacagtggtcggtacatatgtgactactaacgtctcccttattccacctcggagtgagcaactggtgaattttaccgggaaggccgagatgggaggaccgttttcctatgtgtacttcttctgcacggtacctgatatnnnnnngcacaacatagtgatcttcatgcgaacttcagtgaagatttcatacattggcctcatgacccagagctccttgnnnnnnnnnnnnnnngtggattgtggaggaaattccacagctatttaacaactgttattggttcttccacatagcacctgtagaagagagcacagcatctgttcccaaggcctgagttctgtacctacccgcatgtggtgtaagcagaggaggaattaactcccagcaaacatcctcctgccacttaggaggagacacctccctatggtaccacttatgtttctcagaaccagcagaatcactgcccagtgcctagcctgtgcccagcaaatagttggcactcaataaaggttttcagaatttaatacagatcttttcagctgttcttagggcattataaatggaaatcataacgtggttctaggttatcaaaccatggggtgacgtggagctaggactgtgagtgagctgcagnnnnnnnnnnnnnnnnnnnnnnnnnnnnnnnnnnnnnnnnnnnnnnnnnnnnnnnnnnnnnnnnnnnngaaaannnnnnnnnnnnnnnnnnnnnnttgtttcagctgttcccaaaggcctgtgagcttttcaaaaagaaagaaaaaagtgtgttggctttttttttttagaatgttagaattgtttttaccgagagtctacatggggcttgattcatccttcatccattggctggaacatggatggggatgaagaaaa

SEQ ID NO: 10303 - DNA, 857 bp, Macaca Fascicularis
  misc_feature (1)...(857): n = A,T,C or G
ctgtagcaggnancgaggaacctgtgcatgannnnnaccgnnnnnntatagaaatgnnnnaaggaggggattgtggtggcttgtgccgagactgagcctggaatgatgcagctcagtcaaggagcannnnnnnnnnnnnnnnngggttgaaaacccagggtttttacttggagaggagagatgccaagctgcttcttcatcaatccaaatttcatttacagatctggaacactttggggctgatttgtctctttaggggacatccccaatatggttaattccaactctcagaccttgtgctttagttagtacatgtgactcaccagatggggtccttagatcctgttcctgctcccaatgggaatttgcttttctttgtcattttgggaaaggggcttggtttctgagtgtcttgtcttctcattctttttttttcatatcctttttctcaaaaaagccatcagcatctgacttccacccaccaccaacccccacccctccccgcccccctgcttcccctcactgcccaggtcgatcaagtggcttttcctgggacctgcccagctttgagaatctcttctcatccaccctctggcacccagcctctgagggaaggagggacggggcatagtgggagacccagccaagagctgagggtaagggcaggtaggcgtgaggctgtggacattttcggaatgttttggttttgttttttttttaaaccgggcaaatattgtgttcagttcaagctgtgaagaaaaatatatatcaatgttttccaataaaatacagtgactacctgaaaaaaaaaaaaaaaaaaaaaaaaaaaaagggcggcgctcgcgatctagaactag

SEQ ID NO: 10304 - DNA, 709 bp, Macaca Fascicularis
acgataccgcctggagcactatactgtgacgtcgaattggctggcattaggaactgtcttcctgttcgggcttttgtcgttttctcgctctgtggcactgttcagaggatatcatgggccccttgatttgtatccagaattttaccgaattgctacagatccaaccatccacactgtcccagaaggcagacctgtgaatgtctgtgtaggaaaagagtggtatcgatttcccagcagcttccttcttcctgataattggcagcttcagttcattccatcagagttcagaggtcagttaccaaaaccttttgcagaaggaccactggctacccggattgttcctactgacatgaatgaccagaatctagaagagccatccagatatatcgatatcagtaaatgccattatttagtggatttggacaccatgagagaaacacctcgggagccaaaatattcatccaataaagaagaatggatcagcttggcctatagaccattccttgatgcttctagatcttcaaagctgctgcgggcattctatgtccctttcctgtcagatcagtatacggtgtatgtaaactacaccatcctcaaaccccggaaagcaaagcaaatcaggaagaaaagtggaggttagcaacacacctgtggccccaaaggacaaccgtcttgttaactagtgattccagtgacctgactccctgca

SEQ ID NO: 10305 - DNA, 704 bp, Macaca Fascicularis
  misc_feature (1)...(704): n = A,T,C or G
tatgataaattatntaaggaatactgcatagcagatctcagtaaatataaagaaaataagtttggatttaggtggcgagtagaaaaagaagtaatttcaggaaaaggtcagtttttctgtggaaataaatactgtgataaaaaagaaggcttaaagagttgggaagttaattttggttatgttgagcatggtgaaaagagaaatgcacttgttaaattaaggttatgccaagaatgttccattaaattaaattttcatcacaggagaaaagaaatcaagtcaaaaaaaagaaaagataaaaccaaaacagattgtggagagtcatcacgtaaaaaatccagattatcctctgcagaagaggcctccaagaaaaaagataaaggacattcatcttcaaagaaatcagaagattctctaaagagaaattctgatgaggaagaaagtgcttcagaatctgaactttggaagggtccactaccagagacagatgaaaaatcacagcttttttttttaaatagggaagaagaatttgatgagtattttcaggatttgtttctataagacgagagagacttaatgtgaaacttcatgaagttttaaacttcatgcaatttgaaattccatgtaagtttttatctgcaagttacagcttgtgtggtgtctttggaaataaaaatccaggttctctcagaatgtcagatgct

SEQ ID NO: 10306 - DNA, 753 bp, Macaca Fascicularis
  misc_feature (1)...(753): n = A,T,C or G
agaggaggattgtcatcgtgacagcagcagctcaagttagcatttcaagcgattttgtgggtgcagtgataatgaagaatgggtattttgtaccagggctctnnnnnnnnnnnnnnnnnnnnnnngaggctggagtggaaaccaagagtgggcatcaaagatgaggagccaaagcccctagaactctggccacccagccaggagggactgtccaatcacattcaggattgcaaatgagctgggccctgggtgaggtgggggtctggcctaagggggaggggcctggtgtgggtggggcggggcctggcctggtccaggcttgggctccgtacccgtcactgctgtccctcctgaggtctggattggggatgaggacaaagaaatagcaagagatgagaaacaacagaaacttttttccctaaaggattggttaaatcagttctgatacagccttacaatacaatagtatgcagctgaaaaataattgtatgcctttatatactaatatgtaataatcttcaagtgaaaaaggcaagccacggaaatatgtatagtgcacttcccatttgtgtttcagaaaggaggagaatataaatacatatttgcttatgtatacctattcagaataaatggataacgctgattacttttgggaggggaaccaggaggttgaggacaggggagggaagggtcttaacacttatacccttttgtacattttgaatttggaacnnatgtgactgtatacctatc

SEQ ID NO: 10307 - DNA, 552 bp, Macaca Fascicularis
  misc_feature (1)...(552): n = A,T,C or G
gccgcgagctgcacactatgaccaaggcgttgctgaacgtactcgacatggacggcgaccctgagctctttgagcgcttngngggcgcggacttccccttcaccgtggccgaggcgcagagcctgctgcgctgcacggtcaacctggaccactcaatccgccggcgcatgggtctcatccgagccgtcagcgcgctcaagccgcccagcccgcccaagtcccctgcccgcgatgccccccacgctgcccaccggaccaacagcacctccagggcgcctccgtcgggccgtgccgcagggcaagctagcgaaggccaccacgctggggacttgacccacaggggcaagctatggccggtggcctgcgcgctcttccgtccagggctatccagcccaggtgggccttgaatggaggacnnnnnnnnnnnnnnnnnnnnnnngttcctctatctgcccagatgggggaataggcggctggactgaacccagggtcccaatgagccctttgagggccacacccccaggtgaatctaagccagagccgtggacagag

SEQ ID NO: 10308 - DNA, 401 bp, Macaca Fascicularis
aagatccttcattagaaaagtggtatacagtttgcagtgaggcaaaatttacgtgaaataggtgagcggtgtgttgaagaactcaagcatttcattgcagagtatgatacttccactcaagatttgggagagcctttttagatttttttggtcagaccggaaaaaaaaaacagcttctaaaaaatttttttcctggattgtgtaaatccttaatatatggaatttttgtgatgcgagtgaaatactttatgatagttgaccacatttcaatattaaataaacatctaaaatagtgtgtttaaaatgtgtaattagaatttttggattttttttttttttttagaaatggggtttcaccatgttggccaggatagtgtataaatggttggcctcaagtcata

SEQ ID NO: 10309 - DNA, 764 bp, Macaca Fascicularis
  misc_feature (1)...(764): n = A,T,C or G
tgcattttttatcactggattttaaaatatgatttgatcaattggtggcgttcgtggcactttcatattttagttaacagaatcatttttgagggagttnnnnnnnnnnnnnnnnncttaccacctggatcctcaccacagccaagttaccggtcaagattttaatatgccatgtaacttgaacttctaagaaagtttatatgcatttgtatgtaaagtattttataatctttaaagaaacaacagtcacatttcttgccagagtccccctgcctttaaaaattctcttttctggttggggaaatgatgtctggtaactgtttttactacgtctgcttctttgcaaagcttcgtctttaacagagtaatattctatgctaaaatagtcattatttttagaaagaaaattgttcagctgctggtttctcattatatatannnnnnnnnnnnnnnngttgatcaagagcttaatggaaaacaagatgaaccgaaaagtgaacagtaagtttggcacctagtccaaacaagactgaagaatgtgctgatggnnnnnnnnnnnnnnnnnnnnnnnnnnnnnnnnnnnnnnnnnnnnnnnnnnnnnnnnnnnnnnnnnnnnnnnnngactttttcataatggacttttgtattatacaagggactgttcactgctgtattggtttgcaaatctcttgaatttagctctttaatagctaactgtattattattttatattttgtattgctaaatagcagagaactacact

SEQ ID NO: 10310 - DNA, 754 bp, Macaca Fascicularis
  misc_feature (1)...(754): n = A,T,C or G
aaagaaattgactctacattgtataagaacttatttgtggataagaatatgaagtatatccaacagaagatgtttcaggtctgtcactggaagaacaattgaggaggttgcaagaagaacgaacttgtaaagtgtgtatggacaaagaagtttctattgtatttattccttgtggtcatctggtagtatgccaggaatgtgccccttctctaagaaaatgccctatttgcaggggtataatcaagggtactgttcgtacatttctgtcttaaagaaaaataggctatattttaacatgtataaaaaagtctttaaaatattgttgaacacttgaagccatctgaagtaaaaagggaattattagtttttcaattagtgacattcatgttctagtctgctttggtactaataatctnnnnnnnnnnnnnnnnnnntcatatatttaatcttaatctgtttatttacaagggaagatttatgtttggtgaactatattggtatgtatatgtggacctaagaggaactaagggagtagtgtcactgcttgttatgtatcatttcaggagttactggatttggtattctttcagaaagctttgaatactaaattacagtgtagattaaaagaactggaaaccagaaactctggagttcatcagagttaatggtgccgaattgtctttggtgcttttcacttgtgttttaaaatatccttattattttctcttatttctccccctagtttgtgagaaac

SEQ ID NO: 10311 - DNA, 790 bp, Macaca Fascicularis
  misc_feature (1)...(790): n = A,T,C or G
cagagacatatnnnnnnnnnnnnnnnnnnnnnnnnnnnnagtactggaatgcggtcagccaccgggcccntgccatcatctatgactnnnnnnnnnnnctcacgggaaggaagcccaggatgacaaaggtcatgaatcagattttaagaactgcttccatgttggagtatttcatcaaccggagttgggaatggagcacatacaatacagaannnnnnnnnnctgagctgagtcctgaagaccagagagtattcaactttgatgtgnnnnnnnnnnnnnnnntggaatacattgaaaattatgttttgggagttaaaaaatacttattgaaagaggatatggctgggattccagaagcaaagcaacacttaaaaaggctccgaaatatccactacctctttaatactgccctcttcctannnnnnnnnnnnnnnnnnnnnncaagatctcagatggctnnnnnnnnnnnnttcttcattgtaagcttctgttacaaattcctctcctactttagggcatccagcacgctcaaagtttaagaacatttcaccatagctttttatctggaacctctcagatacctctaaaannnnnnnnnntgattctcaagattagaaagtaacaaggaatatgcccaaactgtcagtgtcaccttttatgtattcatccctattccttaactatatatttttatttcagtgagagaaggaaagttgtaaactagccagcccatagtcacctacattttagggaaaaaaattcaaattgtttcctaacattctattttatg

SEQ ID NO: 10312 - DNA, 717 bp, Macaca Fascicularis
  misc_feature (1)...(717): n = A,T,C or G
cgtggtgacnnnnggcaagttggctcacacagactttgacnnnnnnnnnnnnnnnnnnnnnnnngttttcttatatcctttcctttcccacctctaaggtggctggggagaggtcaggggaaagatagttgtaaaaactctaaagctttaatatattcggttttgtatgtaatggaagcacggggctagagttttccgcctatgtcccaccacctgtccctaacataaaggccttccctcgctgttgaggccaccatgccttactgcatccggccaggctgcgaagcgtgaggcacatggtgaatgtggccactgacttttctgtcactaactggacaactggaagacttggaaaggccttcacctgtatctacactctgagcttgccacagaggctccgtctgactgtgggctgggaggagggaggcaggggagagctggtcactgtggctggctttactgcagggcagcactgtggccagctggctgtctggacactgcacgcagaagttgaaacactgaagggccgaagtggcccgcgccgccgcacacagaccctgactttagtgtgggctgttccacgcttggttcaccattgctgcctgggacttacctgctcactcgggccttggctcagctgcaaatggggatacgttagaaactgttcccaaagcttgtcgggctccttaaatgacatgtacaatttaagtgcaaaga

SEQ ID NO: 10313 - DNA, 771 bp, Macaca Fascicularis
  misc_feature (1)...(771): n = A,T,C or G
catgagttnnnnnnnnnnnnnnnnnntacnnnnnnnnnnnnnnnnnnncacaatgaagacaaattacanttccatggtgcnnnaaagaacagccatgtaataaaattccatgcaattgttaaaaagagtaggatgaatttttaagtattgctatgaaaagatctgtgcccagcctacttttacccatttttaaaaggnnnnnnnnatatggaattataatgccagtaataccacttagataatatatattttaagtaggagaaaaccttaaaattactcaccaaaattttgacaaggactgggataactttgtgactttcagtttctctgaaatgttggcattttttattacagtataaacttggattttagccacgcacgatggctcaggcctgtaatcccagctctggaagctgaaggatagcctgagcccaggagttcgaggctgcagtgagctacgatctcaccactacactccaggctggaagacagaaagagacctagtctcaaaaataaataaataacatttaaaaataaaaataacagacttggatttgtacggtggttcagaaagaatatttgtttgaaaaannnnnnnnnnnnnnnnaaatacttacaggattttaaagaccaaagtgttaattaaaacccaatccagaaactctcttttaagaggacttcatattttcatggcattgattccttctcaaagtgcctttgatagagctgttcttagtgcagtagggagatgtgtaacaatttacaaaaggg

SEQ ID NO: 10314 - DNA, 740 bp, Macaca Fascicularis
  misc_feature (1)...(740): n = A,T,C or G
aggagtggagtgctgtcatatnnnntnnnacgggagaggcccaagcacagcaaggacatcgcccgcatcacctttgacgtgtacaagcaaaaccctcgagacctctttggcagcctgaatgtcaaagccacattctacgggctctactctatgagttgtgactttcaaggactcggcccaaagaaagtactcagggagctccttcgttggacctccacactgctgcaaggcctgggccatatgttgctgggaatttcctccacccttcgtcatgtagtggagggggctgagcagtggcagcaaaagggccgcctccattcctactaagaaggggctctgagcttctgcccccagaatcattccaagagacacactgcaaagactatgacagcatcaaatttcaggacctgcagacagtataggctagataactcacccaatttccccattgtcctctgatccgcttgtcagagaacctttcagcataatgcctcacatcccaagtctatacctttacctgaagaatgctgtcccttcctagccacctttctggcctcccacttgccctgaaaggccacaagcctgtcccccaggcatcttgatcccagcctgattgctgctacatctaacccctaccaatgcctcctgtccctaacctccccagcacactgatgacagccctctgactttaccctgagatgtcttcatatccttcaccacaaactaacaaaaacattcca

SEQ ID NO: 10315 - DNA, 718 bp, Macaca Fascicularis
  misc_feature (1)...(718): n = A,T,C or G
ccacnnnnnnnatcatgatgcttctactggcttttgccagtttgtagagggaaaggtgggttggttttagtgctccgaagaacaaaaacaaacaaacaaaaacccctgctacagcatttcaggtgcagtatgatatttcctaatctttcctatttcttaacaaaagattttaaagtacttctctagtcattgaagttttttttttctttacataaatattgatatattctttttctacnnnnnnnnnnnnnnnctacagtttttaatgacttaacaaattgtaccacattgttaaggacatgtaatgacagacactagaactcagacctctgcatgtatatttgataacatgtcttttgtaaaaaaaaaaattacaaaaaaatttgtttacattccactggtaccttaatttaaaataaatcagactaacaggtggtatctcttcttagtgttctatttatcttatttgctaatgggagcacttcttcctttgttaggctgtgctttactgataaaaccaagtattgaataaagagagttaattatctttttaaagtaaataaaattatgaaaatatatatagtatatataaagtattgtgtttaataaaatgttatgcaatgttttccaaactgataaagtttgtaaagtgctataaatgtattttgttaagtacagataaaagctattgtgtgagtatattgtgctaaaatcatag

SEQ ID NO: 10316 - DNA, 1127 bp, Macaca Fascicularis
  misc_feature (1)...(1127): n = A,T,C or G
gccgcgaggttcaaattgagcacatcaaggcttatgtcaccaaatcccccgttgatgcaggcaannnnnnnnnnnnnnnnnnnnnnnnnnnnnnnnnnnngttgcccaataccagatatatggctgacatgatctcaggaaatggatacacaaccattgttccagacttctttgtagggcaagagccttgggacccctctagcgactggtnnnnnnnnnnnnnnnnnnnnnnnnnnnnnnnnnnnnnnnnnnnnnnnnnagagnnnnnnnnnnnnnnnaagtatctgnnnnnnnnnnnnnnnnnnnnnnnnnnnnnnntcgtgnnnnnnnnnnnnnnnnnnactgctgtccatcatttgatggtgaaatannnnnnnnnnnnagcaggggtgtctgtctatggcatcgtcaaggattctgaaggcatttacaatttaaagaaccccaccttgttcatttttgctgaaaatgatgtgtgattccactcgagaatgtatctctgctgacccagaagttgaaagaacactgcaaagttgaatatcaaattaaaacattttctgggcagactcatgggttcgtgcatcggaagagagaagattgctcacctgcagacaagccctacattgatgaggcgagaaggaatttaatcgagtggctgaacaagtannnnnnnnnnnnnnnnnnnnnnnnnnnnnnnngaatagctttcatcccaaaatttgcttggaaatacttagatcatttaattttcacttttataaaataaatgtaggaatcctaaaattcattatttcatttgaaacacaaattcagtaggaaannnnnnnnnnnnngatttgatttttaacatgtacctcaaatcataatttaaaaacaaggcctgggccgggcgcggtggcnnnnnnnnnnnnnnnnnnnnnnnnnnnnngccgagacgggcagatcacgaggtcagaagatcgnnnnnnnnnnnnnnnnnnnnnnnnnnnnnnnnnnnnnnnnnnnnnnnnnnnnnnnnnnnnnnnnnnnnnnnnnnnnnnnnnnnnnnnnnnnnnnnnnnnnnnnnnnnnnnnnnnnnnnnnnnnnnnnnnnnnnnnnnnnnnnnnnnnnnnnnnnnnnnctggcca

SEQ ID NO: 10317 - DNA, 746 bp, Macaca Fascicularis
  misc_feature (1)...(746): n = A,T,C or G
gtccaaagagtcggcaagtccgnnnnnnnnnnnnnnnnnncatgtgggtgtatnnnnnnnnnnnnnnnnnnnnnnnnnnnnnnnnnnngaacaacattcagatcaccaggcctgccttcaaaggcctcaccttcacggacctgcctttgtgcctacaactnnnnnnnntgcagaggctgagcgacgggcgggacctggtcagcctgggccaggcggcccccgacctgcacgtgctcagcgaagaccggctgctgtggaagaaactctgccagtaccacttctctgagcggcagatccgcaaacgattaattctgtcagacaaagggcagctggattggaagaagatgtatttcaaacttgtccgatgttacccaaggaaagagcagtatggagataccattcagctctgcaaacactgtcacatcctttcctggaagggcacnnnnnnnnnnnnnnctgccaataacccagagannnnnnncgtttcactttcaccccaggactttatcaaattgttcaagtnnngaatcccagcacatgccaacaattcagaaaggtccccatgatgaatggagagctgggaatatggcatttggacacttcatttgtaaatagtgtacattttaaacattggcctggaacttcagagataagtcacggagaggacttggaggggagaaatgcagttgctgactgggaatttaagaatgtgaacttctcactagaattggtnnaaaagcaaaata

SEQ ID NO: 10318 - DNA, 755 bp, Macaca Fascicularis
  misc_feature (1)...(755): n = A,T,C or G
tcctaggacctccctagaggnnnnnnctaatccagaaacaccagagaagccagtaagaactcctgaggccaaagaaaatgaaaacatgaacaatcagaaccccgaagaactttgtacttcccccaccttaatgacatctcagattgcttcagagcctggagaggcaaagaagatggaagacaaggaagaggatgataagcttatctcagttgactcctcagagggccaagaccagcttcaagtctccgcggtaccagaaaacaacaacctcacagcacctgaacctcaagaagaggtgtctacaagtgaaaatccacaactctgaagagaaactgccaagactccccctgccccacgcctccccagagaagctcttcaaccagagggtataggtcagagggatataagagccagtatccgttcctgggttctcagtgggaatgctggtgctatctaaagacctggcattaatcaaggtggaggagcagccttgtgggagggatggagggaggcaggctggggagaagagaacattagattcagaaaatatttaattctggttttagcattattagaataagactttatacattaactaaagtggagctttaatcactataaaaaccaaaagtatctatagacacagacacttgtctacacagagacataaccacacatactcaggatagtgaacaaatctgtctttgacttatgacccattttgcaagacttaaagccagaagatcacatttcag

SEQ ID NO: 10319 - DNA, 765 bp, Macaca Fascicularis
  misc_feature (1)...(765): n = A,T,C or G
aacgtgtgccggacagaaacggcctcgacnnntacagagaacaaggatggtacctacaactggacaagctggctcctgnnnnnnnnnnnnnnnnaaagggatgatgtggtcctcacttgccaggtgaagcatgatggacagctggcggtcaacaaaagccttgtcctggaggtctcagcccaccagaaggaccagagctcagatgccacccatggcccggcatcatctcttactgtgctgctcctcatagctgtcctcctgggccccatctacgtcccnnnnnnnnnnnnnnnnnnnctctccttccttcctcccctgccacgtgggacccncatnnctgctgcctccttcctttcttgagaggctcagcttgagagaatgagttagtgagaagcttctctagacttggctccaaacgcctcccctcccaagacatctgcctgcccacaggctcctnnnnnnnnnnnnnnnnnnccttgatgccccagagcagggtcttcattcatggtcctgagaagaggccatgggactgggctctgggcactgacttatgacacnnnnnnnnnnnntgagaaacacgccatgtctaaacacaccaggactcctcccatccatcgccttgggactggccataaaccacagactctctccaggctttcgagagttatcctgtcttccagattcctgcctaccccaactccccagccttgttgaggttctctatcgcctcttgaatacaaatgcactcccaaangtggttaagaa

SEQ ID NO: 10320 - DNA, 921 bp, Macaca Fascicularis
  misc_feature (1)...(921): n = A,T,C or G
cagtgaagccactgcaagattgatagatgatgaagtacgaatccttattaatgatgcttataaaagaacagtagctcttctcacagagaagaaagccgacgtggagaaggttgctcttctgttgttagaaaaagaagtattagataagaatgatatggttgaacttttgggccccagaccatttgcggaaaaatctacctatgaagaatttgtggaaggcactggcagcttggacgaggacacctcgcttccagaaggccttaaggactggaacaaggagcgggaaaaggagaaagaggagcccccgggtgagaaagttgccaactagacacccagagggaggctgtctcagtctgtccgctgtggttnnnnnnnnnnnnnnntttcggctgtgnnnnnnnnnnnnnnnnnnnnnnnnnnnnnnnnnnnnnnnnnnactggcccagctgaaatgatggggagaggagtccttagtcctttcagcctcggaggtcacagtgggtggcaggtgactttccggaggccttgagggaaatnnnnnnnnnnnnnnnnnnnnnnnnnnnnnnnnnnnnnnnnnnnnngcttgagcccagagtggccgaggctggaccccggggcaccaagtggggtcggctgaccgtgcggcagggatcgttgcactggactcttagcgtgtgggaagatgctttctctttgtcgcccactcttcattcctgtttctcctcagttcccctgtgcagatgggctgtgaaattaaattggagtcctgataagaacattttaatttgacttaatattttaaagattgaatccagatcacctgttgctgtcttaatggaatggttttctacaggagctgtaacatacttaaaaatatgaatgtattatgtaaatatggcttctttacataataaaattcca

SEQ ID NO: 10321 - DNA, 651 bp, Macaca Fascicularis
  misc_feature (1)...(651): n = A,T,C or G
atatagtgnnnancatgtagtgcttgcagtnnnangcattttacatatatattcactcattnnncactcaagaagggaacactaaggcaagaaagggtaaatannnnnnnnnnnattatagttagagacagagcaggtgtnnnnnnnnnnnnnnnnnnnnntaatgattgagtcttatttcagtgatgtctgttataatttttttaagtgcctatgaagtcatcaagctaaaaggatataccaactgggctattggattaagtgtggctgatcttattgaatccatgttgaaaaatctatccaggattcatcccgtgtcaacaatggtaaaggggatgtatggcatcgagaatgaagtcttccnngagccttgccatgtatcctcaatgcccgaggattaaccagcgttatcaaccagaagctaaaggatgatgaagttgctcagctcaagaaaagtgcggataccctgtgggacatccagaaggacctaaaagacctgtgactactgggctctaggctatagaaattttaaaactacaatgttattaactctgagcctttagttttcatctgtgtacatggatcgcagtttgctttgatcttcttnnnatatgtgaatttgggctcatagaatcaaagcctatgcttggt

SEQ ID NO: 10322 - DNA, 774 bp, Macaca Fascicularis
  misc_feature (1)...(774): n = A,T,C or G
ggaaagatggaggtatangggnnccagatgtcgctccctggccacgagnnntgcgggaccatcctcatagtttacaacattccccatggcatccagggccctgagcaccccaatcccggaaagccgttcactgccagagggtttccccgccagtgctaccttccagacaatgcccagggccgcaaggtcctagagctcctnnaggtagcnnnnnnnnnnnnnnnnnnnnnnnnnnnnnnnnnnnnnnnnnncacaggtgagacggacactgtggtgtggaannnnnnnnnnnnnnnnnnnnnnnnnnaccgcaacgttacaggccatggctaccccgaccccaactacctgcagaacgtgctggctgagctggccgcccagggggtgaccgaggactgtctggagcagcagtgaccttgtgccccagcacagccgcctctggtggccaccccgctgccccatggctggctgggtggccaggcaggaagtgcccagcccgagaggctgggaggtttgttgggggtgtgnnnnnnnncnnnnnnnnnnnnnnnnntccccctgcctgcctctccttcctcccctccaggaattgggcagccctgggcagttgtactcatgggggcttaagatgcagctacctcagtgcgcagggcccgtctgtcctctgggggctgcttcgggcctgcggtgctcggggcctggtgtggggcaactagagacttccccagcctggacgggcgtgggttctgggtcagcttctttacctcaatttgt

SEQ ID NO: 10323 - DNA, 723 bp, Macaca Fascicularis
  misc_feature (1)...(723): n = A,T,C or G
cccaggctggagtggctgtcatggccgtggccgtcagcgtgggcctcctgctcctcgtcgttgctgtcttctactgcatgagacgcaaaggaggacctggctgccgccggcggcgggagaagggggctccgccaccaggggagccagagctgagccactcagggtcggagaggccagagcagaccggccttctcatgggaggtgcctccggaggagccaggggtggcagcgggggcttcagagacgagtgctgagccaagaacctcctagaggctgtccctggacctggagctgcaggcatcagagaaccagccttgctcacgccgcaaccacccccgccttccctcttccctctccctgcccagccctcccttcctgcctctgccggcaaagcaaggccgcaaagcagggactcacagcggctgcctgcctccgggagggaagaagagggaggggggtgggtgggagggggcnnnnnnnnnnnnnnngtgactctcccagnnnnnnnnnnngctcctggacccaagcccagggccaggcctgggacaaggctctgagggtcggctggccggggctatttttacctcccgcctcccttgctggtccccccacctgacgtcttgctacagagtctgacactggattcaccccccaccccgcccctggtcccgctcctgcccccaccctacctctacccgaccccatcatctgtggacactggag

SEQ ID NO: 10324 - DNA, 861 bp, Macaca Fascicularis
  misc_feature (1)...(861): n = A,T,C or G
tatgagaagtccannngntccggaggccgnnnctgtgnnnacgctcatgacatggcacaggtgtttctggatgagacaatgataggnnnnnnnnnnnnnnnnnnnnnnnnnnnnnnnnnnnctgannnnnnnnnnnnnnnnnacctgaggatcctggtggagaatcaaggacgagtcaatttttcatggcaaatacagaatgnnnnnnnnnnnnnnnnnnnnnnnnnnnnnnnnnnnnnnncttccctggagggctttaccatctattccctggagatgaaaatgagcttctttgannnnnnnnnnnnnnnnnnnnnnnnnnnnnncccagatagccaccagggcccggccttctaccgtgggaccttgaaggctggcccttctcccaaggacaccttnnnnnnnnnnnnnnnnnnnnnnnnnnnnnnnnnnnnnnnnnnnnnnnnnnnncttgggcggtattggaacattgggcctcagcagacactgtaccttcctggagcctggcttcgtccggaagacaacgaggtcatcttgtttgagaagatgctgagtggctcagacatcaaatctacggacaagcccatgctgtaaaaccgtgtctgaacatattttttgggttgctggagttcatctgtaagtcatttttgaggaataagatttatattaagactatcaaacacggtgttgcttacaatagcaaaaatgtgaaaataacaacaacaaaaaccagcagaagaattgttatgtattttggagtctatctatatgatgcctatttttaggctttaaaaagtcttcaaaatctttaacggctgatttatctagttaaatgcttaatccttagcaggctcttattct

SEQ ID NO: 10325 - DNA, 710 bp, Macaca Fascicularis
  misc_feature (1)...(710): n = A,T,C or G
tccaagtaagcaattactgtccttttaagggctcacaactctaagggggtgtnnnnnnnnnnnnnnnnnnnnnnnnnnnnnnnnggggtacgtgactgggggctgcatgtactggtaattagatcagaacaaaacaggatagggatttgcacagtgcatttctatacaatgtctgtaatctatagatagcataaccgattaggtcaggggctgatctttaactaccaggcccagggtgtggcgccgggctgtcnnnnnnnnnnnnnnnnttctgccttttagtttttacttctttctttggaggcagaaattgggcattagacaatatgaggggtagtctcctcccttaaggtgnnnnnnnnnnnnnnnnnnnnnnnnnnnnnnnnnnnnnnnnnnnnnnnnnnnnnnnnnnnnnnnnnnnnnnnnnnnnnnnnnnnnnnnnnnnnnnnnnnnnnnnnnnnnnnnnnannnnnnnnnnnnnnnnnncataccgtgtgactcaggtaggttatgagcttgnnnnnnnnnnnnnnnnnnnnnnnnnnnnnnnnnnnnnnnnnnnnnnnnnnnnnnnnnnnnngggcgtgacagccactctgcaaccctccctatccctgtccccatgcccgtgannnnnnnnnnnnnnnnnnnnnnnnnnnnnnnnnnnnnnnccccccccaccacggaactgccactgagccttcctctcc

SEQ ID NO: 10326 - DNA, 697 bp, Macaca Fascicularis
  misc_feature (1)...(697): n = A,T,C or G
caacaccccaggagttnnnncttacttcccacctggcctgccacctacagacgccgggggagcccctcagtcttccatgtcagannnnnnnnatgtcaacctagtgacccagcagctatctaagtcacaggtggaggaccccctgccccctgtgttctcaggcacaccaaagggcagtggggctggctacggtgttggctttgacctggaggaatnnnnnnnnnnnnnnnnnnnnnnnnnnntggctgatgggccacaggnnnnnnnnnnnnnnnnnnnnnnnntctcagcctccctgcttgctgactggctcgaaggccatggcatgannnnnnnnnnnnnnnagtccctgcnnnnnnnnnnnnnnnnnnnnnnnnnnnnnnnnnnnnnnnnnnnnnntgacctccaggacccatgaggcccacagcctgtgcctagctgccacggtagacctagttccaagatccnnnnnnnnnnnnnnnnnnnnnnnnnnnnnnnnnnnnnnnnnnnnggctcggcttggattattctgcaggttcatctcagacccacctttcagccttaagcagccacctgagccaccaccnnnnnnnnnnnnnnnnnnnnnnnnctgactccccctgtacaatccttttcagtattatatttttattattattatgttattattacactgtctttttgccatcaaaatgag

SEQ ID NO: 10327 - DNA, 729 bp, Macaca Fascicularis
  misc_feature (1)...(729): n = A,T,C or G
cagagagaggatcngataatgagggttctggccaaggctctggaaatgaatcggaaccagagggatccaacaatgaggcctcagatagaggctcagaacatgggtcagatgatagtgactaggttttatttcatcaataagcttcatctctggaggagacttttttaatatatgaaagctgtgataaaaatgtttcagatgtttagtcaattgtgaaatttttcttaaggcaattttcttttctatcagtttgtatattactaagccccaagagacatttcctgtgctagagtccaatatttgagtctcttgtgcaaatgagactattctttgtggtacaattccacctatcatatgtgaaaactgcagtaaaaataaacccagatgctaaatcattcctacaaaggtttgactgannnnnnnnnnnnnnnnnnnnctttatatgttaagcagcatactcttttgatttttattgcaatcttttannnnnnnnnnnnnnnnnnnnnnnnnnnnntctttattccgttttgagtttagattgagaatattttattttctgaaggcagagatatctactgtataattgcaccaaagtacatttgaaaggaaggttttcaatagtgtaatactgcagcgatgtagataaaatcacaaatatataatttgttaggttgaataaggtgtggaaaatgcttttctgttagtagaatgcaaaaacctacctaagcc

SEQ ID NO: 10328 - DNA, 732 bp, Macaca Fascicularis
  misc_feature (1)...(732): n = A,T,C or G
agggcatcagctnnnngaaggtgtggaccagtcacatgaagaggaccatccagacagctgaggccctgggtgtcccctatgagcagtggaaggccctgaatgagattgatgcgggtgtctgtgaggagatgacctatgaagaaatccaggaacattacnnnnnnnnnnnnnnnnnnnnnnnnnnnnnnnnnnnnnnnnnnnnnnnnnccaaaggagagtcctatgagnnnnnnnnnnnnnnnnnnnnnnnnnnnnnaatnnnnnnnnnnnnnnnnnnnnnnnnnnnnnnnnnnnnnnnnnnnnnnnnnnngcggtgcctcctggcctatttcctggataaaagttcagatgagcttccatatctcaagtgccctctgcacacagtgctgaaactcactcctgtggcttatggctgcaaagtggagtccatcnnnnnnnnnnnnnnnnnnnnnnnnnnnnnnnnnnnnnnnnnnnnnnnnnnnnnnnnnnnnnnnnnnnnnnnnnnnnnnnnnnnnnnnnnncctgcccactactgagccctttccaagaaagtgtcctcatcgccttccacctttaggaaatgctatccttgcccttcccctactctgccttggcctcgnnnnnnnnnnnnnnnnnnnnnnnnnnnnnnnnnncaactcccaaacaagcctcacttactggccgcaactaaggagctatctagctctggatgaaactttctttcttaatcct

SEQ ID NO: 10329 - DNA, 780 bp, Macaca Fascicularis
  misc_feature (1)...(780): n = A,T,C or G
agcacatgcagtaggaacagcacaggatgtatgtggagtggggtaggtcggtgatgtgtgggntgaaaagcagttggtaaagttccnttcttgggactcattcctggagtcagtggatacaagtagtgaagaaggttcacactgcaaatagtgttctcatctcaaaacaaactatcattccagaaggaaaagtgtgttggggcaagcagacaacacaatttcctaccagaatatgtccctcaacccccaaaacaaggcttctgtcagcctccccaccagtgatggataacagctcctattctcagctgacctgactgagccaacccctgaactctgcactccttggggaggccacctcccgtcacacccctgagcagagttagggaggaattctacttcccgtaaaaggacctctcctgaggggcagaacctggtgcctccaccacagcttccctctcggctcattccaagcttggccaaattaggggagtggggtggaggttgccctgcatcccccctcctctgcctgagtgtgtctttgtaatgtcagctggcatcatacaaagggcaggagaagcaaacacccagaactcttttgctggtcagaggttccctgagtgtctgtcctcacccaagcctgctctgtgtgtctgtgttgtgaagcttgagactctggaaagaaatggggaggggggtgggggaaatgttgccctaagaatgcttctcattcctctgttcttgttgggtcctgtttttggggagggtgggggttgggggaag

SEQ ID NO: 10330 - DNA, 705 bp, Macaca Fascicularis
  misc_feature (1)...(705): n = A,T,C or G
gttttaagcattggtagcatcattgaataaaataatagtttcctgatgtcactattttgaagtggaaaatatcacttggatgtggaggttttactttttaaaaaaattcagcttaattaccttaccttaattaccttagatacattaataatggaaaaatacaagtcctttctctagaacttgttttctatttttattcctttttgtgaaaacttttcaatttaattttgactactgtaggatagtattgattgaatggatactatgggaaaatggatccaatatttaagatagaagtagtttaaggaaacnnnnnnnnnnnnnnnnnntttttaaaaaaatgtttttactcagatgaacaatttgactttaatgaaagactggtgattattgtacaaagaaattnnnnnnnnnnnnnnntactaattatactgagttttaagcctacatatcacaaaatatttagaattgtgtaaccttttcatacatttataatttttaatgtctttttaaaagatgtgggaccaaaagtatatttacaatttggaaattcgactgcataccaataagaaaacttactttattttgaaatttatctgggatattaaagaatctaccaaattcttaaaaacacagatttatactttaagcttattttgaaattaaagaatatataccaattcttagaaacacttgaaggactac

SEQ ID NO: 10331 - DNA, 737 bp, Macaca Fascicularis
  misc_feature (1)...(737): n = A,T,C or G
ggtgcagcgactgaaggaggaatnnnnnnnnnnnnnccggtatgtggagaacaacaagaatgctgacaacgattggttccgactggagtccaacaaggaagggactcggtggtttggaaaatgctggtatatccatgacctcctgaaatatgagtttgacatcgagtttgacattcctatcacatatcctannnnnnnnnnnnnnnnnnnnnnnnnnnnnnnnnatggaaagacagcaaagatgtacagnnnnnnnnnnnnnnnnnnnnnnnnnnnnntcaaacctttgtgggccaggaatgtgcccaaatttggactagctcatctcatggctctggggctgggtccannnnnnnnnnnnnnnnnnnnnnnnnnnnnnnnnnnnnncgtcatccaacacaaagagaaatgcaaccaatgaagaatcaagccaccgaggcagggcagaggnnnnnnnnnnnnnnnnnnnnnnnnnnnnnnnnnnnatcacacttacctaactgcttccccggacaccctccacctctagttgttactaagtagctgcagcagtcattgctgggggagaaacaaacaaacaccaaccagtattgctacttagtttctaaggctgcacagggaagggaaagactggnnnnnnnnnnatgtagaggtaatttatatccgcccctaggtggagcaacatgcgatcctggaggcatgggggtaactgaaagtgagtacataaagtctttctg

SEQ ID NO: 10332 - DNA, 1434 bp, Macaca Fascicularis
  misc_feature (1)...(1434): n = A,T,C or G
gggattttgatgnnnagcaacaggaagcaannnnnnnnnnnnnnnnnnnnnnnnnnnnnnnnnnnnnnnnnnnnnnnnnnnnnnntaaccccatgatgtctaannnnnnnnnnnnnnggaaggaccttgctaaactccatcgggaggtgagaagcacacctttgacagccacacctggaggccgaggagacatgaaatatggcatatatgctctagagaatgagcatatgaatcggctannnnnnnnnnnnnnnnngcttctgcaannnnnnnnnnnnnnnnnnnnnnnncacccaaagtatgaacgctnncatcggattgccacggagaccgaccaaattggctcagaaatcatagaagagctgggggaacaacgagaccagttagaacgcaccaagagtagactggtaaacacaagtgaaaacttgagcaaaagtcgaaagattctccgttcaatgtccagaaaagtgacaaccaacaagctgctgctttccattatcatcttactggagctcgccatcctgggaggcctggtttactacaaattctttcgcagccattgaacttctatagggaagggtttgtggaccagaactttgaccttgtgaatgcatgatgttagggatgtggatggaataagcatattgctgctgtgggctaacagttcagnnnnnnnnnnnnnnnnnnnnnnnnnggaggagggaggaaagatggaaaaccacttaaatgtgaaggaacagcaacaagaccagtatgatataccaaggtaataaatgctgtttatgatttctttaaatttacatagtactgtagcatattaataccctgtgaactgcaaaaagccaaatacatttacagtagtattggtcaccaaaatagaggggaaactttacaattgtgagaatgtgtaaatgttctcattaaggcagtattgacccagacaaccattttgtatctgtctgtcccctcaatgcctcannnnnnnnnnnnnnnnnnnnnnnnnnnnnnnnnnnnnnnnnnnntcctaaattctcacacgtgcttgattttcnnnnnnnnnnnnnnnnnnnnnnnnnnnnngttggccatagacaatatgccctccttctcttgtctgaccaaaacttgaagcaatcacatccactgccaggttagctgtagtcttcgcctcttcctctgannnnnnnnnnnnnnnnnnnnnnnnnnnnnnnnnnnnnnnnnnnnnnnnnnnnnnnnnaacaaagtgtgacaaaacctcaaattcccttgctgctactctcagtgagggtcatcccactgggacagggagaacaagccaaggtaaaaacaagagtccgttttgtagtagaaaatacctattttcaggaagccccttgcacctcatcctcttggccgtgaatttaagttaaaacactgttatgctacagtagataa

SEQ ID NO: 10333 - DNA, 734 bp, Macaca Fascicularis
  misc_feature (1)...(734): n = A,T,C or G
gaagcaagacccagataccaacacaacgatatggccggagaccatatggtgttgggctgcttattgccggttatgatgatatgggccctcacattttccaaacctgtccatctgctaactattttgnnnnnnnnnnnnnnnnnnnnnnnnnnnnnnnnnnnnnnnnnnnnnnntacttggagagacatatgtctgaatttatggagtgcaatttaaatgaactagnnnnnnnnnnnnnnnnnnnnttaagagagacacttcctgcagaacaggacctaactacaaagaatgtttccattggaattgttggtaaagacttggagtttacaatctatgatgatgatgatgtgtctccattcctcgaaggtcttgaagaaaggccacagagaaaggcacagcctgcnnnnnnnnnnnnnnnnnnnnnnnnnnnnnnnnnngaacnnnnnnnnnnnnnagtgataagccagtctatatatgtattatcaaatatgtaagaatataggcaccacatactgatgacaataatctatactttgaaccaaaagttgcagagtggtggaatgctatgttttaggaatcagtccagatgtgagttttttccaagcaacctcactgaaacctatataatggaatacatttttctttgagagggtctgtataatcattttctagaaagtatgggtatctatactaatgtttttatatgaagaatataggtgtctttgtggttttaa

SEQ ID NO: 10334 - DNA, 906 bp, Macaca Fascicularis
  misc_feature (1)...(906): n = A,T,C or G
gtcttgggggnnnnnnnnnnnnnnngtgnnnaggagaggttttaaatatgtaaataattttccatatgggttagaggatatgaacagtgttagggaagtctttctcacagcgtgtgcttgcgtccccgcgtcanatctattnncattccactatgccccaagcgctggtggtgtggccctttctttttcttcttatcttcagggacatgtgctgttgtgccctcatgtctcacttggttgtttagttaaggcactttataatttttctctcttgtgttcctttctgctttatttccccgctgtgtcttgtctttagcagatcaaccccatcctttgccagctcttcttatcccatgggcactggccaagctttagggaggctcttggtctgggaagtaaaaagtaaacgtggggcagtgggtcaggccagtagttacactgttaagtcactgtagtctgtgtaaccttcactgcatccttgccccattcagcccggcccttcatgatgcaggagagcagggatcccacagtacatgcgctagcactggagttggtgagcatgcgctctgtcttgagatgaggagcttccttactgctcctctgggtgatccaagtgtagtgggaccctctgctagggtcaggaagtggacagtaacatctgtgcaggtgttgacttgaaaaataaagtgttgattggctagaactgctgcctccctgactgtnnnnnnnnttccaccccctgcactgcacttcgttctctcctcacccttacctgcttcaccctagtctgttctggctgtttattaccttgttgcaaaacacggcggaagcaaggattaccttgacaaccctagcttctccttagccatcttccctgacagtgtgatctgtttagtgagatttagc

SEQ ID NO: 10335 - DNA, 734 bp, Macaca Fascicularis
  misc_feature (1)...(734): n = A,T,C or G
cagagcattatttgggaaagcaaactggtgattactggcattttattaaacttaaaactttgtagaaagcaaacaaaattgttcttgcgagaaaaatcacttttagattaaaacacatttttttacatacctaggaggatttaaatccttttcccataaataaaagtataattttcttggtggcagaatgaaaattagcaagttctagcatatagactatataatcagattgacagcatatagaatatatcatcagacaagatgagggagtataaaagttactattnnnnnnnnnnnnnnnnnnnnnnnnattagtttaaaaatactatattctgaatgcaatttttttgttcccttgagnnnnnnnnnnnnnnnnttttggcagtctaagtgtaaatgttaacagcagnnnnnnnnnnnnnnnnnnnnnnnnnnnnncatgatttcccaaatgaaacactgccttggctagagtttgaaaaaactaattgagcctgtgtctggctagaaaacgagtttatttgaatgtgaatagtgtttcaaaggtatgtagttacagaattcctaccaaacagcttaaattcttcaagaaagaattcctgcagcagttattcccttacctgaaggcttcaatcatttggattaacaactgctactctggggaagagtcttctacccacaggtgaagaaaatgagcacacccttcacactgttatcacctacccttaagatgt

SEQ ID NO: 10336 - DNA, 654 bp, Macaca Fascicularis
aacaagatgatgcagaccaatgtcccaggcgtgttcgcagctggtgatgccgtcaccttcccccttgcctggaggaacaaccggaaagtgaacattccacattggcagatggctcatgctcaggggcgcgtggcagcccagaacatgttggcgcaggaagcggagatgaacaccgtgccctacctctggaccgccatgtttggcaagagcctgcgctacgcgggctacggagaaggcttcgacgacgtcatcatccagggggatctggaggagctgaagtttgtggctttttacactaaaggcgacgaggtgatcgccgtggccagcatgaactacgatcccattgtgtccaaggtcgctgaggttctggcctcaggccgtgccatccggaagcgggaggtggagactggcgacatgtcttggcttacagggaaaggatcctgagctcacatgcagtagacttgggcaggcaaaggggggcaccaggggcagaggccaagccttgggggcaggtgccaatctccagtcccaggatcccccagggcagaacctgagccctcccagtgcttgccttcagccacctggctcccctcctgggaggcctctgctggatccagaagatgctcaaccctcaaggcctctactgccactgac

SEQ ID NO: 10337 - DNA, 760 bp, Macaca Fascicularis
  misc_feature (1)...(760): n = A,T,C or G
ctttacatgtannnnnttaacaaataatattnntngtctttaatagactctgtgtttcccctnntcctgtaaccactgtgannnnnnnnnnnnttagacaaagtgagaagtaagtgtttcttcatgtagcaggttaacgtgttttatttttctgttggactatgttcaaatatgttttttgtcttatcctacnnnnnnnnnnnnnnnnagaaggaggtggaggtgagtttannnnnnnnnnnttttttttccttttaaagaagtgttccagactcacctgctaacagtcacttcatgctttggcacaagctctcatgtgctcggtgtctgtctggcttggctgtgactcagtgcaggtgannnnnnnnnnngtcagcattatgttgctgggggcagaaagaaatgcctctgtataaaacagtnnnnnnnnnnnnnnnnnnnnnacatccaattttctctcctcctcctcaccgtcacattattttgacaacaggcagaatttctcagattatctttgggatttaagtgtgactggtttaccttggagaagagagtgaagcttgaagagaggtctcgtgacttggcagaagaaaatttgaagaaagaaatcactaactgtttaaaactattagaggtgagaatcagaacatttgggatataaacatttggtctaagccaggcacannnnnnnnnnnnnnnnnnnnnnnnnnnnnnnnnnnnnnnnnnnnnnnnnnnnnnnnnnnnnnnnnncaagatcagc

SEQ ID NO: 10338 - DNA, 679 bp, Macaca Fascicularis
  misc_feature (1)...(679): n = A,T,C or G
ctgtgtagccgcaggaggagcagttgagggtctcnnnnnnnnnnnnnnnnnnccccaannngaaccaagggcagttnnnnnnnnnnnnnnnnnagtacattcgtttttcctggagtggngattcaggtgtcagatccagatagggggtcannnnnnnnnnnnnnnnnnnnnnnnnnnnnnnnnnnnnnnnnnnnnnnnnnnnnnnnnnnnnnnnnnnnnnnnnnnnnnnnnnnggtgggccgcagactggcttctctacctggaaggacgaggggctgaggccacnnnnnnnnnnnnnnnnnnnnnntcctgtcggcctccacagctccccatccctccaacctccacctccttccaacccctcctctcctgcctcactatccatttgctcaccccaaaaaaagactctgactaggcatggggtggaagaggccagggcagagagacagcatgtggctagtcctgcgaggggaaggaatacctcaatggggcccttggtgttatcccagttatatcatagatctcatcataaagtacacattgtgacctccctcctttagcctgcctggaaaaagccaccacctttctctgacacccaaacaacctccactggatgtaagctacatgaggacaggggctgagctagtctctcttcttcacctctgcagctctaagactt

SEQ ID NO: 10339 - DNA, 418 bp, Macaca Fascicularis
  misc_feature (1)...(418): n = A,T,C or G
ttttcaggacgtcaagaagnnnnnnnnnnnnnnnnggnnnnnnnnnnnnnnnnnnnnnnnnnnngccatggccctggagaaaaaactgaatcaggcccttttggatcttcatgccctgggttctgcccacacggatccccatctctgtgacttcctggagactcacttcctagatgaggaagtgaagctcatcaaaaagatgggtgaccacctgaccaacctcaacaggctggccggcccggaggctgggctgggcgagtatctcttcgaaaggctcactctcaagcacgactaagagctttctgagcccagcgacttctgaagggccccttgcaaaataatagggcttctgcctaagcctctccctccagccactaggcagctttcttaacgaccctaacaagcctggaccaaatga

SEQ ID NO: 10340 - DNA, 677 bp, Macaca Fascicularis
agcgcgaggaagaggcacggccttgccacgccacccacaaccgcgcctgccgctgccgcaccggcttcttcgcacacgctggtttctgcctggagcatgcattgtgtccacctggcaccggcgtgatggccccaggcacccccagccagaacacgcagtgccagccgtgccccccaggcaccttctcagccagcagctccagctcagagcagtgccagccccaccgtaactgcacggccctgggcctggccctcaacgtgccaggctcttcctcccacgacgccctgtgcaccagctgcactgccttccccctcagcaccagggtaccaggaactgaggagtgcaagcgtgccgtcatcgacttcgtggctttccaggatatctccatcaagaggttgcagcggctgctgcaggcccttgagaccccggggggctggggtccaacaccaagggcgggccgcgcagccttgcggctgaagctgcaacagcggctcacggagctcctggaggcgcaggacggggcacttctggtgcggctgctgcaggcactgcgtgtggccaggatgcccgggctggagcggagcgtccgtgagcgcttcctccctgggcactgatcctggccccctctcccccttatttattcgacatccttggcaccccacttgcactaaaagcag

SEQ ID NO: 10341 - DNA, 767 bp, Macaca Fascicularis
  misc_feature (1)...(767): n = A,T,C or G
caagcagagtttgaaaagnnnnnnnncggcatgtacctgggggagatcgtccgccacgtccttttacatttaannnnnnnnnnnnttcncttccggggccagcagacccagcgccttcagaccagggacatcttcaagaccaagttcctctctgagatcgaaagcgacagcctggccctgcggcaggtctgagccatcctagaggatctggggctgccnnnnnnnnnnnnnnnnnnnnnnatggtgctagaggtgtgccaggccgtgtcccagcgggctgcccagctctgtggggcgggtgtagctgctgtggtggagaagatccgggagaaccggggcnnnnnnnnnnnnnnnnnnnnnntgggggtnnnnnnnnnnnnnnncaagctgcacccgcacttctccagcctggtggcagccacggtgcgggagctggcccctcgctgtgtggtcacgttcctgcagtcagaggatgggtccggcaaaggtgcagccctggtcannnnnnnnnnnnnnnnnnnnnnnnnnnnnnnnnnnnnctgaggaaatctccaggctgaggaggctccaccgcagccttgctggacctgggtcggggtctgcctgtttcccagccaggcccagccacccaggattcccgggacatcccatgtgtgacccctctgcggccatttggcctttctccctggctttccccgagagaagtagcactcaggttagcaatatatatatataatttatttacattcacgtccaataaaatccct

SEQ ID NO: 10342 - DNA, 850 bp, Macaca Fascicularis
  misc_feature (1)...(850): n = A,T,C or G
aacttgtaatgggtgnnnnntggtatggttatgannnnnnnnnnnnnaatctgtctgaggatcatgtttgtaccattgcaaaagtcccattccggggggctccttgtagtgatgctgcaggacgtcaggtgccctacaaaatgatcatgaagcaaataaatagttctatttctggaaaccaatgggataaagatcagcaggctccttattataactataaagatcctgctggccactttcatcaagtatggtatgataaccctcagagtatttctttaaaggcaacatatatacaaaactatggcttacggggcatcggcatgtggaatgcaaactgtcttgactactctnnnnnnnnnnnnnnnnnnnnnnaaactgaagaaannnnnnnnnnnnnnnnnnnnnnnnnnttacaaagatgaacatcttttgtcaaaccattaagatttagaaaaatgatctgtataaatagatctagtttcttgcatttttgttatgttgctatatacttttgttattggtatactaaaaaaagaataaagaaatgttgattgtttgaattcnnnnnnnnnnnnnnnnnnnnnnnnnnannnnnnnnnnngaatataaaggcaagaaactagtcaacttacctgttaagtattcctctattagatgtttcaacactataatttaattgggaaaaattgctttcagaattttattatgccatatttcccttcattatagtaaaatatatgcttatgaatcaatgctgatttttaaaatatgtataatctgaagtggaaattgtttgcttagagtttttaaaaacctagtcttgaaaagcagtttgtgctatactttcccc

SEQ ID NO: 10343 - DNA, 478 bp, Macaca Fascicularis
actagtaggggcatatggggccacggagaagccccggccccaaggttctgcccagccccccccaggtgccccccaaggccctcctggaacagcttctggcccaccccctcctggacccatccttcggcctcagaaccctggggccaacccccagctgcgaagcctcctcctcaacccgccaccgccgcagaccggggtgcccccaccccaggcctccctccaccacctccagccaccaggggctcctgcgctgctgcccccgccacaccagggcctggggcagccccagttggggcccccactcctgcatccaccacctgcccagtcctggcccgcacaacttcccccgcgggctccactgccaggtcagatgctgctgagcgggggtccccgaggcccggtcccccagccgggcctgcagcccagcgtcatggaggacgacatcctcaggatctcatctgaatccccaacacccaat

SEQ ID NO: 10344 - DNA, 736 bp, Macaca Fascicularis
  misc_feature (1)...(736): n = A,T,C or G
ggatgccaaacgagattggggccatgccaaggactatgtggaggctatgtggctgatgttgcagaatgatgagccagaggacttcgtcatagctactggggaggtccatagtgtccgggaatttgtcgagaaatcattcatgcacattgaaannnncattgtgtgggaaggaaagaatgaaaatgaagtgggcagatgtaaagnnnnnnnnnnnnnnnnnnnnnnnnnnnnnnnnnnnnnnnnnnnnnnnnnnnnnnnnnnnnnnnnnnnnnnnnnntgcaccaaagcgaaacagaannnnnnnnnnnngccccgggtcgnnnnnnnnnnnnnnnnnnnggagatggnnnnnnnnnnnnnngagctcatgaggacaaaccccaatgcctgagcacagccgcggagcccgcccgccagcccgccctccggctgcgatccccgcagagtcgccggtgcagacgcactgtggggatggggaggggcgtgccaatctgcgggtccctgtggcccctgctgccaccgcgctgtcccggccgcaggagcgggccgccccgccgagttttgtagcagccgggatgtgaccctccggggtttgggccgcttcgcttttgtcgaagcctcctctgaatggctttgtgaaatcaagatgttttaatcatnnnnnnnnnnnnnnnnatnnnnnnnnnnnnnnnnaaattgtggggccttcaaattgtttttctcttttcatataaaa

SEQ ID NO: 10345 - DNA, 652 bp, Macaca Fascicularis
  misc_feature (1)...(652): n = A,T,C or G
gagcgcgcagggngcgccnnngagnnnnnnnnnnnnnnnngcccgggcccggcagggggccgctgcgtgcgctggggtccccgcgagagccgggccctcttcatgcaggccacgccacaccgggacatcagccgccgcgtggccgccttccgctttgagctgcgcgaggacgggcgccccgagctgcccccgcaggcccacggtctcggcgtagacggtgcctgcaggccctgcannnnnnnnnnnnnnnncctggccgcatgcaccagcgacttcgtaattcacgggannnnnnnnnnnnnnnnnnnnnnnnnnnnnnnnnnnnnnnnnnnnnnnnnnnnnnnngctgcccgtgtcctccgccagacactgccgctgttcgggaggcggggatccggggaggaggggctgacctcctttcgtaccccactgcgctgtggcgtccgcccaggcccaggcaccttcctcttcatgggctggagccgcttcggggaggcctggctgggctgtgccccacgattccaggagtnnnnnnnnnnnnnnnnggctgcccgcactgcccacctccacccctgtgaggtggcgctgcactgaggggccagatgctgggaggagctggtaggagggagggtggggggcccactgcttggag

SEQ ID NO: 10346 - DNA, 702 bp, Macaca Fascicularis
  misc_feature (1)...(702): n = A,T,C or G
gtnnnnnnnnnnnnnnnnnncagaaaagtgtgnnggctgcagaatttcaagatggatcggganntgccctcattcacccagaatgtgcacaggctggtcaacgannngcgctactacagactctgcaacgatagcctgccccctggcactgtgaagctctaggcctgctactggctggggacacggacttctgctgttgccacatgcgccaaccctaccttccaccacagatgtctcccagacgggcgtcggtcacactctttggcttctcccacgccaagcaacgctgcctgcctctgccgctcttccacatattgccgctgcccagcagagatggcttctgggtccacctgagcactggatggtgctcccagggcattggagcaggcggagggttgtgtggccaggtattaggaggcaccgggaaatcccatgggggtggcccatgcagaccaggggcatgtgggtcatggggcagaatcgccaaggacagctcacgacagtgccaccttctcaccattccagccaaggagagatgtgacgtcggaactgctctggcacttctgtcaagcctcccccgccccaattgccctgagatatctgctctttgtcagagatttgcaaagactcacggttttgttgttttctcatcattccacttgtgatactaagaaactaagaagcttaagaaaagaaataaaa

SEQ ID NO: 10347 - DNA, 825 bp, Macaca Fascicularis
  misc_feature (1)...(825): n = A,T,C or G
tgnnnnnnnnnnnnnnnnngnnnnnccatggcaaagtggatccagtagagcccattaatcttgatcattccgtttttttgtccatcttgtttcatttccttgccccgcccccaagacggagtctcactctgtcacccaggctggactgtactggcacgatcttggctcactgcannnnnnntcccaggttcaagcttgtccaggctgatcttgaactcctgacctcatgatccatccacctcggcctcccaaaatgctgggattacggggtgagccacagtgcccatcctcacttgctttcttatccttacactcccccagtcccagagtaactgccacatacaccacaaaaaccaaatacccccaatgaccttagccccattgctccattcactcccaggtgagaattcaggcaaacgtccacaaaggtcacaggcaacgtgcatacggttctgttatatcccatatattaccccttcatgtcctaaagaagacattttctcttagagattttcattttagtgtatctttaaaaagaaaaatcttgtgttaacttgcctccatctttttcttgggtgaggacacccaggaatgacccttttgtgtctatgatgttgctgttcacagcttttcttgataggcctagtacaatcttgggaacagggttgctgtatactgaacgtctgacagtagctcttagactcgcctatcttaggtagtcacgctgtgcatttttttttcattggtgtactgtgtttgatttgtctctgatatatttggagtttttctgagaaatggagcagtaatgcagcatcaacctataaa

SEQ ID NO: 10348 - DNA, 755 bp, Macaca Fascicularis
  misc_feature (1)...(755): n = A,T,C or G
gatgagatctatggnnnnnnacacgtcagtggccaggtcaccaattattctttggatgctgtgctctgctacacccccannnacaagaaatcccacacannnnnnnnnnacaagaggatggtcagccgtcgcaccttccggccactcaaccagtccnnnnnnnnnnnnnnnnnctggtttcagtccacctatggatctgaggggcctgcttctagtgagttattgcctttcctaagaagtcaggcatcgcacttcagcagacactgtactgacacttggtctcctcctgaaattcccagattcactgaatggtaccatgccgacctgtgagaagttatgttgcatcannnnnnnnnnnnnnnnnnaagcttggctccctcagaaaggcgcttcccttttgcactgctgaggatctttgaaggaacatgnnnnnnnnnnnnttcagcttctggcaccagagtggaacccagtaagcaccatcaggaatgaatttcnnnnnnnnnnnnnnnnnnnnnnnttttcaagggagtagttaacttgcaaattacatccttgctgaattcaggaggtctaaaaccctactctaccatgttagaaaacagcccaggattttctcattgctctgccatcatatatatctatgactagagccctcatttttccatctgcaaaacaataatgcctatgtgtatttgcatatagatttgaaatcttcattcaaggttcggtaggatcagattttctcaaaaataaga

SEQ ID NO: 10349 - DNA, 718 bp, Macaca Fascicularis
  misc_feature (1)...(718): n = A,T,C or G
annnaaggaaacggagactannnnaaagttactgttcctagtccagctttaagtttcgataaggaacatgctgttttgtttcatgattttattaattatggaaatttggcattgagggattattttattgagggtgaaagagattccagaaacatcttctgtgacgatgatgtcctttagggctcttggagcagccagaccatgtttccaagagaaacccggtgatactgccggcagacccccaccctccccagttgtcctggggctgaatgggcaaatctatccaaacagctagtaaccggctgtgagggagagggtcagaagcacttagcgttggcctctgattcctgtcctctcgtcctcttcccactccagtgatgaaaatgatttttctctaaatgcnnnnnnnnnnnnnnnttcaatgggtaaggatgctttcaaggagctcgctcggcctgcctaccctgccctctcacctctgaccgctcctgcctccacctctgactcttcagcagctgaagattaatgcagataaagaccaaagcccaaaagaagggggaaaaaaagcgaagcccagagaaggcaggctgtgcctgagcctgatggcagagctcgttgctgggtgaggatggcgttctccaagtattcccaaccgacgggatgaccttccattgtgttttcctaaccctgctcatcctgtagcataaatgaagtgcac

SEQ ID NO: 10350 - DNA, 647 bp, Macaca Fascicularis
  misc_feature (1)...(647): n = A,T,C or G
gttagctttgtatgacagtagtctttccctttatagtttttctataaaaactggttttaaaatcagtagaaaagggcaggttgaatcaaggtgaatgaatcnnnnnnnnnnnnnnnnnnnnnntcatcgctgttccttcagctgagtgctgcacatcatgggctctgtctgtgagagaaaaatcccggtgcttggtgtccttgcatgacatggagttttgcatgtagatcaatttaaaatgtacctcttgtttacataatttgcataattttgaaagataatgttgccaaactttggaaatgttaatgttcagactgaaaatctccactacatgtaacttttttcctctggatcagtggcatggcttataatcccagccagtggtttgaactgttccagtgtcaactgccatgtgctctgcttcaggggggaactagtcttttgtgaattttttgtacataagtatttgttacaaatattttagcaaatgctttatatttctcttgcttgtgcatatcttgnnnnnnnnnnnnnnnaaatagtgcaaacattatttccttaccggggaaagagggtttttttctttttttctttttttttttttcaagtttgtgtgtgggggtgggtaggggagggggtggtttatg

SEQ ID NO: 10351 - DNA, 768 bp, Macaca Fascicularis
  misc_feature (1)...(768): n = A,T,C or G
aggtttcataagttngtactgaaaaacagcattttgattggtnnnntttgtaacacnnnnnaccatctgatgcttctgaaaagtactttcaactttcgaaggaaacttttctttaaagactgacctaaacactgagggaaactttagaacgtttaaaatataggagtccatgatttccctgtgttttcagtttctttccttctgtgaacgatgagacttggagaacgggctggtccttcaccacctcccgttggccctggcccggccggggaaggtggcagtggcactggactgacctgcagtgacccgcgatgccgcgccacaagggacactcacggcttcattcgagagctgctgccaaaatgcctggcgccgccaccgtcaggggctggcttcgaggacgcccgcctgcctcgcgggccgtgtccgcgggactgtgttcgtacgtgcgtagtttcgataccacatcgcggggctgtgttcctacgtgcgtagttcgatatcacaccctccgtgtgccgccttacttcctgctttgagaatgtataacgtggaaatccacnnngaccaagtttctgcagaggccttgccggatggttccataactgtagagtctaaatactatccattacagaaattaatcgttcagttgagagaagtactgatgacttttcaaaacaaatgaaccatcgtagttgacagagaaccatattgtagaggtttgtagttagtgcttatttttgcatgttgatgtgactagctaataaa

SEQ ID NO: 10352 - DNA, 757 bp, Macaca Fascicularis
  misc_feature (1)...(757): n = A,T,C or G
cagcgagccgctgcaggnnnttngatatgtgaaggggggccactaccatgcccacgtggacagtgggcctgtgtacccagagaccatctgctcccataccaacaactggggacctgcgtctgtacccttcgagacctcctgccgctacataacagtgctgttttatttgannnnnnnnnnnnnnnnnnnnnnnnnnnnnnnnnnnnnnnnnnnnnnnnnnnnnnnnnnnnnnnnnnnnnnnnnnnnnnnnnnnnnnnncctccgtgacacacggaggcactgtgacaagggaaacctgcgtgtcaagccccgacagggcacagcagtcttctggtacaactacctgcctgatgggcaaggttgggtgggtgacgtggacgactactcgctgcacgggggcnnnnnnnnnnnnnnnnnnnnnnnnnggnnnnnnnnnnnnnnnattaatgtggaccccagccgagcgcggcaagcgctgttccaacaggagatggcccgcttggcccgagaagggggcgccgaatcgcagcccgagtgggctctggaccgggcctaccgcgatacgcgcgtggagctctgagggaaaagttagccccagttcccagccgcaggtcgccagnnnnnnnnnnnnnngggtccaactgtccctctgtccnnnnnnnnnnnnnnnnnnnnnttgccccaccccgccagccgcaatnnnnnnnnnnncctatattcatgttatttattgtgtactgnnnccatctgccccgtc

SEQ ID NO: 10353 - DNA, 738 bp, Macaca Fascicularis
  misc_feature (1)...(738): n = A,T,C or G
cttgcttcaaagtaagnnnnnnnnnnnnnnngccgactcnaccttacaggtgcatttgttgttttgcactgggaagaaataggatccatccttagctgagcctctcatggcttccctccaaagtaacttagggttgagggatctatatnnnnnnnnnnnnnttacgttaaacctctagtttcatgctgtcattcattaggctgggccaccaaatgtttnnnnnnnnttatcagaagccaagtcattagcgtcttgtttgttgcccattgcctatacttttcacctgagatgtgtgagttcgggccttttaaaaactactgaattgtctgagccttgaagacatttccagggagaagagataatctctcatttcactcacaggctggtctaataacctatttaacgatgtccttgtttaagaaccattatttatttttagtttttaatataaannnnnnnnnnnnnnnnnnnnnnngtctttaaatgaggaaattttaagtcctactgatctaacctttgaagctttaaaaaagaggaaaaaagggtgggggtgggaaactggcatactgtttatagcactgctgattggctaagccactgtgtctctgctacaaattaaagaaagcctaaaagttttccttggtcatagagttggggaatgacagaatttttctttactgtgaaatgtatgtacagagtagaccacctctagccctgtggcgaaagaggtacactcga

SEQ ID NO: 10354 - DNA, 757 bp, Macaca Fascicularis
  misc_feature (1)...(757): n = A,T,C or G
tagatataatatcagncnnnnnnnnnnnnnnnnnnnnngataaaatgaggttgnnnnntatctattatataagcacacagcaagcannnnctgaggctgatttggagcaatataaaaaagctttnnnnnnnnnnnnnnnnnnnnttaatcctttacaatatatcaaacagtggannnnnnnnnnnnnnnnnnnnnnagctcctgccagctatnnnnnnnnnaccactaaaccaatgggtctcttatcacgagtcatgaatacaggatcannnnnnnnnatggaaggagtgaagaacctggttnnnnnnnnnnnnnnnntacctgttactcgtattttggacaatcttatggagatgaagtcannnnnngaaactgatgactatagatattttgatcccaaaatgctacggggcnnnnnnnnnnnnnnnnnnnnnnnnnnnnnnnnnnnnnnnnnnnnnnnnnnnnnnnnnnnnnnnnnnnnnnnnnnnnnnnaatatcaaaatcttgttgactacataaaggggaaacaaggcaaacacattttatatggctgcagtgagctttttaatgctacacagttcataaaacagttgtcacaacttggacaaaagtaacacacaaaaaccttactatgatataatctacttggaatgtggataaatgtgaaaagaaaagttagaagagtagcataacagtgtcctaacagtgaaaatcagttatttgttaatttttaaggaaattctatacttaatatgta

SEQ ID NO: 10355 - DNA, 774 bp, Macaca Fascicularis
  misc_feature (1)...(774): n = A,T,C or G
gataagagcaagtctagcttcctgatcatgtgcggaggccagaagaatgggggaaactcatctatcagtgggtttccaggagtggccagaacaactccgtctttaccctgtatgaactaactaacggggaagacacagaggatgaggagttccatgggctggatgaggccactctactgcgggctctgcaggccctacagcaggaacacaaggcnnnnnnnnnnnnnnnnnnnnnnnnncgaggcgtcaagttcttctagcagggacctgtctccctttacttcttacctcccacctttccagggctttcaaaaggagacagacccagtgtcccccaaagactggatctgtgactccaccagactcaaaagggctccagtcctgaaggctgggacctggggatgggtttctcataccccatatgtctgtccttggatagggtgaggctgaagcaccagggaggaaagatgtgcttcttgttgccctacctcctttccatcctagactgtccttgagccagggtctataaacctgatactttatatgtgttcacacatgtaagtacatacacacatgcacctgcagcacatgcttctgtctcctcctcctcccacccctttagctgctgttgcctcccttctcaggctggtgctggatccttcccaggggatgggggaagccctggctgcaggcagccttccaggcaatatgaagataggaggcccacgggcctggcagtgagaggtgtggctcgacaccgnntttatgatataa

SEQ ID NO: 10356 - DNA, 738 bp, Macaca Fascicularis
cactcaagccgccaccataaaacagaaagtaaaggacaccgggcaagccgactcacagtcctaagagaatatgcctacgatgtcccaacgagcgtggaaggaagcgtgcagaacggcttacctaaaagccggctgggcaatcacgaaggacactcaaggagccgaagagcttatttagcctacagagagagacagtacaaccgaccccagcaagacagcagtgatgcttgtagcacacttcccaaaagcagcagaaatttcgaaaagccagtttcaaccagtagtaaaaaagatgcgttaaggaagccagctgtggttgaacttgaaaatcagcagaaatcttatggcctcaacttggccattcagaatggaccaattaaaagcactgggcaggagggatccttgctgggtaccgatagcactggcaatgttaggactggactgtggaaacacgaaactactgtttaacgttgctgggcttcctaggcagaaattcatagaaactgtgatattcacattccttcaagctatgaacatttaaaaactgtttacagccaccatagggattcaaaagaatttggaataaactttgaagttttggattttacttatttttatccccaaattgttgctatgttttaggatgtgaaataaaatctttctaaaacatggttttcgttgtcgaagcaccaacaggacatttgggatctgaaatgtaatttcttagaatctgtactt

SEQ ID NO: 10357 - DNA, 1134 bp, Macaca Fascicularis
  misc_feature (1)...(1134): n = A,T,C or G
gatgatacgtggttaggagtccaggcaaggcatgcacttggaatgctttcagtcagcaagagggtcaccttgctgaggtgcagggcaaggtgtggcaggctggtgatcccaggtggaggacaggagtgacaggtgtggatgtttggtggaggtgttctgagctcaggnnnnnnnnnnnnnnnnnnnnnnaagcctgaacgtggcctgggtccttcggatgggttgactggtctctccagtcgcaggggcagcccaggcaccgtcctgggccttcccttctggcnnnnnnnnnnnnnnnnnnnnnnnnnnnnnnnnnnnnnnnnnnnnnnnnnnnnnnngagccccacagcttggcacaggctctctcacctcaagcccccagtcctccttgggaccgtgggaggccaggccctgcatctgaggtcctggtttttgtcaaggcagggccctgnnnnnnnnnnnnnnnagggccagcctcagggccctgggcttcgaaccaggctgttgatcacagccnnnnnnnnnnnnnnnnnnnnnnnggcctggctggccctgagggctgagaaagagaggctgcagcagcaaaagcgaatagaagccctgcgccaggcagctgtgggccagggcgacttccacctgctggaccacaaaggccagggtcgccgcaaggctgacttccggggccagtgggtgctgatgtactttggtttcactcactgccctgacatctgcccagacgagctggagaagctggtgcaggtggtgcggaannnnnnnnnnnnnnnnnnnttgcctccagtgcagcccgtcttcatnnnnnnnnnnnnnnnnnnnnnnnnnnnnnnnnnnnnnnnnnnnnnnnnncaggacttccacccaagannnnnnnnnnnnnnnngctccaccgaacagattgcccaggctactcacagttaccgtgtgtactacagtgccggccccaaggatgaggaccannnnnnnnnnnnnnnnnnnnnnnnnnnnnnnnnnnnnnnnnnnnnnnnnnnnnnnntcaccgattactacggccggagcaagtcagctgagcagatctcagacagtgtgcggcggcacatggcgactttccgcagtgtcctgtcttaagccnnngcagcc

SEQ ID NO: 10358 - DNA, 728 bp, Macaca Fascicularis
  misc_feature (1)...(728): n = A,T,C or G
tgagcnnnaaggcannnatgcctnnctgtggggcctggggctgcagaacgcnnnngcgtttcatgggcttcattagcggccctagggagagggctttctgctttggatccctgttccagctcctgttctctagcacgggccctgggtctatcgacttcccccatcaagtctcttcaggccctcagtcaagtttggctaaaggttggtgtaaaaatccagagaagnnnnnnnnnnnnnnnagatgccgtggattaactgtgaaactgaccaactccaggtctgataccaaaagcaatatttgtcatgtggtctgaccatgtggagatatttctggacttgctagagcctgcttagctgcatgttttgtagttacgatttttggaatcccactttgagtgttgaaagtgtaaggaagctttcttcttatatcttgggcttggatactgcccagagaagaaatttggctttttttttttcttaatggacaagaaacacttgctgttctcatgttccaactctgagagcaagagaccctcatcatctgtgcctggaagagttcattgtcactgagcagcacagcctgagcgctgtcctctgagtgtcannccgtattccactgccttatctgacaaggggtcacatgctgctcaccttactgccctgggattacatcagttacaggccagagtctccttggagggcctggaactcagtcctcctatgaacct

SEQ ID NO: 10359 - DNA, 737 bp, Macaca Fascicularis
  misc_feature (1)...(737): n = A,T,C or G
cttgaagctcctaactacannnacaacatgcacgagggaaatgnnnnnnnnnnnnnnnnnnnnnnacataggagccacaaaatgttctttgttctttggctccagaaagactgtcagatttcagcctcttttgatggaccgttttatcacagttgactttaaatacagcttgtctcatgacacaacacttccctacattccatttnnnnnnnnnnnnnnnnnnnnnnnnnnnnnnnnnnnnnnnnnnaaggaatcttttcatccagannnnnnnnnnnnnnnnnnnnnnnnttggacttgagcccccagcctccacttgaacaccatatgaagggaacctcaatacctcataaaatggcctttctcattcatctcctcatgggaacattattgtacnnnnnnnnnnnnnnnnnnnnnnnnnatgactatgaccnnnnnnnnnnnnnnnnnnnnnnnnnnnnnnnnnnnnnnnnnnnnnnnnnaatggcctgggaatggactgattattattatacattttctggcctgagagaaagccagagtcccctgctattaacagcagccctgcctgggagcttggaatcttggtaatctgcccgattggatctatggaggtagtctcaccctttttttcttttgtgggaaattaagagaaataattatcagacatatcatcacctccagtggaactacagagacctggaccccagctgcactgttttagtgtaaaaataaac

SEQ ID NO: 10360 - DNA, 769 bp, Macaca Fascicularis
  misc_feature (1)...(769): n = A,T,C or G
gaaagccagcaagcgactccgtgagccactggatggagatggagatgaaagcgcagagccgtatgcaaagcacatgaagccgagcatggagccggcgcctccannnnnnnnnnnnnnnnnnnnnnnnnnnnnnnnnnnnnnnnnnnnnnnnnnnnnnnnnnnnnnnnnnnnnnnnnnnnnnnnnnnnncacgagcgggaatcggcgtttactgggggccgggccatcctttaaatgtannnnnnnnnnnnnctgggcgacagacaaaccaaagagcagaaattcatgcagcctgcaaagccattgaacaagcaaaggctcaaaacatcagtaaactggttctgtatacagacagtatgtttactannnnnnnnnnnnnnnnnnnngttcaaagttggaaggaaaatgggtggaagacaagtgcagggaaagaggtgatcaacaagnnnnnnnnnnnnnnnnnnnnnnnnnnnnnnnnnnnnnnnnnnnnnnnnnnnnnnnnnnnnnnnnnnnnnnnnnnnnnnnnnnnnnnnnnnnnnnnnnnnnnnnnnnnnnnaaaaggagctaaacaattggaagactgagccatgtgactttagtccttgggagaacttgagccagtggctgtcttgctgcttgtgnnnnnnnntnnnnnnnnnnnnnnnnagatgggaccatcgcggtgatgggcagatgcgtctttcacacggaatcaggcacagtggccttctgtgacacgttttcataaaaaatggttaagtatataataa

SEQ ID NO: 10361 - DNA, 1022 bp, Macaca Fascicularis
  misc_feature (1)...(1022): n = A,T,C or G
atggtaaataaatagatatacaatgtgtggtatgccaagttcttggactgaaaaacatagtattacaaagattcaatctccttatacaatcccaatcagtatcccagcagggtgtgtggatgtgtgcagaacccaaccaactaatcttaaaattcaggggaccaaggctagctcaaacccgattaaaagagaaagggtacaacgtgggaggatttgatcctccagatatcaaaaaacactatgtagtgctaataagtagaacagtgtgatatttatacacagatagaccaatataaacaaaccaaacagtatagaaagcaaattagcatgtatttgcttttattagaacttgctatattagaggtgttgcatggcatatcactggggaatgaaaaagttttgaagtaaatggtgttgggataaccaagtctttataaagatattcaaatcatgcagaaaatnnnnnnnnnnnnnnnnnnnnnnnnnaagtgtcaaaggcagaactctaaagcttctagaagagatacaagagaaggatttttttcaacaatacataacattgctattctgaaataatatttgatattataaaatctttaagttgcgttaaataaaaatattggtatatgtgactgggttgaaattaagaatttatgttaatcaaaacagggcataaaaagtgaaaannnnnnnnnnnnnnnnnnnnnnnnnaaggctttctaatttatcggctctcaagcagtacctccccaaagannnnnnnnnnnnnnngtctcatgcattgtcttgactaggtgactttcaatcatatctcttcagtctatctttttatggcattattaagtacttgaagtttttctttttatatatttttttcatatgtgttttgtcagtttacaatcagtaatatacaagatcactgtacacatcaattttgtcttatcatagatgtgtctctagtatctnnnnnagaactaggtacagagaagattctcaataattatctgttgacagatgaacag

SEQ ID NO: 10362 - DNA, 756 bp, Macaca Fascicularis
  misc_feature (1)...(756): n = A,T,C or G
aaggctatgatgtgcngggtggttccatgagagcctgcccatggcctcgggtgcccctttannnnctgctggatggacatccggnnnnnnnnnnnnnnnnggtcgtggccggggtgggcagaggcagaggcagaggcagaggcagatggaggcacggagggcccatcaccagtggggtcgttacctcttgtcaacagctgggcgtggctcaggccagagcttctcaacctagagtccctggggatggctgccaaaggtgtgtgtgagagacacgtatccctggacttttcttgggggaggtctgggactttggccacattctccaagggctgctgggcttcggagcagtccctcccatgtctcggccaccacagggcccctctctctccttgtgcccagaccctctgccgccttggtaacgagcacaaggaaagtcttggggtgctcaaaatcaggagagcaaaacatgccaggcaaaagcccccgggaaaagccggaggagtctggggtgaccaccggggtgtggagcagcaagggcaaagacagtgatcacggccctccagctgtctgaacctcagttttctaatctgtagaatggggatgatcatacctgcctcacaagaatgttgagacaattcacagaaatgttctggagccccttccccctgtgaccggcattcatgagtctgctgggaccagaaaacccatctcagggggtcagcggggcacccaggagaatctggctgtgcacgtgct

SEQ ID NO: 10363 - DNA, 738 bp, Macaca Fascicularis
  misc_feature (1)...(738): n = A,T,C or G
gtgaggcctgtaacccaccagctgtccagtctggccctggtggcttccaagctgtgcgaggagagccccatcacatcagtgcccagagggagtttgcgggggcgggggcctagccctgcagctgcctcctctgagggcagccccctgcgccgcaccccgctgcccaagcattttgagatcacccaggagacagcccggctactctccaaactggacagtgaggctgtgcccagggccacctgctgcccggacgtccagcctgaggaagccgaggaccatctctgaccaccctggcacactaaataaggnnnnnnnnnnnnnnnnnnagacggacgcaatctccctacctcccaccacctggtggccaaacagcctgccaggagttcaatactgggagaggtccagagggttcctataaggaaaaactatttaatacatggcctatgggaggcctaaaaccctttcgggggcaatgtcctggaatccccnnnnnnnacacaggtcactgccaagcatcagggccactcaggctcnnnnnnnnnnnnnnnnnnnnnnnnnnnnnnnnnnnnnnnnnnnnnnnnnnnnnnnntcaccctagtctcccacccctgggacaggggtgcttttgctactttggttgtggtcactcccccacacctgcctgcccccttcgtggactcgaagtgaccttnnnggaggaggtgggcagcgcagactccacatcctgnnnnnncctgg

SEQ ID NO: 10364 - DNA, 751 bp, Macaca Fascicularis
  misc_feature (1)...(751): n = A,T,C or G
gcagccaggtgtagtncnnnnagccactnnngccaaagtgagagtccagcnntcttccagcgcttgggccacggcagcggccctgggagcagaggtggagcgaccccattacgctaaagatgaaaggctggggttggctggccctgcttctgggggccctgctgggaaccgcctgggctcggaggagccaggatctccactgtggagcgtgcagggctctggtggatgaactannnnnnnnnnnnnnnnnnnnngaccccaagaagactattcagatgggatctttccggatcaatccagannnnnnnnnnnnnnnnnnnnnnnnnccttatgcccgctcagaggcccacctcacagagctgctggaggagatatgtgaccggatgaaggagtatggggaacagattgatccttccacccatcgcaagaactatgtacgtgtagtgggccggaatggagaatccaatgaactggacctacaaggcatccgaattgnnnnnnnnnncagtggcaccctcaagtttgcgtgtgagagcattgtggaggaatacgaggatgaactcattgaattcttttcccgagaggctgacaatgttaaagacaaactttgcagtaagcgaacagatctttgtgaccatgccctgcacatatcgcatgatgagctatgaaccactggagcagcccacactggcttgatggatcacccccaggaggggaaaatggtggcaatgccttttatatattatgtttt

SEQ ID NO: 10365 - DNA, 813 bp, Macaca Fascicularis
  misc_feature (1)...(813): n = A,T,C or G
ttgcactgagcattccacttaggaagaggatagggaaggatctgntccgcctttggccacaggagcagctttggccacaggagcagaggcagacctgggatgcctgttcctcttcagggatggatagtgacctgtcttcattttgcacaggtaagagagtggatagataacctatgggaattatactatggggccttatgagctgcttctaagaggttaacctggaaactaagctcagaggcaagataataaagcactttagggcttgctcctgagttgggcttgannnnnnnnnnnnnnctgtgggcctccaggccagcaccttcctgtagggcagtggggctagggtcacagcccctaacttacaaaacaatcaaagaatcattagaaagggttcattaaaccttttggacacagggcctcagnnnnnnnnnnnnnnnnnnnnnnnggtcataagcaagctactggnnnnnnnnnnnnccagcctcctgactgagtgcaacatttctccactgcactgtggtagcagctcagcagggcctctaagccttgatgtcacactcgaaggcctgnnnnnnnnnnnnnnnnnnnnnnnnnnnnnnnnnnnnnnnnactgcccaatgtggagatgggggttagtggggctttctatggannnnnnnnnnnnnnnnnnnnnnacctcagggggtctcttggtgttagtgatgctggagaagagaatattactggtttctacttttctataaaggcatttctctatatacatgttttatatacctcnnnnnnnnnnnnnnntttagnnngggaaatgct

SEQ ID NO: 10366 - DNA, 690 bp, Macaca Fascicularis
aacccgtgcactcttatggttgagacgatttgctcatggaacagcaggtctggtgttccttacggctctctcaggggcttttgtggcagggctagatgctgggcttgtttacaactcctttcccaaaatgggagaatcctggatcccagaggacctctttaccttctccccgatcctgaggaatgtttttgagaatcccaccacggtgcagtttgatcaccggattctgggaatcacttcagtcactgccattacagtgctctacttcctctctcggagaattccccttcctagaaggaccaagatggcagcagtgactctgctggctttggcgtatacacaggtgggcttgggcatcagcacgctgctgatgtacgtcccaactcctctggccgccactcaccagtcaggctccttggctttgctcactggtgctctttggctgatgaatgaactccgaagagtcccaaaatgattcttagaggaccagcttcttgggactgtgactgcttttgagagctcttcagagatcctaagaacttgggcttttctacgagatgaccctgacatacccagtggtttccaaatggtcaacttacttaaaaatcttttcctgttttgagatagtcactggatcaagaatgcattaagtgtggttaccctaaaggttccctgtaaatctgcttttca

SEQ ID NO: 10367 - DNA, 716 bp, Macaca Fascicularis
  misc_feature (1)...(716): n = A,T,C or G
attcacagccaggagatnnnnggccagttcctccaggaggtgtgtatgcagccccgccagctcggctcacctgcctggggctgcctggtggcctagggtctacctgcagcctcaggcaggtggcttctctctgggacatgaggtgcccttgactcttcctgtgagagccccgggcggtgctttgaaggaaagggggagctgaggctgcgtcccattccctggctgcactcggggtgggatgtgagaaggggcgagtgccaccactacctgggcccccgtctgtccttgcaggtctccgtcatggcagtgatgaaaacctaacagggtggctccctatgccagctcaggtgactggaactnnnnnnnnnnnnnnnnnnnnnnnnactgggccggccagccttgcactgtgagggctggtcctgagtcttggcctgcctcccatccctgccagggggctgctgcctaagagtccacgggaagcctccatcatgagagactcagccctggnnnnnnnnnnnnnnnnnnnnggaagggcgggaagcttggcggcttctgtcgcgcctctgagacggcagagaccccaggatcccagagcttcccaggatccctcccagatcctcctctgctgactccacacagaagcctcacacccacagggtagggcagcagatcttctttatacctatgtattgtttgcatcacttttaggatgtaac

SEQ ID NO: 10368 - DNA, 668 bp, Macaca Fascicularis
cagaaggtcaaggctggcttggggcctgtgcttcctgtcaagaccccatcagcaaggacgacgtggaacgctgcaagcagaaggacctgctggagcagatgatggctgagatgatcggcgagttcccggacctgcaccgcaccattgtctcggagcgcgacgtctacctgacctacatgctgcgccaggccgcccggcgccttgagttgcctcgggcctctgacgccgagcccaggaagtgtgtcccctctgtggtggtgggcgtcgtgggcatgggccacgtgcctggcattgagaagaactggagcaccgacctcaacatccaggagatcatgaccgtgcccccgccatccgtctccggcagagtgtctcggttggccgtgaaggccgccttcttcggtctgctgggctacagcctgtactggatgggccgccgcactgcgagcctggtcctgtcgctgcccgccgcgcagtactgcctgcagagggtgaccgaggcccggcacaagtaggagactgctccccgcccgctcgggcccctgaggagccagtgcccctgcggcacttcctgggtgccaggcgcatcctagcccgccggaggcccctgccaccccccatgggggtctaggcccggcctcgcctgccctcctggtccagtcacccctccc

SEQ ID NO: 10369 - DNA, 747 bp, Macaca Fascicularis
  misc_feature (1)...(747): n = A,T,C or G
tatatgatgggtnnnnagactaagaccatggcaaaatttataaccactgtactgaagtcnnctgatgatcagacccagnanntttggaaagagaagatgctcggctaatgtcatggctccgatcttcatcttgaagaagagtgacattgggcgactgctgcttggaaaactgtccacacttgctactctttgagaatgaagttgtcattcagggcccctcatgtagcccaaagaccaagaaaaatctggcccacagatatgttgcagactgcaacatattttaaaaatagattttatcagtggagaaatggtgatagttttttcttcagttttctcttgggaagagttttatgttgtttaaaaaatatnnnnnnnnnnnnnnnnnnctttatgggcttacgtaatactcctttcatccattctttttaaagaacggcttacctttcctatttatttttagggtgattttttaaaaagacttgtgcaatacattttgaggtgaaacttagtggattttttctgataaattagagcatttaattgactattttnnnnnnnnnnnnnnnttgaatatttgctaaagaccagttctttaagctaagacatgtaataaatcccaaatggcagtacctcattgtttacttagcttttgtacttatatttttcagaggaaaaaaacactactgtaaattgtgaatagccaatacataactgtattgtatgcagatctgtgannnnggcagtgtc

SEQ ID NO: 10370 - DNA, 753 bp, Macaca Fascicularis
  misc_feature (1)...(753): n = A,T,C or G
ggacagaaaattctacctgtgctacataggagaagtttggaatgcacttaatagctggtttttacaccttgatttcgaggtgaaannnnnnnnnnnnnnnnnnnnnaataaatttaaatctcttgaaccagtaggtgcttaatatttttnnnnnnnnnnnnnnnnncatttgactctcatgggttctattaaaaatatgtataggaccccaatccattgccatcaaattgcccttggactttttcaaggtatattatggggttttatgcaaaattccaagctaccatgtaacctttttttaaccgtttaacaaggaggggggactgcttcctaccttctttacatgttgtgcattgttgtggtccagaaatgccaaacctttnnnnnnnnnnnnnnnnnnnnnnnnnnnnnnnnactatacaggccttgaacttcatggcatatcaactttgccatatctgcaggagagctgttctatatgaaacagttcagagttgcaaatatcacatgtgaatgatatggtaacttttaagaaatgtctgtattgtatttgaagactgtttgccataaatctgaaatttgaacctatgtatttcaatttggtatgctaaaaagttctgaattaatgtaaatttttttgttataatattgtaatctcagttcaaaagttaactgaaaatataaagcccagtgatttctatatagtaaattgaactgtaaaggtaaaaaaaaaaaaaaaaaaaaaaaaaaagg

SEQ ID NO: 10371 - DNA, 717 bp, Macaca Fascicularis
  misc_feature (1)...(717): n = A,T,C or G
accaggcacccttgngaacaggggtctgggtgtaccccaggggtgttaaggctcaggagtgggcagcagtcagggagagacagaactggnnnnnnnnnnnnnnnnnnnnnnnnnnnnnnnnnnnnnnnctgaaagttgaggcaatggcagggcgtagactcaggcagagaggattgtgggaggaatccgttnnnnnnnnnnnnnnnnnnnnnnnnnnnnnggacaaaccttgggtcacggggctagtagatcgtggaccacagaataacaaatgagaaaaagcttgggttggagtgaaattttggtctcaggcagcagaacagaccagagtctctgaggatgaagtttcccacccctatttgtagggnnnnnnnnnnnnnnnnnnngaannnnnnnnnnnnnnnnnnnnngaaatagtaaaagaatcaaaggggtttccatttcactccacttgttagtttatctnnnnnnnnnnnnnnnnnnnnnnnnnnnnnnnnnnnnnnnnnnnnatggggtagggacagctgcacgcggaacagcccccacccccagtcggctgcttccagaacaagcagtctttatgggctttctctgaggcccagtcactgctcctgggacccagtcccctggaggggaggtggaaaatcagtgctacgggtccagtctttcccgtggctgccaccagcgaatgaaacttttgtatgatacataaagtgc

SEQ ID NO: 10372 - DNA, 727 bp, Macaca Fascicularis
  misc_feature (1)...(727): n = A,T,C or G
atcgctgccaccagcctctacagccccgagagnnnnnnnnnnnnnnnnnagaagatgtgggacgagctgcctgaggtcgtgcgcaaggactacggcaagaagtactttgatgaaaagatcgccaagatggagacctactgcagcagtggctccacagacacgtcccctgtcatcgatgctgtcacacacgccctgaccgccaccaccccctacacccgctaccaccccatggactactactggtggctgcgaatgcagatcattacccacttgcctggagccatctctgacatgatctacatccgctgaagggtctctctgtggcctctgtcggggatccctggtggaaggggaggggagggaggaacccatatagnnnnnnnnnnnnnnnnnnnnnnnnnnnnnnnnnnnnnnccaggaagacccatgactggttttaacattaaccaaagggaataacccaacctgacttgtttgcatagtgagtgacttgggcctccacaagcagggtgtggagtggcaggcaggggcctctcaatctcagggcaaacacggtgaatttgtctctctggagatcatttcatacagcgattttgagaaaagatctttatattaaaaacagatttattatagaatggaatcaaaactccttcatatcttcaagccaaattatcactttaaaaaactatctcatttgatccttaagccagtctcatgaataaaaagg

SEQ ID NO: 10373 - DNA, 741 bp, Macaca Fascicularis
  misc_feature (1)...(741): n = A,T,C or G
actgcctgtgtgagatctgtgtnntaaaatgtactgaaatggaaatttatgaattattacaaattgtaatgctggaaacaaaaaataaatccttggttaaagggtttgtaatggtgatttttgatctagaaatctcatttactggaaaaattacaagcatttacattggtttttttgtggtttttttattttactgtttagagtattttgcatactgtacattttaagtgaaataacattccagtttttaagatagaaaattgtgttctacatatatatatatatataatttgatactctattcttaaagtttcaaattccttaccccttctttacaaaaaaaaaaaaaaccttgtttttttttacctgttacaattcactctatacttttttcttcttccttcccctttaccacttgccatttgttacttcatgtcattgccatatgggaaagtaccaaattatatccagtttcctcttagtgatattactctgaaaaatttcacaaagccagacaagaataattaactcattttttccccaagatgaccctcaaagttaatgtgcagcaggtattccaaatggtaatttttttttagaattccgtaaaaaaagccagtttctgatatttctttttaaatctgattttggttgaggtcataccattcttaaataataattgaaggtttatattgccattttttctaattctgttttgcactgataaacttacataaagtt

SEQ ID NO: 10374 - DNA, 674 bp, Macaca Fascicularis
  misc_feature (1)...(674): n = A,T,C or G
gaannnnnnnnnnnnnnnnnnnnnnnnnnnnnccacggtaccctggagctgcaggccgagatcctgccccgccggcctcccacgccggaggcccagagcgaagaggagagatccgatgaggagccggaggccaaagaagaggaagaggaaaaaccacacatgcccacggaatttgattttgatgatgaaccagtgacaccaaaggactccctgattgaccggagacgcaccccaggaagctcagcccggagccagaaacgggaggcccgcctggacaaagtgctgtcggacatgaagagacacaagaagctggaggagcagatccttcgtactgggagagacctcttcagcctggactcggaagaccccagccctgccagccccccactccgatcctccgggagtagtctcttccctcggcagcggaagtactgactcccactgctcctgcctctaggctgcagtgtctgtacctgctggggcctgggccctccttccccagcccaggcactgagaaacttgggaagaagagagaagcctcaagctcccaaacagcacattgcaggaaagaggaagagagtgtgtgagtgtgtgtgtgtgtgttttctattgaacacctgtagagtgcgtgagcatgtgtgtgtgtgttttctattgaacacctattcggagac

SEQ ID NO: 10375 - DNA, 748 bp, Macaca Fascicularis
  misc_feature (1)...(748): n = A,T,C or G
atgagtagaatttccttnctgtcccttgtcacaagtttaaaaacctcacagcttgtataatgtaaccatttggggtccgcttttaacttggactagtgtaactccttcatgcaataaactgaaaagagccatgctgtctagtcttgaagtccctcatttaaacagaggtcaagcagtaggcgcctggcagtgtcaagcccgaaaccaagcaataccggcatgnnncagccaagcccagagccctaagatcacaaacaaatatggcgggaacctcctcggctctccctctgcagagttccttgccctaacagaatgttaccacacgaacagtcctcggtgaatctgagaggagaggatggggtgaggcagcagcaccagatgtattactggaagggagcttttggtggtagatcccctggtgtctccaacctgaccaggtggacagagctcagagaggcccacttatcgctagagaggtgataggacatatggcttgccacaaagatctgtttgacccgacatatattagatgagggatgtccaaacatctgaatgtgaggccaaccttttaccagagttaaacttttgacaagggaacaaatctcaaaatgatccgtcagtcatgtagctagctgtagagcttgcaacttaatagcagcagatgcccaatgccatgtgaagtaacaaacnngtttttggttttttttcccccttcagttttaatgttatgtgtaatgtatttaaaccc

SEQ ID NO: 10376 - DNA, 719 bp, Macaca Fascicularis
  misc_feature (1)...(719): n = A,T,C or G
ggcccgtgnccctaaaattggctgtagccacacgaatgtaagaaagtcggatcncatccaggatgaagcacttagaagggcgattgagaaccacaacaagagaatacatcattccgaataggaaaagccacctgcccgcagggacaccagcagcctacctcctacctcagccgtctgttgagagcagtgctggccccagcagttagggactggctgcatagcatacttgtttggggtaaaacttgatgcttttatgtgtgcttgaaaacatttttctaagttacacaacagaaatgcaagcatattgtttatttttaagtgttctataatgttaaataaaactttgatcatctgcagtgtcctccctgcacgcctcctgatgtagggattgttccagaggtgcaggcttttccatttcaaggacatcagattgatttttataatagttttggctaaagaatgtttttcagccannnnnnnnnnnnnnnnnnnnnnnnnnnnnnnnnnnnnnnnnnnnnnnnnnnnnnnnnnnnnnnnnnnnnnnnnnnnnnnnnnnnnnnnnnnnnnnnnnnnnnnnnnnnnnnnnnnnnnnnnnnnnnnnnnnnnnnnnnnnnnnnnnnnnnnnnnnnnnnnnnnnnnactcaggaggctgaggcaggagaatcagttgaacccaggaggtggagattgcaatgagccgagatcacaccactgcactc

SEQ ID NO: 10377 - DNA, 764 bp, Macaca Fascicularis
  misc_feature (1)...(764): n = A,T,C or G
tttggcagctacaagtagccggctnnnntngtggatttgacctgttcctaatttggcgtggggtgcaggggtgcggggtcactggccccttttccacactcctccgacagcagctccctgtgcagtggcctggtctcaccgtgtgcagccttgtggtttatgcttagatgtgcatttccctgctggtaaaaggagagactgacaggtgtcctgcagaccggctgaccactcccttcggagaaggcaggaggcctgagtgatctgtactcagaacgtccagcagagacccatggcctgaaggcaaagtnnnnnnnnnnnnnnnnnnnnnctgttctctcctctctcctccccagagcccccgcccccgtgggatgcctcctgccatcaggggggttgaaatccctctccccccaggagccctgctgctgtgttcagtggtagggcaaaaggagagaaaacagtcatggtctaaaaacccacatagcactttgctcttagttacatgtaaacttttagatttctaaaacgggtgggcaatcattctgaatactgttctgtgaccctgactgctggttctgaggacactggtggctgtgctgtgctgtgtgtggccatcctccatgtcctgtccctgtagctgctccgtttagacagcggacagacgctcacgcccaggggatgtcctcatgctgtcactgcgcggtttcccttcgcagatgtgtatattgatgattgacaggtcagaaagtgtatctgctacaata

SEQ ID NO: 10378 - DNA, 268 bp, Macaca Fascicularis
aatattctgtgtgaggagagtaggaggttttgcaagggacagggggcccgactacccagtgtttgagttatatcctctcccatattcatgcactctcgcggaaaaatgttaatccaaatacacacttaaaattagtgttggtctctattctgatatgagtattttaaagtctcaaagtgctgatttggtagagggaggaattatttttctggaggggggttagagtacatcttacgcggagttcagaaaacagtgtctctgacaaaaa

SEQ ID NO: 10379 - DNA, 706 bp, Macaca Fascicularis
  misc_feature (1)...(706): n = A,T,C or G
gaccccgagagagtgacccnnnnnnnnnnnnnnnnnccagacagtgatgacgacgaggannnnnnnnnnnnnnnnnnnnnnnnnnnnnnnnnnnnnnnnnnnnnnnnnnnnnnngatgaggcaagtggctttaacatcccggcagagcaggcttctcgaccccggacccaaccccgaaggacacagcctgaggcccaggatgtggaccccaggcctgaggctgaggaagaggagctcccctggtgctgcatnnnnnnnnnnnnnnncaccctacgcnnnnnnnnnnnnnnnnnggacctcttctgtgcccgctgcttccgagagggccatgatgcctttgagcttaaagagcaccacacatctgcctactcccctccgcgtgcaggccgagagcactgaggacaccctggttctcctggaaaggcagtcccacaggcagtggcnnnnnnnnnnnnnnccagccacaggacgtccgatgggagagcttgtctggctctactgatgatggataggccccttcctgagctttggtgtccctgaaatgaggaaagattctctattcgagaagatgactgggagggccgagggaagaagtcggggccctcctattagaagcccagactggaagtgagaggcatgatggggagagaccagactgaatctacgggtgagccctgtaacctggctnnnnngcacagggccctcc

SEQ ID NO: 10380 - DNA, 711 bp, Macaca Fascicularis
  misc_feature (1)...(711): n = A,T,C or G
cgttccaagcccctcaagaccctctcccgagaacggcccctgcctaacatcttcaacctgtacaccatcctcaccgtcatgctccagttctttgtgcacttcctgagcctcgtcnnnnngtaccgtgaggcccaggcccggagccccgagaagcaggagcagttcgtggacttgtacaaggagtttgagccgagcnnnnnnnnnnnnnnnnnnnnnnnnnnnnnngccccaccccatgaggccaccttcgccatcaactacaaaggcccgcccttcatggagagcctgccggagaacaagcccctggtgtggagtctggcagtttcactcctggccatcgtcggcctgctcctcggctcctcacccgacttcaacagccagtttggcctcgtggacatccctgtggagttcaagctggtcatcgcccaggtcctgctcctggacttctgcctggcgctcctggccgaccgtgtcctgcagttcttcctggggaccccgaagctgaaagnnnnnnnnnnnnnnngcagtgctggtacccactgcccaccctggctgccgctgggcgggaaccccaccagggccccgggagggaaccctgcccccaaccccccacagcaaggctgtacagtcttgcccttggaagactgagctgggacccccagagccatcgggctggcttggccagcagaaccagccccgagccagcacctt

SEQ ID NO: 10381 - DNA, 768 bp, Macaca Fascicularis
  misc_feature (1)...(768): n = A,T,C or G
tcctgggccccccncnnnnnngagccaggtggagaaattgagctcgtgttccggccccaccccctgctcgtggagaagggagaatactgccagactaggtatgtgaagacaactgggaatgccacagtggaccacctctccaagtacttggccctgcgcattgcccttgagcggaggcagcagcaggaagcaggggagccaggagggcctggagggggcgcctctgacaccggaggacctgatgggggtggcggggagggcgggggtgccggaggaggtgacggtcctgaggagcctgctttgcccagcctggagggnnnnnnnnnaaagcagtacaccatctacatcgcacctggaggcggggcgttcacgacnnnnnnnnnnnnnnnnnnnnnnnnnnnnnnnnnnnnnnnattctggaaggtgtcccggccactggagctgtgctatgctcccaccaaggatccaaagtgaccccaccaggggacagccagaggaaggggaccatggggtatccctgtgtcctggtccatcaccccagcttctttgtcccccagtatccccagcccagcccgccaacaagaggacacaaatgaggacacgtggcttttatacaaagtatctatatgagattcttctatattgtacagagtggggcaaaacacgcccccatctgctgccttttctattgccctgcaacttcccatctatacaacgtgtggagaagggaagaaccctccccttcacgccctcctaccaacaacaaac

SEQ ID NO: 10382 - DNA, 757 bp, Macaca Fascicularis
gcagacgacggacagtggtcacaggggctgatttctgctgcccggatggtggcggctgcgaccagcagtctctgtgaggcggccaatgcctctgttcagggacacgccagtgaggagaagctcatctcatctgccaagcaggtcgccgcttccacggctcagctgctggtggcctgcaaggtgaaggccgaccaggattcagaggccatgaggcggctacaggcggcaggaaatgctgtgaaaagagcctcagacaatcttgtccgtgcagcccagaaggcagcatttggcaaagctgatgatgacgatgttgtagtgaaaaccaagtttgtggggggcattgctcagatcatcgctgcccaggaagaaatgctaaagaaagagcgagaactggaagaagcaaggaaaaaactggcccaaatccgccagcagcagtataagtttttacccaccgagctgagggaagatgagggctaaggtgcgcgcccagatggcgagtcccaagggatggccctggctgaactggacagtgttcctgagaggctgggcacttacctggaaactgcccacctccccccggggtgagcctggagccctgcgtgcttgttctcacgtctctgtcccgtcggcaccggctgcatgatcgtgatgtcacacggtacaatgtcctacccacagctcctctgccgcctcccctcctgcctcactgtgtctcaggagagaggggtgcacatttcgtggactttaccaacaaaga

SEQ ID NO: 10383 - DNA, 755 bp, Macaca Fascicularis
  misc_feature (1)...(755): n = A,T,C or G
gatgacttaaaatgcatctctttttnnnnnngctgcagctggcaagtcaaagtttattgtatgtgtataaattcccagttgagcatttttgcatttggattagtgtgagaggaaaaatgtgaaatgtctcaaatcaaatgcttccttnnnnnnnnnnnnnnnnnnnnnnnnnnnnnnnnnnnnnnnnnnnnnnnnnnnnnnnnnnnnnnnnnnnnnnnnnnnttttttttaaatggctgatatattcatctccagaggcccnnnnnnnnnnnnnnnacttttaaaactttagcctttatgtaagattagagaaaccaannnnnnnnnnnnnnnatgtgatgaaaagctctgattttatttttctcccgcttatcaacatgtatttttatttgccgaatgaaaatcgtggtgtgttgcttcgatgaatggaatttcaggttctccctgtgcacagccggtgggcaaaggtcaccttcaatgactttttctccctatctgtatgttaatccccagcacnnnnttgcattttccagttgcttcctgggtgtctgtacatagtttgtctttgtataggagtgagtgtggtgaccgtcaatcccctgatctcccgggtnnnaatttaacagatnnnnnnnnnatgaggaaaacgatgtaaatagagaatacgaattaaactggatctctgtggcctaggttttgtacatacagannnnnnnnnnnnnnnnnattattgtttgtctctgatgatgtatgca

SEQ ID NO: 10384 - DNA, 733 bp, Macaca Fascicularis
  misc_feature (1)...(733): n = A,T,C or G
acgccgagctcannntgccgnnnnnnnnnnnnnnnnnnnnnnnnnnnnnnnnnnnnnnnnnnnnnnnnnnnnnnnnnnnnnnnnnnnnnnnnnnnnnnnnnnnnnnnnnnnnnnnnnnnagggnnnnnnnnnnnnnnnnnnnnnnnnnnccgagacagtcaacacgctgctccacgaattcctgctctgggagcccgagccctcgcccaaggctctgcccgagccactgccggcgcctccagaagacagagaagtaaacgccgggtcggcggggcatcgcttggnnnnnnnnnncccagcaggaggaggcgggaacctgcgccgggtctacagcgcagaccacctgggcgggccgttagctccggtgggcggggccaggtcagggagacgtccccagtctggctgggcggggcgtggcatctgagagagcccagcggacactccgctctctgcttcggtcccgcggggcccatcggcgtttcggggttgcagccgggaccctcgcggaagatgaccttgtacagaagctctcccccactttccccacgacgccacggtcgaggcaggccccccaccccgctctctgtcttccgtgtccgccgtgcttgatcctgggacccacgatccccacggggaccctcggggccccatcccgttgcccgagaccctccctaccccccattcttcggcgctgggagctatttttgtccaaggtgggagggatgggggggct

SEQ ID NO: 10385 - DNA, 700 bp, Macaca Fascicularis
ccgtgatgagctccgacgtcgcatcatccagtggctggaagctgagatcattccagatggctggttctctaaaggcagcaactacagtgaaatcctagacaagtattttaagaactttgataatggtgactctcgcctggactccagcgaattcctgaagtttgtggaacagaatgaaactgccatcaatattaccacgtatccagaccaggagaacaacaagttgcttaggggactctgtgttgatgctctcattgaactgtctgatgaaaatgctgattggaaactcagcttccaagagtttctcaagtgcctcaacccatctttcaaccctcctgagaagaagtgtgccctggaggatgaaacgtatgcagatggagctgagactgaggtggactgtaaccgctgtgtctgtgcctgtggaaactgggtctgtacagccatgacctgtgacggaaagaatcagaagggggcccagactcagacagaggaggagatgaccagatacgtccaggagctccagaagcatcaggaaacagctgaaaagaccaagagagtgagcaccaaagagatctaatgaggcggcacaggatagtgtctggagcccagcatcttctcttccacttcagcgctgagtccagtatacacgagtgtctgctacagtcgccaaatcaccagtatttgcttatatagcaatgaa

SEQ ID NO: 10386 - DNA, 748 bp, Macaca Fascicularis
  misc_feature (1)...(748): n = A,T,C or G
cacatactgagtaaatacagagctacgcccagnnngtattgtactctgaacttaatgcaaagtctccttggtgatttacacaaaggccgtggatttgggtcagaggcacatttcatacataacagcccttataaaggtttgccctgcctccacattttacagtatcttaaaacagtacatttcttttaaggaattttatctttgtgagtcagtactcaaacttagtggttctcacagtgtggaccaggaacatcagtatcacctggggaattgttcaactcacctcttaaaacctatgaactcagaaaccctgggggtggggccgagcagtctgttttagaaagccctccatgtgattctgatgcatagtagcctatgacaattccagaccaggtgaatctcagatactaatcctcacatcacccttgtcttgaccatctggtgcctgttctgcagttttaacattctgcaacaataagtgttttattataaagtattaatttcaatgctctatacttagggggaaccactggtctcaaaatttgaaactattatttaagaggagaacattcgcaaagcaaaacttaggcatacttggtttttctctgtagtacttttgaatgctttatcttccttacagaataacttgtcttccttatgctttaagctccaaaagggtaaggagtgttaatcatctttgtatcccttgcacaggacctagcaaataattggtactcaatgttgctag

SEQ ID NO: 10387 - DNA, 620 bp, Macaca Fascicularis
  misc_feature (1)...(620): n = A,T,C or G
ctcactcctcccccaccccttccttctgagccgggccctggggattggggagccctcttgttcctggtgagggtcagctgaaggggctgagcatccgtcactcctgttcctgccggggtggctgtggggcctggcaggaggggcctaggtgggtcgggcctgagaatcagggcacaggtgtggtgtctgctgggctggagaggagactggggagagacaccccaacctcccagggtgggagctgggctgggctggggtnnnnnnnnnnnnnnngcgggggagggctctgcccaggaagagtcccctgtggggaccaaaataagttccctaacatctccagctcctggctctggtttggagcaatggaaggggttgccagagtcctggggtcccagaggagcaggagtctgggagggcccggagttcccaccctctagtggatccaggaggagcagcagccgagccctggagtggcccagtacccttccaagaggccacagtccnnnnnnnnnnnnnnnnnnnnnnnnnnnnnnnnncaacagcttgggacaatgtgaacatggactcaaagacatggccctttctctgtagttgattttttcaatgtgccattattgttt

SEQ ID NO: 10388 - DNA, 774 bp, Macaca Fascicularis
  misc_feature (1)...(774): n = A,T,C or G
gcagcggcggcagggagctgggttggggtgggcatttgatgcgggaggtgggtgatgtgcttgctagctgggcaagaaagcagctgtggacctgccccaaggccacacatgcctggtcaggctggcttctgatgttcagtgccctgggccgggacagatttttttttaacgtcttgaaacttaaactctgtgcttgtaggatactgtaacctttttgtctttttttttttttttttttcaaacctccacctccagtgactgtgactggtcccagtgattgtaccttattggttgctgtgggtctgggcgggcctggagccagaaggcgactttattttttctctcctatgccaccccaggtggggagggagggaggtttcagactccggtttctctcccttacccttttattcccaagcctccttggccccaatataagtggtgggaaccctctgccagcttcgtgagttttgcctgaagatggccccccagcactggttggggacaagggccaaattggtgaccaccagtcatgcctaggacctggggcccaaaagccaggcaacccctgactacaggggccactgggtaccctcctagttgagaggggccgctgtttcgccttgtccgtcagtgccagtgnnnnnnnnnnaggttgcgaggtgagtcctccagagcttcccagccgggccctcctcctgcctgttctggcttgtctgctcccacgctagctgtcccttttctgattctggtggatcctccctcccctacata

SEQ ID NO: 10389 - DNA, 676 bp, Macaca Fascicularis
  misc_feature (1)...(676): n = A,T,C or G
taaaaaaaaaaccatattcctccagttggaaggttttatacttgactatctgcccattctttgcacccaccacccccaccaannntctgtaaccaccattcttctctctacttctgtgagttacattgttttaaattctatatgaatatgaagtatttgtctttttgtgcctggcttacttcacnnaaacacaatattctcacaacttccattcatgttgcaaaatgacaatttccatcttttttaaagactgagtaatattccattatgtatatgtataccacatttcctttatccatttatctgttgttaatatatagtgctgcaatgaacatgggagtgccactctcttggacaaactgatttcaaaacatttgggcaaatacctagaagtgggattgctggatctaacatgtcttctatttgacttttgaccctgtgtagtaggacattatagaacttggggtttgggaaagttagcttaagatcatacataagtaaatgtatttgaacttggattatttagcctccttgtgattgcaaagtcttgaatattctcttaaaataaactattaaaattaaaattttaaattattctctattctcttcagttatgctttaaaaaatatatattcgtatcttttgtaggtggaaccgtcccaaaatgtcccttgct

SEQ ID NO: 10390 - DNA, 607 bp, Macaca Fascicularis
  misc_feature (1)...(607): n = A,T,C or G
ccccacagcagcccctcgcgnngcaagcccaagaagaagtccaagaagcacaaagacaaggagagggcgtctgaggacaggccccgggcccagcctccagactgagcacctgccacccatgccaccctcggagccccagcagatgccccaggtgtaaatggaagctgcagcgtttccagtgttcccacatccacgtcggagacgcccgactacttgctgaagtacgcagccatctcctcttcggagcagcgccagagctacaagaatgacttcaacgccgagtacagcgagtaccgcgacctgcacgcccgcattnnnnnnnnnnnnnnnnnnnnnnnnnnnnnnnnnnnnnnnnnnnnnnnnnnnnnncagggctccgaggagtatgagactactcgagggcagattttgcaggaatatagaaaaatcaaaaagaccaataccaactacagccaggagaagcaccgctgcgagtacctgcacagcaagctggcccacatcaagagactcannnnnnnnnnnnnnnnnnnnnnnnnnnnggcttggccctagctgcccgccccgatggcgggaatctgggagggtggggggagnnnaaaagccggga

SEQ ID NO: 10391 - DNA, 1178 bp, Macaca Fascicularis
  misc_feature (1)...(1178): n = A,T,C or G
gagtatgagacgatgctgacggagatcatgtccatgggctatgagcgggagcgggtnntggccgcnntgagagccagctacaacaannnnnnnnnnnnnnnnnnnnnnnnnnnnncgggaattcctgggagccccgagccggaacacggttctgtccaggagagccaggtatccgagcagccggccacggaagcagcaggagagaaccccctggagttcctgcgggacnnnnnnnnnnnnnnnnnnnnnnnnnnnnnnnnnnnnnnnnnnnctgcgctgctgcccgctctgctccagcagctgggccaggagaaccctcagcttttgcagcaaatcagccggcaccaggagcagtnnnnnnnnnnnnnnnnnnagccccctggggagctggcggacatctcagatgtggagggggaggtgggcgccataggagaggaggccccgcagatgaactacatccaggtgacgccgcaggagaaggaagctatagagaggttgaaggccctaggcttcccagagagcctggtcatccaggcctatttcgcgtgtgaaaaaaatgagaacttggctgccaacttccnnnnnnnnnnnnnnnnnnnnnncgagtgatgccaggaagccaggccacccaagccctcaccctacccctactccatgaaagttttataaaagaaaaatatatatatattcatgtttatttaagaaatggaaaaaaaaatcaaaaaccttaaaaaaaaaaaaaaagcaaacagtccagcttcctgtcctcctaaagtggcccctgttcccatctcggtctgagaagacccgggccagacagctgtccccccatcctcctccccaacccagcctgctcagagaagctggcaggactgggaggcgacagatgggcccctcttggcctctgtcccagctccctgcggccagatggaaaggcggctgcttgcctctccatcctccgaagaacccgaggacccctccccaccccatcttcttctaggatgagaggaagctggagccccaaactttgcccaaatctttccatctggggcaagccctaaaaggcccaaggccctctccnnnngtctggctttggcctnnnnnnnnnnnnnnnnctaacatnnnncagtgtcaaggccacccccaccccagaacagaaccgtgtctctgataaaggt

SEQ ID NO: 10392 - DNA, 758 bp, Macaca Fascicularis
  misc_feature (1)...(758): n = A,T,C or G
ggattaatgatnnnnnnnnnnnnggccacactgccaagcaggtaaagtccacaggagaggcactggtgcaaggactcatgggtgcagcggtgacgctcaagaacttgacaggtctaaaccagcgtcggtgagaggaaacggtgtaagctacaatgcctagaagagaatgagtggacagattgaaagagctttgaaaagtatgaggtgccatccgtgtaacctggtgttcatgagaacacactaaaggactcctgagacactaccacagccacctggaaaccacaaggcatttgatgctnnnnnnnnnnnnnnngattgggccgcttcttcagttcctaataccagaccaagcctcctgatgcctttctgcactgcaattgtgtgattgaaaaatgagatgttcatccaagcagtcaagccacagaaacccagcatgtccctgtcacgatctcatgggcaccttgatcatgtcttaaccttccattaaccttggggctcccaagccagagtcaaggtgacgcatgcctcatggcacctcaaggtgacagctcatccccagcacagcacaggcatgtgcacacagaggtgttccttgcacccccctccctctcaggtgtcctgagatgctactcctgggaaacccctcagaaaactgcctcaccgagacaagtgcctgctggacagaggtgtgatcccaggcctggtgtcatatgacaccagcatgcatcgcaggattattagtgtattttgagtctaaa

SEQ ID NO: 10393 - DNA, 759 bp, Macaca Fascicularis
  misc_feature (1)...(759): n = A,T,C or G
ctggaggaactgtgtcagtgccacagaggaggaggtcaccccccagcaccggctctggccaacgctggcccaaggaatctgggcccctccatgannntccactctgggtgcctctttcctggtggaaggcccttccacctgccttgtatccctgttgctgactccgtccaccctgttcctgttagaggaggacgctgcagggcccctggcagagcccccacnnnnnnnnnnnnnnnncgaagcctctgagaaggtgcctccctccgggccgggccctgttgtgcgtgtcagggagcagcagccactcagcagcctgagctccgttttgctctaccgctcagcccctgaggacttgcggctgctcttctacgatgaggtgtcccggctggagagcttctgggcactccgtgtagtgtgtcaggagcagctgacagccctgcttgcctggatccgggaaccgtgggaggagctgttttccatcggactccggactgtgatccaagaggcgctggcccttgaccgatgagggtcccacgccgaccttggccctgacctcaggagccacactgtagacattccctctgctggtctctgggtctggcttccaggctctggctgtggacttcttcagcctctgggtactagccagtgaggcaccaaatgacccagggcttaagggagaggcgagagaatgatctggcctcaggggacaggccacgtggtcaggaggaatattttcctgcacttttctcagggcaa

SEQ ID NO: 10394 - DNA, 723 bp, Macaca Fascicularis
accaggtgctaaggaggggagagggggcatcctgtctctctccagaccatcattgcactttaaccagggtcttaggtacaaaatcctacttttcagagccttccagctctggaacctcaaacatcctcatgctctctcccagctccttttgcataaaaaaaaagtaaagaaaaagaaaaaaaaaatacacacacactgaaacccacatggagaaaagaggtgtttccttttatattgctattcaaaatcaataccacaaacaaaaaaatttctaagtagacacttttccagacctttgtttttttgtgtcagtgtccaagctgcagataggattttgtaatacttctggcagcttctttccttgtgtacataatatatatatataaatatatatatttttaatcagaagttatgaagaacaaaaagaaaaaataaacacagaagcaagtgcaataccacctctcttctcccttactcttagggtttcctttgtagcctatgtttggtgtctcttttgacctttaccccttcacctcctcctctcttcttctgatttcccctcccccacttttttaaagagtttttctcctttctcaaggggagttaaactagcttttgagacttattgcaaagcattttgtatatgtaatatattgtaagtaaatatttgtgtaatggagatatactactgtaagttttgtactgtactggctgaaagtctgt

SEQ ID NO: 10395 - DNA, 756 bp, Macaca Fascicularis
  misc_feature (1)...(756): n = A,T,C or G
gacagnnnnnnnnnnnnnnnnnnnnttaannnnnnnnnnnnnnnnnnnnnnnnnnnnnnnnnnnnnnnnnnnnnnnnnnnnnnnnnnnnnnnnnnnnnnntgttttcttcactaagtcttcannnnnnnnnnnnnnnnnagtcactttacatattaaaaatgaggagnnnnnnnnnnnnnnnnnnnnnnnnnnnnnnnnnnnnnnnnnggccttgaggatagtcttcatgttcaaaggcactatgcttttattatataacttccttcagaagactgaaccacatgatattttcagccctgttaacactaaaaatatttaaagctgaatgatagtagtgactcattgtattacttaaaacttatataacacgctgtattagannnnnnnnnnnnnnnnnnnnnnnnnnnnnnnnnntgagacattggtttttatgtctaaatgctatttctgaataaatgaaatagtaattagatcnnnnnnnnnnnnnnnnnnnnnngtttgaaagatataaaacttatatnnnnnnnnnnnnnnnntatgcacatgatgggattgataaaatattaaatgagaacaaactaggtatgattaggacatttgaaaccctaattgtgaatttatttttaatagttactgaaatgaaaatatttaaaataatgcacaatgtcttaagtcttcctaaatcaagattttggttaaaaaatacttttagtaatattaaaaacangattttttttttaagtaaatcataaaat

SEQ ID NO: 10396 - DNA, 697 bp, Macaca Fascicularis
  misc_feature (1)...(697): n = A,T,C or G
ttttaaaaagtcacagtgaccccgtttnnnnnttacttgaannnttgcntngcctannnnnntttagttatagatccgaatttcctttcccagaattaattcggaatcccagtctgccctggttttgnnnnntccaccgggataccagggttcaggataagtttgaggtgctgaattacacaagcattcctgtctannnnnnnnnnnnnnnnnnnnnnnnnnnnnnnnnnnnnnnnnnnnnnnnnnnnnnnnnagcgctgccaggccgcaagtacagccctgggtacaacaccgaggtgggagacaagtggatttggctgaagtgaatgggccgccttttgctccagctgggtcacagcgacagcgacggccaagctgcaccagnnnnnnnnnnnnnnnnnnnnnnnnnnnnnnnnnnnnggggagggtaaataatgcgaaaattgcacagtggaagaagtggtttcacaaaaagccatccatcctgtagtgtaggtaatggagtcgggggagcagcgtccattttggatgtttggaaccctctggctttgttttggaatggcccaccactctcactggannnnnnnnnnnnnnngtgaacggccggcttttggcggcccctgtggtttcagtactgcccctttgtgccattcaggttgtgtacgttgttttttttccgacttccagaaataaaagc

SEQ ID NO: 10397 - DNA, 618 bp, Macaca Fascicularis
  misc_feature (1)...(618): n = A,T,C or G
cggcctcccaaagtgctgggattacaggcttgagccaccgcgcccggnnngtgttcctagatttttaatgtcaagttccccctgctggttctaatattaacagaaccacagtcttctgctagccaatagcatttatctaatgtcagctagttatacaagcttcaggagaatttaaacaataacaagaatagggtaagctgggatagaaaggccacctcttcagtctctgtagaatatagtaacctttatgaaacggggccatgattnnnnnnnnnnnnnnnnnnnnnacctaggtgaaattgtttaggcttgtgcatctttgttcaaatagcctcatgtaattgccatatgtcactcactatatttgcataaataaaactctacaactcattctaacattgcttacttgaaagctacatagtcctatagaaatgtgaggattaatgctttaatgattttagagacagggtctcaatatgttgcccaggctggtctcaaactccaccaaatatacttattcattttatggaaaagatgaggctttgcttagtatcatgtccatgtttcgcttcannntcagtggagcttgtgagttnnactactgctcaagatgtcata

SEQ ID NO: 10398 - DNA, 753 bp, Macaca Fascicularis
  misc_feature (1)...(753): n = A,T,C or G
gaaattcatnnnnnnnnnnnnnnnnnnntgtaaggagtgtggaaaggccttcagttgtagctcatacctttctcaacatcagagaatccataccggtaagaaaccctatgaatgtaaggaatgtgggaaggcctttagttattgctcaaatcttattgaccatcagcgaattcacaccggtgaaaagccttatgcatgtaaggtatgtgggaaagcctttactaaaagctcacaactttttcagcatgtgcgaattcatacaggtgagaaaccctatgaatgtaaggaatgtggcaaagcctttacccagagctcaaagcttgttcaacatcagagaattcatactggtgagaaaccctatgagtgcaaggaatgtggcaaagcctttagtagtggctcagcacttactaatcatcagagaattcacactggtgagaaaccctatgattgtaaggaatgcggaaaggcttttactcagagctcacagcttcgtcaacatcagagaattcacgctggtgagaaaccctttgaatgtcttgaatgtgggaaggcctttactcagaactcacaacttttccagcatcagagaattcatacggatgaaaagccatatgaatgtaatgaatgcggaaaggcctttaataaatgctcaaaccttactcgacatctgagaattcacactggtgaaaagccctataactgtaaggaatgtgggaaggcatttagtagtggctcggatctcattcgtcatca

SEQ ID NO: 10399 - DNA, 786 bp, Macaca Fascicularis
  misc_feature (1)...(786): n = A,T,C or G
agattgacagtggcagcaacctcaccacggacctnnnnnnnnnnnnnnnnatcaccaacaggttggagtatgaggcacgaaatcagaagaaagaagccaaggagctggccttcctggaggccgccaggcggcaggcggcgcagcccctgggggagcgcgacgnnnnnnnnnnnnnnngcggaggccccagccggccctccccctgctctgcttctcaccttctgcatttggacataggactctgcagggccactctctctaactggcctggctctggaagggctggtgacgactctgcctcctgcctgccttcgaggtgcctggtttgcagcagactctcnnnnnnnnnnnnnnnnnnnnnnnnnnnngggcgtccagcacagtggagaggccggcagtgagacgggcagacggcacctgcagcccgaaatgcagcactcctgcgtgcgcccccacctggtccccggatgtccccaccacctggacagaggccacactgactgcccacccagctgtggcgggaggtgcagagcggagggctttagggagcagcgactgcggtcacccctttagttctctgggtgcagaccacagcacctcccacttggcatcccccaacacggtgtcctgccacccggcgccggctccaggaaaacacgcttgccttcattcccggcagcttcgccgctctccttatggactctgttctgtttgtacgtggctgatgtaaatctctttggtacaactgaataaagcctggtgnnnnctgctgcgtggggctcccag

SEQ ID NO: 10400 - DNA, 702 bp, Macaca Fascicularis
  misc_feature (1)...(702): n = A,T,C or G
ttaaaaataattaaggatttgaggtctaggctcatatgcaggtaatgagaaagttatagaagcagtgaacccacaatccacaatcctcaaactcagagtgcatcccggaagaggccccaggcggagctcaggtccgccctggcctttgccatcccaggaggccccctagccagcaagagtgggactgcctttcctgtggaaccactgcttccccaggcaggaagaaagagggagttctggccacctgagcctttcccttgccaatccaggtagacagaggccctgcctttggctgagctgagacacctcttgtttcccttccccttgaaccagtcnnnnnnnnnnnnnnnnccaggctaccttctgtctcttagtctaagtttgcccacctgtaaagtagattcaggatatctgtatagggctgtgacaacagacttggaaggtttgcnnnnnnnnnnnnnnnnnttgagaaggggaaatttttcaacatgtagaagcttcagaattagaggtccctctttaccccggacctgagaggaaagtagatgttttgccaaaatacttcttcattcctttaaaaagtacatctttcctatgcaagagtgtctcacatgtgcttaaccgaggtgcttctagttggtgagcagtgttgagcttagaagtggtgtgtgctctgtctgtctgtctttgtctgtctgttgt

SEQ ID NO: 10401 - DNA, 716 bp, Macaca Fascicularis
  misc_feature (1)...(716): n = A,T,C or G
gcttggcccaggagagtccnnnnnnnnnnaaacagcagactatgaagttgctgatgatgaggaccgaagtgattatggactgtcaatcttagatatattcttcaatgataagttggcagcccctttaccagaaatacctccagatgttgtgagaaaatgtagattgggactgaaggaggagaacccttccaaaaaagtctttgaggaatgtactagagttacccataactacttaagaggggaaccatttgaagaataccaagaaagctcatatttttctcagtttttacaatggaaatggctggaaaggcagcccgtaaccaagaacacatttaggcattacagagttctaggaaaaggcggatttggagaggtgagtaatgggagccagttccgagcagcgctgctagctgggtgggcagcaaggtccnnnnnnnnnnnnnnnaggtaacgcatcaactctcccagtacactgttgccttagtgggcgttttgggaatcatcttagccgacnnnnnnnnnnnnnnnggaattttgagcaaaaggttttgaagaatcccttctcttggtgacttcaccttttacctcatagttcnnnnnnnnnnnnnnnnnnnnnnnnnnnnnnnnnnnnnnnnnnnnnnnnnnnnnnnnnnnnnnnnnnnnnnnnngtattgtggaatttccatgattctatttccgtaaatttaagactgacc

SEQ ID NO: 10402 - DNA, 769 bp, Macaca Fascicularis
  misc_feature (1)...(769): n = A,T,C or G
aacagggtcgttcccatacacatttgacctggtccagccttttccaaatgaatagacccaattctgacataaagaaagttttatttgtattttactactgtttggtcaattttgatacataactggttacaaacagagccttactatttattagtggggaaattattttaagaccgtccttttcagtatttaattctgacagatnnnnnnnnctgtttcattttggattctttctgttttggaaaatgctgtctcatttaaaactgttggatatagctggatcctggataggaaaatgaagttattttttcattgttgtttttaattggggtgatccagagctggcaccttcaggcacattggtctcatagccattactgtttttattgcccttctaagatcctgtcttcagcnnnnnnnnnnaaaannnnnnnnnnnnnnnnnnnnnnnnntcatcacagaaatgaaacacagtggtctgtctctctcagaactggttgcagctaaaatagagagatctgactgctgtctataggattttggacttaatgactgaaattgcaacttgtcctttttcttggcattacaggttttgccaaaagaactttttttgtatcaaatattgatgtgtgaaagtgaaggagctagtctgctgaaccaggaatagtttgagatattgaactgtcatttttgcacatttgnnnnnnnnnnnnnnnngctttgtataaacttatcctctggtttcctatacgttgtaaatatgtagacc

SEQ ID NO: 10403 - DNA, 718 bp, Macaca Fascicularis
  misc_feature (1)...(718): n = A,T,C or G
gccccaggtcnnnccagccccnnngtacagaaggaggactcagggacagcagcctagccccttgtgcacttgaagggaaccccagagcttctgcagagccaacactgagggacagagggaggggcccaagcccagggctgcccactcaagaggcaaatgggcagcaaagcaaaccggacacttccgatcaccaggtaggaaaacacagccaggactgtactgggctgggctcttattgctctctactttgggggggcactgatatgacctactcctgttctctcgttgacccctcccctttctctcaggtgtctctaccacggggagcagggggtatgtgagtctccttcttcattgtgctgatggactannnnnnnnnnnnnnnnnggtgtgggtgggcgtgaaggccctcccctccacnnnnnnnnnnnnnnccccagctgagggaccagctcaacttctacctggagttacacggtctcaggctgggggcctcaggagaggtcatggcccctcagtctcttctcctnnnnnnnnnnnnnnnnnnnnnnnnnnnnnnccttccccaacacctcgctccatataatagagcgtggcagctgggagcaggcccctgcccctggtgggcccctaaagcaatagcaccataggccccctgccctcttagcacaagaggcccaggccctggcctggccttcgtgccctttattcatgtcaa

SEQ ID NO: 10404 - DNA, 944 bp, Macaca Fascicularis
  misc_feature (1)...(944): n = A,T,C or G
gaggatggggagnnnnacagaattcggtaaagacannnnnngagacacatcctttcaccaaacttgtggtnnnnnnnnnnnnngtagaccctgatgtagcttattcttcagttccctatgagnnnnnnnnnnnnnnnnttttttaccttgaacaactgcttggaggaccagagcttttcctaggattcttaaaagcttatgttgagaagttttcctataagagcataactactgatgactggaaggatttcctgtattcctattttaaagataaggttgatgttctcaatcaagttgattggaatgcctggctctactctcctggactgcctcccataaaacccaattatgatatgactctgacaaatgcttgtattgccttaagtcaaagatggattactgccaaagaagaagatttaaattcattcaatgccacagacctgaaagatctctcctctcatcagttgaatgannnnnnnnnnnnnnnnctccagagggcacctcttccattggggcacataaagcgaatgcaagaggtgtacaacttcaatgccattaacaattctgaaatacgattcagatggctgcggctctgcattcaatccaagtgggaggacgcaattcctttggcgctaaagatggcaactgaacaagggagaatgaagtttacccggcccttattcaaggatcttactgcctttgacaaatcccatgatcaagccgtccgaacctaccaagagcacaaagcaagcatgcatcccgtgactgcaatgctggtggggaaagacttaaaagtggattaaagacctgcctatcgatgattttagagatttctcttttttaaacggaattcgtaaagaaatataaaacttcagctcacaattaaaactgtctttttagttttgactttttattgttttgttggtgatttactaaaataaagt

SEQ ID NO: 10405 - DNA, 745 bp, Macaca Fascicularis
  misc_feature (1)...(745): n = A,T,C or G
catagaggctttggatgtnnntaagcagcatagaattctcctgtgggggatcgggagccatggggggttgcaggagaggagagannnnnnnnnagttgtgcttggtgaaggacgtggtggggatcacctgttcccctaggtgttttaggacctacccagaggggcccccagccttgctcagggtgactcatgggtatccttgctttctcttgnnnnnnnnggcccttgctgagatgctcaaggagaacaaggtgttgaagacactgaacgtggaatccaacttcatttctggagctgggatcctgcgcctggtggaagccctcccatacaacacttcnnnnnnnnnnnnnnnnnnnnnnnnnnnnnnnnnnnnnnnnnnnnnnnnnnnnnnnnnnnnnnnnnnnnnnnnnnnggaaaaaaacgcaacgcttctcaaattcggctaccactttacccagcagggaccccggcttcgggcatccaacgcaatgatgaacaacaatgaccttgtgaggaagaggaggcttgcggacctgactgggcccatcattcccaagtgcccggagtggtgtctagtgtgtggcggtggagaccatgcctttgaactggacgtgttctattgatgacttgtactctgcaggggaaannnnnnnnnnnnnnnnnnnnagcacgaaacccttnnnnnnnnnnnnnnnnnnnnnnnnnnnnnnnnnnnnnnnctagtggttgtagttgaaaattttat

SEQ ID NO: 10406 - DNA, 758 bp, Macaca Fascicularis
  misc_feature (1)...(758): n = A,T,C or G
agnnnnnnnnnnnnnnnnngctattaagaatttggggagacgcagaaattgtggtaaaattccttaatgtttaagggaaagtaactttaagagatttttggaaaagctttatatacattcttttcaaatttcagtacaaatgaaaaagtggttttaatcagtgatttagtagactttgagcaactatgcacgcttaagtttaatagcatggtttggccagtgtgttactctcaagtcctgttctcagtcagcttctatcatcaaagcaattgtttcattatagataaataaggaagacatgttttaatttaaaaattcatgtctgagttaactttcataagggatttcatttttcctaagcattcttaaagtcttttattatttgaaggttcttttttcccagtacatttgctaggaataacaacgttttaatgtttttaatctacttgagcaacactatcgtgtcttacaaaagttgttcatatgtaaatgatcatcacattctgtgaatcgaggccatgttcaggtgctaaggaagttcgccttttacacagaaggttgagaaaatttcctagatataaatacagataaatcagacattacagtggtgatgtagaaaccataatggcaatggaaaggagtccagttcatagcctaaaacttaaaaatgtattcttaggagtcagattttactgaatattttacccacaatagctgcctattttgttataataaaatatatataaatatatatataa

SEQ ID NO: 10407 - DNA, 767 bp, Macaca Fascicularis
  misc_feature (1)...(767): n = A,T,C or G
gatgctcnngaaggggtgtaaggagctgtggcatcggcagcctccatacaggaccagcctggaannnnnnnnnnnnnatgctctgctgctggtccccaaggagaactctctcatcctggctgggggagactgtcagttgcacactatggaccttgaaactgggactttcacgcgggtcctccggggccacacagacnnnnnnnnnnnnnnnnnnnnnnnggaaaggagcccagaggtgctgtcaggtggcgaggacggagctgttcgactttgggacctgcgcacagccaaggaggtccagacgatcgaggtctataagcacgaggagtgctcaaggccccacnnnnnnnnnnnnnnnnnnnnnnnnnnnnctgattccgactggatggtctgtggagggggcccagccctcaccctctggcacctccgatcctcnnnnnnnnnnnnnnnnnnnnnnnnnnnnnnnnnnnnnnnnnnnnnnnnnnnnnnnnnnnacctgattctgtcggctggccagggccgctgtgtcaacnnnnnnnnnnnnnnnnnnnnnnnnnnnnnnnnnnnnnnnnnntcctcccnnnnnnnnnnnngcctcagcctcaaccagcagcccgccgcgcccgagtgcaaggtccnnnnnnntgcaggtaacagctgccgggtggatgtcttcaccaacctgggctaccgagccttctccctgtccttctgacctccgacgacacccccagccagcccagggtnnnagagtgtttttcatttct

SEQ ID NO: 10408 - DNA, 734 bp, Macaca Fascicularis
  misc_feature (1)...(734): n = A,T,C or G
ctactgaccaacttgccaaaacagggaccccaacatgggccacncggctgtgcccacacagtgggaaccctacacctcggaaaacggcagctacctggagatcaccaagaagatggatggcagctccgtgaagcggggcctgagaaccaacttcctgcgctactggaccctcacctatgtggcgctgcccacggtgaccgaccaggaggccacccccgtgccccccacaggtgactccgaggccactcctgtgccgcccacaggtgactccgaggccactcctgtgccgcccacaggtgactccaaggccacccccgtgccccctacaggtgactccgaggccacccccgtgccccctacaggtgactccgaggccacccctgtgccgcccacaggtgactccgaggccacccccgtgccccctacaggtgactccgaggccactcctgtgccacccacaggtgactctgaggccacccccgtgccccccacaggtgactccgaggccacccccgtgcccccaacgggtgactctgaggccacccccgtgccccccacgggggactctgaggccacccctgtacacccaacgggtgactccgaggccgcccctgtgccccctacagatgactccaagggagctcagatgcctgtagtcattagtttctagcatcccatgagccttggtcttaagaggccgcaagggtgggaccccaggggctcccctcccgtct

SEQ ID NO: 10409 - DNA, 719 bp, Macaca Fascicularis
  misc_feature (1)...(719): n = A,T,C or G
aattttctttatgtgtgacacatgttcaannncttattgaccataactgtnnnnnnnnnnnttggacatttttggagtttttttnnnctggcataaattgatagcattttcctcagtgctgctgctgtgggaagccatcctttttcaagattcttcccctaattggctctttggtttccctgctctgtttcatttatttcattaaaatgttattcctttatttaagactcgcttattagtctgctgtttctctgaaaaattttagagctaagtatagtgatcgtgaactttctattgcataatatnnngcaatataacaattccttacatgtgtgaagtcctgcataactttcaaatttcattaaatgttggcactaggagtcatcagatctagccttcatcattttccagtgagaagcagagacccaaagggcctgtcacttgtgcttgttcagggggctgtctgtcatgcctggaggctcttcggcatacttccccctctttcccttctgccaccgtggcttccaagcacctctgttcatagaacgtctctgaaattgagtctttgtcatgacttatcccaaagtagagtgatgtgtttcctctcattttagtttcaggactttgtcagcacaagctgtgccctaggcttgttactttatactctaatatcctgaaaagatgtggcttcatctatgaaggggcaaaatattggtttg

SEQ ID NO: 10410 - DNA, 1104 bp, Macaca Fascicularis
  misc_feature (1)...(1104): n = A,T,C or G
cacaccagcnnngnngttactgctgcccccggcctgcaggacctgtgttnnnnnnnnnnnnnnnnnnnnnnnnnnncgtggtgggcagtgacctgcaggatgcccacctgtcctgggaggtggccgggaaggaccccaaagggggcatggagaaggggccactggagcagcacagcaacggctcccagagccagcacagccgcctggccctacccaggtccttgtggaatgcggggacctccgtcacctgcacactgaaccattccagcctcccatcccagnnnnnnnnnncactgagagaacccgctgcccaggcacccgtcaggctttccctgnnnnnnnnnnnctcgtctgaccctccggaagcagcctcatggctcctgtgtgaggtgtctgacttctcgccccccaacatcctnnnnnnnnnnnnnnnnnnnnagcgnnnnnnnnnnacttcttggtttgccaccacgcaccccactccacagcccgggagcaccatgttctgggcctggagtgtgctgcgtgtcccaggcccgaccagccctcagccagccacctacacgtgtgtggtcagccacgaggactccaggactctgctcaacgccagccggagcctggatgtcagctatctggccacaacccccccgatccctcagagcaaggatgagaacagcgatgactacacgaccttggatgagctcacagtacaacggaccaccctgtccacgttcgtggccctcttcgtcctcaccctcctctatannnnnnnnnnnnnnntcatcaaggtgaagtagccctagaagagcaggacgccctgtacctgcagaaaagggaagcagcctctgtgcctcatccgtggatgccagagagcagaaaggacccaccctggactctgctgtacgcaggaaaatgcaccagcccctgcctccagctcccctctgtccgccacagaacccagtcttctagaccaggggaacggnnnnnnnnnnnnccgcaggtgaagcggagcacccctgccctggccctaacccctgtgcctccttcctgtgcttcccccagagccagctagtcccatctgcaccccccggcctccccaaaaca

SEQ ID NO: 10411 - DNA, 667 bp, Macaca Fascicularis
cctggggatgggcccctttcaggaatcacccctgaggatggcctcggggtttccccctgtgccctgacagccactcctggtatcagagctgccttccagagggcagcacagccagggctgggtgtctttagggatcactttttccaagactccagaaggtgccaggttctccccttgagctcctgctgccccatcccccatcctcccagacctgggcaggagctgtgctgggagaaagggtggcagccggaagcctcggagctgagccccggcctggctgcccctcccctctggccctctccactgctttccagacactaaccatggcctccaggccagggattgcccaagactcctagggcagccctcccagcgccccacggggtcgcccatgggcagagatggctttcttatgcccctccctggggcatggagggtggagggggcccctgggtccccctgaactccctgtatatctgtataaataacgggattttcatggcgctgccccacccacgttatcactgtgtgatggtctcagtcagtctcctccctgcctccactctttcctctatttatttcactcttgtttggttctaccgtgcactctcggtccccttccaggttcctgtttataacccctatcccctctgcccccatcttgtat

SEQ ID NO: 10412 - DNA, 733 bp, Macaca Fascicularis
  misc_feature (1)...(733): n = A,T,C or G
ggggaccccagctacaagaccgccaactctctccatcnnntgctccacccacacaagttctcctatcacacctttttccaggactacagcattgatgaggagnnnnnnnnnnnnnnnnnnctggccctgtctctctcagagaactgaagggaagcgcagccacccgcctgcatctggggtcagggatgtccccccttgagggacaggcctgggctcctgtgtcgcacctggcacctgctcgggagcacgccccaccggaccaggannnnnnnnnnnnnnnnnaggaggggagccggggccaagcctctgggcctgaagacggaccagctgctgaggctgccagagcagggccgcctggtcccaccggcgtcgctgggttcttcggtgcttctggccgagcaggcggcctccttgggcagnnnnnnnnnntgggacctggagccgccgctgtgtcttcaaagccatgatgccctctcgtgggaagaagggaccggcggcgnnnnnnnnnnnnnnnnnnnnnnnnnnnnnnnngcccaggctgccaccctgcccagcccgacccgcttccaccttgcgcatttggtactggcttttgtgatacttaggaatcctggcatcttttctatattatccagtgtgataatcttttcacgttttatagagcaaagacagaacagttactcttcatattgcaatatctgtgtttgactaggaataatagtatttttatgga

SEQ ID NO: 10413 - DNA, 742 bp, Macaca Fascicularis
  misc_feature (1)...(742): n = A,T,C or G
tgcttggaaggtgtgnnnacgacttcgagataatngnctnnnggccaagccaannnatggtgacattatcaggtttgcgcctncgctggtgatcaaggaggatgagcttcgagagtccattgaaattattaacaagtccatcttgtctttctgagggtagccagctgttttcagagcgagctggagacaggtggtcctgtaaaagctttgtctttaatgcgggcacattccactctcatgagtgttcaaaaactttttttttggaatatatgtttttttcagttgatacataatagaacaacgtttctgaccccgccagttgctttgtaatgtaactaagagaatnnnnnnnnnnnnnnnnnnnnnnnnnnnnnnttgatgtgcatgtgtactttctaagtgaaatgcatctatgtacaaacagcctctaaatcaagtttttcagtataatttatatatgtttttataatttcctcactgnnnnnnnnnnnnnnnnnnnnnnnnnnttatctctggggtattacataaaagggttcaccttataaaatgaaatcatttttattgaattttaggaaggattaatggttaaatgtatgcaaaatattaacattaagtaaacttcatattggccaacaccagggttgtattttatggatgtcattattttgaatgaagaattagtgtttaacattcctaaatttgtgtgagtgcttgattataatttgtaaaaaatgtttatttt

SEQ ID NO: 10414 - DNA, 257 bp, Macaca Fascicularis
gaaagggccatgttcaaattctggcaccaccacctcagagctgtgtgaccggaagcagtcacttaacctgtgtctccccttcctcaccagtaaatcctgctacatcatgtactgtgacgaggattcaataaggttgtatgtggacagcagctggcacagaggggctactaaataaatggctgctgttaaatccacactaaaagtacatgtgatctgacagaacccagcactaaaaaaaaaaaaaagtacatgtgata

SEQ ID NO: 10415 - DNA, 766 bp, Macaca Fascicularis
  misc_feature (1)...(766): n = A,T,C or G
tcctagatgacactcctgtcctggaagaaatgggacatgtgacagtgtttgcctctcagaagttggagatactcaggtggtggtttttaagcatgaaaaggaagatggcgccatttctaccatagtacttcgaggctctacagacaatctgatggatgacatagaaagggcagtagacgatggtgttaatactttcaaagttcttacaagggataaacgtcttgtacctggaggtggagcaacagaaattgaattagccaaacagatcacatcatacggagagacannnnnnnnnnnnnaacagtacgctattaagaagtttgctgaggcatttgaagctattccccgnnnnnnnnnnnnnnnnnnnnnnnnnnnnnnnnnnnnnntaatctctaaactttatgcagtacatcaagaaggaaataaaaatgttggattagatattgaggctgaagtccctgctgtaaaggacatgttggaagctggtattctagatacttacctgggaaaatattgggctatcaaactcgctactaatgctgcagtcactgtacttagagtggatcagatcatcatggcaaaaccagctggtgggcccaagcctccaagtgggaagaaagactgggatgatgaccaaaatgattgaaattggcttaatttttactgtaggtgaaggctgtatttgtagtagtactctaagaatcgcctgatgttttcttattctccttaaattaagaggtattttgtgtttgtattcttggctgga

SEQ ID NO: 10416 - DNA, 784 bp, Macaca Fascicularis
  misc_feature (1)...(784): n = A,T,C or G
gcagagagaccccaaaggtagtagatgtgcccagacagaaatgggtcccatccagtgcttcataccnnntcagtcaccatcccagacagtgagtcccagatcttctagttctggcttctgtgtcccacacagcctgttcccagcttctttcctggttcccttgttaaggattcatttatctattcagtgttgaatggataaatggcctgggcctctgctcagaggcaggtcaccgctgggccctgaggatcaatgcaagatgataaagacttttttttttgagaaggagttttgctgttgttggctnnnnnnnnnnnnnnnnnnnnnnnnnnnnnnnnnnnnnnnnnnnnnnnnnnnnnnnnnnnnnnnnnnnnnnnnnnnnnnnnnnnnnnnnnnnnnnnnnnnnnnnnnnnnnnnnnnnnnnnnnnnnnnnnnnnnnnnnnnnnnnnnnnnnnnnnnnnnnnnnnnnnnnnnnnnnnnnnnnnnnnnnnnnnnnnnnnnnnnnnnnnnnnnnnnnnnnnnnnnnnnnnnnnnnnnnnnnnnnnnnnnnnnncgtgcctggccgacaaaggctttgataccagaatgaactgtcaagggaagtgctgaggagggattaacctgtgctgcctgggaccctcggggtcttgggttggggagtgtgaataggagtttgcagatggagaataggaagggcattccaggcagagggaaacttgtgcagagacccagaggtgcggaaggaaaagtggggctggggctggggtggtctggattatggcct

SEQ ID NO: 10417 - DNA, 694 bp, Macaca Fascicularis
  misc_feature (1)...(694): n = A,T,C or G
aacattaaaggaagccgttcaaagaacaaaaatntacactttatcctttctaacactgtgaaaatcactgcgtttaccaagaaaaatgagaacattttcgattgtgatttaatagattctgtagatcaaattaaaaatatgccatgcttggatttaagggaatttggaaaggatgttaaacattggcatggtgaaacaaaagaagctgcccacaataatggaaacacaggttttgatgccctgagccatgaatgtccagctaagcctttgtttcccagagtggaggtgcagtcagaacaactcacggtggaagagcagattaaaagaaataggtgctacagtgacactgagtaaaatatctcggccactgaccgtccacacttaggcactgagagattttgatgttctgaaatcagattttatgaatttggatacccttttgaggaacttgatgtaaacatgttcagaaatctcatgtctgtctcaatgggatatttcttgtattacaccttgtcatttttttcataatttatttacatctacttttgttttaaatggaatgaagaggtgaaacactatggatatgttttccattcaaatggcactttagcatattgttctgttttcctataaaacatcatgggtgtgatttttatactgctgatacttgtcacaattattataccttctctgt

SEQ ID NO: 10418 - DNA, 1132 bp, Macaca Fascicularis
  misc_feature (1)...(1132): n = A,T,C or G
ttgnntanntacatgaaagagaannnnnttgtctggaactnnttggctttgtgcaagctgtgtccaaggcaagtacataaactggtaccttgtaataaagaggcagctgatgccatgcacttgtctgagggcatagctccatgtcctctgacattcctggtgtcccaaagaatagcaaatgccagtttgaatattatgtaacttatttttttaatgtggacaggggaccttaaaaatcactaagttattaaaaatgtggatgtgctagaatttgatatgtctgggaacatgggaagggctcacaattggaatcccatgagtttctgtttttctctacccaaactcattccaaagctgactgcatttgtaccatcttacttattttggggattacacacctcagccgcgtgagatgggggtcagctctttataataaagggaaactagaccaggcctaaagcccaccccctaccctcacccctacatccctcttctgaaacttaaaaacagtgggaatataggaaagggaaccaaatctcattaattgttctccccattaccccaatgaatggccatacaggctaagctgaataatgacaaagttgaaaggaccaatacagccccttttataagggttttgaacgttttgcaaatgtattggtccctgtgctgtattttgtagccttttcccgggcttcagctcccctacttcttttgtatgtgtatgcatactgtagctaaccattaaagtcatgacacacacgagtccactgtgcctttctcagtagcagcagccagtgctggtggtgaggaggaaaagtggacagtccagccttgcagaccttggggccatgggggaccatcaactacttgctgaatgataggtcattcccactaactaagctggcatgtttaaggaaactatttttctnnnnnnnnnnnnnnnnnnnnnnnnnnnnnnnnnnnntctctggttaaacagaatttaaaatgcccagttttaataccccccaggtatttcggtattttttctttttaaagaaaatgagtagatgtgtattttaaaacttaacccacttaaaatttgccttacctttcatgactgtcaagttttacagccagagaggacaaa

SEQ ID NO: 10419 - DNA, 723 bp, Macaca Fascicularis
  misc_feature (1)...(723): n = A,T,C or G
gtcaggggggannntngtgnnngcggtgcagatgggccctcccacnnnngagccttcttagacccttggactnncagacacagggcccttggctctggcatctcacccccaagactgtctctggccctgccgagcctgcaggagccccgggacagagcgcccattcccctctacttgctgctctgggcctccccacatgtcttggggtctccacattcccactagtgggtctcacatgtgtgtctgtgtcttctccttaaacactcaccctggagtctgttctcacacctgtgcacaggtttgcacactcaagttctcacgggcaggctcaggtctgtcccgctgccctgggcacgagatctcccgaggacctgggcctgttctgctcccaggagcgccgagcctgttaccgcatgactcctgccatccagctcaggttcctcatggattcagccatgcatggactgggggcttccctggcccacggtgcccctcgtgtctcctcacgtgggtgtctgtggttctctcctgtgtaaatgtcacgccccaccccgtttcatgtgggccctaacacgcgtgcgttcttggtgggcacacgcaggaccgtgcctcacagggcccactccctgcctatgcctccctcttgtggggccggggagggcggctgctctgtcatgagaatgtacggcccgtgggtgattaacgggcctttttcactcagaa

SEQ ID NO: 10420 - DNA, 796 bp, Macaca Fascicularis
  misc_feature (1)...(796): n = A,T,C or G
gtaaacacagnnnnnnngnnntnnnacgttcggaatactcaagtggcatagagcctggcgtcgccaaggtcaaaaagcaaaacgcacccggagagnctggtagccggcccctgcggcccagtctgcagccgacaccctgctttggccatgggaaaacattaaaatggagaaaaacccagaaagctnnacagcaggacagcaagacttcccagaaagtttaaaatctctctgggtcttcgagtggatcctggaagccctgggtggcagtagattgatgtcctgttcttgtcagaggagccttgtggaaaacaactgctgtctttctctgaatatcacgtccccaagaatcagaggggccacagcccttttcctccgtgggaggccctggagcctgatagaaatcagtggtgtggggcaccatagagactagccagctcccgatggaaggggtctgtgtcttgcaatgatcccatcagtacccggcactcccttcacccaggcgctgacatgccggggttgagctggcactcttgggacgtggtataagaacgtcttgcgtgtcagtctggaacggggttgattgctgcccttacctgnnnnnnnnnnnnnnnnnnnnnnnnnnnnncctacctatcagtgcatacattggcatgaattttgtgaattagggtgttaaaaactggaattgaatttgtacaaagagagaagaaaatacaaaaagtttttgggctgggtcaaaaaatacgaatgtgttttcaggctcgtgatccctcttattttcnnnnnnnnnnngaga

SEQ ID NO: 10421 - DNA, 756 bp, Macaca Fascicularis
  misc_feature (1)...(756): n = A,T,C or G
tactactccctgtgnctgtacataggacaaatgtcctcttttacttttcaaaactgacttaggtattcatggaccttgattcttccatatacattttataataaatatgtgaaattgctcaaaatctctttttggaannnnnnnnnnnnnnnnaacaaatttgtaaataggggagaactgacactcttgcgatgtttnnnnnnnnnnnnnnnnnnnnnnnnatgttctcgggtcatcttttttgccctttcatggagttgtaaattttcacaaccaaagtcttgtatatgctgttagattaattcctatttctagttgctataaatgatatcttatattttattacatttctaataggctatggtgttggtgaaatgttaaccctctcattagatctactagtttgcttgttgattctattgtgttttctatgtaaatgattttgtcagctataaataataatgttttattctctttccttgcaatacctatgctcatttattttttgtgtttnnnnnnnnnnnnnnnnnnnnnnnnnncattaaacagttcatagtcatgatagtgagtattcttatgctgtttccagtattacagggactgcttagaaattttctctatttaaacatgatgtttgttgtagccttgttaaagctctgtaatttttaccagaaatattttgacatttattgttatttttttctacatctattgagatagtcacattccttttgtcttcactccatataaaggtaa

SEQ ID NO: 10422 - DNA, 721 bp, Macaca Fascicularis
  misc_feature (1)...(721): n = A,T,C or G
cnnnngtcnnnnnnnnnnnnnnnnnnnnnnnnnnnnnnnnnnnnnnnnnnnnnnnnnnnnnnnnnnnnngcaagctnnnnnnnnnnnnnntgcagaagatggctctggggatgttctttggttttacctccgtcattgtggcaggagtcctggagatggagcgcttacactacatccaccacaaccaaaccgtgtcccaggagattggggaggtcctgtacnnnnnnnnnnnnnnnnnnnnnnnnnggcagatccctcagtacctgctcattgggatcagcgagatnnnnnnnnnnnnnnnnnnnnnnnnnnnnnnnnnntcagaggccccgcgctccatgcaaggcgccatcatgggcatcttcttctgcctgtcgggggtgggctcactgttgggctccagcctagtggcactgctgtccttgcctgggggctggctgcactgccccgaggacttcnnnnacnnnnnnnnnnnnnnnntagacctctacttcttcctgctggctggcattcaggctgtcacggctctcctatttgtctggatcgctggacgctatgagagggtgtcccagggcccagcctcccacagctgtttcagcagggacaggggctgaacacaccccattccagcccccttgcttcactccaccagacagacagcagcagtcccggctctggttccttctcggtttattctgttagaagaaaggtcccaaaaaac

SEQ ID NO: 10423 - DNA, 955 bp, Macaca Fascicularis
  misc_feature (1)...(955): n = A,T,C or G
gaggctactcactagtatcgggtggtactgacaatcacctggtgctggtggacctgcggcccaagggcctggatggagctcgggctgagcgggtgctggagcttgtatccatcactgccaacaagaacacctgtcctggagaccgaagtgccatcacaccggggggcctgcggcttggggccccggccttgacttctcgacagttccgtgaggatgacttccggagagttgtggactttatagatgnnnnnntcaacattggcttagaggtgnngactaagannnnnnnnnnnnnnnnnttcaaatccttcctgctcaaggactcagaaacaagtcagcgtctggccgacctcaggcaacgnnnnnnnnnnnnnnnnnnnnnnntcnnnnnnnnnnnnnnnnnnnnnnnnnnnnnnnnnnngggaaatgaggcccacaggctggaagttactctccctccccctacctgggccagtggaatagaaagcctttctattttttggtgggggagggaagacctctcacctagggcaagagccaggtatagtcccccttcccagaatttgtaactgagaagatctttccttttccctttttcagtaacaagacttagaaggagggcccaggcactttctgtttgaaccccctgtcaggatcacagtgtcagagatgcgtgctccttcttggggaagttggggagtgcccttcagagccagtggcaggcaggggtgggtaggcaccctccttcctgtttttatctaataaaataccaacctgccctgagttnccattactgtgggtggggtcctctgggccaaacagtgatttgtctctttcaatgtgtacactcctcccctcccaccacctctaccacaaggacccccggggctgaagcctcctctctctgtctctgatcagagccgacaccagacgtgatnnnnnnnnnnnnnnnntc

SEQ ID NO: 10424 - DNA, 665 bp, Macaca Fascicularis
  misc_feature (1)...(665): n = A,T,C or G
actctccccatgctgacttggctctgtaacagaagtgagcagtatggctctctaagactccacatcttctnnnnnnnnnnnnnnntagaaggggtagcatcctctcactctgtaatctcagctctcctaatcccatcagctctcctaatcccatcacttccccagcccagagaagacattccaaccctgtctgatacccaggcccctgtttctcacccgagcgcaccaccacctggcgtgtagaatctccaggaagcctggctgcagcttcccatttggttacgaggttggagaaaaagtcaaagtccccnnnnnnnnnnnnnnnnnnnnactccgcagtcagactgggctggtagtaagctgccggtggaacacactcatttgccctgggtgtccttggtcctgcctggctctctgtagtggaggcttcccttggcctcacctcctttggcccttaggatctccccatttggagacagagccatttggatattttccccttgaacttttccaggaccnnnnnnnnnnnnnnnnnnnnnnnnnnnnnnnnnnnnngctaaacttagaggctgctagagtgtagtggttaagaacaggaacttgggnnnnnnnnnnnnnnnnnnnnnnnnnnnnnnnnnnnntttaactctgtgacttgatgcaag

SEQ ID NO: 10425 - DNA, 694 bp, Macaca Fascicularis
  misc_feature (1)...(694): n = A,T,C or G
tggggcctccaggtgcagctgtgggtggaagaccggggttggcgtgtnnnnnnnnnnnnnnnnnnnccaggcnnnnnnnnnnnnnnngggctcttttcctggtcattgggtggggctgagtgccacatgttcccacattaaaaaggggggtccagggctgtgtgtttgcgtgtgtctttctgggtctagggctggggggagtttgggtcaaggactgtccctccagcagtcacctcctcccaccctcagccccaccctcagccccacagtcaactggccatttccctgctcaaccctccctcctagaccctgagcctcagaggatccagcccatgagagaacgggcatctgggaggcccctcacctgctcctttgaccttgctcccnnnnnnnnnnnnnnnttccaccatgccctgggctggactcccgtgctcctcagggcccacccctgctctggtacaggcccctgctgagtgggtccctctcctctgcccctggggcccatcccctattgtccagggtccccatcctgtaccaagcagactgggcgctaagacccctggcagaacccagactctgctcgcacctgccccagcttctgccacagcttcagtcagggnnnnnnnnnnnnnnnnnngaagaaagagaaatgcaggagcnnnnnnnnnnnnnnnnnctgggaagagggtgccca

SEQ ID NO: 10426 - DNA, 724 bp, Macaca Fascicularis
  misc_feature (1)...(724): n = A,T,C or G
ggtcatactcactnnntagccagccccatcccctccacccgacacctgagttcttgcctcctccttttggggacacccaaaacactgcttgtgagaaggaagatggaaggtaagttctgtcgtcctttccccaatccccaggaatggacaagaagccaacttagaaagaaggggctcacgtggctggcctggctcctccatagacccctgttcttaacctctgcccacctgtgcatgtcatcacaaacatgtgctcttaagttacaagagaccaaatccacccagggattagggttcaagtagcagctgctaacccttgcagcagcccttgtggggctcccaacacaagacaaagctcaggatgctggtgatgctaggaagacgccctccctcactgccccacattctcccggtggccctaccagcctcacccatcaaaccagtgaagttctcaatctnnnnnnnnnnnnnnnnnnnnnnnnnnnnnnnnnnnnnnnnnnnnnnnnnnnnnnaaagggaacccaagcagtagagagcgatattggagtcttttgttcattcaaatcttggatttttttttctttttccctaagagattctctttttagggggaatgggaaatggacacctcataaagggttcaaagatcatcaatttttctgactttttaaatcatcatcattattatttttaattaaaaannnnnnnnnnnnnctttttttgg

SEQ ID NO: 10427 - DNA, 921 bp, Macaca Fascicularis
  misc_feature (1)...(921): n = A,T,C or G
cagaatgattatattcttcttnnnctggtacgaaccagggcagtgggcnnnnnnnnnnntgtccgtcgcttggtagtggcnnnnnnnnnnnnnagacttggactttatatcttcgccagagtatccctnnnnnnnnnnnnnnnnnnnnnnnnnnnnnnnttcagtcagctcacagctcgaccccttcatttgcatataattccaacagaacctttcccaaccactagaaagaatggagagagaccatctcatgaagtacaaataataaaaaatatgccccagatggcaaactttgtatacnnnnnnnnnnnnnnnnngatacagactacacatcattatcatcagactttattacaactaccacctgctatggtagaagaaggtgaggaagttcaaaatcaagaaacagaattggaaacagaagaagaggctatgactgttcaagttgacatcatacccagtccaacagacaccagctgcagtcaagaaactccagcctttcaaactgacaccactcctagtcagactgagaccaccgccagtgagacaggagccagttccaatccagaagccatccctgctttatctgagaccaccactactgtggcaggagctgtatctgcacctgcagaggcttacacacctcaggatgccacatctgccccagaagggaccaagtagccaaactgtagtcctaaaggaggacatgtcattcaaaaagtccgagtaaagttattttctgtattttatatttgcttctgnnnnnnnnnnnnnnnnaattaatgttcagttcttatattaactggttttggtgtcttgaatatatttttttaaattatgtgtatgaacaattctagtttcatttgttcaatcagaagagtaaataaccattcctctcatgtttgatcactgagtgtatct

SEQ ID NO: 10428 - DNA, 744 bp, Macaca Fascicularis
  misc_feature (1)...(744): n = A,T,C or G
gataaaaggannnnnnnnnnnnnnnnnnnnnnnnnntgggtaggggatgtggcgggatcctcattgccatggtactcaaaggcagaagagcctggagtttgttgcttttctgctattctttcatatcctgggcctggtgattagcaattctnnnnnnnnnnnnnnnnnnnnnnnnnnnnggttttatttgtccttttttatttnnnnnnnnnngcctgccagagacgggcctggggcctgatgaggaccttagcgctgctcattctcctttttggttnnnnnnnnnnnnnnnnnnnnnntggggaaagcaggcccnnnnnnnnnaagtcaggggnnnnnnnnnnnnnnnnatagtggcaaagacctagtggtcccctacccccacatctctcagttcctggcatgaggagagaagaccttgcnnnnnnnnnnnnnnnaacctttgaggccgggaggagagagcagcctctgggcatcgttcccagtgtcccccacannnnnnnnnnnnnnnnnnnnaccccccccccccgcccgccaccccgctgctcacctcttgtgtttgtggttctgtttgccccatttatctgttgctatttttgtgttgtcttcccccgctccgcattttgtaaaatggctcctgggggagtgtctttgctggatctgctccctctcgccctctcactccactactttttggaagaaagtgatggcagaatgcggtggtggtggggggtcttttgtact

SEQ ID NO: 10429 - DNA, 776 bp, Macaca Fascicularis
  misc_feature (1)...(776): n = A,T,C or G
agcagaagcactgccnnnnnnnnnnnnnnngaccatnnnnnnnnnnnnnnnnnnnnnnnnnnnnnnnnnnnnnnnnnnnnnnnnnnnnnnnnnnnnnnnnnnctgttcctgttgctacctgtaccgccggcgccagcaactccagannnnnnnnnnnnnnnnnnnnnnnnnnnnnnnnnnnnnnnnnnnnnnnnnnnnnnnnnnnnnnnnnnnngaccccaaagctggccctgcacccccacaacctggcttcatgtacccacctagtggtcctgctccccaatatccactctacccagctgggcccccagtctacaaccctgcagctcctcctccctatatgccaccacagccctcttacccgggagcctgaggaaccagccatgtctctgctgccccttcagtgatgccaaccttgggagatgccctcatcctgtacctgcatctggtcctgggggtgggcaggagtcctctagtcaccaggccccagaccaagccaagccctgggccctactggggacagagcctcagggaagtggaacaggagctgaactagaactatgaggggttggggggagggcttgggattatttttactgggggcaagggagggagatgacagcctgggtcacagtgcctgttttcaaatagtccctctgctcccaatatcccagccaggaaggctggggccctactgtttgtcccctctgggctggggtgggggcagggaggaggttccatcagcagctggcagtagccctcctctctggctgccc

SEQ ID NO: 10430 - DNA, 591 bp, Macaca Fascicularis
  misc_feature (1)...(591): n = A,T,C or G
acggagccatttttagctctgatcagcacgggaatgtgnnncggcctccaaggggctttgtcttggtgcccccgcccctggtcccaacnngatcccatgagggagtcgggacaggaggatagatggtgctccccctctcgccagagtcagaggccctggagaggggctctccacggcagatggtctttattcctccctcacgagcacagggcggggggctccccactcttggaagaggtggagaagactcttggggttcagcgtctcccacccagacctgctcttcacatgccggccgtcccctcccccactctatactggggagaggatatcagcctctgatcagtttcacaaagtttgttccctaaggaaatcaaatcccactgtcacctaactctaaagatataaacagcccacggatcagtatgggaaccccaaatcccacagggccagatgtggagtgtgtgtctgcccccgtgttctcttcatattcaaagcccccacttctctccaggctgtttctttttttatgactgtaaacatagatagagctttattttgttaataataagataatgatgagtaacttaa

SEQ ID NO: 10431 - DNA, 490 bp, Macaca Fascicularis
  misc_feature (1)...(490): n = A,T,C or G
aatggagcgtcttatggatgatgggctgaaagatgagagtggannnnnnnnaggnnnnnnnnnnnnnnnngttcaaagnnnnnnnntaatggcttcagcttggtctttcatcaccaccttctttacttcactaataccnnnnnnnnnnnnnnnnnnnnnnnnnnnnnnnnnnnnnnnntgccagctacaaggagggtctgnnnnnnnnnaagtggtttaaataacagtgcaatttcaaaaaatttataactttcttttgatcatcatgtacagaggtgtttttttttctttaggcttctcatgcatatgaatattttaagcacaaatggactactaaatgtctgaattttttttttaagatcctaacagaacatagcgtaacnnnnnnnnnnnnnnnggtgttattcatttcaattatgtgtagtataccnnnnnnnnnnnnnnnncatgtcttatttctttaaagagctgcttcattggccgggcgcca

SEQ ID NO: 10432 - DNA, 788 bp, Macaca Fascicularis
  misc_feature (1)...(788): n = A,T,C or G
agagatcactnnngtcnnnnnatgagaaagggggcaacatgaaggaggttttccgccgcttctgcgtggggctgcagaagatcgaggagatctttaagaaagcgggccaccccttcatgtggaaccagcacctgggctacgtgctcacctgcccatccaacctgggcactgggctgcgtggaggcgtgcatgtgaannnnnnnnnnnnnngcaagcaccccaagnnnnnnnnnnnnnnnacccgcctgcgcctgcagaagaggggtacaggtggcgtggacacagctgccgtgggctcagtatttgacgtgtccaacgctgatcgcctgggctcgtccgaagtagaacaggtgcagctggtggtggatggtgtgaaactcatggtggagatggagaagaagctggagaaaggccagtccatcgacgacatgatccccgcacagaagtaggcgcccagcccacctgccaccgactgctggaacccagccaatgggagggcctggtccaccagagatgcgccccctcacttcttgccccgccccctgtcccggagtcccaccctgtgatggttctgtctcctgggagctctctccacccttctcagagttccagtttcaaccagagttccaaccaatgggctccatcctctggattctggccaaatgaaatatctccctggcagggtcctcttcttttcctagagctccgcccccaccaggagctctagttaatggagagctcccagcacacccggatcgtgtggtttgtctccacgcaaagcaataaaa

SEQ ID NO: 10433 - DNA, 772 bp, Macaca Fascicularis
  misc_feature (1)...(772): n = A,T,C or G
gaggccccgagacgtgaagctggcccgcacacagctnnnnnnnnncaagaaacannnggcagcagccagggaggactatgtgctggtggccggccattaccccgtgtggtccatagccgagcacgggcctacccactgcctggtcaagcagctacgaccactgctggccacatacagggtcaccgcctacctgtgcggccnnnnnnnnnnnnnnnnnnnnnnnnnnnnnnnnnnnnnnntgggctatgtgctgagtggggctgggaatttcatggacccctcgaagcggcaccagcgcaaggtccccaacggctatttgcgcttccactatgggactgaagnnnnnnnnnnnnnnnntgcctatgtggagatcagctccaaagagatnnnnnnnnnttacatcgaagcctcgggcaagtccctctttaagaccagcctaccgaggcgagccaggccctgaactnnnnnnnnnnnnnnnntctgaggcccgatccccactgttggtgggtgggccctgctgggaccctactcnnnnnnnnnnnnnnnnnnnnnnnnnnnnnnnnncagcagggcaggaaggggaagcacagctgatgaactgtggtgccacgtgacccttgtnnnnnnnnnnnnnnnnnnnnnnnnnnnnnnnnnnnnnnnnngtcccannnnnnnnnnnnnnntctgtggctggctcacctttgctgagttccggggtgcagtgggggagtaaggcctcctaaatcaagcatttttctgtcactgatgtcaa

SEQ ID NO: 10434 - DNA, 772 bp, Macaca Fascicularis
  misc_feature (1)...(772): n = A,T,C or G
ccagcacagacaccgcagatnnngaactgaatgttcctaaatggcacagccaatccagacttctcagaaactgggcaaaaacattaaaatggggatgatcaggtcttctgcagtggtccaacacaggatttcttttaaatgtttcaaaaacatgtccttaaaatttcagcctgcttcttagcgagtgggccagttttgcttaaaactggttgggggggggatgtttttaaaaattgccaaaaagttagatgaaaatgtattactgtataaagcaaagctgtatatactaaacattttttagcagagtaatatttatttgcatagtctatttattgtattcgtattacactgttattaaatactgggatgaaatcagtgacctgaagcaagaaatcttgccttttaatgtatcattaattagggctgctgtgatattgtcagcttgcattaacaattagaagatagagaacccgccatcagggtgnnnnnnnnnnnnnnnnnngactacacttggtagttttccaccatttaaagaactggtaaatatgaaacatttgttgagttaccagaattgccattaacagtgttttctttcccatattccatgctttctgcctctgtgtatatatgttatatatatatatgactgtgctgtgtatttatcgaagctagtaagcaataatttatatgtaaaaatggccaagcaatataaggttaaaacttatataagtaacccttaccttatcttgtattttcaatttntttttttaaa

SEQ ID NO: 10435 - DNA, 273 bp, Macaca Fascicularis
ctttgagggccccacaaaatatgacatggcatgtgtgtacccaaacacagcaaaaaagcaacaggtgtcataagaatgaataaagtgctttgtgtgtacttactgctcatttaaaaaattgattatccctcatctttactgtatctttttcactacagaggcatcctaattgatttttgaattcaagagatttatcgagcaccttctataagccagcggctatacaaagtggacagggccctgacgcccagagtgacagaagtgctgtgtggc

SEQ ID NO: 10436 - DNA, 714 bp, Macaca Fascicularis
  misc_feature (1)...(714): n = A,T,C or G
aaaacaaatgcaagatattcccnnnnnnnntagagatcannnnnnnnnnnnnnnnnnnnnnnnnnctgtatctccttgtgaaccaggaacatcaggcttaannnnnnnnnnntcnnnnnnnnnnnnnnnnnnnnnggattattcatattatttagataatagattaaaagatgaacgaatgagtcaaggacctaaagaacctcaaggattccactttacaaattcnnnnnnnnnnnnnnntgcttttcattcatttccaaacttgcagagtgagcaacttttctccaaaaaccacactacagatagccataagcaaacagtagcaacagactctcatgaaggacttacagaaaatagagagnnnnnnnctgttgatgagaaaattactttnnnnnnnnnnnnnnntcctcaagttttctatgaactaccagaagtagtacnnnnnnnnnnnnnnnnnnnnnggaagagaacaggatcagatttccacattggacataaataagnnnnnnnnnnnnnnnnnnnngaaaatctagggaataccattattttcagattagcagtttattaaggtcttctatattaaaacactaatagatattcaataatggagtaaactgttcgagataaagcaagaatagttgcaggaagtaaattctggtacaaagcataaaaatataacagaagaaataatgtaaaatactatctttctgtcta

SEQ ID NO: 10437 - DNA, 753 bp, Macaca Fascicularis
  misc_feature (1)...(753): n = A,T,C or G
accaggaaattccnnncagctctttgcctcagatnncctannnctcctttagtcttgtaggggttccaaggatggctcttctaaccagaggctggcctgtctttaaaacttaaaatactttagggtggtgccaccactgcagactattgtggtactttgtgtgacagaagacacgtacacacacaccacacacatacacatacacacactctctctctgtctctcttacctttagctgcttgatctttaagccatccaacttgatgccagttcccttcttcatagaagagtgaagggaaagacttccttggtttgacttaaaccttgtccacctcttgatattttaggattgaggaacaagtcattaatctaaggactgattacagtggctggagcttgggcacttgtcttatcactggtcactgagtctgaaagtcccagctgaattcttgcctttaagtgcttttgctgctatttttttgcccccagtttccacaagatccaatcaagaattctgtatcctgggacagtcagattctactaaatcaggccaggaaggaggggaaaagagtgagagaatggtattcccagacacttcttcctcctgccccttttcccagcagctctcagaccagatgttggctgctgtacttattccctgaggtagggaatgtgtgattgagtggtctgtgttcctattgctggtggggtgatagggtgggctaaaaaccatgcactctggaatttgttgta

SEQ ID NO: 10438 - DNA, 615 bp, Macaca Fascicularis
  misc_feature (1)...(615): n = A,T,C or G
gtgactctgtaaccannngagaccttcacctttgctgccgttgggggcnnnnnnnnnnnnnnnnnnnnnnnntgacnnnnnnnnnnntgggggcttctggttctgtctgtgtggaccggcacctgggctnnnnnnnnnnnntcctcccattcggaccaggctcagggctnnnnnnnnnnnnnnnaatgggccccaccacaaaggggcccatctgnnnnnnncgtcttctaggtccccagctcagggagccatccccagctccagttttctcatgcgaatatgcacagagttttaattaaacttgttacactagcctgccgatgagacctggacacaggcagacctggcgctcttgaaccccgannnnnnnnnnnnctggccctgaggagtccttgcagcccnnnnnnnnnnnnnacgacaggcccaaagatggacactgcccccccggccttgtgannnnnnnnnnnnnnnnnnnnnnnnnnnnaaccacagaggactggtgggcggggctccccagccatcaccatcctgtgtacaatggctgtagacttgtatatggctcctttaatattgtannnnnnnnnnngtacaattgtcgtgcgtttgtgtgaacac

SEQ ID NO: 10439 - DNA, 691 bp, Macaca Fascicularis
  misc_feature (1)...(691): n = A,T,C or G
aagactgataattcagaggtnnctggaatccaacacctgacattaagcaatggagannnnnnnnnnnnnnnnnnnnnnnnnnnnnnnnnnnnnnnnnnnnnncagagaaactctggcaacgggtaactcgagccataaatgccaannnnnnnnnnnnnnnnnnnnnnnnnnnnnnnnnnnnnnnnnnnnnnnnnnnnnnnnnnnnnnnnnnnnnnnnnnnnnnnnnngaagaatggtcttnnnnnnnnnnnnnnnntgatccactcacaggagaatggcattacaagtttgcagatacccgaccatgggacccacttaatgatatgatacaatttgaaaaagatggcnnnnnnnnnnnnnnnnnnaaacatcgtactccaatggttaatgtccccaaaatgaaacataagccaaccaggcaacagaagaaagtagcaaaaggctattcctccccagaacctgacatccaagactcctctggaagtgaagctcagtcagtaaaaccaagtacaagaagaaagaaaggaatagaactgggagacattcagagttccatcgaatctataaaacaaacacaggaagaaattaaaagaaatattatggctcttcgaaatcatttagtttcaagcacacctgccacagattattttctgcaacaaaaagactacttcatcattttcctcctgatttg

SEQ ID NO: 10440 - DNA, 737 bp, Macaca Fascicularis
  misc_feature (1)...(737): n = A,T,C or G
gcgccaggannncgtgacggtgtttggatgcttgacccacgaggtgcccttgagcctgggggatgnnnnnnnnnnnnnnnnnnnnnnnnnnnnnnnnnnnnnnntcctctccgtcagtgccactaccagggttnnnnnnnnnnnnnnnnnnnnnccgcagacggggacctggttcctggcccttcgctccctgtgcggggtagggcctcggttcgtgcggtgccgcaacgcgacggccgaggtgcggatgcgcaccttcctgtccccnnnnnnnnnnnnnnnnnnnnnnnnnnnncagtgcaagctgcnnnnnnnnnnnnnnnnnnnnnnnnnnnnctgcgagtgcaaggccgggtggagaggctggggctgcaccgacagtgcagatgcgctcacctatggattccagctgctgtccacactcctgctctgcctgagcaacctcatgtttctgccacctgtggtcctgnnnnnnnnnnnncgatatgtgctggaagctgctgtctacaccttcaccatgttcttctccacggtatgcggctgtgtctgcatcttatcactgggtgcttgtgagtggtggtgggtcacagtnnnnnnnnnnnnnnnnttctccaaaggttnnnnnnnnnnnnnnnnnnnnnnnnnnnttctacagacagagacagcagtgcttcccaacctatcatgcatagaaaagggtcgtttttgtaaggcacattggaggaaatgaacaaaac

SEQ ID NO: 10441 - DNA, 725 bp, Macaca Fascicularis
  misc_feature (1)...(725): n = A,T,C or G
atgccttaaagtcannnnnnnnnnnngaggnngattcagaattgaagcagttctcaaaaggggaaactgaacaggacctggaagcagattttccatcagaatcctttgacccacttaataaaggccagggaatccaggcacgttcccgaacaagacgacgacacagannnnnnnnnnnnnnnnccagacgaagaggannnnnnnnnnnnnnnnnnnnnnnnnagcccaggagtcttattcaaggagcctttcnnnnnnnnnnnnnnnnnnnnnnnnnnnnnnnnnnnatgtatggggtannnnnnnnnnnnnnnnnnnnnnnnnnnnnnnnngccaaggaagagcagggggannnnnnnnnnnnagggnnnnnnnnnnnnnnnnctagcccacgttctgaccccttaggaagnnnnnnnnnnnnnnnnnnnnnnnnnnnnnnnnnnnnnnnnnnnnnnnnnnnccgctctgtcaagctgaaggaagatattctgtcctgcnnnnnnnnnnnnnnnnnnnnnnnnnnnnnnnnnnnnnnnnnagaggtgcggagaccaaatggtgaaaaatatgatccagacagtatcttatacttgtgccttggaattcaacaggtatcaagttaaacatatggattcttgaacctagcaaatccattgacctgaatatgtccccacagaaattacatgcacatgtacacacccagatatgtactggtattttca

SEQ ID NO: 10442 - DNA, 701 bp, Macaca Fascicularis
  misc_feature (1)...(701): n = A,T,C or G
aaggacatggcactgcctgtgcccagccctcccannnngagatgcacaggtcggacacaatgcccagccccacaggggcccagggtgggcataggctgtggccagggnnnnnnnnnnnnnnnnnnnnnnnnnngctctccagggggatcctnnnnnnnnnnnnnnnnnnnnnnnnnnnnnnnnnnnnnnnnnncggactaggcggactctctctgctctctgggtaggcccttgtttcccacatgctgctcccatgtctggtagaaaagcagggctctctttggttccagagagctacctgcagtggctggtcttgcacatccacttttagcacctcccgccaactgaggtaggcagcccccttcatttcatctttgggataccagccccaggggctgctcccatcccacctgctccnnnnnnnnnnnnnnnnnnnnnnntcctttccttgcaaggagggagtttgcctttcccctgcaggctgctggcaccttctaggtccacagaaacctcacctnnnnnnnnnnnnnnnnnnnnnnnccccgggcaggctgaacacacagtgtctgtagccccattgtcttgtcatggggagctgagagggggcaccaaaggannnnnnnnnnnnnnnnnnnnnnnntagaaccccagcttctcttccactagaatgtatgcagtagagtacgttccctggtagccct

SEQ ID NO: 10443 - DNA, 779 bp, Macaca Fascicularis
  misc_feature (1)...(779): n = A,T,C or G
cagggagcagatgggcctcattggtgagnnngaatagagtaactggtctatgagttgccacnnnactttgtgacccagcaagacctttcccctctctgggtgttagtttcttatctgtaagatgaccagagttgctcagatgatctcctagatcctttccagttctctgattttgtaaagccaatggcttctccctcttcaaggtgctatgccgaccagccctgaaggctgggatctgccgctccctccagccaccagggggcaggagtgcactacctgctgtcagtcgccagagtggccgctctgtgcccagccctccagcctcgcccttggaggctgctcttcatcctgcctgtggttttcaactcagagctggacttctatttataagttacctgtatttatatttatatgcccgctgccatggtgaaggctggacaaggtgctcctctggcccctccttcgtacctcagatgcctgaacagaacaaggcaaacacgtagcagcctctcaggagcagacaggtcctctttcggggctcaggagggtgggcacgtacccagtggcctgcaaagtgagcttattacccactacttcctgtgcctgctttgtgcttctaaggtgcacacctagcctaggtgagacactgcagccaggcaaccaccgacacacgccccttctcaaagccagaggtgagtggggcaggtgcccagggctgggcgagtggaattaggacacacacaggcttgggcttcannnttnnnnttattgatgcattc

SEQ ID NO: 10444 - DNA, 714 bp, Macaca Fascicularis
  misc_feature (1)...(714): n = A,T,C or G
cgacaaggacnnngagaaggcagctgccacctatgagcaaatgaagtgtctcaaacccgaggatgtggccgaggctgttatcnnnnnnnncagcacccccccacacatccagattggagacatccagatgaggcccacggagcaggtgacctagtgactgtgggagctcctccttccctccccacccttcatggcttgcctcctgcctctggattttaggtgttgatttctggatcactggataccacttcctgtccacaccctgaccaggggctagacaatttgtttgagatttttatatcatcttgtcaaattgcttcggttgtaaatgtgaaaaatgggctggggaaaggaggtggtgtccctaattgatttacttgttaacttgttcttggtccccctgggctccgtggcctttgtctgctctcagtctcttccctttgatatgggaaaggagttgtggccaaaattccccccatcttcttgcacctcaacctctgcggctcagggctggggtggcagagggaggccttcaccttatnnnnnnnnnnntatccagggctccagacttcctcctctgcctgccccactgctccctcttccccttctctttctccttctgggctctccagcccaatcttggctgctcgtcccctcgtggggtcatccctccactctgactannnnnnnnnnnnnnnagggcctggtccagag

SEQ ID NO: 10445 - DNA, 1664 bp, Macaca Fascicularis
  misc_feature (1)...(1664): n = A,T,C or G
gccagtgcctggctgaacgctannctgtcatnnngnnngacatgctgctgggccgcatgctgccccagctggtctgcggcctcgtcctccggtgctccnnnnnnnnnnnnnnnggcccaggagaatggctgccgcaagactctgagtgccgcctctgcatgtctgtgaccacccaggccaggaacagcagcgagcaggccataccacaggcactgctccaggcctgtgtcagctcttggctggacagggaaaagtgcaagcaatttgtggctcggcacacgccccagctgctgaccctggtgtccagggactgggatgcccacaccacctgccaggctctcggggtgtgtgggaccacgtccagccctctccagtgtatccacagccccgacctctgatgagaactcagctgtccaggtgagtccagctgccacactgaaaagaagcctcagatcccacaccaccctcctcgccgcccttcctcgggagtcacttccactggtggaccacgggcccccagccctgtgtcagccttgtctgtctcagctcaacagaatccgacgccagagccacttccatcctctctggtgtgaggcacagcaagggcagcatctggaggagctctgcagcctccacgcctaccacaacctcccagggctaggctcaggagaaaccagccactgctccacaggacagggagtagaagctgggccctgcctcacacccacccccatgcattcaaagactggcttttacagctatttgtaattcaaaattcagaagaataaaaaatgggaacatatagaactctaaaagatagacatcagaaattgttaagttaagctttttcaaaaaatcagcaactctccggcgtggtcgagggtggacactgcacactctggcatgatgagatggtgaccaagcaagctttcttcctcgagatgctctgctgcttgagagctgtcgctttgttaagatataaaaaggggttttctttttgtctttctgtaaggtggacttccagcttttgattgaaagtcctagggcgattctatttctgctgtgatttatctgctcaaagcccagctggggttgtgcacactagggacccattcctgtgtaatgcaatgcttgcaccaatgctaataaagtcctattctcttgtatgagaaagaaaaagacaccttaggaggccgaggcaggaggatcacttgaggtcagnnnnnnnnnnnnnnnnnnnnnnnnnnnnnnnnnnnnnnnnnnnnnnnnnnnnnnnnnnnnnnnnnnnnnnnnnnnnnnnnnnnnnnnnnnnnnnnnnnnnnnnnnnnnnnnnnnnnnnnnnnnnnnnnnnnnnnnnnnnnnnnnnnnnnnnnnnnnnnnnnnnnnnnnnnnnnnnnnnnnnnnnnnnnnnnnnnnnnnnnnnnnnnnncagtaaataaatacatannnnnnnnnnnnnnnnnngtggcctcaccctgnnnnnnnnnnnnnnnggcctacctcactctctcccttggcagagaannnnnnnnnnnnnnntcctcnnnnnnnnnnnngctcccagcctgccctccagctgctgctctccccnnnnagtctctactcaatgggatgaggtgaggtcgtgaggacaccaaaaatctaaaaatannnnnaaacccaaa

SEQ ID NO: 10446 - DNA, 737 bp, Macaca Fascicularis
  misc_feature (1)...(737): n = A,T,C or G
atgatgatagcnnnnngatatgttgatcagacaacacatgaagagtatgaatcctgtttggcagatagtttctcccaagcagcagatgaagaggaggaattgtctgctgccacaaagaaaccacacactcatggtgataaacaagacaaagtcaagcagaaagcatttgtggagccgtattttaaagataatgaaagagagactagcttgcaaaattttcctcatattgaggtggttcggaaaaaagaggagagaagaaaactgcttgggcacacatgtaaggaatgtgaaatttnnnnnnnnnnnnnnnnnnnnnnnnaaagagaaaagaagttggcttcctgctcaagacaccgattccgctacattccacccaacacaccagagaatttttgggaagttggttttccttccactcagacttgtatggaaagaggttatattaaggaagatcttgatccttgtcctcgcccaaaaagacgtcagccttacaacgcaatattttctccaaaaggcaaggagcagaagacatagacgttgaaacagaaacaataggatggagcagttttttccttcttatttatacttaaagttggtattaaacattggttttttgatcttctataaatagatttataaatcagttttctattgaaaatgtttgcgatattttgcttttgcacctttaaaacaataaggcgctttcattttgcactctaacttaagagtttttatta

SEQ ID NO: 10447 - DNA, 739 bp, Macaca Fascicularis
  misc_feature (1)...(739): n = A,T,C or G
catgaagtagtgctgtaaaannnnngccataggaatacttctgtnnacatgcttctcattcaagaattcgtcatcacgcatcacaggccgcgtctttgacggtgggtgtcccatttttatccgctactctttatttcatggagtcgtatcaacgctatgaacgcaaggctgtgatatggaaccagaaggctgtttgaacttttgaaaccttgtgtgggattgatggtggtgccgaggcatgaaaggctagtatgagcgagaaaaggagagagcgcgtgcagagacttggtggtgcataatggatattttttaacttggcgagatgtgtctctcaatcctgtggctttggtgagagagtgtgcagagagcaatgatagcaaataatgtacgaatgttttttgcattcaaaggacatccacatctgttggaagactttaagtgagtttttgttcttagataacccacattagttgaatgtgttaagtgaaatgatacttgtactccccctacccctttgtcaactgctgtgaatgctgtatggtgtgtgttctcttctgttactgatatgtaagtgtggcaatgtgaactgaagctgatgggctgagaacatggactgagcttgtggtgtgctttgcaggaggacttgaagcagagttcaccagtgagctcaggtgtctcaaagaagggtggaagttctaatgtctgttagctacccataagaatgctgtttgctgcagtt

SEQ ID NO: 10448 - DNA, 771 bp, Macaca Fascicularis
  misc_feature (1)...(771): n = A,T,C or G
gccccagcagcctggctgnnctggctcctgacagcacctgtttctgagcagccgtgttgcgggcgctccttctctgcccctcagcgagagcctcagggacctcacaaccccttgtgtctagtggtgatccctcctaggatgaggaagacccccttgggctctgggctgacccccacctcctgtatagctgtgcacaggcccccagagtgacccatgtggggcaaccccctgcagtgcacaggccccacccatctaacccaggaccgggcctcccgggggtggggctggagccccctggtccctctggttgtctggagtaggaatctaatttatttatttattgcctggctagtggctcgggggaggaggtggccctgtcagctgttccacctgcccctgccccttggagcagtctgcttctcccttcctttcctctccagcaacacagtcgagtctgaaagtatgtagaggacgggacaggaagatgagagagggctggacatcccgcccactgtgtcccagccagggcagggagggaccatggcctgcagggtcgaggggccccaatgtgcacagctgccgcagggagggaggtcttggggagatgggcggtcagctggcctgtccttggtgagtgcacacaccgcgtgcacacgtctcggcctgcacacaaccgcgggccttcctggcgtctctggcccccacgtgtctgcgctgtagatactgtatcaaaagtcccagcgtctagatggttaacatagagctgcttct

SEQ ID NO: 10449 - DNA, 683 bp, Macaca Fascicularis
  misc_feature (1)...(683): n = A,T,C or G
cattgagcatagaatnngnnngcattatnnnagggcaccannntcnnngtgcaaggaagaggcttaagtatgttcatttttatcagaatgcaaaagcaaaaatgatgtcactttaagaaatagctactgtttgcaatgtcttattttaaaaaaatggaacaaannnnnnnnnnnnnnnnnnnnnnnnnnnnnnnntgaggaaatgggatgtgcacttaaaattcacatgtgacaaaattatctacaccttacataggaggagaatacttgaagcagtatnnnnnnnnnnnnnnnagcagattttatacttnnnnnnnnnnnnnnnnnnnnntgcatttaaatcgtttagctgatggctaaatagcaaaatttatatttagaagcaaaaaaagaaaatcctagagatgtgttttataaataggtttatgtgtactggtttgcatgtacccatccaaaatgattatttttgtagaatataagttaaacttactatttataatgcataggtaaccattaactatgtacatataaagtatacatatgtttatattctgtatatatggnnnnnnnnnnnnnnncccagtgtacttctcaaaccaagactacagatattttgttttttttgatttctctttatactaannnnnnnnngnnnnntaaaagnnaataaggggaataataaa

SEQ ID NO: 10450 - DNA, 736 bp, Macaca Fascicularis
  misc_feature (1)...(736): n = A,T,C or G
gagagtgggcagtaaattctatatagacaaaggtgaaaacaataaactgagcctgatatataaacatgagtacaattcaaaatagaatggtaaggaggtgtggatgtttctttatcactataaatgtttttgacacacctgcacacacagaaaattataaactcaaagataatgaacctagagtcatgtggagggtgtgaggtgggtcaaaagagaaatagaggatattaaggagtataggtaggtattgaagaagagctgcattttatacacatacagacacatgcacacatatatacctatatatactctttctgtctctccatatatacatatatatttatatttttgcacatgtaaatacatatatgtaatgtatatttattttcccccaatactcctcatacctagagaccatgaactacatacagagggaaggcacactttctacctgaaggccagcgcttacattggtgatcagtttgttcagttctcttgatcattagagtatgtgtataaaatcatggatgggaactttgtgagccatttaacttttgcaagaagcatatgaatgtgattgttcttttagagtttgttaggtgggtggtggtaaagtaatacagttttctagatgataaaatcatgaatctcatacatttcaaaaattttattcaatcattaattaatgagaatatcagtaagatgttaaacaaatttnnngagcatttgaaaaacc

SEQ ID NO: 10451 - DNA, 735 bp, Macaca Fascicularis
  misc_feature (1)...(735): n = A,T,C or G
aatcaatgtttgcaatggtaaatgaaacatttccttggacatgtantncaaagtcattacatataagtaagttttagaaattcaggaaagttagcaattatgtacagatattatacagaggaaagtagttatatttttaaatgctattannnnnnnnnnnnnnnnnnnaagaggtaatctatgttatttcctattctaatgtgttttcctaatacaaaacttcaactttctaagttagtagagacgatttttgttgttttactttcattaactgttgcttaaggtttttatacacttccagattttaattaatactttcatatttctaggagcatggttgatatgaaataaaggactttatttgtaaggaaattattttcagttcttagaagtagatttgaattttaataattctaaaatgtgacacattttggaaactttccaccatatttaggaaaactctgattttagaagtctagcatagaagaaaagaagtagtgannnnnnnnnnnnnnnnnnnnnnnnnnnttaacatttagaactggcagaaacttcatatgtcgtctggtccagcttccttattgtgtcggtgagaaaacgtaatactgttttcaaagtcgtaggtaagttaatgctgtgctacaattagaatgattactttggacacctaaacaattataccatttgcttcaaagtattagtacataaaataacttgagggattgttattttcta

SEQ ID NO: 10452 - DNA, 739 bp, Macaca Fascicularis
  misc_feature (1)...(739): n = A,T,C or G
caaacaatannnnnacaccgtcttcaagatcnnngattggacggtgatgaatgtcttagtcatgaagagtttcttggggtgttaaaaaacannnnnnnnnnnnnnnnnnnnnnnnnnnnnnatcagagtatacaagaatactggaagtgtgtgaagaaagaaagcattaaaggagtaaaagaagtctggaaacaagccggaaaaggtcttttttaataaaagatataatagtatggcaattatattgttccaaatgtcaaaatttgtgatattttagaagtactagctgtttatcttcctaagtcttcattgatattctttgtgatataagcatgtcttgtacttgctttctgattcataatttttttaaagaacttannnnnnnnnnnnnnnnnnnnnnnnnnnnnnnnnnnnnnnnnnnaaaaggcctagatttgaaatggtgttttgtacttcggtaagatggaaagcttagtgattcactgatttcttggacactctaataatgatatgctttctggaaggataaaacaaatacatacgggaaaaagtacttgagaccaagnnnnnnnnnnnnnnnnnnnnnnnnnnnnnnnnnnnnnggctaaatgaagttaaaaacttatttgagatttttctcatctgtaccttatatatatcataaatttattgtgtattttatgtcagtagcttagctgtttattgtctttaaaataacatgtaaatttcaatgttcatc

SEQ ID NO: 10453 - DNA, 750 bp, Macaca Fascicularis
  misc_feature (1)...(750): n = A,T,C or G
cagcagcaggtgggcnngnntgggggcagggggcccgggactgcnnnnnnnnnnnnnagccctggcagtgctaggtgaggaggggaccaggcctgaggctctggagctagagctgctcttgagcagtgggcgnnnnnnnnnnnnnctnnnnnnnnnnnnnnnnnnnnnnnnnnnnnnnnnnnnnnnnnnnnnnnnnnnnnnnnnnnnnnccctcggcccctccagtccnnnnnnnnnnnnnnnnnnnntcaaactgctgctggccgagtttgcccagcaccgccggcttgatgctcacctccccctcctttgccgcctgtgcnnnnnnnnnnnnnnnnnnnnnnnnntcctgcttctactgaggacatacctcccagatgaggtggggccccctaccccatttnnnnnnnnnnnnnnnnnnnnccctctcactgtgnnnnnnnnnnnnnnnnnnnnnnnnnnnnnnnggactcaaggatggccctcaggcccagttctaagcccatatgaggacatcctatgggaccctagcactccacccccgaccccacctcgggacctatgactacccttcaggcatcagaacactcaggacctggaggcttgcttgnnnnnnnnnnctgnnnnnnnnnnnnnnnnnnnnnnntctgggacacagtgatcagggaagggtgcgtgggacttggaggggcccatggtggacctgtgtatgcaatattcttctgtcatctggagctatttttaagatat

SEQ ID NO: 10454 - DNA, 737 bp, Macaca Fascicularis
  misc_feature (1)...(737): n = A,T,C or G
ggtggcagcacagccacacccgttcccatgtccggaggagggcaaggctgggtgctcagcagccgnnnngagccggggccccttccaggggctgaaatccacctttctccatcttccctgccttcnnnnnnnnnnnnnnnnngtagagagtcctgggattaggggttctatgctcttgcctaattaggaacattcttccctgtctcacgtgagtttgccaaggatatggggcaggaggcgtcctctgctgacccccctgcagcctggagccaccccagggactgtcctgggtggagggcaggtgaacacaagctgctgccgcgtggagccgctcactcgacgtttttcagctgtgaccattcccgggagctctttaagcccttctctctcatttggaactagggggaaccaggaaggggctcctggcccgtgtcctctgcagcgagggttgtggggggcgcagcatccatgccttgctgctcgtctttcatgaagtctattttttaagtgctggctccccctaatattttatgcagaggagggaaaatttatagtggcaattattttctcnnnnnnnnnnnnnnnnnnnnntaggaggaagggggcctagcagagcgtggcgtgtggcagaatcgcaccgccccggctccccagccccaccgccatgcagggctcgcgtgcgggaaaattaatatgccagcgtttaggcctgtgcccctctgctgggtgtaactgct

SEQ ID NO: 10455 - DNA, 742 bp, Macaca Fascicularis
  misc_feature (1)...(742): n = A,T,C or G
caaaagctttnnnngagtgatgaacaggattctgaatatttgcaatgtggagttccagccccgatctcacgtcagtgagggtctcctgtcgagatctcaagtgtgtttcctttggctgttccctaatacaaaatatggacatatttttactcgtagcactcaatttagtaacttctagatgctaccgttgacctgagttaatttcactttgtcttgtaagtaaaaattctcctttcagtatattattttcttggccttccattttaaaggttaaagtttctaacctaagaattaagtacgcattcaggaagctgttgtctaggccccttgtgaatctgggttcattccaatacggcaagtaagagttggaaactttgagaacacggactataaaggcagcagcccaaacactgtcagactctaattggccaccctgggaaacagttgccctgttattctttaaagaaagacgtttattctaatgaaagccagactgtttttaaagcatgtggcaggaagcagaaggttggatccaagcccttgttnnnnnnnnnnnnnnnnnnnnnnnnnggtttctctttttgtgacctttattattattttgttaactgttgtaaccagttagctgttgtgttttaaaatagaaaggaaccagactgaaattgtaaatactttgtaaacataagcatttgtacttgaatagtaggattttaaagggcattgatagcctaccaaacaaaag

SEQ ID NO: 10456 - DNA, 723 bp, Macaca Fascicularis
  misc_feature (1)...(723): n = A,T,C or G
gtcccgagtccctgctgcctgtcacagtccttcggccagcgctggacctcaaccctgaggagtcacnnnnnnnnnnnnnnnnnnnnnnnnnnnnnnnnnnnnnnnnnnnnnatgctatggccggaaggcctggggtagcctcctccaagccgctcgcaccccgtaggtgcccatccgccgctggcgccagtgnnnnnnnnnnnnnnnnnagagcaggacagatgtcacgaacaggaacagcaacactgacacnnnnnnnacnnnnnnnnnnnnnnnnnnnnnnnnnnnnggctcatagatctccagcatcttcggggctgagtgtgtgcagaagacttcgccaccgcgagacatcaagtccagcacagccaggcaggagaagttgtggtggccgtcctctctgtgagccatgctgcnnnnnnnnnnnnnnnnctcctgcagggcaggggctgccttcccgaaggtctgactgtgcagagtctcactgccacggagcaggctgagggtgaggctgtccaggggctccacggcgggcaccnnnnnnnnnnnnnnnnnnnnnttgcccacggccacccaagtgggctgcagtgtgaggaagacctgccttggaggctggtacacgctgacgttggaactcattgacttctgcttcccagnncangtgaagtggcaccagnnnaccgtgtcatnnnagatgtttgnnntcaagtaatgcttccactg

SEQ ID NO: 10457 - DNA, 759 bp, Macaca Fascicularis
  misc_feature (1)...(759): n = A,T,C or G
acgatgatttaattgcaaagactaggtgtatattttttctgttttctaaatgacccgtggtacttaataggtgtactaaaattgtgttgggagcagggatttggaaattnntgatagatgtgtagttaatatagtaattctgtttcatgagatataatctattatgctagtggtttaataggcttgctatataagtagaaagaacatggctcaactagatatctttatatgtatgggcattactcttagtgatatttgtttcctgtcctttgttgctcatgctatttaagtgcaggctgagacccagcctctttgtaatcaaaataatccactgtttttttgcagaccctattcacagggttaaaaaaattaagattgctttccatgtttgaaatttaccattgagagtcaatgaagttgctattttgagtttagcattgatattgtgaaaataaatgcaatttggatttcatgtttcttaatattcattcttgtttcacaaatgaatgattaaggaattactgcatcataaaggaacctaagtgaggtatatgatgagtgtattgtctttgcacacacacatataggtatattctgaatacaagcttattcacattttgcttcctaatctttttgttgtacagggattcaggtttcttattcttacaacatgattgtttgtatgtgaagcacatcttgctgttgccttatttttgatgcttttattcatgataagaattgtcaatataagaatgtata

SEQ ID NO: 10458 - DNA, 783 bp, Macaca Fascicularis
  misc_feature (1)...(783): n = A,T,C or G
tgcaaataacaattnatcagtgattcagagtaaaaagaagactaacttttcaagcaaatgcatctgtagataaagatgctttatattagactgtcatgtctcagtgtatatctgtatatattatttgatattcagagaatctaaagcactcatctactgttttaatgagatttaacagtgagtttcgtttgtaaactgctnnnagtctgtggcgttcgggcacaggtctggctggccagctggggtctcctcctgggctcagtgggcctggggcctctccgacgtggtgcctgctggagggaggcttgtcatcacnnnnnnnnnnnnnnnnnnnnnnctgactggcctttgtcctggttccgtagcagaacactgtaaaagtgcccgcgactttgcagtagttgcagatttcagtcgtcctattacttgtgtgcaaacaaaagctgggtcttacccaccgcacaagtctctccggctgcccagagtcgccagggagcaggtgctgcagccagagctacactgtggtcacatggggcggccgggggtgggggagaacctgtattttatgtaactcagcagtgcccaccgccatcacgagctatgcatttactgttcccagtgagcagatgtcttgcttggaaagtggacctgtgtctgtgtctgtcgcgagaacttaccagcagaaatcctcatttctgtgctacagatttaccaaaaattgtcgtctttnnnnnnnnnnnnnnnctttaaatgtatagtattttaggaaaaaatcaataaaca

SEQ ID NO: 10459 - DNA, 710 bp, Macaca Fascicularis
  misc_feature (1)...(710): n = A,T,C or G
taaaatannnnnnngagttactgggtagctnnnnnagtatctcattgcttataacacaactcactagatagatagtctatactagtgactcctgacatcaaaattatctggggaacttttaaaaaaatacatgggatccacaccataactacactaagaatcgagaatgtctgtattttttttaacgttcccaggtgataattccatgcagcctagtgtgggaaaccccgacctaccattaagcctgtgnnnnnnnnnnnnnnnnnnncactggaatcactgagggaaactttaaacacaaaaaggaaagcaaaacacannnnnnnnnnnnnnnnnnnnnnnnggagagtcatgtgcaggaatcagcattttaaacaaccacgcagttggtcccaaatgactcagaaacactgtaccacnnnnnnnnnnnnnnntattataatgagtacattcagcaattaggnnnnnnnnnnnnnnnnnnnnnnnnnnnnnnnnnnnnnngcagttttagcaagtgtttgagggcaacactcagccttttcaagtaaaatatatttatattcttaaatattaggtcaaagtcaacnnnnnnnnnnnnnnnnnnnnnnnnnnnggaggcaaatgctctttccaacaatttaaacctttaaacaaaccagttcttacccctcaacttnnnnnnnnnnnnnnntccatcattagtctgatat

SEQ ID NO: 10460 - DNA, 738 bp, Macaca Fascicularis
  misc_feature (1)...(738): n = A,T,C or G
tnnnnnnncattttttcttgctgctcctccccatcacctgggctgttttctgttggccccttttgttttttggccttaaccctcctgctgcacagggtgaggtgcctccttggcacagactgtggatgcctcctcccccagcagagccacacagcctnnnnnnnnnnnnnnnnnnnnnnnnnnnnnnnnnnnnnnnnnnnnnnnnnnnnnnnnnnnntttgtgcttgtggctgannnnnnnaccnnnnnnnnnnnnnnnnncttctgaggannnnnnnnnnnnnnnnnnnnnnnnnnnggacctgatgagtgaccttctggagctggtcaggtcctcgttgcagcaggcaagactaatcactgaacctgcctcatggcaccagaatgaacagggcaggcaggtggtaggcccagctggggacaggggagagttcctgtcctccccatatccctacatgaaatgtgggaaagttgctgctgttgattcagggtctgtctgggaggcagagggcccttggtggatagtcggttagtgcctggaaaacctgtcccagttatcaggaatgcgtgcctggggagcccccaatggcggggacagggccagagttcatgttgaccctggggacgctgtgaatttctcctgcaggagagccatcattgaacttnnnnnnnnnnnnnnnnnnnnnnnnnnnnnnnnnngagaagtgggagacttctgaacagtaattcatttaacgg

SEQ ID NO: 10461 - DNA, 733 bp, Macaca Fascicularis
  misc_feature (1)...(733): n = A,T,C or G
atggacttgggttctatgaatcaagcatgcatcaatgtggagggctcccgccaggctctgaccctgcaggactgggcagcccagcgggtgcaccatctcctaccgagccccannnnnnnnnnntgtnnnnnnnnnnnnngtcatcgatgagcggactgatgtctggtccctaggctgcgtgctatatgccatgatgtttggagaaggcccttatgacatggtgttccaaaagggtgacagtgtggcccttgctgtgcagaaccaactcagcatcccacaaagccccaggcattcttcagcattgcggcagctcctggcctcgatgatgaccgtggacccgcatcagcgtcctcacattcctctcctcctcagtcagctggaggcgctgcagcccccnnnnnnnnnnnnnnntactacccaaatctgaaaaagcagcnnnnnnnnnnnnnnnnnnctcgtgcctcagaaagagggttcccatccctcattggaatctctacccattccatccaggactgctcttacacttgggggtagcggggtcaggacaatcatcttagtcctgcatctgctcttctgctttcttccaagagcaaaacctgggcaaggggccttactgagtgggagtgggtgggggttgggaaaagggaaatggtgggatacagagcatggctctgagcannnnnnnngagctcacnnnagtgttnnnnnnnnnnnntgggagcagcaggag

SEQ ID NO: 10462 - DNA, 546 bp, Macaca Fascicularis
  misc_feature (1)...(546): n = A,T,C or G
tcctgcccatcccnnncttgagggagcagcaggggccaggagctaccccaggagtgggccaggccgggccacagcaatagcaaagccagggccagagcgagccatgccagccctannnnnnnnnnnnnnngtttgagagaagggaacttttgctgaggttttctctgaggttttttttgatgctttataggaaactattttttaaaaaaagccatttcccacccgaggacacatgggtgtgttttccctgaccccagcagggcgaggaatgtagctgagaggtggggtgggctgggctctggtgccctcttcgctggccaggccacctctcctcctgattcccttggcaccttgtctgtctacctgtctccctgcctgcccatctgcaccttttgccgcccactctgacttccatctgcgggctgagaccacgcttgcctgccctcttcttcctgccttaagaatgttcttttaggccgggcgcggtggctcccacccgnaatcccagcactttgggaggccgagacgggcggatcacgaggtcag

SEQ ID NO: 10463 - DNA, 716 bp, Macaca Fascicularis
  misc_feature (1)...(716): n = A,T,C or G
ctgtggactgggcaaggtggggtatttattcctcactagctgggttaccatnnnnnnnnnnnnnnnnnntctggtatttggaatggaaatgtaataatggacattagggagccctgcctttttctactggttcccccaatgtttgaaagaggcattaggctcctggtagcctattctgtgcattgctgtatacacacagacacacacatgtatgtttgttatcaagaactggtcagaccttgcgagtttttgtaaacactggacagatggagttaaaaagagcttttgttgagatttggcatgaaggatatggtgctctatttgtaatagaaacttccaaggctcttccagctcccctttcgctccattctttagctgtnnnnnnnnnnnnnnnnnntgatattcaaaactnnnnnnnnnnnnnnnnnnnnatggtcaccttctaaaagatatattcatagttattaatgaccctgttcccaccgcaaattttaaagtgctcctaaacccataacttgcctgtttgaactatggtaatgggtggaagaggagttcaccagttttaaagannnnnnnnnnnnnnnnnagtacctttgcccttaggaagagtgagtattggagtcatctattactccaaacctccctttttatttcctgagcctggcttggaccttggcattccgtttgaattccttcnnnnnnnnnnnnnnntgttg

SEQ ID NO: 10464 - DNA, 747 bp, Macaca Fascicularis
  misc_feature (1)...(747): n = A,T,C or G
agttagcatggctgtgcttttcgtaatagaatgctaaagactttgagaatggaacttggatgtctgttgtaggagaannnnnnnnnnnnnnnnnnnatgaaggcagcattgtaggattaacatttttgtccactgtatattatcttggaaggctcttgttaatatgttacacttaatattctccacagttacctttagagagaatttatgagaagttagtttctgatgcagaggtttttaggctgtgatttcatcaaaagtccttttagcattctacctcaaagggacacttagtatgcctaaaatttattcacttagttttccttttttatttgaaaaaatacatgacatgtaatccttttttcttgaattctttctcagattttaaagtactatattaaagaaaaaaattaatgtctaaagcctagcattcttgcagaaccctatactaacatgtaattgggagagggtggggcaaatgagtagagaaacagattcaagcgtcaagcttccaaagcatttttataaatggaaaatccttaaattatgaaacagcttgatatagtgtcctttttttaaaattccaaactttttttattgataatggagattgctgtttgagtttttaaacttaatctagaacagaggagtattaaaagtaatgctgtgctgcattatttaagactatcagcaaatttgatagattgttcttatgacttgtattctgattacagagaaccatcatga

SEQ ID NO: 10465 - DNA, 666 bp, Macaca Fascicularis
  misc_feature (1)...(666): n = A,T,C or G
gcccatcctggactttggggctgaggcactcatcgtgcaggcccgatcggcccaccgtgactgtgaggacgtggccaaggctgcnnnacgggacctgggttgccatgtcgaattccaagagctgtggacaggccagaggggcaacctggcgccatgaccccaggcccagtctgggccatgattctgggtgagtcgtgtgactcaggaatgggggtagatccaggtcctccactgtcccacattagttctgtccccttcacagtgagaagtgtttttcggcagtccttgggtaaagggtcggggaggggggggccttgtagggaggcatctacacagaagaaagcagcccacacatcccnnnnnnnnnnnnnnnnnnnnnnnnnnnnnnnnnnnnnnnnnnnnncgttactgtccttctccttccccctagccccatgccctaccagaaggggcaaagggcacgtcccatcactcacggccgtatctgaaatgtggtggccgctgtgggccaggctcagggcagggcaggcgattccagtggggttgggcccccagtgcctgctgcttactgcaggttcgtacggacctctgctcctcgtttttctcacctgtaaaatgggtctcagatgcctggccccagctgtctgtctctggttttgggccagc

SEQ ID NO: 10466 - DNA, 757 bp, Macaca Fascicularis
  misc_feature (1)...(757): n = A,T,C or G
atcactgaatcnnnnntcgnnnnnnnnnnnnnnnnnctcggaatcttccatctaccaagaagaggtgcnnngctgaaagttaaccaggaactggcaggctacnnnnnnnnnnntgtgagcttcatcaaagaagattttgaacttcagttgaacaagcaactcatatttgattcggttttttcggcgtctctctggggtgggatgttggtgccnnnnnnnnnnnnnnnnnnnnnnnttgctgannnnnnnnnnnnnnnnnnnccaaccagcgtccgcggattcagcnnnnnnnnnntcgggccacagagtgaaggagactacctaggtggagaagcgtactgggctggcggcctgcacctctacaccccattacctttccggccaggccagggcggttttggagaacttttccgaacacacttctttctcaacgcaggaaacctctgcaacctcaactatggggagggccccaaagctcacattcgtaagctggctgagtgcatccgctggtcgtacggggccgggatcgtcctcaggcttggcaacatcgctcggctggaacttaattactgcatccccatgggagtacagacgggcgacaggatatgtgatggcgtccagtttggagctgggataagattcctgtagccgacacccctacaggagaagctctgggaccagggcagcagcaaggcgcccatgccacgcactgtctctcaaggaaacacggctcagcgattctttgactgcagaccct

SEQ ID NO: 10467 - DNA, 698 bp, Macaca Fascicularis
  misc_feature (1)...(698): n = A,T,C or G
tcgtgcagatgccggttctgagcagtgtagactcagggtccctgtggaggtgctgaagcccgtggttccacacggggcagcagggagcacaagactcaggtcaggatggacaccactcatgcgagcattgaccttttttttttttgctttacaatttaannnnnnnnnnnnnnnnnnnnnnagttgttctttcccactaaaaattgctgctgtagaagttggaggtggagctgtnnnnnnnnnnnnnnnnnnggccgggctgggatgtgtgccccaacagctcagtgctttcctgacactccagtgtctgggctggttgaggaacgagttctctcttcctcccggaccgagttcctccctcgggtttgccttgagacgcattgagtttttgggccccgtggcctctccctgtcaggctgccacaggccctgcttccggnnnnnnnnnnnnnnnnngctnnnnnnnnnnnggttctcgttggggtcaccaaagtgtgcccggctgctatgaaaaacgttgggaatcttggtttcagtttttttattctatgctaggttgtacagacttatttatatcatcgttttgagggactaatggagnnnnnnnnnnnnnnataatattagcgaaaccatggaattatatgaaaattatacatgagaaataaggaaactattttgctgattgtaaatttttgtggg

SEQ ID NO: 10468 - DNA, 691 bp, Macaca Fascicularis
  misc_feature (1)...(691): n = A,T,C or G
gctggagacnnnnnnnnnnnnnnnnnnnnnnnnngtgggcgacaccatggacgttctgnnngagaagtggnnnnnnnnnnnnnacctcggcacgcagttnnnnnnnnnnnnnnnnnnnnncttcagctctgagcagtacagaacaggaaagcccatccctgaccagcttctcaaggagccaccattccctctgagcacacnnnnnnnnnnnnnncccatgtccctggaggcctggctggacagccaccgcagggacctgcaggcaggcgcgcnnnnnnnnnnnnnnngggacacctatgagacccaggnnnnnnnnnnnnnnnnnnnnnnnnnnnaagacctgagacagaatgtggacgtgtggctgtggcagctggagggctcctcggtggtgacaatggggggacggcacctgagcctggcccctgannnnnnnnnnnnnntgctnnnnnnnnnnnnnnntgcctgggagcgaacacaaggctctgtggccctgtctgtgacccannnnnnnnnnnnnnnnnnnnnnnnnnnnnnnccctgttgccatggcctgaagcagccacaggtgtgccctgcaagcaccctcgagtgccatccctgccaaacaactctcccagccccactgcttccctgtgtactgctgctgtgtcccccacagacctggacattnnnnnnnnnnnccctcctg

SEQ ID NO: 10469 - DNA, 1016 bp, Macaca Fascicularis
  misc_feature (1)...(1016): n = A,T,C or G
catagagannnnncactgntnnnnnnnnnnnnnnnnnnnnnnnnnnnnnnnnnnnnnnnnnnnnatttcatttaaaaaaataatctatgcagcatttcaagaaacaaccatatgatgttgtatattataannnnnnnnnattctactattgaattatgtacaacattttcattttttatgcttctcgaggtggtaatgagaaaaaagtttttttaaaaaagtgtgccctgctgtatttcttataccatttattaannnnnnnnnnnnnnnnnnnnnttatgttggtttgaaaggaggaaatagcaaggttaagatgtgtgaataatttctgtatatatgtataaccaagtgcaaacactgatgtataatgacagtataaaatgctttcatgtttgtgatgtctagtgatgtggaaaatataagccctaagtccattagagtgcacngtaattaaaattggcataataaacacagattattgggggaaaaggaaaattagtgatctcttctactatgttctttaccaaattgttgcatctggttctgaaaaagcatagcatgtagcagcttccaaacatattcatattgcttaagaggcttaacattacctaaactagagactagacataaagccctcagttnnnnaannnnnnnnnnnnnctataaggatcttggaacagcaaatgattaaatgtcagttcccctaaaccaataaaaatttatactagattttttatttctacttatcattaatgatttggtgttggatttcaggataccttgtatgtcttaatttattttaaatatttattttgaatgagtttgatagaaaactggtagaaaagtatagaaaatttgactattatttatagatttcaggtatatttatatgtgtaaaagaaattgacaaatatatattccatctggcctttactgactcctgttaaatgcagttttaaatttatatcataacacctacttaagtgcctgacacagtaggtnncaataaaaattac

SEQ ID NO: 10470 - DNA, 746 bp, Macaca Fascicularis
gttcaggccacccaacatgtattgttaaaattactgcacatcccccctcagatatcaagtatacactgttcatgttagggtgtgtgtatgtgtatgtgtgtatgtatgtgtgtatgtacgcacgcatgtgtcccaaatcttgttttaattttttttttctgaatgtgatcgtgttttggataatacctgagcagggttgccttttttttatttattaccattatatattatattatattatatattttttgctttcttataactttggaggaaatttaaatcttggtattaaaattgttttaaaaaggagtaaattttccagttgataaatgaaaaatcactggtctatctttaaaataatgagtttttctttaattactgtggaataatgtgccagctctcatcaacacaatgattttgtacatagggtagggaagcagtgatgctctcaatgggaagatgtgcaacacaaattaaggggaactccatgtattttacctacttcagcaatggaactgcaacttggggctttgtgaataaaatttagctgccttgtatagtcgtttgaaagagaatatgtgatctgtgagataattaatagttttttttagaaaagtctgcaaaagatcttcccaaagacaatgtgccacagatcttttgttctctgtaatgaggattaattgctgtttaaacaaaaacgtaattgttcatctttaaattctttccttttcataagaggatcaagc

SEQ ID NO: 10471 - DNA, 780 bp, Macaca Fascicularis
  misc_feature (1)...(780): n = A,T,C or G
tcatgaattanatgaatatgttatagctaaaggaaaagtcatctataaaacatgatagatttgaaaagagaagactttttgagtatatgaaataagtcaatatagttatattaaaagttaaaacaccttaatatttaccagaattatatcacttaaacctaaatgtacttcaatgtctttttaagtcactcaaaaaaccccagggatagatttattttcatttaacacatgcatttgacatataaacaggtaaacctattgtgattaaaatcataaaacatccaattatttcacaaatattagttacaaatattccgtagattaatatgatggggtatcacaaaaatgcctttgtggggaaaagtaggcttgacttaaaatttccattttgtgtctgtatttcacgtttcagtttttaaactatatttagtgaacattggggaatggaaagaaatctaagtgatacaccccaatgaagctaaaannnnnnnnnnnnnnnnnnnaatggtatttcctttccccaagtagtttattttctagatgcttttcaaatgaattaatgtcctctgatgaagagtgtccttccatttctaaggtcttctcaatctcagctacnnnnnnnnnnnnnnncgttcaagacacatcatttaatacacaggcatagggaccttcctgaaatggatgcattttttccaactacaatcatgtaatttttttttgaaatttaaaaaattgttgattcttcacattacaattgggtaaaacacattgacagctctc

SEQ ID NO: 10472 - DNA, 790 bp, Macaca Fascicularis
  misc_feature (1)...(790): n = A,T,C or G
gcagtgggcaccaannnnnnnnnnnnnnnnnnnnnnnnnnnnnnnnnnnnnnnncnnnnnnnnnnnnnncgcaaggggctgnnncagctcttctgctcatcatcctgcctcaccacnnnntccaagaagccctcgggnnnnnnnnnnnnnnnnttctgcaagaaggagatctggaacaccaaggactcagttgtggcgcagactggttccggaggctccttccatgagttctgcacgtccgtctgtctctccctgtatgaggcccagcagcagcgcccgatcccccagtctggggatcccgccgatgccactcgctgcagcatatgccagaagactggagaggtcctgcnnnnnnnnnnnnnnnnnnnnnnnnnncaccggctctgcagcgattcttgcttctccaaattccgggccaacaagggactgaaaaccaactgttgtgaccagtgtggggcttacatctacaccaagaccgggagccctggccctgagctcctcttccacgagggccaacnnnnnnnnnnnnnnaacacaacctgcttgggggcgtataagaaggtggggccgagggagtagtgcattagagggctgtggaagggggtgtggttcttgggtgataaataaaggtggctgacaggtcaaggactgggagaaataaaacaaataaagggggtttcaattgtatctgttatgttttatttttgaagctggctggtggatacacaggtctttgttacatcatcatctatactttttttgtatgcctgaaatatttcatgttaaaaca

SEQ ID NO: 10473 - DNA, 744 bp, Macaca Fascicularis
  misc_feature (1)...(744): n = A,T,C or G
gatgtgtgtgcctagcacacttnnnnnnccctccccttttttccagttggatttgtttttctgttctcttctgtcctgtcttatactgcaactgtgtctcctaggggacagatggccttctttgtcatcttcactctccacccccagagaggagtcagagccataactcaatcactcagcccctccaaagatagttgagttgatgtgtgatattctcataatgttgagaaccctgatgagatatattatcttcccctcgctacaatgcctctggggccaaggcacccattcttcttggtatcctccatccctcttgaggcttccacttttttttttttaaacataaagnnnnnnnnnnnnnnnnggcctgtggtgatgcaaagctgctttgctctgtatctggctggactgatctgtctcacaagaagccatgaggccatagggagaagctctctctccccttcatcttctgctccaaaggtggtaacaagaggcgtacccattggggttggagcccccttataacatcttcctgtcagaagactgatggatctttttcattccaaccatctccctttcccccgatgaatgcaataaaactcggacaccagcaaccgttgttctttagaaatgggttttctgatcgcatggctgatgtattatgggcagtatggatgtcttcatttgttgcttctgtttttcatctttttttgttttattaataaaannnttgtgtatttgctc

SEQ ID NO: 10474 - DNA, 743 bp, Macaca Fascicularis
  misc_feature (1)...(743): n = A,T,C or G
gatgggacatgctttgaagaaatcaaaaagttcctcatncnngactataatgatgagatcaggcaagcacagctccaggaattaacatatttgaatggtggttcagaaaatgcagatgttccagtggttcgagggaaacccaccttgcgtacaagaggtgtaccagccccagcaataaccaggggaaggggaggagttacaacacggcccgttggagttgtagtaccacgagggacgccaactnnnnnnnnnnnnnnnnccacccgagggccagtgagtcggggaagaggacttctcactcccagagcaagaggagtccccccaactgggtacagacctccaccgccacccccaacacaagagacttatggagaatatgactatgatgatggatatggnnnnnnnnntgatgaacagagttatgattcctatgataacagctatagcaccccagcccaaagtggtgnnnnnnnnnnnnnnnnnngacatggactcagtgannnnnnnnnnnnttcctacggacaagaagagtggactaactcaagacacaaggcaccttcagcgaggacagcaaagggcgtctacagagaccagccatatggcagnnnnnnnnnnnnnnnnctgatgttgtgaaatannnnnnnnnnnnnnnncgtgtatactgttcaaagtaatttttttctatgaacaatccctttttaaataaatcaaaatgcttaaaatctgaatggatggaactaaaa

SEQ ID NO: 10475 - DNA, 638 bp, Macaca Fascicularis
tgattccaaagtcatgaaatggggaggctcctcgttccaggatattcagaggatgccgtcgcgaggatccatggtgttccagcctcttcagataaataattaccaatatgcaattcttggaagtgattactcctttactcaagtgtataactgggatgcagaaaaagccaaatttgtgaaatttcaggaattaaatgttcaggcaccaagatcattcacacatgtgtccattaataagcgtaattttctttttgcttccagttttaagggaaatacacagatttacaaacatgtcatagttgacttaagcgcatgagacaccaaattctgtggctgccatcagaaattttctacagtacatgacccggatgaactcaatgcatgatgactcttcttattacacttgcaaatgaatgcctttcaaacattgagactgctagaaccaagcactaccagtatctccatccttaactgtccagtccagtgatgtgggaagttaccttttataagacaaaatttaattgtgtaactgttctttgcagtgaagatgtgtaaataagcgtttaatggtatctgttactccaaaaagaaatattaatatgtacttttccatttatttattcatggttcagaaacaa

SEQ ID NO: 10476 - DNA, 773 bp, Macaca Fascicularis
  misc_feature (1)...(773): n = A,T,C or G
gagccacagtcaggccaggttagtgaggggtccacagtgagcagggtttagtggggaaggggatgctaactagagtcagaagcagtaggtgatgtgtgggagctcctcagaagcccaacacaggatccaccccccgtaccttccatgggccccgcctgaaaaccaggtaagagctcagccacccctgaggtcctccctggannnnnnnnnnnnnnnnnnnnnnnnnnngccagagccagcccaggctgcgccgcccnnnnnnnnnnnnnnnnnngctggccaagtggaaggtgtgccctgaagtggggaggggctgnnnnnnnnnnnnnnnncgcatggcttctgccctccacccgcccacatgtgggtgctcataggaaagaaattcccattgcataatccacctgtgtctcatgccacgaggactccaacacaaatcccagggggttctgagggctctgcctcagcttgggcaccctaagttttcctcattcataggttttagcaccccaaagggctnnnnnnnnnnnnnnnnnnnnnnnnnnnnnnnnnnnnnnnagtgccctagggcccacgagataaagagacagacaggatctcagctctgtcgcccagtctggagtgcaggggtgcgatcatggctcactgcagcctcaacctcctgnnnnnnnnnnnnnnncccacctcagcctccggagtaagtagctagggctacaggcacgtgccaccacacctggctgaaatggtttaattttactttacaaatcgaaaaa

SEQ ID NO: 10477 - DNA, 407 bp, Macaca Fascicularis
gagctcaaggcaaactatgcgttcaagatgtatgacttcaacactgacaagttcatctgcaaggaagacctggagttgacgctggcccggctcactaagtcagagctggatgaggaggaggtggtgcttgtgtgcgacaaggtcattgaggaggcttacctggatggtgatggcaagctgggctttggtgacttggaggacatgattgccaaggcccctgacttcctaagcacttttcacatccggatctgaggacactgccgaggctgcaggggcatggaagtccaccgtcacgccatgcggtcacatgggtgtggcctccaagctccccaggaaagcagtggcagcctgtggggttcacaccaaaaaaaaaaaaaaagaggtcagggttataatgaggtatgcaa

SEQ ID NO: 10478 - DNA, 319 bp, Macaca Fascicularis
gcatcaccagaagggagtaagcagcgagagaagcaataatactcctttccttacaccagggacttgcaccagggcagctacttccgggtgtttgctcctctagccagcattccttcatcgtgacccatcctaggcagccagcaccatgagcgggccctcccatcgacaggaagagttttttttttgtttaccctccccgtggcgtcaggaaggagtagaggatgggttggctggagcagtcgtactgggcaagatggagccccacttggaggacggtggtctttcacagcgtgtgcaggggcagaggaggaagggacca

SEQ ID NO: 10479 - DNA, 711 bp, Macaca Fascicularis
  misc_feature (1)...(711): n = A,T,C or G
gcccgagaggcagancnngaggtgcgaagcaatgccatctttgggctgggtgtgctagcagagcacgggggccaccctgcccaggaacacttccccaagctgctggggctcctttttcccctcctggcgcgggagagacnnnnnnnnnnnnnnnnnaacatctgtggggcacttgcccgcctnnnnnnnnnnnnnnncaccaggaaaccagagccccaggtgctggctgccctactgcatgccctgccactgaagaaggacttggaggagtgggtcaccattgggcgcctcttcannnnnnnnnnnnnnngcagccctgaccaggttgtagatgtggctccagagctcttgcgtatctgcagcctcattctggctgacaacaagatcccaccagacaccaaggctgcactgttgctgctcctgacattcctggccaaacagcannnnnnnnnnnnnnnnnnnnnnnnnnnnnnnctgcctgttgacaaggctcaggagctccaggctgtgctgggcctctcctagatcgcaggctgcagccagtccagagagaacagagcctgcccagaccttaagaccacctctcagcnnnnnnnnnnnnnnncttaccaaagattctgggactnnnnnnnnnnnnncgccagccctacttgctgccttacagggctgtccctgaggctggatctgttacaaatgagtcatgacatcata

SEQ ID NO: 10480 - DNA, 698 bp, Macaca Fascicularis
  misc_feature (1)...(698): n = A,T,C or G
ccagcctttccccagncannagctggggtaggggcgtctgtnnnncatcacttaccttggaaaggtgggaagcnnnnnnnnnnnnnnnnnnnnnnnnnnnnnnnnnnnnntgtgccagcagcttcccagcacctgcggaggggctgcagccccagctggactccaccctgtccctcttagcactctagctgcccactccaggacagggactcgaaaccccctccnnnnnnnnnnnnnnnntccagggccctgtttgggaccactctctcagtccccaggctcctcagggctccggagcaggagggtctcctacctggaagtccccttgagctccagggcccaaccctacctgccagtgctggtgtcagggcactcaacaccgagggtgggggccgcgccccttgccatgcccacggcctcctcctgtagcccctgcccgcatcctcgatgctgcacgggcccgccctggcggggcttggcgagtaatgtgttttgtcccgagttatcnnnnnnnnnnnnnnnnnnnnnnnnnnnnnnnnnnnnnnnnnccaccacccgccgtctgccgccctaggcttcctgaccccattagttccgacacttgtgaaactccgagaagtgctgtggtctcagcaatgcacctgttttgtacatgattgtgtaatttaaaggtatataaatacaannnatatatatat

SEQ ID NO: 10481 - DNA, 759 bp, Macaca Fascicularis
  misc_feature (1)...(759): n = A,T,C or G
cagaaatcacaatttcatcagagnnnnagagattattgagactcaggattcagatcagaggttcgactgtggctgggacaggagttgtgtgtagaaatccaccaggtggcctgagtgcagggggacctccagggctgagttgagcagcctctcccactgacctctttctcgtttgtggacgaagcagcacgtatcaccccattcatcacttggacacatcgcctttgcattgtcttgtcactccttgctcacagtcttatagcacaatatacccaaatcagcacccccagtccgagggctgggcccaaggtatggtcggaggaggagctcctgcctgcggttttgtgtacgtgtgtatgtgtgtgcgtgtttgtgtgcgtgtttacctccacaggggacactctacactcagcgtaagatctgctgggaacagggccaccaggggtggctggatctcagtctctctgtctctctttctctccttttccttttggtgtatcaaatatttgattgacaaagtaagggccttgattaggaccaaattctcatgtgtgttgctatggtctttatttaggacaacagttaacaatgcagtggcccattcttgtcactctatacatatgactatacgggacatatgtaatatataaatatatatataaaacattcccctctgtccccttggcttaggatggaggcctctctgttgagctgaaatgtacctgcagctgggtgctgccagcagcttgcaggccccag

SEQ ID NO: 10482 - DNA, 795 bp, Macaca Fascicularis
  misc_feature (1)...(795): n = A,T,C or G
agaggtcaaggcccagtgtgcagnngtcntcaactttataccattattgtgagagcttatatttgtgtgggttttgtgttttcagtgggaatttggtttccctaaagacccgtgaccagaaacataaaagaaactcaagatgtttctggtgaaagaatgcaactctgggaattagggtgagctggctttgttatctggatgtctttcaggagaaacagatccagaaagggcttgagttgagggcatactgccagtcctgtaccatagcctatgaaaaatatcctgcagaagcatgtctccatttgtggcatatgtattttttgttattgttatgcctgtgtgtgaccttagctgcttttgaacttaggaatctcctgcaagaggaccctctggctctccaaggactcagggtcggggagggccagccagtgtgcctagctcctccccaggcacgtcagtaaaaaagccggacccaaacatcaaaaataatgctgcaagtgaaggggtgttggccagcttcttcaacagtctgttaagtaaaaagacaggctctcctggaagtcctggtgctggtggggtgcagagcacagccaagaagtcaggacaaaagactgtgttgtcaaatgttcaggaagaactggatagaatgactcgaaagccagactctatggtaacaaactcttcaacagaaaatgaagcctgaacctccttaaaaagtgcatatgtcgaatgaccaaataactatgtatattgatctgctaagaccaggannntctgataggcacatgctatcag

SEQ ID NO: 10483 - DNA, 664 bp, Macaca Fascicularis
acagggacacacactgggtcctggccagcatcgtgggcaccacaggtgtgagtctgaacctgacccaactgccccccttcaacgtccacctgcagacaaaactggtgcttctggagaggctcccccggccgtcctgagggggaccaagcagcccccagcagccacaggccttccaggagctgagtgttctggcacaattccagcacaattatgacaattcagacaagcaagtcaaaggactgtgcacctgcctctcacagacaccagagcagggccagggcctcctccacagcctcacctggggctcacagcaccagagaacaagggtcccaggtcttgttggcaccccgggaaccactgcccagggtgatggtggcatgctcagggctggtgggcgacagtcatctgtcatccagaccgggtgccattcatgactaatgaggagcagcgggctcacctgggcacctgtctgcccagaggccacgtgtgtcatggcgtgcccacccggggggagcagtagtttggcagcaccccacgcctgctgccagagggcctcttggggcacctaagacagcaccccctctcaggggagaccatggtggcccctgccgcccccctgacctgctgccaccactgcaacttttttattcacaggcatcccatc

SEQ ID NO: 10484 - DNA, 701 bp, Macaca Fascicularis
  misc_feature (1)...(701): n = A,T,C or G
ggtggaggagaatgaaatgctaaaggctgccctgggcagtgccctgcggggaaaggaggaagacttccggatgtaccatgagatcctgggccaggtgaaaagcgtcttcctgcaggccctgcggcagcagaagacagataagcaataggatgacagcccagtgtcggcctggccgggtgggcagcctcaggtcttgagaggaaaagactctgtctgagaactccatctgatccgggaagccagcccagggcagccagctcaaccaattctaccagaagaggctccttaannnnnnnnnnnnnnnnnntctcaggccaggaaggcagaagagaagccctagtgggacactgcaggagaccctgagctggctgggttatagcagcggggagtcccagtggcccactggcagaggcgagagctctggggcggcaagccggctgtgaatgggcagtccctcgggcaggagctcattgccctcgtcctaggtactagccctggatgtccccatggcttcacacacaggagagccctttgttaccctaactgggcacatcccccatgccactcagccccaccctatcccctcacccccatcccagctccatctatagcccgtccacacccgacacagacttggggcactctgctctcnnnnnnnnnnnnnnnnnnttcctcaggacacttcctcaggtgcggaccct

SEQ ID NO: 10485 - DNA, 626 bp, Macaca Fascicularis
aaaaaaaaaaagcgacttcgagtttcctcccctttgcttgaagagacccccctccctttccaaagagcttccggacttgtctgcacccccagcaagaaaccgagttagttttctagagactgaaggaatctccccattcctgcatcaccaccttggttttgttttattttacttcttggtcaagaaaggaggggataacccagcgctcccctcccctcccccttttttaaacgcctgatgaagacagaaggttccggggtgacgagtttggccgatggcagatgttttgggggagcgccgggactgagagactccacgcaggcgaattcccgtttggggctttttttttctctctctcttccttttccccctgccccgtctgcagccagaggaggagatgttgaggggaggaggccagccagagtgaccggcgctaggaaatgacccgagaaccccgttggaagcgcagcagcgggagctaggggcgggggcggagaaggacacgaactggaagggggttcacggtcaaactgaaatggatttgcgcgttggggagcaggcggcggcggctgctggtcctgcgccttccttctacgtgaaatcagtgaggtgagacttcccagacc

SEQ ID NO: 10486 - DNA, 339 bp, Macaca Fascicularis
aaaaaaaaaaaaaatcactaaatttcccacaaatcttgtttctggcactttagaaaaactgcaaaaaaatacgtaataaagaatacatatatatatatctacacacaaattatatatctatctatctatacagcggaaccacaagagagagtgaggaaggcctggaggcaagggcagaggttatgacagtgcccctatatctttaacccgtactcctctgaggcaaacaggcatgggaaaatggaagggttgaggatggaccggagaattggaacttcagaataggtcaaaattccaaaaccacggacaccttcctcggagaaccgggaaattggtcac

SEQ ID NO: 10487 - DNA, 709 bp, Macaca Fascicularis
  misc_feature (1)...(709): n = A,T,C or G
tggtacaattctggtgctaggtgagtctttctaggagtgaaaatgcagaaaaggatgttgaaagctgttggctaatacatcatttcaactgctaataatctgagagggggcttgggcatgacttaaaatgttcatactttgactaagtacggttctttcctcacatgcaatttcttagttggatggtactgacctgcttctttnnnnnnnnnnnnnnnnnnnnnnnnnnnnnnnnnnggccgtttggcatctctgccctcattgtgggtttcgactttgatggcactcctaggctctatcagactgacccatcgggcacatnnnnnnnnnnnnnnnggccaatgccataggccggggtgccaagtcagtacgcgagttcctggnnnnnnnnnnnnnnnnnnnnnnnnnnnnnnnnnntgatttgaccannnnnnnnnnnnnnnnnnnnctcctggaagtggttcagtcnnnnnnnnaaaacnnnnnnnnnnnnnnnnnnnnnnnnnnncaacccctcaagattttannnnnnnnnnnnnnnnngaagtatgttgctgaaattgaaaaagaaaaagaagaaaacgaaaagaagaaacaaaagaaagcatcatgatgaataaaatgtctttgcttgtaatttttaaattcaaatcaatcatggatgagcctcaatgatgtgtaggcctttccattccatttattcacactg

SEQ ID NO: 10488 - DNA, 705 bp, Macaca Fascicularis
  misc_feature (1)...(705): n = A,T,C or G
gaagaacagacccctcccccacagccccgcatagcacagccccagaagcgagaggagctcaccaagaaggagaatgaagaagacaaactcactgactggaataaactggcttgnctgctctgcagaaggcagtttcccaataaagaagttctgatcaaacaccagcagctgtcagacctgcacaagcaaaacctggaaatccaccggaagataaaacagtctgagcaggagctagcctatctggaaaggagagaacgagagggaaagtttaaagaaagaggaaatgatcgcagggaaaagctccagtcttttgactctccagaaaggaaacggattaaatactccagggaatctgacagtgatcgtaaacttgttgataaagaagataccgacactagcagcaaaggaggctgtgtccaacaggctactactggctggaggaaaggggcaggcctgggatatggccatcctggattggcttcatcagaggaggctgaaggccggatgagggtccccagtgttggagccccaggaagaaccagcaaaagacagtccaatgagacttaccgagatgctgttcgaagagtcatgtttgctcggtataaagaactcgattaagaatggagacaagttccatgggacacaacctcctccttgttttgtttgtctctccttttcttttgttactgttcttgctgctagaac

SEQ ID NO: 10489 - DNA, 745 bp, Macaca Fascicularis
  misc_feature (1)...(745): n = A,T,C or G
ccttcccgcananntatgtcannngnacccccacacgnnnccctcaattncntagccccaggncngttcccagcatggccccttcacaggcatcnnnnnnnnnnnnnnnatgatgagctccgtgagcctgatggggggccggggcggggtgcccctctacgaccggaaccacgtcacaggggcgtcgtccagcagctcgtccagcacgaaggccacgctgtacccgccgatcctgaacccgccgccctccccggccacggacccctccctgtacaacatggacatgttctactcttcaaacattccggccaccgcgagaccgtacaggccctacatcattcgaggaatggcgcctcccacgacaccctgcagcaccgacgtgtgtgacagtgactacagcgccagccgctggaaggccagcaagtactacctggatttgaactcggactcagacccctacccgcccccacccacgccccacagccagtacctgtcggcagaggacagctgcccgccctcgcccgccaccgagaggagctacttccacctcttcccgccccctccgtccccctgcacggactcgtcctgaccttggccgggccactccggcttctctgtgcccctgtaaatagttttaaatatgaacaaagaaaaaaatatattttatgatttaaaaaataaatataattgggattttaaaaacaggaatgtgaacagtgatggggtgggcagggctgggagaact

SEQ ID NO: 10490 - DNA, 737 bp, Macaca Fascicularis
  misc_feature (1)...(737): n = A,T,C or G
ccacacctgtacagaactgggataggcgcagtggagcgggctgcttggggggcgttggcccttcttagagaaggccctccatgtgacttcctccaaggagccagatgcgatcctcgggctgctctcaccgtggcctgtccagggtccaggtccnnnnnnnnnnnnnnnnnnnnnnnnnnnnnnnnttagagcatcttgtgtgtgccagacacactgctactcgtttctataggagaacacagaggacataggaaacccttaaaacacacatgggattctctggtcacagttttgggnnnnnnnnnnnnnnnnntgggcaagtgcagcacccccnnnnnnnnnnnnnnnnnnnnnnnnnnnnnnnnnnnnnnngagggagtgctggcccatgggtgctgccggcttcctgccaccagctgggcctcagccctcnnnnnnnnnnnnnnnngcactgtggggcacccagggagcagggacatcgggggtcctgcngtggcacccctnnnnnnnnnnnnnnnnnnncacgtccccactgtgaaggatgaagagcaaggccctcgggaccnnnnnnnnnnnnnnnnnncacactgagccacccagagagaatgggcctggcagcgggccggggccatgcggggagcgcctccctgtgttgcctgccactctgggcactggccagcagccctctggtgagaagaggtcccccctttttatgtgcactaccccaccatctgtna

SEQ ID NO: 10491 - DNA, 731 bp, Macaca Fascicularis
  misc_feature (1)...(731): n = A,T,C or G
taagagacagaaaaatnnngatacgattcagtgattacgtggaagtagcaaaagcgcaggactatgacaggagggcagacaaaccctggacgagactgtcagnnnnnnnnnnnnnnnnaattcgtaaagaattaaatgagtacaaaagtaatgaaatggaggtacatgcatcaagcaagcacttgacaagannnnnnnnnnnnnnnnnnnnnnnnnnnnngaagaatttgtgtttaattttttgataccaacactgaacattcatcagggaactttcnnnnnnnnnnnnnnnngactacctgctgtgtttgtgagaagagcaggatcacacacacaggtgcaatcttgaccacacttacctgcaagaggagtaaccagaggacacacttccttcctcctttggtgtctgaggagtgtgaactgttggggtcagttaagacccaacataactctatcagannnnnnnnnnnnnnnnnnnaaccttgttttacagttctgcagtgtaatggaggacgggcaacgtgcatgtgcaggctcaccactcccaggcctcnnnnnnnnnnnnnnnnnnnnnnnnnnnnnnnnnnntatgtttaaaagacnnnnnnnnnnnnnnnnttattaatttgaaaactctttaagttcatgttatacaaaatgatttactgtattatacttttccttttttatataatgtctaacaaaaaatacagctgcaacattttgattcc

SEQ ID NO: 10492 - DNA, 737 bp, Macaca Fascicularis
  misc_feature (1)...(737): n = A,T,C or G
aaaacttgaaaaacccctgtnnntcagaagttgagtgggttgggggaggcagtgatacgaagtgactgctatgtattttcactaccagatttttttatatttgccactgttaaatagttggaaaggggaaattctgattaagcaaaagtggtatcatcctaggtaagcttatttcagaacaagtctaatatttcagattctttcttctcgactttatactctgagctgttccttactgtaagtggtgtgtatgaaacctccatgcattttccagtatgaatctgctaatatgcacaataaatccatgtctttgtttgtttttctattaaaaagcaatcaagaaagataatgtgaaaaagaaaggaatttagaggtagggaaaagatgaatgtcagacatttgaaaaactatagtaaaatgatgaacactaaatatacttgagaaaactttcttgatatgccagtgagttaggcctgatctttgaaatagtgaataggaatacaatgcatttcctcaatgatcactgattagaatgaggtggtgggatccttgggaagccaaacagagcggannnnnnnnnnnnnnnnnnnncagtccagtgaatccacgaccctcggacctgtccccacagaacagcttataccatggaatgaggacaaggtgatattcnnnnnnnnnnnnnnnnnnnnnnnnnacaacctgtacagattgaaatttcacctgtaaggagaaagtga

SEQ ID NO: 10493 - DNA, 707 bp, Macaca Fascicularis
  misc_feature (1)...(707): n = A,T,C or G
gtgaaagaagtggaaacacccttaactnnnnnannnnnnnnnnnnnnnnnnnnnnnnnnnnnnnnnnnnnnnnnnnnnnnnnnnnnnnnnnnnnnnnnnnnnnnnnnnnnnnnnnnnnnnnnnnccctattctatatgtgtcctctaaatctactccagagacccagtgccctcaacaataaagacttttctttaataagagtatggtaccacttgcctcaaaagttactgtggtgcttaagattgtctttatctgacatatatcaccttctgggttatttattcattgtgccaggacctggcattttcatgttcctttgaccaagtgttcagaatttgcttgactctaacctgaagagcttcttaagtgatgacccttcatggagcttctgtggcagtgaataaactgttaactgaaggcaaatgttataattaatgtatctatttgctgcattgtatatggattaaataataaaaacaagtaatctaccttcagagccatgtatttgagaacactcaaatcattatattttcctatgtacttttttttataaacttagccttaaactgttgtaaaaataggaaagttgtaaactatgttgtaaaaataggaaacgtggctaaaaaatatacattatattgtttcaggattttgtcagtnnnnnnnnnnnnnnnnnnnatctttgtatttatatacatgatttaaa

SEQ ID NO: 10494 - DNA, 773 bp, Macaca Fascicularis
  misc_feature (1)...(773): n = A,T,C or G
agtgggtacgtgcgnnnnnnataggctagccagagagagggncacttgtgggatnnnnnnnnnnnnnnnnaggaggcaagtgtgaacagggaggccaaagatgaaagttgtctaaaagagcccgcaccccctataaacacggcagaggannnnnnnnnnnnnnnnnnnnnnnnnnnnnctttccagatgttaacaggttatttgtatctcannnnnnnnnnnnnnnnnnnnnnnnnnngcacacagcgtcgtccccttctcggtggtctgaagaggaggaggggaccagggaggggtccttggccagcccctagcgaatggagtgggtccttcttctgctctacannnnnnnnnnnnnnnnnnnnnnnnnnnnnnnnnnnnnnnnnnncaagccagtgaccaagatcccatctgatgtccaaggggctcctgagccagtacccccacttcccaagccccccagccttcctcacctgcagaatcagtcgcccgggtacagcactgtctcctttctttttcttggaagcggtctcaggggcctgagtgacgggcctgaccaccccagctactgcacactgccatgcgactggatggctgacctggcccaaacacccaccaccaggacaacacaaaccaaagtgcactgcgaaccgccctttnnnnnnnnnnnnnnnnnnnnnnnnnnnnntcaatgttgagatgaatgtgattnnnnnnnnnnnnnnnttttctgtttgtctgttttcatagaaaatgtccaagtccacttgcct

SEQ ID NO: 10495 - DNA, 726 bp, Macaca Fascicularis
  misc_feature (1)...(726): n = A,T,C or G
gcagcnnngcttnnnnnnnnnnnnnnggacaaacgcnnnnntcagcttcattgtgagtcaggannnnnnnnnnnnnncaatggctgctatgctccctccagaagaattcatagtcctgttggactctgtgcttcctgagatagcnnnnnnnnnnnngtcaagcatcggactgatcaatgaaaaggctgcagatnnnnnnnnnnnnnnncagatcgtgaagatcctaactcaggacactcccgagtttttcatggaccaaggccacgccagggtggcccagctgatcgtgctggaagtgtttgcctccagtgaagccctccgccctttgttcaccctgggcatcgaagccagctcggaagctcagttttacaccaaaggtgacgagcttatactcaacttgaataacatcagttctgatcgnnnnnnnnnnnnnnnntctgggattggctggttccaacctgacnnnnnnnnnnnnnnnnnnnnnnnnnnnnncctctccgttctgctgccaaaccagaatggcaaattaagatctggggtcccagtgtcagtggtgaaggccttgggattcaaggcagctgagtcctcactgaccaaggatggccttgtgcttaccccagcctccttatggaaacccagctctactgtctcccagtgaagacttggatggcggccatcagagaaggctgggtcccagctgggagtgtgggtgtgagctctacagac

SEQ ID NO: 10496 - DNA, 1127 bp, Macaca Fascicularis
  misc_feature (1)...(1127): n = A,T,C or G
ggaagaggagccagtggtggccggggaagacctccctcctcccagtcctcaagnnnctgatgttcagcctgtgcagnnngaggaagtatcagccagagatttcctgcagagacttgacttgcagattaagttatcaacacaggcagccaagaagctaaaagaagagagcagagatgaagaaagtccctatgcaacttccctctatcacagttaggtgatttgggggcataactctaaccaaaattaagatatgtttggaccttaaagaatccaacaactgaagattcaaaaacatcccttctggattcctatagtgtccatcttaaaatcataactaggtagttctacctgctgcaattgcactgaagtgattagttccctctggctttctataattttaagtctttattatggcatgatggcaaggttgtatcctaaagctcatcacttttgtaggtggtgttagtttttagactagcttttataaatactaattgacataaagcatcaaagactatttatatatttaggctaaaaataatgtttatctccttatgcaatcctgatcatgtgaaaatatggttgctgtttaagtgatgctgaatttgctgtgtgtttataacttaagtgctatatatatatttcgatatgtcttacgtattctctattaatataaagaaccaaattttgttcgctattttgtaacaataaactacaaagcctgannnnnaaaataaactatgtttttaaacttgagtcttcatttttttaacaaatgagaaaataaaattgacttttaaattatatatttaaatggtgacagttccttcttcactttaatggtttttattattataaatgcaattttgaaaaaagtattactaatctaaaagcaaatcaattacaattactggtaatcttggcattttcattgacctaatgtgattcagatatggtgaaaacatggaataaatcaaaagaacaaataataccataatctgacattatattgcagaattctagtttagatttcattgctaagttactttatgagtgtttggtagtcctgtacttatttaaattgacttttattctcataatgtaattggtctttattatatgtatag

SEQ ID NO: 10497 - DNA, 695 bp, Macaca Fascicularis
  misc_feature (1)...(695): n = A,T,C or G
tgggaaggcagggaaatttgacatcatccccaccatnnnnnnnnnnnnnnntggcctggcactgctgggcatggcgaccgtgctgtgtgacatcatagtcctctactgcatgaagaaaagactctactatcgggagaagaaatacaaatatgtggaagattatgagcagggtcttgcnnnnnnnnnnnnnnnnnnnnnnnnnnnnnnnncctgggctctccacggccccatcgaagaacagagaggaggaggagggagaaatggccaccacatcaccccagagaaagtnnnnnnnnnnnnnnnnnnnnnnnctccacaagtactcagggttccccagcagctcctctgtgttgtgtgtannnnnnnnnnnnnnnnnnnncccaggaggtcaccaatctgttcttggctgggtcaactctgttattccctcaacctggggttgtgagggggagcgctggcccgaggaagtggcactgctgtgactttcagggctggnnnnnnnnnnnnnnngaagcctcctgtctccagctctctcctggacaggcccagtcctctgaggcacggcggctctgttggagcactttatgtggcaggggaggnnnnnnnnnnnnnnnnnnnagacttgtagcannnnnnnnnnnnnnnnnnnnnnnnnnnnnnnnnnnnnnncatgaggcagagctggcatttctctt

SEQ ID NO: 10498 - DNA, 689 bp, Macaca Fascicularis
  misc_feature (1)...(689): n = A,T,C or G
attaccccgttttacagatgatgaaatggaggcccagaaacaggaggtggctggtgttaggtcacacagctaggaggcagcagagtggtggggcactgcctgtgctcttaacccccaggccaggtcaccccatcaggcaggcaggaaggctggcggcaggggacgatgtgggcgggaggtgatgccttctcggcgttctcaccacagcctgggtgccgggcgccacactccaaccnnnnnnnnnnnnnnnnnnnnnnnnnncaatgggtgctgcacgggctctcagaggcccctcacctatgaccgtggccttgactgtgggggcctctgtccaccaataacctcccttcgtcccctacaggtggggcagtcgagggtggtgggggcatggcggccccgggcagtgcccacggggtcctgacctgcggcccccacaggcgggttgcatgctgttcccccacatctcgccctgtgaggtgcgcgtgctcatgctcctgtactcatccaagaagaagatcttcatgggcctcatcccctacgaccagagcggctnnnnnnnnnncatcnnnnnnnnnnnnnnnnnnnnnnnnnnnnnnnnnnnnnnnnnnnnnnnnnnnnnnnnnnngagtggagttaggccccaccgccctggatgggcagnncaacttggtgtgggcggagtgtgatgc

SEQ ID NO: 10499 - DNA, 691 bp, Macaca Fascicularis
  misc_feature (1)...(691): n = A,T,C or G
cagnnnnnnnnaggagtgannnnacaggattttgcttaggcaaaaatctaagactcatgttcttaccctnnnggtacatgtggttttgagactgaatgtgtaataggagcactgcctttgccaaatcaaatgagtgacaggttaactagaaaatgtgacaatcacatttcctcttagctcaaataattctgtttttccaaannnnnnnnnnnnnnnnnnnnnnnnnnnnnctgggggaggagagagctgttctctagtggttaacatggtattctttaagaagaaaaaacaaagccaaagaaaactcattatctggcatgttcgccttaaagatggtagtgggtagaatctggagttttcatctcttttcnnnnnnnnnnnnnnnttatatttggtgttggcctctaagtctaatattgcagttggaattcttgctgtattattttttaagtaagtgttatgtgcatttaactgctttctnnnnnnnnnnnnnnnnnnnnnnnntgggggtcttgacaaagcagagtaaaaatatgctgtttacattgtttacttataagtaaggagcctgaaataacctgtagtttctaatgcnnnnnnnnnnttacttgcgttgtcagtttcaattatgaaactgaagtttggtgcctcctctttatcatgttttttctcttgtagcagttgtgtttaa

SEQ ID NO: 10500 - DNA, 712 bp, Macaca Fascicularis
  misc_feature (1)...(712): n = A,T,C or G
gcccgatggcagccatgttattttatatggcttaccagatggaacctttctctgggataatttgcacaacagatatcatcctcnnnnnnnnnnnnnnnaagacgtgacctatgcgcacttgtactccttcctgaactgcctccaggtcagcccctgccacggctggatgtcttccaacaagacgttgcggactctcacttcagagagagcagagcaactctccaacacactgaaaaaaattgcagccagtgagaaatttacaaacttcgatcttttctacatggattttgccttccatgaaatcatacaggagtggcagaagagaggcggacagccctggcagctcatcgagcccgtggatggattccaccccaacgaggtggctttgctgttgtttnnnnnnnnnnnnnnnnnnnnnnnnnnnnnnnnnnnnnnnnnnnnnnnnnnnnnnnnnnnnnnnnncaacccccagattaaacaggtgtttggagaccaaggcgggcactgagcctttcaggagcatgcacccctggggagcacagggaggcagaggcatgggtaaactcattccacaaccctgtatgggctgctacgtcacaggcccaaaggagtctccttcagcagcgtctttgcaaaatgtctttctctcaatgaagagcatatctggatgactgtgcaatgctgtgtgctcctgggatcagtaacccttcca

SEQ ID NO: 10501 - DNA, 759 bp, Macaca Fascicularis
  misc_feature (1)...(759): n = A,T,C or G
acagtncnnnaagatactactgagactgggtatnannnngcaaaagaggtttaattgactcacagttctgtagggctggggaggcctcaggacacttnnnnnnnnnnnnnnnncgaaggnnnnnnnnnnnnnnnnnnnnnnnngtggcgagagagagagtgcaggagaaatgcnnnnnnnnnnnnnnnnnnnnnnnnnnnnnnnnnnnnnnnnatcatgagaannnnnnnnnnnnnnnnnnnnnnnnnnnnnnnnnnnnnnnnntccaggaccttccctcaacacctggggattacaattggagatttgggtggggacannnnnnnnnnnnnnnnnnnnnnnnnngtgcgtaataggggaggtgaaattggggggacaattcagcctttttgtgtctagaggttgnnnnnnnnnnnnnnnnnnnnnnnnnnnnnnnnnannnnnnnnnnnnnnnnnnnnnnnnnnnnnnnnnnnnnnnnnnnnnnnnnnnnngatttaatgttttaaatatcatttaataggtttttctcctgattgcgaattaagtgttggtaatacagaaaatgagaaagtgtaaatcacccccaatcnnnnnnnnnnnnnnnnnnnnnnnnnnattttggagtactttctattagtgtttatttttcccaatcctagtatttttagtaaaactattgtttagtaaatgatttttggtaactaatttcaaaaattatactttcagtatatacttcagccatttattattagaatgta

SEQ ID NO: 10502 - DNA, 683 bp, Macaca Fascicularis
  misc_feature (1)...(683): n = A,T,C or G
acttcactgcagtgaanctaatgaggtgctgctgcnttcccaaagcgccaggtttagcctcctctttattgccatggcattcagtcctttctcattgcaaccacttggaagtctggcccctgagcctgcgtcttcacgtgggagctagtattctcagcccatggggagaaatggaggcctgaatacaggctgtcacctaaggtggtgcgtacagtgttgggccacatgtctagtggtgccaggactgagagatcacttgccnnnnnnnnnnnnnnnngaggtaagagagaccgatccacaatgttcctgaggtgtcttgggcacccataggcaggtgatttctggcttagggcagggttcaggaggctgggcactcacagtttctctttggtcccacagaacatgtttgggttgtggaagcctatggtattcttggctattgcagctgtggctctatatgtgttacccaacatgcgacagcaggagtcagagttctgcctcatggagtgatggcagaccttggccagcgcgagggcagatccccagtggccaccaccctcagctttgggcaggacacactgtgccagaaccctccccatatgttccatgtgtccccgtctcctcagcctcagtcacccaggctggaaaggcttgtggggagcggctgactcccatctcctgcc

SEQ ID NO: 10503 - DNA, 733 bp, Macaca Fascicularis
  misc_feature (1)...(733): n = A,T,C or G
ctggcagggccaccgacgaggagctgctggggcnnnnnnnnnnnngccagccagacgccgctgacaaggcctcggtactagagcctgggagaccnnnnnnnnnnnnnnnnnnnnngaagggacgcgtgccgcctggtgacagccccccaggcaacggctcnnnnnnnnnnnnnnnnnnnnnnnnnccctttgggactctgcctggctctgctgagcccccnnnnnnnncagtgcggcccgagggctctgagccaccagggttccccacctcaggccctcgccggnnnnnnnnnnnntcccgaaagaaccgcacccgcagnnnnnnnnnnnnnnnnnnngcaggcagcgggggtggcgggactggtgactcagagggctcaggtgccctgcccagcctcgcctgcagcctcgcccccctgggcctggcactgnnnnnnnnnnnnnnnnnggggccctgctgacccccannnnnnnnnnnnnnnnnnnnnnnnnncannnnnnnnnnnnnnnggggtctctctccaagccgccagccagccgggtggccgacccgtggggcaggccaggccaggccctccctgacggacgcctcccgcccgccacccccatctccaccccatcatgtttacagnnnnnnnnnnnnnnnnnnnnnnnnnnnnnncgcctcccacccagatcgcggtatatagagatatgcattttattttacttgtgtaaaaatatcggacgacgg

SEQ ID NO: 10504 - DNA, 655 bp, Macaca Fascicularis
  misc_feature (1)...(655): n = A,T,C or G
aatgacattttttnnnnnnnnnnccctcctaccccagtccctaaatgaaatagggaaaaaagaaaacgacgacaacaaagcagaaaaaaaaaaaaaagagagagagagagaaattcatattattattattattataatacaatattttttttaaaaagactgctgcatccttaggaannnnnnnnnnnnnnnnnnnnngcaagagtcannnnnnnnnnnnnnnnnnnnnnnnnnnnnnnnaaacgtacccactcggcaagcccacccttcctannnnnnnnnnnnnnnnnncttccagtgaacagagactcttcaccttcaacccatccattgtcccagctgggaaggggacattcccactagttttcattcattcttgcttttatggaaaataaaagtgaaaaacctccatcaaccagctacttgcagcatctcctgaggacttgcttctcctgcctttggggaagagagggaagagaaagcagagaagcagagatgttccttgaactgcccacaatttttcaataacttttgtttctgttttgtaatgaccaaaggaatgaggctgacataggtgtattttttttttcctttatttgataaagaagccaattctttanncccatgagtttatgccctgggctccttagcccac

SEQ ID NO: 10505 - DNA, 756 bp, Macaca Fascicularis
  misc_feature (1)...(756): n = A,T,C or G
tgttcttgcacacaaaacttaaacacagtattatttagcattcggatgtacatgaactaggatacttatgagaaacccaattgtgtcaaaagtatgacattgtggaaaaaatgaactcaaatatatcaaaatgcacaaagcactagtcttcctccattactgcttagaaagatatgattgtttctccatttacaaaatagaatcaggacaatttaaattttttatattttgcatgcaaaacactgcaattgcttatttatgtaggagggcactctcaccagcttcttctatacacaattgagtannnnnnnnnnnnnnnnnnnnnnnnncagctcaattgaaatattagaaaaaaaatcaaatagatacatatagatttaaaatccagtacttgggaaaagaaatcaatgaataaaaggcctacttgtctgcagcttccacacactgcacctacctactacctctcttccatgcttaactgggtttagaaaggtgagctatgcgtagaagaactacttgagatattcaagtgctgtatttgaacgataagcctatagataccagtctgaagctgcaagggagactttgttagtacactactataaacaggtaaactacctgtttgtacttgatatagtgcatataaaatgactgatttaatacaaaactacagaacatgcaagattttttctgagatgttaagtattacttcagtggagaacaaaacttacttaaccttttgctatgcatgtagta

SEQ ID NO: 10506 - DNA, 728 bp, Macaca Fascicularis
  misc_feature (1)...(728): n = A,T,C or G
ttattgtttttagaatgtgctttgatttcccattagtaaatactttttatgtcatataattcaagggaatcatcatttctggaccctaacatgttttggccaaccttggcaactaaggagacatgcatttctgaattagaaggtccacacactattactcctccgctataacatttaaatgagcatttaagatcttcagtctgtagcacagacgaaannnnnnnnnnnnnnncatatgcccaaatgatgcgaaaattgagcaaaactccagttatttgcagtagtgtatacagccagtagaggtcacactctgaaaacttttcttcaagatatgttttcttttgtttgaattttagtataatgtttaataacttttcatgaacattttctttaactttttaaattaaatgtgagaaaatctgtggagcaaatgctatttcttttaactccttttggtactattactgtctggatctggcttgtgaggttgtgcttcctttccagggcctttaatagtaatcctgttggccctttttgtcataaattgtctgctcttttctcatggagcaataattaagtatattgaatactttagttttataaagtctttaaaatatttaattcttacaatagagtcttgaggtatatgattttatctttatattacaaatgagaaagctggaacaggnnnnnnnnnnnnnnntatgcaatggcagtccttgtattca

SEQ ID NO: 10507 - DNA, 700 bp, Macaca Fascicularis
  misc_feature (1)...(700): n = A,T,C or G
tatggtcaggagacagcatcagggttaagacctttttttttttttttttaaactaggagaaccaaatctggaagccaaaatgtaggcttagtttgtgtgttgtcnnnnnnnnnnnnnnnnnnnnnnncaacagggtatggactatctgtctggtggccccgtttctggtggtctgttggcgggctggccagtccaggctgccgtggggccgccgcctctttcaagcagttnnncctgtgtccatgagctcagggctttgctgaggcctgggccactgccacattggagaagcccatgtgagaagtgaatgctggcggctcagccttcagactgagagaggactgtagggagggcggcaggggcctggagatcctcctgcagaccaggcctgtcccgcctgtggcgcagtctccgggagctgcttcctcctggaaattgacaaggggcggcatcctcctggaaattgacaaggggcgcatcctcctggaaattgacaaggggcatcttcctcctggaaattgacaaggggcatcttgggcagagctggctctgagtgcctccatccaaggccaggttctccgttagctcctgcggccccgccctgggccctgggctggaatcaggaatattttccaaagagtgatagtcttttgcttttggcaaagactgtacttaatccaatgggtttttccctgtacag

SEQ ID NO: 10508 - DNA, 701 bp, Macaca Fascicularis
tgcccgggccccgacgccggccagccgcgcgccaagcccgagtactgggtgctcatgctcaagtacttcatgtgcctggtggtgggcatcacgtcgggcgtctggatctggtcgggcaagacggtggagtcgtggcggcgtttcaccagccgctgctgttgccgcccgcggcgcggccacaagagcgggggcgccatggccgctggggactaccccgaggcgagcgccgctctcacaggcaggaccgggccgccgggccccgccgccacctaccacaagcaggtgtccctgtcgcacgtgtaggaggctgccgccgagggacccggccgaagagctgacgggaggggggcgttttgtttggtagttttgccaaggtcacttccgtttaccttcatggtgctgttgccccctcccgcggcgacttggagagagggaagaggggcgttttcgaggaagaacctgtcccaggtcttctccaagaggcccagctcacgtgtattctattttgcgtttcttactgccttctttatgggaaccctctttttaatttatatgtgtttttcttaatttgtaactttgttgcattttggcaacaaaatttacctttgctttgggggctttacaatcctaaggttggcgttgtaatgaagttccacttggttcaggtttctttgaacctgtgtggtctcaatgggaaaata

SEQ ID NO: 10509 - DNA, 1495 bp, Macaca Fascicularis
  misc_feature (1)...(1495): n = A,T,C or G
ccaaacatgacannnnnnngaaannnattagtgtnnnntacaacccagccacagccaaagaaattatcaatgtgggacattccttccatgtaaattttgaggacaacgataaccgatcagtgctgaaaggtggtcctttctccgacagctataggctctttcagttccattttcactggnnnnnnnnnnnnnngtatggttctgaacatacagtggatggagtgaaatattctagcgagcttcatatagttcactggaattctgcaaaatactccnnnnnngctgaagctgtctcaaaggctgatggtttggcagttattggcgttttgatgaaggttggtgagaccaacccaaagctgcagaaagtacttgatgccctccatgcaattaaaaccaagggcaaacgagccccgttcacaaattttgacccctctactctccttccttcatccctggatttctggacctactctggctctctgactcatcctcctctttatgagagtgtaacctggatcatctgtaaggagagcatcagtgtcagctcagagcagctggcacaattccgcagtcttctatcaaatgttgaaggtgataaccctgtccccagtcagcgcaacaaccgcccaacccagcctctgaagggcagaacagtgagagcttcattttgatgagtcggagaagaaacttgtccttcctcaagaacacagccctgcttctgacataatccaataaaatagtaatttttaagaaacaaatgtatttcaatattagcaagatagcacgccttcaaatcaacccgtaaaactaagaaacttacattttagttcttactgcttaattcaagtaataattagtaagctagcaaatagtaatctgtaagcataagcttctgcttaaattcaagtttagtttgaggaattctttaaaattacaactgagtgatttgtatgtctattcttttcagtttatttgaactaataatgttatctctttctattgtgcattcagtttctaaaaccactaagtttctactccatttacattaaaaaatcttactttacttgcaagagtattttgcctcaaatgtaacaacctaagagcaactgaagataaaatactgagaaattcatttgcttactcctgaagacaaaaatacagctgagatgacaactggatttaatataattatgctggcccaacattgctaccatttgtgttgtctgtgatcaaaaagattatcttttatataggaggatgatgcttctggatattgctttcacttcttctccccacgttagcaaggacaatgcttctctgccattattacaactagttagtttgcatggagaatctttactttaaaattggaagaaaagtcacaagtgagtggtttataaaaatgctaaagaagtcagccgggcacggtagctcacgcctgtaatcccagcactttggaaggccgaggcgggcggatcacaaggtcagcagattg

SEQ ID NO: 10510 - DNA, 632 bp, Macaca Fascicularis
  misc_feature (1)...(632): n = A,T,C or G
gacgggaggnctgcagggcgtatcgaggaagccaaggagctnnnnngaggtgcggagctggaggtcacagaccatggttgggaagggggacgctggacagagatggtcactgggtcatgtgtcctggttggagatgggtaggggaggagagtggagctgttaccatctctttggggctcagcctctacaccaggctcctcccacacttccttgccccgcctccagggctcctgactgtggaccccaccaagcggctgaagctcgagggactgcgggacagctcgtggctgcaagacggcagcgcgcgctcctcgcccccgctccggacgcccgacccgctcgagtcatcagggcccgcagagcgctcgggtctcaacgccaccttcatggtaagggnnngggtccgttgaaggggtgggcagagcctcgagaggtggggtctgggaaggcggggccatcggagtccagaaaggggaggcgcggccgggggcagtggctcacccccgtaatcccaaccctttgggagnnngagcgcgggcggatcagncggtcaggagtnngagacccgctggaacaacanggtgaaaccccgtnnnnnnnaaannnnnntatcaaccaccccgtgccggcgg

SEQ ID NO: 10511 - DNA, 632 bp, Macaca Fascicularis
gtcggtacaattatagctagtgtaaatttttgttggatattgtgactatagtaatgaaatacatttggaactacattatgcatatgactcaatgtgagaaaaatatgtgtctgtattgaaatcagataattttctacctaaaatctaaagtaggtaggtatgacaattagcattataaatatgaaacaaccacctttaggcagattagtgtactgtagagaggcaaagaaaccctacttttaacacaccatttagtatgcataacaaatgtgcaggttgtaaagttttatctttaaaaaaaaatctatcattcagttatgtgtttcaagaaatttgacattgggaccaccaatcttaagaaaaatgtaacccttcacatgctatttgacaaaaaccctcaaaaattatcaaaataaatgcatgttaggttctgtgctttgatgcatatctttgccaactagattagatttttatggttggtatttctgaatacctcaatccacacaaagtgcaaaataaaaatgctaaaattccacagtattttagtactattttgatttgtacagtatttttaaccaattattggagtaatcatattatttcagttcatgtagaatgaaaactactcccta

SEQ ID NO: 10512 - DNA, 770 bp, Macaca Fascicularis
  misc_feature (1)...(770): n = A,T,C or G
tcctgtaaatattannnnnnnnnnnnnnngcttatacctgtgtaaaancactatacaaaagcctaaatcaaaataattcacttcaacaaaagtactttgtatcaggtgacattagagcaaaagaagtaaagcctttgctgtttaccgtcctcctgcaagcatctgattttacacataaaacaggcttcaatttgaagcctaactacaggtaacatacaaaagtaaaactcagaagnnnnnnnnnnnnnnnnnnnnnnnacaatatatgttaaaaatatatatttatttcaatttttagatgcttcaactgtnnnnnnnnnnnnnnnnnnaaataaaagaaaaaacatttgagaaagaacaagaaccttttgtttagagaatgaaatataaattgttaataaacaaagtccacaacaatctattttaaaaaaaaaagttactatagtnnnnnnnnnnnnnnnnnnnnnnnnnnnnnnnnnnnnnnccctccacttaagggaggtggagatttatctctatccaagctttgagtataagcagataagaagtaattttcattttcttgagactgacttgatgaaagggcatatggtgtccccaaaaatgtctgatgagtgagaacattaaaatgactaaactgatgggacatatttaattgactatgataaacctgaaagttactatatgaatcttgttctgttgaattgctgttctctccttcagagcatactatatcaacagaagttctctcttcagaatcaagataagtc

SEQ ID NO: 10513 - DNA, 718 bp, Macaca Fascicularis
  misc_feature (1)...(718): n = A,T,C or G
caggcagctttgcagaagcccagatggacctggtgccnnnnnnnnnnnnnnnnnnnnnnnnnnnctggcctatcctgcatcatttgcatggttgtcggggctgtggggctgccctggggcccgtgccccctccaggccagcccctgctgggctcagaggccgaggaggcactggaggctgctggccgtttcctactgcctgggctggaggaggagctggaagaggccgtgggccgcatccacctaggaccccagggtggcccagagtcagtgggtgaggtgtttcgcctgggccggccccggctggctgcccactgtgcccgctggacactggggccagagcagtgcccgaggaagcggggtctggccctggtggggcttgtggaggcagcaggtgaagaggcagggcccctgacagaggctttactggccgtggtgatggggatcgagttgggggcaagggtcnnnnnnnnnnnnnnnnnnnnnccctgggaaggggacccaaggatgaattggctgtgaaggagcctcnnnnnnnnnnnnnnnngaggaggctgagcagaaggagtcgtcatagaggagcggnnnnnnnnnnnnnnnngaccccaggatgacgacgatctgaagacccgggagtgagaagccaaggccagggtctgggcgtggggcgcagagaagcagaacagcccagggccccaggtgcctggcctggcccagac

SEQ ID NO: 10514 - DNA, 729 bp, Macaca Fascicularis
  misc_feature (1)...(729): n = A,T,C or G
tgctgcctctggccannnnncacanntnncttaaaaccaaagtctctcccttttccttctcaaatcctgtcactcccaagtccacaggaaccctgagaagacactgccccacagaccaactgtttgctcttgacaaggccggttctcctactcacggcctctaattcctcaaattaaagatgaagggcgtggggtgggatgctgccaggttctcccaggcctggcctctggcattccaagggctcaggaggaagagaacgccacctgcactccacctgagctgtgtgcaaggcaggcctctaatggccaccggcctggctgggcctggctcagtcctagatctggggaaggggctgtggctcctccaaaataaaagtccaaataaaccacggcaggaaatactttgtgggcaaaggggccaccttcttcctcccaaataccctctcctagtcagagccctttttcaaacctccactcatatcctccatagacactgcttgccttccttccctaatacctcctggcacaaatgtagctccttttactcgtttctaacttaaacccttactcttttgtcatttcaaaagaatcccaaaactcatcagagcacacatcatgcacgattctacgtataccccacccacctcagtttctagtttctgtccccaccaccctgcaagagtggctctgttcccaggtcccactgctctattcaaggacaaaacaaac

SEQ ID NO: 10515 - DNA, 740 bp, Macaca Fascicularis
  misc_feature (1)...(740): n = A,T,C or G
gccaccacccnnnaagccaggaacccactccctncnctgaggctgagccaagccttttccaggggcagggcccaggagaccattcccagaatccgtggggcagcagccagggctccggctgctggaggaagcagctatccacaaagcttcctgccccagagctgaggccgaggctcccgggagacgccagcccctacccgctggtattccaccaaatgaccctgggggccaggccttcgatcacccacgtcccatccgtgcacacaccgggatgcggctgccaacttcacaccagccccaacccactttgggggagcttacctcctgcgtcacacactccctgcgcatctgctgcaatcgaggtggttctggtgcggagggggggcccttgtggccaacaggaggccccaagaggcggcttggacaatgctcttcttgctccttagttactggctggctgtggcttcagtggtgtgtaagctagtggaacacccacccacccaagctctggggtaccctgggggtctgacaagaggatggggtgggggtggtatcccccaaagaccagcctcagcctcagtggggccccagcgatgttttcttgttgtacaagaaccaggtccgagtgttgcctcctcttccttccggaagccaaactgctcctttattttttagggctgctgattgtgaatctcagagtcttaagagagaagccaaatatatcctctgtaaagaagaaa

SEQ ID NO: 10516 - DNA, 774 bp, Macaca Fascicularis
  misc_feature (1)...(774): n = A,T,C or G
atgatcaannnnnnnnnntgtaaagatatggcccagagtatttataggcccagtaaaaatctggacaaggacatgtatggtgatgatctagaagccagaataaaaaccaacagatttgttcccgacaaggagttttctggttcagaccgtagacagagaggccgagaaggaccagttcagtttgaggaagatccttttggtttggacaagtttttggaagaagccaaacagcatggtggctctaaaagnnnnnnnnnnnnnnnnnnnnncaaggaacatgagcatgaaggcaagaagaggaggaaggagtagacacaggtctcttcatagtgaatgaactatnnnnnnnnnnnnnnnnnnnnnnnnnnnnnnnnnnnnnnnnnnnnnnnnnnnnnnngataaaaaacaaatctgggtgtcggatcccagcactactttttattactggagaatgggggggagatagaaaattctactttgaattacttagtttttttaaagagtgggttgtgtttgtgcttttcccacctttcagcatttatagaacatgctgccccacatacaaagtcaagaccacttccttttgtgtgacactagtagtttggggttaatattttgtgtaagaacagctgcatatgagtaaagttaccccaaccacagtgaggaggatgttcacatactggaactgtcctgccaaataaattttgcccctgttgtgctctgttttaatttggagtgggcaaagtaacctcttgcttggtgcaactattgtca

SEQ ID NO: 10517 - DNA, 738 bp, Macaca Fascicularis
atcccagcagactcagctgaacacagatctgactgcattcctgcaaaaacattgtcatggagatgtttgtatactgaatgccacggagtgggttagagaacacgcgtctggctatgtcagcagagatacttcatcttcaccccccacaggaagcacagtccagtcagttgacctcatcttcacaagactctggatctacagccatcatatctacaacaaatgcaaaagaaagaatattctagagtgggcaaaggagctttccctgtctgggtttagcatgcctggaaaacctggtgttgtttgtgtggaaggcccacaaagtgcctgtgaagaattctggtcaagactcagaaaattaaactggaagagaattttaatccgccatcgagaagacattccttttgatggtacaaatgatgaaatggaaagacaaaggaaattttccatttttgaagaaaaagtgttcagtgttaatggagccaggggaaaccacatggactttggtcagctctatcagttcttaaatgccaaaggatgtggggatgttttccagatgttttttggtgtagaaggacaatgacagtaagagtagttgaaagtatcttgtcactgttagtcttttgatttttttttcccactttttcttgaaagattaagtaagtaattttattttagttccattctagaacgttggggagtgggggacaagaaaaaatagtatagctgaaatgcatctgt

SEQ ID NO: 10518 - DNA, 821 bp, Macaca Fascicularis
  misc_feature (1)...(821): n = A,T,C or G
cnnnnnnnnnnnngcctgacaccacacgannnnnagtgnnnnnnnnnnngcgccaccctgagcaaggacatccggcctgtgtgcaggaagttcatgcaggatcccatggaggtgtttgtggacgacgagaccaagctcacgctgcacggcctgcagcagtnnnacgtcaaactcaaagacagtgagaagaaccgcaagctcnnngatctcctggacgtgctggagtttaaccaggtgataannntcgtcaagtcagtgcagcgctgcatggcnnnnnnnnnnnnnnnnnnnnnnnagaacttcccggccatcgccatccaccggggcatggcccnnnnnnnnnnnnnnnnnnnnnnnnnnnnnnnnnnnnnnnnnnnnnnnnggatcctggtggccaccaatctgtttggccgggggatggacatcgagcgagtcaacatcgtctttaactatgacatgcctgaggactcggacacttacttgcaccgggtggcccgggcgggtcgctttggcaccaaaggcctagccatcacttttgtgtctgacgagaatgatgccaaaatcctcaatgacgtccaggaccggtttgaagttaatgtggcagaacttccagaggaaattgacatatccacatacattgaggagagccggtaaccaccacgtgccccgccagtccagagccgcccacccggagctgcccacctggagccgcccgcatgcagcttcacctcccctttccaggtgccactgttgagaagctagaaattgtgtgagaataaacttgttattacggaaaaaaaaaaaaaaaaaaaaaaaaaagg

SEQ ID NO: 10519 - DNA, 794 bp, Macaca Fascicularis
  misc_feature (1)...(794): n = A,T,C or G
gcattgcagcaggccggctgtttgtggagnnctccattcatgatgagttcgtgcggagggtggtacaggaggtgcggaagatgaaggtgggcaacccgctggacagggacaccgaccacgggccacagaatcaccatgcccacctgatgaagctgatggagtactgccagtgcggcgtgaaggaaggggccacactggtctgcggtgggaatcaaatccctcggccagggttcttctttgagccaactgtnnnnnnnnnnnnnnnagaccacatgttcatagccaaggaggagtcctttggacctgtcatgatcatctctcggtttgctgatggggacgtggacgccgtgctgtctcgggccaatgccacggaatttggcctggcttctggtgtcttcaccagggacatcaacaaggccctgtatgtcagtgacaagctccaggcaggcactgtgtttgtcaacacgtacaacaagaccgatgtggccgctcccttcggaggattcaaacagtctggatttggcaaagatctaggagaggcggctctgaacgagtacctgcgggtcaagacggtgaccttcgaatactgaagaaaggtctttgtgagaagaaagtccctgcccctccctggcggctgggcccctccctcttcagcctgggtgcacagcacctcccacctgggggctaggnnaagccctcctgcctgcaccccatgtctgcatctgggacaccctctgtccagtcagcagcagcccttggctgggtgaggtgtgcccctcccangggagaataaa

SEQ ID NO: 10520 - DNA, 653 bp, Macaca Fascicularis
  misc_feature (1)...(653): n = A,T,C or G
aacagcagtgctcaccagtgacagtggtcacagttgcaagtaaagtatctcnctgaaaccaaagctagcatttcagcatggaaggaattaggaccttttctccaggattacaggtacactggatacagccatgcatggatggttttcctttatttttcagtgatnnnnnnnnnnnnnnnnnnnnnnatatatttgggtgttggtggcttgactttgtccataaggggcgtggccacttcacatgatggcaagcctttaagagcacaaagaagtttaatatggacaacagcagcaaaaagcaagaagaaaacaagtagggaaaaatggctaacctggagagaaagaatttctttaaccttgatgttcttcattaaaaatcttatcttggactgatttgggggatttttagnnnnnnnnnnnnnnnttataagcatgactttcccaggaatctttgttatattttaatttttgataaccatttgattaagtgtatgtgtgtatatatacatatgtatgtttatatacatacatgtatctatgtatagttttgtatatacatatatacacatagacatacagagaaataaccactactttgtaatgctgtacagtttgttttatatttctttactttttttgttactattttatct

SEQ ID NO: 10521 - DNA, 746 bp, Macaca Fascicularis
  misc_feature (1)...(746): n = A,T,C or G
gcttggggccctggactgtgctgcgtgcctcaggctgtnnnnnctgggcggggtctgtggcgatcgcagcaggagctgggnnnnnnnnnnnnnnnnngcacccgggcaaacttgctggctatgtatccatcctgctcaccctggcaggctttgctacagctatggctgctgttgtcctctgcgtgaatagnnnnnnnnnnnnnnnnnnnnnnnnnnnnnnnnnnnnnncagtgtgtgatccctcggacgtcgtcatccctnnnnnnnggtacagatggcaaagtcaagagaaccaatggcagaaagaggagtgtagagcttacatgcagatgctgaggaaggtgttcacagcaatccgtgccctgttcctggctgtctgtgtcttgaaagtcattgtgtccttggcttccttgggnnnnnnnnnnnnnnncttgtgtggccagagctcccagcccctgaatgaggaaggatcagagaagagactactgggggagaattcggtgcccccctcaccctctagggagcagacctccactgtcattgtcctgtgagctgccaaagaccccactgggatgcccgcatgtctctgtctggggcagcccagggcccccactcctggctcctcatactcgcctcccctatggccgctgtccagatcctcctcctttcttctccccacatcagcacctgctgttcctgctccggggttctcaagtccatgaacagatattgttgcattttccaca

SEQ ID NO: 10522 - DNA, 846 bp, Macaca Fascicularis
  misc_feature (1)...(846): n = A,T,C or G
acgaccgcgcnatcanngncnnnnnnnnnnnnncnannnnntccaagtggagtacgcgcaggaggccgtcaagaagggcnnnnnnnnnnnnnntgttcgaggaagagacattgttgttcttggtgtggagaagaagtcagtggccaaactgnnnnnnnnnnnnnnnnnnnnnnnnnnnnntgctnnnnnnnnnnnnnnnnnnnnnnnnnnnnnnnnnnnnnnnnnnnnnnnnnnnnnnnnnnncaacagggcccgggtggagtnnnnnnnnnnnnnnnnnnnnnnngaggacccggtcactgtggagtacatcacccgctacatcgccagcctgaagcagcgnnnnnnnnnnnnnnnnnnnnnnnggccgtttggcatctctgccctcattgtgggtttcgactttgatggcactcctaggctctatcagactgacccatcgggcacatnnnnnnnnnnnnnnnggccaatgccataggccggggtgccaagtcagtacgcgagttcctggnnnnnnnnnnnnnnnnnnnnnnnnnnnnnnnnnntgatttgaccannnnnnnnnnnnnnnnnnnnctcctggaagtggttcagtcnnnnnnnnaaaacattgnnnnnnnnnnnnnnnnngagatcaacccctcaagattttannnnnnnnnnnnnnnnngaagtatgttgctgaaattgaaaaagaaaaagaagaaaacgaaaagaagaaacaaaagaaagcatcatgatgaataaaatgtctttgcttgtaatttttaaattcaaatcaatcatggatgagcctcaatgatgtgtaggcctttccattccatttattcacactnnntgtcctac

SEQ ID NO: 10523 - DNA, 617 bp, Macaca Fascicularis
  misc_feature (1)...(617): n = A,T,C or G
cggctggctcagcacacgctgtgtgnnnggatgtgagcttgttcatnnccagctgtgacttccatttctcccntccttctgtcctcctcctgttcttgccttggacctgtgggtgtgcagaccgctctctctgccttccttgcnnnnnnnnnncagccatccctgatctcgtccccagaggcccaggnnnnnnnnnnnnnnnnngaggggttgtcccactgggtgggtatcttttacccagcactcagacttggcaggagaggcagggcaaccctcacagggagatgggagggcacccaactcacacaagcatgtgacagcaatagagattgggggtctgcccctaggtgggtgagacacaaaccgggccggatttggggccacaggccaggcaggacagacaaggcgtaggtgggagggtcccacaggccctgctgaccccagtgtgtctccccggagatggctcccagttgagtgggacccggcaggagttgcaacagcgctgtcccccacccctgcacacagccaggccctcgaggctctgcagtcactcgcctccctgctagtctctggtcctggtctggagttatattttgatgccatgaagacactgttta

SEQ ID NO: 10524 - DNA, 699 bp, Macaca Fascicularis
  misc_feature (1)...(699): n = A,T,C or G
cagaaagactgctgtcacattttaatgcctctctagacctgataatttaaaaggagtcacattcctcagataaaagcccacaggttctgactcctcaggagaaaaagcatcacccgaagaggaaggaagtggatttgggtatcaccatttctaggggcacacttgattgaagactgagacttctgaagagaagtnnnnnnnnnnnnnngacagaccatcccagttgaatgctgttttccaagaacagaagaaaatgatccaggcccaggaatccgtaacactggaggatgtggctgnnnnnnnnnnnnnnnaggagtgnnnnnnnnnnnnnnntgctcagaaggacctgtaccgggacgtgatgttggagaactacagcaacctggtggcannnnnnnnnnnnnnnnnnnnnnnnnnnnnnnnnnnnnngttggaacaaggagaaccaccgtggacaacagaagatggaatccacannnnnnnnnnnnnnnnnnnntggaaagttgatgatcatgtgctgaagcgcttgcatagtgaaagcctagtgaacagaaggaaacaatgtcatgaacatgatgcattnnnnnnnnnnnnnnnnnnnnnnnnnnnnnnnnnnnnnnnnnnnnnnaatcatgatatatttgacttacatggaaaaagttgaaatcaaatttaactttagttaataagagcaaaggc

SEQ ID NO: 10525 - DNA, 741 bp, Macaca Fascicularis
  misc_feature (1)...(741): n = A,T,C or G
ccannnnnnnnnnnnnnnnnnnnnnnngactaagggaccttgtgaatacagagggaaactatccaaggaacagtcaagagcagttttaattgagtgagtaaagtgatcttggttnnnaattcaactgagaaaacatgactttctccttttttctttaagagggggctaatgttaaccagacatgttatctgtagtcccctgggctctacactgggaaagatgatcaagaaatagataagcctgttattcttccaactgatggttccagttagcacccatgccctagtcatgtgaaacaaagaggggtgaaactgaaattaggccgcataaaacttagaaactaggcctcataaaaaaaaaaaaaaagaacttaaaaaacaccaggtggctctggatagggtcccaccctgcctcaatagggtcccaccctgatagggtcccaccctgccaattccgggaaacaacctcatgaggtcccaccctgccaattccgggggtcctaccctgcctcgaagttcccggaatcaacaactccaggaaaaaacctcataaggtcctgctctaaccaatttagaacaagacaccttgctcaggccatagacagacccnnnnnnnnnnnnnnnnnnnnnctttgtttgaatttcgcgccctaagctgtgtttgaacttgtgtttgcctatataaacagcctgtaacaagcagtcagggtcccaaggccaacttagagctgnnaccctagtg

SEQ ID NO: 10526 - DNA, 726 bp, Macaca Fascicularis
  misc_feature (1)...(726): n = A,T,C or G
tagctgtgcaggagagggctgnntggggcagaggccaggaggggacctggtgtgtcgcccacccaccacctggctcatcnctcaggcctaccctgaccctacattacataggttacatcagcctctgtggctgnnnnnnnnnnnnnnnnnnnnnnnnnnnnnnnnnttgcactagatgggcctgtggtcccaaagtaggtcagtgggttggggttgctgnnnnnnnnnnnnnnnnnnnnnnnnnnnnnnnnntggcttnnnnnnnnnnnnnnnnnctccctgcctagggactatgtgcactccagaccctgcccaggctcaggcctatgaggtgtggagccagcctgacccccaggagccagaggcaccgccaactcccctggcattccagctctccaggcgaccctcctctacccaaagctctgtctcccgnnnnnnnnnnnnnnnnnnngtggccacaggctnnnnnnnnnnnnnnncctgggtggtggggnnnnnnnnnnnnnnnnnnnnnnnnnnnnnntctcatcaaagcctttacaaggtgcnnnnnnnnnnnnnnntgccttgacagcatgacccctggtttggaggnnnnnnnnnnnnnnnnnnnnnnnnnnnnnnnccatgggggggtctacagagtcggggacagaagggaagggacccacaggaagtcatggtggtgcccagggatgggaagggacccccagccacggggacccg

SEQ ID NO: 10527 - DNA, 739 bp, Macaca Fascicularis
  misc_feature (1)...(739): n = A,T,C or G
gctggccaaggcggagcgcgtaagctcgcacgccaacgccgcccaagagcgcgcggtgcgccgcgcagcccaggtgcagcggctggaggccaaccatgggctgctggtggcgcgcgggaagctccacgttctgctcttcaaggaggagggtgaagtcccagccagcgctttccagaaggcaccagagcccnnnnnnnnnnnnnnnnnnnncgagctgggcccagagcagnnnnnnnnnnnnnnnggagagagctcggacgaggagccggtggagtccagggcccagcggctgcggcgcnnnnnnnnnnnnnnnnnnnnnagcctccgaagggccctttcgggccggaaaggccctgcagcgccaccgcccaccccggtcaagccgcctcgccttgggcctggccggagnnnnnnnnnnnnnnnnnnnnnnnnnnnnnnnnnnnngcccatgctggtgctggagccagagcctccgcaggacaccgaggaagatcccaggagacctggggctgccaaagaagttccgctccaaatagagagtgcagcctgagggctggtgttgcctgtctcccctgtgcttgtgccttgtcctaaaataaatcctttcagaatgtagcactcacgccctaataaggagcgaatcctgcatccaccaaggcgggcgctctggccctcccttccttaagcccagtcctgtgtcctnnaaagaggtgcagccactcacacctgctgccctcac

SEQ ID NO: 10528 - DNA, 737 bp, Macaca Fascicularis
  misc_feature (1)...(737): n = A,T,C or G
ccccagaggcaagtctggggtatacaggcaggtgggattcctccccgggaggtcatacctgacctttctggggtaagagggaggctggggcggggatgttggggaagcggcctgggagaggnnnnnnnnnnnnnnnnnnnngnnnnnnnnnnnnnnnctgggggcaggcggttcctttgggaggtgggacaatggccctgtgtggtacactccctgccccccaccccccacaggcagcttagtctggcacgaaggccacactgtgaggctgggccctccagctggtgggggtggcgtggagtggggcctaaggaagagctattaggtccagagtggcagtgggaggaggtggtcagcttggcagggcctctgggagcatccaagtcccagagcaatcctggccttccctgtcttccctcccatgtctgtcctgcagaggtggagaggggtttaggggcaactcggcttctcccctctctggtctggtaggaaccagctgttaggtgaggggccggctctgcacctaggtggggccccgggaccatgtcccagcccctcacaccttgacctcatcatcctcctcagcatccgcaaattcaaaggtgtttgcttgcaccgtgctgggcaccggggtcctgctgtgtgcctggggtgccctccactcttcatccaggctctcccaggaggcccgggcttggggcagcacctccacccgctcctgccgcgcatccatctcc

SEQ ID NO: 10529 - DNA, 719 bp, Macaca Fascicularis
  misc_feature (1)...(719): n = A,T,C or G
tgcgtcactgcccacaagannnnnnnnnnnnnnnnnnnnnnnnnnnnnnnnnnnnnnnnnnnnnnnnnnnnnnnnnnnnnnnnnnnnnnnnnnnnnnnnnnnnnnnnnnnnnnnnnnnnnnnnnnnnnnnnnnnnnnnnnnnnnnnnnnnnnnnnnnnnnnnnnnnnnnnnnnnnnnnnnnnnnnnnnnnnnnnnnnnnnnnnnnnnnnnnnnnnnnnnnnnnnnnnnnnnnnnnnnnnnnnnnnnnnnnnnnnnnnnnnnnnnnnnnnnnnnnnnnnnnnnnnnnnnnnnnnnnnnnnnnnnnnnncaccaccatgaagttcttagcagtcctggtactcnnnnnnnnnnnnnnntttctggtctctgcccagagtccaacaacatctgctccannnnnnnnnnnnnnnnnnnnnnnnnnnnnnnnnnnnnnnnnnnnnnnnnnnnnnnnnnnnnnnnnnnnnnnnnnnnngaccaccgctgctcctaccgctgcaaccaccgctgctcctaccactgcaaccaccgctgcttctaccactgctcataaaggcattctagatnnnnnnnnnnnncttcaggattacctgaaaggcaaactgtttccctgagatnnnnnnnnnnnnnnnnnnnnnnnnttggtcacaactaatcacgcttcctatgatttcatccaactacttaccttgcctactatatctcctttatcttaatcagtt

SEQ ID NO: 10530 - DNA, 731 bp, Macaca Fascicularis
  misc_feature (1)...(731): n = A,T,C or G
gcataaagcccannnngtagtccaccagagacttcacactggagagaagcnnnnnnnnnncagtcaatgtngnnnnnnnnnnnnnnnnnnnnnnnnnnnnnnnnnnnacgtgaaatctcatacacttgagaagtcgtttgaatgtaaggaatgtgggaaaaccttnnnnnnnnnnnnnnnnctttataaacattccagatttcatacaggagagaaaccctaccaatgtatcatatgtggcaaagcttttggcaacacatctgtgcttgttacacaccaaagaattcatacaggagagaagccttacggatgtattgaatgtggcaaagccttcatcaagaagtctcatctcctcagacatcagataactcatacaggagagaagccctatgaatgtaacagatgtgggnnnnnnnnnnnnnnnaaatcaaatcttattgtacatcagaaaattcatacataatatnnnnnnnnnnnnnnnnnnnnnnnnnnnnnnnnnngctaaatcttattaaatactaaaaaattcatgatgataagtctgcagttcaaatgaatttggaagagtagattcccataaaaatcaatcaatgccannnnnnnnnnnnnnnngataataaactttttacagaaaatatgacagaaaacaactataaataatagagcataaagcttggaaagtaagcataacttaaataatcaaagaaccaatggaaactacatttgccatc

SEQ ID NO: 10531 - DNA, 1099 bp, Macaca Fascicularis
  misc_feature (1)...(1099): n = A,T,C or G
cacagatgatnnatcacgcgcctgtannncgagacacccaagttcacagtgctgannnnnnnnnnnnnnnnnnnnnnnnnnnnnnnnnnnnnngagcgcaaccccaacctnnnnnncaagcgtacgcnnnnnnnnnnnnnnnnnnncaagagcnnnnnnnnnnnnnnnnnnnnnngctccttcctgctgctcaagggcccctacgatgacgtgaggatcagccctgtcatctaccacttcgtcttcaccaacgagagcaacgagacggactacgtgccactgcccatcattgactccgtggagtgcaacaagctgctggccgccaagaacatcaacctgcggctcttcctgttccagatacagaagtagggcagggcctcaggacgcccaaggagctgacgggcagcatcccagcaccgctgccctgtccacctggcnnnnnnnnnnnnnnngggactatctgatcattttagcaaaggaggagaacaaacgaagccaacacagggcaagtctgcatgtgtgcgtgacaggacccccgcctccggctcaccccccgacccctgcctcccctccttccgagggccgccagaggctgggctgacccgaagaggagatggtgcaccaggcaccccgaggctcagagacggnnnnnnnnnnnnnnnnnnnnnnnnnnnnnnnnnnnnnnnnnnnnnnnggtgcagtcaggcggcagggctgctccatccctgcgggttccggccgggcgcgggggccttgctgacgtcagacgggatatccgaatatctgatagcaattaaaaggcagccttgtttcgtactttctgttttgttcgaggggaaggcatggctgtgaatggacagcgtgggagctttggtttggcctgggnnnnnnnnnnnnnnnngtccccatctctgtgcccnnnnnnnnnncccgaggaagactcagagacgctgcctccccctacactctgtcatggggtcttgagactgaggctnnnnnnnnnnnnnnnnnnnnnnnnnnnnnnnnnnnnnnnnnnnnnnccactcccagggagacaggactcagccacagggctcagcagacattttcggaaagcagg

SEQ ID NO: 10532 - DNA, 779 bp, Macaca Fascicularis
  misc_feature (1)...(779): n = A,T,C or G
cagggaggggccctaaaacggaggccattgtgtgagcctatcagagttgctgcaaacgtgacccctgctcagtaaagcacttgcaaccgtctgttatgctgtgacacatggcccctcctgctgccaggagctttggacctaatccaagcgtccctttgcccagaaagaaaatgggggaggaggcagtaataaaaagattgaagtagttttgctggaataagttcaaattctnnnnnnnnnnnnnnnnnnnnnnnnnnnnnnnnnnnnnnnnnnnnnnnnnnnnnnnnnnnnnnnnnnnaaagctttttattcctcctgctcatattgtgattctgcccttggggacttttcttaaaccttcagttatgcttttattattttttttcatacacttattggaactccgcttgatttttgcctcttccagttttcctgacactttaattaccaacatgttacctactttgaattttttgcatttaaaacagacactggcatggatatagttttacttttaaactgtgtacataactgaaaatgtgctatactgcatactttttaaatgtaaagatatttttatctttatatgaagaaaatcacttaggaaatggctttgtgattcagtctgtaaactgtgtattccaagacatgtctgttctacatagatgcttagtccctcatgcaaatcaattactggtccaaaagattgctgaaattttatatgcttactgatatattttacaatattttttatcatgcatgtcctataaaggtacaag

SEQ ID NO: 10533 - DNA, 806 bp, Macaca Fascicularis
  misc_feature (1)...(806): n = A,T,C or G
ctggctgagctcccactgatgnnnnngccgtggttggcttggttgctggaggtcnnnnnnnnnnnnnnnnnnnnnnnnnngggaaggccttgcctgagaccatcgaggaagccgaaaatatgcagagaccaagaaaaaaataaagaaaagatgatttacctccaagttcagaaactagacattccattgaactaagaagacagacaattgctcctgtcatgacctagccttgatggcagtaagaccaaaagcagaaattcctgcactcatcacaaagcccatacaactcaaccaaacttacccctgagccctatcaacctaggtctacagccaatggagtctattgtacactgtggaaaaatacctnnnnnnnnnnnnnnngccaagttcttccagttcactttattctcagcattcctaggacattggacattggttttctgaagggttttttccaatctttgtgttttaaaaatttgattattttctctacaatgccatctaaccagaatacacaggggtaccatgggccagggaaacaaagtagaaaaaagtctgaaaaacagaaaagttaggagaggagcatctattttcttaaagaaataaaacacccaaaacaatataaaattgtccagaatgtatgtcaagaactttagataggcctttcaataacataggtgaagatatttttgaaaatacattgattattatctaggttagacttaaagtgaatctcaaataaaagaatcaggaatacaacttaagtaatcatgaggtccttccatatttagactgggtaagcatga

SEQ ID NO: 10534 - DNA, 743 bp, Macaca Fascicularis
  misc_feature (1)...(743): n = A,T,C or G
gtgccagaggagtgtgccatattccaatggctgagccgnnnnnccccaaaacgagagaggttcttatagagactgctaagaagctaggactccggtgccactccaaggggacagtggtcacaatcgagggacctcgttttagctcccgggcagaaagcttcatgttccgcacctggggggcggatgtaatcaannnnnnnnnnnnnnnnnnnnnngttcttgctaaggaggctggaatctgttacgcaannnnnnnnnnnnnnnnnnattatgactgctggaannnnnnnnnnnnnnnnnnnnnnnnnnnnnnnnnnnnnnnnnccctgaaagaaaatgctaataaagccaaaagcttactgctgactactatacctcagatagggtccacggaatggtcagaaaccctccataacctgaagaatatggcccagttttctgttttattaccaagacattaaagtagcatgactgcccaggagaaaagaagacattctaattccagtcattttggaaattcctgcttaacttgaaaaaaatatgggaaagacatgcagctttcatgcccttgcctgtcaaagagcatgttgtaagaaagacaagacattgtgtgtattagagactcctcaatgacttggacaacttcaaaatacagaagaaaagcaaatgatcagtaaacatgtgggaaaaaatattacattgtagagggaaaaaaaaaaccaccattatcttccccctataaa

SEQ ID NO: 10535 - DNA, 746 bp, Macaca Fascicularis
  misc_feature (1)...(746): n = A,T,C or G
agaaatgataagaggagtaggtgagcttgaaaggcttagggaagagataagaagagtaagaaacaagtttgtgatgatgcattggaagcaaagacattcacgcagccgtccttatcctgtgtgctttaggccttgaattcatttttgcctaatattaaaatctggccccagctttctttctgttagcattttctgatgtatctttgacctccattttacttttaataatctgatgaaattttgttttagatagtttccttggtaccagcacctcattggattttggattttgacccattttccaggtctatttttcaattggaaactttcatacatttgcatgggaatgtgttcattccatgttgtaaagtgaaacataacaggttatggcaaagcagcatatttaatatcagctcacatatataggataaaattccaaactttgtgtgtgtgcgtgtgtgtatacatacatccatataacatatatcaaaaacttaaccaagcttatttctgtgtggtgtgaaattttatttgttttcttctttttattctttttgcttatattatatgtgctttttaatgaacacgtgtctcacacacaaaaagaattaaggattttttttacaagtaagagtcaaataatttgcaaccagcttatgagggcaatgggggcacctaaactcttgatgaaagaacaataaaaaagaaatgtaaacctcaaatcacctctgnnnanacacgtgtca

SEQ ID NO: 10536 - DNA, 1181 bp, Macaca Fascicularis
  misc_feature (1)...(1181): n = A,T,C or G
taatttcatggtcgtataatggtgagaagtaatacctgattgtttccnntnctgttctagtaactcagaggaggtatgtgttttatttgtgatagcaaattcctaaatgaacattaggcaagtggtaccattatcaggccagctgcagcctcttgccttgacgtgcattcctagaatttctttgttgctgtaattcttgattaagtgaccttgactttgattttgtaattttgctaatcatcagcaaattcacttgcatgacgttactgccaaatatgaaggtagttgaattattatgagtgattgcggcagagggttgtgccatggtgaaaactttgatgtttgtctgtgttcattggatccatcttttaaaatgacattaccatgagtctgtggtcaaacctgaatatctttgtttaaatttaaaatgggactctatattgttctagttcaggtcttcatttactaagcgattgagagaaatctgacataagaaaatattgttttcactgctggaacaaagaggaagtaacagtgaatccaatatagttcatattgttattgtccagtcatcaagttaactaagcatatcagattatgtttatttctcatacatacggatattaacttaaggtaaaaaagctagatgtgaaggatctgaaaaggcattaatttatgtactaattctgtaaatatgtattaattgcagtattattaaatacagatggattcagtttacctttgaaaaggaagaccactaatttagaaaacaaagctaagtgcagtcattacaagaagcaaagaaatacttaagttggaaaaaaattaaaatgaagggatggtctaagtttnnnnnnnnnnnnnnnnaatattaaagaagcaacaattgcttacattgtatgtgataaaatatacgtttcacaatcaaaattttaatagtaaatataagataaaatttatattaaataatgaaaatgtatttgnnnnnnnnnnnnnnnnnngagaacattgtaacaaaatatatgaaagaaaagtagccagaaatgtgagaacaggtggaaatgtatactttatttgatttttttttttatagaaataaacaacatacatagaattaaatggtgataaaaaacatggaaaaaatacttcgctaagtaacgtctaagttgtagaggatgtgc

SEQ ID NO: 10537 - DNA, 698 bp, Macaca Fascicularis
  misc_feature (1)...(698): n = A,T,C or G
ctggattggtatctgannctagtaggaagggcatgttcctgctgggtagctctaaacaaggtatacatggataggaacagcagcctattctgccagccttatttataaccattttagacatttgttagtacatggtattttaaaagtataacttaatgtcttcttttttctttctccactgtctttttcatagatcgagacatgtaagcagcatcatggaggtttgaagatgccgcatttggattggatgaattccaaattctgcttccttgctttttaatattgatatgcttatacagtttatgcaaaaaatgcagagttataataatgttaacacaggcatgatcttctttataattctactttgagtgctatctccacgtttgaggtatctgggcagctagctttaggagggctggcaacttagaggtggggagcagagaattctcatatccaacatcaacatcttggtcagatctgagctcttcaatctcttgcactcgaagcttgataagatagttatgcgtatataagttaacttccaatttacatactgtgcttagaatttggaggaaaaatttagaaatataattgatggggttattggaaatttgttataatgagtaaaacattttgtcatataagattcatatttacttcttatacatttgataaagttgtgatttaatctggttcat

SEQ ID NO: 10538 - DNA, 366 bp, Macaca Fascicularis
agcggccccgctttgaggccagggtcacagtggtaagggccccgctgtggtggaaggctcagtttgatcctggcttggccatctgcacctggctcatgacaactcactggatcctaccacggcgggcactgtccttggcactgaggccatgccctctccaccggatgagcaaaccaagctccgggtctcgctgtcctcttttgtcaaattggataaactttgtgtacaagggttcagtgatgattaagaggccagcacacaacagggcgtaatgaatgcgttaaaaccgtcctgccagccgggcgagggtggctcgaagcctgtaatgccagcattttgtgaggccgagacggggggatccagagg

SEQ ID NO: 10539 - DNA, 727 bp, Macaca Fascicularis
  misc_feature (1)...(727): n = A,T,C or G
ggccctgtgcgggctaagcccactgcacgggggaggcagggagtcgggatgaacgtcgggccttggccatgaagattccttttcttacggacaagatagtctncnnnnnnnnnnnnnnnnnnnnnnnnatannggcgagatacccgctgacagagagccagctggcgctagtccgggacatccgacgacggggcaaaaacaaggtagcagcccagaactgccgcaagaggaagctggaaaccatattgcagatggagcgggagctggagcggctgagcaatgaacgggagcggcttctcagggcccgcggggaggcagaccggaccctggnnnnnnnncgccaacagctgacagagctgtatcgtgacattttccagcaccttcgggatgaatcaggcaacagatactctcttgaagagtacgcgnnnnnnnnnnnnnnngatgggaccatattcttggtgccccgggggaccaagatggaggccacagactaagctggcctagaggggtggaaatggtgatgggatttctttcattcccttctgataaaggtactccccaaccctgagacccagaaggagctgagttttctagaccagaagaggatgacaatgggaacgggtgtttggaagttccaaggtgtgttcaaagaggcttgccttgacgaagggctggcatctgtcttccctgactcagcttctcaggtcttcagcctccacctcgtcta

SEQ ID NO: 10540 - DNA, 655 bp, Macaca Fascicularis
  misc_feature (1)...(655): n = A,T,C or G
tgctcaacnnnnnnnnnnnnnnncagcccagtgtcaagtccctgctgcaggtgctgggctctgtgaagaataagattgagaactttgcggcttcccaggaggacttcccagcactgctatccaaagccaagaagtacctcattgcccgtggcaagttggactgggctgagggccctgcagcaggacctgccccgcgccgttctgatcccctagtgaagagccggaggccatccttgggggagttactcctgcggcatgcacacagtccaaccagggcccggcagacggcacaattggtccttcagcctgggcgagacggagcaggacttggcctaagtgggggctcccctggggcttcaactccagttctacctgcccggggcggggcccctgaacgccaaggtgaggctcttcgagtcaagaatgctgtctactgtgcagtcattttccctgaatttctcaaggagttggctgccatctcccaggctcatgccgtcacctcacctttcttgttggagacttcagaggaaggatctggccctctcatctcaggctatgggcccctcaatccttaactttcttccatggacaatcagggccatgggtggcctgggcccgggctggggctagggcacaggctcctttttatgtttcg

SEQ ID NO: 10541 - DNA, 648 bp, Macaca Fascicularis
  misc_feature (1)...(648): n = A,T,C or G
tcnntgtagnnattcttgcctcatattttactgggccatgtttgtttcctggtactcatgtattttttttttccagatctctttccccaagttgctattgtaggagtattctgctgcgtgtggatgcagttatactcattaaagcagatctggagtctgaagtagctataaagcagctataaaactgagaaatacattcatagctgcagaaactatgataggtagaggactttgttttgttttgttttttggttttacagagaagagatttttttttcaaagaaaaaaattcccctgaattgttgcacaaatattggtttctacaccatcctaaagaaaaactaaagggtgttttggagtagaaaaaggttataaagttggaatcttaaattgtaaaattaaccattgagtatcaaagttctaaaagcagaactcattttgtgcaatgaacataaggaaagactactgtataggtgtttttttttttttttcctttaaatgaagaagagctttgcttaagggttgcatacttttattggagtaaatctgaatgatcctactcctttggagtaaaactagtgcttaccagtttccacattgtatttagcttctggttggaatttggaaaaacaaaaaaacaaaaaaaga

SEQ ID NO: 10542 - DNA, 750 bp, Macaca Fascicularis
  misc_feature (1)...(750): n = A,T,C or G
gcacagnnnnnnaccggaagggagaatttatttttggaactgaaggaagtcctggcttcctggattgaagtgcacactcgcggactttaggtttagaaatctcctcagccttcgtttgttcatggatgtgtaaactctgagggtggccctgctattcctccatgtgcctgtagtgtccccagcgtaggggtcttaggcgtagggctgaacagtccttccagagccctcgttccaatccctgccattcttgcccctgagggaccctggccactgtgagcagaagggtggcagagctgggacgaagtggcctttgccagtgggctgactgggactgtggagggaacacaggcggggaagctctgcttcagacggggcttggtggggcgggacannnnnnnnnnnnnnnnngctcccattctgaagggaggtcaagcaggatacctggtggtctccatgtggtccaagtgaggtgagatggccctcgtcctggtgttcctcatcatcttgaaaggttcttctggaacccctgtccccttagccatgagagcagaaagtacaatnnnnnnnnnnnnnnnnnnnnngagggggggtttatttctgaaagaaaaatatataaacagatcttctacatttatatttttannnnnnnnttaaatacactcnnnnnnnnnnnngccttttgagctcttgctacagtcgcctttgctactgctttaagagaatttacaggtattgataaagaacaagact

SEQ ID NO: 10543 - DNA, 755 bp, Macaca Fascicularis
  misc_feature (1)...(755): n = A,T,C or G
actgcaaggagggtcaggcacnnnnnnnnnnnnnnnnnnaaatgggacccacgtggagtaggtggcatatgcttcccagagacgggtatcatggctgtgccagaagtacatgtgagactatgnnnnnnnnnnnnnnnnnnnngagaannnnnnnnnnnnnnnnnnngttggctcagaagaaattgacagtattttgtatatatatgcccatttttatttttctttttttaaaaaagagaatgctcttatggtcccctggtgtctctttctaggatgtgtgtcactttgcttcagtgacagccctcccacccagcctggctctgctggcccggagctgaacctctccaggctctcctgttgctttgccatggagccaggtcagctctctgtctgttcnnnnnnnnnncaaggtttggcagttcctgtttctctgggcttcagtcaaggccacagagttctttttcttccctgaaagctggcagcttttgttacagaannnnnnnnnnnnnnnnnnnnnnnnnnnnnnnnnnnnnnnnnnnttcccctttccatccagtggctgctgtnnnnnnnnnnnnnntnnnnnnnnnnnnnnnnnnatgcttgggacaggagtgttacagattttggattttttcagactttggaatatttgcatatatacataacgaggtgtcttggtaggtctcatgtctaaacatgaaattcactcatgttttagatataccttctacatgtagcctaaagataactct

SEQ ID NO: 10544 - DNA, 706 bp, Macaca Fascicularis
  misc_feature (1)...(706): n = A,T,C or G
tggtcacattggaattgctgttcctgatgtacacagtgcttgtaaaaggttcgaagaactgggagtcaaatttgtgaagaaacctgatgatggtaaaatgaaaggcctggcatttattcaagatcctgatggctactggattgaaattttgaatcctaacaaaatggcaactttaatgtagtgctgtgagaattctcctttgagatttcagaaaagaggaaacaatgtgattcaagatatttacataccagaagcgtctaggactgatggatcactgtcctgattcaaattattcttcagtccatttccccttcctatttcagatgttctttttcgcctaactgttcagtcattctggttttcaagtaatgctttatcttatgtccttgaatatagttgtataactttactttttaggtaatattagaacagttcccttcagaggctgcatttgccgccttctgcctcctaaatattacttctcttcaaatctgcctttgaatcatttaaaaaaaaaattaacatgtttttgttgtggctatcttctggggtttcaattcctcagaaacaacttttttcacaaaggaaagtaaagaacactgaaacagtgttctttcagtaaagtacaaagtgtttattttacaaaagagaaggtatnnnttgagagcaattcaaaatcatgctgatgaggatactgatagaaaaa

SEQ ID NO: 10545 - DNA, 695 bp, Macaca Fascicularis
  misc_feature (1)...(695): n = A,T,C or G
gctaaagtcctcaacaagaaaannnnngaaagtaaacctannatnnnggtcaaaaatacgaagctggaaaaggaaaaagaaaagttannncaagaaagactagagaaannnnnnnnnnnnnnnnnnnnnnnnnagtgggaaatgatgtgcagagtaaagccagatgttgtccaagacaaagagacagagagaaatcttcagagaattgcaacgaggggtgtggtgcaattatttaatgctgttcagaaacatcaaaagaatgtcgatgaaaaggataaggaagctggaagttctatgagaaagcgagctaagttgatatcaactgttttcaagaacagatttcatcagtgttttgagaggaatggatggaagtacaaatgagactaattcaagcaaaaagaaaccaaaagccaaacagactgaagtgaaatcagaagagggcccaggttggacgatcatacgtgatgatttcatgatgggagcatctatgaaagacagggaccaggaaagttatgggccagacgacagcagaccagaatctgcaagtgactatgatacataaagcatcataagaaatacaattgcagtcattttatatttttatagagaaatacgtcatcctctgatagttggtgaatgataaggataccatttgtaaaaaagtcaaaacacttttgctagatttcatatttccc

SEQ ID NO: 10546 - DNA, 745 bp, Macaca Fascicularis
ccacagacagacgcacacgctgtgttatgcccagccactctgatttactggcttctgacttgtggactgcttactagtctcaagagatacagtggtggaaaaatatatccctatactcatgaagcttactgactagtagggaagatagactctaatgcaataatcacacaaatatatcatagtgagctctactaagtacgggtgtgtatgatgtatcagggaccatggcccgagaaagtgagaaggctttcctgaacaagtgacaatctaacctgccatccaaatgataaattgctaattaagcaaatggggttccaggggggagtactccaagcagagagaatggcacgtgtgtgtcatacacagggtctagtacatagttggccccctacatatgaatggattctgggtctccagattggaacagaggatggagctaagcaggaaagggcttctcatgaattcaccacacacataccagcccttctgcacactctgctccttacatcaaggcccagctgaacccagcttaggggcagatcagaagggctgcatgtaccacccttatggtcttgccgaacacaccaagaaacccgatggcttccaaattttctgaccctacgaacaggtccctgatactggtgtggagaaagctcaagagagaaccatctggcctgagcccactgtgaggctgtttgtggtcctggcagaaaagcaacaactcgctccccttcccatgtatcaa

SEQ ID NO: 10547 - DNA, 736 bp, Macaca Fascicularis
  misc_feature (1)...(736): n = A,T,C or G
catgtcagtagctttgtctgtgtgatctgtgtgtgtgtggcttggggaatctacccagtgcaggtctaggaggaggnttcaggacctcnncntagagcaggctggctggctcagagtttgtccctagcgatccactagcccacagcaattctccctacctgnnnnnnnnnnnnnnnnnnnnnnnggctctcccagaaagtgagaagggaactcannnnnnnnnnnnnnncatggtggggagaacagcctgtgctggggtcaagccagagggaggatgagccctgaggcacctggagagtcagcctgggtgaggaaggggaggaggtggtccctgatctcagggcaggaaagagccagggggaagctggagccatagcacatggctctcagagccctcagctgtgtcctgtcccccagtctagggacagnnnnnnnnnnnnnnnnnnnnnnngggcccaggcctatgcctcnnnnnnnnnnnnnnnnnnnnnttcggccctgattgtgggcatcctcatgaccannnnnnnnnnnnnnnnnnnnnnnnnnnnnnnnnnnnnaatctaccatgttatgtcacagatcgtacaggaaaaacagcgttactagtagctgcccatagcccacgacccttgtactccactttgcaatgctggccctcacgctggggctgttgtccctgtccccttggtcctgcccctagatacagcattttatccccacacaccctccacaa

SEQ ID NO: 10548 - DNA, 364 bp, Macaca Fascicularis
  misc_feature (1)...(364): n = A,T,C or G
gggagggggtccacaagcacgcccagcnnnnnnnnnnnnnnnnnngcttcgtaattggaacctttgacctgatctaaagtggactttgtagcaacaagaggagcatcagcgggtcggggagggggttgggggtgggctggggggtgggggaccctttgtggattttctttgcctttgtgtttgatgctgtcgtgtgggaaaagtcaactctgatgccaccgttgcgggccggacgaaggatgctttcttcctagaggctccgagctgagctgcgaactcgccccccacccttgggacaagaagacccagtcacatcactgcacccgtcctgtgtcctcaccattgctatgcaaagtgattcttg

SEQ ID NO: 10549 - DNA, 720 bp, Macaca Fascicularis
  misc_feature (1)...(720): n = A,T,C or G
cgtaataatctnntgatgttttaaacattggttccctagtcaccatagttaccacttgtattttaagtcatttaaacaagccatggtggggcatttttcgcctcagtttgaggagaaaaatcttgacgtcattactcttaaattattacattttggagaataagagggcattttattttattggttactnnnnnnnnnnnnnnnnnnnnnatatctttccaagagttgagacgctgnnnnnnnnnnnnnnnnnnnnnnnnnntaaagctgatgcctaggagcttttaaagggatcctttcaaaaggatcacttagcaaacacatgttgacttttactgatgtatgaatattattactctaaaaatagaaagaccagtaatatataagtcactttacagtgctacttcacacttaaaagtnnnnnnnnnnnnnnnnnnnnnnttgcatgcnnnnnnnnnnnnnnnnnnnnnnnnnnnnnnaggtgatagattattttaaaaatgagcaaacaaaagtgggtaatgatagaagnnnnnnnnnnnnnnnnnnnnnctgtatgtttacagactaccatactgtaaatatgnnnnnnnnnnnnnnnnnnnnngaaacttatacatttcttctctcctttctcctaagtttcatgcagatgaatatgaggtaatannnnnnnnnnnnnnnnnnnnnnnnnnnnaataatatgactggcaagaattg

SEQ ID NO: 10550 - DNA, 722 bp, Macaca Fascicularis
  misc_feature (1)...(722): n = A,T,C or G
aggcacttacaggaacccactaaccaacttacgttgcctagtggaatccactagagttcaggccacccacttggtgcctccagcatcttcatgcagccatggagtgtcgnnnnnnnnnnnnnnnnnnnnnnnnnnnnnnnntgtctctatgtagcctgcccacaggtcattgtggcttcgtagtttcatcttttctgcagctattactacacctgcatccttattgtcacttttactttatgtttacttagagaaaactgaagactgccagggcaatttagataacattggnnnnnnnnnnnnnnnnnnnnnnnnnnnnnnnnnnnnnnnnttcttttcccccaccaaatgaagtatatgggctttttataagacctatttttcatgttactcagaatcctagcatattatcatatcttaatttatattatagcagatcatattgtcttgtccataggaagtttgcatttttagaaatctgtacacagagaataccataatgaggaagaaaagttgnnnnnnnnnnnnnnnnnnnnnnnnnncatcagtcagcactttacattagtctttcttattatcaaaagcattcctcattttaaactgtttaaaaagcaattcataaattttgtacctgtccttagcagatttcacagacatcaggtgtccttcgttttaacatattccactacaagattcacagacatcnnnngtcctttgtttta

SEQ ID NO: 10551 - DNA, 690 bp, Macaca Fascicularis
  misc_feature (1)...(690): n = A,T,C or G
ctgctggctatgtattcccagaatcagaagcacatagaattacagaattttaaggaatcttagaatgaattaaaacacgttctagtattgtcacgtctgttgaacattctggtcaagggatcgtttagatagaaaacttgagtctcagaaagattaggattcaagaagacataggaattggaagaaatgagatttgtactcatgttaaatcccagtattcttcctactttttatatcctattggcctgagttttggtaatacaaacgggagtgagtctcgtgcacccagtgtctagaatgagtgtggaattgactagtgaagnnnnnnnnnnnnnnnnnnnnnggaatgggcagggcaaggccaagtttgaagagaaacaatgatcgatcgataaattccaaagatgaccgacacacagaatgttgggaattatctacaaaggcgccttaaaatagaaggttcaagggagctctaaaaactttgctgccttttttttttttaatttatcaaggactgacagatttttactgaaagatgttaaaacattttgagacactgaaggagtggctacagcagagagaaatcttcgtggcaccatctacttccatcctgacttacagaaggtggtttagagcccctggaatactaagggnnnnnnnnnnnnnnnnnnnnnnnnnnntctgtggcca

SEQ ID NO: 10552 - DNA, 568 bp, Macaca Fascicularis
  misc_feature (1)...(568): n = A,T,C or G
gtaaaaccatcnttctggccaaatctcttaacacgttttttacttcagtagtgagggcaatgagaagctttattaagaaagatcctatttaaagggctaagttggtgttgaaagcatgctgacataaagtccagtatttgaggatataaagaggacaggcactgnnnnnnnnnnnnnnnnnnnntttattatactttaatgggatagtgcttcttgaccattatagaacaacaagctgtcaaagggctaatacagatgacccagacctgacattaaatcctgttgattagaaataattaaatgagtgatttattcatttatctcctctgccaaatatacttagccccacaaaaattccccagctcagttaacatttttttgtttttcactttaggcatctcttaggcaaatagagatataaattgtaataggaaacaatctctaaatgtgaaactgaatagagcttcagtctggctctctaataggacaaaagccagtccatgtgttgtctctacctgatttagctttttcttttctttgaacaattcggcatgaattgaaaccaggt

SEQ ID NO: 10553 - DNA, 601 bp, Macaca Fascicularis
ctgagattgtggactgtgacgggtgtaccattgactggaagaaaggaaagaatgttactgtcaaaaccatcaagaaaaagcagaagcataagggtcgaggcactgttagaacaattacgaaacaagtacccaatgagtcctttttcaacttcttcaatccactgaaagcatccggggatggagaatcactggatgaagattctgaattcacattagcctctgattttgaaattggacactttttccgtgagcggatagtcccgcgggctgtgctgtacttcactggggaggccatagaggatgatgacaattttgaagaaggtgaagaaggagaagaggaggaattagaaggtgacgaggagggagaagacgaggatgatgcagaaattaaccccaagaaggaacccagccagccggcggaatgcaagcagcagtaggaagcggaggcgggtgcctggcagaccgactgtcgggactccaggcctgtgggcggggccccggtccttgccgcagcacaatcccgtcgacagagcttactccatctaactcgttttcaagtgcatgattttcactttcacttttcctttttccttattatttg

SEQ ID NO: 10554 - DNA, 460 bp, Macaca Fascicularis
cgtttttataccttcccgcgcggacgccggcgctgccaacggaagggcgggcagggcggcgcgtgattaggctctgttgccatgaaggtgaagattaagtgctggaatggcgtggccacttggctctgggtggccaacgatgagaactgtggcatctgcaggatggcatttaacggctgctgccccgactgcaaggtgcctggcgacgactgcccgctggtgtggggccagtgctcccactgcttccacatgcactgcatcctcaagtggctgcacgcgcagcaggtgcagcagcactgccccatgtgtcgccaggaatggaagttcaaggagtgaggcccagcctggccctcgctggagggggtgtcccgcggccccttcctcatgctggcgctgatggctgcggtagctgctgctggggacagcgcccctgggctgtaacaaggtggaaacaagggct

SEQ ID NO: 10555 - DNA, 745 bp, Macaca Fascicularis
  misc_feature (1)...(745): n = A,T,C or G
tgccaactctacctctgatcannnnnntgatccaaactgctttctttattcctaaaaaatgaagnnnnnnnnnnnnnnnntaaggtgaagggagagaatgaagccaggggctggcacaaatctaatagctgcgaagggctcagtcagtatcagcgatnnnnnnnnnnnnnnnnnnnnnnnnnnnnnnnnnnnnnnntttcctttccataaaaggaagggtccttgtagctgagtggaannnnnnnnnnnnnnnnnnnnnnnnnnnnnnnnnnnnntccatatccagaggaatgtgattgtgatccccnnnnnnnnnnnnnnnnnnnnnnnnnnnnnnnnnnnnnnngtctttgactttaaattgagtgatgannnnnnnnnnnnnnnnnnnnncttcaacagaaactggagggcctctaacgtattgcaatcctctcatcaggaagactatccctccgatgcagaatattgaggttgaatctcctggtgacatcacacaggggattatctttcttcgctgaagtgtgactatctccatcaagtcctattttagccacgcttatcagagatcacagtgaacttcatcctcctgtagatcagaatagaggtgctgttttagacatgtatttctgtaagtgcaactaggatcagaatatcacaggaaaacatcgcttgaataagcagatgacaattttttccacttcnnnnatctgaacaaatgtttgtcaagcacaagaaactctgc

SEQ ID NO: 10556 - DNA, 738 bp, Macaca Fascicularis
ttcatgtttaaagacctaaatttctatgcacaaggaataaagggccacttaccaagtgtaaatcacaacataggctaccaaaatatttcttatttgctaggagaacaaagctgtcacagtgcataatagttggacagagatggctaaaacagaggcaaattcagatttggaaacaggtgtcctctttattattgattgccaagatctgaaaatcttcagtgtcttataagatgacaatgaagcagcccctgaacagcatggagttgctgtgagcatgttcattgcagacctttgcgttgggtcctgggaatctgagctttgttctctgtgcatggtggataattgaaaccaagaggacgtgggatagaccttgtgacagatcaattctgcgacctctgttttctgggtcacattattcattgttaatttaaatacaggactaccaaacagtacaaacctaccatgagtctggtggaaaagtaaaagtaaaagctgcacaagttacatacagtttattattctaatgtacaactatttgcatataatgtgatttaatttattgttgttttgtgtagaaaaggagaactaatgactgtggatataacccctgttttgtataatatattttatttcttgtgcaaactggtcatttgaaatatctacttcatttgatgtttggatataaatgtgtatgtgtccttgtaaatgtttctattaagcaagaatgccacatactca

SEQ ID NO: 10557 - DNA, 695 bp, Macaca Fascicularis
  misc_feature (1)...(695): n = A,T,C or G
gagctggtcgccctcaaggagagaatgagaagcgccgtgcggagagagcggagcagcagaggattcgtgcagagaaggagagggagcgccagaacagactggcggaggaaaaagccagaagagaggaggaggatgccaagaggagggcagannnnnnnnnnnnnnnnnnnnaagctctgtcttccatgggagccaactacagcagctannnnnnnnnnnnngaccagaagagaggcaagaagcagacggcccgcgaaatgaagaagaagattcttgctgagagacgcaagccgctcaacatcgaccacnnnnnnnnnnnnaaactgagggacaaagctaaggagctctgggagaccctgcaccagctggagaccgacaagttcgagtttggggagaagttgaaacgccagaaatnnnnnnnnnnnnnnnnnnnnnnnnnagtgcagatgctggccaagttcagcaagaaggctgggaccccagccaagggcaaagtcggcgggcgctggaagtagagaggacagaaaggcccctcgaggcagagaccctccgccctcgtgcnnnnnnnnnnnnnnnnngggactccacatcctccggcccccacagtcctgtcaggggctccctgacaatcctggggnnnnnnnnnnnnnnncnnnnnnnnnnnnnnnnnnnnnnnnnnnnnnnnnnnatcccct

SEQ ID NO: 10558 - DNA, 525 bp, Macaca Fascicularis
  misc_feature (1)...(525): n = A,T,C or G
gcagaaaagtagaccccatggcgattnnnnnnnnnnnnnnngcagacgttggggaatatgtgcggcatgaagagacgttgacttaaannnnnnnnnnnnnnnnnnnnngcggctgtgtggaagggccgagctttgtttcctgtgtttgtgtggactccaccatcatcttgaattttgtcaacactctgacctcttcagggacttcttatttactgtactctctatcattgacaaatgcaggctggattcttattatatacagagagagctcaaaaatggnnnnnnnnnnntttgtgtttgtgatgaaatagaatactctgtttcatatttgaatcagagggcttcttgttnnnnnnnnnnnnnnnnnnatcattggaactaggaacaagaatagcttattgttatctgtgataacactttgttttctaaactcatgataagaacacagggattggccgggcgcggtcgctcacgcctgtaatcccagcactttgggaggccgagacgggtggatcacgaggtcag

SEQ ID NO: 10559 - DNA, 1135 bp, Macaca Fascicularis
  misc_feature (1)...(1135): n = A,T,C or G
tgcccacaaggactgtgaggtggccccactgcccaccattnnnnacgccagaagannnnnnnnnnnnnnnnnnnnnnnnnnntagtgnnnnnnnnnnnnnnnnnnnnnnnnnnnnnnnnnnnnnnngaggaggtgtgccagaccattgaggacaatagccggagnnnnnnnnnnnnnnnnnnnnnnnnnnnnnagagcctgtgcgcagtgctggaggagcgcaagggcgagctgctgcaggcgctggcccgggagcaagaggagaagctgcagcgcgtccnnnnnnnnnnnnnnnnnnnnnnnnnncacctggaggcctnnnnnnnnnnnnnnnnnnnnnnnnttcagtccatggaagagccacagatggcgctctacctccagcaggccaaggagctgatcaataaggtcggggccatgtcgaaggtggagctggcagggcggccggagccaggctatgagagcatggagcaattcaccnnnnnnnnnnnnnnnnnnnnnnnnnnnnnnnnnnnnnnnnnnnnnnnnnnnnncgcttccggggaggaagaagatgaggaggtggccctggacggagacgagggcagcgcggggccggaggaagagcggccggatgggccttaaggcctgcgccaacccgaccctgctcgagcgcccgcgctagggtcggggaggatatgcgcagagaccgcggcgtcgcccaaataggcgcccgccccaggaggatatcannnnnnnnnnnnnnnnnccccgacccgtatctcctttcgctgcccaatgccgcagcctcggcttcggaggcgacccgcccaccatcttgcccttcccagaacctgagactatccggggggcggaagccaaatgaacccctattgggcnnnnnnnnnnnnnnnnnnnnnnnatggtgagcccagcgccctgggaaaagggtcgagggcggggcggtggtgctgggacctctgaggtcctagggatttggggaccnnnnnnnnnnnnaggcacctggctgacctgggtgaaagccgctctcctggagccccccacagcattttgttcccctcccgctggcccgggggccccaccttcccacgggctcccacgctgtnntgagtgccccgcccccacgacagaagcc

SEQ ID NO: 10560 - DNA, 786 bp, Macaca Fascicularis
  misc_feature (1)...(786): n = A,T,C or G
ggataaacacntttgagagtnnntggtagtagannngagtattcangactgaatgttaggcaggtagacagtgactggttaggctgagaaacccataagtactttccttgagttctgcttccactattacttactttacaatggatgttaatgttcagatttcatcttatttactaaaggtggagaaaggatgtggaagtaggggttatgggctctcaaaagtagatttatagagattttttttttttaatcactgttnnnnnnnnnnnnnnnnnnnnnnnnnnnnnnnnnnnnnnnnnnnnnnnnnnnnnaaatcagttagacttgacaagcttcagggaaagaattttcaacaactgcaatctttgattgttttactatgggaacttgcagggatataattgacaacattataataataataggtaaaatatttaaggaattctcaaatgctttatggacctcttaaaaaatgtggttagccaattgattcaacttttatgggtttatatgctctcatataaaccaatttgttaaaaatccttggaaacacatttttagtagaggttctcatttacttataaagattaataatcaaattactacaattaatatccatttagctttttcagtagtctaaatatttggaaactccctagccatctataacactagttcaaaacaaggctaattcataacctgtattaaaaatgtttgaagtggtatcaagagcattgtttatgcatgttgtgatactatttgtggaattgtataatgagctatttc

SEQ ID NO: 10561 - DNA, 444 bp, Macaca Fascicularis
  misc_feature (1)...(444): n = A,T,C or G
attagccattcaatggagaagccggagagagtcaggcaaagatggtannnnnnnnnnnnnnnnnnnngggcggggcggggcggggcggggcggagagggaacagacgggctggctgcctacttgcattccgctaggacactgaaaacccagaaaacaaaacagacagtaaactacccttgtttcttatgtatctcagtgcagagacgggggtggagggcagagaagagggggagaccaggctgaaggaggaggagcagagggaaggggacgctaagggggaagcacaccaaatccattagtactatatatagatactcgtatatactgcgtttcttagcctaagaagaaacttgtttgacgggacgggcggcctttgcggtccgcgatgctggtgctggtcgggcgcacggatctcccgggaggggccgaagcggggctggccc

SEQ ID NO: 10562 - DNA, 706 bp, Macaca Fascicularis
  misc_feature (1)...(706): n = A,T,C or G
actgcaagtggcatcagttggctgtgatgcttcgaaataggtctgctcctcacagctttgggaatctaaatggaagaagaaaagggagaagttaacagcctccactggggcaagtttgtgagcacataggcacttagtcataggaaacatattacatgcaggccctagcctgggggaggaaagtggatagacagaaaatcattaggtaatttaagtactaaattgggcagggctttttagtatcaaatcactactagactgtttaatttgttaaattctctctaggatggtggcttataacctaaccaaagttatcgatattcttggtaaactcagaggcctgaagttctttgatagacctgaaataagtgtgctaagtcagtggttcccaagtctggctgatcaggaatacctgggaagtttgttaaaatttttttaaatgttttaagatttttgggtcctgagccacatgtggcannnnnnnnnnnnnnnnnnnnnnnnnnnnnnnnnnnnnnnnnnnnnnnnnnnnnnnnnnnnnnnnnnnnnnnnnnnnnnnnnnnnnnnnnnnnnnnnnnnnnnnnnnnnnnnnnnnnnnnnnnnnnnnnnnnnnnnnnnnnnnnnnnnnnnnnnnnnnnnnnnnnnnnnnnnnnnnnnnnnnnnnnnnnnnnnnnnnnnnnnnnnnnnnnnnnnnnnnnnnnnnnnnnnn

SEQ ID NO: 10563 - DNA, 737 bp, Macaca Fascicularis
  misc_feature (1)...(737): n = A,T,C or G
cacgtgtgcactccaccantctggccattccccgnnnannnnnncccagaacgtcactgtgctcagagacaaactggtcaagtgtgannnnnnnnnnnnnnnnnnnnnnnnnnnnnnnnnnnnnnntctgctcctgctctccctctcccttctccaggccacggatttcatgtccctgtgactggtggggcccatggaggagataggaagcctcaaattccagtgcagagatcctacttctctgaatcggctgaccccctccccacagtccctcacacctcgaggagaagtggggaccccatccctcatcaggagtnnnnnnnnnnnnnnnnnnnntctacccacatccccgcggcacctcaccctctccacacacctctggctgtctttttgtactctttgttccagagctgcttctgtctggtttatttagggtttatccttccttttctttgagagttcgtgaagagggaagccaggattggggacctgatagagagtgagagcatgtgaggggtagtgggatggtggggtaccagcnnnnnnnnnnnnnnnnnnnnnnnnnnnnnnnnncagacctgggagagacttggatgaggagtggttgggctgtgcctgaacctagcacggacacagtctgtcctgagagcactcctcagcaggcatgnnnnnnnnnnnnnnnnnnnnnnnntgagggcaccaccaagaatttgtggcctaccttgtgagggagagaa

SEQ ID NO: 10564 - DNA, 747 bp, Macaca Fascicularis
  misc_feature (1)...(747): n = A,T,C or G
gcccatgcacccagtgctganntcagcgtnnnggctttgtagtccaggtggcggcagtggtggcatgagcagggcnnngggccggagggacaacgaactcatcggccagactgtgcgcatctcccaggggccctacaaaggctacatcggtgtggtgaaggatgccacagagtccacggcccgtgtggagctgcactccacctgccagaccatctctgtggaccgtcagcggctcaccacggtgggctcacggcgcccgggtggcatgacctcgacgtatgggcggacgcccatgtatggctcccagacgcccatgtatggctctggctcccgaacacccatgtatggctcacagacgcccctccaggatggcagccgcaccccacactacggctcgcagacgcccctgcatgatggcagccgcactcctgcccagagtggggcctgggaccccaacaaccccaacacgccatcacgggctgaggaagaatatgagtatgccttcgacgatgagcccaccccgtccccgcaggcctatgggggaacccccaatccccaaacacctggctacccagacccctcgtccccacaggtcaacccacagtacaacccgcagacaccagggacgccggccatgtacaacacagaccagttctctccctatgctgccccctccccacaaggttcctaccagcccagccccagtccccagagctgagtcctgtatcagccctttatcctcacaca

SEQ ID NO: 10565 - DNA, 733 bp, Macaca Fascicularis
  misc_feature (1)...(733): n = A,T,C or G
agggggtgaaggccnnnnnggagccannnccaaaggcaacagagggcggtggagaggnnctgcccagcgggtctgagtgtgaggtgccactcatgggcttcccagggcctggcctccagtcacccctccacgcaaagccctacatttaagccagggagagacagggcagccggggccaggctctcagccagtgagacggccagccccctcctgctgccacaacacgtaagttctcagtcccaacctcggggacgtgtgcagacagggctgtgtgaccacagctgggtcctgtcccctctggaccttgtctcctcatctgtgagatgccgtggcccagctgatgagccctaatgtccccagaaccgagtgcctatgaggacggcgtccgccctgccctctgcaacgtgcagtccctcggcacgccggccctgccatgtnnnnnnnnnnnnnnnnnnnnnnctgctgggctctcccactccaagcagaccctgggggtcagtgaaggaagctcccagaaagagcagagggagagcaggtgggcgacggggctgtgtgactctagctttggccccaggaagcgaaggaacaaaagaaactggaaaggaagatgctttagaaacatgttctgctttttaaaaaaaaatacatatatttataagagatcctttcccatttattctgggaagatgtttttcaaactcagagacaaggactttggtttttgtaagacaaa

SEQ ID NO: 10566 - DNA, 704 bp, Macaca Fascicularis
  misc_feature (1)...(704): n = A,T,C or G
gaagagattataaaaagacatttcacattaaagatttgcagtcgtgggacacggtttggaaaacactgatttataaggttatgcatattacaaatagctcccaaatggttaaactggtattctaagatgaaagctgaatgaggtgaataaatgcatgtgaactaatgtttagtttagaaagttagagcttgtctcaagtcagtacagctcttaagataatacagtaacactaccttttatttctttgctcttttatccctttcaggttcgatttgctgctttgattactgtgttaacactggctgaaaaactaaaggagaattatattgtcttgctaccagaatccattcctttcttaacnnagttgatggaaggtaattcccaaactattcccaactattaaacaattaaggaataattcagtaaaattctgtgaaaatgtgcccaatgataatgcagatttggatataacatgactagcagttgatccagtcctcatacaggcggctccagtctcaaatacaggcaggctcgagctcctgttttgagttgggtggagggagcgagttgtgaagtgaccacctcgtgatcatttgagagttcgtttacagtgtgatcttcactgtctttacttttgtggtgttttttgatcatacaagcagattacagtagtgtttttaattacctcatacatttatatgatt

SEQ ID NO: 10567 - DNA, 684 bp, Macaca Fascicularis
  misc_feature (1)...(684): n = A,T,C or G
actcatttagcagtagttctattgggcactagtagtcagttgggagtggttgctataccttggcttcatttatatgaattgtcaatttattaaataataaaaaagaaaatcccagttattgcagtagagtgataggacgttctatgcttacagaaaatatagccatgattgaaatcaaatagtaaaggctgttctggcttttatcttcttagctcatcttaaataagtagtacacttggatgcagtgcgtctgaagtgccaatcagttgtaacacaaattgaacttnnnnnnnnnnnnnnnnnnnntgtgtttggattttcgatcaattctttaattttggaagcctataatacagttttctatgcttggagaaaaaaattaaatggatcactgatattttagtcattctgcttctcatctaaatatttccatattctgtattaggagaaaattacccacccagtaccagctcccctctcaaacccccaacccaaaaccaagcattttggaataagtctccttagttttagagtgtggattgtataaccgatgtagtctttgacgtacttatttggtttggtgttaatttgactatatgtgnnnnnnnnnnnnnnnnnntgcttttctttggtcaaagttttctgtttattttgcttgtcattttcgatgtactttaaaaaggt

SEQ ID NO: 10568 - DNA, 719 bp, Macaca Fascicularis
  misc_feature (1)...(719): n = A,T,C or G
gggccggctcacctggaggaagatgtgcaggaagctattgggnnnnnnnnnnnnnnnnnnnnnnnnnnnnnnnnnnnnnnnnnnnnnnngcaggcagccgggagccggggtgctgctgcggtatgggagccagcttgctcctgaaacnnnnnnnnnnnnnnnnnnnnnnnagctctttgggccctggggtgaaatcgtgagcccctcnnnnnnnncagccacgagtaaggcagggggctgnnnnnnnnnnnnnnnnnnggctccgcacgcccggattgccatccatgccctggctaccaacatggacaatgggaccaagggagccaatgccagctacatctcgatccgggacatccacagcttgaggaccacaacgttccatgggcagcaggtgctctactgggagtcagagagcagccaggctgagatggagttcagcgaggacttcctnnnnnnnnnnnnnnnnnnnnnnnnnnnnnnnnnnnnnnnnnnnnnntgggtaccggaggggcaggaccctcagtcctggaagggaaaggaagggacctgacggtnnnnnnnnnnnnnnnnnnnnnnnnnnnnnnnnnnnnnnnnnnnnctctggtctcagtgctttccaattcgaactttttccaatcttaggtatctactttagagtcttctccaatgtccaaaaggctagggggttggaggtggggattctggaaaggcagccccca

SEQ ID NO: 10569 - DNA, 529 bp, Macaca Fascicularis
  misc_feature (1)...(529): n = A,T,C or G
catatgcaatgaatgtnnnnngnnncaccacaaagcgcactcttattatacatcagcgaactcatacaggagaaaaaccctatgaatgcaatgaatgtggtaaagccttcagccagaaaatatgcctcatacaacatgagagatgtcatacaggaaagacnnnnnnnnnnnnnnnnnnnnnnnnnnnnnnnnnnnnnnnnnnnnnnnnnnnnnnnnnnnnnnnnnnnnnnnnnnnnnnnnnnnnnnnnnnnnnnnncaatnnnnnnnnnnnnnnnntcaccacaaagtcagtactcaatgtacatcaaagaacgcatacaggagagaggccgtatggatgcagtgattgtgagaaagccttctcccacttatcaaaccttgtcaaacataagaaaatgcacacaagagaaatgggtagaatcagtcaagttgaaaactcctgtaatgaagnnnnnnnnnnnnnnnnnnnnnnnnnnnnnnnnnnnnnnnnaaaaccctactagtgcagtgaggccaggcacggtggccc

SEQ ID NO: 10570 - DNA, 636 bp, Macaca Fascicularis
  misc_feature (1)...(636): n = A,T,C or G
gacgccgcctggnnnnnnnngcgcaccaggtnnnnnnnnnnnnnnnnnnncatcatcctgtacgggcagagcatcggcaaggtgcccaccgtggacctggcctcgcgctacgagtgcgccgcggtggtgctgcactcaccgctcacctcgggcatgcgcgtcgccttccccgacaccaagaagacctactgcttcgacgccttccccaacatcgagaaggtgtccaagatcacgtcgcccgtgctcatcatccacggcacggaggacgaggtgatcgacttctcgcacgggctggccctctacgagcgctgccccaaggccgtggagccgctgtgggtggagggcgccgggcacaacgacatcgagctctacaaccagtacatggagcgcctgcgccgcttcatctcccaggagctgcccagccagcgcgcctagcggcggccggggccccaaccggccggacctcagcaataaggcggcccctggacctcaccccgcgccggccccccaggggctgcatgtggacccccgggcggcccaggggaccccgccccgacccaggggccgtggactatgtacaggcaacagagctacgcactcctttcctttggaagcaagaagaaaatacggaaaacg

SEQ ID NO: 10571 - DNA, 503 bp, Macaca Fascicularis
agaattccagtcaataatggctgtccacggttctcagatgtgttaatatgaatacatgctgaatttcaccattcctttctcaaagagactacttttaattttcatttctgggactttgatttatataaactatgttttcagttcattgttatttttcacatctttgaaactttgagcatttttttataagccagcaattttattttatatagcattgtaaaatacacttctaggaaattttaggaaagatttaactttttaaatctatttggcataaaccctgatttttttttttccatttgacaaaataatacaattccacagaactaggtcagcagattctctgatttgtaatgtcattcacctgtgaagttttaagtctctctggtgctaagaattggcactttatagcctggtgcctttacttttaatttgagagaacctactgctagtcccaggaaacgtacttggaaataagtcagctatttttttccccagtgata

SEQ ID NO: 10572 - DNA, 756 bp, Macaca Fascicularis
  misc_feature (1)...(756): n = A,T,C or G
gacaaatacacatttgaaaatttccagtatgaatctagagcannnnnnaatcacagtattgcnnnnnnnnnnnggaaagtggatggaagtaacttggaaggtggttcgcagcaggcccccttgactcctcccaacaccccagatccacgaagccctccaaatccagaaaacattgcaccaggatattctggaccactgaaggaaattcctcccgaaaaattcaacaccacagctgtccctaagtactatcannntccttgggaacaagccattagcaannnnnnnnnnnnnnnagaggctttatatcctaaacttttcaagcctgaaggaaaggcagaactgcctgattacaggagctttaacagagttgccaccccatttggaggttttgaaaaagcatcaaaaatcgttaaatttaaagttccagattttgagctacnnnnnnnnnnnnnnnnnnnnnnnatgtcctttgtcaatcccctttctggcagacggtcctttnnnnnnnnnnnnaagggatggatatctgagaatattcctatagtgataacaactgaacctacagatgataccaccataccagaatcagaagacctatgaaaagaaagttgtatgtgccacataaaactctgaatataaaagttgctgttttactattttannnnnnnnnnnnnnnnnntgcatttttcattagtagcaataatagcaatttagtgattttccttttgtgacattcaatttcaatctcagatcaaa

SEQ ID NO: 10573 - DNA, 766 bp, Macaca Fascicularis
  misc_feature (1)...(766): n = A,T,C or G
ccatagtgatagccaagtgcatcannnnnnttaagctgacaaaatagcagaattagagaagttaaaaagaaaagataaatggttttatgataatgttaaccatcttttgttagtaaacatgcgttttattattttaatcattgatgccttacaaaagaaaacatctttctaataccctgaatatgtgctgttcttagagtcatctatggattcttttaaaggttgtttgtgaaattagttttccctctttagaatctcaggagtnnnnnnnnnnnnnnnnnnnnnnntgtcagtggataagacagggcttgttaactgttctggcagtagttaaaattaaattgtacacttctcagcctgggttcatgcttcatcattaatacacctcacagtgcctaagaaacatttacttactggtcagaaggtattttggaagagttattaaggaggaacaaataatttaagttcttaaaaattacctaaaacaccccaaatataaaaagaagccttcacacctattctgtgtttaggatgtcttaaattattagcagtactccttttttaaaaaacactgtaaaagtaaccataaatatgtgaggacttactattttaaatgaaatgagctccatagattagttttgaatataaaatatataaaagtgcttcagtggtttatgtaggctttaaaaacacgttatcttacagtcctttaaagcagctgtagagtttgtatcatttttcaagccaatttcagtcatggattgaa

SEQ ID NO: 10574 - DNA, 593 bp, Macaca Fascicularis
  misc_feature (1)...(593): n = A,T,C or G
agagtgtcaannnnnncagctggattcaacctggcaggnnnnnnnnnnnnnnnttctccatcaaaatcccattctcatgtccagaggcccagtgggtcatctcccaaggtgggtgtggcccctgacctcaggggccttgctggtgctgttacctcccacctgctccatcctgaggcctcacccagaagtgggaccctccccttcctcaccagagccaccgtcannnnnnnnnnnnnnntggagcgtcaacaacaaccagaaaggtttctgcccagggcaggcttcttaaggcccttaggaagttttgtgccttccaagtgctgaggaagacctggtcagcctaaatcttcccagtcctgctgtggagctgtcagtcactggaataataagctcctggttccttgggagtcctgggggcacgcctttcgtgctgtgtggcagggttcctctctagacaagtacacaggccctgccaccctgacatcaaactgctgtactatgatcacagtccctgtgccatccttttccaaggctggggctcacaccaggtttttgannnnnnnnnnnnnnnnnnnnagacttttgcttccact

SEQ ID NO: 10575 - DNA, 746 bp, Macaca Fascicularis
  misc_feature (1)...(746): n = A,T,C or G
cagcatgaacccgtccatccggttgctgntcatcctgcgagacccgtcggagcgcgtgctatctgactacacccaagtgttctacaaccacatgcagaagcgcaagccctacccgtccatcgaggagttcctggtgcgcgacggccggctcaacgtggactacaaggccctcaaccgcagcctctaccacgtgcacatgcnnnnnnnnntgcgcttcttcccgctgcgccacatccacattnnnnnnnnnnnnnnnnnnnncagggatcctttccccgagatccaaaaggtcgagaggttcctgannnnnnnnnnnnnnnnnnnnnnnnnnnnnnnnnnnnnnnacaaaaccaagggcttttactgcctgcgggacagcggccgggaccgctgcttacatgagtccaaaggccgggcgcacccccaagtagatcccaaactactcaataaactgcacgaatattttcatgagccaaatannnnnnnnnnnnnnnnnnnnnnnnnnnnnnnnnnnnnnnnnnnnnnnnnnnnnngctaagctcagaaactttcctactgtaagttctggtgtacatctgggggaggggaaagaattttaaaaaagcatttaaggtataatttatttgtaaaatccataaagtacttctgtacagtattagattcacaattgccatatatactagttatatttttctacttgttaaatgaagggcattttgtattgttttnnnntggttgttaacatt

SEQ ID NO: 10576 - DNA, 723 bp, Macaca Fascicularis
  misc_feature (1)...(723): n = A,T,C or G
tccatgccctggggagtgagcnnnntgcggtgggnnnnnnnnnnnnnnnnnnnnnnnnnnnnnncnntgagccctccttcttgnnnnnnnnnnnnnnnggaggagcctggagtgtaattacctgtcatctggnnnnnnnnnnnnnnnngcccgcccgatgctgggcctgaactgtcctaggtgaccccatctctgnnnnnnnnnnnnnnaatggagaggagaaccctagacattctgcatgcctggggacggggtggatgaaggaaagggtctgtaaggactcagtgttgactgtgggtccccctggggtgggtttagcaggctgcagcaggcagaggagagcaccccctgagagtgtgtgggagaaggcctcgctgtcatgtgaatccctcaatacccctagtatttggctgggtgttcagggactttggaagctctattgcaggtgtctgggggtctaggactttagggatctggggaaggaccaacccatgccctgccaagcctggagcccctgtgttgggggggtgaggcagggagcctggagccccggtggaggggaggtaaggcgggggagcctggagcccccgtgtgggggggggcgaggcgggggaggggaggtggtcactgagttgaccttctgaacatgagtgtcaactccaggccttgcttccaggcccttccctctgttggaaagggggtgtgccctggcccccaaggagg

SEQ ID NO: 10577 - DNA, 764 bp, Macaca Fascicularis
  misc_feature (1)...(764): n = A,T,C or G
cagtacaatccaaatttgtcgtagacttgtgcaatattnactgttgtgggttggagaaaagtggaaagctacactgggaagaaactcccttcccttcaatttctcagtgacatggatgaggggtcctcaaaagacctcaagtttcccaaaccgaatcacctgaagaaggacagctcctgctgttgccccttagtgaggaatcttcccccacttcctctacccccaggttcccctccccacagccagtcccctttcctggatttcttaactgctcaattttgactcaaaggtgctatttaccaaacactctccctacccattcctgccagctctgcctccttttcaactctccacattttgtattgccttcccagaccctgcttccagtctttattgctttaaagttcactttgggcccacagacccaagagctaattttctggcttgtgggtggaaacaaagctgtgaatctctgcaggctgtgttcttgcatcttgtctgcaaacaggtccctgcctttttagaagcagccccatggtctcatgcttaatcttgtctctcttctcttcttgatgatgttcactttaaaaacaacgaaacccccgagctggactgttgagcaggcctgtctctcctattaagtaaaaataaataatagtagcatgtttgtaagctattctgacagaaaagacaaaggttactaattgtatgatagtgtttttatatggaagaatgtacagcttatggacaaatgtacacctttt

SEQ ID NO: 10578 - DNA, 762 bp, Macaca Fascicularis
  misc_feature (1)...(762): n = A,T,C or G
ggaagaccttgnannncnnctgcacggtgtttggaaaccccgaccccgaagtggtttggttcaagaacgaccaggacatcgagctcagcgagcacttctcggtgaaggtggagcaggccaaatacgtcagcatgaccatcaaaggcgtgacctctgaggactcgggcaagtacagcatcaacgtgaagaacaagtatggcggggagaagatcgatgtgacggtgagcgtgtacaaacacggggagaagatcccggacgtggccccaccccagcaagccaaacccaagctcatcccggcgtctgcctcggcgccaggccagtgaaggcgttttcccggcctggagaggggaaaatatgcttggcagagacaggagtgctgtgtgtttgttccagaggagcagccggcgtccggtggcgtcctgtgtgggccggtagttgatcacacattgtgcttttgatttttgcgtttggtgatgattatacccgtctaagggagaaagctaacattttccacaagacagaacaacatgtttacacgagggtagacagcaggcacctgacagagagggggttggcagatgacacactagcatttgcacgggtgtgggcacatgggcgtggcacccggacgtgtggagcatgtggcggtctgtgtgaagccaccgagaagctgccgtgctgctctttgggagctgcgggatctagcagctctgaaatcttggctgtggagcctttgaagcatgtgttacctggttaagcttg

SEQ ID NO: 10579 - DNA, 694 bp, Macaca Fascicularis
ctgccagcccacctgctgtggtcaagctgctgtggccaaaccagctgtgggtccagctgtggccagaccagctcctgtgcccctgtctactgcagaagaacctgctaccaccccacatgtgtctgcctgcctggttgcctaaaccagagctatggatccagctgctgccagccctgctgccgcccagcctgctgtgagaccacctgctgcaggaccacttgcttccagcccacctgtgtgtccagctgctgccagccttcttgctgctgatcaagtcccaagacaaccaccgtcctcacacaacaactttctgctccactgactgatcttttgggggactaatttactttgctgctgacagccaccgtgctctcacccaaatttttatgaattctctgtatgtttaaaatcttgggaatctgctagacggatgtcagaatacttcatcctgtttctcttttttcttaccccttgtggatcatgtgccagcttcgtgtgctctcaatttggagtcatggtctcagctgtgactctaaagtcatgagcttcagtctctgcttctaaggaatttaggcttctgcaactgagcaataatctttgcaatcgtatatttgttttcaatatcctcttcatggttcttctatccttctttcttcttttcatgataactttgggttgtgttcctggtagcaga

SEQ ID NO: 10580 - DNA, 700 bp, Macaca Fascicularis
gcaaacggggttgtgggaagtgagcagccatctccccgtgtgatttttttttttcctctgatttgctttgccatgtgtccttcacatccagatccccgtcggtgttagttccactcttggtctttcacgctccccttgcctgtggaacattgtctggtcctagctgtggttcccattgttcccccttcacccttttctgttaaccttgtgcctgtctcctgtatgatcacatcaccaaaaaggggggggggggggaagactttttttttggccattttgtaattgtataaaaatagtagacaactgcttaatggttggggttttttcacaattttcaacattagtgatttttttttttttgtttgcaagttaaagggtttgtcattgtttttttaaagaaaaaatacaataatgcaccatatccctatgcataaagtgctttttttatttataaggttgaaaattttgaataacccttttagcattgaaaaaaaaaaaacaaaaacaaaaaatggaaaaaaaaaaaccttgtattttgtaaatattttcttttcctgctttggagctgtgtaatggcagcgaaacatgtagctgtctttgttctatagaaatgcttttcttcagagaagctgatctttgttaatgtcttgattctgtttgcaaagcacagagtagtgtttaaaaaaaaaagaaggaaaaa

SEQ ID NO: 10581 - DNA, 738 bp, Macaca Fascicularis
  misc_feature (1)...(738): n = A,T,C or G
aagcccagnnggagacanntcagccagcagaaaggccacnnnnnnnnnnnnnnnnnnnnnnnnnnnnnnnnnnnnnnnnngtctcctctttgccctccgccatcaggaaggggatggtgtcctgtccccactgtggtggctttaggcgacgttcttactgtctgctctgcctcagtttccccatctggaaaatgggggcaggggtactgacctacctcaggtggcaaggtgagcagggaacatgttggagtcctttagagagtgtgatgtgnnnnnnnnnnnnnnntgtgtgttcctgtcctgcttccccttcctctttggggctgaggagggggttaaaggccaaatgctgtttcccaacaccctgaagtctacacacgtctcatgaatgcatcnnnnnnnnnnnnnnnnnnnattagccattccgaaatctgtgtaatcaacttcacattattcaagttacaaatcactgtgtccatannnnnnnnnnnnnnnnnnnnnnnnnacaaagggttgggccccttttatttttacctgccacccagcatctcccccacctgccccttctgggtgacacggtctgtaaacagaatcatgtatgggtctttgtctgagtctgtagcacagcaggaaaagcccagcaaggacccagtttgcaccgacagcacccacaccatgggtggtcccacagcaggggaccaagctggcctgaggcatgcccagttgtaacaatgctgc

SEQ ID NO: 10582 - DNA, 713 bp, Macaca Fascicularis
  misc_feature (1)...(713): n = A,T,C or G
acanngnctactacnnncaggtctctctgaaggcaccggaagctactgtgaccctcccggtcttcattggcaatattgctgtgaaccatgccccactgagcccccggccaggtccagggctgcctccctgggccccacccctggtggtgccttctgcaccaccccaggaggaggccgaggctgccgctggcggcccccacttcttggacccggtctccctctccaccaagagccattcgcagcagcagcccctgctggccaccttgggttctgtgcctggtgcccccgagccctgtcctcaggatggcagccctgcctcatatccgcttcggcctcccttgtgcatttcaacaggtgccactgtcccctactttgcagagggctctgggggaccagtgcctaccaccagcaccttgattcttcctccagagtacagctcttggggctacccctatgaggccccaccgtcctatgagcagagctgcggcggcgtggaccccagcctgacccctgagagctgaccccgtgctgccttctccaggcaggcctggcctctgccctgggactggggcgcccagggcctcgtgccttctctctcggcctggcctgacccactcaggacatgcccagcctctgccagctcctctggcgtccaccctcttctccctggggctggggtgggggtggcagggagctgggacctggagagactc

SEQ ID NO: 10583 - DNA, 776 bp, Macaca Fascicularis
  misc_feature (1)...(776): n = A,T,C or G
gcaaacagagcatgctgagaaggaggataaaacttcagaacgagcaaaacaccatcaacgttaattccagagatggaacattttttttcctagtaagaaaataacccatttgaagagaagaccactaatgagaagaccactaaagagagacaccaagaatggattcagcagaatcatttcnnnnnnnnnnnnnnngcagtttgaagggccaaagccatgatcagggatcagtcattaaaggacgcacttcagtattagtaaaccctcttatgatgattaaaagagaagggcagccctctccaccatttggtactttctattcaacttccactgaccataaaatgtttctcttctgagctagccccatcatgtggtgaacctccaccctaacaaagtaggatggggtggggggctaaattaattggagttaggtgaggagagagccagaaaacatagatctgggggcagcagtgctgggtggagagagccagaaaacagatctggaggccgcagtgctgggtggaattgtcgaggctgtggcatgttgggtttctctctctctctcttttctcctttgattatgtaagagctgtttcattttaacttattatggtgattatacaggcaagaagacaaaaaggagagaaaatgtacctcttctactggaataatgtttatgattacaagtgagatgtggtatttttatcaatatgaaggcaaccttggctgatgtaacctctatagtgaatactcacatcttactcactcactatcaa

SEQ ID NO: 10584 - DNA, 475 bp, Macaca Fascicularis
ttgttctcttcggctaccccaagcccgaaaacctcctccgagactgaaagcttccgcagcgcccttccccgcgtgcccggaacctgccgcagtcgcactccagtttttttatggcctacgatgttgcaatctgggcttcttgtttactccactgcctctatccattgagtactgtgtcgatattgttttttaagattaatatatttcagatatttaatacgaaacgtggaagggaatgctggagtaaaatctcccctctgcccgcgcgccagctcctgtggtttctgtctgagcacgtgggcgccgggaggggatgctgaggctgtgggagctgcctccagggctctggccactcaggaggagggcggggcctgcacttgaagtcaggccgaacttgtctatttttaaaacggtagctgacgaatccttccagagggaaagttaagtgttgtacttgaaaaggtcaatcttcggg

SEQ ID NO: 10585 - DNA, 778 bp, Macaca Fascicularis
  misc_feature (1)...(778): n = A,T,C or G
cagtatattcaagactantnngaggtagttctagcctttaaaatnnnnnacagacctatgggcttaaaagaacccaagtaccgactaagcaaataggcaaaagacatgttggaaatgtagtatagtacttgaaccattcactatcatagggattattggtgcatcctgtgtaaatggaagctgagcttgacacctggtgcttttaactagtgataaagtcatcctttcactgcaagcacagcatacctgtacctccaaaagtgatgttttagtgaacacaccgttttcaacacttgtgccttggggtgatcatagaagctttgtgaaaactactgatgttttctcagtctccttaaagttacgtccacgctttaaaatgtgtgtaggaaagtgggtttatgttttctctaagatacctttgctgctttccatactttgaaactattaagcttcttaactgcctcttattggaaatacttctggggaaacttcatggtcccacaatgtcattgccatacagcttcactagagttctttgaaccacagatgaaaagagctttgtattattttttaattccctctccagatatcgttttaggagtattataacaaaggtggtgggcaaaaacaatgtaaggagcctttccagttatcttgagttgcagctctgtagtttcttttttgaggccaaacacactgtattttacaagtcaaaatataatttatattaatcactatgttaatgagtatgtgaaacattcttttgcattgatgaatt

SEQ ID NO: 10586 - DNA, 585 bp, Macaca Fascicularis
  misc_feature (1)...(585): n = A,T,C or G
aaataaaccatgtcaggtatcaccagttatatannnnnnnnnnnnnnnnnnnagaggagatcgatttcttggtactcagcgagaagaaaannnnnnnnnnnnnnnnnnnnnngtcttgtgttttaacataagttctgacttgtctcaaaattcacactaacttttttaagtttgattgcccagagtagcagcactccctcatttgctgccttatttatttttttttgttttctccatccccatttcagatgacacaacccacataagaggagcttgaatatttaacatccctctagatttcatagtgggcgggggaggaagtaacactgcagaatcaagaatttccaggccatgctgactgatgctgtagcttcgaacagaattgggaggcttctgttttgaattcccagaaattgtataaggatcaaaaggccgggcgtggtggctcatgcctgtaatctcagcactttgggagtccaacgcaggtgtatcacgatgtcaagagatcgagaccatcctggccaacgtggtgaaaccccatctctactagacatannnaaaaaattnnnnnngcgtggtggtgga

SEQ ID NO: 10587 - DNA, 673 bp, Macaca Fascicularis
  misc_feature (1)...(673): n = A,T,C or G
tacagaaaaactatgttatcttttttctttttgccttgtatgtattnncacttacagttttgaaaagtgtcttttagttacaaataaacatttaaaccatctgtgtaggaacatgtgaaaagtataggcatagtctcttcactttctcannnacatcctctcatgcaaaggttctgatcacagttaaatttcaatgtcttcaaacagggataagtgggttttttaaaggaggcaaagtctcatagttatttctataaccccactgatagtttggttggctgggtttaaaaaatcttattacacaaaactgagatgacccagtttcgagaatctcaattaaaataagtgcccaggtgaagacagacgggtagacttcatgcaaaattaggaaatgtacttttccgctcctatctatctttaataccttaatttcaaccctctnnnnnnnnnnnnnnnttttccctactctctaatcatttggattaataatttaaattacataccattctaaggtacannnnnnnnnnnnnnnnnnnnnnnnnnnnnatttnnnnnnnnnnnnnnnnaagcatcttctggaggagacaggagattatcaaagggtgtacttaggtgacctgagggcaaacctgctcagtcattttattgagnantnnntgggatgcttgaacag

SEQ ID NO: 10588 - DNA, 728 bp, Macaca Fascicularis
  misc_feature (1)...(728): n = A,T,C or G
tatatcaataggtgttttcctctcttattttgtaaacaatattatnttagctattaagctggataccttctttcaaattcagccattcagttgtaaaggtgggaagaagtttcttgacaagactctgcaattaaatgcttacaatttggggagacccttccttgattacatcaagtatgttggtacatgggtttatacaagttcctcttgagaagacaaaaagaccaccatgtgtgagagctctttgactttgccaataggggcctatcttaatgcacttgtttggacacggttctgatcttatttgtaatggctgcaaaaggagaggatgaaacgctgtaaaagtaggaaatgaagtggatgctggaagaaaatgtaattggtggtacagctatgggccagatgatggaggggagggtggggacccctgccggcaagcagggggtcacagctggctttccttgcttaggaaaagggtactgcagctccagcagcctcctctgtactcagccaggacacccgtgggacctgtttgcatctgttttgcttctttgggaacggcacagtcacttatcctgccatttgcggagatgacctggtgcactttgactgttgagcaatgcattattgctgtagtcaaggttagtgcaagcaaggaaacattcccagtaaggtatttgtttccattttctgtctatgcttctgtcagaaacttgctaggacattta

SEQ ID NO: 10589 - DNA, 684 bp, Macaca Fascicularis
  misc_feature (1)...(684): n = A,T,C or G
agagaaaccctttgaatgtagtgaatgtgggaaagcctttagcacaaagcaaaagctcattgtccatcaaaggactcatacaggagagagaccctatggctgcaacgagtgtgggaaagcatttgcttatatgtcgtgcctggttaagcataagagaatacacacgagggagaaacaagatgcagtcaaggtggaaaatcctcctgcagagaggcacagcatattacacaccagtgatgtcatgcaggagaaaaactccgctaacggggtgactacacaagtgccttccgtgacccctcagacatcactaaacatcagcggcctccttgcaaacaggaacatagtccttgtgggacagccagtggtcagatgtgcagcctcaggagatgatagaggatttgcacaggacagaaaccttgtgaatgcggtgaatgtggttgtgccttctgtgatcaattatgtcttattttatgttacagaaaacccataggaagagaactcagatctatgtggaaaaagggtggagcaaaaatttgtagttcattatgtggctgaaaagcatacactgagagaaaatgtataaggcagagaaagcctgataaactcatcctatttaaatgtatgctgtgatgnnnnnnnnnnnnntgatgttagcctaaacacatacacagcagttgctctatt

SEQ ID NO: 10590 - DNA, 729 bp, Macaca Fascicularis
  misc_feature (1)...(729): n = A,T,C or G
tagtagatgatgatatcatnnnctactgtagaacatagtnnncnntactgnnnnnctnnnatagccatataattgcagtatttctttgtatttctttgttaagcagagaaatattaaggaactttttttttatgtcttcgtattattccataattagtaaagcaagatgaaatatcaaattttagtcagttttttcatggatttgtgttcttacagtacttgaaaatatttaaggaagagatgaagctctgcagtttttttctatgtgggatgattacttttttaaggaggattaattctgagtatagtaaataaaggggaatatatgaattgtttaacaaattagaatttgtttacaactacttgaatttttaaattatgtcaaaacttacattacttgccaagcagtatgatgtaagagtataggaaacataaataagaatacagagataccaatttggttacaatttaccattttataagactaagcaataatcttaaaaacctctttcctgaatatttaaatgtgtttgtatggtgttatgactgattgttactgatttagagactaagccctcttaaaacctttagttaaatataaaaagaaattatatgtaccttgcctccctgatggaaaactatataaaattgtagacttaaaaggtttgtggaaatacattaggatatcagaaaactaaatatatagagttgctttatgactactacctc

SEQ ID NO: 10591 - DNA, 769 bp, Macaca Fascicularis
  misc_feature (1)...(769): n = A,T,C or G
gnnnnnnnnnnnnnnnnnnnnnntgaacatgnaatanngntccagaagacttgcatagccatgtggtaaatgagcatgcatgtaaattaatagagttaagtgataagtnnnnnnnnnnnnnnnnnggacagtatagcctcttaagcaaaattacctttgacaaatgtaaaaatttctttgtatgtcaagtatgtggttttcggagtagacttcatacgaatgttaacaggcatgttgctattgaacatactaaaatttttcctcatgtttgtgatgactgtgggaaaggcttttcaagtatgctagaatattgcaagcatttaaattcacatttatctgaagggatttatttatgtcaatattgtgaatattcaacaggacaaattgaagatcttaaaattcatctagatttcaagcactcagctgacttacctcataaatgtagtgactgcttgatgaggtttggaaacgaaagggaattaataagccaccttccagtccatgagacaacttgattattctctttaacttacagaaagtttaaaataataaattcagcctttttttggggatgattaaatggatgattgtaaatacaacttatgaaatttgcctttaacaggtaacttttgtaaattataaaattttattggcattcctccattttcagtatataaatatatctttaatgtggtattttcaattgcgtgatagtttgtagttttaaccactcctggtnnnnnnnnnnnnntttcttgcatgtgctcga

SEQ ID NO: 10592 - DNA, 648 bp, Macaca Fascicularis
  misc_feature (1)...(648): n = A,T,C or G
ccaccttttccncaagttccnnnnatctccnnttcctgcnnncaanngaannnnnnnnnnnnnnnnnnnnnnnnnnnnnnggcttngatgcgcctcttatcaagcactgggagtttgatgcaccaagccctctcccagagannacagagaacgtggtgtgtgccctgggcatgattgtgggtctggtgggnnnnnnnnnnnnnnnnnnnnnnnnnnnnnnnggnnnnnnnnnnnnnnnnnnnnnnnnnnnnnnnnnnnnnnnnnnnnnnggtcacaggtcacacgaggggcccgcgtcctgcctgtctgaagccaatgctgtctggttgcgccatttttgcgcttttatgttcaattttatgaangnnnacaggtctgtgtttgactcagcctcagggacgactccgacctcttggccacagaggactcacctgcccacattgagggcaaccccgtcacggcctcaaggcacccccaagccccttccttgcctgtgcatccgggggcagctctttagagggtttgcnnnnnnnnnnnnnnnnnnnnnnnnnctccagannnnnnnncgcccctccccagctcgccccttgaggacgacnnnnnctctccacagnnnnnnnnnnnnnngggagccccttcccacccacc

SEQ ID NO: 10593 - DNA, 565 bp, Macaca Fascicularis
acacagcacagctttttcaaggctgtattgagaagggaagttacgaataagggtgtgttgggctaaccagcccacagagctcacattcttgtcctttgggtgaaaaatacttgtccatcctgatatctcctgaattcagaagttggcctccacatgtgcaatggctttaagagccagaagacgagttctgggaattttgcgagttatcctgtggccaggtgtggcctcaggtaccaaacagggttacctgtagctctttggtcctttgtactcccacgggtctgcagagtcccatctgcccaaaggtcttgaagcttgacaggatgttttcattactcagtctcccagggcactgctggtctgtagggattcattggctggagtgggagagttgaacagcatttaaacagagttctcttgaaaatgtctaaagggattgtaggtagataacatccatcactgtttccacttatctgaaatcttccctcttggctgcccccaggttgtttactgtggagaacaatgcataggaatgtccggaaagcgcctctacaacttgttacag

SEQ ID NO: 10594 - DNA, 744 bp, Macaca Fascicularis
  misc_feature (1)...(744): n = A,T,C or G
gtgctgctacttctggaagtagtgtcccttcctcccggggatgacctcaggactctgtcggtttcccctttacccttcctcgtccccgtgttctgctgggctctgattctgcccgatgattatccccataggttctcaaaaacatgaacaagtctgaaaagctcagacatttggcagcctaaacagcactacccattcaagcacccggtggataaagaatgcagggaaccatccacacagctgccaaccctgggaagcatccagttctcaaatcgtttttgctatggatttatattaacgagaacattccttgctttccctcctgctggtattttaaagccacaannnnnnnnnnnnnnnnnnnngcagaaagaagtctgtgatgataaatgagaatgaggatgacctaggcaccctacgctagcgtgagaagactgcaccccaggaaggatctgtgttagtccctgggatggctccaaggtctgctctaggaaggcagcatgctcagtgggaacacagcaagattcagaatttaaagtagttgcttcatggctctctgcactcccttttcttcctcgcagcctccctaagatgactccagtgtgactctgtgcttagtgagcaatagtgattgagctcatgttccctgtaagtgccgcttctcctccaggatgggcctctaaagctgaggcctggctgggagcctgtttgccctctgtcttaaacaaacactgtaaaatacca

SEQ ID NO: 10595 - DNA, 168 bp, Macaca Fascicularis
ttagcccctctcattttcgagcccactctagcatatcaggtgccctgacccagggcccaaaatggcgtagggatacagggtctccaccctggggtgtagtcttctcccatcttgcagggattgcccaccgtcttccagacaccccacatgagaggggcaccaggttta

SEQ ID NO: 10596 - DNA, 701 bp, Macaca Fascicularis
  misc_feature (1)...(701): n = A,T,C or G
gccagnngnaggccaggnnnaacagacatccagcaggttacacaggactggaatctgaagacaacagcaagcccaggagacccacctcggtaggagtcactaaggcataaacctcgcgtcagaagttcatctcaggatgaatggattattgtttgttacaccatgagaacactgagtgcttacttggtgctgactnnnnnnnnnnnnnnnnnnnnnnnnnnnnnnnnnnnnnnnnnnnnnccatggggcaggccctactgttatccccattttgcagataataaaactgaggtcactttaaagatggaaaaaccgaagcacgaatgaggaaactgaggcacaaacccaggnnnnnnnnnnnnnnnnnnnnnnnnnnactcactacnnnnnnnnnnnntgannnnnnnnnnnnnnnnnnnnnnntagaaaacacagaaagtacagagggaaagaaaggcaaaagcattgtatatccttagatttcttaaaagcacacacacgtatttcttttttgcaaaaatgagaagtaatcatgtatcaaatacattatttgataaccactttttaaatttttaccataaaccatcttcatgacaataaatacgtatctatctcatcattttgattgctgcatagtgttccactctgtgtatctatcctagtgtactttgccagtatgttgtcattggacttttggtcat

SEQ ID NO: 10597 - DNA, 751 bp, Macaca Fascicularis
  misc_feature (1)...(751): n = A,T,C or G
ggagaacacagagggcgagtatagcagcctggagcnnnnnnnnnnggcgggagtggtggagagcctgaagatcatcaccaaggccaagtccnnncgcattgccnagaannnnnnnnnnnnnnnncaggagagcgggcgcaagaaagtgacggctgtacacaagnnnnnnnnnnnnnnnnnnnnnnnnnnnnnnnnnntccagtgctgcagggaggtggcagcccgctacccccagatcaccttcnnnnnnnnnnnnnnnnnnnncaccaccatgcagctggtgtcccgancccagcagtttgatgtcatggtaatgcccaatctnnatggcaacattgtcaacaacgtctgcgcaggactggttgggggcccaggccttgtggctggggccaactatggccatgtgtatgcagtttttgaaagggttaagaggaacaccgnnnnnnnnnnnnnnnnnnnnnnnnnnnnnnnnnnnnnnnnnnnnnnnnnnnncagctgnnnnntgctggaccacctcaagctgcactcctatgccacttccatccgtaaggctgtcctggcgtccatggacaatgagaatatgcacactccagacatcgggggccagggcacaacatctgaagccatccaggacattatccgccacatccgcgtcatcaacggccgggccgtggaggcctaggctggccctgggacctccttggattccccttcccaccccagcaccccagccagcctggtaggcagagcc

SEQ ID NO: 10598 - DNA, 832 bp, Macaca Fascicularis
  misc_feature (1)...(832): n = A,T,C or G
aggtacagtaaaaagtatgctattttnnnctcatgagaccactgtcatatatacagtccagcactgaccaaaatatcatatcagcattttttcttctaagattttggcagcaccaaacggatacactaacaggatatactctttgtaatgggtttggagaactgtccgtagttacttcttttaaaaaggtgatctacacagtagaagttagacaggtttggtaatgagatctgcaagtccaaataaagtagaagtcggttgctgacatgttagtgcagcatcttggaggtttgaagatgccgcatttggattggatgaattccaaattctgcttccttgctttttaatattgatatgcttatacagtttatgcaaaaaatgcagagttataataatgttaacacaggcatgatcttctttataattctactttgagtgctatctccacgtttgaggtatctgggcagctagctttaggagggctggcaacttagaggtggggagcagagaattctcatatccaacatcaacatcttggtcagatctgagctcttcaatctcttgcactcgaagcttgataagatagttatgcgtatataagttaacttccaatttacatactgtgcttagaatttggaggaaaaatttagaaatataattgatggggttattggaaatttgttataatgagtaaaacattttgtcatataagattcatatttacttcttatacatttgataaagttgtgatttaatctggttcatttttgttccacgatttaaataaaaccatgaaacttgaaaaaaaaaaaaaaaaaaaaaaaaaaaaagg

SEQ ID NO: 10599 - DNA, 228 bp, Macaca Fascicularis
ctcattgtctacatgaggcccaaatgtgtgaagtgcgatttctgcttttgtgtaccccaccaccccattaccacagctgcctttgtgtttgtgtcaataaaaagccaaaccctaggtcctgcttgttgcctctgagagtggagggaaggtgagcttctggaaggccggcactgccagcagaagatctggcttcttcccgcccccatctctttacatgcccaaatcacg

SEQ ID NO: 10600 - DNA, 775 bp, Macaca Fascicularis
  misc_feature (1)...(775): n = A,T,C or G
gccttactactttgtagaggtccaggcccctgcagattnnnnnnnngcagtttatactgtcctggccaggcgcaggggtcacgtgactcaggatgcacccatcccaggctcccctctgtacaccatcaaagcttttatcccagccatcgactcttttggctttgagactgatcttcggactcacacccagggacaagccttttctctgtctgtcttccaccattggcagattgtgcctggtgatcctctggacaagagcattgtcatccgccccttggagccacagccggctcctcatctggcccgggaattcatgatcaaaacccgccgtaggaagggcctcagtgaagatgtgagcatcagcaaattcttcgatgatcctatgttgctggagcttgccaaacaggatgttgtgctcaattaccccatgtgagtgcacggactcctgggagctcctgctccctacagtgggctgcaactcctgtacttgaagctgagacctcgtatgatgttgacgtggccttggtgttgtcagagtgtctggaagctgctgctgccatcttgaacaactcaccaacctccaacccagagccccagtgagagaggagcatttggcctcctgcttccttctgtggcctctgccaggctccttttccaagggaaagagaggagcttgggctcacagaaagagaaagggatgaaaccccaaggggccctatctttgggatttacatggaattttattttctacaagtttgaccttagccgtggttgc

SEQ ID NO: 10601 - DNA, 729 bp, Macaca Fascicularis
  misc_feature (1)...(729): n = A,T,C or G
gtatattagattnnntattaaagtcactggaaataggacaagttaatggatgtttttatattttaatagaatcatttctatgtgttatgaaattcacttattaatgataaatttnnnnnnnnnnnnnnnnttagaaaacaaagtattgctaagtactgtaacatactggccaccaaaattcgtattgagattatcttggtttcttgtaagagataggaatgagttcttacctagtgttgcagtccagcaaatacagaggtggtttaatcaaacaactatagtgtgaagcaagagtaaagactaaggttttgagagcattcctactcacagaagtcaagaaatctgtcagataggaatctaagtatttatagcgagattgtgaaagcaaccttaatgttttgaaggactgttgagactaggtgctttgcttcctttcctcagatatctttctgtggcatttgagaacagaaaccaagaaacacggtaattactaaattatgaggctttgctttttgtttgcttttaagtagaaaaacatgttggcaacattgagttttggagttgattgaggtaatcagacttaactagttttgtcattccatttgttaaagatacagtcaccaagaannnnnnnnnnnnnnnnnnnnnnnnnnatttaagccttgcttatttttaaaaattatttccattcagtgatgttggatgtatatgaattatttagtaaataat

SEQ ID NO: 10602 - DNA, 748 bp, Macaca Fascicularis
  misc_feature (1)...(748): n = A,T,C or G
ccataggtgatcnnnnnngnnattaaaaaagcataatactctcaggcctcatcccaagcttgacccatgctctgtatgttgaacacgtaatcacaagtattctagcaaatcctgccttggttgcagcctgcactgtagatgcaagggttttgctgtggttcttcttatnnnnnnnnnnnnnnnaagccccagatgatgcnnnnnnnnnnnnnngagccatcatcnnnnnnnnnnnnnnnnnnnnnnnnnnnnnnnnnnnnnnnnnnnnnnncccctgtgactctgcttaaagcannnnnnnnnnnnnnnnnnnnnnnnnnnnnnnnnnnnnnnnnnnnnnnnnnnnnnnnnnnnnnnnnnnnnnnnnnnnnnnnnnnnnnnnnnnnnnnnnnnnnnnnnnnnnnnntcaggctgtgggggcatcnnnnnnnnnngtggcccagaccaccctgacccctgggcctgcctgcctggccctgcatgctgcacactcgctgcgcttgtgcagatcctggccnnnnnnnngtcgttgctcttgtcttatcttctcttacagagtctccctccctttatagaatgtcaaccaaagagtgccctcctcccctctcagcctcctctttagctagcctccccatctcatcacaacgcatgtctgtgnnnnnnnnnnnnnatttacagtgccacacggaaccctgtattttgcacacagcaaaacaaacaatgtttagctttatttatggtatttgat

SEQ ID NO: 10603 - DNA, 733 bp, Macaca Fascicularis
  misc_feature (1)...(733): n = A,T,C or G
gtacggaggtgagaagcacagagcccgagttgannnnnnnnnnnnnnnnnnnnnncctggatccgctgccagcccccactgaggaagggaaccccctcctcagacactatcgggggcctgcgggggatgccacggtcgcctctgagaaggaatcagtcatgtaaaccccaggagggaccttccctgccctgctggaggtgctcattggacactggattatgaggaatggatagatgaatgaactagggctctcggggtctgcctgcacactctggggagctgggggccccagcctcctcctggannnnnnnnnnnnnnnncctggctgctggagtacatgtgttcatgagggttactcctcaaaacccccaattctcactcatgtccccaactcaaggctagaaaacagcaagatggagaaatgatgtcctgctgtctacccgccacgacctgcctggccttacctgtgtcagggagcaggtcacaggccaccacggggaattctagccccattggggggatgtttcaacaccatgctggttattttggcggctgtagttgttgggggaatatgtgtgtgtgcacgtgtgtatatgtgttctgtgacctcctgtctccacagtacgtcccaccatgtccccagatcccctattccctccacaataatagaaatactcccagggactctggggagaggctgagggcaaatacctgcnnncactccagaggacac

SEQ ID NO: 10604 - DNA, 730 bp, Macaca Fascicularis
  misc_feature (1)...(730): n = A,T,C or G
ggtgaactacgagnannnngtccgtnnnnnnnnnnnnnnnnnnnnnnngcgcccaccatnnncctgggcacccgctcggcccgcagggcaagaacccggggcctctagcctcctcctccttccccgctgcctccccagggcagggtggcgtcttcctgggccaggttgattctgcccacctctctgcatcccacttcccgcatctcttctctgcgctcctgcccaccttcccacctgctcatctgaacgacatggaactctcccgctccaagcaaaccgtggaaccctccccactcgggagaagcagagctgaccttaggnnnnnnnnnnnnnnnnnnnngcgctgactctgcggccagtcaggatggacacagggtgaccccttagagcacgcaggcaagatccctaacaggcacccaatgcccaggccagggcggctgcagccctcagcccacgccaggattcccggaggctcctggactggaggctccctccgcnnnnnnnnnnnnnnnggtgggaggcctcttggcctgcggtaaggggtgctgatggggactgtggccacagaggttaggcctcctgaaaacagcactgccttccacgctgccccagcttgcccctttccttgtcggccaacccaccgtgattnnnnnnnnnnnnnnnnnnnnnaaaccgggtcagctgtaacctgttccnnnnnnnnnnnnnnnagggaggtttggatgagcag

SEQ ID NO: 10605 - DNA, 742 bp, Macaca Fascicularis
  misc_feature (1)...(742): n = A,T,C or G
cagatgaccaggctgtcgtgctgaaggccctgagattggcgcccgaggggcgtctgcgaagggatgggctgcgggccctcagctccctgctcgnnnatgnnnncaacaaggtgnnnnnnnnnnnnnnnnnnnannnccggagnntgtcnntgggccctgccttccgggagagggccctcctgtgctttctggaccagctggaggatgaggacgtgcagactcgagtggctggctgcctggccctaggctgcatcaaggctcccgagggcattgagcccctggtgtacctctgccaaactgacacagaagctgtgagggaagctgcccggcagagcctacagcagtgtggagaagagggacagtctgcccatcgacggctagaggagtccctggacgccctgccccgcatctttggttctggcagcatggcgagcacagcattctaaactattcacccacgggttcctggcgccccttccccgtactttcagggctcaccaggcactggcagggagggtaagggctggctccagatacccctcccccacagattcctagcaatgcaaatctaatatattcttctgttgcccctggggttgaagagtcagtgcctgcagtcaagtgcctcccagcctaggctcagcacatcccnnnnnnnnnnnnnnnnnnnnnnnnnngaccaccctgcctctgcccagccacatcccttgattttgtattttatttacnngagtttacagaa

SEQ ID NO: 10606 - DNA, 640 bp, Macaca Fascicularis
gatgaagaaagcccttggaacgatgccagcgaaggtagcgccaaggcctgggacacgctcacctcccccagtaacaagcaccctgagcacgcattttacgaattcaccttccggcggttctttgatgacaatggctacccctttcgatgcccaaagccttcaggagcagaagcttcacagtctgagaactcagatttagaaacctctgatctggtggatcagaccgaaggctgccagcctgtgtacgtgtagatgggggccaggcacccccaccactcgctgcctcccaggtcagggtcccggagccggtgccctaacaagccaagagggaagccgagggctgttttgttttaaattagtccgtcgattacttcacttgaaattttggtcttcaccaagaaaacccaaacaacaagacgcttttgaaaacaggactcagcattgctttcaataggcttttcaggaccttcactgcattaaaacaatatttttgaaaatttagtacagtttagaaagagcacttattttgtttatatccattttttcttactaaattatagggattaactttgacaaatcatgctgctgttattttctacatttgtattttatccatagcacttattcacatttaggaaaa

SEQ ID NO: 10607 - DNA, 821 bp, Macaca Fascicularis
  misc_feature (1)...(821): n = A,T,C or G
cccaccgtccccgtcaccgaggannnnnnnnnntccgggctcgagtgccctgtgtgcaaggannnnnnnnnnnngggtgnnnnnnnnnnnnnnnnnnnnnnnnnnnnnnnnnnnnnnnnnnnnnnnnnnnnnnnnnngctggagcagcacgacagctgccccgtctgccgaaaaagcctcacgggacagaacacagccacgaaccccccgggcctcactggggtgagcttctcctcctcgtcgtcctcctcctcctccagctcgcccagcaacgagaacgccacaggcaactcgtgagcccgcgtcggccgccgggaaagcacgggtcctttcccacccatccgcagccggcgccacacggcacccacggactggtgccccggcgggccacacttggctggtcagcgctgcaggtcccgcctgttccagggcaggatccaggcccggcccactggccccctggctcgggaaggcgtgggccacatggttcccgctggggtgtccccagcctccccatcctctgtctaacctcaccctctaaacattcagcggtggaaagatttttataattttaaattattactgctnnnnnnnnnnnnnnnnnnnnnnnnnnnnnnnnnnnnnngcatgatttgtggcaaaagacggggcgcagctgccccacagtgctgcaggtgccgccaggacaggccgcgtgggcccccggcctcccctcggccgcctccacgacccggagttcgggggctcgggaccatgaggatgaccagcaaaattcaagaacaaaattgctccannnngacnnnttttaaaggaaaaaatat

SEQ ID NO: 10608 - DNA, 748 bp, Macaca Fascicularis
  misc_feature (1)...(748): n = A,T,C or G
acccatgggcaccaggttaaaaagtccttcttttagcagtgagcagggcaggcagggtcacgagcccaaaagctgggaagtccagaagccccagaacaatgcattgcaaagaggcaaaggggacctgaggagtggctgcttcataatgaggcttctgacctttccccaccacacagcccaaggtgcagcctcctgagaggaccatcacaggccctgcagagttgttcagaaccccaactctctgtaagaatggcagggggtgggcacaaaggatcctcaaaaccaatttctcattcctggtgctcctcacgcctcaaaccgtgcctactgccttcttgtccacagctggctggctaccccttgaactactgggtctctggacccactgtgcccagccacccccaagagcactcaggcgagagctgcccgaggaggctgctgaggaggaaaggagaaaggctgaagttccaagtgagatcgaggtaactgcaccacctgttgcctgcatcgccccagtgccagggtctgcctgaccaactggctgccctcccctgctatgagggccaacagcacaggctcactggccttgtgccttctgaggcccgagtcccagatgcttggggtcttagttctgcttctcctgtccccaggtcccgagggaggccctggagcccagtggtccccttatgctgtcttcnnntaacacctagagannnnnggcagtgggaccacaaccttacactgtcca

SEQ ID NO: 10609 - DNA, 671 bp, Macaca Fascicularis
gcgttagccagtacatgctttttaatgggacctgtgaagcaactgaagaaaatgtttgaaacaacaagattgcttgcaacaattattatgctcttgtgtttcatatttaccctgtgtgctgctctttggtggcataagaagggactggccgtgttattctgcatattgcagttcttgtcaatgacctggtatagcctgtcgtacatcccatatgcaagggatgcagttattaaatgctgttcttctctcctaagctgaaaatcagaaactcgtggaaaagagcactcgaatgttgatactctgtgtttggtgaagtttgcttttccccataaaatactccagaaacaactgaagtgacagttgaagaccgttttgtactaagtctcattttgtatactggtaaaaactacatgcttgattaaaccgttaaatgcttgtaactttaaattcatgatgtgtcattaatacgcttttccaaaggagatttttaatcactgccagtcgtaaattatttttagccaatctttaagtcttttcaaaacagctttgaaatgtgaatatttaagggtagacctgtgctgcaagataattcagcttttttggcttttaaaaaatgtctgcactttttaagactttttttttttttttttactttaaactgtgaaacttct

SEQ ID NO: 10610 - DNA, 750 bp, Macaca Fascicularis
  misc_feature (1)...(750): n = A,T,C or G
gttagtggtagtggngnnnnnacacttcattccttgcaacactgaggttttgggtgttgacgtaaagtggaccacacaccacatctgctgccgtcttgacacttttttttgtttggttggttttgttacatcctacattatgcagaactatttttgtacaaattgtttaaaagttatttatgcaaggttgaatgcataccagtgtttttattgttttgagattgccaattttcctgatttccttaaggtaggagagnnnnnnnnnnnnnnnnnnnnnnnnnnnnnnntctacaaatgtgcccagatctnnnnnnnnnnnnnnnnnnnnnnnnnnnnnnnnnnnnnnnaactggaagttgagagcctgctttgtacctcaagagttacatgagcatgttgtggataaatgtaaattatagttgaagtaagatactctgccaggtttcctctgtagaaaattcacttttctcaaattttaaaatttcgacttcagcctttgcactcaggagggtctgctccagcatgagctcttgtacttacataaatctannnnnnnnnnnnnnnnaagacgtagaataaatgctcccacatagcctttcttttgcttttttctctcctctgaagtgtgacttgagttctcatttaggtttgtaacatggctatttcctagttgtaaagttctgcatttataagtgccattgttgtaaggtggtgtttcctagaccttccctgatgcgatttaccttgtga

SEQ ID NO: 10611 - DNA, 677 bp, Macaca Fascicularis
gatacataccattttctctacaatgaatctgtgctaatattttgccgccttcttttcttttcccccttagagacagggtttcactatgttgcccaggctagtctcaaaatcctgggcttaagcaatcctcctgcctcagcttcctgagtagctggaaccacaggtgtgtgctaccgtgcctggcacttttttgccttcttaatggagatattcagttttctttttttcatttaaacaaagaaaaaaaaaatgtatctactctaccttccctctgctctcctccctcccaatcctacttgcccatatgagcacggctccccatggccacatactcttgcaaagcttttttgctgcttcgcttttctctgaacagatctgatattgccgctcctgtggttttctcaaaattaactttgccatggtttttaaaaaaggaatcaaaatgcattgttgcattaagctttttcaataaaggaaaattacagaaggaaaataggcaacaccagcaaattatatgtggacaggttctaaactatatatatatacatatatatatctctatatatatacgtaatcatctagttctgtcatcttactgaaaggaataaaacttctaaggatcatcatttctgagaagttcttggaaatctttatgtctaagtgattgtattagatca

SEQ ID NO: 10612 - DNA, 773 bp, Macaca Fascicularis
  misc_feature (1)...(773): n = A,T,C or G
gagaagcaggagaaggnntagaagccagtccctccccacctgcccagagcgccaggccagcacagaaattcctgaggccaccgtcaccaaagttaaagagaatgttttattgtttatctttttcctttttaccttattgatttgatgagtcttgaaattgattcatttccataaaccaagttaaagtatgccccgaccatttaagaaaacagccatctgagacacgcaggaaattgtgagcatttcgacccgagctctcatttcctattcgggatgggtcagacacacagtctacccaggggtgtctgagggggacaaggagggagggggtctctggagatctgtcacccagggagccccctctgtgtctaagaggccaccactgctgcacatggtcagggaggcttggtggccgtcctggcacatggcttttcctgggccaactgtgacctgtctggctcaggaatgggctctggctgcttggggagccatgtcactcctgggccatgggggcacctcccgggcacttaggtgtttcacagagattccagtttcactccctgggcagatccccaggccccatccgggatagggcagaggcggcgctggcagccccagggaaggagggtgtgtaccccaaggcgccctggccgtgctgggggactggggtgagcgctccatgttcacatgagcactgctgcctcttcacttgtgggactgactttgcaaacccaaggannnnnnnnnnnnnnnnnnnnnnnnnatcatcttgg

SEQ ID NO: 10613 - DNA, 691 bp, Macaca Fascicularis
  misc_feature (1)...(691): n = A,T,C or G
caaagacatcacannnnnnntagatagctggagcaaggaatgagnnnnnnnnnnnnnnnnnnnnnnnnnnnnnnnnnnnnnnnnnnnnnnnnnnnnnnnggtcctnnnnnnnnnnnnnnntggagggaaatgcaggacactctctgtccaggcctatctccactaactctggaccctaaaacagctcaccnnnnnnnnnnnnnnnnnaaaaaccnnnnnnnnnnnnnnnnnngnnnnnnnnnnaaggtaatgccnnnnnnnnnnnagaggtttgactcaagtgtggctgtgctgggctcaagaggcttcacctctggaaagtggtactgggaagtagaagtagcaaagaagacaaaatggacagttggagtcgtcagagaatccatcattcggaaannnnnnnnnnnnnnnnnnnnnnnnnnnnnnntctggcttttaagactaaggaaccaaactgatctaaaggctctggatttgccttcttgcagtctgacactgactaacaacctcgacaaagtgggcatatnnnnnnnnnnnnnnnnnnnnnaggtgtccttctacaatgctaaaaccatgactcacatttatannnnnnnnnnnnnnnncatagagaaactttatccctacttctgcccctgccttaatgatggtggagagaataaagaaccattgcacatcttacatccacagg

SEQ ID NO: 10614 - DNA, 921 bp, Macaca Fascicularis
  misc_feature (1)...(921): n = A,T,C or G
agaaatgagagtgtggacaggcaaataagggatatccaaagagaagaagaaaaagtgaaannnnnnnnnnnnnnnnnnnnnnnnnaggnnnnnnnnnnnnnnnnnnnnnnnnnnnnnnnnnagatgatcaggtcaaggaaggccgtgagcaagctgtatgcctccannnnnnnnnnnnnnnnnnnnnnnnnnnnnnnnnnnnnnnnnnnnnnnnnnnnnnngagtggctggttccttgcagaagagcacagaagtgatgaaggccatgcaaagtcttgtgaagattccnnnnnnnnnnnnnnnnnnnnnnnnnnngtccaaagaaatgatgaaggctgggatcatagaagagatgttagaggacacttttgaaagcatggacgatcaggaagaaatggaggaagcagcagaaatggaaattgacagaattnnnnnnnnnnnnnnnnnnnnnnnnttgggcaaagcacccannnnnnnnnnnnnnnnnnnnnnnnnnnnnnnnnnntcaggagcaatggctgcctcagatgaggaggaggaggaggaagannnnnnnnnnnnnnnnnnnnnncggctggccacacttcgcagctaggagctgcctaccccgctgggtgtgctcacactcctctcaagagctgccattttatgtatctcttgcactacacctccgttgtgaggaccattttggagaaggttctgtttgtctcttttcactctctgcccaggttttgggatcacaaagggattgttcttgtaaacgtggtgtaaataaatgcatcatttttaggagtatgtacagaaatatcttattgtggggaggaaaaagaaatccatcttctcatgaagnnnnnnnnnnnnnnnnnnnnnnnnnnnnnnnnnnnnagattctacttttgtctataaaannnctgcataaat

SEQ ID NO: 10615 - DNA, 577 bp, Macaca Fascicularis
  misc_feature (1)...(577): n = A,T,C or G
caagaataagggtttatggcagactttgcttttttaacatgtgagaaatgaattttttattttgtgatttatgtgatntcttttttttgctgagtgaaggaaaagagaaattgttgctattgtcagcatcttaaaggtatttccaatcaaggcaaggctaagtgctttgtgatagtattaagcaagtcatgttttgaatggattacctgtaatgatgcattggaatgatataattatacaagtaatgccaaaaaccaagtcaaagcctaattaaccaaagcactcatttaaaaatcatcagtttggacctatttggacctgtcagtactgtgaagtagttttggttttgtggcatatgaatagctgtttaacaaatcaaagttagctttttgcttctcagctgttttggacaatacaagttcttaatggggagacattatcatggcatgacttaagggaacattggttttgtgaagaaaacagattatctaaagccatctctatatttctgttcagataaagattaatgagttatgtgtttatatcagctttgtatatttcctcttcgccattctat

SEQ ID NO: 10616 - DNA, 868 bp, Macaca Fascicularis
  misc_feature (1)...(868): n = A,T,C or G
ctcatgagcaaggaccggctacagtgggtcaccatcactagcccccaggctatnntgatgagcatttgcttgcagtnnnnnnnnnnnnnnnnnnnnnnnnnnnnatcaggcnnnnnnnnnnnnnnnnnnnnnnnnnnncgggtggggggcactttgagacgctcagacagccagcaagcagtgaagtccccaccactgcttgagtcacctgatgccacccgggagtctatggtcaaactctcnnnnnnnnnnnnnnnngtgagcttgcggggaattggcagtcccagcacagatgccagtgccagtgatgtnnnnnnnnnnnnnnnnnnnnnnnnnnnnnnngatgaggatctgtaatctccactgcttggatgtttgccctctacccgtggaatttacagaaacttgccctgtgcctgtgtcccccaagctggggagggaggggtcttttccttctcccttcctaccttccccttttctcttggccaggggccttgtaatgtacctttcctcgtcccctgggctggctgcacagaggattgccccttctcttttcagagctggcnnnnnnnnnnnnnnnnnnatttagtattttgcacaaagtctaagggaccatggctacctgccttggggaggaaccacaactccctttgggccacttctggcttcttggggccatgggccaaaggccaaggggatgggcagaggtctgtgtttggtctggcctagtcccccatcataaacnnnnnnnnnnnnnnnnnntacctctggttccctctcactgcccctgcttcccctatcacagcatggactactgtgctaagggtaaggccaaattgcctgccattgccaattcagcatagacatg

SEQ ID NO: 10617 - DNA, 728 bp, Macaca Fascicularis
catcaaacacttcgttaactgcagacataaattctggatttgccaaacgtgttcgacaagataattcaagcgataagcacttacaagaaaacaaaccaacaatggaacataaaagaaacatctgtaaagtaaatccaggcttggttagaaaatttggaagaaatatttcaaaaggaaatctaagataaatcacttcaaaaccaagcaaaatgaagttgatcaaatctgcttttcaaagtttatcagtaccctttcaaaaatatatttaaaatctttgaaagaagacccatcttaaagctaagtttacccaaatactttcagcaagcagaaaaatgaaactctttgttttcttcttttgtattctaaaaaaataaaattccaaaagaaaaggttgtcttttaagttttttaagtatttgttgccttttaaaatccctgagtgtaagttaccatggtggcagcttagttttactatgctacaacaagttgactaggacattttagtaaatggtagtgagttaaattatctttattattttttgaaaataagaatttagaagtggtaaaattatggcccaagatgtatttggcttgctattatgtttcaatacattgttttaatcatatatatgactttccttttcaaaaataatgtacaagtgtcgatatatgtgcccataaaatcattgtaaatattatttaagtagtcatcacaaataaaatattgtc

SEQ ID NO: 10618 - DNA, 782 bp, Macaca Fascicularis
  misc_feature (1)...(782): n = A,T,C or G
tacccgagccctccccgannnnccagactatccaggagggtagcagggaacagccctatcaccctccagatataaaacccctctactgtgnnnnnnnnnnnnnnnccctgctcttccaggagtctggccacaagaaggggagctttctggagggcagtgaggtccgaannnnnnnnnnnnnctacgccaagaaaaatgacttggttgatgcagacaacaaaaatcttgtgaaattggatcccatcctatgtnnnnnnnnnnnnnagaaaaatgaacagcatacagtcatgaagcttccatgggacagtcttnnnnnnnnnnnnnnngaaaaattacagcctgcctatcaagtgacctttcccggacaagagcccattgtgaagaaagggaaaatctgtccaattgacatcaccctagcacaaagagcttccaataaaaaggtgaccgtgttccggaacttggaggcctatggtctggacccatactcagtggctgccatccttcagcagcgatgccaggctagcaccaccgtcacttttgcccctggggccaaggacagccttnnnnnnnnnnnnnnnggaaaccaggtccaccacctcggctggctattgcttgaagagtatcagctccctcgaaaacacatccaaggtctagaaaaggcccccaaacctggcaagaagaagtgacagactcttttgtctcacgtggtggatccattggaaatccaagctctgggctggtaatttttatgagcattttcagcttttgcaaatacaaaatat

SEQ ID NO: 10619 - DNA, 773 bp, Macaca Fascicularis
  misc_feature (1)...(773): n = A,T,C or G
gagcccgagtgcaannnnnnnnccaacatccnnnnngatgggttcaagcagatccgacagggaatgatcacgttaatcttggccactgacatggcaagacatgcagaaattatggattctttcaaagagaaaatggagaattttgactacagcaatgaggagcacatgaccctgctgaagatgattttgataaaatgctgtgatatctctaacgaggtccgtccaatggaagtcgcagagccctgggtggactgtttattagaggaatattttatgcagagcgaccgtgagaagtcagaaggccttcccgtggccccgttcatggaccgagacaaagtgaccaaggccacagcccagattgggtttatcaagtttgtcctgatcccaatgtttgaaacagtgactaagctcttccctatggttgaggagnnnnnnnnnnnnnnnnnttgggaatcccgagatcgctatgaggagctaaagcggatagacgacgccatgaaagagttacagaagaagactgacagcttgacgtctggagccaccgagaagtccagagagagaagcagagatgtgaaacacagtgaaggagactgtgcctgaggaaactgaggggcgtggctgcggttccggacgggctggcggagctgcacgggatccttgtgcgggaagagctgccctgagcacctggcaccacaagaccacgttttctaagaaacattttgttcactgatacaaaaaaaaaaaaaaaggaattcatgatgctgtacagaatt

SEQ ID NO: 10620 - DNA, 750 bp, Macaca Fascicularis
  misc_feature (1)...(750): n = A,T,C or G
atccaggagcgggcctggctgcggcagcagggcaaggaggtgggggagacgctgctgtactacggctgccgccgctcggatgaggactacctgtaccgggaggagctggcgcagttccacagggacggcgcgctcacccagctcaacgtggccttctcccgggagcagtcccacaaggtctacgtccagcacctgctaaagcgggaccgagagcacctgtggaagctgatcgaaggcggcgcccacatctatgtctgtggggatgcacggaacatggccagtgacgtgcagaacaccttctatgacatcgtnnnnnagctcggggccatggagcacgcccaggccgtggactatgtcaagaagctgatgaccaagggccgctactccctggacgtgtggagctagggcctcgcctgccccgcccaccccgcagactcctgcctgtaatcactctcctggctccctcctgcagtctcctgggtgggtttggcttggccttggcacaggcgcaggtccagtgacagagactcctccggggcctgaggtgcaccctcctgagctccccaggccaggtgagggcctccggcagcacagcccagggcctgcacgggggcaccgggctccatgccttgggaggcctctggccccttggtggccacacagaagggctctttctctcagctgagctgggcccagcccctccatgtgatttccaatgagtgtaaataatttaaaancctcngccctgaa

SEQ ID NO: 10621 - DNA, 728 bp, Macaca Fascicularis
  misc_feature (1)...(728): n = A,T,C or G
gctgtgggagagatcgtcgggatcgtcacnnnnnnnnnnnnnnnnnnnnnnnnnnnnnnnnnnnggctgaggcagcactaccagaccatctgacggcccagcccgccctctcccggggctgcctggggaggcagcttatgctcgctccggctggcacagcggctggggctgttccggggcatggaggattcccagtcacccactcagaaagcctggagtcatgggacaccttgctggtcagaggtcctgggggtggttttgaaccgtcagagcttggacttagattctgacttccccagcaaggatcttcccacttcctgctccccgtgttcccaccctccagtgttggcacaggcccacccctggccccaccagagccagaagcnnnnnnnnnnnnnnnngggccccgggctgcactccgagtcgtgttcctggccgtcttcgctactttcctagagaacctggctgttgccttaaatgtgtgagagggacttggccaaggcaaaagctggggagacgccagtgacaacattcagttcatgactagatttaggaattgggcactgagaaaattctccgtatttcagagagaccttccctcgtttgggactccgaacacggcatcctcactggtttgttttaagggaaacactgtactcctgggtgtgggcagaggctctggtcttgcccctgtggtttgactctccttagaaccaccacccaccaga

SEQ ID NO: 10622 - DNA, 685 bp, Macaca Fascicularis
  misc_feature (1)...(685): n = A,T,C or G
gcaggcgcccccggagcnnncagnnntnntccccgaccctcgagcannnnctggtctgcctttctaaggaagccgagcggaagctgctaacgtgggaatcggtgcataaggagaacttcctgctggcacgcgctagggacaagcgggagagcgactccgagcgtctgaagcgcacgtcccagaaggtggacatggcactgaaacagctgggacacatccgcgagtacgaacagcgcctgaaagtgctggagcgggagatccagcactgtagccgcgtcctcgggtgggtggccgaggccctgagccgctctgccttgctgcccccaggtgggccgccaccccctgacctccctgggcccaaagactgagccctgctggcagacttcaaggagaagcccccacaggggattttgctcctagagtaaggcttatctgggcctcggcccccgcacctggtggccttgtccttgaggtgagccccgtgcccatctgggccactgttgggaccacctttgggagtgtcatccgtacaaaccacagcatgcccggttcctcccagaaccagccccagcctgggaggatcaagtcctggagcccgggccattatccctctggggactccgccacaacaggggagaatggagggtccttggggtaacagggaccacagacccctcaccactca

SEQ ID NO: 10623 - DNA, 705 bp, Macaca Fascicularis
  misc_feature (1)...(705): n = A,T,C or G
cccccaannnnnnnnnnnnnnnnnnnnntgggagnnnnnnnnnnnnnnnnnnnnnnnnnnnnnnnnnnnnnnnnnnnnnnnnnnnnnnnnnnnnnnnnnnnnnnnnnnnnnnnnnnnnnnnnnnnnnntgaactttggcgctgctggcagcatcatggcccacgagctgttgcacatcttctaccagctcttgctgcctggcgggtgcccagcctgtgacacccatgccctccaggaagctctcctgtgcctgaaacgccnnnnnnnnnnnnntccattacccagcggaacctccttcaatgactccctcacattcttggagaacgctgcagacgtgggggggctagccattgcgctgcaggcatacagcaagaggctgttatggcaccgtggggagaccgtcctgccccgcctggacctcagcccccagcagatcttctttcgaagctatgcccaggtgatgtgtagggagcccagcccccaggaatcttacgacactcacagccctccacacctccgagtccatgggcccctcagcagcnnnnnnnnnnnnnnnnnnnnnnnnnnnnnnnnnnnnnnnnnnnnnnnnagcccctccagccgctgccagctctggtaacttggttaccgaagatgccacagcacagaaatatcgaccaacacctccctggtcacatccatggaatcagagcaagatttcctttc

SEQ ID NO: 10624 - DNA, 743 bp, Macaca Fascicularis
  misc_feature (1)...(743): n = A,T,C or G
cagtgagcttctaccaccatggacctgnnntcgggcgccggaagacgccagaggagctactgcggcagaaccagagggccctgaaccgtgccatgcgggagctggaccgcgagcgacagaaactagagacccaggagaagaaaatcattgcagacattaagaagatggccaagcaaggccagatggatgccgttcgcatcatggcaaaagatttggtgcgcacccggcgctatgtgcgcaagtttgtattgatgcgggccaacatccaggctgtgtccctcaagattcagacactcaagtcnnnnnnnnnnnnnnnacaagcaatgaagggtgtcaccaaggccatgggcaccatgaacagacagctgaagttgccccagatccagaagatcatgatggagtttgaacggcaggcagagatcatggatatgaaggaggagatgatgaatgatgctattgatgatgccatgggtgatgaggaagacgaagaggagagtgatgctgttgtgtcccaggtcctggatgagctgggacttagcctaacagatgagctgtcaaacctcccctcaactgggggctcgctcagtgtggctgctggtgggaaaaaagcagaggccgcagcctcagccctagctgatgctgatgcagacctggaggaacggctcaagaacctgcggagggactgagtgccccttgccactccaagataaccagtggatgccnnnggatcttttaccctaacc

SEQ ID NO: 10625 - DNA, 318 bp, Macaca Fascicularis
ggaagggagggttcacagggggcaggtgctgtttcctgttggtcgcaagcatgtgggcggggtcatgggagcggcagttagagacttgtgggggccagacgagcttcatggcaatgcgctagtcccttgggttaatttgtgcgttatgctttcattggaccagctgaaatcactgtatttattcaacttgtgatttttgttttctttctcactttaacttaaagagaattttataggtcatggaaatttaatcattaaacgttttcagtatcaattggtgtttttgttaaaggaatgaataatctgttcatgcatgct

SEQ ID NO: 10626 - DNA, 814 bp, Macaca Fascicularis
  misc_feature (1)...(814): n = A,T,C or G
ggccacatcatttcagatggagnnnncagcnnncctggggatgtggccnnnnnnnntggggcaggagctgacttcgtgatgctaggtggcatgctggctggacatagtgagtcaggtggtgagctcatcgagagggacggcaagaagtacaagctcttctatggaatgagttctgaaatggccatgaagaagtatgctgggggcctcagagggaaagacagtggaagttccttttaaaggagatgtggaacataccatccgagacatcctaggagggatccgctctacgtgtacctatgtgggagcagctaagcnnnnnnnnnnnnnnnnnnnnactaccttcatccgagtcacccagcaggtgaatccaatcttcagtgaggtgcgctagacctgggcagttctaccctcccaaggcacaagtactctaccatggggnnnnnnnnnnnnnnncctcacccatcccagctactgcagctctgtattactttgtcatttcctgttgtctcactcctgagggctcctgcagtaactctgtacttctctatctgcacacacaaaatgcccaagacactcactggggaggaagcaaggaagaaaacagtctgagaaaatgacgcaagataatcaaatgggaatctggggacccaacatcctgaagattattaaaaggaaaagatgctgattggtacataagtctcttatatgaccttggtctagaggaggcaggcttttagaatcatgttttgttaatctgcttcactaaatgggaccttcacatatctaaaaagctctgaagtgtttgtatattgag

SEQ ID NO: 10627 - DNA, 711 bp, Macaca Fascicularis
  misc_feature (1)...(711): n = A,T,C or G
taatannnnnnatgaannnnnataatttagccacatgagggcagtagaaatccaaatgcaagtttttattttttctttttatttcaggtaagtaatttgcaatggagactgaaaatagagtgccaactaaaatatttttgaactcttcccttagcaaatttgtctggctttttgtttgtttaagtagctgggattaaagttaaggaaaatcttaagcattaaacttattaacaattatgttcttggtagccaagatctcttaaattgctttggagaaaaatgtgaggggaannnnnnnnnnnnnnnntttctaaatgttttgttttnnnnnnnnnnnnnnnnnngtacagattctgcgataatgtgtggacttttgtattgaatgatgttgaattcagagaggtgacagaacttattaaagtggataaagtgaaaattgtagcctgtgatnnnnnnnnnnnnnnnnncaatactacagaatgaatagaaaaaatatggcttttttatgccatcttctgttactcattgcttttgaagagaagcatagaagagactttttatttattctagaattgcagaaatgactacactgtgctataccagagaattccagtagaaacttataactctgtagcctcttacatcacctttattatacagcatggaaaaaaagacttttttttaatgacaaannnttgttgccttcctaag

SEQ ID NO: 10628 - DNA, 716 bp, Macaca Fascicularis
ccaaggaaacaaatacagagtctcccagggagaagaaaaggcagagactccatttgaccctctgtcctgtctgggtgctcatgaaatgtgtggaaaatctggtgttttagccaatggggcaaccatcacagagcaggtcaggcgaattcttatcagacctgtgcaagtgaggcactctacgtgttagtcccagctttgccagagccctgtaaccacaagcaagtcattcagctcttccgggcagctcccacatcatagggaaggggtggaactgtgctctcccagatcccttcaacctcttccctcagggagcacctccgtgggcaggggcccctgtgggacgtcagggcatggctgcccagccctcccctgcgaggcacctacttggaaatgatcactggagggcagcgggaaagggcacttagcacctgggacatgtgaccccgcttcacgaccacagcagatgtggcatttgggttggaaacacactgcagaggccttgaaggctgacggctgtagtttctggccccgttcaaccctgcaaaagcctgccttgtacctcaggacgtcgtggaaggtgacgtcgccaccgttgtggagcctctccatttcgtagcacatgtgcttaaacaggagcttgtccttgtccaggtccacctccagcctcccacgcagcagccgcagcaggaacttgacacggaatgtggggatcaccc

SEQ ID NO: 10629 - DNA, 747 bp, Macaca Fascicularis
  misc_feature (1)...(747): n = A,T,C or G
gtaacgcagacatcagctttacacttcacaggagattgatggcactgaggaagactgcaatggagatcatgacactactgttaataaggccaggaaaactgccatttcaagttctgaaaaatgtttgagtatttgaatttagagaataacatggttccaagaaggagggtgtaaaacctgtaaaatactgtcaacatatgtattcattagttacaatctcatgtttgtgttttcttagtagnnnnnnnnnnnnnnnncgtaaaaaataccccaaatatgtttaagtattaaatcactttacctagtgttttagaaatattaatttacttgaagagatgtagaatgtagcaaattctgtaaagcatgtgtatccagtgttatgtactttgatccttgtgacgtctttctgtcatgtagcttttagggtgtagctgtgaaaatcatcagaactcttcactgaagctaatgtttggaaaaaatatatacttgaagaaccaatccaagtgtgtgcccctacccccagctcagaagtagaaaggatttaagtttgcttgtattagctgtgccttcattattttgctatgtaaatgtgacatattataaaatggtgcataatcaaattttactgcttgaggacagacgcatacagtaaggatttttaggaagaatatatttaatgtaaagacttttagcttctgtgtgggttttgaattatgtgtgagnnnngtgatctataaagaaacataa

SEQ ID NO: 10630 - DNA, 1154 bp, Macaca Fascicularis
  misc_feature (1)...(1154): n = A,T,C or G
cttcaagccacatccataggtgtctggcctcagtgctgcaccagctggtaaccnnnnnnnnnnnnnnnnnnnnnnnnnnnnnnnnnnnnnnnnnnnnnnnnnnnnnnnnnnncccaggaaagtggctatcagaggagccgcgaggcagccctgttccctgtaccgccctcggattggaaagcccctcctgcagctctcaggtaacagcagacaccaagtgagagaacccagtggcctctggctcccagctcaggaggtgnnnnnnnnnnnnnnncagccgagccgcctgtatnnnnnnnnnnnnnnnntcctcggatttaggcagacttgnnnnnnnnnnnnnnnnnnnnnggaggnnnnnnnnnnnnnnnnnnnnnnnnnnnnnnnnnnnnnnnnnnnnnnnnnnnnnnnnnnnnnnnnnnnnnnnnnnnnnnnnnnnnnnnnnnnnnnnnnnnnnnnnnnnnnnnnnnnnnnnncttcctttcagcaccaataaggaaaaagaacacctctcttttcaaaatatcttatcaggtgtaaagatttttcttctagggaagaaccgtctggatatatatttgataatgttaccaaaaccgtaggtgtgcttaccatagaaaacccctaatgtcccgtgaagatacaatacagaaaaaatacagaaattaaaaaagtttttttataacagtatttctaaatctcagcaagttaaaaagcaatagttaaaaagcatcaagattgatatacttaaaacttaaggtggttatggatgaatgaaaatgaacatttccttcctcagcggcccccgtgcctcgtggcttcctttgagactgggcctggggcaggcacagagccttggtgcgggcctcgggtgacccgtgtgcccacccctgctaggccttagatgccacagaatctgagnnnnnnnnnnnnnnnnnntaatcagtggaagggcctggcctgtacacgaagcccgggaatccacaggcagccactatgggacacgtgggtaggggatccctgccttggcgctgagggaggtgtgcaggggcctgggggccacacgtccttactctggacaccaggacctgactaggcagaggcaaccttgtgatgacnnnnnnnnnnnnnnnnnnnnctgcctgtgnnntggg

SEQ ID NO: 10631 - DNA, 740 bp, Macaca Fascicularis
  misc_feature (1)...(740): n = A,T,C or G
gcttgggagatgtggctgnnnaatgagtgagggtgggtacaggntnnnctgccccagcatggctcagatgtctgagtggggggacacgggctgagggtgtgtggnnnnnnnnnnnnnnnccccaggcagatactggttcacaaggacatggttagctgggaggcctccaaagaggctgaggtcagacactttgtccacgtagcgctggagccatgggggcagccgctcaggaaccatcccccggggatggggaagcccacctggggaaggcaatggggtcctgagggctcccccatagcaacagatcccccattagggattccacaatggctggaagcaccctgatcccctcagggacccctgaccctttggagatagccactgggtccttcagaggtttactcacttctccagaccacgggcccctttcagatactcccannnnnnnnnnnnnnnnntaatccctcaggacctccactgacccctttaaaatcctcctggctcggccgggcgcggtggctcaagcctgtaatcccagcactttgggaggccgagacgggcggatcacgaggtcagnnnnnnnnnnnnnnnnnnnnnnnnnnnnnnnnnnnnnnnnnnnnnnnnnnnnnnnnnnnnnnnnnnnnnnnnnnnnnnnnnnnnnnnnnnnnnnnnnnnnnnnnnnnnnnnnnnnnnnnnnnnnnnnnnnnnnnnnnnnnnnnnnnnnnnnnnnnnnnnnnntg

SEQ ID NO: 10632 - DNA, 689 bp, Macaca Fascicularis
  misc_feature (1)...(689): n = A,T,C or G
ggaggctagccttgttctcccgctttacagacccctntcctcccactcacaccccctctctgagctgcgccactagcacatgatgcagtgcttcttagaggcgttgctgtcctctgcttggaggcttccgaggattttccaggacaggggaaggcgctcgcctaagaaaaagccttcaggttccgagtcagaggaggaggagcaggtggagaaaggggtgtccttggaatcacaaagagtctccaagcggcactgctcctgccctttgggtgcctccgctttttccccaggtcggttctcctgctggggactggatccaggcagccccgtctgagtttgcaggcaggaaccgccggcggcagcgagaaggagtgttcggaagagggtcgcagagttcaccgaggtttggtcccttcctccagttcggtctggtccagtctccccaaggaatgcctgcccttccagtgccccggcccagctcgagcctgcatccgagtagcggttctcgaagcagctggggcagcaggggcttcccccaggcagggcataacgtcccccgcccagaggcccggcgcagtcctggcaacagaagtggttctcatgccagcgctgtccctctgcctcggtgcagcgctgggagaagatcagctggtcacaagccgggcagcgcgggcgcagcaactctgcat

SEQ ID NO: 10633 - DNA, 735 bp, Macaca Fascicularis
  misc_feature (1)...(735): n = A,T,C or G
agtgcccccgtgcctgccnnnnnnntgcnnnnncccgctgagccggaggcgggcacgtcggtactgatgtgttagggtagttcagaccccnngctccgggcaggcgcggctggacggacccccaccctgggtcttaaaacatgaggggaggcgtggggaggccttggccgagcccgccggccagcctgacaagccaggctggctgctggtgaatgtgaacgctccgggcttaagtccactccccgccccaagttctctgnnnnnnnnnnnnnnnnnnnnnnnnnnnnnnnnnnnnnnnnnnnnntggatatcccccacatggacnnnnnnnnnnnnnnnnnnnncaacaagaataaaaaactggtcaagaaactagccaagaagtannnnnnnnnnnnnnnnnnnnnnnnnnnnnnnnnnnnnnnnnnnnnnnnnnnnnnnnnnnnnnnnnnnnnnnnnnnnnnnnnnnnnnnnnnnnnnnnnnacaacgaaaacatggtggccaaagtggatgaggtgaagtccacaatcaagttccaaatgaagaaggtgttatgtctggctgtagcagttggtcacgtgaagatgacagacgatgagcttgtgtataacattcacctggctgtcaacttcttggtgtcattgctcaagnnnnnnnnnnnnnnnnnnnnnnnnttatatatcaagagcaccatgggcaagccccagcgcctatattaaggcacattgaataaa

SEQ ID NO: 10634 - DNA, 710 bp, Macaca Fascicularis
  misc_feature (1)...(710): n = A,T,C or G
gttccggannnnnnnnnnnatggnntnnnannncntgttcgagagcttctcaacgtgatccaggactacacttgggaggacaacagcgatgagaaaatccgcatctacacctgcgtcctgcatctcctctccgccatgagccaggagacgtacctttaccacatagacaaagtggactcnnnnnnnnnnnnnnntgggggagactccaannnnnnnnnnnnnnnnnnnnnnnnnnnnnnnnnnnngatggctcagatcctagagcatctgaaaaccctggccaaggacgaggccctgaagcgccagagctcgttgggcctttccttttttaacagcatcttggcccatggggacctacgcaacaacaagctcaaccagctctccgtcaannnnnnnnnnnnnnnnnagaggcacggctgtgcagacaccaggaccatggtgaaaacgctagaatacatcaagaagcaaagcaaacaaccagacatgactcatctgacggagctggccctcagactccctctgcaaacaaggacctaacccccaggcccnnnnnnnnnnnnnnnnnnnnnnnnnnnnnnnnnnnnnnnnnnnnnnnnnnnnnnnnnnnnnnnnnnnnnnnnnnnnnnnnnnnnnnnnnnttttctttttacatatgtgcaaattggtttaagctttggcctctatccaggttattctgacaatgaagaaat

SEQ ID NO: 10635 - DNA, 726 bp, Macaca Fascicularis
  misc_feature (1)...(726): n = A,T,C or G
gagttttgctcttcttnnnnnngctggagtgcaatggcgcgatcttggctcactgcaatctccgccttgtgggttcaagcaattctcctgcctcagcctcccaagtagctgggattacagacgcccaccaccatacccagctccnnnnnnnnnnnnnnnnnnnnnnnnnnnnnnnnnnnnnnnnnnnnnnnnnnnnnnnnnnnnnnnnnnnnnnnnnnnnnnnnnnnnnnnnnnnnnnnnnnnnnnnnnnnnnnnnnnnnnnnnnnnnnnnntgtgcctggcctgttatttccaaactgaacctttcattactttctttagccaannnnnnnnnnnnnnnnnnntacaggaggaagatagcaacgttgcaccctaagggtccaactggagacactaatatgcagagatggggctgtgagatggccctattgggttggaatcagaaccagaagtcacacaaccttgnnnnnnnnnnnnnnnnnnnnnnnnnnnnnnnnnnntagggcaagtatatcctccttggatattcactaacttgaaagttaaaagtagttttcctggttttcatgctggcagtctttacatgcaccannnnnnnnnnnnnnnnnnnnnnnnnnnnnnnnnnnnnnntgctcaccatcaaattctggaggtacacagctctaagctaatggtaggggcaggaaagacatgtagaaggaaataaatactcaaactgccccccat

SEQ ID NO: 10636 - DNA, 719 bp, Macaca Fascicularis
  misc_feature (1)...(719): n = A,T,C or G
caggatccggtcctgttttgctgcgttcntactgtttctatgttctcctgcttgccatcaatggagtgacagaatgtttcacatttgctgctatgagcaaagaggaggtcgacaggtacaattttgtgatgctggccctgtcctcctcattcctggtgttatcctatctcttgacccgttggtgtggcagcgtgggcttcatcttggccaactgctttaacatgggcattcggatcacacagagcctttgcttcatccaccgctactaccgaaggagcccccacagacccctggctggcctgcacctgtcgccggtcctgctcgggacatttgccctcggcggtggggttactgctgtttcagaggtgttcctctgctgtgagcagggctggccagccagactggcacacattgctgtgggggccttctgtctgggagcaactctcgggacagcattcctcatggagaccaagctgatccatttcctcaggactcagttaggtgtgcccagacgcactgacaaaatgacgtgacttcagggaagcctggacacctgaggcacctggaccagctatgggcggttctgtgggtggaacacatattctgtgtaagagccccccgagggctctgcagcggagtgacagcaagcctggaggtgaggcaccagagagagcatgagacacctgtgaccattcgaagtctgaaatgcggaggaggag

SEQ ID NO: 10637 - DNA, 729 bp, Macaca Fascicularis
  misc_feature (1)...(729): n = A,T,C or G
aggtggcgatagggcgacgggaggcccnnnnnnncnnnnnngatgactatgacacagaggatggcacaggcgtccgggattacatccatgnnnnnnnnnnnnnnnagggccacattgcagccttgaggaagctgnnnnnnnnnnnnnnnnnnnngatctacaacctgggcacgggcacaggctattcagtgctgcagatggtccaagctatggagaaggcctctgggaagaagatcccgtacaaggtggtggcacggcgggaaggtgatgtggcagcctgttacgccaaccccagcctggcccacaaggagctggagtggacagcagccttaggannnnnnnnnnnnnnngaggatctgtggcgctggcagaagcagaatccttcaggctttggcgcgcaggcctgaggaccctcccctaccaaggaccaggaaaagcagcagctgcttgctctctagcctctggcaggaacccagggccctggagctgctggggccaagccacggcctcccctacctcaaaccccagctgggcccactcatcccaccaggcatgaggccaagggctccactgaccaggaggccgaggtctctaactcttatcttccacagggtccaagagttcatcaggacccccaagagcaagtgagggggcaaggctctggaacaaaacctcctcctcccaggcactcatttatactgctctgaaagagcttccaaagtattaaaa

SEQ ID NO: 10638 - DNA, 714 bp, Macaca Fascicularis
  misc_feature (1)...(714): n = A,T,C or G
gcctatgacaggatcacactgggcctcccagaagggaaagtcccagcggtccccacaggaggcttgggagcccacaagccattgaggaggctgccagctcctcctcaccaggccccaacctgggtaggtctggagccacagaccccatccnnnnnnnnggntgctggaaggctcagcacctccacacccaggcactagnnnnnnnntnnnnnnnnnnnnnnnnactcacccccaccagcagttgctctcctcccagctccacctctgggaagctgggcatgtggtcctggaaattccatattgagggcccagacagggcatccccaagcagaaaggcaannnnnnnnnnnnnnnnnnnnaacctccaggatttggaaaccacaactccagcccaccctaagaacctgtctcccagggagcaggggaagacacagccacccagtgcccgtccaccttgtgaggatcccagccagggctggctatgggagtctgagtgtgcacaagcagtgaaagaggatccagccctgagcatcacccaagtgcctgatgcctcaggtgacagaaggcaggacgttccatgccaaggctgccccctcacccaggagtctgagtccagcctcctctggaggggccaagaaccagggnnnnnnnnnnnnnnnnnnnnnnnnnnattggttccagatgagcttttaaagcaaacatagcagttgtttg

SEQ ID NO: 10639 - DNA, 689 bp, Macaca Fascicularis
tccatgtacctaccacccaggagcaccccgattccatgaggggatgaagtcttggagctgttgtggcatccagaccctggattttggggcattcttggcacagccagggtgcagagttggtagacatgactgggggaagcagctcccagcatcttgccgccatgattggcaccagacagattccttagtagtggtgactgtatatggccagattccacttcctgcgtttatctgggtgaaggccagtcaaactgagcttcatgtccacattgtctttgatggtaaccgtgtgttccaagcacagatgaagctctggggggtcataaacgtggagcagagctctgtctccttgatgccatctcgggttgaaatctccctggtcaaggctgacccaggatcctgggcccagctggagcaccctgatgcactagctaagaaggctagggcaggggttgtgttagagatggatgaggaagaatctgacgattcagatgatgatctgagctggacagaggaggaggaagaggaggaagcaatgggggaatagtgaccagacagttgatgtctagataggacctcaatgattcccttagaatcttagagaccaggatattgttggccatgtggtgtcattgagcagcaggaggctgaaggaggggagaacaaaatttccaaaccatgctgttttt

SEQ ID NO: 10640 - DNA, 332 bp, Macaca Fascicularis
  misc_feature (1)...(332): n = A,T,C or G
gtataaaaaaatccaaacccaagtcaaaaccttggctccagcatgcaaacacgtttacaggaaggtattctcctggctttgtgcccaccatggtgcgaatcctgacccagggcctcctgtctcccttcaaaggcagacccttttgggggatgagtttgccagactccccgtgctggtttctttgttactatctctttggggttttgttttagttcttttttcctttttttcttttcttttcttttttaaaaannnncggctgtgaacttgaatgaccactgctcaaactttctgctattggcgcgggtgggatgggaagaaggggcgtctgt

SEQ ID NO: 10641 - DNA, 727 bp, Macaca Fascicularis
  misc_feature (1)...(727): n = A,T,C or G
gtnnnnnnggagcacactcnnnnncaaagaatgaggcctccaaacaaatattggagattaaaaaatttataccattcccaagatttacatcagatcctcaatcaaatgatattatgctggttaagcttcaaacagccgcaaaactcaataaacatgtcaagctgctccacgtaagatccaaaacctatcttagatctggaaccaaatgcgaggttannnnnnnnnnnnnnnnnnacccagatttcttaagaccttctgataccctgcgagaagtcactgttactgtcctaagtcgaaaactttgcaacagccaaagttactacaatcgcgacccttttannnnnnnnnnnnnnnnnnnnnnnnnngatgccaaaggccagaaggattcctgtaagggtgattcagggggccccttgatttgtaaaggtgtcttccatgccatagtctctggaggtcatgaatgtggtgtcgccaaaaagcctggaatctacaccctgctaaacaagaaataccagacttggatcaaaagcaaccttgccccacctcatacaaattaagttacaaatgnnnnnnnnnnnnnnnnnnnnnnnttttttcctaatatgctcacaggttagagttggatataagtaaagcacaacacaagatggggtccatttttgtacttgtaagtcattttattannnnnnnnnnnnnnnnnnntcttgtatcactgatgtatttctac

SEQ ID NO: 10642 - DNA, 686 bp, Macaca Fascicularis
  misc_feature (1)...(686): n = A,T,C or G
cctggccacacggactcggcctgccntnnccctnnnnnnnnntgccctnnnnnnnnnnnctgagagccacttgcccaccagtctggtgaggataannnnnnnnnnagcgacaggaggccaaccctgagaccaagaacagggtgcctggctgccaactgctcctccagaggtgcgnnnnnnnnnnacttagcactagcattctatcagcactagcatcccactccattggcactggtaccccgctccatccgcattaatgccctgctccnnnnnnnnnnnnnnncgctccattggcactggcgcccactccatcccccgctccatcggcactggcgccccgctccattggcactaacgccccactcggcgccccactccatcagcactaatgtcctgctccatcggcactggcgccccactnnnnnnnnnnnnnnnnnnnnnnnnnnnnnnnnnnnnnnnnnnnnnnnnnnnnactacgtccaacnnnnnnnnnnnnnnnnnnnnnnnnnnnnnnnnnnnnnnnnnnnnnnnnnnnnnnnnnnnnnnnnnntccaccggcactggcgccccacttcatgggcactttgctgctgcctcctgagcactgccttccatgaacagggacagaccnnaggccnnnnnnnnnnnnnnncctgcgggcctccaaagggcaacagaagagtata

SEQ ID NO: 10643 - DNA, 796 bp, Macaca Fascicularis
  misc_feature (1)...(796): n = A,T,C or G
ctgataaggccctaatgatgctctttaatgatggcacctttcaggtgaatttctaccatgatcatacaaaaataatcatctgtagccaaaatgaagaataccttctcacttacatcaatgaagataggatatctacaactttcagactgacaactctgctgatgtctggctgttcattagaattaaaaaatcgaatggaatatgccctgaacatgctcttacaaagatgtaactaaaagacttcgaatggaccctacgggactcctcttttccactgtgagatctacagggaagccagtagaatgatctagagcatgttgaagnnnnnnnnnnnnnnnnngtacgaaaacaattcccccgtggcccgctggagtgggtggaaccagaacaggctaaggcatacagttcttgactttggacaatccaagagtgnnnnnnnnnnnnnnnnnngttgagatacctgttttaaaaggtttttcagacaattttgcagaaaggtgcatnnnnnnnnnnnntctctctgttgagagcacttcagccagaggacttggaactgtgaatatacttcctgaaggggagggagaagggaggaagctcccatgttgtttaaaggctgtannnnnnnnnnnnnnnnnnnnnnnnnctgtgaactatggccatatataatttttttttccattaatttttgaagatacttgtggctggaaaagtgcattccttgttaataaactttttatttattacagccacaaagagcagtatttattatcaaaaatgtcttttttttttatgttga

SEQ ID NO: 10644 - DNA, 764 bp, Macaca Fascicularis
  misc_feature (1)...(764): n = A,T,C or G
aaaatggatgggatgaggatgagaggctggagataattgttttatgggatttgggtgtgggactagggtacaatgaaggccaagagcatctcagatatagagttaaaactcaaacntcttatgtgcactttaaaaatacactttaggggctggcacaaatctgattagagtcacatatccatacacaggggaaacacacatagactcaacagcagccatgcagttccagagacacatgaacctgacacaatctctctcatccgtgaggccacagtttggaggagcctagtggcctcgggaaaagtcccaatcctgagggaccccccagagatttccatggtgctccggtccactgatcttgggcctggggtgatccaaacaccaccccagctccagctgtcttctaccactagaagcgccaagagaagcagaggtggctggcactggccagtcggaaggcacgatcagaccttggaggactttgctggcctgcctgctagccctgctcttgttgtggagaaggaagcagatgcgattgcatcaccctgtcattgggcaccgctgactccaacatggaggacaccagggagtagggcctgggcctgtttccccagctgtgatcttgcccagaacctctcttggcttcataaacagctgtgaaccctcccctgagggattaacagcaatgatgggcggttggggggttgggggtggattgtgtcctctaaggggacaggttcatctgagtaaacataaaccccaac

SEQ ID NO: 10645 - DNA, 806 bp, Macaca Fascicularis
  misc_feature (1)...(806): n = A,T,C or G
tactagtgnnaanntttnatatatnnnnnncacaaaagtcttaaaaccatgtggaaaaattaggtaattattgcagattgatgcctctcaatcccatgtattgcgcttatgtttcaagttgttatcacagttgagacttaatttctcctaatttcttctgcctgaagggtaagtggtgcgtccagcttacacaatcatgattcaaaggttggtgggcaatgtaacactttaaaagtatgatggaagagctatctggaaattatgagtaggctgaattttcggtacaaaactttagtataattgtagtttgcaaagtttatttcagttcacatgtaaggtattggaaataannnnnnnnnnnnnnnnnnnnnnnnnnnnnnnnnnnnnnnnnnnnnagtggttctttgcagtttcttgaaaatttataaaccaggcacaaggttcaatttagattttaagcacttttataacaatgagaagtgcctttnnnnnnnnnnnnnnnnnnnnnnnnnnttaatctgacatcgctgccagtcgagtttctgggcagatttcctgtgtcagtgttcccactccttgttgcattaatcaagttatttnnnnnnnnnnnnnnnnnagtgtttgtatgtcccaatttacttgcatgtgtaaaccattgctgtgccattcaatgtttgatgtgtaattggaccttgaatcgataagtgtaaatacagcttttgatttgtgatgcttttatacaaaagtttattttaataataaaatgtttgttctaacttgtctgcttttttaaaaataatcttact

SEQ ID NO: 10646 - DNA, 748 bp, Macaca Fascicularis
  misc_feature (1)...(748): n = A,T,C or G
gaccagagtgnnnnnncaacgaccatcagcggcntcatcaccacccgcaagcaggcagtgggacctggtggtgtcaactcaggcccagnnnnnnnnnnnnnnnacaagtttctggcatggagcggcgtcatggagtggcaggagcccaggcctgagcccaacagtcggtccaagaggtggctgccgtcccacgtctacgtgaaccagggggagatcctgaggaccgagcagtggccaaggaagctgtacatgcagctcatcccgcagcagctgctgaccaccttggtnnnnnnnnnnnnnnnctcgcgcctggtccagttccacttcaccaaggacctggagacactgaagagcctgtgccggatcatggacnnnnnnnnngctggctgcgtgcacttttcctacaaagcatcatgtgaaatccgtgtgcttatgctcctgtattcttcggagaagaaaatcttcatcggcctcatcccccacgaccagggcaactttgtcaacggcatccggcgtgtcattgccaaccagcagcaggtcctgcagcggaacctggagcaggagcagcagcaacgagggatgggggggtagtggccaccccgggctgggcccctccagagtcacagatgaggccccggcagagactggtgacatgcttctgaacaggggcccctggggacttcaactgcccagcaacatggaggatggtgtcctgaggcctccaaggatggtccccacccctctacgt

SEQ ID NO: 10647 - DNA, 702 bp, Macaca Fascicularis
  misc_feature (1)...(702): n = A,T,C or G
tcccacatggtaaatatgatcccattgggagtaaattgtagcttttnnttattcatgcagtaaataatacatcctttcacttagcagagatgnnnnnnnnnnnnacgttttgctatgttaaaagtggcagaacatgaaagacaaaaataacattttttaagcgacataagagtgaaatgaatctctatgacatttcgggaaaaaatatagttttctatctctttcaagggcagaagagttttcatttttatttttgtaattttatctgtaagtcataannnnnnnnnnnnnnnnnnnnnnnnnnnttttgaaaattacagttctggaaatgcagatagtgtttactttgaaaacaaatgtcatgaaagatttccagtttttaaagctgtatgtttcactgcttcatatctctgtccnnnnnnnnnnnnnnnnnttagtttgtgcctagagctgtcactcactgatnnnnnnnnnnnnnnnnnnnnnnnttccaaagtgggatcgactgtgcgccttnnnnnnnnnnnnnnnaagtcttttgttccactgacatttgggtgatgtcttcacatggaaatataataaaagtgaaaatctagtttagtactgcattatttattttcctgaggctaaagaggagcagtcctatgccttttattcagcatcctttatcnnnnnnnnnnnnnnntgataactgccttt

SEQ ID NO: 10648 - DNA, 767 bp, Macaca Fascicularis
  misc_feature (1)...(767): n = A,T,C or G
ttacatcagtagctnncagaggaaagactgtgcagtaatgtcacacagaagaaagtacctgacaaattattggattccagcacagtgactcacttattcaagataactgaaaacattggttgtgnnnnnnnnnnnnnnnnnnnnnnnnnnnnnnnnnnnnnacagagggcacgctatgaggcagctaactggaaatacaagtatggctatgagattcctgtggacatgctgtgtaaaagaattgccgatatttctcaggtctacacacagaatgctgaaatgaggcctcttggttgttgtatgattttaattggtatagatgaagagcaaggccctcaggtatataagtgtgatcctgcaggttactactgtgggnnnnnnnnnnnnnnnnnnnnnnnnnnnnnnnnnnnnnnnnnnnnnnnnnnnnnnnnnnnnnnnnnnnnnnnnnnnnnnnnnnnnnnnnnnnnnnnnnnnnnnnnnnnnnnnacatgcctgtctactgttctatcannnnnnnnnnnaccttcagaaatagaagttggagtagtgacagttgnnnnnnnnnnnnnnnnnattcttacagaagcagagattgatgctcaccttgttgctctagcagagagagactaaacattgtcgttagtttaccagatccgtgatgccacttacctgtgtgtttggtaacaacaaaccaacattatggaggtccctggatgaaaaaggaacctctcccactcctcctgccactgnnnnggttaggactctat

SEQ ID NO: 10649 - DNA, 703 bp, Macaca Fascicularis
  misc_feature (1)...(703): n = A,T,C or G
ttgcccatgtcannnnngatcagcacaaattccctcattactttggaaaggaaatcataggtgggatgctggatatagaaccaagactttggaggaaaggcatccgagaaagcnnngaggnnnnnnnnnnnnnnnnnnnnnnnnntgctcagtggtggaagccatatgacttcaccaaaagtaaaagctgttgaggtgtaccttccattttaaaatttcnnnnnnnnnnnnnnnnnnnnntatttccactgcatctaatgaagcaactgaccctcagnnnnnnnnnnnngnnnnnnnnnnnnnnnnnnnnnnnnnnnnnnnnnnnnnnnnnnnnnnnagattgtgttatttttttcctcacctgcttctatggacttcattttagtcatcatggagtaaaaacatctattcgatgatctgctcacattcctgctctctacctacttcttgatattcnnnnnnnnnnnnttaatttagagaaggccttttctgaagggatatctagaaagcataggaaatccttggttcagagggaagtgggtnnnnnnnnnnnnnnnnnngtctattatctggcttcttttgcatttttaaaaataagacttgatttaattttaatttcataggattttatagaaaagctcttaattttctactagcagtatatagtatcacttctattctttttgttaaaggaaaagggaaa

SEQ ID NO: 10650 - DNA, 759 bp, Macaca Fascicularis
  misc_feature (1)...(759): n = A,T,C or G
agccagggatgccagcagcaccctacccaatgcagtacccaccacnnnacccggcccaacccatgggcccgccggcctaccacgagaccctggctggaggagcagccgcgccctaccctgccagccagcctccttacaacccagcctacgtggatgccccgaaggcggccctctgagtgttctccgacctctctggctgccacttggttatgttgtgtgcagatgtcccattgttccctggagcctgtgtcgtgcctgttgggggtcaggcagcctcctgatgccagaacacctcaggcagagcccttctcacctgagagttgtctgcctggactgtcccctgtccctgcatcttccctgggaccacccggagggccacatccacacacagcctagctgcccacagggagctctgctgcccttgctggccctgcccttcccacagttgatatgagactgaaaccccaggatagtggagggaaattggctcagaggagacggacaacctggcaactgtgagtccctgctttccctgacaccagcctcatggaatatgcaactctggtaccccagtccagggtgttctggcagcagggacacctgggccaaggggccatctggaccaaaggtggggtgtggggccctggatggcagctctggcccagacatgaatacctcggtgttcctcctccattactgtttcaccagagctgtcttagcttcaaatctgttgtgtttctgagtctggggtctgtactc

SEQ ID NO: 10651 - DNA, 742 bp, Macaca Fascicularis
  misc_feature (1)...(742): n = A,T,C or G
ggtggagtcatatgnnnngttcgcaggcaaccctctagtcatggagaaaggtattcaaagatctagtccaatctttttctagagaaaaagataatccgaagctcacaaagataaagtgacttcctcaaaatcacatggttcaggacagaaacaannnnnnnnnnnnnnnnnnnnnnnnnnnnncctcagaaggaataatcggtaaactaagaatnnnnnnnnnnnggcgccagaatgacacaaaggacagaattcttttcctagttcttaccctcgcaaggctagggagggcatgaacacaaaaataagaactggtcttctatactttctctgaatcatttaggtttaagatgtaagtgaacaattctttctgccaagaaacaagttttggatgagctttcatgtatggannnnnnnnnnnnnnnaccgagggaccaaggaaacaaggtgggggaggcagagnnnnnnnnnnnnnnnnnnnnnnnnnnnnnntgtcactgtcactagctgatccctcaggtctgctgcaaacacaacatggagggagggcgcagatgactctttagtgtgggtctttttgtctgtagtgaatgttcaacagtttgcccaggaagtgggggatcatatgtgtcttagtggacaggggtctgaagtacactggaatttactgagaaacttgtttgtaaaaacgatagttaattattgcattttcttacaaaactatatttnggaaaattgtata

SEQ ID NO: 10652 - DNA, 721 bp, Macaca Fascicularis
  misc_feature (1)...(721): n = A,T,C or G
tggtgtcacctcctgnnnggggaagannnnnnnnnnnnnnnnnnnnnnnnnnnnnnnnnnnnnnnnnnnnnnnnnnnnnnnnnnnnnnnnnnggtgcctgcactcccggcaggtccaagggcagctccagccactttcgcatgtcaccttgggtcttccagctccagtacctttgcgtgtcacctcacacaccacaaggggactggggcatctggtccctggggcctggtgccgccctgccgggttccacaggccaatgctctgaaagaatagacgtggggcccgagaggtttaaagattttatttttannnnnnnnnnnnnnnggacagcgaagccttccccgtagagacccgtgctccaacttgggcctggggcactgctcgctgctcccaggaagggggtggcgccacaggcaggaacctgcgaagtccagagtccagggtggagagcgctagcctcagccagagcagccacggcagccacagtgnnnnnnnnnnnnnnnnnnnnnnnnnnnnnnnnnnngacattgagatnnnnnnnctgcgccacactcgtccctgcacgctcacatacgtggcaaccctctgccaccatgccgtatagggacacacctcannnnnnnnnnnnnnnnnnnnnnnnnnnnnnnnnnnnnnnnnnnnnnnnnnnnggaaacagctgctattgataccaaggttacatctgtatgtgtagttataatac

SEQ ID NO: 10653 - DNA, 751 bp, Macaca Fascicularis
  misc_feature (1)...(751): n = A,T,C or G
gccagaaaaacgtcttgaactacttcccttatctcttctccaagacactgtgacnnnntcaccagctcctcccttgttctctaagttccactgagctccacgtgccccctccaccatttgcagaggcctgcacagctttctggctgaagcctagaacggacctcccaagttttaggacaaacagctcagttctagtctctctggggccacacagaaactctttttgggctcctttttctccctctggatcaaagtagacaggatcatgggaccaggtcttggagctgagcctctcacctgtacttttctgaacaatcctcttcctctgaggctgggtcctggccttatcctctgatctccatgacttcctcctccctcctgccgactcctgggttgaggtgaggcctcagtcccccagcagatgcttttctgtctcagtctgcccaatcacccggaattcggaagtcctgaatccgtagttttcccttccatcatatcatcctgctcttctgcttccctcaccctgagcccnnnnnnnnnnnnnnnnnnnnnnntggtcagagacccagatcagctcctaacccttatcaccagctgcctcttctgccaagtccttgtttgctgttaatttctttacagaggggttgagcagggatcctgatttcaatgacggttggaaataggactttccagagaagagaggattgggtagatattttttctgaatacaaagtgatgtgttaaatactgc

SEQ ID NO: 10654 - DNA, 708 bp, Macaca Fascicularis
  misc_feature (1)...(708): n = A,T,C or G
tgcatggcctgnnnnnnnnnnnnnnnnnnnnnnnnnnnnnnnnnnnnnnnnnnnnnnnnnnactgtnnnnnnnnnnnnnnncgcagatatggtcccaaagggatcggnnnnnnnnnnnnnnnnnnnnnnnnnnnnnnnnnnnnnnnnnnnnnnnnnnnnnnnnnnnnnnnannnnnnnnnnnnnnnnnnnnnnnnnnnnncaccagcaacnnnnnnnnnnnnnnnnnnnnnnnnggagaatccgagaagtgccctcgatgtggcaagtcagtctatgctgctgagaaggttatgggaggtggcaagccttggcataagacctgtttccgctgtgccatctgtgggaagagtctggagtccacaaatgtcactgacaaagatggggaactttattgcaaagtttgctatnnnnnnnnnnnnnnncccacgggtattgggtttggaggccttacacaccaagtggaaaagaaagaatgaagaggtgcgacatttctcagattttttgcgagcctaaaacacttgccaagtaatcctgcacagatggatacctttccccaaatagcctctccttgtacattattagttgtacattatttgtttctcctcagaagtgnnnnnnnnnnnnnnnnnnnnnnnnnnnnnnnnnttggaagaaaattatgtgaagtttaatctataacaaatgctttattatttataatgcttgga

SEQ ID NO: 10655 - DNA, 673 bp, Macaca Fascicularis
  misc_feature (1)...(673): n = A,T,C or G
ctgttcaagcatcccannnantnctcaataaaatgactgagcaggtttgccctcaggtcacctaagtacaccctttgataatctcctgtctcctccagaagatgcttnnnnnnnnnnnnnnnnaaatnnnnnnnnnnnnnnnnnnnnnnnnnnnnntgtaccttagaatggtatgtaatttaaattattaatccaaatgattagagagtagggaaaannnnnnnnnnnnnnnagagggttgaaattaaggtattaaagatagataggagcggaaaagtacatttcctaattttgcatgaagtctacccgtctgtcttcacctgggcacttattttaattgagattctcgaaactgggtcatctcagttttgtgtaataagattttttaaacccagccaaccaaactatcagtggggttatagaaataactatgagactttgcctcctttaaaaaacccacttatccctgtttgaagacattgaaatttaactgtgatcagaacctttgcatgagaggatgtnnntgagaaagtgaagagactatgcctatacttttcacatgttcctacacagatggtttaaatgtttatttgtaactaaaagacacttttcaaaactgtaagtgnnaatacatacaaggcaaaaagaaaaaagataacatagtttttctgta

SEQ ID NO: 10656 - DNA, 897 bp, Macaca Fascicularis
  misc_feature (1)...(897): n = A,T,C or G
gctggccactgtnntaaagcacgaattgggagnnnncagcgacaccaccagtcagcagccaaagannnanctcagtcnnnnnaggtctccccaacaaccatccaggtgacatannncccctcaagtcagaagagtaaacgtgccagcacttccttgaattgaagagctttaaggataactataacacattggagagtactctgtgatggagctgaaggactctngccgtagatgaagccagtcagttgcagtgtgcaagacaggctgcttgccgggctgccctggggacatctgactcagcaggcccagactgtatccatcgaagttcccgttgtatccagagttcttagagcttgtgtctaaagggtaattccccaaccttttcttatgggcatttttagaacattggctaagactattttcccccagtagcacttttttctggatttgcattcaggtgttattcttaatgtttctgtcaaagcttaaaaatcttcacttggtttcagccagttcaccttccctgttccaggtttatttaattcccaaggtgagagttggagagagatgtcttccatatctatacctttgtacacagttgaatgggaactgtttgggtttagggcgtcttagagttgattgatggaaaaagacaggaactggtgggaggtcaagtggggaagttggtgaatgtggaataacttacccttgtgctccacttaaaccagatgtgttgcagctttcctgacatgcaaggatctactttaattccacactctcatgaataaattgaataaaagggaatgttttggcacctgacataatctgccaggctatatgacagtaggaaggaatgatttcccctaacaagccaatgcactggtctgactttataaa

SEQ ID NO: 10657 - DNA, 710 bp, Macaca Fascicularis
  misc_feature (1)...(710): n = A,T,C or G
gataatagcgccccacagcctctctggacacttgctgnnngcggagccagtgtgccatnnnctgcacgtgggcggccggcgcaacctgcctcctccatggctttcctggtttgttcctccccactgaagctgacttagccagccccnnnnnnnnnnnnnnnnccagctcccctccccgtctccttgagtcagcagactgtccaatgtgctcagccaggctggaggcagcaggcaacaggctgtggaggaggcccctcggacagggagcagcctgcctcacccctgaacagctctttcggccccatctccnnnnnnnnnnnnnnnnnnnnnnnnnnnncacggggacttgggtaagcaacaggcggcactcaggactctcttctcaaccttgctgttcagacttgttaagatctcagagtccacaggaaagaagtcactgttgcaataaaagcacccgtagtagcaaaaacataaacaaataaaacttcccccacatcacagatgattttggacaagattttccaaccttgctggctactttagtttgggacccattttttttctcatttgattttgcttgtgcagaaaatagtttccagcacatggattggtctgagagagaatgagactcagttgtggatagtctgttctctctgagcatgttggccaaactagtatcgtcaaattattgagtggatcatctcttggaa

SEQ ID NO: 10658 - DNA, 713 bp, Macaca Fascicularis
  misc_feature (1)...(713): n = A,T,C or G
gcaatttgaaaataannnnnnnnnnnnnnnnnnnnnnnnngaggaggtggagtggcaagtcgnnnnnnnnnnnnnnnnnnnnnnnnnnnnnnnnnnnnnnnnnnnnnnnnnnnnnnnnnnnnnnnnnnnnnnnnnnnnnnnnnnnnnnnnnnnnnnnnnnnnnnnncttacgnnnnnnnnnnnnnnntttnnnnnnnnnnnnnnnnnnnnnnnnnnnnnnnnnnnnnnnnnnnnnnnnnccttggtatgccgattnnnnnnnnnnnnnnnnncactggccacccgaaagaagaagctcttagacctcctccatctgcagctgatttgtagagacacagaggatgaggaggcctggatccaagagactgaaccctcagcgacttccacctaccttggaaaggacttgattgcctccaaaaagcttatgaataggcacaaagtcatcctggagaacattgccagccatgaaccacgcattcaagtgataacagaaaggggaaacaaaatggtagaggaaggtatgtatgattgagattcagttggccaaaacatcaccaggccagacctctgggaagaagtttgtattctcttagnnnnnnnnnnnnnnnnaaaaatatctgacccgttttcccacttaattctcttttggcatttctgacaaatggacatatggttttgtttgtatatttcaataacaggaatattccaatcct

SEQ ID NO: 10659 - DNA, 696 bp, Macaca Fascicularis
aagcccccagaaaagagaagaactccctttttatactacagaacattcattagtgtgggcttatatagctgtggctcatgctacccaaatccagatttctttatcctctagagttgattgctgtatattgaagttgaacatcagaggatgggaagagggctctgtaagccagaaccttactaaagtagagggcacaatcagcgtgaataaattcacttcagaatcccaagttgaggccgggcgcggtggctcacgcctgtaatcccagcacttcgggaggccgaggcgggtggatcacctgaggttgggagtttgagaccagcctgaccaacatggagaaaccccatgtctactaaaaatacaaaattagccgggcatggtggcgcatgcctgtaatcccagctactcaggtggctgaggcaggagaatcacttgaacccaggaggtggaggttgtggtgagccaagatcacaccattgtactccagcctgggcaacaagagcgaaactccatctcaaaaaaataaataaaaatcccaatcccaagtcgaaatcacttcttgttttaaacaagaatgaattattactgtgtatgttagggtattaaaactgtgtcaccagtacggtgaaagttgtttcaacattttaaacagtggttatagactctttaaccatcatatatttgcttccattcttg

SEQ ID NO: 10660 - DNA, 662 bp, Macaca Fascicularis
  misc_feature (1)...(662): n = A,T,C or G
agggtgggcagggagcagtatgtctgcagggnnnnnnnnnnnnnnnnnnnnnnggcaaggcccgtgctgcaccagccacctgacacatggtgacagtgctacgggccctgcgtgtggcccctgcacccgtgctgtggcaggcannnnnnnnnnnnnnnggccaaggctgctgttcagtgaagagtcccatgtttagtgtggactaaagtcccatgtttagccactgccccaggctcctgtgaccccagaaaccaggtcacgtggaccacggtggcagaccctcatcacgcccgtgagcacctagaagtgagaacactgtattcctacaatttacacttggatatttctccttatttagtttctagtgaaagaaatcaagtaaggaactatctttactttagatggaattatttgtttttttaactgttgccatattcatctatatagctaatatttcaagataagtaaagaacaaaacctgtctaaaccttttatttccaatgaatgaaagttgtgcactttatttataggctctatgttttggcttctgcagtacttttattatctacacataatttggccaaaaataagaaattggaaagaattacatgtttagtttatagtagaagatgatgacactaagttgtgaaaatatgttgtga

SEQ ID NO: 10661 - DNA, 700 bp, Macaca Fascicularis
cccgcactcccccctcccgaattcttcccgcggcccctcccagcctcccgccctcccaccggccgctcccacccagcctttctaaagatgggggtgggtcggagcttactttctttggaaggcagtggatttttctcttgcgtctctgtcttcttcagtttcgacttatcgaatttctcgatctcagccatatcgggtttgtcagacatggttgcggaggaaaagctgcagggagcaagccaagagcgagcgtgaggaagagccacccacccccagtgtctctgggctgggaactgcgcttctgccctgcgacccgcagcctgaaaacccttctcgccctccttccgctgccgttccacactcacgagcttcctctttctacagaaaaaggggcgacactccccgcgcccctcctccccatatttcaaaacgctggggaccaaagagggcggatgcctctcaaagccgaatcttgcagaataaaggaaattgaccaatgcgaattgttcattacagcgtttaaaattaaaggctggctaggacaaggaaataggaaagccacttccgaattcaagtgggaaaaatcggcaagaattcttaaaatggaacccaggcagcaaaagcgtttcctttttctagccgcggcctctccgcaaaggatgcgggccggatctggctttctcgtcctctcacaaaggcg

SEQ ID NO: 10662 - DNA, 712 bp, Macaca Fascicularis
  misc_feature (1)...(712): n = A,T,C or G
tcgtgctgcagccatgctccncacggtggagagggctacggttatgggccagagagtgagttatctcaggcttcagcagctacacggaattctctgtatgacatggcccggtatgaacgggagcagtatgtggaccgagcccggtactcagccttttaaaaactggaggtaggataattgcggactgaaccctcgggctgcggtcatatatgagaacttgctccgcgcggtcccctttgccgggatgtttccattgcttcatgtttcagtaaacaaaaggagtttgtgaccaactatgttttctttcttaatttaattcttctaagttgacttttctttcctcctgaaactagtctctgtagcctttcactctgttccttacattctcagcctctgagcagccctaggtaaggattatgctggcatcccctttttcctgtgcagtggagcccctcttatcttgctttccctaggagttgaatccttctccctgcctacctgcagcatctcctttccctttaaaatgaccatgtagtggcaagcagccttttactcttctgttagctctggactctaacattgaagttactcttctgaaattgctaggaccattgggggttttgttgttttgttttgtttttttatgtccgacctgtgatcgtggtacagcattagctgaaatttacccttgcgcattccacgcctccctttt

SEQ ID NO: 10663 - DNA, 720 bp, Macaca Fascicularis
  misc_feature (1)...(720): n = A,T,C or G
gnnnnnnnnnnnnnnnnnnnnnnnnnnnnnnnnnnnnnnnnnnnnnncacatgaagtccagaagctccagtgccccannnnnnnnnnnnnnnntatcagcatgatcctttcagaggcgatccgnnnnnnnnnnnnnnnnnagtccatgtcctaccttttcagaaacataggcttagatgactgaacagctttcctttaggaaaactcccgagggccaaactggaaacatnnnnnnnnnnnnnnnnnnnnnnnnnnnnnnnnnnnnnnnnnnngtttgttcctccctctcccctgtaacctctcttcttgttgattcctatgaagatagaccaactttttatgtcggtttaggtgttcgtgagtttggggagccatttttataaaagaaaaactttattctcctcttttgaaaaggtaagaccttgttttagtgttaactgtttaaannnnnnnnnnnnnaataagatttnnnnnnnnnnnnnnnnnttttctgaagttgcttgagccaagtgcttaaaaagttaataaaataaaatgatctgtatgatacctgcagttgaaaagccaaaaagattatactgtccagtccagtaaatgacatttttagagatgcttttgtagacaagcttatggaatatgtgattgtatttattttccgcaactaaaaaaggaataaaaacttgtgtttgtgtgtttttctaaaactttgtgttttggcaa

SEQ ID NO: 10664 - DNA, 711 bp, Macaca Fascicularis
  misc_feature (1)...(711): n = A,T,C or G
taaaaccagagaatcttaaggtctaactgtggaatataaatagctgaaaactaatgtactgtacataaattccagaggactctgcttaaacaaagcagtatataataactttattgcatatagatttagttttgtaacttagctttatttttcttttcctgggaatggaataactatctcacttccagatatccacataaatgctccttgtggccttttttataactaagggggtagaagtagttttaattcaacatcaaaacttaagatgggcctgtatgagacaggaaaaaccaacaggtttatctgaaggaccccaggtaagatgttaatctcccagcccacctcaacccagaggctactcttgacttagacctatactgaaagatctctgtcacatccaactggaaattccgggaaccaaaaagatcatccctatgggcttggaccacttacagtgtgataaggcctactacacattaggaagtggcagttctttactcgtcccctttcatcggtgcctggtactctggcaaatgatgatggggtgggagactttccattaaatcaatcaggaatgagtcaatcagcctttgggtctttagtccgggggacttggggctgagagagtataaataaccctgggctgtccagccttaatagacttctcttacattttcgtcctgtagcacgcnnnnnnnnaaagtagtc

SEQ ID NO: 10665 - DNA, 762 bp, Macaca Fascicularis
  misc_feature (1)...(762): n = A,T,C or G
taggtagtttaaaggactgcatnnnnnngaaatgattcttcacttggagaacatacttgcctctagatatttcactctaagcatcctaaatataacaatagagaaagataagtcaaccaacagatttggggatgtgnntcttcagcacattttggtcatnnnnnnnnnnnnnnnnnnnnnnnnnnnnnnnnnnnnnnnnntttgctcctttaccaggtatgtatcactttgttactccagatgccatccttggtgattacagactgtttatcactatcattgttagcaagaggaannnnnnnnnnnnnnnnnnnnnnnncttcccatgagtataaatgaatttaagacatttgaatcaaagnnnnnnnnnnnnnnnnnnnnnnnnnnnnnnnnnnnnnnnnnnnnnnnnnnnnnnnnnnnttcccaaggttaatctttttaaatatctctagacatcaaatactttctgtatgtgttagctgtgtctgtctatgatgcaagtaactctcctcctatttgggggatagttcagagaggtaggagcattatctcccatttttctggtgacttcttggagtatagaattcaccattttatccataagtcttcaaagggtaatggtggagtagaacttacataatgcaaaatagtcttctatttttaataggaacttagaaaaaacttaatatatagagttgtttccnnnnnnnnnnnnnnctatttatttgtatttaaagtattgtttattatttgtactgattc

SEQ ID NO: 10666 - DNA, 723 bp, Macaca Fascicularis
  misc_feature (1)...(723): n = A,T,C or G
cccagtggtggcatgagtgatgacgacaaatcagggctgcagttggccctggatgttgagtacttaggagagcagatacaaaagctgggactgcaagcaagtgacataaaaagcttcccagctctcgcagagcttgttgctgctgccaaggaccaggcaacagcagagcagccttaagcatctnnnnnnnnnncgaggttagattcttaagcaagagaagannnnnnnnnnnnnnnnnnnnnnnnnnnnnngactctgttctcttannnnnnnnnnnnnnnnnnnnnnnnnnnnnnnnnnnnnnnnngcgacacgcccatgcgtcttctctcagcgtatttgggtcttcctttgcccaaaaagaacacaaaagcctttttccattgtatggaagatagtttttaagacatttgaaactttctactatagtttacagaacaaattattttatttttattgtaaatcttagtgtggaagagctgatttctaaaatatgattaaagnnnnnnnnnnnnnnnnnnnnnnnnnnnnnnnctccctgagcctgcagttggaagtgacgactgtagtggagtgatgtcctgtatagaaacgcccttctctgaaataaagagaactcctgggctttctaaagaggctgccggaggccgtcctccactcccactgtgtgtgggagcagtgcttctgatcctgctgtcaccgcagcctctnncaggggccggc

SEQ ID NO: 10667 - DNA, 593 bp, Macaca Fascicularis
tatcacgtgtggcataacagtgtccacactttttcaatttttttttaaattttgagcaattctcgtgcctcagcttcccaaataactgggattacaggtgcatgccatcatgcccagttaatttttgtatttttagtagagacaggttttaaccttttttgtcaggctggtctcaaactcgtgacctcagatgatccgcctgtcttggcctcccaaagtgatgggattacaggcgtgggagccaccatgcttgacgtacacactttttacttctatacatgatttttggattggacataaaaagccaagccacccattggcttttaatccaaagaacatgtatactttttgtacccagaaactatgattcatattgattgcaggtgcctgccatgatttagataagattttttttttgcatggtttttatgcttttctaaacaggatcctggttttataatacttccaagcctatccatggatatatcaaatgtcttcacttgtgtattttcatggctaggtatttctaatgtttatttttcgcctgtgtacttctacacatagctatgcactatgaaaattcaatggaatga

SEQ ID NO: 10668 - DNA, 723 bp, Macaca Fascicularis
  misc_feature (1)...(723): n = A,T,C or G
gcccgccgcatccaggacctcatcccggtgnnnnnnnnnnnnnnnnnnnnnnnnnnnnnnnnnnnnnnnnnnnnnnnnnnnnnnnnnnnngcaggggctttcctggcctgtgcccgcctccaagctcacatcgcctgcagggacctcttccaggacacctaccaccgctactgggccagtcgccagccagacgcagccactgccggcagcctccccaccaaaggagactcctgggcagatccctcatgacagcctccatgggggattcagtccccaaagcaggccataccctgctgtagtgcctcttagcccttccccgtctgccctgggtcaggggagccccctgggcttcccagtcttgcctggctctcctccttggcccaggagctcaggatccctggggctggggaactcccaacttcgtgccctagatcctgcacctccccactccaaagtgggcatccgggaactctaagccagggaagcagttaacttatctgtgccaacatttgagggagccttgtgcccatgcatgccgttttcagatccggactcatcagggggagccctcacctctgcctcaagtctgccgtggaaggcagagatggtggtcctggaggcagtcctcacctctgcctccctcgctcctccaacagctgccttctcccgggttccagcctctcagtgtggagaggtaggggtgcggggggaggggggagctga

SEQ ID NO: 10669 - DNA, 751 bp, Macaca Fascicularis
  misc_feature (1)...(751): n = A,T,C or G
actttatatggcgatggtgctgctaaccagggccagatatttgaagcttacaacatggcagctttgtggaaattaccttgtattttcatctgtgagaataatcgctatggaatgggaacatctgttgagagagcagcagccagcactgattactacaagagaggcgatttcattcctgggctgagagtggatggaatggatatcttgtgcgtccgagaggcgacaaggtttgctgccgcctattgtagatctgggaaggggcccatcctgatggagctgcagacttatcgttaccacggacacagtatgagtgatcctggagtcagttaccgtacacgagaagaaattcaggaagtaagaagtaagagtgaccctattatgcttctcaaggacaggatggtgaacagcaatcttgccagtgtggaagaactaaaggaaattgatgtggaagtgaggaaggagattgaggatgctgcccagtttgccacggccgatcctgagccacctttggaggagctgggctaccacatctactccagcgacccacctttcgaagttngtggtcccaatcagtggatcaagtttaagtcagtcagttaaggggactagaaggggaggttataccttcagggggctaccagtgttctcaacttggttaaggaggaagaaaacgcagtcaatgaaattcttgtaaacttccattaagactaagtgtgtagattgagcaggtagtaattgcatgcacttgaca

SEQ ID NO: 10670 - DNA, 659 bp, Macaca Fascicularis
  misc_feature (1)...(659): n = A,T,C or G
atcgaccaganactnnnnnnnctgttcaccaacccatgcaagaccatgaagttcatcgtgtggcgccgctttaagtgggtcatcatcggcttgctgttcctgctcattctgctgctcttcgtggccgtgctcctctactcgttgccgaactatttgtcaatgaagattgtaaagccaaatgcgtaacaaaagcaaaggcnnnnnnnnnnnnnnnntccagcaatgagagannnnnnnnnctgtggaccaatatccagtgtgattttgtgtctgagaccacaccccagtannnnnnnnnnnnnnntcaccgagcccnnnnnnnnnnnnnnnnnnnnnngtcnnnnnnnnnnnnnnnaacaagcaacatttgcatcatgttatctcttaagtattaaaagttgtattttctaaagtttaaatcacgtttttcaaaatatttttccaggtggctggttccatttaaaaattatctttttatgtgtcttcggttctagaattcagttttttgaaattgctaaatagaattcaaannnnnnnnnnnnnnnaggtgatatacttcatatttgtaatcnnnnnnnnnnnnnnnnnnnnnnnnnnnnnnnnnnnnnnnnnnnnnnnnnnnnnnngcccacaaccattgttatattttgtgtggatgt

SEQ ID NO: 10671 - DNA, 744 bp, Macaca Fascicularis
  misc_feature (1)...(744): n = A,T,C or G
aactcatcatgacaagtgtagaccaaatcannnntcaagtgtctagagagaagaacctggagacctcaaaagccagggatatagtctttagccgcctattgcaattgatgtcaactgaaattactgaaattagcactcctagtctccatatttctcagtatagcaatgcaaatccatagagagaatgcttccattactgtctctcatttacttaagcatgaagcaacactttatccatttattctgagaatgtgcaggagggagtggtgaaggggaattaagggctagagaagtaaannnnnnnnnnnngtcatgtgtgaatcatggggaaatctcataatattacacttgatgaaggaatatggtaagaagagccataaggaatgatttcaaagagaggtgtgtacagcaaggaagcaaaaataaaaatgatcaaaaaaagaaaaggttaattcatttaaagaaacataggaattaaaaaagaagacagcaaattagatgaaacaaaaaggccaaaaggtagctgggcgcggtggctcaagcctgtaatcccagcatttgggaggctgatgtgggtggattacctgacgtcaggannnnnnnnnnnnnnnnnnnnnnntggtgaaaccccatctctactagaaatacaaaaaattagccgggcgtggtggtgggtgcctgtgatcccagctacttgggaagctgaggcagaggaatcgcttgaatccgggaggcggaggttgc

SEQ ID NO: 10672 - DNA, 750 bp, Macaca Fascicularis
  misc_feature (1)...(750): n = A,T,C or G
agtgttcactgtcatctgttaggaaattntgtttcgtcatgtctttgcccagatccgtagtgagagtgctctgtatttttttaagataatttgtatttttgcatactaagatgtaataaaagatgtttatcatgaaaaagaaacaatattagattttggtctctataatctattttggtattgttatgaacatggatatgacaaccaaactggaaatcagcacactagggtaaagtgaatactgaagaatattgtcacacaggtgttgtgcaccttgtttagggcttatttcttaatatcatccaggtcattagttttgctaatatttgtgttgtcttgaccaagctcctactaagtacaggacacaaatgtttttttatcttccaaggcctggctcaaatgccactgctgcaaagctttctttgactttctggccaccccccaaaccagaagtgatcttccccctccatatactctagccttttcatgacactaacttatagttcactgtttacctgttggtgtaacagcaaattataaatagtagttttcaacatacttctaaggctaaattcatttccaagagtagcaaagcttactagccaaaggctccacatttatcaactcttaaaagctagacttgagagagcctcatagcctatatgattttgagtaaatgaatctctgtacctcagcttcttcatctgcaaagtgagataattgtactattctactttcctcatagtgcgg

SEQ ID NO: 10673 - DNA, 1139 bp, Macaca Fascicularis
  misc_feature (1)...(1139): n = A,T,C or G
gaaagtatcannncaggggctttttgtggccatgncnggcccctcatccnncannnnntttgcaactgtttgttttactgggccctgtactttaacccaattattaacattgatcttgtggtcaaggnnnnnnnnnnnnnnnaaacccaggtgttgtgactggcactgcccaggctgagactcttcaagtcccgctgacgtctgagctttgacgcgtaagaggggtgaggcagggagcacacttcctattttttacccccagtaaaacaaggtgctgctttgtatgtcaaacactccaaccatgtcctctccccgtcgnnnnnnnnnnnnnnnnnnnnnnnnnnnnnnnnnnnnnnnnnnnnnnnnnnnnnnnnnnnnnnacagcagcggcccttcccacccagccgccttcctcacagggactaggaggctcagtccccgacggctgacaagactcagggtcctcagtggacacagtgtgggtgacatcataagggcgccacatcagtcccctccccaacctcagtgactgacagaggatcctagatctcagaggccgagaccaggcttactggggcctggcctgtcctctaagtcaagtttaggaaaacaagaaagattctgtcataggtatggagagttgcacataaaaagtaccgaagaaaacccaaaattcaatcaacaattctgtcttattgaagagttgctaggattcagagtaaaactcaaaggattcagtttgagcctagaatgatggttagacttgtagtcagtgggcttgttattgttttgctttatggaaatcaaagtacgtgagggtccctttctctgaatggagagattgagagannnnnnnnnnnnnnnnnnnnnnnnnnnnnnnnnnnnnnnnnnnnnnnnnnngttttggcgatgcctcaccnnnnnnnnnnnnnnnnnnnnnnnnnnnnnnnnnnnnnnnnnnnnnnnnnnnnnnnnnnnnnnnnnnnnnnnnnnnnnnnnnnnnnnnnnnnnnnnnnnnnnnnnnnnnnnnnnnnnnnnnnnnnnnnnncctgcacctgtaatcccagctacttggaattggaaatcgcctgaacccgggaggcagaggttgcaggaagggagattgaaccactgcactc

SEQ ID NO: 10674 - DNA, 702 bp, Macaca Fascicularis
  misc_feature (1)...(702): n = A,T,C or G
catctattccatctcacttggtggggacacagacaccattgccaccatggctggggccattgctggtgcctactatgggatggatcaggtgccagagagctggcagcaaagctgtgaaggctatgaggagacagacatcctggcccagagcctgcaccgtgnnnnnnnnnnnnnnnnntgagggccacagctgttggggctctgccaggtcccctgggaccaactacagctccagtcggaaacccnnnnnnnncttgagtggggctccccactctccctgcattgtggagctgactgactacaccagtggggctggggtctcttcaggggatttcactggaacagtgagcaagggactgctgcctcgctggtgctgggtctctggtatgatgcagagccgtagggcactcccaggtcgtcagcaggacggagggacccaggcgggtttatttgggggtacttgtggcattttcctgtattgtcttggacatgggatgtggggaggtggaaatgatgagnnnnnnnnnnnnnnntccctgttgggtnnnnnnnnnnnnnnnnnnnnnnnnnncctagcagggcccccgagcagcaggttgtatggatgaagggacaggcacttgcatnnnnnnnnnnnnnnnnnnnnnnnnnnnnnggctgccatgtggcttattaacagcttccagggnnnnnnnnnnnnaa

SEQ ID NO: 10675 - DNA, 703 bp, Macaca Fascicularis
  misc_feature (1)...(703): n = A,T,C or G
gcgcagtatcatcctgtgtcaggacagtatccacncccgccggcggcgcgccggagtcccgccgccccggccccccatacccgaggagcgcaggccccggggcacggcgacgctcagcaacgggaagctgtgcggggcaggggagcccgaccagctcgcgcagagactggcgcaggaggccgccctggtggcccgcggctgcacgcacatccgcgtctgccccgagtgccgccgcttccagggcctgcgggcacggccgtcgcccgcccgcagcgaggagagcctggagtgggagaagaccaccaacagcagcgagcccgagtagtcccggcggccacaggacgcgcggaggcggggcggggcgggcactgctgtcagccgcgagccgggacttgtacagcgtcgacacctctccggatttcggagccagtcacttttccaaaagatcaaggagcctgacgccccagccagagaccgcgcccggtcaggcagcggggtccacccggagacgttgcacccaagtggcaaaggacggccctccctcctgggcacaaagacacatcttctcccagcgggcctttccctctcgccaaaataacagagtatagggtggggggtccctacccagaccagtccaatgaattggtggaatcatcagctgaattccccctagtcagaggccaatgtaccctctgtctagttc

SEQ ID NO: 10676 - DNA, 649 bp, Macaca Fascicularis
  misc_feature (1)...(649): n = A,T,C or G
tccctgtggcnnnggcagtggtctccttcctcctcgggctggccctgggggtggcctgtgtgctggtgaggacgcagatgaagaaactgtgctcgtcgcgggataagaattcggcagcgtnnnnnnnnnnnnnnnnnnnnnnnnnnnnnnnnnnnnnnnngctgtcctcccccaaccagtaccagtgacccagtgggcccggccacgccgcccccgtggtccccccagcatcttccccaccccaccgcgtcccccacccctccacgcctccacccggccacagcccttacccctccacgccccccaccccgctgtcctcccacggctgcagcagagtttgaagggcccagccctgcccagctccgagcagacacacaggcagtggccaggccccacggtgcttctcagtggacaatgacgcctcctccgggaagccttccctgcccagccccgctgtcacgaggaggaagcctgactgtcctttggctgcatctcccaaccatggccaaggagggcttctctgtgggatgggcctgggcacgcagccctctcctgtcagtgccggcccacccaccaacaggccccaacccccggcagcccggccgaggaccggagaccagtccgccacccacagccgcaccagaaataa

SEQ ID NO: 10677 - DNA, 731 bp, Macaca Fascicularis
  misc_feature (1)...(731): n = A,T,C or G
tgctgggaacaatcccatttcctgagggaatgggaggatctgtctacttttcttatcctgattccaatggaatgccagtatggcaactcctaggatttgtcacgaatgggaagccaagtgccatcttcaaaatttcaggtcttaaatctggagaaggaagccaacatccttttggagccatgaatattgtccgaactccatctgttgctcagattggaatttcagtggaattattggacagtatggctcagcagactcccgtaggtaatgctgctgtatcctcagttgactcattcactcagttcacacaaaagatgttggacaatttctacaattttgcttcatcatttgctgtctctcaggcccagatgacaccaagcccatctnnnnnnnnnnnnnnnnnnnnnnnnnntctgaaatggtatgaaaactttcaaagacgactagcacagaaccctctcttttggaaaacataatttgaataaaataatttttaatggattctgaaatttgtcatgttttgaagataactgactctatctgaaagtacgaagtcaaaggatcatgaaacctaagtgtaaaaactgcttagtgactgaagcttaattaaaaatctttattaaaaattaaaaacattgaaaaatgaaaatatgttcatcattaaagacttttttccccttaagcttaaaatactattcaggggcaaaacattttgttttggctatgattca

SEQ ID NO: 10678 - DNA, 786 bp, Macaca Fascicularis
  misc_feature (1)...(786): n = A,T,C or G
aagagaaggtcannnnnggtagcacaaccaccacacgtcgttcatgctctaaaaccgttactaagactgttattggtcctgatggtcacaaagaagttaccaaagaagtagtgacctccgaagatggttctgactgtcccgaggcgatagatttaggcataggtactctnnnnnnnnnnnnnnnnnggcaccctgatgcagctgccttctttgacactgcctcaactggaaaaacatttccaggtttctttccatctacgttcagagagtttgcnnnnnnnnnnnnnnnnnnnngttcagaatctggtaccttcacaaatacaaaggannnnnnnnnnnnnnnnnnnnnggtagctgaattcccttccagtggtaaaacttcaagtcacagcaaacaatttattagtagcacagcttacaacagagaaggctctacatttgaaagcaagagttataaaatggcagatgaggccggaagtgaagctgatcatgaaggaacacattccaccaagagaggccatgctaaatctcgctcttccagaggtatccacacttctcctttggggaagcctttcctgtccccttagactaagttcaatattnnnncacagtgctcccatggccccttgcatttccttcttaactctctgttacaattcattgaaactacacttttttggtctgtttttgcgctagactgtaagttccatgggggcagggcctttgtctgtctcatctctgtatttccaaatgcctaagagtaacagagtcatgactcaataaata

SEQ ID NO: 10679 - DNA, 772 bp, Macaca Fascicularis
  misc_feature (1)...(772): n = A,T,C or G
ccagagcaaagctaccagggggacatgtaccccaccnngggcnnnnnnnnnnnnnnnnnnnnnnnnnagcagaagggtcagagcatgtttgtggagaacaaggccttttccatggatgagccggctgcagctaagagnnnnnnnnnnnnnnnnngcgggtnnnnnnnnnnnnnnnnnnnnnnnnnnnnnnnnnnnnnnnnnnnnnnnnnnnnnnnnnnnnnnnnnnnnnnnnnnnnnnnnnnnnnnnnnnnnnnnnnnnnnnnnnnnnnnnnnnnnnnnnnnnnnnnnnnnaactcgaccctgcgggctgaagacatgtactcggcccagagccaccaggcggcaacacnnnnnnnnnnnnnnnngaactctcaggtctttagaaacccctatgtgtgggactgagtcagcagtggccaggagaggcgggcggatttggggagggccctgaggacctggccccaggcaagggactcttcaggctcctcctcccactggcaggctcagcaacatgtgccccagagctagaagggcctccctctctgccagtgttccggtgggtgtcctgggtgtcctcgcccactcctcagtgtttgtggagtcgaggagccaaccctggcctcctgccagggtcacctccacggtcacactccagccaaatagtgttctcggggtggtggccgggcagcgcctatgtttctctggagattcctgcaacctcaggagacttctcaggcgctcaggcctggatcttgctcctctgtgaggaaca

SEQ ID NO: 10680 - DNA, 737 bp, Macaca Fascicularis
  misc_feature (1)...(737): n = A,T,C or G
gtgctacagcaccatctctttagtcagctgctaatagtatggaaacatcggaaaagagtgggtaaagtcctaggtggggttctctttgtgcctnactaggaggaagcagtaggcttcctttctaagatagggactcagctggtctattttaccctgtgacgtgtaaatatacttttgaataagctactatcctgaggctcagggttttgctgccacttttcctgtttttccacttctgcttccaaagattttccttttagttgtttgaaacaatactttacaagacaggaagtctttagactgcccgcattcgtgaaggagatgatgtgtggctagatcagtagaagaagctgagtgcaaatgccttgttggctagagtatcggaaggttgaaaattccaggtaactgggagaatgggcaagtcctcagctgaacaatcttggatgtagtctagcagcaacccacctacagtggcattatgtttggagttacgaggagaagtgaaagataagaattacctacagctttgtattcagataatttatatccaaaatttgtgttttaaatttcatactccagaacttttatgtttatgagtattagccctttaggttatgggaggtgatatacttagtccattgatattttcacttgtcatctaaatttatgagaccttgtcttagagaatctaaactatattgtcttatgttttctgtgctgagtttggtttgttacac

SEQ ID NO: 10681 - DNA, 682 bp, Macaca Fascicularis
  misc_feature (1)...(682): n = A,T,C or G
tgtggctggaagcccccgacctcctcttggccgaaattgacctccccaaactggtgagttntgcccgctgggccagaggaggggaatgaggtctggaaaggtcagggactgtgtctctgagcgagagtgacaaggggctgttgctggactttgtcagctgtgtactctctcccaggaggcccacaggccacctttgggtgccgtcctgagggcgcccgagggattgtaagtgctcggttgttgagacttgtaattgctgtcttctgcctcttccctgggagattagacccttcaaatatagtttcccagcatgtgaggctaccatgcctggtccaggtgaccgtcctgttgctgaggagggtgacctgattccaccacctctccaggatggagccctggggctgtcgctggagatcggggagaaccgcctggtgatggggggcccccagcagctgtatcatctggacgcttatatcccactgcagatcaactctgatgagagcaaggcagccttccaccggaagagaaaggtgcctgggggacggttcggggaagccgggacgttggggagcctggactctggctccgagggaggaggaccaggggcgggacttctgggtcctggatcctcattctctttgctctgtctcctcagcaattaatggtagccatgccgcttctg

SEQ ID NO: 10682 - DNA, 442 bp, Macaca Fascicularis
  misc_feature (1)...(442): n = A,T,C or G
tcatctcaannnnagatgtatacagcnnngagttataaatggttataaagctnnngntactgatattagttatttacatcaaaaaagcttttagaaaatggtacgaggtaaccaattcttgtcatggtgaaatacgattgagtaaccaagcagttttactattctggtgctgcttcataacaaaaatgaaaagctgcatgcatctacatacagcaggcatggattgtttatgtcgtatgatctcctttattaagtaagttcacttatagtatttctatgatttgattcattaccgtaatagggccatgtaggaaatgcactgattgcatgttattgtggcaagaatatcataaacgtcatttaaatcctccaacatgatggatccgcttatggtnnnntttgttgacaggtgaaattaacattnngnnagttacnnnnggaa

SEQ ID NO: 10683 - DNA, 778 bp, Macaca Fascicularis
  misc_feature (1)...(778): n = A,T,C or G
gacacagtcatggttcaagtgtccacatgcacttgtcagtccnngagggatggtgggcatggctgcttcatcccttgaggatgcccgggccccatctgggctcatctttctgtttagagggaagcataacatatctgccactgggaagataaattcatgtgaagcaattttctcttaaaaaaaaaacaaacaaagctttctaagtacaatcattctctaggacttgggaagctccttgcacttggaacagggctcaggtgggtggagcagtaacacactgcccaggaagtttgctgctgtggccctgtcctgcggcctcagagtccttctttactattatnnnnnnnnnnnnnnnacctttattggggtgggaatggaagagcagagggaggatggcccaagggtgttgaggccagcagtgagagctgtgtaagccaagacttggaactgtgttctcaagggttgtgtgggacgtgggctctccatagtgtgtaggaaaagcatgttgactctagtggctcagagaggactttgctgggtttctttctgtgaatatctccgcactgaccatgctggaattggatgctnnnnnnnnnnnnnnnntactgcaggggtccgtttagtaacgtcctgtctgtgacctttgttgttgacctctagaccccaagatgtgaacagtgcacgtgttaatgtcatctttgctcgtgtgttataagccccaagttgctgtatattttcacaaatatgtctacacactggtcatgattttgataataaa

SEQ ID NO: 10684 - DNA, 702 bp, Macaca Fascicularis
gtgtgcgtgatgtgctgaatgacacagccccacgagccatggctgtgctggagtcactacgggtcatcatcaccaactttcctgctgccaagtccttggacatccaggtgcccaacttcccagctgatgagaccaaaggcttccatcaggttccctttgcacccattgtcttcattgagaggactgacttcaaggaggagccagagccaggatttaagcgcctggcttggggccagcctgtgggcctgaggcatacaggctacgtcattgagctgcagcgtgttgtcaagggccccagtggttctgtagagagtctggaggtgacctgcagacgggcagatgctggagagaagccaaaggcctttattcactgggtgtcacagcctttgatgtgtgaggttcgcctctatgagcgactattccagcacaagaaccctgaagatcctactgaggtgcctggtggattcttaagtgacctgaacctggcatcactacacgtggtggaggcagcattagtggactgctctgtggccctggcaagacccttcgacaagttccagtttgagcgtcttggatacttctccgtggatccagatagccatcagggaaagcttgtttttaaccgaactgtcacactgaaggaagacccaggaaaggtgtgagctggaagcactgaacctacctcatcctggaggttggggc

SEQ ID NO: 10685 - DNA, 688 bp, Macaca Fascicularis
  misc_feature (1)...(688): n = A,T,C or G
ttagaatatattgatagattataaattgattgtgaaacttnnnnntgaatnnnnnngacatgttttactcagttacatgagtataaaggatattttcagtcctgttatcttcannnnnnnnnnnnnnnnnnncccaccctattgttctacttgttatatgtctattcatacagtaaattcatttcaaggtttatgccagtgggtattattggtgctttttgaagttnnnnnnnnnnnnnnnnnnnnnnnnnnttaatgttatgttcatctataatggcataggggaaatatatatatttttaatattgtaaacatttgtactgaataacctttttttccccccctccgcaagcaaaactggttgaacagcggatgaagatatggaattcaaagctctaatggacctttttgaagagaagttgtggcttatgtggagtttacatgggcctctgatggaagaaagctaatctgtttagtatttgtgcattttactaaaatggcagcttaaagttgtgtatctgctattgtgatnnnnnnnnnnnnnnnnnnnnnnnaaaaaaaaatgacctctttgctttgtgctgtgtacacaagannnnnnnnnnnnnaaagaaaaaccctttttatggctcacacagcttaagagtagctgtctctcaaacgtgcgctcacagttgagctgcttttg

SEQ ID NO: 10686 - DNA, 692 bp, Macaca Fascicularis
gcgaggaagacaccggcgccgagtagctggagtaagcggagcgcgcggtgctgtagccgctgcgcacgctggagatgtgcacccggggcgtctccacgtagcgccgcttgtaggaggtcgagtagtacggctcgtagctgaaggaactcatggtggctgccggtggctccccggcccgcggcggcggtgggagcccggagagagaggacaggggagagagggaagtgggaggatggatggctgtgtgcggctaggcgccgtcctgccacccctatttatacgccgggaggctcctgacgcagcctgcgatcgatcactgcgcgccggccagtgggggcagcgcgctgctgcaaccaaggcaaggattctgcgcaaaagggaaggcgggggcgagctacggccagggtagctgcggcgctcgtcctttccactttgctcagaggcccctgattttctcagagatcccatgcccccttactcatttcccttctgtgccctcccacgcagcccctcccttcctacatcgcccaaaccccgtgacacttggatccttaagtgtccccaaaacaggttcttgctcccttttgacacccgagttttcggtatcccggcacctcgcacacaccctgtccccccaactctcccttttcccacccgggacctccttaattattccccttggtgtatagggc

SEQ ID NO: 10687 - DNA, 712 bp, Macaca Fascicularis
  misc_feature (1)...(712): n = A,T,C or G
cgtgcacaccnnnnnngctgcnntnctgggcgagcgtntctttcctttcttccgggtgctctccaagggcacccgcatcaagctcnnnnnnnnnnnnnnnnnnnncccgcgggggcccnnnnnnnnnnnnnnnngggggcgggtggtggagggtggcccgtaagtttgaggggctcaaaggctcttcccactgtttgtcactgtgttgcttcccactcccccttgaccccaggcccctgcttctccctctaggagcctaaagaaccctcctggcctccagcccggccttctctcacctcctatgtctgtccagcagaccggccagaatttagcttcacttgagagagatctggaatggtcgccatgattgaaaccacgcaccattacatcgcccaataaattatttcttcccccgtcccctttccagcactcannngaggagcaaagctcatcccacccccacccctcccgggtctgttcactgccaggctcctttcccttgttcagtggagctggcttttctcccagcccctttccatgcctttcgttccannnnnnnnnnnnnnnnngggagcctggggacgggtttgggtccccaagaggagagccnnnnnnnnnnnnnnnnnttctagtaaccccttgccttgtcacataacagcttttgccctctgctttgatggctgaggtgaacttatgttctttggaaaaggga

SEQ ID NO: 10688 - DNA, 729 bp, Macaca Fascicularis
  misc_feature (1)...(729): n = A,T,C or G
ccttgttttttcgctcttcacaataaatcttgctgctgctcactctttgggtcggtgccacctttaaagagctgtaacactcaccaccaaggtccatggcttcatagnnnnngtcagtgagaccacaaacccaccagaaggaacaaactctggacacactagaatgatggtagaggtgataaggcatgagacagaaataacaggaaatactttggatccaaatttccgatcaggcaatttacaccaaaactcctcctctccacttagaaaaggcctgtgctctgcgggactattggctctgggagactcaggaacttgtttttcttcttcctgcagtgctgtcatctgagtccttgaaagaggagaaaagaaactgttagtagaaccaggttgaaaacaacactctcctctgtcttttgcaggactcctgagcnnnnnnnnngtgcccacattcaaggaaaaaccttctgccccagctttgcaggatggaaagctttcccgcctggctgttactcttccacgagagagggctttctcaggacctgnnnnnnnnnnnnnnnnnnactgcagaaaatgccctcccttgtggcttcctcagctcctgcccttggcctgaagtccccgcaatgatagcnnnnnnnnnnnnnnnnnnnnnnngctcccttttacctaaaccctatggcctcccgtgcatctgtactcaccctgtaccacaaacacatgacatta

SEQ ID NO: 10689 - DNA, 757 bp, Macaca Fascicularis
  misc_feature (1)...(757): n = A,T,C or G
catcacacattaccagctcaanntccagacgggcnnnntggtgccnnnncatannntccgcattggccccgcgccagccttcacgggggacaccatcgccctgaccatcatcaagggcaacgaggagggctactttggcacacgcaggctcaacgcctacacgggcgtggtctacctgcagcgggctgtgctggagccccgggactttgccctggacgtggagatgaagctctggcggcagggctctgtcaccactttcctggccaagatgcacatcttcttcaccacctttgccctgtgaggtgccagcaccggccacctgcgggtgcgacgcagcccagggctcacactgcgtgggagggactgggtcactattgtggtttttactataactttgtaaattaacttaattttgctgacttgactcctgtgggcttctggacccctcctttgccccgcaggaggaagttccgtggcagatggtgcgttcccacgtaggcaccaagtggaagcttgtggggtgggccacggccatggcaggtgccctgtgggtgaggctgggtgatgacctgaggaccagggacacgggaccacattggggctcttggactcctcggatgacccatccccgaagttgacattccatttcatgttccactgtgattcttttcttttttaaaaaatcattttaaagttttttgtttaattataaagtagtacatctacattgtaaaaaaaaaaaaagtcaactagtaga

SEQ ID NO: 10690 - DNA, 742 bp, Macaca Fascicularis
  misc_feature (1)...(742): n = A,T,C or G
gaggagtgctggtgtccgaggagagccccgcggcagccaccaccgtcctcgcggaggacccgcacacggtgttggtggagttctcgtccgtggtagccgacacccaggagtnnnnnnnnnnnnccactgcggatgatgcggagnnnnnnnnnnnnnnnnnnnnnnncgagggcacccagacggaggtgaggggtggggcgggcgggggcagggaggctccctggcgcagccgctttcgctgagccgtggccccgcaggtgnnnnnnnnnnnnnnnnaggtggtgcagcagattgtgcaccaggccagcgccggccaccagatcattgtgcagaatgtcaccatggatgaggagacagcgctgggcccagaggcnnnnnnnnnnnnnnnnnnnnnnnnnnnnncccccgagagcctgacagaacaggtggccatgacactggcctcagccatcagcgagggcactgtgcttgccacccgggcaggggcgagtggcactgaacaggccactgtgaccatggtgtcatcagaggacatcgagatcctggnnnnnnnnngcgagctggtcatctcctcgccagagggccagctggaggtgcagacggtcatcgtctagcatgaggtctgcggggtcctggccgggcagggacagggcagaggacctgagcgccccgcccacgcctgcctggcagagaagaaggcacagaatggaggcgccccaagatggnnnngtgtacataagag

SEQ ID NO: 10691 - DNA, 742 bp, Macaca Fascicularis
  misc_feature (1)...(742): n = A,T,C or G
catgagctccacttttnnnttactnnnaanagcttnnnntgagtcctccttactgatggttgtgtctttaattatatacatctctgtccctccagacagatccctctgtcctcactctctgatttcattgaggatcttgggtgagagagagggacctgcnnnnnnnnnnnnnnnnnnnnnnnnnnnagctagattgggaggttggctggtcactgatggttataatgactgtgggnnnnnnnnnnnnnnnnnnnnaatgaacaggagacacagatatgaagacagtcagattctgattgatatggtctgaagtgctcctggtattgcaagtcatttgctnnnnnnnnnnnnnnnnnnnnnattgagttgtaaagttgcttcttcttcagccttctttcctgtagcctagaatggagaatctgaccagaccccannnnnnnnnnnnnnnnnnnnnnnnnnnnnnnnnnnntacattagggcatttgtatttccctcacaatacttgccacattacttggcataggagacatgcttagtgtaattatgagttaacaagcctttggatcagggcttgactcatgatagacaaagtatgtannnnnnnnnnnnnnnnnnntcttgggtaagcaccatttttctttctatcgcctttccttgaaaatacatcttcagctttgggtaggaggaatcttggggtgtgaaatcattgcaaatttacttcatctttctggagtttgaggtt

SEQ ID NO: 10692 - DNA, 728 bp, Macaca Fascicularis
  misc_feature (1)...(728): n = A,T,C or G
gtcctgcgcagctggctgnnnnnnnnnnnnnagcattgtgtgtgcccatcnnncaccagggctaggtaacacccgcagctccgccctatgtagcctgggctactgtgtnnnnnnnnnnnnnnnnnnnnnnnnnnnnnnnnnnnnnnnnnnnnatgcctccctgggccccaaactgggtgcagaccaggtcccaggcctcaccctggggctctnnnnnnnnnnnnnnnnnnnnnnnnnnnnnnnnnnnnnncctatcaccttggccagtggcgcttctggtggactctgcactccggtatacannnnnnnnnnnnnnnnnnnnnnnnnnnnncacgctgtagcctgtcttgccgtctttgtcttgttgccactgtgtttgtttggagccaaggggctgaagaaggcattgggtatggggccaggcccctgnnnnnnnnnnnnnnnngcctggtttattttctggtggcctcatggggtggttctgggactggatttcctggtgaggtccaagctgttnnnnnnnnnnnnnnntctggcccagcaggcnnnnnnnnnnnnnnnnaacctggcagaagccttggcaattttnnnnnnnnnggctacgcccctgctcctcgccctattctgccaccaggccacccgcaccctcttgccctctctgcccctccctgaaggatggtcttctcatctggacacccctggaagcaaatcctagttctctcccaacc

SEQ ID NO: 10693 - DNA, 702 bp, Macaca Fascicularis
  misc_feature (1)...(702): n = A,T,C or G
gccagacggccagcaggctccnnnnnnnnnnnnnnnnnnnnnnnnnnnnnncagggggacaatgggcagcaanncnnnnnnnnnnnnnnnnnnnnnnnnnnnngtttggtgtattatccattttgtgaatttgggtaggggggagggtagggataatttatttttaaataaggttggagatctcaagttgggtccacttgccatgcaggaagaggcccactagagggcccatcaggcagnnnnnnnnnnnnnnnccctgnnnnnnnnnnnnnnnnnnnccagcctgtaccttgctctggggctacagggtggtgggcaggatctcaagccagccccctccagctcatgacactgtttggcctttcttggggagaagatggggtattcccactcaccagccctagctgtcccatagggaaaccctggagccgtccctttggagccaacaagaccgccccagggctacagcagaactttaaagctcaggagggtgacgcctggctcggcctgctgggaagagctcccctccacagccgcggctgatccgcaggactaccgcaggcctggactcaccaacttgccacatggtctaggtttcagcaacaagactgccaggtggttgggttctgcctttagcctggaccagagggaagtgaggcccaagnnnnnnnnnnnnnnnnnnnnnnnnnnnnnggccacccc

SEQ ID NO: 10694 - DNA, 770 bp, Macaca Fascicularis
  misc_feature (1)...(770): n = A,T,C or G
atagnnnnnnnnnnnngggcaccgccagggannnnncagtgcttcagtgtacgtgttagagaatattggccaagcgtctgtgagccccgtgctgtattttgtaataaagnnnnnnnnnnnntgctttccgagcttcctttgtccttttctcccctttcccaccctgtaaccnnnnnnnnnnnnnnnnnnnnnnnnnnnnnnnnnnnnnnnnnnnnnnnnnnnnnnnnnnnnnnnnnnnnnnnnnnnnnnnnntaggggaaaggggttccccagctgcgctcacttctgccacgcggagcggcagcctctgtgagccctggtgggaagagtttgaatgtgtttttcctagcttccctcattcccattttcaacatccccagtgctttctggccctgctgctcagatttccgagtgactcaaatggggaccgttacttgtgctgggtgacaggccatttgtgnnnnnnnnttgtgtgactttcaagttagaacccaggtcccctgcatgnnnnnnnnnctgaactcataccctcggtagtggttggttggctgttgcttttgnnnnnnnnnnnnnnnnnnnnnnnnnnnnnnnnnntattcaaagtgaaattcagcttaccgtgtgatttttgggtctatcactgtatttttcaccnnnnnnnnnnnnnnnnnnnnnnnnnnnnnnnnnnnnnnnnnnntgtgaagtctgacttgctgagtgtgaaattctagtattgataatgttgtaagatgtgttgcctactcataaaa

SEQ ID NO: 10695 - DNA, 645 bp, Macaca Fascicularis
  misc_feature (1)...(645): n = A,T,C or G
tctcaacccacatcagtgatannnnnnnnnnnntccccagacagaaacatgaaatgacttaaaaaaatagaaaatattcttctcgccaggcacacaagactgtannnnnnnnnnnnnnnnnnnnnnnnnnnnnnnnnnnnnnnnccacgcccgcgcacacaggcgcacttaaataaataacacgcgcacgcacggctttcnnnnnnnnnnnnnnnnngacggtctggtgagtnnnnnnnnnnnnnnnnnnnnnnnnnnnnnncagggaggtgccccgcggnnnnnnnnnnnnnnnnacggacccctggtggatcagaacagagctggcacctgagccgctgagcaggcggctacttctggctctgttgagttttggaagacctttgagagatcaacagcatcaccgggtaggtcctgagtccgcggctgatacgttagggtcacctgggggctgctaaaagcccatagtcctagccccatctgcagagttggcttctgaaggnnnnnnnnnnnnnnnnnncctgcatttctaaagctgttcaaatccaggcctttggaggcttaagactaagcctgcaccatttcaaactaagtacannnnnnnnnnnnnnnnnnnnnnnnnnnnnnnnnnntcacacttctgct

SEQ ID NO: 10696 - DNA, 630 bp, Macaca Fascicularis
ccccctggaggggaagggccaggccagcgaggactcctgactctgtaagctgccagccagttccctgaatgggtgagagagcccctggcagcaaggtatctgccacattcatctgtcctggggtggtttcagaggggctcatgcttcctagggcagctgaagccatccctaggaagacaggccatgggcagcatgcacaggtagcctggtagcacgctcctcctcgtccccatgactgaaacatggctgtagctgggggtaggggcagtgccaggcccatcaataattcagcaagatggggaaaagctgcagctcctccagcaccccctactgttggggccaggctagtgttcccggcatgcctcagtctggcatgtgacttcttccctgcaggtgcccaggcaggagggactggcttatgccaccccgtgcaggatcatctttttagcttacagagcctagtatgattcaacaaccctccacctctgccctcaacatgcccaactgatctggtgaagggtactgaagacgaaggcctctcaggcaccatggatgggatgggtgtgtgtgaggcgggcagagtccccaggagctgccccagctctggctggacagttgcatgggaaggcc

SEQ ID NO: 10697 - DNA, 744 bp, Macaca Fascicularis
  misc_feature (1)...(744): n = A,T,C or G
agtagacccagctcttggnnntttccttttgcaaagtgttttgttggtggagaaatggggcacctgtctagatcttgtccggataatcccaaaggcctctatgctgatggtggcggctgcaaactttgtggctctgtggaacatttaaagaaagattgccctgaaagtcagaattcagagcgaatggtcacagttggtcgctgggcaaagggaatgagtgcagactatgaagaaattttggatgcacctaaaccacaaaaacccaaaacaaaaatacctaaagttgttaatttttgataacaactagcactatcattagttaccacctcatcgttactttctaaaccaggcccacttcacgagttagagttgagctcccttgtagccaggactatactgtagatatcactatgatctgggtgtggtcgaaaacaattttgtttattctgtccatcaaattgtacttctactactgtttggagaaaattgaagaaaagaataagatgattaaatggattatctaaaagaacatattttaagagacagaacttagacataaccaagtagttgtatacctgattgtaacaatcatcttttataaaagcaaaattatgcataaatgtaaaacactcctaaacaaagggtacaaatgaatttttggttatatcattttcttggctcaaagtatcaatttattattataatagaaatttataagttgctagaaagtctctgttttaaaac

SEQ ID NO: 10698 - DNA, 772 bp, Macaca Fascicularis
  misc_feature (1)...(772): n = A,T,C or G
agtggagagtgccgatacggggagaactgtgtgtannnccacggagattcttgtgacatgtgtgggctgcaggtcctgcatccgatggatgctgcccagagatcacagcatatcaaatcatgcattgaggcccatgagaaggacatggagctctcatttgctgtgcagcgcagcaaggacatggtgtgtgggatctgcatggaggtggtctatgagaaagccaaccccagcgagcgccgcttcgggatcctctccaactgcaaccacacctactgtctcaagtgcattcgcaagtggaggagtgctaagcaatttgagagcaagatcataaagtgagactcctccccagtcttcatttgtgctttctcttttggggaagaatttagtaacttgtgccaactttcannnnnnnnnnnnnnnnnnnnnnnnnnnnnttttatcttgaaactgggatattctaatggggatttcttnnnnnnnnnnnnnntagcttctaggttagttggtctatctacctacttttatttgaatgaggaaaccttgtgtatcagttagtagaatcttcgtgctttttctgaggagattgnnnnnnnnnnnnnnnnnnnnnnnnnnnnnnnnnnnnnnnnnnnnnnnnnnnnnnnnnnnnnnnnnnnnnnnnnnnnnnnnttttccactttcctattccattcattaagctagccaataatccaccatcctttaaagattgttctcataactgaacaaaaaccacannttaaacagagcaaagctc

SEQ ID NO: 10699 - DNA, 702 bp, Macaca Fascicularis
  misc_feature (1)...(702): n = A,T,C or G
gcagggaacannnccaatctnnnnttggatgtcagctgcccccacctccctgggcgtcaggaccactcactcctcggtgctcataatcaccccacggccccaggaccacggcaccaacctcacttgtcaggtgaagttccctggagctggcgnnnnnnnnnnnnnaaccatccagctcaatgtctcttatgcttcacagaacccaagaactgatatcttcctaggagatggctcagggaaacaaggagtggttcagggagccatcgggggagctggtgtcacagtcctgctcgctctttgtctctgcctcatcttcttcacagtgaagactcacaggaggaaagcagccaggacagcagtgggcaggatcgacacccaccccgccacagggccaacatcctcgtactggaaatcacagggctcctgctctgctttgctccctcctgaggatccagttcccagcacagaggaggtcccagagacctgggactgagttcagggtnnnnnnnnnnnnnnnnnnngaaattacctaagctctctgagagctagtttcctggtctgtaaaatggacaaaataatagatgccaaagatgatgtcagtgtagctggccataatttttccacattagtctctgtgaatattgaagagaattgggaatcaatcaatacatgctacatnnnnnnnnnnnnnnnngtaaagcc

SEQ ID NO: 10700 - DNA, 719 bp, Macaca Fascicularis
  misc_feature (1)...(719): n = A,T,C or G
tgaccacgaggcggtggtgaggcagctggcccagccatgcacagaggtgccgctctgtcctcaggagctgatgggtcctgccgacttggcagcagggcaccccagcttggtgggagaggatggacaggatgaagtaagtgcaaaccacgtggcagcccggcgcctggccgcnnnnnnnnnnnnnnnnnnnnnnnnnnnnnnnnnnnnnnnnnnnnnnnnctacccgggtgtcttacggtgggtgctcaccttcatcatcgccctggccctgctgatgtccaccctcttctgctgcctccccagcagctggggcagctgctggccctcctccaggactctcttctgcagagagcagaaacacagccacatctcttccattgcctgagtgccctctgatgaggctgcccctgcagccctttctgcccttgggcccccgaacttccacaatgaacagggtaaggggttacggactaagactggctcctttgggaaatcacatgccagcgggacttgcaagccaaagccgagatggccagcctgggtcaagaattacacgcttggatgacaggcttgcacttacccttgggatagcacagctaaactgctgggggctgggggaccagacacaaagtacttgaacacgacaagatgggggaagctcctgttcctcttatgccaatgttcctggtttttctttatataacttgatgaaagtattg

SEQ ID NO: 10701 - DNA, 704 bp, Macaca Fascicularis
  misc_feature (1)...(704): n = A,T,C or G
tacccaatgnnnnnnnnnnnnnnnnnnnnnnnnnnnnnntgagcccttgaaaaatgaactgcccnnnnnnntctaatgggagttgtgaatgtaactggttaatggtacacattccaccttcaagaatactctttttaatgggaggttatgctttggcaatcagcatctccctgggaggagagtcaagacttggagacatgtgcttctcattatgtggttagaaattggtgcctcagccctatctagactggggaagaattgaggatctnnnnnnnnnnnnnnnnnnncagaaagaaatctgcatgagttgcttttttaccctttaaatcatttgccaaacattgcagcaaacaagtgtgcatatgtaacaagcttccatgttttcatagaaggtgaaccattagtataaatggtaattagttgttccttaaccctccacatacatttgcctattacacataaaattaatatttactttagtgaagtggtttgnnnnnnnnnnnnnnnnnnnnnnnnnnnnnnnnnnnnnntttcatacttaccatacaaaagtatggtaccttaaagcttttgctctatgttctttaacgtttcactgnnnnnnnnnnnnnnnnnnnnnnnngaataaaaattgaaactggtgttaatctgaaaattaatgattctctgtaagcacagtatttgaaaagagaatagcaattagg

SEQ ID NO: 10702 - DNA, 709 bp, Macaca Fascicularis
acacttacgccaccctgctgcccgccacctacaactccatgatcaatcccatcatctatgccttccgcaaccaggagattcagcgcgccctgtggctcctgttttgtggctgtttccagtccaaagtgccctttcgttccaggtcccccagcgaggtctgaagggctcgctccatgtcctctcaccaacaccacacccccaacaagccagcctttggtaagcttggtacctgctgatgaactctgagatcccaatggtgtgagtctgactgtggaaagaaaaagggactaaagagaaattcaacaaactcaaaaggacaaagaggcttgttggcactttacatatacagtgtatacatgtgtacatatatatacaaatatttgtatcttctggaggtgttcaggatgtggagcttcctattctgtgaaaaaccaagaaaaagatacgattgtatactcaaattgtacatcacatttgtcaaacgaatacattccaatactgcttaattatagcactttatttttagctgctgaactgccagaacagtgttgccattttcaagggcagggaaaagggagtaaaaggtgtatttttgttgtatgtgatagaatattttgctgcacatgcatcaaaaaattacaacatattttgtacacgaataaacccattacaagaatgtaatttggggtatgtgactgactatagaatt

SEQ ID NO: 10703 - DNA, 549 bp, Macaca Fascicularis
  misc_feature (1)...(549): n = A,T,C or G
ctgcacccgcaccacgccgccggcggcgtgcannnnnnnnnnnnnnnnnnnnnnnnnnnnnnnnngaccatgtcggtgcgcgagctaaaccggcagctgcgcggggtcagcaaggaggaggtgatccggctgaatcagaagaggcggaccctgaaaaaccgcggctatgcccagtcctgccgcttcaagagggtgcagcagagacacgtcctggagtcggagaagaacnnnnnnnnnnnnnnnnnnnnnnnnnncaagcaggagatctccaggctggtgcgcgagagggacgcgtacaaggagaaatacgagaagttnnnnnnnnnnnncttccgagaaaacggctcgagcagcgacaacccgtcctctcccgagtttttcataactgagcccactcgcaagttggagccatcagtgnnnnnnnnnnnnnnnnnnnnnnnnnnnnnnnnnnnnnnnnnnnnnnnnnnnnnnnnnnnnnnnnnnnnnnnnnnnnnnnnnnnnnnnnnnnnnnnnnncattattatttgcagtcatggagaaccacctacc

SEQ ID NO: 10704 - DNA, 709 bp, Macaca Fascicularis
acagtccacattctcaagacaaacactccccatctctggtaatcagactggcagttctggagtgatctcccctcaagagctactgaagaagcttcagattgtgcagcaggagcagcagctgcatgcctctaaccggccagccttggccgctaagtttcctgtgctcactcagagctctggaacagggaaacccttggaatcctggatcaacaagacatccagcacagaacagcagactcctcttttccaggtcatctcacctcggcgcatccctgctacagcagctccttctctgctcatgtcccccatggtgttcgcacagcccacttctgtcccgccaaaggaaagggagagcggccccttgcctgtgggaggccaggagccacctgctgccaccaccagcctcctcctgcccatacagggcccggagccctccgtgatcaccagcagcccactcaccaagctccagctccaggaggcactgctgtacctcattcagaacgatgacaacttcttaaatataatctatgaagcctatctcttcagcatgactcaagcagccatgaaaaagactatgtgacagcaagtcggtttaaaactgattttcaaggtccttctagaactctggcacaaggtcctttcatgttgagtgtggtttccttctaatgtttctgccttttttaaaaaaaatatcgtataatatgaagta

SEQ ID NO: 10705 - DNA, 778 bp, Macaca Fascicularis
  misc_feature (1)...(778): n = A,T,C or G
ttgcagatgagaggctgagtnnnncagaagggttaggcaacctactgaaactcacagaagtcacatgtgatggagagaggatttaaagccagggcctcnnnnnnnnnnnnnnnnnnnnnnnnnnngatgtgtgcaggatcccagcactgatacccagtgacaaactatggagaacaacaaagcatgcaggaccccggcagcctcccaggacaggctggcaagggaggagggccggccagcacttggtaggccatcagtctggccatctgtcgtgtcacagaagcaaaccgtgccttctggctctgcgccccatattcccagcatcatagacatccaacagcaccagcaggagagtgnnnnnnnnnnnnnnnngctgttcgtgcctgtccctgctctgcctcccacccagttgcctgaatcannnnnnnncagatgcagccaccgtctcttgtcaagtgggacctcatgctaattctcagaaggctaacttgagaggtctggggccttgttccctagagggtccccannnnnnnnnnnnnnnnnntnnnnnnnnnnnnnnnnactcaatgccctacatcctcctctatggtctctcccctggcttgnnnnnnnnnnnnnnnnnnnnnnnctttgtatgctatgttcctactgtgatggaaaactaaatgactataacttattttatatccatattcagattatatagagaatattctatgtatctatgatgtgcttactactgcagtgcattggtcattagtcttcaggtaatacagac

SEQ ID NO: 10706 - DNA, 787 bp, Macaca Fascicularis
  misc_feature (1)...(787): n = A,T,C or G
aacactagtctagaggtggacactgtcaggggttnnnnnnnnnnnnnnnnnnnnnnnnnnnngcagtaggnnnnnnnnnnnnnnnnnnnnnnnnnnnnnnnnnnnnnnnnnnnnnnnnnnngggttacctaccctgattgttgtcatttgtaacaggtcacttccttttcactcagtttaaattggtgatggacgttgcttgatcgagcttattactctctattttgagaaggtagaaggtaagagggcccatattcattctttgccatgaaatgaatgaattaggaagattgtatttacttatacttaagtgttttttaaatacatgtttaatgaaataaactgtaaaatatccagttttgtgtattatatgtacatttgatttttaannnnnnnnnnnnnnnnnnnnnnnnnnnnnnnnnnnnnnnnnnnnnnnnnnnnnnnnnnaatatggtgtacagagtggagtgtgttcttataaaaatatttaatgacattggttcttgtgttttgatcttttatttctgaaacactcaaacaccttacaaagtgctgagtaggtaatagtgacccaacttgtttgctaaatgattatttgtttaaatctgtacagtttcaagtgttcacttatacaaagagtgtatatactttcaaataatttaaaatgctttatattatttggctagaaattgctgtttttaataaatgtgaattttttaaaaataaagatttttgcttcctaccttgtcctcatgtgtctgatatgtgtgtggtggattccttgagg

SEQ ID NO: 10707 - DNA, 1196 bp, Macaca Fascicularis
  misc_feature (1)...(1196): n = A,T,C or G
gaagtccatgatgtttcnttggaaggctgttgttacagttggggcttataagaagtgatactggacaggatgagaagggagtaggnnnnnnnnnnnnnnnnnnnnnnnnnnnnnnnnnngcnnnnnnnnnnnnnnnnnnnnnngtgcctcgggtgcaccccagcttctctgaggtccaagatgctcctggggagttgaccaacatttgggaagataataggaggcaatggggaaactgctccccaatatattcctcttttcctttcttnnnnnnnnnnnnnnnnnnnnnnnnnnnnnnnnnnnnnnnnnnnnnnnnnnnnnnnnnnnnnnnnnnnncagtgctgggagatgatcagaaatcgcagggcacagcctcaggtctacctggacacttgtccgattctcaacagccagacacccaatctgtggcctcctgctctgaggccatcccccagcttccctagaacacagcagacatctgagaaagcttcagcagttctcttactaacagattcagaaaagtgtctcaaagcagagcacagagttatttggtgtatgctgaagatggcctttgtgccacaatcatttagtaagtaagcaatcaatttcccattgaactgaaaatgcaacgtttatcatacattcgattctcattcacactccttaagatttgtgtcagaatctttatttctgttcatgtgttctacttttctactcctgtatgaataaaatattgatttggttacagtggctttgactataatgtgggagccaatttttgcctcagtcttcattttcatatttaccttgcgattctcaggcatttttttcttctatgtgaaagttaaaatcattgtgtaatttcccccccccaaaaaaaaatcttattggtattctagttggcaatgtcttacatttatgttaagtttgagggaactggtaaatagtttaagtataagttagtcaagaccattttctttctaagtgaacagacttaaaactccagagctactgaagtaaaagttagaatcatttgcattttcattcagataggaggtaatttagtaaattttgacactattattttaactctattaacttaagtaatgtcataggagaaaacacaagcatttgaccaaatgagatccattcagcgactaactggcaaggcactcaaaacatgtcatcataaagtg

SEQ ID NO: 10708 - DNA, 693 bp, Macaca Fascicularis
  misc_feature (1)...(693): n = A,T,C or G
agatggccgacagccccgagttcaccagcatcnctgcctgctactggtgggccgtcatcaccatgacgacggtgggctatggcgacatggtacccaggagcaccccgggccaggtggtggccctgagcagcatcctgagcggcatcctgctcatggccttcccagtcacctccatcttccacaccttctcccgctcctacctggagctcaagcaggagcaggagagggtgatgttccggagggcgcagttcctcatcaaaaccaagtcgcagctgagagtgtcgcaggacagtgacatcttgttcggaagagcctcctcggacaccagagacaataactgagcgcagaggacacgcctgccctgcctgccatctgtggcccgaagccattgccatccactgcagacgcctggacagggacaggccgcttccgagtgcagtcctggcgcagcaccgactcccacgcacccggggaaggacaccctcactcccaccccccgggaaggacacccgcacatcagcagaggggccctgcccctccgcctgcagccatgaaaggaagccgggtcatcagcccagccccgcccgccccaacccctatgtctgtttccctcagtaaggagatggcttattcttttcaccatgcgaataacatgcccagcaaaaacttgctttatgggtctgcctggagaaa

SEQ ID NO: 10709 - DNA, 734 bp, Macaca Fascicularis
  misc_feature (1)...(734): n = A,T,C or G
cagagaccgggtgagctgcagtgctgnncccgccaggctgcatggtgccaaggccatcttggacgcagaacccggtccccggcctgccctacaaccttcaccgtccatccgcctgcccccagatgtccccctccctggctccaaagccaagcccaagccacccaagcaggcccagaaggagcagcggaagcagacgaaggcgagagggcagctggagaagcccccagctccaaatcaagccatggtggtggccgctgcaggagatgcatgtcccccacagcatgtgcccccgaaggactcaggcccccaggactcagcccctcaggattcggctccccaggtctcagcccaccactgctcccaggagagcctgacatcccaagagagtgaggacacctatttgtaaccctggcagctcaggcctccagggcggggtctccacatacctacacggttcatgaactgacattccacggcctgcccaccctctgagggccaagccgcctggccactgggctggagtctggctggtccaacacagattctgcctgagcctccttatttattttctttacagtggcactcgggctggcccagccagggcaggcagaagctagggcctgggggtggggcctccttcagccccctcctcctggggggatgctccccagggttagggtgctggtgtgaggggaaagggtggggtgttctttgtgtaaaatagaaacatggtt

SEQ ID NO: 10710 - DNA, 876 bp, Macaca Fascicularis
  misc_feature (1)...(876): n = A,T,C or G
gtatttcctaacttnattnncaaaatgatgtatgaaaaaccaaatttaaagattttaacatgtcagagagaagagagttaaaatttaaaaatgcatcttgggagagaaatttgtctatgtttctagtgcctttcttgtcttgattgtatggtcagtaggcaatcttaaatgtttttatttaaaataaagtattccatgaaaatataaatatatgtatacactactaaattttgcatttatagctaaattgaatcagaagactgcttatggttttaaaattgcaatgacttaaataatgaggttgttaattagagtcagagcctgttcacatattgtgatcaggtagcaatgacatgtaccacttaaattattttatcgtctatttggtagttcgattttaactactcaatgaaaacagccatgaatatcttttcttaaagagagttttgaaaatgatcacttacctaaaacttgaaagctatgaattagttatccatactctcatgacaattttgttggtgaacaacaaaaaagagatctatttctttaaaagatatttgtgcagaaactgcatgtaactcttaagttttactcctaacatacgtatgtttggggaagtattctattctatacttgccaatgtggagaacaaaatagttttttaagaatgaagaagtatatatatccattctgtattttacgtgcagcagaattatcttccgtaggatttttttgtgtattcacaaggtgatatttgtattgtaaaacaataatggtgaaggaaataaaaaggcttttaaaattttgtttgttttaaatctttgtaaagttattattccagagagtatactggtatcttacagcttacctagatca

SEQ ID NO: 10711 - DNA, 950 bp, Macaca Fascicularis
acacacatacacctgtgtgtatgtaatacataatgttcattgtacagatgtgtggggtttctttgtgttttatgatacattacagccaaattatttgttggtttatggacatactgccctttttttttttttttccagtgtttaggtgatatcaaaataggaaatgcacttaaccatgtaaaagatcagtgctaaagtaagctttttagggccttttgccagtaggtagtcactcaatgtggtattgatcttttcacaaataacagaactgagaaacttttatatataattgatcacataaaacagatttgcataaaattaccatgattgctttatgtttatatttaacttgtatttttgtacaaacaagattgtgtaagatatatttaaagtttcagtgatttaacagtctttccaacttttcatgatttttatgagcacagactttcaagaaaatacttgaaaataaattacattgccttttgtccattaatcagcaaataaaacatggcctcaacaaagttgtttgtgttattgtacaatttgaaaattatgtcaggacataccctgtagaattactaacctcactgccccttgtagaatatgtattaatcattctacattaaagaaaataatggttcttactggaatgtctaggcactgtacagttattatatatcttggtcgttgtattgtaccagtgaaatgccaaatttgaaaggcctgtactgcaattttatatgtcagagattgcctgtggctctaatatgcacctcaagattttaaggagataatgtttttagagagaatttctgcttccactatagaatatatacataaatgtaaaatactgacaaaagtggaagtaatgtattttaaagtaattacacttctgaatttatttttcatattctatagttggtatgacttaaatgaattactggagtggg

SEQ ID NO: 10712 - DNA, 752 bp, Macaca Fascicularis
atgccacattaacaatttttaaagttgatgagaatcaagtatggaaaagtaaggccatactcttacataataaaattactcttaagtaattttttcaaagaatcacagaattctagtacctgtaggtaaaccataaatctgttctaagacatatgatcaacagatgagaactgggggttaatatgtaacagtgagattagtcatatcactaatatactaacagaatagaatctaatcttcatttaagacactgtagtgaattatctgacctagagttacctagtttaccacgctgtatcttttgaatcatgaaaccttaagacttcagactgattttacaggttgtcttccattccaacctaacatccaatgcaggcaaggaaaataatacaagatttccagtgacaaaaaattatattatctcaagtatttaaaaaaaataaaaatatgaattctctctccaaatattaactaattcttagattatattttgaaatgaacttgttggcccatctattacatctacagctgacccttgaatatgggggttaggggagctgacaatccatgggtctgcaaaatcttaactacctaatagcctactgttgaccataaaccttactgataacataaacagtaaattaacacatattttgcatgttatatgtattatacactgtattcctacaataaagtaagctagagaaaagaaaatgttatttagaacattgtaaaaaagagaaaatatattt

SEQ ID NO: 10713 - DNA, 772 bp, Macaca Fascicularis
  misc_feature (1)...(772): n = A,T,C or G
tatatagggaaggggttgcggcccaagattggcannttaaaacatgcaactgaatgattntgaggccaggtgnctgagcnnnnnnnnnnnnnnnnnnnnnnnnnnnngggtaggcaaacaggtgaagcnnnnnnnnnnnnnnnnnnnnnnnnnnnnnnnnnnnggtcctctgtgcttctctcattcaatgacactgatcttttcctcccattcctatcttccaacctaagcactcatttctagatccttctgctgtcctaaagggtgtgcgacttttttccccannnnnnnnnnnnnnnnnnnngnnnnnnnnnnnnnnnnctggacccagactgcctggggtgagtctcaggtcttagccctccaggttaagttgcttaaattttccaggctttagctttcccatccgtaaagtgcagnnnnnnnnnnngagagctgattaaatgaaataatatatgtgaaatgccatgaacagggactagtnnnnnnnnnnnnnnatttaaatgtnnnnnnnnnnnnnnnnnnnnnnnnnnnnnnnnnnnnnnnnntcgacttcctttgggaaaggtgaaggtttcatgagcccgctggctggatgggatatagagttctctttctgnnnnnnnnnnnnnnnnnnnnnnnnnnnnnnnnnnnnnnnnnnnntctattgtttaattttctcccttgatccacagattgnnnnnnnnngttctggggacaaactatgccttgctcatttttgtacccagcatagtgctggacacaacattac

SEQ ID NO: 10714 - DNA, 734 bp, Macaca Fascicularis
  misc_feature (1)...(734): n = A,T,C or G
caaccctctacaaagtaaagaaattaacttacttatgctggaggttgtaaatctnttctgtgaaaaatgagaccttggcgatgaccttcagcaggatataaataactcccacaagcttagtgttccaataatggaacactacgcacagttaattaactttaaaacttcccacaaagaaaagcccagatgcagagagcttgattgtgaattctatgaaacatgtaaagaggaattaacaccagtgcttcactgtcttccaaaaaattaggagggaacacttcccaacacattctattgggcaagcattgcctaaagatatcacaagaaaacaaaactacaggccaatatcccttacagcccaagcccgtacagcacccgctccacctctggagggctggagactaaggccggccacacggggccagctgtgtctctgtggccaatccccagtaaaaactctggatctcgaggctcaggtgagcttccctggatggcagcactccatagagactgccatacatcctcgatggggaaacaggcactgtgctgtccgcatgaccccaatgggagaggacagccggaagctcacaccggagcgggactccatctcaaaaacaaaaaccaaaaacccagaaacctaaaaaaccaaacaaacctaatgcaaatggagtccttccattggtggctcctgggccctgccccatgtgcctcttccccgggctgattttaacctg

SEQ ID NO: 10715 - DNA, 758 bp, Macaca Fascicularis
  misc_feature (1)...(758): n = A,T,C or G
cagcaaagtgttgccagaggcagagctgcaggaggagaccatgcggatcgcgcggaagatcgcgtcactgagccgcccggtggtgtccctgggcaaagccannntctacaggcagctgccccaggacctggggacggcttactacctcacctcccgggccatggtggacaacctggccctgcgggacgggcaggagggcatcacggccttcctccagaagagaaaacccatatggtcacacgagcccgcgtgagtggaggcagaggagtgaggcccgtgggcagcgcccaggagcccgccctcccctctggccccaaccccacactgcctctcagcttcagcaggcagcagacgagctgcttctgtgacttgatactggtgtcacagcatttggcctacattaaaagccacgcttccatggtgaaagacaaaatggggagtgactgaggtgctgacctcggtgcaaggctggtgagccctgtagcgggccaactatggcaggaagcctggcgtttggggtgctccttacaacatcttaagcaagcgacccccctgacatagcagaaggtgacaacccatggaggcaggaaagaaggacaccagcctgacccttatccaaaacctcctcctaggcggagttaatcctggctgctcaggagaggcaacacatttcaaatctccatgagatgttctccacgcagaaaatcttcttgattctatggagacgtaatcatgcctatggctttgaataatcttat

SEQ ID NO: 10716 - DNA, 726 bp, Macaca Fascicularis
agttgggagcccctccgcttcaacactggagaactgagccttgcatctctccagggtccaaggccacgcttggtgcactggcaagacttgcttcagccccaggtgtggtgagttagacctgggaaaccaattatgagtggaaaatgaacctctagttcaactgtgccagaggaagcagccctccagtgccccccgcctcactcctccccatcatgtaccatgaaaaccccctctgatggcctcaaggcagtgcctgcaggccgaggcccttctgggggtttctatctttcttccaccagactccaagcccactctcctccaagactgtgctgtcttttcttacccagagtattaacactactaagtctttcaccttaatttatgactcaggatttattcacgtcctgcccactctaggctcacaggaataaaatcaagtgctagacacgctggctgccactaaggcactagctctggagctggtggtggcagcggggggtgccgcccagcgtgctgggtcctggcagtgcctctgctgtgctgcacattgagccctttctcagtccgtggagtgtcgagttgggccatctgtccactgacctggccttcatgtaagcagctgtgggctgcgggcagacaggagctcagagatgcagcatgaggctcttagaaaaacttggccatttgctgcctctaattccttttgctttgacatattgggctatg

SEQ ID NO: 10717 - DNA, 716 bp, Macaca Fascicularis
  misc_feature (1)...(716): n = A,T,C or G
caccagggaccaccgccagcnnnnnnnnnnnnnnnnnnnnngctaagannncagagctgcagcctttctgcccccagggtccctgcagcccctcctcagatactcgctagatgcacccagatgggaagcattggagtctctgtcccaaagcctcagagatcagtaccgctgccgccgctacctcctcctcaagcgccttgacctcactacatctgctttccactggagtgaccgggcagaggcccaaggagaagccatgagggcagtgctgatcccaattcgagaggttctaaccccggaatcggacatctccatcgcannnnnnnnnnnnnnnngagccgacctgtctcgtctcatccnnnnnnnnngcatggctgtccgcaaagggacctgctgtgccatcaacaaggtgcttatgggcaacgttccggaccgggggggccgcccaaatgagctggagcctcccatgcccacctggaggagccgaagagaggatggaggcccccagtgttggggccgcaagaagaagaagaagaagaagtaaagagggactggtggtcggggacagggggacctccgtgagatgccaatgccatcagtaatctctggggagtccgtttaaggctttccttggtccttggcacccaagcccccccatctcctattcctgaggccccaaatgctgtactcccattcactagtcaataccaagaacc

SEQ ID NO: 10718 - DNA, 780 bp, Macaca Fascicularis
  misc_feature (1)...(780): n = A,T,C or G
gcatcatcaacaactccaatggcaaccgtaccattgtgctccatgacacgagcctgccagatgtgnctgctacggactttgagaaggttgatctgacccagttcaagtggatccacattgagggccggaatgcatcggagcaggtgaagatgctgcagcggatagacgcgcacaacaccaggcagcctccagagcagaagatccgggtgtccgtggaggtggagaagccacaagaggagctctttcagctgtttggctacggagacgtggtgttnnnnnnnnnnnnnnnnnncaagcacttggggttccggtcagcaggggaagccctgaggggcttgtatggtcgtgtgaggaaaggggctgtgcttgtctgtgcctgggctgaggagggcgccgacgccctgggccctgatggcaaactgatccactcggatgctttcccgccaccccgcgnnnnnnnnnnnnnnnnnnnnnnnnnnnnnnnnnnnnnnnnnnnnnnnnnnnnnnnnnnnnnnnnnnnnnnnnnnnnnnnnnnnnnnnnnnnnnnnnnnnnnnnnnncggcaagaagtgtggccagcagggctttgatggcatcgtgtcagagccggtgcggtaggaggtgccggctccccgcacactatggaggctgacattgcggctgcatcgccttctcccctccatccagcctggcatccaggttgccctgctcaggggacagatgcaggctgtggggaggactccgcnnntgtccgtttccccacacgtctctccctgcagag

SEQ ID NO: 10719 - DNA, 243 bp, Macaca Fascicularis
ccaacatacctcaccccaccccacccctaaacatggtcccttgttactaggcaaccaggaaactgctacctgttgacctcaccagagaccaggagggtctggttagctcacaagacttccccaccccggaagattagcatcccctactaggctcatactcaactgatgattattagacaattccatttctttctggttattataaacagaaaatctttcctcttctcattgccagtaaaggct

SEQ ID NO: 10720 - DNA, 743 bp, Macaca Fascicularis
  misc_feature (1)...(743): n = A,T,C or G
aaagctcaagnnnnnnnnaagctaatgacctgnnnctgtgcgaagcntacgggaggctggacctcgannnnnnnnnnnnnnntggcctctcggcccctctgctggcgtccccggagcccagtgctggccccctacaggtggcagcccctgcccactctcatgctggtggccctggccccactgagcatgcctgagcctccggggccacccttcnnnnnnnnnnnnnnnnnnnnnnnnnnnnnnnnnnnnnnnnnnnnnnnnnnnnnnnnnnnnnnnnnnnnnnnnnnnnnnngacttccttgggaagcttgttagcccagggtnnnnnnnnnnnnnnnnnnnnnnnnnnnnnnnnnnnnnnnnnnnnnnnnnnnnnnnnnnnnnnnnnnnnnnnnnnnnnnnnnntttgctgccttcctggccgaccaggtgaaagaaggtttccaagctaggtctggcatgttggggatctcagcagtggggcaggaggnnnnnnnnnnnnnnnnnagtcctgacctgagcctgttgtcagagttgggaggggctctgagcagtgttgggcaggctgggtctcccattccgaggccagggttcctgtgcagagccccacccactggtttttgccctgagccacatatgtctgtgccatgggctgaatgccacgacaggtgcgtgtgacagcggccacccacacatgtggaagctaggnnnnnnnnnnnnnnnnnnnnnnnnnntaatgagac

SEQ ID NO: 10721 - DNA, 751 bp, Macaca Fascicularis
  misc_feature (1)...(751): n = A,T,C or G
ggggcgcaagtggtagaagagaagaagcnnnnnnnnnnnnnacgggnnnaggtgnnnnnnnnnnnnnnnnnnnnnnnnnnnnnnnnnnnnnnntattnnnnnnnnnnnnnnnnnnnnnnnaactggcaaaggagagccaggcttttgctgaaagagtttgaagctgttctcacggaaagacagaacatctactgcagtctgtttcttcctcgcagcaagcggctggagctagagaagagcttactggtgcgagcgtccgtcgaccccgttgctgcggacctagagatggcagccggtctcaccgacatatttcagcacgatacatactgtggtgaagtctggaacaccaacaaacgccagaatggcagactcatgtggctctatctcagatactgggaactggttgtggaactaaagaagtttaagagagtagaggaagccatactagaaaagtaagacaaggatgaaataaaactgcttttagtgacgcgaggccaggcagtcatgagccttctgggcctctggcgtcgtctgtcccttgctgcctgtgccatggccacaccgccacccttcagcagcgacctccactcccgccaccctcggagcagaagtgcccgaagcctcagagacggagggtttcctcctgacgctctgcagctgctggggatgtggtttctctgaagcatttgtaagctgcccgtattgtatcaagcagaacagtgtaacctcgtattttagctccagggaaaaa

SEQ ID NO: 10722 - DNA, 772 bp, Macaca Fascicularis
  misc_feature (1)...(772): n = A,T,C or G
tcacagacannncagacttcaagaggaagatnnnngacttgcctggagctgtggatgagcnnnatgacagacgcttcgtcaagtggatgatcaagaacaagggcttggtggccatccctgtctccnnnnnnnnnnnnnnnnnnnnnnnnnnnnnnnnnnnnnactatatccgcttctgttttgtgaaggtaaagggcggggctgggggaagagagacctcccagagcttcccaaggcctgctgggggcatggggagagtgtgggactaacctannnnnnnnnnnnnnnnnnnnacgctccaggccatggacgagaagctgcggaagtggaaggcggagctctagccctgaagtcataccttggccctgacatccccacctgcccgcagagatactcttgtgtgtctgtctttgtccaggtttcagnnnnnnnnnnnnnnnggaagatgctgttgggaaacctcttctnnnnnnnnnnnnnnnnnnnnnnnnnnnnnnnnccttcttcatcttagagaaccaagtgcctcctgtctgaaaggtgagggcggcctgacctgggcctctctcggctcctctgtaggtggatttgtagggtcttgggttgcttctggtctctccaggcttggccgagaccaacagtagagtcccaccgnnnnnnnnnnnnnnnnnnnnnntgcatgggccctgctaaggctcaggcataacctcacctttcctggctcatcttggccttggggatttgcctttagacttgagtgctcaagccactc

SEQ ID NO: 10723 - DNA, 476 bp, Macaca Fascicularis
ggggggaaagtggttatttttgacatggttatcaccaaccaggaagagccgtaccagaaccaatcaggccgaattgtttgtaatgtacccgggtaataataattcacctttcaggtggtgttcgagcgggagatttgcctgttcattgttttctcctcaagggggcaggttagacggtccctggggttttgtgacaccaccaacaagggggtttttcaggtggtgtcagggggcaaggtggtttaggtgcaggggggtgaacaggtttgggttgaaaaagaccccagaaagggtaacatttaccaaggttttgagggtgacagggtttttagggggtttcttatttttccgttcacctgagcccgggaaggaccccttccccacccacctttttgggttccatggttcggtttgtaaaaaggggggggtgttgttttaggtggtgaagggaggggggtgggttcgagagccccagg

SEQ ID NO: 10724 - DNA, 725 bp, Macaca Fascicularis
  misc_feature (1)...(725): n = A,T,C or G
tgagagccaatgtttgaagccaaactgttgaagtcattgagaaccaaactgatgaatttggattctctcatgtatgtaaagaagtgtcactcaaggtttttgagccaaaagtgatgtgaggaaagaggtaccttagtctcagaggcatgatagggaatacggtgtggagatagtaagacaggataggaagcatttgcaataatccaaacatgtgataagtgtctgcagaaggtcatggcactagatgtgaactaaagcaataatttcatgttacttagggaaagtagcattactgtcattagccacacattcattagagaagtttctattgttagttttggaattctgcatctggtaggtccaaggtagtttgttgttagaaatagcaggagcactttaataataataatagttttgtagcatgannnnnnnnnnnngtccaaagtttggaannnnnnnnnnnnnnnnnnnnnnnnnnnnnnnnnnnnnnnnnnnnnnnnnnnnnnnnnnnnnnnnnnnnnnnnnnnngcaatttatcgaacacaccttcttagtgctgcacagggtcacatggatgaagatgtnnnnnnnnnnntgctccagatcatacaaatgcggcaggggcttgtgtgctagcagttagcactgacggnnnnnnnnnnnnnnnncttgctggtgctgaacattctttgtgcaactccatggtctttctgggccttactgtg

SEQ ID NO: 10725 - DNA, 722 bp, Macaca Fascicularis
  misc_feature (1)...(722): n = A,T,C or G
gggcattggcaataaactctttgttgcagctgttttccaagcagtgtaaatactttttcctgtgattatgtatagccttggaatggcaccttttaactaacccatatgtgtttggtttcaatggttttttatattcagatgtatatatggtgctcactttaggatcagcagtgttgaccatttatgctgcatagctgtattatagccttattagttgtttggttgaccctcggggtgtacaaatgtcagtctgagtggtgtcttactcctttgtttataagtgaatgattgtgcatgtgttgtatgtcatagtatgtcgtcacataaaagggagggagcgaaaaaccattacattaagataatattggaccaaactacttacttgctctaaacagttacttgtaccccttaacctgtcttcaaaagttgcatagagttacagtagtgtataaattaaatattgtggaaaaacagtcttgtatttttctgtatgtgtgtatatatataattatgtacttnnnnnnnnnnnnnnnnnntttaaagatgtgacaatcttgacaccaattttaagaatagctgtgagaccgaattaaagataatccctaccaagtgaaaattgatgtgtgttaagagggtacataattatcaactgatttggtcagttgcttccaatgctggttgatttcccnnnnttgtgtaaacattgacaggtatgtgacaaa

SEQ ID NO: 10726 - DNA, 712 bp, Macaca Fascicularis
gccactggctgtggtggccgtagttgcccccatccctggggctaaagccagacccatttctgaacaggggagttggtatcatgaatgtttccgggtttgctgcacccgtggcactggaagcccagctccccgtgtcagaccccgctgtcttcctgggccctggggctcactgtggaggagctgacggcttgggcccttggccagtcctggctcttctctgggcctcaccagggacactcttgaatgtatggcctcaggcgctccctagaggggccctcaaccccctaacctgtgggctgcccccttggggatcccctgcccccttggggatcccttgccccccagtgcctctgctcgtgggtccctggacatggcctcgaagcgaaccttctttggagaagcaacagcagcagccttggccaacgcgtccaactcccaaggctgccgtggagggcagggtggtggtgcttgcctggatgtggccccgagtgcctcccctccctccctctgcgggggagtctcccgcctgaacctgaagacggagcagggccccgcttcgccctggagcctcttcctgtgcctggctcaagctggctgcctgtcagtctcggggaatatggcccaggtctcctcagcctctgccccagttctgggagaagtttctactggtgtatattttttactggaaatgagcctcttaggaatgaatgta

SEQ ID NO: 10727 - DNA, 778 bp, Macaca Fascicularis
  misc_feature (1)...(778): n = A,T,C or G
gaaaatgcagactnnnnnngtcccaccaactgtggaaagtagtnnngagcggcctatgaacaacagcnnngaggcccatacagtggaggcaacttctcctgagactatctgtgagatgatcacagatgtagttcctgaggttgagtctccttctcagatggatgttgaattggtgagtgggtctcctgtggcactctcaccccagcctcgatgtgtgaggtctggttgnnnnnnnnnncccattgtgagtaaggactgggacaatgaatactgcagcaatgagnnnnnnnnnnnnnnnnnnnnnnatgtattcttggcctgggtagcctctannnnnnnnnnnnnnnnnnnnnnnnnnnnntagtccttcctgttctccaagccagtgaagagnnnnnnnnnnnnnnnnnnnnnnngagcctgtttttgaaacacnnnnnnnnnnnntggtagtgcctgatcacaacccatgatnnnnnnnnnnnnnnnnncccttttcttccttcagcagaggccaggctgtggagcnnnnnnnnnnnnnnnnnnnnnnnnnnnnnnnnntttttattttcaaccacannnnnnnnnnnnnnnnnnnnnnnnnnnnnnnagggtgaagggagtatgggcaagcaaagcataggtatggtaggggtggtggtggggttgaagaaacttgttggtataattgtcataggacttgcctaaaatattattaaaattacaggagtgtactcagctttgagcctaggagaaaacaccactgtatccatttaaa

SEQ ID NO: 10728 - DNA, 741 bp, Macaca Fascicularis
  misc_feature (1)...(741): n = A,T,C or G
cataactgannnnnnnnnnnnnnnnnnnnnnnnnnnnnnnnnnnnnnnnnnnnnncaccatcagacattataagtacttggtcccgtggatgctctttcaatgcagcgcccttgccatcccaagcccagtgacctnnnnnnnnnnnnnngccactttccaccaactttttccaagtcctttaactcgttgcagtctgtattttccaccttttgtttttccagttccaggacacagattatcaactggggggaccaaatagccaccttgattttcttctttgtggtctttttcctgaaaattggggcccagtccttggctgtatccatgtaatgatcttggaccatggtagaaaatgcaccaaataggatcatatgaattgctgtctagccttagtcaataaacttgtaggacttttaaacaaaagtgtacctgtaaatgtcctgaatccagcattgttgagctgtcatcaacattcttgtgtctgttttactgttataatactaggtaaatatggaagtaaaggcattccnnnnnnnnnnnnnnnnnnaaaaaaaaaggaattctggtcctgttttctaaaagaaaatgttgtagaaattcttaatttggaaacttggatctatttattagtaagagtttcagctttcttcagctgccagtgtgttactcatctttatcctaaaaacctgnnnnnnnnnnnnnnnnnntgttcacatatgattctcttagacacttttata

SEQ ID NO: 10729 - DNA, 896 bp, Macaca Fascicularis
  misc_feature (1)...(896): n = A,T,C or G
aagtatgagcatgatgacatgnnnnnnacagnctgtnnnnngagnnnnggcacacaagctgtcannnnnnnnnnnnnnnnnnnnnnnnnngtttgggaccttgctcagcaggtggtactgaattcataccgagctcatgctgcacaggtcacttgtgttgctgcctctcctcacaaggactctgtgtttctttcatgcagcgaggannaacagaatttnnnnngngatacccgctgtcccaagccagcatcacagatgggctgcagtgcgcctggctaccttcctacctcactggcttggcatcctcagcaaagtgaagtctttgtctttggtgatgagaatgggacagtctcccttgtggataccaagagtacaagctgtgtcctgagctcagctgtacattcccagtgtgtcactgggctggtgttctccccacacagtgttcccttcctggnnnnnnnnnnnnnnnnnnnnncacttgctgtgctggactcaagcctttctgaggtgtttagaagccnnnnnnnnnnnnnnnnnntgagagatgcgacttggtccccgctcaatcactccctgcttaccacagtgggctgggaccatcaggtcgtccaccacatcgtgcccacagaacctctcccagcccctggacctgcgagtgttactgagtagattggatttaagacacaaagcaagtcccccatgagcgtccacttctttgccctaccctctcagcttgtgagacaacacaggagccttctgtagtatgttgatatgctagatctgtgccattaaaaggcatcgtccctcagcctgagggaggctgaattctgggttcctgtagtcacagggaggaaaagctttcttaaaaatggacatgtatgtgcgtgtgactgtgt

SEQ ID NO: 10730 - DNA, 754 bp, Macaca Fascicularis
  misc_feature (1)...(754): n = A,T,C or G
tgtttagtggggacacaggcacccagctttggggtggtgctgacgctcccagggtgccaggagccactgggacagggcgaggctcccagatgccccttgaggtgcctggctctccagggagcttctggcccaaggccgtctgaaggatctgttccttaaccccccagtgccttggcgannnnnnnnnnnnnnnnnnnnnnnnnnnnnnnnnnnnnnnnnnnnnncagtccctggtgccctcctggccctgctgcccagtgagggctcctactggtgggttcattggcctgggcccagcgagccctcgcctgcattgaccttaggcccatagagagggcctgtcccggcgctgaccccgccaggatctggtcactgccccaggggactgatggggcctgactgcgggggctgtgggagctgaggaagtgccgctcaggagccgggatcaccgctccaccgtctgccctccaaggacacccatgggcgcggtgggctggcggcttcctgctgctccctgtcagagtcaaagcacaaatccctgggatgggctcaagggccgaggcagctgagggaagctccaggtggggaccatgtcttcttggggttggtgccctctggctgggacccttcgccggcccaggatccccgggtgctgcagtggggtggcctcccctctgcctggtggagggagctgtgggcgtggggatgtgactgaataaagccaccgtgggtggatgtgcttggagtctggagt

SEQ ID NO: 10731 - DNA, 330 bp, Macaca Fascicularis
  misc_feature (1)...(330): n = A,T,C or G
cannnnnnnnnnnnnnnnnnnnnnnnnnnnnnnnnnnnnnnnnnnnnnnnnnnnnnnnnnnnnnnnnnnnnnnnnnnnnnnnnnnnnnnnnnnnnnnnnnnnnnnnnnnnnnnnnnnnnnnnnnnnnnnnnnnnnnnnnnnnnnnnnnnnnnnnnnnnnnnnnnnnnnnnnnnnnnnnnnnnnnnnnnnnnnnnnnnnnnnnnnnnnnnnnnnnnnnnnnnnnnnnnnngcctgaagtctttctaatgcccaaatgtttccattgtgtcacatatctgagctgtgctctttccattagccactttcccattatcatagctgatgacatgc

SEQ ID NO: 10732 - DNA, 692 bp, Macaca Fascicularis
  misc_feature (1)...(692): n = A,T,C or G
tcagggcctggnnnnnnnnnnnnnnnnagtcntgagtgtcaggccccagagacccctgtggccaggacaatgtggaccgactctgatctccctcaacccctagnnnnnnnncacaggagcctcatctccggggctaaggccccaccagagaccactgcccccaatagtcagactccccctttaagacctggctcagtgctgtcccctcagtgcccacccannnnnnnnnnnnnnnnnnnnnnnnnnnnnagccatcaggtcactgtgccctaaggggtttgaccaaggaaccatgggctgtcccttgaggtgcctgggcagggtgagggggttattccagcctcctaacccgannnnnnnnnnnnnnngctccaggggaaataggtgtggccaggctgcnnnnnnnnnnnnctgggagctggctgactgcaaaagctaggctggnnnnnnnnnnnnnnnnnnnnnnnnnnnntggggtggtgagggtctccnnnnnnnnnnnnnnnnnnnnnnnnnnnnnnnnngctccctcttactcagtaatgagaggtagggaagggaaccggggggagccatttagtcctccctgccctgcccactgcctggatggggcgatgtcaccccctcatccttcccccagctctggcccctgggtcccgccccccaaccccctggtnnngaacaatctttgc

SEQ ID NO: 10733 - DNA, 774 bp, Macaca Fascicularis
  misc_feature (1)...(774): n = A,T,C or G
tnnnanntttgactnnnnnnnnnnnnnnnnnnnnnnnnnnnntnnnntttgtngnnnacatttagaaacatcgctcagaagcccgtgttctcagcctcacacgccctgccgtgctggattcaggactgaagtgctctgannnnnnnnnnnnnnnnnnaggagcactcnnnnnnnnnnnnnnnnnnnnnnnnnnactagtcaccttgtctttcagcttccagtgtcttgagttttttatactttgacagcttttgtttaattgcatacatgagactgtgttgacttttttcagttatgtgaaacacttagctgcaggccgcctggcagaggcaggaaatgctccaagagtggctcagtgctccttggtgtcttctgcatggcatcctgnnnnnnnagcatgcgagttccctccatcattgccaccgtggtagagggatggctccccaccctcagcgttggggagtggcgctccagcctctttcttggttgtcatagtgatagggtagccttactgcctcctcttcttacaccctaaaaccttccacactagtgccatgggaaccaggtcggacaaagtagagagaagtgaaagtggagtctgggaagtagttgcctataacagactagacagaaaaggaacacttgtgtattttaagatacgaatgtgactcaagactcgaggccgatacgagnnnnnnnnnnnnnnnnnnnnnnnnnnttgctgtacatagatactacagacttgtactaacacacctgtaatttggtatttgt

SEQ ID NO: 10734 - DNA, 646 bp, Macaca Fascicularis
  misc_feature (1)...(646): n = A,T,C or G
tccagcagtcccacgtgcacgtccatgacttgcagagctttggccttgacaacatcaacatgannnnctacatccagcacctgtcatttggggaggactatccaggcattgtgaaccccctggaccacaccaatgtcactgcaccccaaggtaccagcccgggaggcagcccccagccacagaaggcctgccgggcacccgtacccagtgctttgttttcccctcagcctccatgatgttccagtactttgtgaaggtggtgcccactgtgtacatgaaggtggatggagaggtgctgaggacaaatcagttctctgtgaccagacatgagaaggtcgccaatgggctgttgggcgaccagggccttcccggagtcttcgtcctctatgagctctcgccgatgatggtgaagctgacagagaagcacaggtccttcacccacttcctgacaggcgtgtgcgccatcattgggggcatgttcacggtggctggactcatcgattcactcatctaccactcagcacgagccattcagaagaaaattgatctagggaagacaacgtagtcacccctcagcgcttcctctgtctcctgtctctccccggcttgtggttgtcccccnnncctccaccaccctccacctcct

SEQ ID NO: 10735 - DNA, 632 bp, Macaca Fascicularis
  misc_feature (1)...(632): n = A,T,C or G
caggcctgacccaggccccctgtgtgtggtgtggtcatctgcacccatatnnncagccccatccttgggcgcagtcgtggaggatctgaggcgctgggtgatggctgcatagccagggtcagggtggtcatctgcagactcgagggagatgaatgcccctgcctcagtctccccttctgtctgtgggcgtcacggtggcccctccctgactgagtggctgcccacgatatcaggggtgggatgggcaaagcgtgtggtgtgtgacaggacacagcccgaggtcatgcggcccaccgtgttgcagggttcagagcccagctacctggaccgcacggagcagctgcaggccgtcctgtgcagcaccatggagaagagcgtgcttggtggccaggaccagctgcgggtccgtgtcacagagctggaggacgaggtgcgcaacctgcgcaagatcaaccgggacctgttcgacttctccacgcgcttcatcacgcggccggccaagtgaggcccagagacccgggcccaaggcgcccaggcctgagccccacgcctcccagcaaccggagcccacgggtgtggcccccaccagcccaggcctggactctccccnnnttctgcgtcgtgtttgggct

SEQ ID NO: 10736 - DNA, 775 bp, Macaca Fascicularis
  misc_feature (1)...(775): n = A,T,C or G
gggtcatcaaggcaaatatggaaggatgccaccaatgtgggtgatgaaggtggcttcgcacccaacatcctggagaacaatgaggccctggagctgctgaagacagccatccaggcagctggttacccagacaaggtggtgatcggcatggacgtggcagcatctgagttctatcgcaatgggaagtacgatcttgacttcaagtcgccnnnnnnnnnnnnnnnnnnnnnnnnnnnnnnnnnnnnnnnngagctctataagagctttatcaagaactatcctgtggtctccatcgaggacccctttgaccaggatgactgggccacttggacctccttcctctcgggggtgaacatcctgattgtgggggatgacgtcacagtcaccaaccccaagaggatcgcccaggccgttgagaagaaggcctgcaactgtctactgctaaaggtcaaccagatcggctcggtgaccgaatcgatccaggcgtgcaaactggctcagtctaatggctggggggtgatggtgagccaccgctctggggagactgaggacacgttcattgctgaccttgtggtggggctctgcacaggacagatcaagactggcgccccctgccgctcagagcgtctggccaaatacaaccaactcatgaggatcgaggaggctcttggggacaaggcagtctttgctggacgcaagttccgtaacccgaaggccaagtgagaagctggaggctccaggactccactggacagacccaggtcttccagacctg

SEQ ID NO: 10737 - DNA, 723 bp, Macaca Fascicularis
  misc_feature (1)...(723): n = A,T,C or G
acaggtgataccttgtttgtggctggctgcgggaagttctatgnnnnnnnnnnnnnnnnnntgtgtaaagcnctgctggaggtcttgggccggctgcccccagacacaagagtctattgtggccatgagtacaccatcaacaannncaagtttgcgcgccacgtggagcccggcaatgccgccatccaggagaagctggcctgggccaaggtgagtggggcggtcactgtgcagtgctttcctgtgggctgctcagggctactgtgcacggcggggtcgccagagtgggtagacagccacccctccgagcccagagagcaggcctgggactcaggccagtgtggcccagctcgccctgcatggccaacccagggttccgttgagatccctctgcctcagacgctgcatgtctaacacgtgcctggcctgttcccatattctgagcagtggggtcaggctggcaccacgtggctctgctggctctccaggctacagaacgtggctctgtgtccgaaggactcttatctccgtgatggccccgcgtgagcctccacggcgtagcccaggctgctgggccaggactgcaggagccggcggggctctccaggggtgtttccccgattcactggaaatgctgtcggaagcacacacaccgggcgtctcaggcgtggcttccctctgctgagtggagagtcgctgccttcannnnggtttattgtttaa

SEQ ID NO: 10738 - DNA, 772 bp, Macaca Fascicularis
  misc_feature (1)...(772): n = A,T,C or G
caggcgccgggctgctcctcactgnnnccgagacannnnnnnnnnnnnnnnnnnnnnnnnnnccgggctcttcaggtccagaccnnnnnnnnnnnnnnnnnnnnnnnnnngaggagaggtgcactttacaggtccccgatgaaccaagggaaccctccaccatatccgggccctggtccaacggccccatacccaccttatccaccacaaccaatgggtccaggacctatggggggaccctacccaccctcctcaagggtacccctaccaaggatacccacagtacggctggcagggtggacctcaggagcctcctaaaaccacagtgtatgtggtagaagaccaaagaagagatgagctgggaccatccacctgcctcacagcctgctggactgctctctgttgctgctgtctctgggacatgctcacctgaccagcccagccgtcctgtcatgnnnnnnnnnnnnnnnnnnnnnnnnnnnnnnnnnnnnnnnnnnnnnnnnnnnnnnnnnnnnnnnnnnnnnnnnnnnnnnnnnnnnnnnnnnnnnnnnnnnnntgggattctagattagtgggggttgctactgtttaattcagtgacttgatctttttaatgtccaaaatccatttcttattgatctttaaagatgtgctaaatgatttttttggccaaaggcttagttgtgaaaaatatttataatttttaaattatacattcaaggtnnnnnnnnnnnnnnnnnnnnnaggaatgatttctnnnnntaacagcctg

SEQ ID NO: 10739 - DNA, 732 bp, Macaca Fascicularis
  misc_feature (1)...(732): n = A,T,C or G
catgagtgttgaggtggatgcagaccccgggccgcccctgcctccagcgcaggggccggcgatgctcggctgctggcgcccccggggcggaaccccttcgtgcacgagctgcgcctcagcgccctgcagaaggcccaggtggccctcatgacactgacgctcttcccggtccgcctcctggttgccgctgccatgatgctgctggcctggcccctcgcacttgttgcatccctgggctctgcggagaaggaacccgagcagcccctggccctgtggaggaaggtcgtggacttcctgctgaaggccatcatgcgcaccatgtggttcgccggcggcttccaccgggtggccgtgaaggggcggcaggcgctgcccaccgaggcggccatcctcacgctcgcgcctcactcatcctacttcgacgccatccctgtgaccatgacgatgtcctccatcgtgatgaaggcagagagcagagatatcccgatctggggaactctgatccggtatatacggcctgtgttcgtgtcccggtcagaccaagattctcgcaggaaaacagtagaagaannnnnnnnnnnnnnnnnnnnaaacggaaagtggccgcagataatgatttttccagaaggaacttgtacgaacaggacctgcctaattaccttcaaacctggtgcgttcatcccgggagcacccgtccagcctgtggttttacgatatccaaataaactggac

SEQ ID NO: 10740 - DNA, 749 bp, Macaca Fascicularis
  misc_feature (1)...(749): n = A,T,C or G
cagagaaggtccaagggtgatgaagaaggaagcatggcctggagcttggaagggaggggcggtgggtggtggcatcttgactgccccctgttgtcccacacgggggtggtcacacctcttcactccagcccgcctggcttcagccttccatgagctccacctgcttccaacttcaccttggagggggtgggatctgttggcatcaacacgggaccccctgcttcaccaaagcccgagccctcagcccttggggagaacgaatggctgagctttgattcccggggtccttgagaggctgcaggctggtggcagtcccaggggagagacaccacgggtgcagaaggagacccagacatcccgaggaagttcccagnnnnnnnnnnnnnnnccagcctgaagcctgcttaaactgtgtgatgtgcaataaccgagcttagagttaggaattgtgttcaagtgcttggatttccgtctgtagatttaagtgctgaaattgtatctctcagtaattttagatgtctttaaaaaatcgaaaaaccaagtgttagactgtgtgtgtgcgttgatgggcactcaagcgtcccgtgagtcatccagccatccctttcccctgcacccgatcctctcacgtcccgccccgcctccacttggggacgctgcctcgtgtcgtctttatctgcctattactcagcctaaggaaacaagtacactccacacatgcataaaggaaatcaaatgtgttattttta

SEQ ID NO: 10741 - DNA, 762 bp, Macaca Fascicularis
  misc_feature (1)...(762): n = A,T,C or G
tgagagatgtgtnnnnncaatttaatgagccctcaattcattgtttttnnnatgaatgagtagaattaaatnnctnnnnnnnnnnnnnnnnnnnnnnnnnnnngctgttactaggcaatgttgcttataataaaaatgacccctgtaggttacctgcgtttggaagagagggccatgaaagaactctataaacacccagtagaaggccatggctatgaacttcctaaagtacagtgtgctcctaatcccaaggctccccctgcctgggatctaaaagcaaatatatcatatcggttttatgtgtgtttgtatgatatctatatacacacatgtacacatatatatatagatannnnnnnnnnnnnnnnnnnnnnnnnnnnnnnnnnnnnnnnnnnnnnnnncaggtggttcccatacccgcttgtgttcccagccctcacacctcagttgtcactcaggctagcgactagcccttggacctctgtgaaaattccactgacagacaaacctaaggctgccctgctatactttctgccctgtttccttctgcaaaagtgatgccagcatggcctannnnnnnnnnnnnnnnnnnnnnnnnnnnnnnnnnnnnnnnnnnnnnnnnnnnnnnnnnnnggagaaggtgtggagccacacgtcctaactcccagaccannnnnnnnnnnnnnnnnnnatgctgcctcttcccttctgactggcctttgagtcgaaatgacttgttaccttcacttttctatgaagtaa

SEQ ID NO: 10742 - DNA, 683 bp, Macaca Fascicularis
  misc_feature (1)...(683): n = A,T,C or G
cagtgnnnnnngctgtctccaaggccagcagccgccgcagcagcttcagcatggaggaggagtcctgatcagtcctcacccctcccctgggacttccccacccaggaaaggaggaccagtcaggatgaggccccgccttttcccccaccctcccatgagactgccctgcccaggtatttcagaaggagaaggccggagaagnnnnnnnnnnnnnnnnnnnccccctggggatcacagcctcacccctgcccccgtgggactcatccttgtccaggaatgttagtcagaacatgctgcttcttacttccatttggtctttgaagaagctgaggaatagaatnnnnnnnnnnnnnnnnnnnnnnnnnnnnnnnnnnnnnnnnnnnnnnnnnnnnnnnnnncannnnnnnnnnnnnnnnnnnnnnnnnnnnnnnnnnnnnnnnnnnnnnnnnnnnnnnnnnnnnnnnnnnnnnnnnnnnnnnnnnnnnnnnnnnnnnnnnnnnnnnnnnnnnnnnnnnnnnnnnnnnnnnnnnnnnnnnnnnnnnnnnnnnnnnnnnnnnnnnnnnnnnnnnnnnnnnnnnnnnnnnnnnnnnnnnnnnnnnnnnnnnnnnnnnnnnnnnnnnnnnnnnnnnnnnnnnnnnnnnnnnnnnnnnnnnnnnnnnnnctggccgacaacctgattctaa

SEQ ID NO: 10743 - DNA, 2114 bp, Macaca Fascicularis
  misc_feature (1)...(2114): n = A,T,C or G
agtccgggcagtgacgagctggggacnngatgcgaacactggaacagccagaaggacctcctggaggagaagcgggcagtggtggacacggtgtgcagacacaactacgagctgaacgaggccgtgaccctgcagcgccgagtccagccgagggtgaacatcgccccctccnnnnnnnnnnnnnnncagcaccacaacctgctcgtctgccatgtgacagatttctacccaggcagcattcaagtccgatggttcctgaatggacaggaggaaacaactggggtcgtgtccaccaacctgatccgtaatggagactgnnnnnnnnnnnnnnnnnnnnnnnnnnnnnnnnnnnnncccagcagggagacgtctacacctgccaagtggagcaccccagcctggacagtcctgtcacggtggagtggaaggcacagtctgattctgcccggagtaagacgctgacgggagccgggnnnnnnnnnnnnnnnnnnnnntcatcatctgcggagtgggcatcttcatgcacaggaggagcaagaaagttcaacgaggatctgtatgaacagggttcctgacctcactgaaaagactaatatgccttagaacaagcatttgctgtttcgttagcacctggttccaggacagacctccagcttcccaagaggatactgctgccaagaagttgctctgaagttagtttctatcattttgctctttgatccaaagtactgtttctctcattgggcctccaaccatgttcccttcttcttagcatcacagataatcaaaatccaacatgagtgtttgctttcctttaaaaatctgcaccaaatcatctcttgtcacttttctctgagggttttagtaannnnnnnnnngttaataaagaagttcatttcggtttacatgtaggaaagaannnnnnnnnnnnnnnnnnnnnnnnnnnnnnnnnnnttaactattgtataatgaggactgttagnnnnnnnnnnnnnnnnnnnntctgaattgactgtatttcagtgaactgcccccaaatcgagtttagtgccttcatccatttaggtctcagaccactattnnnnnnnnnnnnnnnnnnnnnnnnnnnnnnnnnnnnnnnnnnnnnnnnnnnnnnnnnnnnnnnnacacagctctgatccaacatataacttactaagaggatgttttatcattactattaagaagttaaattaatatcagaatttaaaattataaattttataagtctaatacactttaaccattttcnnnnnnnnnnnnnnnnnaaatactacttaaccaaatatgacttggcctttcgaatgcattcagtagacgtcatttgtcgtctaagtttgcattcatccaccagcctagacctcctgtcttcattttcatacagacagaaatgcctccgcactagggaaagagcaaagaaatacgtgtagcacttttcttcaaacactggcctctttgtttttttttttttttaacaatccaacattgttatgtgttttgcgtctcatattgacacctttcagtcaaggtagaggacatgtttgttgtaaactttcttttttgtgtagaggatgaattcttcactcctgatacacataagcagtgcacagcagctctctgatacgtccaattgatgccctcaatctccctggcttcttacaagcatcttctgggccttgtgtgtccctgggcgcctgtccctagtcaattcgcaaaaactactgtgctcctcttgcccacctccccttgcaaataatatccaccatatggggaccggctgcctccaattccaagagaggtggggctgaaggtacagacttgggcttcactggcacagatacaagtaaatatagctggagtctacagagaggatggactaagtgagggagtcaggaaagagaagccacccataaggataacaaattatgtctcataatcctcttaacctagggaataggacaaaatcattttttctttttaaaacatccttatccctgctcagcctcgtttcctcaaaaactataaaggaaaatgctactgacttgtttctgtgtagtaatttcagctgtcacataatgaggtaatgaggccagtat

SEQ ID NO: 10744 - DNA, 715 bp, Macaca Fascicularis
  misc_feature (1)...(715): n = A,T,C or G
gnnnnnnnnnnnnnnnnnnnnnnnnnnnnnnnnnnnnnnnnnnnnnnnnnnnnnnnnnnnnnnnnnnnnnnnnnnnnnnnnnnnnnnnnnnnnnnnnnnnnnnnnnnnnnnnnnnnnnnnnnnnnnnnnnnnnnnnnnnnnnnnnnnnnnnnnnnnnnnnnnnnnnnnnnnnnnnnnnnnnnnnnnnnnnnnnnnnnnnnnnnnnnnnnnnnnnnnnnnnnnnnnnnnnnnnnnnnnnnnnnnnnnnnnnnnnnnnncaacaacaacaacaaaaaagatgcatttagtatagctgggaaaaataacattatttcctatgcaaatgatgtgtatccatgtacccatggtaaatgtaaatatactgtgtctcttttgggagcaacttctagtagaggagtctttcatnnnnnnnnnnnnnnnnnnnnnnnnnnnnnnnnnnnnnnnnnaaatcttaaaggagctttaattgacatttattataccaattaagcttggaatggggcaatggatgcatttcccaaaatgtctgaaagcactaacagcttacattgctgagtgagaatctcctgggtgtaatttagccacttagggatctgcgtgaacactcccaggccgttatgatgctgttatggcttcagtgtataaatgcatgagtgttgtttctgttctgtttgatgctctcttgtatatttatttacactttacagaatattcc

SEQ ID NO: 10745 - DNA, 715 bp, Macaca Fascicularis
  misc_feature (1)...(715): n = A,T,C or G
gaaacccgacagcggggcatgccgannnnaggaccgggcgccggagggacggagggacgcgcaggccgagcgcacggcagccgccaacggccccaagaggcggtccccagagaagcggagggagggcacccgcagcgccgacaacactttggagaggagggagaagcaagagaagagacgagacgtctctccggagcggaggcgagagcggtcacccacccgcaggagagacggctcccccagccggcggagacggtctagggagagactccaggagcaaaggaggtcccccgagcgcaggagagggggctcgcccgagcgcagggccaagtccaccgaccggaggcgcgcgcactccaccgagcgcaggagagagcggtccctggacaaaaggaacagagaggacagagccagccaccgagaaagggaagaggggaatctgaaacaggnnnnnnnnnnnnnnnnnnnnnnncccacggagcagagaaggcgagcttacaaagaatgtagcaccgacctcagtatctgagacgctgagtcacattccaacctttaccgtgtcaaaggttctaagaggaaagtcacaaacgtgaaattatttagtttcttacctaatgaagcatctgacacctgatgatcctatgaataacaacaaacatattaaacatttgaaatcttataagaaaaatatatatgaaaagtattgtgcctgatg

SEQ ID NO: 10746 - DNA, 705 bp, Macaca Fascicularis
  misc_feature (1)...(705): n = A,T,C or G
aacatgcccagaagtgccagcaggagcagcgagaagcagagggatcctgtcgacccccacgggctgagggctccagtcagagctggcgacagcaggaggaggnnnnnnggctcttcaaagagcgagcccgggtcaaggaggaagaactgcgtgagagnngagccaggagggcgcaggaggctnnaggggaccgagaacccaagccagccagggctgggcccagggcagagcaccccagaggagcggggaggggcagcctctggcgatttggtgatgtgccctggccctgccctgggggaggggacccagaggccatggctgcagccctggtggccaggggcccccctttggaggaacagggggctctgaggaggtacttgagggtccnnnnnnnnnnnnnnnnnnnnnnnnncttcctgcagcgattccgaagccagattgagacctgggagctgggccgtgtgatgggagcggtgacagccctttctcaggccctgaatcgccatgcagaggccctcaagtgaccctagggaagaagcaagaaacttcggggctgcagcctcaggatgaggcagaaggaagggtaagggaaaggatggggaccacaaggaagagccaggtgctgctcagcagaggatatgggtgggagtgaaacttgtaacaagtgggggtggggagtgcgggccgccaccactgctctttgac

SEQ ID NO: 10747 - DNA, 749 bp, Macaca Fascicularis
  misc_feature (1)...(749): n = A,T,C or G
gcatcaggtctctctnncngnnnntaaannnngtccaagaggaactaaaaccagaggcattattactgcattgtttgtcacnnnnnnnnnnnnnnnngaannnnnnnnnannnnnnnnnnnnnnnnnnnattaaaggagagaacttggtaacgtgaagtatttctcattgaaatgctttcccttttgtatatagccagtgttaaatccttaaatgcaatacagcctctgattattgagcttcctcttaaaaagatttttaaattttatgtagccaacattgcagtactgtatgctcaaacacaaatcttaaagtctcggaaatgtttagcttatgaaaataatcgactctgaatatttgttacaagtctgttttatgttttgattactagtgagcagaaaataannnnnnnnnnnnnnnnnnttattgaaatggcaatnnnnnnnnntcatttttatgtgattttagaaatgttaaggcaatactactaattattgtaggttttttttttttttttaacatatcacccaaagcatgtnnnnnnnnnnnnnnnncaagtgtcttttctcaaatcccataattaactgaaatactactattaaattttcatgagaattctaaaatgaatcctgggaaacgcacatttggtgatgttgcactttctgtattttacaggaattagtcagtacacgttgaaatgtttaacattttaagattggaagcttaannnctggnannnaaagatcacat

SEQ ID NO: 10748 - DNA, 711 bp, Macaca Fascicularis
  misc_feature (1)...(711): n = A,T,C or G
cagagatcgcnannnnntcggacannnncaaggacgggggtggcgggagcgagggctctccatgcccaccgtgtcccgggcccatagctgggcaagccctaggaggcagccgtgcgtcgccgaccccggcgccatcgcgcnnnnnnnnnnnnnnnnnnccttttccaggcgggacggtgctgtcccggcctctctactacaccgcgcccttctatcccggctacacgaactatggctccttcggacaccttcatggccacccagggcccgggccagggcccacaaccggtccggggtctcatttcaatggattaaaccagaccgtgttgaaccgagcggacgctttggctaaagacccgaaaatgttgcggagccagtctcagctagacctgtgcaaagactctccctatgaattgaagaaaggtatgtccgacatttaacgcgggctgcgtcggtcccggacttttctaatttattaaaaacatggccttggcagttatttttccatcactgagaaagagagagaaaaaaaataaactacccctcctattcaaaagtttatagtttatggagatggatggcataaaaatgtaaacatctccacacacacacacaaaagtcttaaccaaccgaaaagaaaaattaaaaaaggatttgtattaaatcttattctgtatatttaatgtagcatttttgtatttaaattgataa

SEQ ID NO: 10749 - DNA, 754 bp, Macaca Fascicularis
  misc_feature (1)...(754): n = A,T,C or G
gacatcgagatcgccnnnnaccgnnnnnnnnnnnnnnnngaggagtgcagaatnnnnnnnnnntgccagagtgccgtgagcatctctgtggttggaggtagcaccagcactggaggcatcagtggaggattaggaagtggctctgggtttggcctgagtagtggctttggctccggctctggaagtggctttgggtttggtggcagtgtctctggcagttccagtagcaagatcatctctaccaccaccctgaacaagagacgatagaggaaatgaggtccctgcagctcactgtgtccggctgggcccagcactggtgtctctgtgcttccttcactttacctccatcctccctctctggggcttgtcttactagtgtcccctccactatcccatgggctctctctgccccaggatgatttcctgggctgggacagggactctgcctcttggagtttggtagcttcttctcgatttgagcctggtgacccacctggagtgggagggatgtcagctgacaactcacctcctatggacagagacgaaaatgaccaagagtgtcatctccagaattattggggtcacatatgtcccttcccagcccaatgccatctcccaccagatcctgtattatccnnnnnnnnnnggaccaaactacttttccatcacnnnnnnnnnnnnnnnnnnnnnngcttaggacaagaactacttagtgtcccattctactcctgtcattccctcttatccatctgca

SEQ ID NO: 10750 - DNA, 756 bp, Macaca Fascicularis
  misc_feature (1)...(756): n = A,T,C or G
cagatccatgaggactgcaagcacatggggctcctcgttggcagaggcggcatttttctcagacatttcgcattgcaccctcaatgtgcatcactaaaccagaagttgattttgcaacagaagtatttcattctgccttaacccaacacatggaaagaagagctaagtaacattctcagaaataaaactacaagtctnnnnnnnnnnnnnnnnnnnnnnnnnnnnnnnnnnnnnnnnnnnnagaaccnnnnnnnnncagagaacacctgcagctctccataggagctgtagaagacatggttgactgcctaccaaccatatttgttagcagagcccctattatcttgagaactccattcttcagcgannnnnnnnnnnnnnnnnagagaataaatcctaattagtttttgttaggtatgctaatttgattcccctttgcagtgattggtttatgcatgaatatgtgatgtatttttgtccaacaaatcttgaagaaaaatattttggtggaggtgccttcagggaaagtttgcttcatccctcactcttcagctcaagaagagatgtcttgttcttgcactgagaacatcgtatgtccataatgagattcctggcaccatatcagctgtcttgaagtcatgaggacagccctttttggcgaggctggaagatcgatggaagcaaagtgtttagtgatgtcaatgagctactcacttaagcattcccggagccaccctacctcagggcttcttgata

SEQ ID NO: 10751 - DNA, 712 bp, Macaca Fascicularis
  misc_feature (1)...(712): n = A,T,C or G
gaggacctnnnnnnnnnnnnnnnnnngaggtattacatgcgagnnncacaggcagcaaaggacnngctgtaccggcggctgcgggcnnnnnnnnnnnnaagaaatgcnnnnnnnnnnnnnnnnnnnnngcgcaccaggaaccgggaggtccgccccgccgagnnnnnnnnnnnnnnnnnnnnnnnnnnnnnnnngcgcctctccgactccgccaagcaagagctcatggacttcaagtcccgccgggtctcctcttttcgaaagaatctcatnnnnnnnnnnnnnnnnnnnnnnnnnnnngccaaggccagcaccctgattctccggaacacccttgtcgccctaaagggggagccttagagcagccagagctcagccagaccctgctcnnnnnnnnnnnnnnnccagggtatcccagacccctctctctggcaagatgtctccttctctagcacagtgccactagccacaccctcactctgccccacatcctcccagggaaagcccaaaccccctaccactacnnnnnnnnnnnnnnnnnnnncctgcaagacacagggcagcataggcatcatgattggacacaggtcagcagagccccagggaccccgacacccctccccaggaagctgaggaacagcctcctctctcacccagggccttgaaggaatcatagctctcttgatcccagcctgnctcctcacaaataaaa

SEQ ID NO: 10752 - DNA, 628 bp, Macaca Fascicularis
tgaactgtaatttgggagtttgttcccttttagtgccacgcgttgaatagttccacatacttagaagagctcagcggggctttgccaggtctcctgagcatcatgagtaatgtgtttggtcagactttgctgacaccaaagtattttaaacaaataaaaggttttggggaattttgtttggctacctggacgggccagtttgcaccgtgtgtccctgcagctcactgtgcgcggcgcatgagtgactggcatgtttagcccatcacatttcattcggtgaaggaaaggcaagagttgaaacattttccataaaaaaaatgatttttgtgaagaacatagtgagtttgtttgtcatcagtcaacagcgggtgaaactgaccactgagaaatgggcgtgggcactgacaattttcagcaccattatttggccaggaattgagcttggcttggcgaaggtccttttaccctgttttgttcatttaaatgcagacatatttaaatcatattcaactagttactaacgacctcaaggtgtattccctggcaaaaaggactttctcaaaataggactgcacgcttggtgtactttaaatgttaatgtttaatttaaaaattttattaagaggat

SEQ ID NO: 10753 - DNA, 726 bp, Macaca Fascicularis
  misc_feature (1)...(726): n = A,T,C or G
gggagtaccaggaaaagtttcaggagtctctaaagaagctgaagaatgaggagcaggaagctgagaagctaacagcttttatcagagagannnnnnnnnnnnnnnnnnnncagatggagcccgagagannnnnnnnnnnnnnnnnnnnnnnnnnnnnnnnnnnnnnnnnnnnnnnnnnnnnnnnnnnnnnnnnnnnnnnnnnnnnnnaggaagagaagaaggggctacgaattatagaagaggctgagaatgatctggtccaccagagccagtcannnnnnnnnnnnnnnttggatctggagcgtcgatgtcaggggtcaacaatgnnnnnnnnnnnnnnnnnnnnnnnnnnnnnnnnnnnnnnnnnnnnntggaccctgaggaagccagaagctctccctacaaagctgagaagtatgtttcgagccccagatctgaaaaggatgctgcgagtgtttagagagctgacagatgtccaaagctactggggagatcacgnnnnnnnnnnnnnnnnnnnnnnnnnnnnnnnnnntcaacnnnnnnnnnnnnnnnnnnnnnnnnnnnnngatataaaaggagacagagccagctgactggggaccatggggctggtggaagttcaggaaagagaaagatctgctggagtacttatccccttcccacttattttcccatacagtaagttctaggcaaaaaattagcccagcnnnnnnnntactgtaaact

SEQ ID NO: 10754 - DNA, 620 bp, Macaca Fascicularis
taaatagtgactgaaccaatttatgcagtaaatagactaaagttcacagggcacggatgagtttatccaacttcgttattttatcttgtcatttacaacatccatataagcaactagccatatacgcaaaattcatataactactgacttaaatgtacatctatctgttcttgtctccatatattcatgtaagatgcacaacaaaagaaacatcaaaagtttataaaaataaatctgactatatgcatcctcatttatgccctttagaacctagattaaaaatgttgagaagacatgggtagtggcgcatacattttgttatccttgaaataaatagcctaagtcatattattgaagaactaatgaacaggtaacatgttgtagaaaattagcctttcattgttttcttctgtgaagaatctgttgctatgtactatatattcagcatttatatttggtttgtttcatagctaatgaggtatttagatatgaacaattgaatacatattgaaatagtgtgctggcatttgtagttttgataaagaccattgcaggcaatggaattgtgccagagaaatctgatttctagtacaaaaggaatacttagccagggcctcaag

SEQ ID NO: 10755 - DNA, 751 bp, Macaca Fascicularis
  misc_feature (1)...(751): n = A,T,C or G
gcagccagannncagcgcatgagggaagaatttgataaaattggaatgaggaggactgtagaaggggtnnnnnnnnnnnnnnnnnnnnnnnnnnnnnnnnnnnnnnnnnnnnnnnnnnnnnnnnnnnnnnnnnnnnnnnnnnnnnnnnnnnnnnnnnnnnnnnnnnnnnnngttgaaggactaaaacgcttaatgacagagatactgggtcgtcaggatggagttttgcaagactgggtcattgacgactgcattggtaactggtggagaccaaattttgaacctcctcagtatccatatattcctgcacatattacaaagcctaaggaannnnnnnnnnnnnnnnnnnnnnnnnnnnnnnnnnnnnccttgtttgcagtccctaaaaattacaannnnnnnnnnnnnnnnttgtttgaattgtatgacaatgcaccnnnnnnnnnnnncatcatttctagtctccctcagctgttgagcagnnttcaattttatatacaactgaattcctgcgcagtggagaagtaaaagaagccgcttgtctctgtgagcacagctatatannnnnnnnnnnnnnnnnnnnnnnnnnnnnnttttggttttatctcttttgcgatccctaaattgccacctactttcttttgtttgaatagtaaaattaatatgaagaactagatagtggtgtaaacaaaagtgataatgtttatttacttttggttctactcatactttttgtacaacataaagaagg

SEQ ID NO: 10756 - DNA, 751 bp, Macaca Fascicularis
  misc_feature (1)...(751): n = A,T,C or G
gcattcaagacagacacagaggctgagctggacctcatcagccgcctttccagagaacatnnnnnnnnnnnnnnnnnnnnnnnnnnnnnngggcagaagggggcaagggtgccttagccctggctcaggccgtccagagagcagcacaagcacccagcagcttccagctcctttatgacctcaagctcccagtcgaggataaaatcaggatcattgcacagaagatctatggagcagatgacattgaattactccccgaagctcaacacaaagctgaagtctacacaaagcagggctttgggaatctccccatctgcatggctaaaacacacttgtctttgtctcacaacccagagcaaaaaggtgtccctacaggcttcgttctgcccattcgcgacatccgcgccagcgtcggggctggttttctgtaccccttagtaggaacgatgagcacaatgcctggactccccacccggccctgtttttatgatattgatttggaccctgaaacagaacaggtgaatggattattctaaacagatcctcatccatattcaagaagatactttgaaagtctggccagtgtctattcaggcccactgggagttaggaagtataaggaagccaagagaagtcagcccctgcccagaaactaatagtaggagtttccccggaagtcattttcagccttaattctcatcatgtataaattaacttaaatcatgcacatgtctatttactttagtgacgt

SEQ ID NO: 10757 - DNA, 741 bp, Macaca Fascicularis
  misc_feature (1)...(741): n = A,T,C or G
ctgctgatcaaggacttggactaannnnngatgaacttcccaatcagatgagcatggatgattggccagaaatgaagaagaagtttgcagctgtatttgcaaagaagacaaagacagagtggtgtcaaatctttgatggcacagatgcctgtgtgactccagttctgactttagaggaggtnnnnnnnnnnnnnnncatcaaggaacggggctcgtttatcaccaatgaggagcagagcatgagcccccgccctgcacctctgctgtcaaacaccccagccatcccttctttcaaaagggatccttttgtaggagaacacactgaggagatacttgacgaatttggattcagccgcgaagagattgatcagcttaagtcagataaaatcattgaaagtaataaggtaaaagctagcctctaacttccaggcccacagctcaagtgaatttgaatactgcatttaaagtgtagagtaacacataacattgtatgcatagaaacatggaggaaacagtattgcagtgtcctaccactctaatcaagaaaagaattacagactctgattctacagtgatgattgannnnnnnnnnnnnnnnnnnttagggcttttgatttataaatactttgggtatttatactaaactgtggtagttattctgccttccagtttgcttgatataatnnnnnnnnnnnnnnnnnnttgacttatattttgaatgagttaatatatcgtaattta

SEQ ID NO: 10758 - DNA, 653 bp, Macaca Fascicularis
  misc_feature (1)...(653): n = A,T,C or G
tcatcatggctgtgttnttcgttttctggacaccctacaatgtggctatccttatctctacctatcaatccgtcttatttggacttgactgtgaacggagcaagcatctggacctgttcgtgctggcgacggaggtgatcgcctactcccactgctgcgtgaacccagtgatctacgcctttgttggagagaggttccggaagtacctgcgccacttcttccacaggcacgtgctcatgcacctgggcaaatacatcccgttccttcctagtgagaagctggaaagaaccagctctgtctctccgtccacagcagagccggaactctctattgtgttttaggtcagatgcagaaaattgcctaacgaggaaggaccaagcagatgaagcaaacacattaagccttccacactcacctcttgaacagtccttcaaacttccagtgcagcaccgaagctcttgaagacactgaaatatacacacagcagtagcagtagatgcatgtaccctaaggtattatcacaggccgggggttgggcggtgtactcatcatcaaccctaaaaagcagagctttgcttctctgaagcgttacctacattttaatgcacctgactgttaaatagctacaaaaacgtaaaagtttttatatttta

SEQ ID NO: 10759 - DNA, 699 bp, Macaca Fascicularis
  misc_feature (1)...(699): n = A,T,C or G
acgctnnnncagctctcccacctaccgtgccctgctgctgcaggggccgtcacagtcnnnnnccgaggnnnaggccgcccccagcagcacagaccccaccgcctcctatggccgactctgggttgccttcaggtgttggctgtcgggnnnnnnnnntgcgggcccagcctggccggctggggtccccagccgtggagacggtcctagacccagtggggagtgctgtgcctcctggctctgcccacccgtggccaagcaggaactccaggtgcagggagggccagaanaaanntcatcggcccgcagatggctggcccagggctcttggtgggggctcttgcatggtgagagtaggggcccccccaggagccatgctggacccaggagcctcgttggggcctcttccccaggcagctgacgggccccggacaagccttggtggggagcannnnnnnnnnnnnnngtagttctatgacataaggagacctcctacttgagctgtctgtaccccagaatcaaacccagaacctcagaaccagatgtaggacctcagaatcctgcactcaaggtggcaggacccaatttctgttttatatgttcatgaactttaaacctggaaacatatccttactaggtgttttatcaaaaaaaaagttttcatatttatctctatccctaaccccccaaaaataggatgtc

SEQ ID NO: 10760 - DNA, 711 bp, Macaca Fascicularis
  misc_feature (1)...(711): n = A,T,C or G
aagnnnnnnnnnaatcaccccagggaacccgaaaaagaaagttggttcctctcttggtggccttacttgatgttttacaaaacttgggactacaatactaacctttttttctgaatctgctgttctacccatgtgtctcacattcatttgtattatttcaagaaatgtactaatttccagtttactcaggccttacaaatccataccaaattagcctaaagacaaggcattttatattcatttctattttcagcatgtttctaccaaagctattagaatcaacacgtacctctgaatgcctgattataagaagacatgagaagacttaaaagttttggaaatttacagagccatgatttttgannnnnnnnnnnnnaaaaccatctgaatnnnnnnnnnnnnnnnnntttgccaaagatgcactctacaaatgcttagtagtggcctgatttttttccatattatattgccatgacaaactaaaaatgaactgtgtttaagaatatagtatttctgtttttcatccaagttgattgggnnnnnnnnnnnnnnnnnnnnnnnttttacagtattgtgtattcagcaaagtggacgttcctgctcttccctttccccattgcatgcctcttcctcccttgatttcactttctctcatgcccagatccttttttctccnnnnngttataacnnnngttataaaagaaagatctg

SEQ ID NO: 10761 - DNA, 716 bp, Macaca Fascicularis
  misc_feature (1)...(716): n = A,T,C or G
aaggaagcatgttataccaatgcnnnnnngcagatgctaattctcttgctcctcctgttcttactcttcatttaaagagatttcagcaggctggctttaacctacgcaaagttaacaaacacataaagtttccggaaatcttagatttggctcctttttgcacccttaaatgtaagaatgttgcagaagaaaatacaagggtactctattccttatatggagttgttgaacacagtggtactatgaggtcggggcattacactgcctatgccaaggcaagaactgcaaatagtcatctctctaatcttgttcttcacggtgatattccacaagattttgaaatggaatcaaaagggcagtggtttcacatcagcgacacacatgtgcaagctgtgcctacaactaaagtactaaactcacaagcatacctcctattttatgagagaatactgtaatagtatcaaaagtactttttctggaaacacgtttatgacttttataatggctgaaataacaataaaaaagtaaagactaattaaaatcatgttcacttaacattaaatacatgccagaagaaatcatgtttatttaaatattgaagggaaaaatacctaaaaatttacaaaggttttgtattgtcatggtggttttaattcctgcttcgtttctggaaagcaaatcctgaattacttaagtcctctgtgtttaatgtctgg

SEQ ID NO: 10762 - DNA, 748 bp, Macaca Fascicularis
  misc_feature (1)...(748): n = A,T,C or G
agactnnnnnnnnnnnnnnnnnnnnnnnnnnnnnnnnnnnnnnnnnnacaaataaagaacaataacatagatgtcgcaatagaaaacattgaaaatatgcttacttcagagaatccagtcattgaactccaatacttcggcttggcatacttattcagaaaagtaatagaggagcagttggaaccagcagttgaaaagataagcatcatggcagagagannnnnnnnnnnnnnnnnnnnnnnnnnnnnnnnnnnnnnnnnnnnnnnnnnnnnngtggacgcaggcaaggtggacgatgccagagctctcctacagagatgtggtgcaattgctgaacaaacctcgattttgttggtgttcttccttaggaatggtgggaaacaaggaaaggcatcaactctgaaatctctgttagaattgatnnnnnnnnnnnnnnnaaaggaagaagcatatagttccctcatgaaaagctatgtctcagagaaagatgtcacatttgnnnnnnnnnnnnnnnnnnnnnnnnnnnnnnnnnnnnnnnaattggatgatctgtttctcaagcgttacgcatttttgctgaagaatgctggagagtctgtccctttcactgaaccccctgaaagctttgaattttatgtacagcagctaaaagaattgagggaaaattcttcctgaaataagcaggcgatactttgttttgtatatatttgtgattctgtgtctacatgttattttgaagtgtattgaa

SEQ ID NO: 10763 - DNA, 555 bp, Macaca Fascicularis
  misc_feature (1)...(555): n = A,T,C or G
ttatgcacaagctggagagctgagaggaggggcttctgcagggggagggcgcgtccgggcgccgcacactgcgcagggctccctggatggtgctcaccacatcacgtcttctgtgctttccgccaagcactgggccaggtggctgtcaacatccagctgggtcagcctggggccgaactctttctggcacatggggcagctgcgcagggcggtaccctccacggnnnnnnnnnnnnnnnctctgggggccctgcagggatcaggtgccgggcgctggggcagggacctggcgggggactccaggtgccctcctgccccgcgaagcagccggtaggagcggcccgggctccacaggtctggtggaaagggcgtccaggaaaaggtcttgggtccgacagtgaaggcttcagtgggctccgggccgcacctgggctcctgtccagggaaggcgggcagtggaggcacctcgtggtccagggtgagctctgggctcaccgtgcgcagcagctcggcccagagccgctcccgctcatcaccccccaggagaaaccaggg

SEQ ID NO: 10764 - DNA, 726 bp, Macaca Fascicularis
  misc_feature (1)...(726): n = A,T,C or G
attctacacgccaggtggtnngcgctctaggggttgtactgggccgtgggggtggtgccatcggccacatgctgctgccctttcggctgggcctggggggccccatcggctcaggccaccaattcttcccctggatacacatcggggacctggcaggaatcctgacccatgctcttgaagcaaaccacgtgcacggggtcctgaatggagtggctccatcctccgccactaatgctgagtttgcccaggctttgggtgctgccctgggccaccgagccttcatccctgtccccagcactatagtgcaagctgtctttgggcgagagcgtgccatcatgctgctggagggccagaaggtgatcccacggcgaacactggctactggctaccagtactccttcccagagctaggggctgccttaaaggaaattgtagcctaagtaggtcatggcaagggcctgaggcctgtccctcataggcttccaggttaggcactgtgaataggctcagctcctctagagagctgaagccatctggttcttagatttctcccccagtcctctttcccattgttctgttgctccaccttactgtctcaaggctgtaatctcatcaggttgggacattaatcttttcaactccttgcaagatttcctagttgggtttctctacatgtcctgcagctgccccacttctcctttatgctgtgtagagaatactctgcag

SEQ ID NO: 10765 - DNA, 674 bp, Macaca Fascicularis
  misc_feature (1)...(674): n = A,T,C or G
gaataacgtcactgggccaaaagatagatcagtaccgcagcctttnnnnnnnnnnaatcaccaggtcaggcacaaggagaagagaggttcctggatactgactaacttgggtgggcctagccaggagaaagacagtaannnnnnnnnnnnnntttcttggaagatccctgaagccatcacagaggctccccaacttctgagtcgcccatctgttgctggagtgggaatggattgctgaaggagagggagctttgctctctctaggtgggcaagtttcctgggctctctgtgttgcctccctctggcttcttcctcccgtgccctctccccgtgtgccccagggggatcagggatcctcaccctcctgaggcccagtggggaagaatgaacatggctgcgtccaggttaactgaagctgccatttgcccagccttttccatcccagccctgtcagtgagccctggtctggtgcaactgctgcaggatgcctgtagtagggaactctggaagtgtactggtctgaggtgggattttccctccccacagtgcactgagcaacagagggtggtgaggggtgagggagccatnnnnnnnnnnnnnnnnnnnnnnncccccattatgtaaagtggggtgttggcgtggggcagactctgcttgggtttggttgtaagata

SEQ ID NO: 10766 - DNA, 757 bp, Macaca Fascicularis
  misc_feature (1)...(757): n = A,T,C or G
cggcagcggaggcagttcacctggcaacagcnnnnntgaaaaacccagaggtgaagctggcagggctggcagccagggatagtctgcgcctggaggcaggcctctgcctgtacgggaatgacattgatgaacacactacacctgtggagggcagcctcagctggacactggggaagcgccgccgagctgctatggatttccctggagccaaggtcattgttccccagctgaagggcaaggtgcagcggaggcgtgtggggttgatgtgtgagggggccccgatgcgggcacacagtcccatnnnnnnnnnggagggtaccaagattggtactgtgactagtggctgcccctcgccctctctgaagaagaatgtggcaatgggttatgtgccctgcgagtacagtcgtccagggacaatgctgctggtagaggtgcggcggaagcagcagatggctgtggtcagcaagatgccctttgtgcccacaaactactataccctcaagagacaagcttggaataggttctccttgaaannnnnnnnnnnnnnnnnnnnnnnnnnnnnnnnnnnnnnnnnnnnnnncctgctcctccagggagctggcatcacctctcccctccctgcaagttgttgcatctgggtccnnnnnnnnnnnnnnnnnnnngatgttccctctctcactgcccctatgcatgcatacccttgttctgtctgaataaccacaacaaccgatgcacttccgtgtnnnntaagccacat

SEQ ID NO: 10767 - DNA, 722 bp, Macaca Fascicularis
  misc_feature (1)...(722): n = A,T,C or G
accaaaagaaacgnnnacagcannnnnnccagagagcannaattaatagtcaagaattgggagatgaaaaaatccagattgttacacaaatgctagaattggtagaaaatcgggcaagacaaatggagttacattcacagtgtttcnnnnnnnnnnnnnnnnnnnnnnnnncctcagataaagcaaagatggattctagccaaccagaaagatcttcaagaagaccccgcagacagcggaccagtgaaagnnnnnnnttatgtcatatggcaaatnnnnnnnnnnnnnntgatgatcagccacctaaagaaaagaaatccaagtcagcaaagaagaagaaacgctccaaggccaagcaggaaagggaagcttcacctgttgagtttgcaatagatcctaacgaacctacatactgcttatgcaaccaagtgtcttatggggagatgataggatgtgannnnnnnnnnnnnnnnnnnnnnnnnnnnnnnnnnnnnnnnnnnnnnnnnnnnnnnnaaccaaaggggaaannnnnnnnnnnaaagtgcaggggagacaatgagaaaaccatggacaaaagtactgaaaagacaaaaaaggatagaaggtcgaggtagtaaaggccatccacattttaaacggttgtttgtcttttatataattcgtttactttcagaaaatgttttagggtaaatgcataagactatgcaataatttttaatcat

SEQ ID NO: 10768 - DNA, 1397 bp, Macaca Fascicularis
  misc_feature (1)...(1397): n = A,T,C or G
ggcttgcgatcacatctttacagaagaactcagcccacaccctagaatgtagacctttggaaaaannnnnagtgctccattaagcaagctacaatgcgggggcagatcctaggaagggagcagaactgccagggttccaaccaaagaaacaggttaattaataatgggcaatattggggagatggatggggaaaaggagaaaaagctccgctaacctaaggataccacaaccctgaaaggagcgccttctagaacaaaggtaaaaatcactaggacagatctgtgagggttttcctttcgctctcatagtaggatgttgatctaacaggggagttttgaagtgtggagcaggggggcaaaaaagaaagaaaatgagaattttaatttttgaaataacggcaatttatccattgcacataccactgtattatgcaaatcaaccttttggaaaatttagacacagaagggaactagacagttttccccctggagagatgaaaagctttttggctcttaagtctttgataaaaggcgtacataattcttgtgtctactgtacagaatactgccgctagctggatttcccaattctgagtaacactctgcaatccaaacagggttcaaccctccatcttacatgcctgcattacaggacttaaacacataatccaagaatttcttacactaatttatacattttaattggttgcatatattaacatgtactataagattcttttctaagaagcattacataataaatggatactgtaaaaagatctgattagttaaaagtaacaagcattaacagatagatacatacaaaactcagcctgatcagactgggtgtgagcctgtaatggggcatggggcaccagccttcccaaggggtagccttcaaggagggaggggaaaggggaggtaaaaagaccacaagaccgttaaaaaaaaattagacacagattaactgtaaacagttctctctctctccagtggacaaaaagaataagcttccaatgccaactccatatcagaatgacatccaccgctggcctgtcctgctgccatacacgcgggctcatgtgggtgggcaggcagaccccaagagccatcacgggcaggggctggagtttgattacgtcaggggtgtgtgtgtgtgtgtgtgtgtgtgtgtgtgtgtgtgtgtgacatgtggggtgtaactatgtttgatggggttttcttttggcagctggatgtgagagatcaatgtatgttttgtttggaagaggagaggggaattgtnnnnnnnnnnnnnntgtgttcttggtttgtgaaggactctgtgctcaactctcactgccccctcagcaactgcagctttctgccgaggccttggcccggtcattcttgtccag

SEQ ID NO: 10769 - DNA, 682 bp, Macaca Fascicularis
  misc_feature (1)...(682): n = A,T,C or G
gtcacccattgtccgagccttctttgggtcccagaataacttctgtgccttcaatgtgacgttcggggcttctacaggccctggctactgggaccaacactacctcagctggtgagagccagggcttcggctgcgggcttggggagttgaagtggaccaaggctgagtctcccagcctttcctcctaagcccgcttacctttctctctctgcttgctctaggtcgatgctcctgggtgtgggcttccctccagtggatggcttgtccccactagtcctgggcatcatggcggtggccctgggtgccccagggctcatgctgctagtgggaggcttggttctgctactgtaccacaagaagtactcagagtaccagtccataaattnnnnnnnnnnnnnnnnngggaaggacattactggacctgtcttgttgtnnnnnnnnnnnnnnnnnnnnnnnnnnnnnnnnnnnnnnnnnnnnnnnnnnnnncccgtcttgcttttctgtggaacctcagaggccagcctcaatttcctggagacccccaggtggggcttccttcataccttgcggggggaactttggaggggatggaggacagggctattgataaggtccccttggtgttgccttcttgcatnnnnnnnnnnnnnnnnnnnnnnnnnnnnncaggcctaaatgagag

SEQ ID NO: 10770 - DNA, 643 bp, Macaca Fascicularis
  misc_feature (1)...(643): n = A,T,C or G
gaaattgcctctactaaatgttaagtttctggggcagcaccagctgaagtcagcgacnnnnctttttaaaacacaaggttctgacattaagagatttctgtttctctatccatcattttcgggcatcttgaatcacctgatttagaggcagtgacgtcctgactgggttggttctgctctcgctgggcaggtaagacccccagacccacgtccacagtgcatctgatgttctcccagcggtcgtcacttccccagggaggccaggtaggcataccagaacagagctgccaggttggcgaagagcnnnnnnnnnnnnnnnnnnnnnnnnnnnnnnnnnnnnnnnnnnnnnnnnnnnnnnnnnnnnnnnnnnnnnnnnnnnnnnnnnnnnnngccccccctcatcttggtagcaaaggctgaggtgtctttcccctccagaaagttcatgatgaggaagaacaacatgaggaaggccggtgcaaagacgaggcggtccaggaggagcctcctgagccctgccagggggacctctggagggatccagtgttccatgaagaggtagaagaagtgactcagcggccctgtgaagaagaatccataaacagcgtatctcagnnncccaccgacatctagatttctagag

SEQ ID NO: 10771 - DNA, 863 bp, Macaca Fascicularis
  misc_feature (1)...(863): n = A,T,C or G
agggccagtgcccatttttaaccctacccattgatcatttcaagaaacctctgnnnactgtgtggcannnaggcaaaacatgnnccacaaattcaacttgtatatttggcagattaaacttgacattatcgtaatctttgttttgcactccatcctttggctcccatgcttgagccatttttacccagctgggtatggtgccatgttcaggcacacgtacctggcaaggttcagggcacatatctacctggggccctggggcatgacatctgttaggaggcactaagcagggttcggggatggaccccaggattgcaggattggggctgggagagacctcagatgccacagcctgctccctcccctcttttagccaagttgggatattaggcctcagcaggcagggaccctttcaggccacagcaggctgaagctgcaccaggatcttggtctggcctgtagatgtcccctggtagttataattctgtaactctaggggagaaggggagtagcactggcattggatgtcgccaaggcccacattttcttgagagaagccacaaaaggtgtgcaaatgccctttagtgcaggacccggtgacatgacatcaactccaagacagaacctcactttgcagcacaggaaaagtatatctaaaatgagcatgtatcagaagtcaactgccaacattgtaatgacaaaataaattcccgtgaagttccataaccaagcgggcacggtggctcaagcttgtaatcccagcactttgggaggcgaagtgggtggatcatctgaggtcaggagttcgagaccagcctggccaacaaggagaaaccccatctctactaaaaatacaaaaatta

SEQ ID NO: 10772 - DNA, 712 bp, Macaca Fascicularis
  misc_feature (1)...(712): n = A,T,C or G
gggtcacggaggagaacaaggaagagtacatcatnnnnnnnnnnnnnnnnnntttcacccgaggcgtggaagagcagaccaaagccttcctggatggcnnnnnnnnnnnngcccnnnnnnnnnnnnnnnnnnnnnnnnnnnnnnnnnnnnnnnnnnnnnnnnnnnnnnnnnnnnnnnnnnnnnnnnnnnnnnnctggcagaagagcaccatctaccggcactacaccaagaacagcaagcagatccagtggttctggcaggtggtgaaggagatggacaatgagaagaggatccgnnnnnnnnnnnnnnnnnnnnggacctgccgccnnnnnnnnnnnnnnnnnnnnnnnnnnnnnnntnnnnnnnnnnnnnnnnagttttgcattgacaaagttggcaaggaaacctggctgcccagaagccacacctgctnnnnnnnnnnnnatcttcctccctacaagagctacgaacagctgagagagaagctgctgtatgccattgaggagaccgagggctttggacaggagtaactgaggccgccccccaacaccccccagtgcacacatagtcctgagtcctccctgcctgggaggccaccggccctgcagcccttgggaggcccccgtggatgtggccctgtgtgggacgacaccatcatctcgcttcaggcagaagagcctgatcccaggaggccctgcagttccccccaccc

SEQ ID NO: 10773 - DNA, 772 bp, Macaca Fascicularis
  misc_feature (1)...(772): n = A,T,C or G
atgacaggacgctatgctnntatnnntataccagaagtaaagcagcatgggaagctggaaaatttggaaatgaagttattcctgtcacagttacagtaaaaggtcaaccagatgtagtggtgaaagaagatgaagaatataaacgtgttgattttagcaannnccnnnnnnnnagacagttttccagaaagaaaatggtacaatnnnnnnnnnnnnnnnnnnnnnnnnnnnnnnnnnnnnnnnnnnnnnnnnnnnnnnnnnnnnnnnnnnnnnnnnnaggctcaatgttacaccactggcaagaatagtannnnnnnnnnnnnnnnnnnnagaacctattgattttccaattgctcctgtacatgctgtatctatggttcttaaagatgtgggattaaaaaaagaagatattgcaatgtgggaagtaaatgaagcctttagtctggttgtactagcaaacattaaaatgttggagattgatccccaaaaagtgaatatcaatggaggagctgtttctctggggcatccaattggaatgtctggagccaggattgttggtcatttgactcatgccttgaagcaaggagaatacggtcttgccagtatttgcaatggaggaggaggtgcttctgccatgctaattnnnnnnnnnnagacaacctgctatttaaggagacaaccctatgtgnnnnnnnnnnnnnnnnnnnnnnnnnnnnnnnnnnnnnnttagcttatattcagataagctgtttcatttatattattttctatg

SEQ ID NO: 10774 - DNA, 722 bp, Macaca Fascicularis
  misc_feature (1)...(722): n = A,T,C or G
tgcaannnnnnnnnnnnnnnnnnnnnnnnnnnnnnnnnnnnattgatcgctatctgaaggtggtcaagccatttggagactctcggatgtatagcataacatttacaaaggttttatctgtttgtgtttgggtgnnnnnnnctgttttgtctttgccaaacatcatcctaacaaacggtcaaccaacagaggacaatatccatgactgcctgaaacttaaaagtcctttgggggtcaaatggcatacggcagtcacctatgtgaacagctgcttgtttgtnnnnnnnnnnnnnnnnnnnnnnnnnnnttacatagccatatccaggtacatccacaaatcnnnnnnnnnnnnnnncagtcagtcaagccgaaagcgaaaacannnnnnnnnnnnnnnngttgttgtggctgtgttttttacctgctttctaccatatcacttgtgcagaattccttttacttttagtcaattagacaggcttttagatgaatctgcacataaaatcctatattactgcaaagaaatgacacttttcttgtctgcgtgtaatgtgtgtctggatccaataatttactttttcatnnnnnnnnnnnnnnnnnnnnnnntgttcaaaaaatcaaatatcagaaccaggagtgaaagcatcagatcactgcaaagtgtgagnnnnnnnnnnnnnnnnnnnnnnnnnnnnnnnnnnnnnnnntaggccttctattgt

SEQ ID NO: 10775 - DNA, 705 bp, Macaca Fascicularis
  misc_feature (1)...(705): n = A,T,C or G
ttcagcacannnnntgctgagccctggnnnnnnnnnnnnnnnnnnaagcgtgtgtgtatacggactttgtcccttaaggtctatataaagaatcctcgcagaatcacagacctgtgccgcccgccaccttttgccattgttacatgatagatttggtttcgttttgttttgttttgttttttcttttagaactgtacagtgttgaaaaagaaatcaaatgtaaatgtccggttttcatataatgtttaaaaagaccattgaggaggaggctggcgctcgccccacgtcccccttgattgtaaattgcttctgtttataagtaaactgtgcatgactcctgcgtagcggtcattatcgtgtctgttggtgaaatttttattaaaaggaaaattctgtagatgcacttattgaatatgtgattaggatctacgtccgagactaggagtcctgaactgccgacgcaaaagaggcacagttcccaattaatacggaaatcgctgtgggagaagaatgaaatgagacatgaagtgtaggaaatcatgaaaagaacaactttgcaaatttcattctgatgcttgtgataaagacaaatgtacttgtgtagagacatttccttaagagaaggcctaggagaagctgattttgaggttaatgctgtagaataggactgtataccaaatgtaatctttccaatgctccaatgaa

SEQ ID NO: 10776 - DNA, 750 bp, Macaca Fascicularis
  misc_feature (1)...(750): n = A,T,C or G
cattgagtgtgctgactccgnnnannnnnngcagggccacatcannnntgatggaggctgcacgtgtccaggggatgtcgccaaagcatttggagctggagcagattttgtcatgctgggaggaatgttttcaggtcatacggagtgtgctggagaagtgattgagaggaacggacggaagctcaagctcttctacgggatgagctctgacacggccatgaagaagcatgcaggaggagttgctgagtacagagcctctgagggtaagactgtggaagtgccttacaaaggagatgtggaaaacactatcctggatattctcgggggactgaggtccacgtgcacctacgtgggggccgccaaactcaaggagctcagcaggannnnnnnnnnnnnnnnggtgacccagcagcacaannnnnnnnnnnnnnnnnnncgggaatgaaacggcgtctggctcgagtggaagcatccaaacctgcttttcccatctccctcctacnnnnnnnnnnnnnnnnnnnnnnnnnnnnnnnnnnnnnnnnnnnnnnnnnnnnnnnnnnnnnnnnnnnnnnnnnnnnnnnnnnnnnnnnnnnnnnnnnnccttctcggggcccagacacaaggcaccgattgggccaacatcagagccctgctgcccagaactcacaacctcattgttcaaaccaacactcgcacctttctttttctctttctctctccctttgtttttctttctttttaaaagaagat

SEQ ID NO: 10777 - DNA, 322 bp, Macaca Fascicularis
aggtacacacgacgacttattcaagacttctcccttaatttatcggcccccgagacgagtcagtataatcagtggtcagcaggggaccccccgcccgccagctgactgccctcgtcatcggtggtcacatcctcccccccccacccccaccaacacaacacgctgctggtctgtgtcagcctttgtaacatgcgggaggctctgccgtgtctttctggtgaactgtatttggattgcgcgcattgtcacggtccgcccccgggctgcgggcgcccttccctccgggcacccctgcattctgcatccccacctctagacgctg

SEQ ID NO: 10778 - DNA, 727 bp, Macaca Fascicularis
  misc_feature (1)...(727): n = A,T,C or G
tgaaggccaagtatgagttgctgaatgccggctacaaaaaatgtgatgagtacatcgaagccctgaacacgggcaagctgcagcagcagccnnnnnnnnnnnnnnnnnnnnnnnnnnnnnnnnnnnnnnnnnnnnnnnnnnnnnnnnnnnnnnnnnnnnnnnnnnnnnnnnnnnnnnnnnnnnnnnnnnnnnnnaacagccnnnnnnnnnnnnntctgtgtggctccaaaggttccttcattaacatatcacannnnnnnnnnnnnnnnnnnnnnnnnnnnnnnnnnnnnnnnnnnnnnnnagacggctttgaaaacaggtccctgcctcactttgaaaaacactcaaagctcccagctgccaaaggctttgtggctaatagcttttattctggtttgacaccaactgagtttttcttccacacaatggccggccgggaaggtctagtcgacacggctgtaaagacagctgaaacaggatacatgcagcgaaggcttgtcaaatctcttgaagnnnnnnnnnnnnnnnntgatnnnnnnnnnnnnnnnnnnnnnnnnnnnnnnnnnnnnttcatttacggaggagatgnnnnnnnnnnnnnnnnnatggagggaaaagatgaacctttggagtttaaaagggttctggacaacatcaaagtaagatttagcattatatctggggttagagtgtttttaaggatgtttctttaggatggaagtactgt

SEQ ID NO: 10779 - DNA, 739 bp, Macaca Fascicularis
  misc_feature (1)...(739): n = A,T,C or G
caccggcaggacgctgtnnncnnnttaggaaatggtgatcctgtgcgtagcattggcagcctctgtgcggcttgcccttaactgtcaatactaagttgttaacagctctaaatgcacctctttttccttatctggttgcataggcggccatcgtgagaatcatgaagatgaggaaggttctgaaacaccagcagttacttggcgaggtcctcactcnnnnnnnnatccaggttcaatcctagggtccctgtgatcaagaaatgcattgacattctaattgagaaagagtatttggagcgagttgatggtgaaaaggacacctacagttaattggcttaacccttctggaagggtctgactgtgtgacccgcggcaaatagttcacgttggnnnnnnnnnnnnnnnnnnnnnnnnnnnnnnnnnnnnnngccgccattggacctccctttttaaaacggagaccaagactcccatcagctggtatcggatttacatcggaactgctcaggattgatacatttcaagtctgtaaatacggacaccaacgccatttaccctaatttaagaacagcggggactgaccctccatgccgagggctgcatgctaccgcatctacgtcaatacatgggctccccgattcgcagctgtcgccttggcagcacttgtcacgttggcagcactttgagagcaagtgtgaatggacccacatgtaatctgctatgaaaaccatttgtatag

SEQ ID NO: 10780 - DNA, 689 bp, Macaca Fascicularis
actggccagtggaggtgctgtacggggcggcggcgctgaacgggtgtttcggcggcttctccgccttctggtccggggtcatggcgctgggatcgctgggctcctccgagggccgccgctccttgcgcctcatccttattgacctgatcctgggcttggcggggttctgcggcagcatggcttctgggcatctcttcaagcagatggctgggcactctgggcagggcctgatactgacggcctgcagcgtgagctgtgcctcgtttgctctgctctacagccttttggtgctaaaggtccctgagtcggtggccaaacccagccaggagctcccccccgcggataccgtgtctggcacagtaggcacataccgcaccctggatcctgatcagttggacaaacagtgtgcagtgggtcaccctccatctcctggaaaagcaaaaccccataaaaccaccattgccctgctctttgtgggtgctatcatatatgacctggcggtggtgggcacagtggacgtgatccctctttttgtgctgagggagcctctcagttggaaccaagtgcaggtgggctatggtatggcttcagggtacaccatcttcatcaccagcttcctgggtgtcctggtcttctcccgctgcttccgggacaccaccatgatcatgattgggatggtgtcctttggg

SEQ ID NO: 10781 - DNA, 735 bp, Macaca Fascicularis
  misc_feature (1)...(735): n = A,T,C or G
gncatgnnnnnnnngagttcagttgaatgatgagaactgaatgttccatttgttggggagagtcagaacgacactaataatttgcnnnnnnnnnnnnnnnnnnnnnnnnnnggtcgcccaatggtgatctccagcgggatgcagtcgatggacnnnnnnnnnnnnnnnnnnnnnnnnnnnnnncccctcaaccccaacttctgcttcttgcagtgtaccagcgcatacccactccagcctgaggacgtcaacctgcgggtcatctcggaatatcagaagctctttcctgatattcccataggttnnnnnnnnnnnnnnnnnnnnnnagccatatctgtggccgcagtggctctgggggccaannnnnnnnnnnnnnnnnnnnctttggacaagacctggaaggggagtgaccactcagcctcactggagcctggagaactggccgagctggtgcggtcagtgcgtcttgtggagcgtgccctgggctccccaaccaagcagctgctgccctgtgagatggcnnnnnnnnnnnnnnnnggcaagtctgtggtggccaaagtgaaaattccggaaggcaccattctnnnnnnnnnnnnnnnnnnnnnnnnnnnnngtgagcccaaaggctatcctcctgaagacatctttaatctagtnnnnnnnnnnnnnnnnnnnnnnnnnnnnnnnnnnnnnnnnnnnnnnnnagaatcggtagataatcacggcaaaaaaatc

SEQ ID NO: 10782 - DNA, 708 bp, Macaca Fascicularis
  misc_feature (1)...(708): n = A,T,C or G
agccagcccttcagcctacaagagacatannngccaagaggaagaattnnnngagtgagctgcagaggaaggaggaagagatgaggcagatgtttgtcaacaaagtgaaggagacagagctggagctgaaggagaaggaaagggannnnnnnnnngaagtttgagcacctgaagcgggtccaccaggaggagaagcgcaaggtggaggaaaaacgccgggaactggaggaggagaccaacgccttcaatcgccggaaggctgcggtggaggccctgcagtcgcaggccttgcacgccacctcgcagcagcccctgaggaaggacaaggacaagaagaaagccagtggctggtcttccatttacagtgtcactattccctgatggagctgttatgtgccgctccagtgaaggccccagccgggatgctaggccnnnnnnnnnnnnnnnnagatggcaactcacgtggtgccctaggtgcagctgcgtggtctggtatacatgctgcaaaattcacccagttcccctcattttaatttttctaacctagagcttaattttaataactttaaaacacttctaaatatnnnnnnnnnnnnnnnnnnnnagacaaataatatcctctcccattattttcataagtaacacagatttcctgatttttaaaaactaaaaaataccgctaaacctttcttatgtataaagtatgcc

SEQ ID NO: 10783 - DNA, 199 bp, Macaca Fascicularis
atcatgagctgttcaataatgacagatgcattggttgagatgaagtttccagtaaggaagtgacagtgcaatgtggatatttatgtctgtaaaataggaagagcttaagttctcaggctgaacctgccactgctggagccatttcatttcaacaaggcgtcctcacagcaaagaagagatgtgatttggtaccatttca

SEQ ID NO: 10784 - DNA, 768 bp, Macaca Fascicularis
  misc_feature (1)...(768): n = A,T,C or G
agccttttgagactgagcactcccagctggacgtgannnnnnnnnnnnnngttgaagaagacactgctggacaggatgtcctgcagctgcttgttaggttatgtacttcctgttgtcagttacatgatggagcagctggagaagctggacactgacatttaggatgcaccctattttgtcactgaggtgctggacgtcattgctcctccttatacctctgacttcgtgcaacttttcctccccatcctggagaatgacagcatcgcaggtaccatcaaaacnnnnnnnnnnnnnnnnnnnnnnnnnnnnnnnnnnnnnnnnnnnnnnnntaacttcatcatggtgaactaatttagagcatcctccagcgctgaagcagaacattccagaaccagttgtggagaaaccctttcaagaagctgttttaagaggctcgggcagtttcttcaaaatgggcaccattgggaggaggnnnnnnnnnnnnnnnnaaaggaaaatggtagcagcttcagtgagaaactgctcttacgaacagtcccttctctgctgtcaatccagtactgctctcaaatcctgttttcggtgttcatttccttcaaggcaggcgcactgggctcgcatgacgcctcaggacagatccggccgtcagccgtgggccgctgggaactcagacactcggggaactcctttcaaagctgacctcagttttctcacaagaacccagttagttgatgttttattataattgtcttaattgctaaggacaag

SEQ ID NO: 10785 - DNA, 761 bp, Macaca Fascicularis
  misc_feature (1)...(761): n = A,T,C or G
caagagttctctacaacccacactgcagtaccaacgctgcagttctttatgtgctgggggccggggctgtctccccgggagcagtctggctcgctgtggacagctggacaaaggctgtcttggcaagacgtggggatgagcttctcccaaggagtctcggcgtcccccgccccaggaggttgaggctagctgacacccccctgacaattcacagctgacttaatgctacatgagtcctgagtagctcccctgggagaagaggctaagctggggcaatggggaagtggttgctattagagaaatctggaggaggtttgaggagtcacatgcnnnnnnnnnnnnnnnnnnnnnnnnnnnnnnnnnnnnnnnnnnnnnnnntgctcctacagagtcactgacctgccctgccagagggcagccatgaaagtnnnnnnnnnnnnnnngagtgcaaagtgnnnnnnnnnntaccctccggcccggggcggggcagggtgagtgttcgtgtgagctgtgctctggggggcccgcacgctggacgctgacagtggggctggggtgccggagcgtctctgtctgctgctttccttagtattgatcatgtccatctacagaccgttcctgtcaggnnnnnnnnnnnnnnnnnnnnnnnnnnnnnnnnnnnnnnnnnnnnnnnnnnnnnnnnnnnnnnnnctgggcctgaaggggctcnnnnnctgctgcgctggggannnntgatagccagcagcnnnnnnncatgtgtc

SEQ ID NO: 10786 - DNA, 770 bp, Macaca Fascicularis
  misc_feature (1)...(770): n = A,T,C or G
gcagtcactgtgatgctgaggcnnnncntgtgccaataaatattgtcagaccagcccatatgaaaggaagggaaggtcatatggatcatataatgctaatgaagatatggaacctgattggttaacttggcctgctgatatgctgcactgtactgaatgtgttgtttgcctagagaattttgaaaatggatgtttgctaatggggttgccttgtggtcatgtgtttcatcagaattgcattgtgatgtggttggctgggggccgacattgttgccctgtttgccggtggccttcttataaaaaaaagcagccatatgcacaacaccagcccttgtcaaatgatgtcccatcttaaccatgtgcaatttgtcctttataagctttgagtatcttacagcttgcctttttaatgttagtcacaatgtttttgtggtttgaagtttagtttaatgttagtgcagtgacaggaaatacacattatgctaatgttgatgacagaatttatttggttgccttgtgtgttaattgaatgcatacttaattgtaaaattttttatttacaacattggaaattcagaagttaatgttttttgtaagcacaaaagaagtatgatagaaatttatcctagcaagacgttacaagataggatcaaattctaatagaattgagccggtttcttatcctaaatgtttcctccctttttacaatctctgtccaacacctcttggttaaataatgtatgctgtgagacatgaaattaaaacagacc

SEQ ID NO: 10787 - DNA, 749 bp, Macaca Fascicularis
  misc_feature (1)...(749): n = A,T,C or G
annnnnnnnngtgcgtcatgggcccgatcgatgacagcnnnnnnnnnnnnnnnatcgcacagctcctcttcctgcagtccgagagcaacaagaagcccatccacannnnnnnnnnnnnnnntggtggtgtggtgactgcgggcttggccatctacgacacgatgcagtacatcctcaaccctatctgcacctggtgcgtgggccaggcagccagcatgggctccctgcttctcgccgccggcagcccgggcatgcgccactcactccccaactcccgtatcatgatccaccagccctcaggaggcgcccggggccaagccacannnnnnnnnntccaggcagaggagannnnnnnnnnnnnnnngcagctctataacatctatgccaagcacaccaaacagagcctgcaggtgatcgagtctgccatggagagggaccgctacatgagccccatggaggcccaggagttcggcatcttagacaaggttctggtccaccctccccaggatggnnnnnnnnnnnnnnnnnnnnnnnnnnnnnagcctgtagaagcaacgccagcagcagaacctgtccnnnnnnnnnnnnnngagctggtcctcctctccagaatcacatgaaggggccagaggccagccagacccccagctgggccctgttcaccccttgctgctgggcccggaggggccccttgaggaacttttaatttgcaagggtgccccctatggatggggcattccagctgagac

SEQ ID NO: 10788 - DNA, 743 bp, Macaca Fascicularis
  misc_feature (1)...(743): n = A,T,C or G
ttgagctttttgtgaaactgtctacccagtccccagaaggaattactgntggagttgtcacttntttaagtaatatatttatgggagtacttttattttttctcacattttatcacacagagttgtcttggttcaactggtgccttcccgggtcgtgtttgcttagtctcctcctcattctgtgcttcagggaatcctatgacagactctatcttgatgtggttgtctccgtttaatagcacagacttgaaggagtttaaaaggaggctggaaatcaatactgcacactgcacatttgctcggaattgcacatctaacagaaaaagagggagaagaaagaaacttcattcagaggttttgttaggttacagattatcacattaatttaattactactaggtaataataataatgggagacttgagtgataataggggattttaaaactctacagatggcatacctgtgcctgattctggggttggaagtgtgacttcttacacataaagcactacctaagtaatactctctctgttttgtgccagtgctaaactactgattacttgtaattatgaaaagaaataaagggtgtctatcacatgaagataacgccttccctaagtcacatatcagaataggaagatatgccactaacttctaaagaagttcaaaccctgtatccaattttaatgataaaatagccaagcaggcatattgatgatagaaattagccatgtgtacac

SEQ ID NO: 10789 - DNA, 717 bp, Macaca Fascicularis
  misc_feature (1)...(717): n = A,T,C or G
ccagagatnnnatggtaaaatcagnnnaagacagtgnnnnnnnnnnncatatgttggtacaaagaagtgtttggccacattacaggtctcagactcaactgctatgtgtgnnnnnnnnnnnnnnnnnnnnnnnnnttttttgctgagttccctgtttccatatctccaggtgaaccataagaatgcagagggtggctgagaagcctgggcttctgggattccaccttgcattctctgctcttcaaccattgttttagactctgaacaccnnnnnnnnnnnnnnnnnnnnnnnnnnnnnacttgggcatcaagtgctcttttaagaaggggctgtcccaaaggactgttcaataatcttattcaatagagatgttggagtccagaaccaagttagggagcaaaccagtaacctatnnnnnnnnnnnnnnnggatcctacaatgatgtttgtttttaagacaggatcttgctatgttgcccagactggtctcaaactcctgggttcaaggcatccatcctcccacctcagtctccnnnnnnnnnnnnnnnnnnnnnnnnnnnnnnnnnnnnnnntccttacaaccatttattttaatttatttcatttataactgatatctttcatttgtatgtggcagctagagatttatataggatggaagtaatttatttttaatttaaatatttcatgttgaactgtttgccttgtatagaacat

SEQ ID NO: 10790 - DNA, 752 bp, Macaca Fascicularis
  misc_feature (1)...(752): n = A,T,C or G
tgcagtgagtcacnnnnnnccacgnntcaccnnnnnctcacagcaggggcnncggccccactcatgatgatgtgaccttgaggcagtggcacgggcctttggggatgagctgaagccacaccctnnnnnnnnnnnnnncaccaaagccctaggaggggaaggctgggagaagctgtcattggtgccctcctctgcccgcctgcattatggcacagatcctcgcactggtcatcccttcagattcccactggtctccgtccgaaatgtctacctcttcccnnnnnnnnnnnnnnnnnnnnnnnnnnnnnnnnaggggctgaagggactgttccaaaacccagctgttcagttccactcaaaggagctgtatgtggctgctgatgaagcctccattgcccccattctgnnngaggcccaggcccactttggacgtaggcttggcctgggttcctaccctgactggggcagcaactactatcatgtgaagctgactctagactcagaggaagaaggacccctggaggaatgcctggcctacctgactgcccgtnnnnnnnnnnnnnnnnnnnnnccctacatgcccaacgccgtggagcaggccagtgaggctgtatacaaactcgctgaatcaggtagggaccttatggaggaggggcagtatgcccaaagccattggtgccaccccagatctcagtaatgcaggggctgttgggtgcttcctgcaaatcccagggagggcagaagatagcttc

SEQ ID NO: 10791 - DNA, 677 bp, Macaca Fascicularis
  misc_feature (1)...(677): n = A,T,C or G
gtacacatcacacagggnnnntggtcctggcnnnnncaggtgcnctggtgtgcaggatccttnnnnnnnnnnnnnnnnnntcctattgtcttacctagagagcatgccacttgggccacctccccccaacccttggccaaaggagcgnnnnnnnnnnnnnnnnnnnnnnnnnnnnnnnnnnnnnnnnnnnnnnnnnnngacgcagcagaggcagcaggcccttcctcctgctgacgaaacactggctccctcatgttctgggcaccgcagaagtgttctgcacatggtctctatggaggaaagctagtcctcccggcccaggcagcacttcctccgtgaggccctgcagtttcctggtgtgtgcctggggagctagagacatggtgccaaacctccgtaaggcnnnnnnnnnnnnnnnagggggaggagctgtcaggcccaggactgcctccctgcacatggagagcaaatctaaacctaagccaagacccctaccttctccagctccaagggatgccaggaccagagaagggcagaggtcaggaggggcctgaggaggccaagtctggggcagcctcagaggcaaatctacactgtagccagtcccctnnnnnnnnnnnnnnnnnnnnnnnnnnnncatttcactacaaacttatgtttgaatcctttattagaaa

SEQ ID NO: 10792 - DNA, 723 bp, Macaca Fascicularis
  misc_feature (1)...(723): n = A,T,C or G
atgacaanggatcagaaattaggtgagtacttggccaggatgctagttaaataccctgagatcattaattcaaaccaagtgaagcgagttcctggtcaaggctcatctgaagatgacctacaggaagaggaacaaattgagcaggccatcaaagagcatttgaatcaaggcagctctcaggagactgacaaactggccccggtgagcaaaaggttccctgtggggcccccgaagaatgatgatactccaaataggcagtacttggatgaagatctgttaatgaaagtgctggaatacctcaaccaagaaaaggcagaaaagggaagggagcatattgctaagagagcaatggaaaatatgtaagcagctttcattaattaccctactttcattcctcccaccccaagcaaatcctaatatttctctttagtgtgttgacttctatcctgttaacactgtaatatctttaaatgatgtacaggcagatgaacccaggtcactggggagtctgcttcatttcctctgagctgttctcttgtgtatggatatgtgtaaatgttatgactccttgataaaaaatttattatgtccattattcaagaaagatatctatgactgtgtttaatagtgtatctaatggctgtggcattgttgatgctcacatatgataaagagtgtcctataattctattgaaagtttttaatatttattgaattattttg

SEQ ID NO: 10793 - DNA, 690 bp, Macaca Fascicularis
  misc_feature (1)...(690): n = A,T,C or G
atgacacagcttgtctccctcgggctctagagctaggcccgagcattcgggggatcaccccatttctcctagcctgggatggtcgtcgcagctggcctggcccgctccaggactccccttctctcatgtcctctttgctttcttctctggctgtggccttggcagaacccacttttctacctctcccaagtgccagggggcctcttcctctcctatattccccttcctcccccgagcacggtctgctgcctcagaccccagcttatcagccctccctgtccccctcaactgagtgggtgtcacctggagggcctcccttcccccactccccactgacctccctcactcctctgcgcctctgctgtgacttctctctctccctgtcttcactctgttcatttctcttctgttttctgtccccgtggcaaggcccgactgtccgctgcgtcctgcccgaccctcctgtacctccggcctcccagcggccccctcgtcggcggtggcgnnnnnnnnnnnnnnactgttagccgccctccactcccaggccggagggacctctccagaccctgggctgcggccgaggcgcatccgttttcctgccctgggcgtctttgtctnnnnnnnnnnnnnnnnnnnnnnnggcaacgggcactgagaagggaggccagtgcctagaggaagacagctgct

SEQ ID NO: 10794 - DNA, 708 bp, Macaca Fascicularis
  misc_feature (1)...(708): n = A,T,C or G
caggcagcagagggtgaatatgggcaggcgaatagatgctccctnnnncatctnncaaagggtggctggccccttgggatgagacaggcctgtcagtttacacgggtagcagattgacctatgtgtgtatccatgtctgggccctcagctgttcctgggcatgtacccagaagagcattttatcgagaagcctgtgaaggcggctatggcccgattccgcaagaaccttgaggccattgtcagcgtgattgctgagcgcaacaagaagaagcagctgccatattactacttgtccccagaccggattcctaacagtgtggccatctgagcacactgccagtctcactatgggaaggccagctgctccagccagccggactccagcctgcctggcaggctgtctggccaggcctcttggcagtcacgtctcttcttccgaggctagtacctttctgtttattctttgatcttcagggaaccccatagattgagcaaagcgtaaacaccatagggacccattctaagcagagcaggactgcacagtgtcctgtccacacccagctcagcatttccacaccaagcagcaataacaaatcacgaccactgatagatgtctgttcttgttggagacattggatgattattttctgttatatttgtgaatagtccaattccttgcacatagtgggtacccaattcaattattat

SEQ ID NO: 10795 - DNA, 715 bp, Macaca Fascicularis
  misc_feature (1)...(715): n = A,T,C or G
accagcagcttccgctgggtgtggtggctnnnnncagggaccctcatcgtcattattgttggcctaatacttggcctaatatatgtgaaaagaagaaagtcaaggggcgatgtagtcaaggtgatcgtctccgtccagcggaagagacaggaggcagaaggtgaagccatagtcactgaggccctgcaggcccctccggacatcaccacagtggccgtggaagagacagaacctgcnnnnnnnnnnnnnnnnnnnnnnnnnnnnnntacagactctgtaccccaacaccagagatacccggagcgannnnnnnnnnnnnnnnnnnnnnnnnnnnnnnnnnnnngaaccacaggagccaggaggcctgggggctccccgctgggctggcttccatcttctccagtggagggagaggtggagcccctgctggggtggggctggagacgccccgtgccattcccatgggccagcgagggcctggggcctcccttctgctgcagcctgagctccccagagccttgaggaagagcgccagttgcctcgcgctcagggaccacacccccagcccccctggccagcccagagggcccgccagaccccagctgtctgcctgtctgaatattgcggtcttagcaggacaggccccgggcactgcctcacggccaaggctggactgggttggccacaatgtggcattgaatgtatatcacattaa

SEQ ID NO: 10796 - DNA, 807 bp, Macaca Fascicularis
  misc_feature (1)...(807): n = A,T,C or G
cagttccagtcaaagcaagtgtattatgattgannnnnnnnnncgatannngannnnnnntgnnnnncagtgggatatggaatccagaagggaacagcactgataattaaaaacagctggggagaaaactggggaaacaaaggatatatcctcatggctcgaaatnnnnnnnnnnnntgtggcattgccaacctggccagcttccccaagatgtgactccagccagccaaaccatnnnncttttccattnnnnccgcaatggtgcagtgtaacgatgcactttggaagggagttggtgtgcgatttttgaagcagatgtggtgatgctgagattgtctgttcagtttccccatttgtttgtgcttcaaatgatccttcctactttgcttctctccacccatgacttttttcactgtggccatcaggactttccctgacaggtgtgtactcttaggctaagagatatgactacagcctgcccctgactgtgttgtcccagggctgatgctgtacaggtagaggctggagattttcacataggttagatcctcattcacaggactagttagctttaagcaccctagaggactagggtgacctgacttctcacttcctaagttcccttctgtatcctcaaggtagaaatgtctgtgttttccactccagttcataaatctattcataaatctttggtacaagtttacatgataaaaagaaatgtgatttatcttcccttctttgcatttttgaaataaagtatttatctcttgtctacagtttaataaatagcatctagtacacattcat

SEQ ID NO: 10797 - DNA, 747 bp, Macaca Fascicularis
  misc_feature (1)...(747): n = A,T,C or G
atgacttttantannngaaagggatcaaannaagactgtctcacgatgtggaaatgatacgannnnnnnnnnnnntgcctgtgtgtcgagctgactgnnnnnnnnnnnnnnncacgtggactcatcaccgaagctgcttccacccaggcagcccgagccagcagctgtgaccggcaccctgtggcccacacggccagaagtgtttgtcctctagccccctgcagacacagtcggctgcccatggtgggggtcactctggaggcgcctgtcaccagcccctcccgggagccctcccccaccctcagtcctccatccctgaagcagtgagccccatgcctgggccacgctggggcaggccctgtacccaagatggatctcatgccttctcatttctctcccccggtgatttctccaagccagtgnnnnnnnnnnnggcttcgacccactcctcaaccttnnnnnnnnnnnnnnnnntgagtacatgcgagaccctgacgaccagtacaagctcacggaggacacccggcagctaggcctcgtggtgtgccggggcacgtctgnnnnnnnnnnnnnnnnnnnnnnnnnnnnnnnnnnnnnnnnnnnnnnnnnnnnnnnnnnnnnnnnnnnctagccgggccagggctgcaggacaggccagagcagctcggttccccacagacttggccgccgctcccaccnnnnnnnnnnnnnnnnnnnnnnnnnnnnnnnnnnnnnnnnnnnggttga

SEQ ID NO: 10798 - DNA, 660 bp, Macaca Fascicularis
gaatacacatgaacccctataccgattttaagaaaaaaatgattctctttcctctttgtccaagcatgctatccctcaaacccaaaaagaaagaagctctaccttctctctctgagatgggaacagtatttcttctagcatcctgcagccttcccagtcctgctgctcatggtagaaatgctgccacactccaacatcgaggagccctccttgacttccctttacaactcgtattcaattctgcctacaaaatgcctatgtccacttacatgcgatggtaaatgtttaacagtggactttctgaaagggaaaaaccaaaagctgttttgtagtgcttgccaatttctctagtgtaataactcccaacctgaccaatttcacactgtcaacacttaaaccagattgcaaaattcctgaaatttaacaattggttttcaagggccagtccaagcctgctgcaggacacctctgagttacatccatatcagcacacttctcacttccaccaccactccctgtcccaaccaacatcatctcttttgggaccactcctctggctttcatttttcagccacagcaattcttggaaaagtcaaatcatatcacttctctgcttcttccccaacacagccgcatggctcccactctccctccttccag

SEQ ID NO: 10799 - DNA, 751 bp, Macaca Fascicularis
  misc_feature (1)...(751): n = A,T,C or G
acagtaatcattaatccagcaaaaaaaaaaatgaaaagggaaaaccacatagaagggtcatcccggaaatgcttcatctggtggactgtgggagcagaggcattgccaggacttgggaaacagtcactgtgaaatgcgccgcatatctcattcactcacttgagctaatgattccgacttggcagacactaaactcatggaggttcggtttctcctgatacaaaccaaatggctacctggaataatttctttcaagcaacagttnnnnnnnnnnnnnnnnnnnnnnaaatgtataaaagttatgtgtaattaatctataatgccataaatgataatgcaaaacctaaataatatggtggccggaggggctgccttatatttgaaacatgctttctatcatgcattgactgtatgcattttgttaatgcacattttgtttgtttaaataaggtgtgtaagatacacacccttctagatgaaactatatgtgccacactttgcactactcataataacctcaagactatcagaagaaatatttaaatttccattttatgaagaaaggaaccaaattattatgcttttttaaaacaaattaccagtttacataatnnnnnnnnnnnnnttttaagttctaactttgtttattgtatagtgcatcatttgaaaataccaaggaggaaataccctttgtttttaatgatgcaagagtggaagtaatgctagttggcagtatttgatgtaagaaatc

SEQ ID NO: 10800 - DNA, 1141 bp, Macaca Fascicularis
  misc_feature (1)...(1141): n = A,T,C or G
tccttctttgtaatactttctatgtgacatttctcttccccttagaaacactgcaaatttaaactctaggcatgatctcttctggtgttgactggactgcttggggtaggggatgatcaggaggaagtgagcagtcgcctgcctgcagcaggcaacttcaattcctgcctcgtgtgtacatcccacaaatgcaggtgtcctgagcaccacatccagtgggaagagtgtcggggagacgcacagtgtgagcccgcccccacatcatggggtaacatctgttatcaaaccgctgtccttgttgtggaagcacgtagactgtgccagaggccaggcccacgggctcaggcacccctgagccagcagggcgtcttggaaaaataactcttggttcaatacctggagcagaggaggggaaagcccagggctgcagggtgtgacaaaatcacccctttctgtcccactgtatctgggactttctgatcccccagtccaaagccggcttgatttccgcgaactctggtgctcctnnnnnnnnnnnnnnnnnnccatgggttccctcccctctcagcatttccttgtcccctctggacctgcggagtggttaagcagcaagctttggtttatggttttcattcactggtcaagtacattaggcaatgctaaagcctgtgggtttggtccttgaacaagatgtgggccttgcaagatgggagagtaaacctcgaagggctttattaaagaaataaaagagaacttttgtatctttcatcctgggagcactgcgttttcctagctgtgttcttcctggtttaattcagcagagaaggtaaggtgtgaacctacatgccttggagcaggcccaggtcccaaatctcttcaaattcttcacatgtttaactttaaggatttgaaccgtgcagtcttaggttgcagacttcagttttatgccccactggattactttttttttttttttttttgaactgtttgaaagctttgttttgtggtagtccttttgggaagaatccagtattatctacaattattggcaaagtttaaatgtattttacacaactgaaagttttcagaatgtcgaaaagtaattgaaaaacgtgataggtaaattattaggcaaagataa

SEQ ID NO: 10801 - DNA, 686 bp, Macaca Fascicularis
tgaatgtttaaatcgaaaaagcaaaacaactactcttaaaactttttttatgtctcaagtaaaatggctgagcattgcagagaaaaaaaaaagtccccacatttattttttaaaaaccatcctttcgatttcttttggtgaccgaagctgctctcttttccttttaaaatcacttctctggcctctggtttctctctgctgtctgtctggcatgactaatatagagggtgctgtctcgggctgtgcccattctactaactgagtggatgtgacgctgtgcatggatggaatagttcggacacctggcaggggatgcatgggcaagccaggagggccctgacctcccactgcccaggaggcagtgacgggctccccgatgggacttaaaacctcaccgaagacggatgcttaccccttgaggcctgagaagggcagaatcagggctggagccttcggaagggaccttggcacagcgacctcatcccccagctggacacagtttgcctcctaactcgcaaagcaatgacctgccttgtactttatgggcttggggtgtgtagaatgattttgcggcggagtggggagagagatgaaagaggtcttatttatattctaaatcagcaattatattccctgtgattatttggaagagtgtgaaggaaagacatttttccagttcaaaatgc

SEQ ID NO: 10802 - DNA, 557 bp, Macaca Fascicularis
  misc_feature (1)...(557): n = A,T,C or G
ttgaccttatgatccgcccgcctcggactccccaagtgctgggattacaggtgtgagccaccgcgcccggccgaattgcctgttttctaaacgctggaacactcaggaagttctcctccctcccctccaaggggcctatgagaactagaaagctaaaagcttgtccaaaccaatgaggtgtgagtctgtggttttgtctttgcagaatttatagagcggcagcatgcgaagaacaggtattactactaccacnnnnnnnnnnnnnnnnnnnnnnnnnnnnnnnnnnnnnnnnnnnnnnnnnnnnnnnnnnnnnnnnnnnnnnnnatgcagtggaggagggactagtacgtgagccacgctgggagtgtggagatctgcagcatgtgcagctgggccaccggtccctgggattccacagggtggcatgcccagatcttaggactgacatgggaggagccagaccccagggctcttgatttcaattgttctcgaggggtacagggaaaggattcctggtgattagcctctcttgctccctttctcccccagccaagtcg

SEQ ID NO: 10803 - DNA, 699 bp, Macaca Fascicularis
agggggtcaagaggaagaggaggaacagaggtggctggatgccctggagaagggggagctggatgataatggagacctcaagaaggagatcaatgagcggctgcttactgctcgacagcgagctctgctccagaaggcgcggagtcagccttccccgatgctgccgctgcctgtggctgagggctgtccagctcctgctctcacagaggagatgctgctgaagcgcgaggagcgggcgcgtaagcggcggctccaggcggcgcggcgggcagaagagcacaagaaccagactatcgagcgcctcaccaagactgcggcgaccagtgggcggggaggccggggagctgcacggggcgagcggcggggagggcgggctgcggctccggcccccatggtgcgctactgcagcggagcacagggttccaccctttccttcccacctggcgtccccacccccacggcggtgtctcagcggccatcccccttaggcccgcctccgcgctgctctgtccccggctgtccccatccgcgccgctacgcttgctctcgcaccggccaggcactctgcagtcttcagtgctaccgcatcaacctgcagatgcggctggggggacccgagggtcctggatccccccttttggctacgtaaggcccttacctaacctggactctgcgccctgtcccatgcccgctcttgag

SEQ ID NO: 10804 - DNA, 701 bp, Macaca Fascicularis
  misc_feature (1)...(701): n = A,T,C or G
tgaccccgcctagtcatnnnnnnnnnnnnnnnnnnnnnnnnnnnnncgctgttgggtcaaagtnnnnagnnnaaaggcaggtgcaggaggttgggaggggcgaggcgggcgcctgggccccgcccccagcccacctgaccttgtttccaggattccggcctaacccagagctgagggaggccctgaccaccggcttcctgcggaggctgctctggggtagccggggcgcgggagctccgcgnnnnnnnnnnnnnnnnaagttccagcgcgtcctcggcgtcctgtcacagcgcctggagcctgacagctgagagcgcagacccctttcttcacacccgggacccccaggtttttgaagaccccggaagagaccaaaggagtcgtcccaggctcctcacgtcctcaggcggaaacctgccctgtacctcacagcagaggtggggagggcagtcagggtcatccggggcatggtgaacatgtnnnnnnnnnnnnnnncttcagaggccagagttcaaatgtgactccgcttcttaaaagctgtgatttctagcagatcacttcacctctctgtgtctgcctttaacaaaatcatggctgtgcagcannnnnnnnnnnnnnnnnnnnnnnnnnnnnnnnnnnnnnnnnnnnnnnnnnnnnnnnnnnnnnnnnnnnnnnnnagccagggcaacatggtgagacct

SEQ ID NO: 10805 - DNA, 1211 bp, Macaca Fascicularis
  misc_feature (1)...(1211): n = A,T,C or G
ctctcagtgtttatctacaattatttctcctctcnnngcagagtgaaaggagaagagccaggcatgcggcgggaacttggggtccattgaagagctgcgaggggccatcttcctagcggaggaggcgtgccccggcannnnnnnnnnnnnnnnnnnnnnnnnngtgcagcggctccagagatattctctaagtggtggaggaacttcatcccactgaaattcctttggcatttggggttttgtttttccttttttccttcttcatcctccttcttttaaaaagtcaacgagagccttcgctgactccactgaagaggtgcgccaacgggggccaccccaacgccgggcgcccgtccagggacacacacagtcttcgctgtgccacagccagatgaagtctctcagatgggtggggagggtcagctccttccagcgatcattttattttattttattactttggtttttaattttaaccatagtgcacatattcaaggaaagtgtctttaaacacaaaaaccctgaaatgtatatttgggattatgataaggcaactaaagacatgaaacctcaggaatcctgctttaagttgatagctccctctgggagctggagaatcgctctggtggatggctgtacagatttgtatatagtgtcatttttacggaaaccctttcggcgtgcataaggaatcactgtgtacaaactggccaagtgcttctgtagataacgtcagtggagtaaatattcgacaggccataacttgagtctattgccttgcctttattacatgtacattttgaattctgtgaccagtgatttgggttttattttgtatttgcagggtttgtcattaataataattaatgcccctctcttacggaacactcctatttgtacctcaacaaatgcaaattttcctcttgtttgccctacgccccttttggtacacttagaggttgatttcctttttcatcgatggtactatttcttagtgttttaaattggaacatatcttgcctcatgaagctttaaattattattttcagtttctccccatgaagcgctctcgtctgacatttgtttggaatcgtgnnnnnnnnnnnnnnnnnnnnatgtaccgtcctttccaatacgattttctgttgcaccttgtagtggattctgcatatcatctttcccacctaaaaatgtctgannnnnnnnnnaat

SEQ ID NO: 10806 - DNA, 712 bp, Macaca Fascicularis
  misc_feature (1)...(712): n = A,T,C or G
cagcgtggcaaggaggnnnnnnatgccaacctttnnngagcaagaggcagctggatggcctggctgggctgaagggcgagggcagccgcagcaaggaggcaggggagggcggcctgcagctgtgcgggcccacggacaagaccccgctgctgaccggcaaggccgccaaggcccgggaccgcgagctttgacctcaagaatggccacaacctcttcatctctcgctgcggctgtgcctcctggaagcctcctcagcggccccggccttgccccggtggcgtcctccacaggcggcgcggcgtcctccacccagacgcaccggcccttcttgggccccttcccgccgggaccgcagttcgcgctcggccccatgtccctgcaggccaacctcggctcagtggccggctcctctgtgctgcagtcgctgttcagctctgtgccggccgccgcaggcatggtgcacgtgtcgtccgctgccaccagactgaccaactcgcatgccatgggcagcttttcnnngggtggcaggcagcacagttggaggtaactaggatttctacctcaaccgcgagacctatgcaaggacggtgtggaccaactcgcgcccgtggcatggtgcccaccggcctgccgggctcccaccgctggatggcagaggcgaggacggacgggagctccactgtgaatcggcggcgcacgccgcaggaggctg

SEQ ID NO: 10807 - DNA, 736 bp, Macaca Fascicularis
  misc_feature (1)...(736): n = A,T,C or G
gggaagccaggaccaaagggcaaagccggggccattgggcgggctggcccccgtggccccaagggggtcannnnnnnnnnnnnnnnnnnnnnnnnnnnnngcaagaaggggcctaagggcaagaagggggagccgggcctcccaggcccctgcagctgcggcagtggccataccaagtcagctttctcggtggcagtgaccaagagctacccacgggagcggctgcccatcaagtttgacaagattctgatgaacgagggtggtnnnnnnnnnnnnnnnnnnnnnnnnnnnnnnnnnnnnnnnnnnnnnnnnnnnnnnnnnnnnnnnnnnnnnnnnnnnnncaacaagcacctagccatcnnnnnnnnnnnnnnnnnnnnnnnnnnnnnnnnnnnnnnnnnnnncaacaccggcaaccatgatgtggcctcgggctccaccatcctggctctcaagcagggtgacgaagtctggctgcagatcttctactcagagcagaatgggctcttctacgacccttactggacagacagcctctttacgggcttcctaatctacgccgaccaggatgaccccaacgaggtatagacatgccagtgtggtccgccaggcagggagcaagcttctggacttgggcttacagagcaagacccctcaactgtaggctgggggtggggggtccagtgagcagttctagcctcaggctgacctcctctgcctcttttttccccatcat

SEQ ID NO: 10808 - DNA, 710 bp, Macaca Fascicularis
  misc_feature (1)...(710): n = A,T,C or G
caaaagaatggataaagagaatgtttcaagttcccgaaattatccaggcacatcctgtgcactactgaacttcagaaagcaccagtccatccagtgtgcagagtctggtagatgggccagccgtgggcacacacaggctccccagagaccccggggcagagggnnnnnnnnnnnnnnnnnnnnnnggctaatccgttcctgggccaggggtggatctgttttgcaggtttgcaagggtggggagacgccagcctggcccatgggctgtccatgcccaccccccacagaccatgctgccatccggaggggatgccactttctcctggcctcggggatgcacagcagcagccagcctggcacacgctgccctgccctgccctgcccgactgtggaggtgagcgggtccccccgggcctgggtggaaggactgcgcgcctgtcagggaaggccgaggctctggacaggttgtgttacggcannnnnnnnnnnnnnnnnnnnnnnnnnnnnnnnnnnnnnnnnnnnnnnnnnnnnnnnnnnnnnnnnnnnnnnnnnnnnnncgtgtctcctgctcacagcaaccacttgatatcaaaaaacggaaaagatgtacaaaaagatgtcacatccctttagaaagcgacatcatcagaaacgtatgtgnnnnnnnnnnctccctccctctcctgtacctcccccagaccaggctgcga

SEQ ID NO: 10809 - DNA, 779 bp, Macaca Fascicularis
  misc_feature (1)...(779): n = A,T,C or G
gagcagccagccagccacctaactcctnnnnnnnnnnnnnnnnnnnnnnnnnnnggagcaactcgnnngngaaacccgnnnnntcgattctgtccagaaccccgtctgtggcaaagagccccgaagctaagagcccccttcagtcgcagcctcactctaggatgaagcctgctgggagcgtgaatgacatggccctggatgccttcgacttggaccggatgaagcaggagatcctagaggaggtggtcagagagctccacaaggtgaaggaagagannnnnnnnnnnnnnnggcaggagctgagcgggatcagcaccacgtaaggggcctgcctcgcagcgctgagatgtcgagcccatccggcgacagaggacagccaggagcccagccagccccagactccagtgcaccagagcacgcacaggagcctgggcgcgccgccgtgnnnnnnnnnnnnnnnnnnnnnnnnnnnnnnnngaggaaaccaagtgcaactcctgggttttttagattctacctgacacagaacaccaggtctgctcatcttttttgtgttttatatttgcttatttaaggtacatttctttgggtttctagagagatgcccctaagtcacctgcttcattagacggtttccaggttttctcccntggtgatgctnnnnnnnnnncagctggcagtgaccgccggcccggcgtggcgccactgcacaccgcagagctgtccaggcgcagctctgtccccagcgctcatggtgttgaaactgtctgtcatgcacc

SEQ ID NO: 10810 - DNA, 725 bp, Macaca Fascicularis
  misc_feature (1)...(725): n = A,T,C or G
agcactagataagactgggnatacnnngaaaagatgccaatcttgtcctcaaggggctcagattccagctgtctgtccaagcttagcaggggcctagtggaagttaacctttatgtcaaagaatgccatcagtctagccaagagcacgtcctcccaagttccctcccctctccccactcctagtggctcaccctcagggcccttcctcaaaggtgtgggcctcactatcaccaagaatctggctgcttttnnnnnnnnnnnnnnnnnnntgtggagtccaaagtccttccctaacgaagtggagcctgagggtacagggaaggagaaagactgggatctcagagaccagctgcaaaagaagactttgcagctccaggccaaggaaaaggagtgcacagaactgcattcagaattagacaacctcagtgacgagtatctctcctgcctgcgtaagctgcagcactgtcgagaagagctgaaccagagccagcagctgcctcccagaaggcaatgtgggcgatggctcccaatgctgatggtggtgattgctgcagcactggcagtgttcctggccaataaagacaacctgatgatctgaataatttgtgacaactgtctcgggtgaaaatcagaaggaagcaactcaacaaaannnnnnnnnnnnnnnngtacattacagcttgggctttccaactgacttaggatttctgactttttgttatttt

SEQ ID NO: 10811 - DNA, 732 bp, Macaca Fascicularis
  misc_feature (1)...(732): n = A,T,C or G
cccagttctttcagtgtttccattaccctttttactgaattaaagttaagtgacttaaaaggatggaagaaaaactacatggttggagtgtttttagaccagataaatatagaaaagtagaatggaaaatgatactcaatacctagttgaacgcatttcacttctcctgggagatgtattaagactggaagtcctattttatgtaatcagtaaaaagacaaaaattacagtgtgaaaaagagaaagacaggaatcgaagaaaaaagttgcaggttgaattatctatctggatattactagagttgtaaaacttggaaattggaatttatgtgaagaaccagacaactgannnnnnnnnnnnnnnnntcttcaatttaccttcaaatggttttagtttacaacttgggttttgttatttgacacacacacacgtatatataaacatacatgtaattttactattatattgtctttcctttaatcgatgaattgattaaatttagacaattaaaacatttctaaagtgaggctgaaaataatatagaaaatctcattgctacttgtgatgatcaaaaaaggatgtattttctttctaaagttatctataaatatgtgtttgatatgttggacatgaattaccctgtcatgaagcatttaaaagctgattttcttgttagtttgttaattacctgttactagtatttgaccaatacattgtgctgtatgtaaatg

SEQ ID NO: 10812 - DNA, 720 bp, Macaca Fascicularis
  misc_feature (1)...(720): n = A,T,C or G
tcattagactaacataaactaagtttgacagtattatgaactttcatacatggtttggaatgcaaattggtacagtcacttcaaaagtgatttggcaatagctagcaaagttgaagataggtgcccgaagacttaacagtttatctcctgggcatacacagagaaactcctcttgtccaggcatacaaagagacacaaaaaagaatgattattgcagtacagtttacaagagagaaatactgaaaacatgtatcagagaactactttcacctctgcaagnnnnnnnnnnnnnnnnnnnnnnnnnnnnnnnnnnnnnnnnnnnnnnccccatccctccactctctctagtgaaggagagccagctaactcctttcccatggaatgtgagtggagtgatgaatgccacttgcaggttagaactttgagtgggtgtacctccaagctttctttgcccttcttccaactaaatgcagatgctgatggggccctaggaaatggaagaacacaaaatggaagggatcttgactccnnnnnnnnnnnnnnnaaggagagccacttgcttgccaaccaggaacatatatctgagactattaagtgagcaagaaatnnnnnnnnnttacttgagacattatacattcttgggtctcttgtcagcctgctctaatacacaataattatccattatcagaatggataaattgcgatatagtcatacagtag

SEQ ID NO: 10813 - DNA, 581 bp, Macaca Fascicularis
tccacacatttgtgtgcctgatttgaaaggaagctggggcacccagcgagtttagcctttaagtttctgtgtattgatttgcagattaagtaatgctgggaggaataaagaagggacagaaacatggaacataaagcattgaaaattgtggtgcttgggcttctgcttcagagtaacgtcagtggcttagggttaaatggccattttattcaaatgcttgctatacaatctgaaaacacactggcaggtgctcctctccttggcaattcattgagtatccagagttctacgatgtttaactgaagaattggctaatgtgttgatcctccagtgtgactgttctttttgtttgggggtaggtctggggttttttgcttttttattcctgaagcttaccagatatgaatggctaatattccattgttctgcttattgtaatggtgaatgctttaagaaaaaaaaagtgtaatttgctaagaataattcatgatctgtttatgcgataactcctttttgttacaatttttttaaaaaaaggctatttttgttaatgtaaagtaaatatttcagagcaaattttt

SEQ ID NO: 10814 - DNA, 734 bp, Macaca Fascicularis
  misc_feature (1)...(734): n = A,T,C or G
atgctggatttggtgtggtgctaggggaagacaagaaaaagtttaaaacacgtgcgggtgaaacagtgcgcctcatggannnnatgganaaaggactaaaacgatccatggacaagttgaaggaaaaagaaagagacaaggtcttaactgcagaggaattaaatgctgctcagacatccattgcctatggctgtatcaaatatgctgacctttctcataaccggttgaatgactacatcttctcctttgacaaaatgctagatgacagaggaaatacagcggcttacttgttgtatgccttcactagaatcaggtctattgcacgtctggccaatattgatgaagaaatgctccaaaaagctgctcgagaaaccaagattcttttggatcatgagaaggaatggaaactaggccggtgcattttacggttccctgagattctgcaaaagattttggatgacttatttctccacactctctgtgattatatatatgagctggcaactactttcacagagttctatgatagctgctactgtgtggagaaagatagacagactggaaaaatattgaaggtgaacatgtggcgtatgctgctatgtgaagcagtagctgctgtcatggccaaggggttcgatatcctgggaataaaacctgtccaaaggatgtaatccttcgtaggtttgaatactgtgtttttaccaaagtggggccattggcactgtttgcttttt

SEQ ID NO: 10815 - DNA, 724 bp, Macaca Fascicularis
  misc_feature (1)...(724): n = A,T,C or G
tgcggagtgtgtgnnnnnnntgaagggttcagnnnnnnnnnnnnnnnnnnnnnnnnnnnnnnnnnnnnnnnnngagcccggcgccgcatgcaggaggcccgggaaagcctcccgcaggacctagtgagcccctctggaaccctggtctcctagctcacagcagccctgggccacagtgcaagaggacaagatgggggatgtttgaggccagtgctctcctgcctcttcgtctgtctgactagagaccacgctggtctgctgggaaccagaagagctgggaaattcccagctggcccctctgcctagccttctgcagggttttctccctaccctggggaaataaagccagagaccctgtggcccccccttcatgtttgcagtcactgtaaatgggcatcacagcaaggcaggctttttggtctgaagctgtttggggtgaccccatagtgagtgtggccttgactcacttttctggcttgtctcacagtagcagggggatgcagnnnnnnnnnnnnnnnnnnnnnnnnnnnnnggagccttccttcttgcaagaccaaagaaggaaggaaggaaggtggacggtgagaggagtcttaaatccccagcctgtgagtctcagcctcctctttccagggcagcctcattctactgcttggggcttgctgaggttgagatatgagttatttctgagtaggtgaaggttgaaggcagtgctgagtccttt

SEQ ID NO: 10816 - DNA, 730 bp, Macaca Fascicularis
  misc_feature (1)...(730): n = A,T,C or G
caaatgtgaagagtgtgggaaaggctttggtaggagcttgnnnnntcgnnnnnnnnnnngggtccacacgggagagaaaccccacatatgtgaggagtgtggtaaggccttcagtctcccctcaaancttcgagtccacttgggtgttcacaccagggaaaaactctttaaatgtgaagagtgtggtaaaggcttcagtcagagtgcacgtcttcaagcccnnnnnnnnnnnnnnnnnggagaaaaaccatacaaatgtgacatatnnnnnnnnnnnnnnnntcaccgttcacgtcttacatatcatcagaaagtccatnnnnnnnnnnnnnnntagaaatgagaagtgtgttaccaacttttgtctgaatgcaccttttcaagtttttggagagtgcatgctggtggtaaaccctataaaagtattgagagtggaagggggtttattcacgtttggaatctttctaacaaatccatcaagatgatgacatagaaccatgaacaggaatagaactcgtatttaggggaaaaatggggcttgtggctctcttggtaagatctagttaatataaatgatcacctttcaatgtgaatatatgcctgaagataatgtgtggaaggatatttgccatatgctaactggttttttggccagggagagttttgagttattattccttttctttaattttcattttatacctacagtgatcattattttcatgaaagc

SEQ ID NO: 10817 - DNA, 677 bp, Macaca Fascicularis
  misc_feature (1)...(677): n = A,T,C or G
agtgcaaaaaataccagcgaactcctgtttaagaaaaatatccttgatttagtaaatgaatttcctgagaagattgcatgcagtttgcatgttacaaaacagactacacaaatcnnnnnnnnnnnnnnnnnnnncatcacggaaggaagaataacggagaaggagataagagatcatatttcaaaagagactttgttctatatttgtggcccacctccaatgacagactttttctccaagcaacnnnnnnnnnnnnnnntatccaaagaacacatttgctttgagaagtggtggtaggaggcagacacagaaaagataaagaggtgagatctactcaggagatctcctgtcctttgtggcatgattaattttttttatctctacttgagttgtcttattttttaaggctgtaaacgtattgaccagctggataaaagccagctggcagacttaaatgataaactttttgcaaagacctcagtgatcaaactgttttttactacacatgattttcttttattaacaacgatttaattgtctcatgatgtaccatgattggtcaatatagatttttcttttgtctttaggcaaaaaaaaaaaaatacatacttatgtctaatcataggaacatgtgattttgagtgtaaaatgtgggctagnnnttaagattatttgac

SEQ ID NO: 10818 - DNA, 790 bp, Macaca Fascicularis
  misc_feature (1)...(790): n = A,T,C or G
gacagannnnnnnnnnnnnnnnngctcaatgatctcnntgtgagggtggctatcctttggaagnntctctcccaaccacccacttcattctctagcaccacaaaaagtaccagcacatccaccagaagtctttctcctgcccagagccagcctgtgggaagtccttcaactttaagaaacacctgaaggagcacatgaagctgcacagtgacacccgggactacatctgtgagttctgcgcccggtctttccgcactagcagcaaccttgtcatccacagacgtatcnnnnnnnnnnnnnnnnncctgcagtgtgagatatgcgggtttacctgccgccagaaggcctccctnnnnnnnnnnnnnnnnnagcatgcagagacggtggctgccttgcgcttcccctgcgaattctgcggcaagcgctttgagaagccagacagtgttgcagcccaccgtagcaaaagtcacccagtcctgctcctggcccctcaagagtcacccagtggttccctagagccctgtcccagcatctctgcccctgggcctctgggatccagcgaggggtccaggcccnnnnnnnnncctcaggctccaatcctgcttcctcagcaatgagctctccagctttggctttggggagccagactccagggactgaaaaggagcaatgaggagagggtctgcttgagaaacaccagatgcttggtccccaggaactaaggcgacagagtgtagggtggggacaagactgggctgtaggagagctggcctagtctcctaaaggacaa

SEQ ID NO: 10819 - DNA, 696 bp, Macaca Fascicularis
ttcatgatcgaccgctacctgcagcggcacgtgaagctcatccacacagaggtgcggaactacatctgtgacgagtgcggacagaccttcaagcagcggaagcaccttctcgtccaccagatgcgacattcaggagccaagcctttgcagtgtgaggtctgtgggttccagtgcaggcagcgggcgtccctcaagtaccacatgaccaaacacaaggctgagactgagctggactttgcctgtgaccagtgtggccggcggttcgagaaggcccacaacctcaacgtacacatgtccatggtgcacccgctgacacagacccaggacaaggccctgcccctggaggcagagccaccacccgggccaccgagcccctctgtgaccacagaggaccaggcggtgaagccagaacccacctgaggacggcagtggggatgagcacctctagcagcctggactctgcaacggccgtgtcagcctcacccttcgtgcgcacctgcatgggagggttggggggtgctgcccgccctcggtgtacagctcaagtagcctccgtctgctctgggaccagtggtttattttcctacaaacactgagtgacttggggccagacagtttataaacaattgattccttttccccactaaagcaatcgaggagatttgtaatccactttttagtgcaacaagagctccg

SEQ ID NO: 10820 - DNA, 774 bp, Macaca Fascicularis
  misc_feature (1)...(774): n = A,T,C or G
gcatttatatgtaattttttagttaaaatgaagtatatgaaatgtttgcctttagcaccattttannnggtttgtcctactaaaatgactcgagaagtgtttagacaaactccccttaagatgtgcactccatctttaagaacgtattagccctaactttgaggttctttatagtcagagactatgacaccactaaggttcagaataaattttaggccacataaaattgctgtttaatgtagtcaatggaagactttaaaccatgcttctagcttatttttccctcattcattcagcaaatctctgttgggttcttcagtgagaannnnnnnnnnnnnnnnnnnnnnnnnnnnnnnnnnnnnnnnnnnnnnnnnnnnnnnnnnnnnnnnnnnnnnnnnnnnnnnnnnnnnnnnnnnnnnnnnnnnnnnnnnnnnnnnnnnnnnnttgactctccaacagtccannnnnnnnnnnnnnncctctttcagcacatttcagcctcgggactgttcacattagtggcctgagaggtgtttgccgtggggccaccccnnnnnnnnnnnnnnnnnnagcaacattcctgccatccatacccactagatgccnnnnnnnnnnnnnnnnnnnnnnnnnnnnnnnntccagacatagtcagatgtctcctggggccatatcaccctccattaagaaccactgatctcttttacaaaccaggagttatgctcctggtggttaatatggtgtaaccaaagaatcttgcactcaatgcacagtgtg

SEQ ID NO: 10821 - DNA, 777 bp, Macaca Fascicularis
  misc_feature (1)...(777): n = A,T,C or G
cagcatacgccagacgtgcgcgcnnnnnnnnnnnnnnnnnnngaagtgcggaggaaggcgtacgaggccngnnnnnnnnnnnnnnnnnnnnnnnnnnnnnnnnnnnnnnnnnnnnnnnnnnnnnnnnnnnnnnnnnnnnnnnnnnaggagaaccggcgnnnnnnnnnnnnnnnnnnnnnnnnnnnnnnnnaggaggaacggnnnnnnnnnnnnnnnnnnnnnnnnnnnnnnnnnnnnnnnnnnnnnnnnnnnnnnnnnnnnnnnnnnnnnnaggaacgggannnnnnnnnnnnnnaggaagaggtgaaaaatttcatcacccgagagaacctggaggcacgggtggaagcagcattggactccccnnnnnnnnnnnnnnnnnccatcaccagagaggggctggtggtcaggtcacaacgcagggactcctaggggcccagtaaagacagtgcccgccaagggaccatgttggtattgtggtggaagagttggccctgacctggaataaagcagttggtgctgcttatgaggacggttcagccttatccagcacagccttcacgttttgccctctgctgtcaacacttggtcagaaacttccaaacacagtgtcctgttctgcccctgtgtagagcctcagcacaccaggagaccctagagtggcttccatctcannnnnnnnnnnnnnnnnnnnnnnnnnnnnnnnnnnnnnnnnnnnnnnnngtatcatcaagagtagtgatgggcaaattacagtctgagggccaaacgtgcctg

SEQ ID NO: 10822 - DNA, 738 bp, Macaca Fascicularis
  misc_feature (1)...(738): n = A,T,C or G
tgactttgcccccatggtgccacagctgtgtgagannnnnnnnnnnnnnnnnnnnnnnntcccccaggcctctgctcttgacctcactcgacagctggtccacatctttgctcatgagcctgcccactttcccccaattgaggccctcttcctgctcgtcacctccgtcacactcactctcttccagcaaggctctgaagcggaagccagatttgttcctgtgtgaacgatnnnnnnnnnnngctgtgttccagtgtgctgtgctggccctcaagttccctgaggcacctactgtcaaggcctcctgtggcttctttacagagctgctgcctcggtgtggggaagtagagtctgtgggaaaggtggtacaggaagannnnnnnnnnnnnnnnnnnnnnnnnnnngaggccattgggggccaggcctcccgcagcctcatggactgctnnnnnnnnnnnnnnnnnnnnnnnnnnnnnnactgcttcagcctccnnnnnnnnnnnnnnaaggaggccctgcagccacctggttttccctctgcccgcctcagccctgaacagaaggataccnnnnnnnnnnnnnnnnnncgcgagcgagtgaacaagaggcgggtgaaggagannnnnnnnnnnnnnnnnnnnnnnnnnnnnnnnnnnnnnnnnnnnnnnnnnnnnnnnnnntactgaggggtgcccccatcccacccaccccttctcttnnnccttcccnnccccaaag

SEQ ID NO: 10823 - DNA, 749 bp, Macaca Fascicularis
  misc_feature (1)...(749): n = A,T,C or G
tacaatcaagagggaaaaaaattacacaannncaggcaagctaccnnnnnntttgttacatctgcttcctctctcaccaccccctctccctctcttccccagcaagatgtnnnnnnnnnnnnnnnnattctgactgcaataggcaccagtgcccgacacgtacagccctgccatcatccccttctcattttataaacttcaaagtggattcactttctgatatttaacccccataaatgtgcacgtacctgtgtcttatctgtattttaacctgggagactgttgtcctggcatggagatgaccatgatgctggggttacctcacagtccccaccttttcaaagttgacatatggccataccattggctggaatccacagacacacctaagcctgtggcactgggacagaatagattttccatttgagaggnnnnnnnnnnnnnnnncttgtttgaaggaggtggtggtggtggggagaggtgaaggaggtagggagtgccctccaagtacaaaaatgacaaatatgattatttaccatctgggaattctcacacattgatttgttttttaagcagttgccagaaacccccttttttagcttttgcttggggtggggatagaagataaggtttattcaatcctgtccnnnnnnnnnnnnnngtgaatctagccatgtgatttttcagaaaagtaagtggaacatgctgcctcttttcaattctgtcagtgcttccacatgaaacaaaag

SEQ ID NO: 10824 - DNA, 621 bp, Macaca Fascicularis
  misc_feature (1)...(621): n = A,T,C or G
aaagctaaaacttggaagacgggnnngcatctgctaatgaagacaggaaatgacccccctccagcctagtgtgaannngcccctcgtcccacatatagaaaatctcgagtcacggtgaatgagggtgtnnnagatgctcttgtgtgtgtacacacgcgtgtgtgtgtgtgtgcgtggtgtgtgtgcgcgtgtgtgtgtgcggtgtgtgtgcacgtgtgtgcactttgcaaagggtggacacttcagtgtatcccccagaaaggtgatgaatgaatagaactgagagtcacactgagtgtggcgtgcacatatgtgtcacgtgacatatgtgagtctcagcacgtcacggtgggtggctgtgtctgaggacctccaggtgtcactctgagtgtgggtgttggtgacacgcatagcacgggcccgtctccccgtttgtgtaaacgtacccgagtgtactgtggcgtgttttgtgtctacacacgtcacggtgggggagatgtatctctgcacacgtgggtgtcaccgtgtgtgccccgtcactgtgcctgggtgaacggctgtgtcattataagtgtgccaannnnnnnnnnnnnnngtgctcacggcacacgcacacagaca

SEQ ID NO: 10825 - DNA, 652 bp, Macaca Fascicularis
cggggagtatgccgcatgccagtcacacgctttcatgaagggcgttttcaccttcgtcacaggcaccggcgtggcctttggcttgcagatgttcattcagaggaagtttccataccctttgcagtggagcctactagtggccgtggttgcaggctctgtggccagctatggggtgacgagagtggagtcgaagaaatgcagcaacctgtggctcttcctggagaccgggcagctccccaaagacatgagcacagatcggcgaagccaggagagttccagccggggcacagaggattgggggcagtaggagtctggaacacagccttcatgccccccgaccccaggctgaccctccccacaccctagggtaccccggtcatatcctctatccgcatgcatggccaggcctgataaacctctgcagacagccgctgccccagcctgggacctgcccagaaagttggagcagaaggggctctcctctagctggtggttctcctctagggtatcgggacggatggtctgcactgccagcagagagggtgtgtctgggggccaccacctagggggcacggggtagaaggggcttgtgcactctgtcattccctttctagcccctgcacctccgacaagtccaaggtgctaggacttg

SEQ ID NO: 10826 - DNA, 674 bp, Macaca Fascicularis
  misc_feature (1)...(674): n = A,T,C or G
ccgtcactcacgccaacgcgctcactgtcatgagcaaggctgtggcacctggggacaagcccaagattcaggaggtcaaggaacagcgggtgacagggctgctggttgccctgcttgtgggcctctccatagttannnnnnnnnnnnnnnggcagatccccctggctgtgctctttggaattttcctgtacatgggagtcacctcccttaatgggatccagttctatgaacggctgcatctgctgctcatgccacccaaacaccacccagatgtcacttacgtcaagaaggtccggaccctccgtatgcacctgtttacggccctgcagctgctctgcctggccctgctctgggctgtcatgtccacagctgcctccctggccttccccttcatcctcatcctcacagtgccgctccgcatggtggtgctcacccgcatcttcaccgagcgagagatgaaatgtttggatgctaacgaggcagagccggtgtttgatgagcgggagggtgtggacgagtacaatgagatgcccatgcctgtgtagccgccgccgagggaccgatggacgaggggacaggctggtgggatggggtcccccctcccatgccccaccctcctttttatttaagtgaataatttaatgtcccctcctcccccactgcccctgcagtaa

SEQ ID NO: 10827 - DNA, 770 bp, Macaca Fascicularis
  misc_feature (1)...(770): n = A,T,C or G
tgccctggcagaggccatggacacaggaatgggactggccatgggaatggtacccaccatggccctgaatatatgcgctgtagccnnnatctagtcttgnnnnnnnnnnnnnnngacaaccatggtgccacctatgccttcagtgggacccactactggcgtctggacaccagccgggannnnnnnnnnnnnnnnnccattgctcatcagtggccccagggtccttcaacagtggatgctgccttttcctgggaagaaaaactctatctggtccagggcactcaggtatatgtcttcctgacaaagggaggctataccctagtaagcggttatccaaagcggctggagaaggaagtcgggagtcctcatgggattatcctggactctgtggatgcggcctttgtctgccctgggtcttctcggctccatatcatggcaggacggcggctgtggtggctggacctgaagtcaggagctcaagccacatggacagagcttccttggccccatgagaaggtggacggagccttgtgtgtggaaaagtcccttggccctaactcatgttctgccaatggtcccggcttgtacctcatccatggtcccaatttgtactgctacagtgatgtggagaaactgaatgcagccaaatcccctccgcagccccagaaagtgannnnnnnnctgggctgcacttactgaggggccttctgacatgaatctggcctggcgtcacctccccagtcctcataataaagacagatcctcttcgc

SEQ ID NO: 10828 - DNA, 708 bp, Macaca Fascicularis
  misc_feature (1)...(708): n = A,T,C or G
ccacccactgagcaatggtatgcagaaaaataagatacaaagcatgctgttcaggaaactgtgaggtaaaggatgcctgcagcagagagcagcaaggttctcaaatgtnnnnnnnnnnnnnnnnnnnnnnnnnnnnnnnnnnnnnttgaagactgctggaagtctaaactggaaaaaaatttccttgaaacaggctctgaaatgccaagaccctaagcctacctttgccctgtcccctgctacttgggaagctcttgtacgaaccagcttagaaataaatgctgcatttaagagacttccgaagcaagctcctgttccttgacgttggtgtcagaatcaagctcactcttctaggcccttggaacctgggcataaagcattcagagacgaatgaatgcaacgtgtcttttctgatggtctctccttcaaagctctcagataagtcaccatcaaacatctgaggaggaaggaggtggaggtgacagttcatcatgcgtctgtggcttacacacaagaaaccatcagttctccctcttctttatttccttctcgacggtggtttctgactccttctgcaagatcacacccagacatccccaacgcannnnnnnnnnnnnnngaccagggatgagaaaatgaactaagactgccaaaacctaacacnnnnnnnnnnnnnnnctttcaccacgccccccggcccccgaaccc

SEQ ID NO: 10829 - DNA, 857 bp, Macaca Fascicularis
  misc_feature (1)...(857): n = A,T,C or G
gctcagagagccgcagaaaaagaaggtgtatgttgggggtttagagagcagggtcttgaaatacacagcccagaatatggagcttcagaacaaagtacagcttctggaggaacagaatttgtcccttctacatcaactgaggaaactccaggccatggtgattgagatatcaaacaaaacgagcagtagcagcacctgcatcttggtcctactagtctccttctgcctcctccttgtacctgctatgtactcctctgacacaagggggagcctgccagctgagcatggagtgttgtcccgccagcttcgtgccctccccagtgagaacccttaccagctggagttgcctgccctgcagtcagaggtgccaaaagactgcacacaccagtggctggacagctcagaccacgtactccaggcccctggcaactcttcctgcctactgtactacatgcctcaggctcccagtgcagagcctcccctggagtggccattccctgacctcttctcagagcctctctgccgaggtcccatcctcccccnnnnnnnnnnnnnnacaaggaaggggggatggcttcctaccggtagcccctctgtnnnnnnnnnnnnnnnnnnnnnnnnnnnnnnntgaggatatgtggggcgggtctcagcaagagcttgtggggctccccatctgtgtccaaataaaaaggggtgggcgagggctggctgcagctcctatgccctatcacgaggactgagggctcaaacacaccacacttactggctttctgggtcttttatttgtacccatgtgtctcaccccatgaatgtacctggggaaatcaactgacctccctgaacatttcatgcag

SEQ ID NO: 10830 - DNA, 771 bp, Macaca Fascicularis
  misc_feature (1)...(771): n = A,T,C or G
gcagctggctcgggctgatgactatgagcaggtcaagaacgtggccgattactacccggagtacaagctgctcttcgagggtgcaggtagcaaccctggagacaagacgctggaggaccgattctttgagcatgaggtaaagctgaacaagttggccttcctnnnnnnnnnnnnnnntggtgtcttctatgcctttgtgaagctcaaggagnnnnnnnnnnnnnnnnnngtgtggatcgctgaatgtatcgcccagcgccaccgcgccaaaatcgacaactacatccctatcttctagcgtcctggcccgaggctctcaattgcactgtgtgtgtgtgtgtgtgtgtgtgtgtgtgtgtgcgcgtgtgtgtgtgtgtggtctgtgacaagcctgtggctcacctgcctgcccggggtgtagtacactgtcctagcggctgcccagttctcctgaccctcttagagactgttcttaggcctgaaaaggggctgggcacccctcaccaaggatggaccaagaccccctccagagcaaggaggccccctcagccctgtgtttacagccgctgatgtgtctaagaagcatgtggtcactttcatgttcctccctaactccctaacctgagaaccctgggggctgggggcagttcgagcctcctctcccttctgtgagtcactcccagagccgtggcccatgggaaggatagagtgtgtgtccttggggcctggggggatgttgcttgtcagctccctccctcagccctgcccctc

SEQ ID NO: 10831 - DNA, 769 bp, Macaca Fascicularis
  misc_feature (1)...(769): n = A,T,C or G
ctttgaaaaaccaacatagcatcattatcaggaatattacagtaatgaggatttttctttcttttttnnacacacatatgcaaccaactaaacagttataaccttggcactgttaatagagagttgggatagtctttgctgtttgcagtgaaatgctttttgtccatgtgccattttaactgatatgnnnnnnnnnnnnnnnnnnnnnnnnnnnnnagtatgagatacagaacttggtgacccatgtattgcataagctaaagcaacacagacactcctaggcaaagtttttgtttgtgaatagtacttgcaaaacttgtaaattagcagatgacttttttccattgttttctccagagagaatgtgctatatttttgtatatacaataatatttgcaactgtgaaaaacaagttgtgctatactacatggcacagtcacaaaatattatactaatatgttgtacattcggaagaatgtgaatcaatcagtatgtttttagattgtattttgccttacnnnnnnnnnnnnnnntaagactctgatttccctttggacttcatgtatattgtacagttacagtaaaattcaacctttattttctaattttttcaacatattgtttagtgtaaagaatatttatttgaagttttattattttataaaaaagaatatttattttaagaggcatcttacaaattttgccccttttatgaggatgtgatagttgctgcaaatgaggggttacagatgcatatgtccaatataaa

SEQ ID NO: 10832 - DNA, 677 bp, Macaca Fascicularis
cgaccaggccccagccagcaacttctaccgagagccatggctcagcaccaaactggacagtagacatcatgatccctccagttagctctaaaattacagaccccaccagtagagcttgacagctcccggcaccatcacttccttcatctgactttattgaacttttacaaactaacagtcaccagcaccaaagaattaagtcaactaacctgccttgaattttagaccagcaatccatatggctttatctggtataaatcttctgcctttgatcatttctggaccgtaggaaaaaggaatagcaatcattaaaatcttgggccagagaacactatttttacataacagtttcttaacctaaagtcaaggccttggactcttccctgagggttgcctgcgattccttcatgctttctattcagggctaagtcccttactgcaaatgtgttagctctaacatctcccacaagctagaggaacttgcgagtatattaacaaggacacatctgacatcctgtatttggttagaatatacagcacattgtgataacaaagtggattcatcttgtatcattataggcagaaggtatttggcaaatttttatgtattgttttatgtactgtacaagtaacttattcttgaataatgcaaattttgctataatgtacaaattgct

SEQ ID NO: 10833 - DNA, 503 bp, Macaca Fascicularis
aggtgggaggatgacttaagcgcgcaggatagaggttgcagtagaggagagtgttccattgcactccagcgtggatgacagagcacgatctcgtctcttaataataataatcttcttgtatatttttatacactaggaatttacacatgaaacccgatattaaaaataaaatattatgtatgattgctccattaaaaaaaaggtcaaagaaatacatgtctaacattcttagatatgttatgttacaaataccaaatgttgatgaaagaagtcaaagacagcacatagagacatataccctatacatttatttgaagactccatataaaacaatatgaaattacacaaacccgacacatagggttaatagctttcttaattaaggcattttgcagatactaacaaggttagcacttatgtagaaagacaaaaccaaacacttaaaatagctaaaacaacaacaacaaaagactggagtcccctcacgcgatttcaagtctttt

SEQ ID NO: 10834 - DNA, 668 bp, Macaca Fascicularis
ataaaaatttacatttaatcttcgaattatgttatttttgttagtagtgccgaaacctagagaacgtattgtatggtgccttgcaaaaatagaaatagaaagattttagcatgcataccaatatagtatattacgcaatatataagcacacctaattaacaaattaataacagtaaaggtactgctgctggaatgaagaaaacgggatatgtttcttccttttttctattgttacataattgccatgtggacttgtttatgattattgtgtagagtagcatttaagatttaactgtagcaaaaattactttaaccgctgtgtttaagttagcatgttaattaattgtgtagacattttggcacaccatcacttttaactatatcagaccaagggttttgtgcccataataaaaatggaaaatcctgttgaatgttacatattggtatctttaatttcaacagtgggtaaactggtttcccagtatacaattcattgaaagcaaaattgatgaattatttcaatttaatttatacacactcaatacaaactttaatgttgactttatgtaatatttaaagtataatgcattttcttttttactgtttatgtatagtttacaaaataaagaatcttataaccaaaaaaaaaaaaaaaaaaaaaaaaaagg

SEQ ID NO: 10835 - DNA, 709 bp, Macaca Fascicularis
  misc_feature (1)...(709): n = A,T,C or G
ggcgctgtgagtggggtgggcgcgtccgnnnnnnnnnnnnnnnnnnnnnnncgaccccgggnnnnnnnnnnnnnnnnnntgtctttgacatgtagcttttttttaaagacttttgaatgtttaataattttgtaaatcatcctctttacacagagtaccacttatttaataagacgggatgtaaatttacaatgacaaatgtgtattttaagaaagaaaaggacattattttgaatggtactttgtggaaaggggagaataannnnnnnnnnnnnnnnnnnnnnnnnnnnnnnnnaaaacgcccgctgcccgcgcccgccgtcccgcccgcctccaccccgcaggtgtgccnnnnnnnnnnnnnnntattgtagaaagtgtattcatttgctttataatgaaaaatacannnnnnnnnntatattgatatgcatttttatacaggcacataaaaattcaactcggcttgggagcagaatgcattgcgttgtataaatgactctggcctgtgtgtactttgattttataacttgtaannnnnnnnnnnnnnnnnnnnnnnnnnnnnnnnnnnnnnnnatttagaacactttggtagcaatagaaactttggatacatttttgtatggtacatgtgatgtatatagaattagtactttatttttatttttaagaggtaaagcattatgttggggaaagtagggtgggtttc

SEQ ID NO: 10836 - DNA, 758 bp, Macaca Fascicularis
  misc_feature (1)...(758): n = A,T,C or G
gacatcactgctgannnnnnnncacatgtgccgagaccctcatgtnnnnagcgtgccttgctgcccccctgcagcaccgtgcaggacgtggaccagctggagctgtttcccaggggagaggagagtcgccgcagatgacccagctgcggnnnnnnnnnnnngagcccagacgcgcannnnngttggctnntgagaacaggactcgccctgtgcttcaggaacgtctgatggctgaggttcgtgagcttggcggctgcaggaccannnnnnnnnnnttctcannnnnnnnnnnnnnngggggcagcagggacaggactggaagggacctgcagcctggagaccccgcctggccccctctggcttctggtggtccagtgatgggcaagtcacagaccttccccaggctctgcttccagaacccttaacgggaaactgggcctgtctacctttagaagtcttcgattctcagagagcatttgtttaatacaataaaaactagctttaataaaaacctcnnnnnnnnnnnnnnnnnnnnnnnnnnnnnnnnnnnnnnnnnnnnnnnttgttctgttcagaaaagtttatagaattcagataattctgtataaattatggagatcnnnnnnnnnnnnnnnnntttgagatttaaagttttaannnnnnnnnnnnnnnnnnnnnnnnnnnnntggacaaaggcttttccggaaattgtttttttcttctgttgtatacatttgagtcctgcacgctgtgaaatg

SEQ ID NO: 10837 - DNA, 591 bp, Macaca Fascicularis
  misc_feature (1)...(591): n = A,T,C or G
tcagacggtggctggtgcctttggctacttccagcaggataccaagggtttggtggacttccgagannnnnnnnnnnnnnnnnnnnnnntggatgggggcaggaacctggaagagctgactcgtctggcctttgagctctttgctgaagagcaagcagaggggccccannnnnnnnnnnnnnnngccggcttcagcaccatcctgcacctgctgctgggttcgccccgccctgccgccgcagctttgcatgctgagctgtgccaggcaggacccagccgaggcctgtccctgtgtcagttccagaaattctccctccatgacccactatatgggaagctcttcagcacctacctgcgccccccacacacctctcgaggcacctcccagacaccaaatgcctcatccccaggcagccccactgctatggccaacgggactgtgcaagcacccaagcagaagggagaatgagcgcctcagcctctcgcccctcctcctcagggcagtgccaggggcctcccatgtgcctcagccccaccccctccnnnnnnnnnnnnnnncaggggtctcccctacgctcagcccctctctgc

SEQ ID NO: 10838 - DNA, 1058 bp, Macaca Fascicularis
  misc_feature (1)...(1058): n = A,T,C or G
gtaattgtaaatgcnnntaatcaaacatgaaaaagttctcatgattatgccagctacaatagtaatcctcactaagtgataaaaatagtttatgaattgaaaatttgccactacatgttttatgatcaaatagttcatcaaaatgaatctttgctctttggaatgaattattaccatactgccattaaaataaatttgccaactagtaatgcatactggaaatcaaaagatattgaaagaatggtgaacttctcttagtggtattgtcatgctaaaagatgttaatatacatcataaaagcaaagtcagccagctgatattttggttctcaaaaactgcattattaataatattttagtatatagagatattctgcaatttttacattgtaaacatgactatggttttgtatttgctaaatataggggttggactaaaatataataaatctgtaccttatcaaacattttctttgagctcctgctaaaaataggacatgtctatgattgttcagaaatatgttaaatttannnnnnnnnnnnnnnntcacacctgannnnnnnnnnnnnnnnnnnnnnnnnnnnnnnnnnnnnnnnnnnnnnnnnnnnnnnnnnnnnnnnnnnnnnnnnnnnnnnnnnnnnnnnnnnnnnnnnnnnnnnnnnnnnnnnnnnnnnnnnnnnnnnnnnnnnnttaaacccagnnnnnnnnnnnnnnnnnnnnnnnnnnnnnnnnnaaccaggagannnnnnnnnnnnnnnnnnnnnnnnnnnnnnntgcacaccagtntgggtgacagagcaagactaaatctcaaaaaaaaaagaaaaagaaaaagaaatatgttaaatttaaggactgttaacctactttgtactagtaaaaacaacattaagagtcattaaattttatttctgaattaatgaacgtatctggacacattctttgttcctaggttcannnnnnnnnnnnnnnaactcctgagtgttttcatttaattgatttagaggtagaatggaagagaatctatggtacctaccattatacacatttagttgccc

SEQ ID NO: 10839 - DNA, 622 bp, Macaca Fascicularis
  misc_feature (1)...(622): n = A,T,C or G
tccnntcgtcannnnngnnngaaaaaatgctgggcatcttggtgcagcacagagtccggagtggcgtctcaggcgtcgtgggcatggaggtggatgggctgcccttccacaacacccacgccgagatgatccagaagctggtggacgtcaccagggcgcaggtgtaaccgtccatgttccgtgtgagcagggtccctnnnnnnnggcagttctgcatccggggagaatgcagctgcttctggccacaatcctgctagtaaacactggtcttcggtaagcaatgaacgctnnnnnnnnnnnnnnnnnnnnnnncccactttctgggaggggttagtgcaagtgccatggacaaaggacaacatttctctggggcttgccacaggacagtgcctaagactctcaaggcattgatttcaaccctccttcacgctggcttcttcaggccacccccgtggtctcctgcgagaatcttctcgacaattacttctggggacacttgtgagcaattaactgtcaggcagagcatgagaacaaatattcccaggccatgtaggatactccagactccagtcatcctccctcatnnnnnnnnnnnnnnnnnngtggtcttggttacttatgg

SEQ ID NO: 10840 - DNA, 686 bp, Macaca Fascicularis
  misc_feature (1)...(686): n = A,T,C or G
aannagctttggatttaatattcagtaaagtctgtnnntagtttcatgtacttttggtgtgttgcatagccatgtttccattagtttacttttaaatctcaaatttaagttattatgcaacttcaagcattattttccagtagtatatccctgtgattttacaatgtttcatcttttttttttttcagcattaataacaactaggtttaaggtaattagtatattttctaaatgatagtgttaagattttaattctttccaactgcccaaggaattaattactattatatctcatcacaaaaatctgaagttttgattcatttcagagcttgcatcccatgattctaatcgcttctgtctatagtgtacttgctctatttaaggcatatctacatttccaaactcattctaacattctatatattcgtgtttgaaaaccgtgtcatttatttctaaatcatgtatttaaaaagaaatatttctctactactatgctcatgacaaaatgaaacaaagcatattgtgagtaatattgaacatcaataatacccttagtttatatacttattattttatgtttaagcatgctactttcacttggccaatattttcttatgttaacttttgctgatgtataaaacagactatgccttgtaattgaaataaaattacaatctgcatgaaaa

SEQ ID NO: 10841 - DNA, 726 bp, Macaca Fascicularis
  misc_feature (1)...(726): n = A,T,C or G
actagtttcttaggctgccaaaacaaagtactannnnnnnnnnnnnnnnnnnnnnnnactctctcacaggtctggaggctagaaggttgaaatcaaggtattagcagagccatgtttcctatgaaggcgaagtcccttcatacaatnnnnnnnnnnctgaaaatttgcattgcaaaatcatgaagatactgtaacttcaattgtgctaacgattacatgagaaggaaaagaggctgggaagcacatatgcaaaaggtcgtcattggttaaggaggcctacacgccaccacnnnnnnnnnnnnnnnnnnnnnnnnnnnnnnnnnnnnnnnnnnnnnnnnnnnnncgagtactcaacaccaacatcgatgggtggcggaaannnnnnnnnnnnnnnnnnnnnnnnnnnnnnnnnnnnnnnnnnnnnnnnnnnnnnntgttgaggaaagcagacattgacctcacnnnnnnnnnnnnnnnnnnnnnnnnggatgaggtggaacgtnnnnnnnnnnnnnnnnnnnnnnnncgccagtataagatcccagactggttcttgaacagacagaaggatgtaaaggatggaaaatatagccaggtcctnnnnnnnnnnnnnnncaacaagctccgtgaagacctggagcgactgaagaagattcgggcccatagagggctgcgccacttctggggccttcgtgtccgaggccagcacgccaagaccactggccg

SEQ ID NO: 10842 - DNA, 1050 bp, Macaca Fascicularis
  misc_feature (1)...(1050): n = A,T,C or G
acaaagcagactgnnnntggtgtttggagagagatgtggatatacaagaatttnntctagaaaaggctcgtttggaagtgcaccgctttgggatcactggttatggaaaaggaaaggagagaatcctggaacaggaacgtgccattatgttgggcgctaagcctcctaagaagagttatgtgaattacaagnnnnnnnnnnagcaaattaaagaaaaaaaggcagcaaaggaagaagaaaagagactggcccaagaaacagatattttcaagaaaaagaagaggaaaggacaggaggacaggaaatccaaaaagaagaagtccgctcccagtattttgtcaaatggacggattggacaggttggaaaattcaaaaatggaacgctgattctgagcccagttgatatcaagaaaataaattcttccagagtggccaaatgaagtactttatcagataaaacaaggatgggaacaactgagtcaactgcagtggccnnnnnnnnnnnnnnnnnnnnnnnnnnnnnnnnnnnnnnnnnnnnnnnnagactgctttttcattttagaaaaaaagtcagacagaagtaacatctctagctgccgaagtgtctgcttcatggtgctgaacgcgttaggcccagtgcagcatgaatatgaagtgaactcactgaaaactgtttttnnnnnnnnnnnnnnnnnnnnnnnnnctgtttcatgttcactggtatttggtgcatttgcctggaatacaattttttataactttactgttttgtaaatgctagtagtttacattaaattgccttataatatttttaatgatttaatgttacgataccgtgaaagaaccaagaatctgataatttatcagttttgtggaaaagcagttttaatttttagcctaccatgtgtataaaatctacttgggaagaagttacataagtaaaatatgtttgtagtatatgtgcctgtgactgttaaataatggatggttttaacacacagttttgtgcccacgttcaagtgaatgttatttctatcagagtcttcatca

SEQ ID NO: 10843 - DNA, 736 bp, Macaca Fascicularis
  misc_feature (1)...(736): n = A,T,C or G
cgttgaggagtgctgttnnnncannngtganntggcnnncctggagacgtactgtnctacccccgccaagtccgagagggacgtgtcgacccnnccgaccgtgcttccggacaacttccccagataccccgtgggcaagttcttccgatatgacacctggaagcagtccacccagcgtctgcgcaggggcctgcctgccctcctgcgtgcccgccggggtcgcatgctcgccaaggagctcgaggcattcagggaggccaagcgtcaccgtcccctgattgctctgcccacccaagaccccacccacgggggcnnnnnnnnnnnnnnnnnnnnnnnnnnnnnnnnnnnnnnnctgccgcaagtctgcagccggcaccaccaccctccagcctcctcctgaccagnnnnnnnnnnnnnnnnnnnnnnnnnnnaaatctcttggttccacttcccccccggggcttctcctgaccccagcccccgtgccccgcctccccgaaacaggctactctcctcggccccctccatcgggctgaggtccacagcaacatcttcaaacatgtacaaaatcgattggctttaaacaccctccctccaaattatccccaattatccccacacataaaaaatcaaaactttaaactaacccccttcccccccaccacaacaaccctcttaaaaataattggctttttagaaacaccagaaaaactcagaaannngcttaaaaaaacaa

SEQ ID NO: 10844 - DNA, 712 bp, Macaca Fascicularis
  misc_feature (1)...(712): n = A,T,C or G
atccatggctaccnnnnngcgctggagctgtgcagaagcgacgggagcacccnnnnnnnnnnnnnnngtatgctcttgannnnnnnnnnnnnnnnnnncaacacaaggcaannnnnnnnnnnnnnnnnaagaaagtcaatcagtagaagtacacactaacagagagggacaacaggcaacggaggaccgtggctgaggaccctcttctttgtttatacagaggcttgtttctgccacgaaggcacatcatctaccctgttatttgtgcctggtcatgtttcccnnnnnnnnnnnnnnnggaaaagnnnnnnnnnnnnnnnnnnnnnnnnnnnnnnnnnagagtccgttattatacaaccaaatacaacnnnnnnnnnnnnnnnnnngagacggcagatggatgatgcacgactccctgaaaatctnnnnnnnnnnnnnnnntttgatgcacaaaaaggattctacgatttaagcagctcaatgtttggtgcagggatattgtatgttgatttaaagtgcatatatacgtgtgtgtgtgtgtgtgtgtgtgtttcctggggtaaaaatttctgcagttgtaaatttttaacattgctcccagtctttttccacggggccttagttctttagccannnnnnnnnnnnnnnntgacctcagtgaacctaaacatagaatggaagaggtgtataaatctcattaaattaaataagt

SEQ ID NO: 10845 - DNA, 770 bp, Macaca Fascicularis
  misc_feature (1)...(770): n = A,T,C or G
accacggcaccaannncannngtcaggtgaaagttccctggagctggcgtgaccacggagagannnnnnnnnnnnnnnnnnnnntatgcttcacagaacccaagaactgatatcttcctaggagatggctcagggaaacaaggagtggttcagnnnnnnnnnnnnnnnnnnnnnnncacagtcctgctcgctctttgtctctgcctcatcttcttcacagtgaagactcacaggaggaaagcagccaggacagcagtgggcaggatcgacacccaccccgccacagggccaacatcctcgaaacaccagaagaagtccaagttacatggcgccactgaaacctcaggctgttcaggtaccacccttactgtggagatggatgaggagctgcactacgcttccctcaactttcatgnnnnnnnnnnnnnnnnnnncacctccaccgaatactcagaggtcaggacccagtgaggaacccacaaaagcatcgggctcacgtagaagattcacatcctcnnnnnnnnnnnnnnnaaaggcggattcttggagatttaacaccccacaggcaatgggtttatagacattatgtgagtttcctgctatattgacatcatcttagactttgtaagcagannnnnnnnnnnnnaaatctgtgctctttcttttgctaagtgtatgatgtcacacaagctccttaaccttccatgtctccatttacttctctgtgaaataggtacaagaagtcctatctcacagggatgctgtgagca

SEQ ID NO: 10846 - DNA, 696 bp, Macaca Fascicularis
  misc_feature (1)...(696): n = A,T,C or G
agcccnnnnnnnnnnnnnnnnncccgcagcgggaagggccgactgtgnncggctctgtccttccactgcacagccacgtggagacagaatgacagcctgcccccaccgcaggtgccctctgccctcctgaccttctcgtgggacatggctgtgctggaggacatcaaggctgcgggggtcgagccggacgccatcctgaaacctgagctcctgtcagccatcgagaagctctcttgaaataaaagcagggttggcctcagccctgtgggtgtgtctcatgctctccctgttccttcccccaccaccccagggcctccaagccacctctggnnnnnnnnnnnnnnnncccatgggcacgggaggggcgccagctagctgtggagctgtggaactgggccccgtggcagagcccccatctcctgggggctgtggagatgcgcccaagcccccgagggagaggcatggggatgccatcaaatataagccttccccagctgctggtaactgtgtcatgaagcagccaggcagacacacgtggcatctccctgggcaggagagcaggcatgcagcacgggtcccgttcccttgtgctgtgggcggcagcggctgcgnnnnnnnnnnnnnnnnnnnnnnnnnngtgggtgacgacggcaggaggggacgctggccttcccgcacacagacctgcagttagta

SEQ ID NO: 10847 - DNA, 877 bp, Macaca Fascicularis
  misc_feature (1)...(877): n = A,T,C or G
tgcaggnnnnnnnnnnnnnnnncgtcatnnncgacctctcactggagagagaacggctgttgcgctccaaaaggcatcgagggaaaagtctgaaaccgcccnnnaagcatgttgtggagacattttttggatttgatgaggagtctgtggactcagaaacattgtccgaaacatcctacaacacagacaggacggacaggactccagccacgcctgaagaagacttggacgataccacagcccgcgaggaggctgannnnnnnnnnnnnnnnnngacccgggagtaccaggccctgcaacgtgcctatgccctgctccaggagcaggtggggggcaccctggatgctgagagggaggcccggactcgggagcagctacaagctgatctgctgaggtgtcaggccaaaattgaagatttggagaagttactggttgagaagggacaggattccaagtgggttgaagagaagcagctgctcatcagaacaaaccaagacttgctggaaaagatttacagactggaaatggaagagaaccagctgaagaacgaaatgcaagacgccaaggatcagaacgagctgttagaattcagagtgctagaactcgaagtaagagactctatctgttgtaagctctcaaacggagcagacattctctttgaacccaaactgaaattcatgtaaagctcccagacgttttcaagcatgggaaaggggacatgttctagtttctttctttcttctttctttcttttttttaaatctgtatgttcannnnnnnnnnnnnnnnnnaatgtgttctggagagagtgcccacccaagtctatggacatgtaccagagctaatatatttattgcctatggcnnnngttttgcac

SEQ ID NO: 10848 - DNA, 687 bp, Macaca Fascicularis
gcattctttctctccggagtttacatcacttgttagtttacaccccactgttttcacccatctccttagccaacatctgtgtttttgaattttctgagaatattgtcctgtcttcttttatatatggagttctatcttctttatatcttgagactttgacaccagatgtagatatttatctggagctggaaagaaaaattctttttctgtacctcatgcgtacctggtaatgtttaatgggttatttctctttgagggtgactttgtctggaacattggttagagcagatttgttgtcgtgtttctggattctcttccccgttttgcgtaaatattggtcttatatattcttgcctattttgtggcatatgccacataaaaaatgaaccctgatacagacaagtattaccttttcaaattttgaaagggtattaccactttaactctctgtgctcttccaaatagctttaaaatgtgggcttttgtgaagaccactttcaaacaagggagcaccgaaacctgaattggttactgccagaataggtagttttgaaacaagttaaggacatggtatgcgcactctgcattttcatgggcagtgtgcatttaaagccctttcagtagatgagggttgtcagggaggagaaatgaagaagctatgttaatttctggtgagtaagacctggg

SEQ ID NO: 10849 - DNA, 683 bp, Macaca Fascicularis
gcgagaaccgcgggaagggctctccaggcgagagacggacgccaggcgtcgtggcaaggaaaagtgactagctccccttcgttgtcagccagggacgagaacagagccacgctcccacccggctgctcacgatccctcggcggcgatgtcggccgccggtgcccgaggcctgcgggccagctaccaccggctcctcgataaagtggagctgatgctgcccgagaaattgaggccgttgtacaaccatccagcaggtcccagaacagtttttttctgggctccaattatgaaatgggggttggtgtgtgctggattggctgatatggccagacctgcagaaaaacttagcacagctcaatctgctgttttgatggctacagggtttatttggtcaagatactcacttgtaattattccaaaaaattggagtctgtttgctgttaatttctttgtggggacagcaggagcctctcagctttttcgtatttggagatataaccaagaactaaaagctaaagcacacaaataaaagagttcctgatcacctgaacaatctagatgtggacatgaccattgggacctagtttattatttggttattgataaagcaaagctaactgtgcatttggaaggcacaataaaactaactgcaactggtagctagtgcttgatccaatagaaaa

SEQ ID NO: 10850 - DNA, 931 bp, Macaca Fascicularis
  misc_feature (1)...(931): n = A,T,C or G
agcagggcatgctggctgtggtgaaatgtctcaagaacaccccagccttctttgcggagaggctcaacaaagccatgaggggggcaggaacaaaggaccggaccctgattcgcatcatggtgtctcgcagtgagaccgatctcctggacatcagatcggagtataagcggatgtacggcaagtcgctgtaccacgacatctcgggagatacttcaggggattaccggaagnnnnnnnnnnnnnnnnnnnnnnnnannnnntgnnnnnnnnctggtggctcanttctgcccacccgcgggcaacagtggtgccaggaaaaggccaaaagaatgtctgtttctaacaaatccacaaatagccccgagatgcaccgtcctagagcctaggcctgtcctccacccctcctgacctatgtattgtgccacaggacctgggtcagtctagaactctctcaggatgccttttctaccccagccctcacagcctcttgctgctgaagtagatgtttcatttttctgactcatgcaatcattcccctttgcctgtggctaagacttagcttcatttcgtcatttaattgtatatttttatttggaggcatattttcttttcttacgatcattgccagacagatgcatacaagtctgtttgctgcgtacacatttctgttgagggcgactggttgggtgaagtgccgtgtccccgctgaggcgagaaagggaagcatgcctgggagggtagcctgtgcatctggtgagtgtgtcacaagctttgttactgccaaactcactcctttttagaaaaaaaaaaaaagtcattcgttccatcttccttgcagaaaccatgagaannnnnnnnnnnnnnnnnnnnnnncggggcttcttgtaatttgtggaatgtgccttaaacctgaatgtctgtagccaaaact

SEQ ID NO: 10851 - DNA, 671 bp, Macaca Fascicularis
  misc_feature (1)...(671): n = A,T,C or G
ttaccatcaagcaaannnnatgtctgggtggtgggtatggagagccagggaggagcgcagacatagacagttctccagcaactcaaaggcaggacctgcagagcatgtcccttcacagtggcctgactcattgtaaaatcattgcttcacagtcctcagcccttccctacatccctttagtcagttcttgttcctgaggttgaaggcagaaatgcaagctatgaggtttggatgaaggggtactttttannnnnnnnnnnnnnntcatgcctttggatgggcatgtacttccagctggctgtgtttttgtttccctgccatgttaaatatccctatctgttggacacctgtatacatttaagtttgcagtccttttccagtagcagtgatgttacttcctattggaggatttgtagactgtactaaagnnnnnnnnnnnnnnacttatgtcttcttggtggctcctggcccctctctgatgggnnnnnnnnnacagctctctgagaagtgacaactttgtctccccttttctgtgctcatatcagctggcacaagcctagcactgggctctgctcctggtgtcagtgctgcctgctgatttgggggannnnncttcggtggccccagtttcactccagcccnnnnctctnnncactctaggtactcagtgc

SEQ ID NO: 10852 - DNA, 621 bp, Macaca Fascicularis
  misc_feature (1)...(621): n = A,T,C or G
tgagatgtgtaaagctctgcnggaggtcttgggccggctgcccccagacacaagagtgtannntggccatgagtacaccatcaacaannnnnnnnnnnnnnnnnnnnnnnngcccggcaatgccgccatacaggagaagctggcgtgggccaaggagaagtacagcatcggggagcccannnnnnnnnnnaccctggcagaggagttcacctacaaccccnnnnnnnnnnnnnnngctgggctacagccagcacgagccaccttcttctgcagtggccctggctgttgaggtgggcggtgggcatggctctgcacagcctgcagcccggtgccggcctctgcagggagaagacggtgcagcagcacgcgcgtgagacggacccannnnnnnnnnngagggccgtgcgcaaggagaaggaggagttcaagatgccccgggagtgagggtgccctgcaccttcagagcatttggtcaagatgccccaggagtgaggccaccctgcaccttcagagcatttgaggatgaggctcttttaggtaactggctttcnnnnnnnnnnnnnnnnnnnnnnnnnnttgatttaacattaatttcacagcccttggcttgtgttattggat

SEQ ID NO: 10853 - DNA, 731 bp, Macaca Fascicularis
tttaccggaaattaacagacacctcaaaagatgaagagaaccatgaagagtctgagtctttgcaggaagatatgctaggaaacagactattacttccaacaccaacagtaaagcaggaatcaaaggatgtggaagaaaatgttggcctcattgtgtacaatggtgcaatggtagatgtaggaagcctcttgcaaaaattggaaaagagcgaaaaagtaagagctgaggtagaacagaagctgcagttactagaagaaaagacagatgaagatgaaaaaaccatattaaatttggagaattccaacaaaagtctctctggtgaactcagagaagttaaaaaggaccttagtcagttacaagaaaacttaaagatttcagaaaacatgaatttacaatttgaaaaccaactgaataagacaatcagaaacttatctacggtaatggatgaaatccacactgttctcaagaaggataatgtaaagaatgaagacaaagatcaaaaatccaaggagaatggtgcaagtgtatgataaaatccatgtagtgatgaggaatggtgttaaataatgtaatatataaaaatcatgatataagaatgtttgaaggtgatgcatgtttgattttattagtatacatgtcttttagttcaaatgatgtataaagttttatgaatgtgagtttctgcttttgaaaattgcttgtaattcctagccttcaaattattaaacact

SEQ ID NO: 10854 - DNA, 933 bp, Macaca Fascicularis
  misc_feature (1)...(933): n = A,T,C or G
actgcatgtattgtgccaatctgtnnngagtgttcatgctttgtaccaaatttaatgaacgcgtgttctgtaatcaaactgcaaatattgtcataaccaacatccaaaatgacggctgctatatataagtgtttgtcatatggaatttaatcgnnnnnnnnnnnnnnnnnnttaactaaataactttatgtggcactgcctagtaagggaactatggaaaggtttggatctctccaaactgggagaattttaaaaataagaaaataacctttatatgatatattatgactaggctgtgtatttcttttcagggatttttctaccttcagggttggatgtagtttagttgctattaccatagccaacctgtagttttacatatacaatttcttgtggagcaatagagttctccattttacagaagcattttaaatgtagtttgnnnnnnnnnnnnnnnnnnnnnnnnnnngagttatcacttcatttatcttaaagactaaactggttgtcagctacatctaacagaaagaaaaatnnnnnnnnnnnnnnnnnnnnnnnnnnnnnnnnnnnnnnnnnnnnnnnnnnnnnnnnnnnnnnnnnnnnattgattatatttttaacaggaatttaagaaaatattactggaattaaaaatatatatattaaacaagaattttctttgctctgtctagcttaaactactactcaagctgcttaacttcttaagtannnnnnnnnnnnnnnnnnnnnnnnnnnnnnnnnnnnnnnnnnnnnnnnnnnnnnnnnnnnnnnnnnnnnnnnnnnnnnnnnnnnnnnnnnnnnnnnnnnnnnnnnnnnnttggtatcttattaatgagttttaaagatgtaaaacctaaccttttttaaagctccatttgtcttatgtttttagaggctttcttttccataaac

SEQ ID NO: 10855 - DNA, 692 bp, Macaca Fascicularis
  misc_feature (1)...(692): n = A,T,C or G
acagctcactgnnnnnntaccaaagccatagctttaaannntcccaatccccatcaacagcttcctgaaagtttcctctcttgtttacttctgcaaagggtagcttcttaaaaacgtgatcatgtatgagtaagtatttgttcacttacccttttttacttttaatcaatgtcagataccaagagttgtgnnnnnnnnnnnnnnnnnnnnnnnnnnnnnnnnnnnnnnnnnnnnnnnnngaaatagtccccatagttagagtagttacttatgaaatggtcattaaagtgaacacagcacatatacattatctgtactgctttttgttatgattaatattgggtatnnnnnnnnnnnnnnnnnnntattgtatagaaagaaaattacttttttaccaggttttccaaagacagaatagatcacaaagctcaaggaatttaatattcttgtaatggactagataattcaaactgattagcccattnnngaagaaaaacagctgggaattaagttaatccacttgaaattgttttacaataatcagaacattcgaaacctcaaggctcgggatcccatagatcagagcccacctttttgataaactcttaaagtcttggagactagaagcaagatagtttgtgacacatatgcttcccaaaaactagaatagatttttactgaatagtggtata

SEQ ID NO: 10856 - DNA, 758 bp, Macaca Fascicularis
  misc_feature (1)...(758): n = A,T,C or G
tgctgccaggtnntngatgccctggacgactacgagcaccactaccacacgctgcatggaaatgtttgctccttttgcaagcgggccttcccnnnnnnnnnnnnnnnnnnnnnncacatcctggagtggcacgattcgctcttccagatcctgtctgagaggcaggacatgtatcagtgcttggtagaaggctgcacagagaagttcaagaccagcagagaccggaaggaccacttggtgaggatacacctgtaccccgtggacttccggtttgataagccaaagaaaaacagaagcccagcctcagcggaagtcccaggggacagtggagagcggtcagaaggggaggccatggaaatctgctccgagcctgtggcggcctcccctgcaccggccggtgagagnnnnnnnnnnnnnnnnnnnnnnnnnnnnnnnnnnnnnnnnnnnnnnnnnnnnnnnnnnnnnnnnnnaagcaacaagaagaaaaccaaagagtgctgatagattcagaaaaggagtggggggcagtcaccactggtgggagtggcatccaccgtgggcctttctccgaccttctggtgtggccgccctggggccaggccctcgccatcttccctgtccctgttcctcaacaaatggcatcagcagccatcatcagaagcagtgagggacccacagnnnnnnnnnnnnncctcgagacactattgggactgagatgtggacggcctgcctccccctgcagggcaaaccctaagaat

SEQ ID NO: 10857 - DNA, 726 bp, Macaca Fascicularis
  misc_feature (1)...(726): n = A,T,C or G
aacnnnnaccnnatcgtgcntttnatccgggtgtgtgagaagaacatcaagaggtnnnnnnnnctgctgccccggcctgagaccgaggaggagttcctgcgcgtgtgccggctgaaggagaaggagctggaggccctgccgtgcctgtacgccacnnnnnnnnnnnnnnngtggggcagcgtagaggagctgctccgcgttgtcaaggacaagatcggcgaggagcagcgcaagaccatctgggtggacgaggaccagctgtgaggcgggcgcccccggcagagagatgctgcggtgcggggcatcctatgaggcaggcgccccgggcagagagatgcggtgggtgcggagggatcctgtggcccacggagctgccnnnnnnnnnnnnnnnnnnnnnccggtgatggagcctggggggcacaggtgcgcctggggaggagcagggcgcaacccattcccccagccccggctgacctggcccagcggtttggccctgctggcctgagcagggagacaggggagcaaaggacgccaagctggaggcccgaggccagccggcctctcgagagtcagagcagcagctgaatgtaatgctggggacaggcgtgctgccaccagtagggcagggacccggacagccaggtgaccactagccctggggacactcttgccgtaaacacatccccaggcaggacagatcggggaagggggtgtgtaccaggctat

SEQ ID NO: 10858 - DNA, 763 bp, Macaca Fascicularis
  misc_feature (1)...(763): n = A,T,C or G
agttttttannnnannnannannntttcctcttaccaactcctcttcaggtttttaaagacccagcccttcccaatctcaaagagaaaaaggacaactgagtttatcttgaacagcagaactttttaatcaaatgtttattttggcttgtggatcttggtgttatttaaaaaattgagttgatggtcattgcaagctcatctgttaannnnnnnnnnnnnnncagtctacctttacaagtcattagtcttcattataatatgtaaaaatctttatcctgtattgatctgtttgcatttaagatgacagtgagaaaatgataagcataaagagaagtatcaggttatttgcttttttccaaacttacttttcagatgaactaatgtttagtacagagactgagcaaatactacaaaatttaacctaaccttcatttcattggtttaaatgtgttattaaccttcttaagtgcaaactcatcattgtaaattatattttagcatggtctgcctcaaatagtaatgtatttttctgcattcacttggatatatttagaatcacttttttcctcctgtatcacagaagaggtatgtgctgatttgtttggatatttgacnnnnnnnnnnnnnnnnnnnnnnnnnnnnnnnnnnttcatatttaatttcaaattcaaacttctgaggttgcaacatatatgaactgtgttttcaaaagaagatttgtaagaattaaactatatttaatgagtaaacttttgagattta

SEQ ID NO: 10859 - DNA, 693 bp, Macaca Fascicularis
  misc_feature (1)...(693): n = A,T,C or G
tgcccacgccctccaggaagccctcgaagtagccgattcctggtccgggtgaagggccgcatccctgtgagccgagggatgtgcctccaggactttgcttgtgccattcccaccgccagccccagctcaccgtgaccatgtaatcctgtaactgctccaagcccagaccgctgtggtcgctgccgctgcagtgggagccgtgaaaagaaggtgtggacgtgccgctgtaacatgcttcaaaggtgtcctgggagccattgctgcaggcacaggaagaagggccttcactcgtctccctccagctcctcgccctcgggcaggctgaagagttccactctnnnnnnnnnnnnnnnnnnnnnnnnnnnnnnnnnnnnnnnnnnnnnnnnnnnnnnnnnnnnnnnnnnnnnnnnnnnnnnnnnnnnnnnnnnnnnnnnnnnnnnnnnnnnnnnnnnnnnnnnnnnnnnnnnnnnnnnnnnnnnnnnnnnnnnnnnnnnnnnnnnnnnnnnnnnnnnnnnnnnnnnnnnnnnnnctgacttcaggtgattcacctgccttggcctcccaaactgctgggattacaggcgtgagccacctgcccggcctgtggtcatatatttatttgtgtacttatttaattactgtcagcctgcctccactaagtaaacttcatgaagacacggccacctctggttt

SEQ ID NO: 10860 - DNA, 706 bp, Macaca Fascicularis
  misc_feature (1)...(706): n = A,T,C or G
agccnnnnntgacttccaaagtagtnannnacaggattgtatcatatactcgagacttaccgcatnnnnnnnnnnnnnnnnnnnngtcaaaggctttaaacatgtggggcaaagagatccccctgcannncaggaaagtnnnnnnnnnnnnnnnnnnnnnnnnnnnnnnnnnnnnnnnnnnagctcatgnnnnnnnnnnnnnnnnnnnngggccaggaannnngctggctcatgcctttgcacctgggccaggnnnnnnaggagannnnnnnnnnnnnnnggatgaacgctggacggatggtagcagtctaggaattaacttcctgtannnnnnnnnnnnnnnacttggccattctttgggtatgggacattcttctgatcccaatgcagtgatgtatccgacctatggaaacggagatccccaaaatttnnnnnnnnnnnnnnnnnnnattaaaggcattcagaaactatatnnnnnnnnnnnnnnnnnnagaaagaaatagaaacttcaagaacatccattcattcattggattttatatcattgttgcacaatcagaattgctaagcactgttcttccactctgcttagcaattatgtcacccttttttattgcagttggtttttgaatgtctttcactccttttaaggataaactcatttatggcgtgactgtgtcttactcatctatactagcagtgggta

SEQ ID NO: 10861 - DNA, 735 bp, Macaca Fascicularis
  misc_feature (1)...(735): n = A,T,C or G
gagatnnnnnnnnnnnnnnnnnactgtgggaaagccttcatttttcngnnntcccttaagaaacacatgagannncatactggagagaannnnnnnnnnnnnnnnnnnnnnggaaaatcctttagccagagcnnncatcnnnnnnnnnnnnnnnnnnnnnnnnnnnnnnnnnnnnnnnatgactgtaaagaatgtgggaaggctttcactgttccntcatcccttcagaaacatgtgagaacccacactggagagaaaccgtatgaatgcagtgactgtggaaaagccttcattnnnnnnnnnnnnnnnaagaaacacacacgctctcacactggagagaagccttatgagtgtaaccagtgtggaaaatccttcagcacaggctcttaccttattgtgcacaagagaactcacactggtgagaaaacctatgagtgtaaagaatgtgggaaggcctttaggaattcctcttgcctgagggtacacgtgagaactcacactggagagaagccttataaatgtattcagtgtgaaaaagcctttagcacaagcactaaccttataatgcacaagcgaatccacactggccaggaactccatgaatgaaatgacgacaggnnnnnnnnnnnnnnncctcatgcctcctttctcannnnnnnnnnnnnnnnnnagagaagccctgttatggccacnnnnnnnnnnnnnnnnggcccaactctggctggctgttacact

SEQ ID NO: 10862 - DNA, 698 bp, Macaca Fascicularis
  misc_feature (1)...(698): n = A,T,C or G
tgacagggcacccaaaacccccaactcccaataaaagccgtgacgttcggacaaaccgcgtattgtgaaccttctggccccaaagccccagtccggccagggtgggagtgtctcctcctgcgtctcttttgtggccccccatcccccaggatcatccccgtgtgggtggaggtggaacaggccacgtcacaacagcaggtctctatctctgagcaaacactgagctttttcctgtttgggggatgggggggccacttcacctgacgctcaaacacaccaaccccaggccttgcttttgtgccagctccccctccccctcccggaagcctgggccccaccttggcctcactgagtgggaacccctgccgggggctcgtctgaaaaatgactcaagggtctgcttccnnnnnnnnnnnnnnnnnnnnnnnnnnctccccagagccggctccgccccagctacacacactgccttgttctcacccctgccctgtgcctggcatttgttctctccccccacaaacgtggaatagggagggcagggtcccttctccccttactctgacctgtgggtttcccaggtgcnnnnnnnnnnnnnnaggctccatctgcctggcctgagggangnnntggctggtttcagtggctcaagtgagccnnnnnacgtctcnnnngccccccnnnnngtccagcaccacctg

SEQ ID NO: 10863 - DNA, 702 bp, Macaca Fascicularis
  misc_feature (1)...(702): n = A,T,C or G
tctcaaaaaaaaaaaaaaagaaagaaaaaaaattacagacgtaagcatcttatttacagaagcagagtaattgacctgagtgtannnnnnnnnnnnnnnnnnnnnnnnagagatacacagaatgcagggaaccgtggatctgtttacctggctcgggagttggctgctgcctcgtcctccactgtttcttcatccnnnnnnnnnnnnnnnnnnnnnnnnnnnntcnnnnnnnnnnnnnnnnnnccaccctggatgtggctattcagagaggcctgtcccacggagcccagaggtaagcctcacttgaccatccggagcctctgagggcaggacctgtgggcacccctatcctgactggccaagcagagagagctctgggaatggactctggacaacaggaacacctgtcctgaggccagctcttcctccaggctgctgtgtgtggccctgggacagctggaccggcctccagacctcgcccatgacgggtaggactctcacgtcttgcatctgtccagccatggatgtgaatgggcatgcgacggatgtgtgcctgggccccagggtgacgggtgggtggggcacttggtactgaatggagccttcctcagctggggtttgggannnnnggtgctacaggcaatgccaggtgggtctccagcacagnnnctcagcagtcacagcacccctgcccatggccct

SEQ ID NO: 10864 - DNA, 771 bp, Macaca Fascicularis
  misc_feature (1)...(771): n = A,T,C or G
tgtagatgtagttgtcannnnngacannnnnnnnnnnnnnnnngattacatnnnnncagctagannnnnnnnnnnngctgggctatcacttttggctatnnnnnnncttctcacgcagtatnnangnnnnnnnnnnnnnnnnnnnnnnnnnntaattgggaagaaactaccagtctttccaannnnnnnnnnnnnnnnnnnnnnnnnnnnnnnnnnnnnnnnnnnnnnnnnnnnnnnnnnnnnnnnngagttaagggagcatggagaaaagaagaaacgctcgcgagaggatgctggagataatgatgatacagagggcgctattggtgtcaggaacaaggtggctggaggaaaaatgaagaagcggaaaggccgttagtcacttttatgaaggctcacgttctgctgttctgtgaaagagaactggagaatgaaacctgctccgacagagatcgtgagactgaaatctgtcagaattgtgtccagaatgtgctcagnnnnnnnnnnnnnnnnnnccattctgggttggagtttactgcagaataattcttacagtgctgatgtcaagaccgttactgttttttcaactttgactcttnnnnnnnnnnnnnnntaggatgtgctcttctgtcactcacacagacctgttgccttttttagctgcaagtcgaggactaggttgatgatgtccacgacctgtaattgtaaagaagcttggacatctgcaaatgatatttaagccatcttggcttgtacttttttcaaactaat

SEQ ID NO: 10865 - DNA, 692 bp, Macaca Fascicularis
gcattaaactagagccttaagtcaatcccagaaggtagcataaacaaataaaaaattaactatatggcataagaattaagatcagtgctgtatgtggaaacaacaacgaacaaagctatctgagtgaactgctaatacagaaacttaatgtggacctgtttggggtcaaactattgttttagaatgaaggaattttattattgtgtatataatttgtacataagaagtatggagatgatacggtgttaaaaaaaaatcatggtgaggctacaatactcaagtaacaaggtttgggacaatgtctaagggttaaagtgccaaagccatttctgtactaactgttctcttgttcaggtaccaggggagaaggatgacccctccttattctccaattcatgtacagtattttgtcctagcagcagtaaagacttagttctttacttacaagaggcagaaacaagacagactagttcataaacaaactgaatgtgtaacttctcaaaatgaatctatttcataactcagatgatttcttggtggtgactgagtacccctttagtgctatatttgtgccattcattatctggttcatatttctttgctgttagatgatacacttttcttcaaaaaaatttctaatgtcacttttgtacttttttaaataaagtatgtttaactgttggactctctaa

SEQ ID NO: 10866 - DNA, 773 bp, Macaca Fascicularis
  misc_feature (1)...(773): n = A,T,C or G
aaagcttgggatataaggactggcaaggtgatgagaagctacaaggcgaccatccagcagaccttggacatcctgntnnnnngggaaggctccnnnnnnnnnnncagcacagatgnnncnacccgtganncagctgaccgcaccattnnnnnnnnnnnnnnnnggacctctgccaaaatctcnnnnnnnnnttttcacgagaggttcacctgccccagccnnnnnnnnnnnnnnnnagagcccgtnnnnnnnnnnnnnnnnnatggcaactacatggcccttttctccactgtgtggccctaccggatgagcagacggcggcgctatgaagggcacaaggtggagggctactcagtgggctgtgagtgctccccaggcggtnnnnnnnnnnnnnnnnnnnnnnnnnnnnnnnnnnnnnnnatgtacagcttccgcacggccagccgggcatgcacactgcaggggcacacgcaggcctgtgtcggcaccacctaccaccccgtgctgccctccgtcctcgccacctgctcctggggaggggacatgaagatctggcactgagctttgtgtcactgaaccttcccgttgccagctgggctctgggactcccctcttcctcaagggtgtatgagaggaatgagcacagaggttggctgtgggtcctgggtaccaccctctgagcctcagtttcctcatctgtaaagtggggacaaaagtctgtttgcctcaggagtgtgaggactacaatagtgaaagcgcctggcaggcggccg

SEQ ID NO: 10867 - DNA, 766 bp, Macaca Fascicularis
  misc_feature (1)...(766): n = A,T,C or G
tacgcnnnnnnnnnnnnnnntttgnncctgtgannntactgtatttnnnagtttggaaatatacataccgtgtgctttgcaattgttttatgcttcctggaatttggggattcacgagagacttgaggttagagttctgcaagagagaagacactacatgattgcagctgctacatcaagaacccaagccccagtcaaggttgtgaatacgactttggatgagattgagaaggcccagtggacggttggtcttgaagagtggcagtgtatggacttgaggaccnnnnnnnnnnnnnnnnnnnnnngaggagagctgttttgcgtggttttttgttgttgttgtttttatagcattttgctttttcctggaatgtaattttcctatgacatgttaacnnnnnnnnnnnnnnnnnnnnnnnnnnnnnnnnncctacaattgggatgagttctaggtacatgtgtttgctgactttggggtaaactttgttaaaatacnnnnnnnnnnnnnnnnnnnnnnnnnnnnnnnnngggcccagagtggcggaggaaggaaagcttcaagctggccatgggggtcccnnnnnnnnnnnnnnnnnnnnnatgatgactagcctaggtcattagagcccagactccacagagactaaaatcagagctctgccttgttgtgataaagttcctttgcttggaaaaacaaatgctgaaagccagtttttaaactcatttgtgcagatgaccaaannnnnnnnnnnncaggaaaaggtaa

SEQ ID NO: 10868 - DNA, 723 bp, Macaca Fascicularis
  misc_feature (1)...(723): n = A,T,C or G
ccaggatnnnnnnnnnnnnnnnnnnnngtgatctgcccactcgacctcccaaaatactgggattgcaggtgtgagccaccacgcccggtctggaattttctagtaagaagaaaaacatacggaatgtgtcttcactgttgggtaactctcaaatttgtagcactctgaattttttgtaaaactgtgctaatggaatgcttaatgtcagagttattgtctcacttcaatatctagtattggataatgtttctcctgggagcacagattttttttttcaagtccttttttcctggacttaacatgttcttctagaagacatcagaagtcatgaccctaagccacctcccttcaggaccactttctaccatcggttttcaaaaaactatccacatgttaattctgttttatgttctgtgattctgtggtcgactcagtgcttcagagtccagagattgacttgggttagtggccctaatgaagtgctaaattttctctttnnnnnnnnnnnnnnncagaagaagcaaaaggggaaagggggctagaggtccactcacaccttttacatcagacgagaggagaactgtgnnnnnnnnnnnnnnnnnnnnnnnnnnnnnnnnnnnnnnnnnnnnnnnnnnnnnnnnnnnnnnnnnnnnnnnnnnnnnnnnnnnnnnnnnnnnnnnacgtgcattgttcccagcgtaagtgtgtgaagcctaatacgtc

SEQ ID NO: 10869 - DNA, 684 bp, Macaca Fascicularis
  misc_feature (1)...(684): n = A,T,C or G
tcagtttcatggggcagttnnngcagtttgagacccaggtgctgtgtcactgaggtggtgcccctctgcctgcccccctaactgtgctggcaggagctgactggacgggtgggctcctctctgggctggcacagtcccctcacttctgggagggctgctacctccttacaatttgagaagccccgtggggggctctagcaatgccggcatgctggcctttctgacctggtgctcttcnnnnnnnnnnnnnnnnnnnnccctcattcggggtcgggaaccgagggtgtgtctgctctttcccatnnnnnnnnnnnnnnnnnnnnnnctggactctatactgtggactctccctggtccaccatcatgttgaagcccttggcagcctaagagctccaaggaacaagctgtgacaaccaggatccctgtccgttggttggtccgcccagggcctggagcccaagccctatgttcctggggaagctggggacttgggaagtgatgggtgtgtcgtgctgtgtgtgtcagtctgtgagcctttcacgcctgnnnnnnnnnnnnnnnnnnntatttgtgctcagctgacatttaacactccctcccccgcttcctcctagccctgtgggcagggattggaaatttagnnntttatatttatacagatcattcaggatntgtcaataaaat

SEQ ID NO: 10870 - DNA, 667 bp, Macaca Fascicularis
  misc_feature (1)...(667): n = A,T,C or G
aactgcnaatactttctcnnnannnnnnnnnnnnnnnccccagagagctacaggtnngctcccgacgggnnncgggcctgacccgtccacacagggccgtgtcagcggcagcgactcaagggacgtgtgtacatatgtaaatgagaaatagagacgtgtcnacagatgcaattcatttctcttggaatgtgtattgtttttannnnnnnnnnnaaaacaacaacaaaaaaagcttggaactccatcacgtggaaaaactagatcctgttggttatagcatttgtgagttctccacgtctgtctctctcgctcatgtaatatactctgaccctgcgtggaaagggatttttgttctgtttttattttacctacatgtactatttagcttcagtgtactagtcctgccacctgtgtatttttagggtgctatggaaataatgaaaagaaacggggatttcagaagaaaattgtaaccaaattcatactttgtataatttttgatatcatgatcacaggtgattcacacgtacacacataaacacacccaccagtgcagcctgaagtaactcccacagaaaccatcatcgtctttgtacatcgtatgtacaatgcaatcatttnnnnnnnnnnnnnnnncaaaaaactaattgtgatttctagtcttgca

SEQ ID NO: 10871 - DNA, 760 bp, Macaca Fascicularis
  misc_feature (1)...(760): n = A,T,C or G
atgagaagcagaaaaagtacttccagaagcagtgccacgaatgcatagaacacatcaggaagcagaactggnnncaggcctttgaaatnnnnnnnnnnctactagacggcgacttaacaagtgatccttcttacttccagaatgttacaggatgtagtaattactataactttttgcggtgcacggaacctgaggatcagctttactatgtgaaacttttgtcactcccagaggtgagacaagccatccacgtgggaaatcggacttttaatgatggaactgtagttgaaaagtacttgcgagaagatacagtacagtcagttaagccatggttaactgaaatcatgaataattataaggttctgatgtacaatggccaactggacatcatcgtggcagctgccctgacagagcgctccttgatgggcatggactggaaaggatcccaggaatacaagaaggcagaaaaaaaagtttggaagatctttaaatctgacaatgaagtggctggttatgtccagcaagtgggtgacttccatcaggtaattattcgaggtggaggacatattttaccctatgaccagcctctgagagcttttgacatgattaatcgattcatttatggaagaggatgggatnnnnnnnnnnnnnnnnnnnntttcccaaaagagaacatcagaggttnnnnnnnnnnnnnnnaaaattgtaaaaacggaaaatgtcataggaataagaaaattatcttttcatatctgcaaga

SEQ ID NO: 10872 - DNA, 647 bp, Macaca Fascicularis
  misc_feature (1)...(647): n = A,T,C or G
gccttgcccactcctgctctgctcgcctnnnnnnnnnnnnnnnnnngagctggtctctcactgcctnnngaaggccccctgcctgccctgtcaggaggcagaaggaggcaggtgtgagggcagtgcaaggagggagcacaactccccgctaccactccgggccccgacttnnnnnnnnnnnnnnnnnnaacctggaggaaatccaacctttgaattcaagaacatttggggaatttggaaatctctttgccccccaaaccgccattctgtccnnnnnnnnnnnnnnnnnnnnnnnnnnnnnnnnnnnnnnnnngtgaaaaggctaagaggtttggctcctgcnnnnnnnnnnnnnnnnnnnnnnnnnnnnnnnnnnnnnnnnnngcaaagctgttcttcctggtgaccctgattatatccagtaatgcatagactgtgcgcataggcctgctttgtctcctctatcctgggcttttgttttgctttttagttttgcttttagtttttctgtcccccctatttaacgcactgactagacacacaaagcagtagaattcttatatatatatctgtatattgtccacaattataaactcattccgcatgcggctacacacacaaaaaaagaccnntcaaaattatacctg

SEQ ID NO: 10873 - DNA, 659 bp, Macaca Fascicularis
  misc_feature (1)...(659): n = A,T,C or G
aagacaaacaagactccagtggggtggtcagtaggagagcacgttcagagggaagagccatctcaacagaatcacgccaaacatactttcaggatgaatttcttatttctgccatcttttggaataaatatttttctcctttctatggaaatctgggttcagtgtttgtaaaattcatttttataagcttttctatagctacataatgcctttttaaaaaatgattttgtagtctaaacttaggttgggtatataaacccttccatgtagcttgagatgcctgaaaagactggtaagtgcttttctnnnnnnnnnnnnnnnnnnnnnnnnnnnnnnnnnngccaaggcactggagggatcaaagatgtgtacattggagtccnnnnnnnnncagaagctatttggagagataaggctagtatacacagaactgtaatataaggctgtgttggagcattgtccttaaagatggtagnnnnnnnnnnnnnnnnnnnnnatctgtcagccacagaacaaggcagcaaatgctcctgaaatggaaccatcacagcctcagacacaggactgaagaagtcaagagtgattaaaaagccagggacaggagacaacaattttgtgtttcagtagcaggcatctcgatatactaatttgagggcttt

SEQ ID NO: 10874 - DNA, 120 bp, Macaca Fascicularis
ggaggagggcaaatacctcttcttcaaggaccccaacaacgcaggtcatccgtgtcttcagcctccctgttggcaccttcagctctgatgaagacgatggaggaagaggaggtaggaaga

SEQ ID NO: 10875 - DNA, 729 bp, Macaca Fascicularis
  misc_feature (1)...(729): n = A,T,C or G
ttcatgtctgacaaaacaaggtannnnnatcccaannnnnnnnnnnnnntgtcctgtaaaacttctaggccccctcttacctgcttctgaccttatgctcaagaactctcctaactctggccagagctcagctttggcagctctgaccgttgagcagctctcatcccgggtttcatttacgtctctttccgatgacaccagcannnnnnnnnnnnnnnnnnnnnnnnnnnnnnnnnnnnnnnnnnnnnnnnnnnnnnnnnnnnnnnnnnnnnnnnnggaccacatctctgcnnnnnnnnnnnnnnnnatctaaaaaagggggagctggcctccaccctatgttccatggattaggaacaaaatttcagacatctatcnnnnnnnnnnnnnaaactttctgaacaccaccaccaccaccaatacttatcannnnnnnnnnnnnnnnnnnnnnnnctgatcttggcagggacggaactcctattcagcagtttttgtggaaagcagtaatgcttnnnnnnnnnnnntgtcattcagcattttaagtggagactatgcatttcatagtatgtttgacagattagtactgtgtcctgtgttttgttccagattcttcagtataaataagctctatatcaaaaannnnnnnnnnnnnnnngaaaatgtcttgctgtgttttgtcctatggaaaatactgtacttcaggattatgtttacaattgatccaggtgt

SEQ ID NO: 10876 - DNA, 731 bp, Macaca Fascicularis
  misc_feature (1)...(731): n = A,T,C or G
tgacaaaccagaaacaactgtgggatggtgacggtgggatgtgtcgcaagcgannnnnnnnnnnnnnnncacatgaatgtcggtagccagggtctctcccaagggatgggtttagtcttgatgaannnnnnnnnnnnnnnaattgttaggtagaaacctgggctgggaggcctcggaccccaggctccatcccnnnnnnnnnnnnnnnnnnnnnnnnnnnnnnaccaagcatgagatgcagctagcagtcacatccatccccgttctcagcaggatgacaccatggacagccgtttccggagcctccagcatttgcacaccactacttagcctctctgctgctggaatgttggtagagtcatccctgtaatcaagnnnnnnnnnnnnnnnnnnnnntgttcaatgttgtttacagctcttaaaacatggtgaggaatgcctaagtcttnnnnnnnnnnnnnnnccttgaaagcagacatagcatgacagaccttcctggagtctttggttgggttcaaagtgnnnnnnnnnnnnnnnnnnnnnnnnnntgggaaagggatgctgccccaagggggaccaaaagggccnnnnnnnnnnnnnnnnnnnnnnntgacccctcgcgacaccgtaggacttgacttttgtttagtctttctaagaaatagatcatagagccaagtgnnnnnnnnnnnnnnnaatgtaagggtctgctttgttcttgttgcttttct

SEQ ID NO: 10877 - DNA, 876 bp, Macaca Fascicularis
  misc_feature (1)...(876): n = A,T,C or G
caattgnagngaagacnnngaaannnnnncagacaatgcaggtagacgagcatnnncngccccaaaccannnnggaacagttacagaaacttnnctcagtattcagaaagatggacngtcactgcagggaatgcnncgggatagctgatgtnnnnnnnncatannnnnnnnnngatgcnnnaagaagcatacnnncannnnnnnnnnnnnnnnnnnnnnntactttgtatctggatgtgatccctctatcatgggtattggtcctgtccctgctatcagtggagcactgaagaaagcaggactgagtcttaaggacatggatttggtagaggtcaatgaagcttttgctccccagtacttggctgttgagaagagtttggatcttgacataagtaaaaccaatgtgaatggaggagccattgctttgggtcacccactgggaggatctggatcaagaattactgcacacctggttcatgaattaagacgtcgaggtggaaaatatgccattggatcagcttgcattggaggcggccaaggtattgctgtcatcattcagagcacagcctgaagannnnnnngagctcactgtgacccactcttactctgcttggccaggccacagtaaaaaaagtgaccttcagagcagctgccacaactggccatgccctgccattgaaacagcaatnnnnnnnnnnnnnnnnnnggtgacacaaaaatacattgatcatcaataggagcccatgctagaagtacattctctcagatttgtaccagtgaaatatgatttctgaactaaagaagacattaaaagaaattgtattcttgccaagtaaccaccacttctgccttaggtaatatgattaaaggaaatca

SEQ ID NO: 10878 - DNA, 717 bp, Macaca Fascicularis
  misc_feature (1)...(717): n = A,T,C or G
tagagggtggcaaaatgcctttgcccagtgtctctannntaggcatcttttccttccttattccttccagtcagggtgtgtcctacacataacttcccattagttctcctcaatgttccccctttgtaaatgatcactcctcttttctaaacccttttcctgttcagatccatacaggatttgcaagggtagactgaattatacatgcaaatgccccttgttcatctgtgtcttctgcaaactagtctcatgaagaattctggtgtgcagccagggtagtgaagtttggttctgggactggagattggccatttggcctcctgagattccagctcccttccaccaagcccagtcttgctacatggcacaggacaaacctgactccctttgggcctcagtttcccctccccttcatgaaacaaaaagaatactactttttcttgttggtctagcattgctggacacaaagtgcagtcattattgttgtattgggtgatgtgtgcaaaactgcagaagctcactgcctataagaggaaataagagagaaagtggaggagagggacaaaaggagtaattatttggtatagatccatccatcccaacctttctctcctcagtccctgctcctcatgtttctggtttggtgagtccattgtgccactacccataatgctttgcattgctgcatcctgggaagggggtatatggtctcacaag

SEQ ID NO: 10879 - DNA, 730 bp, Macaca Fascicularis
  misc_feature (1)...(730): n = A,T,C or G
tgcaacagaataacaaccggaaagaagttggggacacatgtatttggttaattacattttaaacacattaggaaacgttgctattttaactttttattgattttgggggggagtaaagaattgtgatgcaaatgaatatcctttaattgattgacttcctaaatttagatttgtgtgcatcaggctttcnnnnnnnnnnnnnnnnnnnnnnnnnnnnnnnnnnnnnnnnnnnnnnnnnnnnnnnnnnnnnnnnnnnnnnnnnnnnnnnnnnnnnnnnnnnnnnnnnnnnnnnnnnnnnnnnnnnnnnnnnnnnnnnnnnnnnnnnnnnnnnnnnnnnnnnnnnnnnnnnnnnnnnnnnnnnnnnnnnnnnnnnnnnnnnnnnnnnnnnnnnnnnnnnnnnnnnnnnncaaactcctgacctcaggcaatctgcccgcctgggtctcccaaagtgctaggattacaggcatgagccaccacgcctagcggcatcaggctttcttaaagtgacagcacatctgtactagagcaagcaggaatcagagaccttccagaaatactactgtgtaagggcgagaaatatcttcacttgtcattgttatatgattattacttttgctgtaatgttaatattgatttattaatatatattatattatcttttcgtacattttctaagaaacatttatattgaggagatcttttattttgccgagggcataaattattg

SEQ ID NO: 10880 - DNA, 820 bp, Macaca Fascicularis
  misc_feature (1)...(820): n = A,T,C or G
agcaaaaccccagagaagccaaagggctcctgtccactccgattccacaggccgggggagagtagggactctgacccccctccccttccttgtaggtgacacatgctttgtcctctgaggcagtcagtgaaggcaaatggtctgacttctttatgtggtcaacattttgatagaatttctttataatttgatagagattatattgttattgttttattttgagtgagaagaattttaaaacctttttatgtgaattaccatcttgtttctttcacctttgaaacagtggattgtagcagagacattgtagcaacccagagttatgcttttggaatgtggtcctcactgtgcaggagaacatggggatcctttgttaacattcccagtgtgcacacactttctgcttcctccgtccagttgctcaagttcttagtattttagcctaacgtttttatcacctacttttcttgaaaagtggtccttttgtcacttagttactgattttcctgggtttgacatactaagtattctatgagatgatatatatgctttttttgaaagctaattctcatgaattcaagtagctgagttcctttgtttcttttattcactaaagtagctggcacaaaacacagaaacctagagcagcagttttatgtcaatgctcatgagtttgtatcgataatataattgttgatccacttataattcgnnnnnnnnnnnnnnnatgtagacattgagttgtcaattaaagaaaatgtggcctctttgtgatcataaaattgccttgttgaggggagagggtttgggacagcagctg

SEQ ID NO: 10881 - DNA, 743 bp, Macaca Fascicularis
  misc_feature (1)...(743): n = A,T,C or G
cagnnnnnagnnnnnnaggaatttggtttctgttgcaagaaagatcattgaagaaggttattataatgaaactcaagaatctacggacattttgctttcagggtgaagcaagcttgcatttggattgcctgctctctttagagcaaatccatactatgaaagcagaaacaaaccnnnnnnnnnnnnnnnttgttattggcagaatttattggcattatacctgcttcatatgggtatattaatattaaaacacaataccatagagtaattgcattacgtgaaaattcttgcattttacaatgcgcttcaccactgaagcagctaatttccattttgaaaattaaaagaaaacagcacagagaagttaaatgctgtgtagcaaagttatggggtctgcttgagggcactaacctcaacagattattcctcctttccttagaataaccatgaaaatgcaaatttactgagcacatttttgctttttaagtagctggttcattttctgaatttctcacattcagagttctgacatcatgtttgcagaaacttgtcttacttagtgtctatttacatgtaaccctgaaaacattattatttgaaaacttttcttatctcaaattaatatacattttcacaacctacctttgtattaagacttgcaattttatcaacctatttcttagaaacaatttactggcttagaatacaacgcaattttatcatactataattttcatgtacaa

SEQ ID NO: 10882 - DNA, 760 bp, Macaca Fascicularis
  misc_feature (1)...(760): n = A,T,C or G
agagggggcgaaccaggggtcatcaacctgtcccctgcacggggcagggaccgagtgagccactccttgtcccgagctcccgcccccactgggccctccttcctcctggtgctaatttggggaccccaggggccgccccggcctcttctccaacctgcctgggccaggatcctgggtcttcccaaccacaccccagagatcaggccccacctgccagctctgctgggcttggagcatgtctgggcagtggagagagggacacagcctgggacaggaagcctcttggttggagcaggggaccctcatttgccacccagaccaatgtgagcctgcccccagccccctcttactggaaatggcaaggggcttccctcctgggggcagctacacccgtccccagaggtgcattcatgcacattctcacagacaacttctcacgcgttggctttggacaaccaggccccaacttggtccctcccccgggggcctccagcctggtgcccannnnnnnnnnnnnnnnnnnnnnnnnnnnccacctcggatgggagcctgggtccctgcctccgctctgcccctgggtggctgggaggagaggccctctcgggggtgacctgggcgtcagccacgggaccccgtcctcctccctcgagtccgcccgagtccctcaagccgcgagccttnnnnnnnnnnnnnnngctgccccctccgcttttggtgtgtgacgaggtccccgatgttcttgatttcccnagagaagcaa

SEQ ID NO: 10883 - DNA, 753 bp, Macaca Fascicularis
  misc_feature (1)...(753): n = A,T,C or G
aatgagatgaaaagttggagtgacagttatgtgtattgtttggaaagaaaatctcatctactaatcatacaggacgaacttgaaatggcttttatacagaaaaacctaagacaatcaaactacgtatggatggggcttaactttacctccttgaaaatgacatggacttgggtggatggttctccactagatccaaagatattcttcataaagggaccagctaaagaaaacnnnnnnnnnnnnnnnnnnnnnnnnnnnnnnnnnnnnnaaacctgcagtagtgttttcaaatggatttgtcagtattagagtttgacaaaattcacagtgaaatannnnnnnnnnnnnnnnnnnnnncaattagttgctaatattaatctccaggtgtaagattttaaagtgcaattaaatgccaaaatctctcttttccctccgtcatccacactggtctagcctcagagcaacccgttaacagactaaaatatacccttcaaaatttgtacctgatagtataaaccaaggtgacttcatgtgatcatatccaggatttttattaattgtttattttatgccaaatgtgatcaaattatgcctgcttttctgtatcttgtgttttaaattcttaataatgtcctaagcaaaatttcttatttctaagtgttgaaatataatgtggatttatacattttttacccttttatcaaagagaattaactttgtttccaggcnnnnnnnnnnnnnnnctcagctaca

SEQ ID NO: 10884 - DNA, 688 bp, Macaca Fascicularis
  misc_feature (1)...(688): n = A,T,C or G
accccacggccctcccaggnnnggtgcattgacccccacgcccagtctctccagccaggccctgccctcaccaagactgcccacaacagacggggccaaccctcaaccaatatctctcatccctggtggagtttcttcctctggcttgagccgcatgggtgctgtgcctnnnatggtgccggcccagagtcaagaaggctctctggtgtgatgaccccgccactcattgnnnaaaggatgaggggtctctctttcctataggggtcacctctagcacagaggcctgagtcatgggagagtaatcacactccagacccttagtactctgcccccacctctctttactgtgggaaaactgtctcagtaacacctaagtgtccaggagatagaagaagaggaagtggatctggaattgggaggagcctccacccaccccgactcctccctgtgaagcnnnnnnnnnnnnnnnactcctcaccaagagggaggggcagagacttccagttactgagtctcccaggccccgttgatctgtaccccaccccaatctaacaccaccctttgctcccactccagctccctgtattgatatannnnnnnnnnnnnnnnnnnnnnnnnnnnnnnnnnnnnnnnnatagggaatgtattttttaaactaacatgaaatatgtgttgttttcattgcaaa

SEQ ID NO: 10885 - DNA, 766 bp, Macaca Fascicularis
  misc_feature (1)...(766): n = A,T,C or G
ccagagggcttcccagtaaggcccagtgatccattatcccaggggcaaacccacctgtcccccttgtgagctgccggttcccaacagccacccccagtcaagggtgagggtgtggccttcaccaggggctgctnnnnnnnnnnnnnnnnnnnnnnnnnnnnnnnnnnnnnnnnnnnnnnnnnnnnnnnnnnnggttctttgttcccattccaaccgatgaaggagcaaacgtctagtgatgtgaagcctaatttacctgcaggaactggcagggatagtcactggctggactcctgtttacnnnnnnnnnnnnnnnnnnnccatcccctcccccacctgcccctgattcccctcttcagtgcctgtcaactgcttttcagcagtggactgcaggggaaagagcagttatttggggtgagtaggcttcatattcccagcnnngaccagacttgatgtgtgaccttgggcaagttccttcccctctctggagcttggtttccccaccagaggaaactgagctggaggagcccgaggtcctgccttttattggctgacacacctcctgtccactgtgtccctctccaagtgccagagaagtggaggcaggttgcttcctcaggctgagatggccccactgtgaaggccacacctgtgggtgggtagccacctggtgccaccacagggcaccagggatgatcctgatgcggcaggcaggggagactcccagaaaannnnnnnnnnngcccaccctcaccagataaactct

SEQ ID NO: 10886 - DNA, 1204 bp, Macaca Fascicularis
gatcaagctgcagacaaggtgtccaggagcgcattaactgcctggaagggacccacgagtttttgaggccattgggttccagaaggtgttgcttcccatccaggatcaggaggaccccgaggagttctacgtgctgagcgagaccaccttggcccagccccagagcctggagaggcacaaggaacagctgctggctgcggagcccgtgcgcgccaagctggaccggcagcgccgcgtcttccagccctcgcccctggcctcgcagttcgaactgcccggggacttcttcaacctcacggcagaggagatcaagcgggagcagaggctcaggtccgacgcagtggagcggctgagcgtgctgcggaccaaggccatgcgggagaaggaggagcagcgggggctgcgcaagtacacctacacgctgctgcgcgtgcgcctccccgacggctgcctcctgcaggggaccttctacgcccgggaacggctgggggcagtgtacgggttcgttcgggaggccctgcagagcgactggctgccttttgagctgctggcctcgggagggcagaagctgtcggaggacgagaacctggccttgaatgagtgcgggctggtgccctctgccctcctgaccttctcgtgggacatggctgtgctggaggacatcaaggctgcgggggtcgagccggacgccatcctgaaacctgagctcctgtcagccatcgagaagctctcttgaaataaaagcagggttggcctcagccctgtgggtgtgtctcatgctctccctgttccttcccccaccaccccagggcctccaagccacctctggaaatacttggctctgccccatgggcacgggaggggcgccagctagctgtggagctgtggaactgggccccgtggcagagcccccatctcctgggggctgtggagatgcgcccaagcccccgagggagaggcctggggatgccatcaaatctaagccttccctagctgctggtaactgtgtcatgaagctgccaggcagacacacgtggcatctccctgggcaggagagcaggcctgcagcacgggtcccgttcccgtgtgctgtgggcggcagcggctgcgcctggcactagggctgctctgtggatgtgggtgacgacggcaggaggggacgctggccttcccgcacacagacctgcagttagtaaatcataag

SEQ ID NO: 10887 - DNA, 701 bp, Macaca Fascicularis
  misc_feature (1)...(701): n = A,T,C or G
atgccagtggaannntcagcctcatnnnaagcaaaaacataacattagtgatactcttactgcctnatcttaaccgaggactaataagatacctttccattaaacaccagtgacttctcaggaaaaaaaaaacaaaaaacaaaaaaaaaaaacagcaaaacaaatggtgtggacacctgctttgttgtggtccagcagtgaccggcttcagtgaggggaaccattctggagggctgcggtctcctgtgcaaaccgacgtgaggcagaagagtaaaaaggccagcccagtgggacctggaatactttgtaactctttaataactgaggtcaggaccgctcttctgccttccctgtccctcaatgtgctttttcccatttccatgatttaaggcaatggtttttccagtatgtgacattttccttcctgtttttcaggtatatcaaagagtttacatattccaattcacatttttacatctgagacgggttttttaagttcataattatgaaagaaatatgtatattgagcttggggaaataaaaatggccttttcttaaattattattattggtaatacaacctcttcattaaataacaatgtagcatgaaaaatttatgattgaaatgtagttttcattacatattaagatacagtttctgagaagaatcattgaatggactagaatatgtcaaaaattga

SEQ ID NO: 10888 - DNA, 747 bp, Macaca Fascicularis
  misc_feature (1)...(747): n = A,T,C or G
tggcaggagcgaaccccgacttcaactgcaacggtcctgtcaacacacagggattctacaggggctcccctgggtgcgtcatggatgctgttctgcgtcacggctgtgaggcagcctttgtgagcctgctggtggagtttggagccaacctgaatctagtgaagtgggaatcgttgggcccagagtcgagaggaagaagaaaggtggaccctgaggccttgcaggtctttaaagaggccagaagtgttcccagaaccttgctgtgtctgtgccgtgtggctgtgagaagagctcttggcaaataccggcttcatctgnnnnnnnnnnnnnnnnnnnnnnnnnnnnnnnnnnngtttctacttcatgagtagacttcgagtgctgcggttgattccagcaagggagaaggtgatctgnnnnnnnnnnnnnnnnnnnnnnnnnnnnnctgtgctgctggtggtatcctgatggctgttgctactgaagatgnnnnnnnnnnnnnnnnnnnnnnnnnnnntgcctgggccgccgaacagtccttgggtcattgtcagctgagaggctcatacaaaagttattattgtttttcccaaattctcttttctggattttcagttgcatattaatgtaacgggccatggaatgtgtacatgtagggactgaggttggaggcctacgaatttccctgtagggaggactcctagcacttnnnnnnnnnnnnnnnnntttatttttctacttctcaat

SEQ ID NO: 10889 - DNA, 760 bp, Macaca Fascicularis
  misc_feature (1)...(760): n = A,T,C or G
tgtataggtgataatcgagatctgcttgtccattggtgccatggcgcccctggggtcatctacatgctcatccaggcctataaggtattcagagaggaaaagtatctctgtgatgcctatcagtgtgctgatgtgatctnnnnnnnnnnnnnnnnnnnnnnnnnnnnnnnnnnnnnnnnnnnnnnnnnnnnnnnnnnnnnnnnnnnnnnnnnnnnnnnnnnnnnnnnnnnngatatgaagtacctgnnnnnnnnnnnnnnnnnnnnnnaatggtgcttagagtatggagaacatggatgcagaacaccagacacccctttctctctctttgnnnnnnnnnnnnnnnnnnnnnannnnnnnnnnnnnnnnctagtccccacaaaagccaggttccctgcatttgaactctgaaaggaaagcatgccacctgtaactcactgcatgaccctttctgtatattcaaacccaagctaagtgctttcgttgctttccaaggaaacaannnnnnnnnnnnnnnacttgatttggttagcttttttcagaatttgtctttcattcggttcatttccattatcatttacttttgcttaaaagtatccaaggaagtcttttaactttaatttccatttnnnnnnnnnnnnngagtgagtgatatgtacagtgttttgagattgtatacatatgttccagaacttggaggaaatcttatttaagtttatgaatataaccatctgttactgttctaaaaatgttaaaagaa

SEQ ID NO: 10890 - DNA, 706 bp, Macaca Fascicularis
  misc_feature (1)...(706): n = A,T,C or G
gaagaagacctgtgtcntcagaggcgggaagaacacctgtcatggtagggacagatagagaccgcccaggcacgcagcctgccttccccggagagtgtgatagctagaaccctagaaccatggctgctggttgagacagcagctcttaagcccaagtcctctcacttctggggaagatcctttcccctcagttacctgcttccccgatgggtctttacctggattttcccaagttctccggtgctctccattcggctgnnnnnnnnnnnnnnnnnnnnccagatgtcatactgaggttttcgggccccaannnnnnnnnnnnnnnnnnnnnnnnnnnnnnnnnnnnnnnnnnnnnnnnnnnnnnnnnnnnnnnnncaggcaaagcctcaggcttctgtccttaggggaggccagagaatccataccccagtacaggatgcggggacaaaacaactagagtgaaggctggcnnnnnnnnnnnnnnnnnnnnnnnnnnnnnnggcttggggtgtgaggagggcattccccggccagctctttttcagattcannnnnnnnnnnnnnnngtttgatgttaacacttgtatctgctactctccgttttaacaaaggcctggctttgagcgcaggcccacaaccatttaggtttagtaactttgcttccttctctgtattttaaggttacctgtttacagtcaataatttt

SEQ ID NO: 10891 - DNA, 645 bp, Macaca Fascicularis
  misc_feature (1)...(645): n = A,T,C or G
gtgcctctgcagctcagtgcccactggcagtgtggggccaccctcacccaggtctcagtggagtacggctaccggcccggtgccacagctgtgcccacgccactcacgaacgtccagatcctgctgcctgtgggggaacctgtgaccaacgtccgcctgcagccggccgccacctggaacctggaggagaagcggctcacgtggaggcttccagatgtgtctgaggcagggggctctggccgnnnnnnnnnnnnnnnngagccgctctcagggcccagcacacctagccccgtggccgcacagttcaccagcgagggggccactctgtcgggcgtggacttggaactggtgggcagcggttnnnnnnnnnnnnnnnnnnnnnnnnnnnnnnnnnnnnnnnnnnnnnnnnnnnnnnnnnnnnnccgtaaatgctgccgccccagctctacactgcgccctggtgctggctgaccgctccctaccctcctgctggaccctggggcctcccgccccagtctccctgaggcccagactccacggagaggagccccatgcccagccggctgagcccaagattcgctcctccccctcatgccaacccccacacaggtcctggccttttaatgttctttgaataaacacttt

SEQ ID NO: 10892 - DNA, 737 bp, Macaca Fascicularis
  misc_feature (1)...(737): n = A,T,C or G
tgggtgcccacatgtcctgccaactagggcctccaactggagtgggggagtcccggcccttaaatcaccagagccaccaagcctgccagaggagtctcattcatgacttggggacgcactgctcctagcaagcaggaagtaagagcaggaagaagcattgctaccttcacttctccccagctctgccctctgggtccacatgaggacagagaggctcgggaaggggaagggagactggccctgcccagccggtctctagcccctcaccacactgggctctctctgccctgtccctctaggacaggnnnnnnnnnnnnnnncagagcactgatggtgcttggattccagcctaagggaggctggccatggtccaggagttaagggcctgggtctggggtttaagtggccacccacccaggccctggccagtgtgggaccaggaggggaaggaagaaagaggctaggagcaggggagagaaggtgcacttggccagtggtgcctgcccggagtgagcccatgccttgcctgcctacccctaactacagtgtttgtgccttgagctgagggggcagcctctgggccctgaacccctgctggggctccacgaccctgagcgaaggggtgagacgaatcnnnnnnnnacctcgnnnnnnnnnnnnnnnnnnnnnnaagcatccctgcagcctcaccttctagacggagatgaggtccaggggttggcccttgctgcctcctc

SEQ ID NO: 10893 - DNA, 740 bp, Macaca Fascicularis
  misc_feature (1)...(740): n = A,T,C or G
acaaaaccaaatnnnnntgtcagaggccaagaccccanggtgggatcagggaccacctcacggggtcataatatcagttttcccccagagcccgggtccctgttcgccacggggcaggcggggtccctggagccctggtgtggagcggaaagtcccagggcggtccctgtcttagaaggaggggcccttggccagccacccccccagcgacactatgcaattgcgcccgccaggatcgaagccatgaccgggtgcaggcgggcgccaggcccgctgtgggtgggcaccagttagcaccgctcactgctgccgggcaggccaggaccagcaggctcctcagccaaccctgtccctcagctcggccctgccacagagagggaccccagcccatcgtggacgttggcagggctcagccgctcccacctccccacagaagcccaggagcgtgtggacgtctgagtccagcttcctgcgtccccacccggccctcctggcccctcacccccaggcagcgagccagccccacccccacgccccctcgtaccctggcaggggattctggggctgttacacctggagaaacattcccactcccctttggcctccctgtactccgagctgtgaatatttttaaccctgtaaatacggccagctcttgtgacacagagactattttatcaaccgtcagcaccgttcctttacgataggattctccacagtggcttctgactcaggctcca

SEQ ID NO: 10894 - DNA, 747 bp, Macaca Fascicularis
  misc_feature (1)...(747): n = A,T,C or G
gagcaggaagtatccaacctccaagataccatgcatgccattcaaaataatgaaagaggtgctcactcaaaggattcaaagccttaatgagaaatttcagaatattacggatttttgtaagaaaagcctagaagaaataaacattaatacagacattttcaaatcagaagcaaaacatgcacattctcgagtaactgtccaaattaactcggctgagcaggaaatnnnnnnnnnnnnnnnnnggctaaaagatttggaagatagcacactaagaaatattagaacagtaaaaagacaagaagaagaagatctcctgcgagtagaggaacagctaggctctgatacaaaggcagttgaaaagttagaagaggaacagcatgccctctttnnnnnnnnnnnnnnnnnnnnnnnnnnnctttccgactacgaacccaaagttgaannnnnnnnnnnnnnnnnnnnnnnnnttgaaagtgctgttcgctctgttctcagannnnnnnnnnnnnnnnnnggaacagaaaagaaaatggaagacttgactatgcagatgtttaatatggaagatgatatgctgaaagcagtgtctgaaataatggagatgcagaaaacccttgaaggaattcagtatgataatcgcatattaaagatgcaaaatgaactggatgttctaaaagaaaaagttcatgattttatagtatactcaatgcatactacaggagaaaaggaaactgtgaaagaatataa

SEQ ID NO: 10895 - DNA, 716 bp, Macaca Fascicularis
  misc_feature (1)...(716): n = A,T,C or G
cccagattcagaatatgacaacntcacctatgtttatggagaaagtttcattggagccatctattatgtacnnnnnnnnnnnnnnnnnnnnnnnnnnnnnnnntggagnnnnnnnnnnnnnnnnnnnnnnnnnnnnnnnnnnnnnnncaatggatacacgccagtacttatactgcctaaagccaaagaaggaattcgcagaaaaagcaggcatcattaagggagtaacagtgattggaaaattggatatagtatggaaaacaaatctaggtgaaaggggaaggttacaaacnnnnnnnnnnnnnnnnntggctccaggttatggagacgttaggttgtctttggaggcaataccagannnnnnnnnnnnnnnnnnnnnntttcatattacctgtaaaataacaaacnnnnnnnnnnnnnntatggatctggttttggaaatgtgcaataccaattccatccactggtgtggaatttcaggaagacagctgggaaagctgcatccaagttcttcgctctctcttgcccttacnnnnnnnnnnnnnnnnnngggactgcaagtatgctgtcttttcaaaaattccaatatttgggggctgttaacttacaaaaattggtttttcaatgcatcattatttattgccataacaaattgtttggtccaaaatgaaagctatattcagaaggtttgcacctcaaaattgagtaataattaa

SEQ ID NO: 10896 - DNA, 741 bp, Macaca Fascicularis
  misc_feature (1)...(741): n = A,T,C or G
gctnnnatncnggaagnnnnnnnnnnnnnnnnnnnnnnnnnnnnnnnnnnnnnnnnnnnnnnnnnnnnnntgttctgcatgnnncagacagactctcatgtatgnnnntgccttaccctgggtattagaacctcttacactaataactgtcaatagagggattnnnnnnnnnnnnnnnnnnnnnnnnnnnnnntacagtctaatttaaattggcttgatgtaggttatggctgctgttattctctgaacctaacagcagctgaagtgaactctaatnnnnnnnnnnnnnnnttaatatcttccatttctaacttcattatagccccagtatccaaaggctgaagctaacaactaagtttcttaacagcttacgaaatgacatactaccagataacagttccgacattaatcacnnnnnnnnnnnnngttggtattgggaaaatgctcttaaaactactgtttgattannnnnnnnnnnnnnnctttctacactgccaagatttgcttaacataaaactcatatgaaacagtcgtgagactgggaagaatgggacagttgaaacaataaatgcttnnnnnnncagaagataagcattaaagatggagatcaagaaaaattcctgagacagaagatctaggcagtgatttagaggaagcctcccaaaaaccccagaggaagaatatgacctgtgtttcatattttacctttctgagctatttaaaattatgtgtatgttttgc

SEQ ID NO: 10897 - DNA, 759 bp, Macaca Fascicularis
  misc_feature (1)...(759): n = A,T,C or G
tcatgtgctgcccctcatcnnnnnnctggagtgtgactcggccccacccgagggccctgagccctggggcagcacggagcatggcgtggaggtggtgctggcccacctggaggctgcccggacagtggcacaccacggaggccnnnnnnnnnnnnnnnntgaggtcaagctgcaggggttccaggcccggccggagctcctggannnnnnnnnnacggagttccagatgcgcctcctctggggcagtcagggtgccagcagcagtcaggcccggcgctatgagaagttcgacaaggtcctcactgccctgtcccacaagctggagcctgccgtccgctccagcgagctgnnnnnnnnnnnnnnnnnnnnnnnnnnnnnnnnnnnnagcgtcaggggcagagggggcacaaacctttccccagagcaccccaaggacactgtgatcaacccgagaatgttctgggttcaactcaagcatctcccttgcacctccagggtcctgcgtggaccctgggttccatcccacctgctacacgctcaccaggtctccgttgaggaagaacaggaacgccggttnnnnnnnnnnnnnnnnnnnctccccttcctgctggggttccctgttttcgagccacgggaggcaggctgctcacgcctcctcactctccgtctgtccctcacccacaccaaggcctccgtctcactgtaaataagtctctgtgttctgtaaatagatgtacagaagccatgttattctttcat

SEQ ID NO: 10898 - DNA, 719 bp, Macaca Fascicularis
  misc_feature (1)...(719): n = A,T,C or G
agggtggctccgtggcccgcacgnncctggaagatggaacatnnaaggttcgagtggtgacccgaaaccctgggaagaaggcagcaaaggagctgaggctgcaaggtgcagaagtagtgaagggagaccaagatgaccaggtcagcatggaactggccctgaatggggcttacgccaccttcattgtgaccaattactggnnnnnnnnnnnncaggagaaggaggtcaagcaggggaagctgctcgctgatctggccaagcatctgggcctccactatgtggtctatagcggcctacagaacatcaagaagctgacagcagggagattgacnnnnnnnnnnnnnnnnnnnnnnnnnnnnnnnnaggaatatttccgagacatcggcgttcnnnnnnnnnnnnnnnggctgccctgctattttgagaacttcctctcccacttcttgccccagaaagccccagatggaaagagctacttgctgaatgactcctgaggactatgaaaagcttggctttcccggggcccgggacnnnnnnnnnnnnnnnnntttctatgccctgagacccgaccatgacatcgagctgaccctgagactcaaccccaaggccctgacgnnnnnnnnnnnnnnnnnnnnnnncaaaggggacttcgccctgctgtgacctgcccatcttnnnnnnnnnnntgggggttnnnacaccagaggggcagaggcacc

SEQ ID NO: 10899 - DNA, 756 bp, Macaca Fascicularis
  misc_feature (1)...(756): n = A,T,C or G
tgtagctaccagccccttgctgctctccctnnnnnccaaacggcccctgnnnagggcacaggccccaacctgtgtgctgggggtccccagcagcaaacactggaaagtcttgttttttctttttccctttcttcttccccaccccttaattttaacttcgtggtaactgagtgtccccgcgtgcctgcgtgttgagtgtgcgggcggcagtgccgttccggaggcctggtccatctggagttttgaggggtgaggggaccagagcagtgggaccagagtggggttcagcttcccttccccacctggagccagggactgcccgtgtaaccagttttggtcctgcccgctgcctccctgatccctccccactctcgccccttctctatgaacttaaatcaaaaaccacttccctccatctcctcccgctcctgtgtggagggggaatatgtgctggctagggtggaggacagagcacctgagcctggggctggctccccggggtgtccgattcagctggtggctgtggagctgagtcccctccctgtaacctctacaaggccagcacccaccatcactacctgcacctgctgtggtcccaccctctggaggtctgggaacctggctggcagcctgggaaggctggagaggcagacggtgggacccaccagctctctccccatcccgcttcttccctggggggccaggccctacctgtgtggtggtgggtgggctgactgtcaagacgtgtcatgtaca

SEQ ID NO: 10900 - DNA, 717 bp, Macaca Fascicularis
  misc_feature (1)...(717): n = A,T,C or G
gagcttctggctctctttcccccacaaaattcgacatacttaaagatctctgtgtggtttaaaaaaaaatgtttttatgtttttttgaggtgggagaggatgtnnnnnnnnnnnnnnnnnnnnnnnnngtttgctgcagaggtaaggatgtgttcctatatcgatctgcagacacccagaaggtgggtgcacactgcatgcttggggtgccaagggatttgagacctccaacatatttgtctgaaggtggtgattctggccacggcccctctgccaagcctgtgtgccatgtccttggtgctttagtgcaagaagcccaggctcagaagcacagcagtgccatctttccgtttcaggggttgtgatgaaggccaaggaaaagcatttatctttaccattttacctgtgtataaagttttagttcattgagtgtgcaaaacacccttatcacttctaaatttgcactttattttttttcttccatgcttgttctctgggcatttggggatgtgagtgctagagccagtgagaggtgtcaggccgccttnnnnnnnnnnnnnntggcctccacctgccctctcttccctgcctggtcgccgctttccaatttgtccttcagagaacttaaggagagttgaaattcacgggccagggcacatcttttatttatttcgttatgttgcccaacagaacttgattgtaaataataaaaagaaa

SEQ ID NO: 10901 - DNA, 660 bp, Macaca Fascicularis
cataatagattttaaaaatctaatgttctatattgcaagacattcttttgttaacaggtttgtttctttttaatgttttacctaaaatttgacatgcttacagaacaggtttgcctcttactttatttaacattgtagaaatgtaattaataaacaatgctcactacacagtttagaatagacgttctcatttatattatcttccaaatttgatcagttagcaaaacttaatacaccaattaaaatatttctacatatgatgagaatgtttacaatttaaattttagaacttgttttggatgtgattatatgtacgaaaatcgtgtaacactatgctcatgctaagaaccgacataacagaattactgaaataaatgtgctgtgaggaatggaaaatatggtgcaggtgtcttggtcatgataaattgtgattctttttaaaatttttttccaaaaacaaattagttcttttaatctgaaatcagattcctttataaacaacaagtttttgtatgcaagcaccattttatttcatgtagtatggctgatactatagttgaaccaaggatatgcattgattctttgcttcgtatgtaaataaagttaaaaaccgttaaaataaggagtattttggtagagtatatacatacctcactgcca

SEQ ID NO: 10902 - DNA, 663 bp, Macaca Fascicularis
  misc_feature (1)...(663): n = A,T,C or G
caggaacttccccttgaacnnnaggagctggccacacccacattgctgctgtggggggagaaggacacttacttggagcaggggctnnnnnnnnnnnnnnncagccgctttgtgccaggccgcttggaggcccacatcctgccaggcatggggcattggatcccacagagcaacccccaggagatgcaccagtacatgtgggccttctnnnnnnnnnnnnnnnactagtggcccttgctggcctgcccaggaggcatggatactcaggaaggaacacacatatnngcctgtgcctgggagtccatccaatgtccatacatgggtggactcttgaatcgctcatacgtatgggactcctggatctcacacaggtgcacctatgggtgccttgggacacactaacccctgtactcacaggcatggatgcatgcatgtgtaacaagaactttgaccctgggaactgggtatacctctcctccagtggagccagatgccaaggggcctcactctgctctttgccaaagttggttctctgccatagctgcacaaaccttaaaccctgaccttcctgtccccgccttccacctcctgcctgggtcttcagctcagtgctactctcaatacgatacnnnngaccgcattggctagttcaagttaaatgta

SEQ ID NO: 10903 - DNA, 700 bp, Macaca Fascicularis
  misc_feature (1)...(700): n = A,T,C or G
aaaagccaaggtgtcatttacgtgtcagttcatttgtggtgatatagaattagctttttcatccccttacacttagaatccacgtattccccttcccactagtnnnnnnnnnnnnnnnnnntcgctttcactctcttatgccttttacgagtgctaagtgtaggatattttgtcaccagaacacaatgctactgccccaaagtaaaaaaaaaaaaaaacaaccacttctggtcaatcaacaccaccagcaaacataagaaagaaatctttctcttttctannnnnnnnnnnnnnnnnnnnnnnnnnnnnnnnnnnnnnnnnnnggtcctgccggagaggaagagacacccagaccagagaaggggtgtgcatgcgcctactcgcttgctagaagtagattctggacagtcagctcttcacctgcctaactgtgtagcatctgcgttgccnnnnnnnnnnnnnnnnnnnnggctgatgcaggatttgttctctgtccagcagtcacnnnnnnnnnnnnnnnnnnnnnncnnnnnnnnnnnnnnnnnnnnnnnnnnnnnnnnnnnnnnnnnnnnnnntgatgcttttactgaactttcttatcctagcacatgcttcaatagttcaaggaacttgaaagatacttttctcttcttacttttacgccatccctgtctttactcctcacacttattgtaagaca

SEQ ID NO: 10904 - DNA, 724 bp, Macaca Fascicularis
  misc_feature (1)...(724): n = A,T,C or G
gnnnnnnnnnnnnnnnggtagggaagacatacgagctactcaactttgacaagcacaagtctatattgttgaagaatggacgggaccctggggaagtgcggccagacatcgcccaccagagtttgctgatgctgatggatagtcccctgnnnnnnnnnnnnnnnctacaggtttatatccatacacagaagaatgttctgattgaagtgaatccccagacccgaattcccagaacctttgaccgcttttgtggcctcatggttcaacttttacacaagctcagtgttcgagcagctgatggcccccagaagctcttgannnnnnnnnnnnnnnnnnnntcagatnnnnnnnnnnttggatgtatgaaagttggcacttctttttccatcccggttgtcagnnnnnnnnnnnngctggtgcccagcagtgatcctattgtttttgtggtaggggcctttgcccatggcaaggtcagtgtggaatatacagagaagatggtgtccatcagcaactatcccctttctgctgccctcacctgtgcaaaacttaccacagcctttgaggaagtatggggggtcatttgacagtagtagaacctnnnnnnnnnnnnnnnnnnnnnnnnnnnnnnnnnnnnnnnnnnnnnnnnnnnnnactnnnnnnnnnnnnnnnntctgcactgagactgtggagtttggggaagccaagnnnntgtacatttgctatt

SEQ ID NO: 10905 - DNA, 744 bp, Macaca Fascicularis
  misc_feature (1)...(744): n = A,T,C or G
ctgttgcgtgttgcccctgcattcnnnccgccgcacnnnnnnccatatcaaannnnnnatagaagttgttgttactgtgtgccaatgtgtcccatgtgggttgtgccaggtagagaaacaggaggtcgatctgtgacggtttctattctgtcgttttgctcctcggtatttgatttgcactatatttagttgaagcctgttcactgtttaaaaccggannnnnnnnnnnnnnnnnnnnnnnnnngttctagtaaatgtcccaccagtgcggtatagaaagcatgctcatgaccctgccgtgtcgtctgaggtacccgttcttatcctagtggttcaggaagagaaaatgcagtttgcactttcaagacagcttctctaaggctggcatgttatctccttgctttgctttgtgccgttttaaaatgtgtaatcgttccagcattccaatggtcttgtgcatagcaggggactgtaaccaaaaataaacatgtatttgtgtaattggtttgaagaagtcttgaatagctctttagtgtcttacttggggttgataagatttgagtgtctgcaattttttactaaatgtagctacaaagtcttaaatggcttgtttgttcttaaactgttaattgatgaaactgtgcataagtttacaatgtactaacttattttgcttattatatatagtgttttgttggaaattgtaaccacacannnnnnnnnnnnnnnnntaaagattagtgt

SEQ ID NO: 10906 - DNA, 715 bp, Macaca Fascicularis
  misc_feature (1)...(715): n = A,T,C or G
agcnnncagagctcaccagatttgtctaagatgactcaccgaattcaggctaaagttgagcctgagacccagctctcctaaccctcaggccaggatgctttccatggcacttcatggcccttgaaaacctcggatgtgtgccaggccatgccctggacactgatgggtttattatcttgacctccatggttactttctggggccccaagctgtgccctggacatctcttttcctggttgaagaaataatgggtgattatttcttcnnnnnnnnnnnnnnnnnnccagatggagagatagggggtaatatgctagaccctgtgcttctcggaaatttggatttagtattttcaggccccaccctcatnnnnnnnnnnnnnnnnnnnnnnnnnnnnngggagtttgcaatgtgatgcactgccaacattgagaattagtgaattgaaccctttgcaacggtctagctaggtagtnnnnnnnnnnnnnnnnnnnnnnggttgaataaggctcccgagctaagggactcgcccaaggtctcacagtgagtaggaggagggcctgagatttgaacccaggggtctgaggccagggccgactgccgtaagatgggtgctgagaagtgagtcagggcagggcagtaggtatcgaggtgccccatgggagtagggggacgccttccgggcggatgcagggctggggtgatctgtatctggagc

SEQ ID NO: 10907 - DNA, 783 bp, Macaca Fascicularis
  misc_feature (1)...(783): n = A,T,C or G
aatgtgccccaaagnnnnnnnnnnnnnnnnnnnnnnnnnnnnnnnncagggagagaaacccaacnnnacnnnnnnnntagggaacatcannnnctccagactggctcctgtgggtgcggtgnnnncgctgggctgggtcctcaacattgccaaggtgctagtgggtccctaagagggcccgtggtgggggtgaagtcacgaggtcctggaggcttaggcccgtcattcccaccctcacttgctgcacagttgtgtttactttttctgggtagaggatgctggacttagcaccctcctgcagggcggggttagggnnnnnnnnnnnnnnnngctctcccttgctcttacccaaactcaatacctaccgcaggatccctcggggcacnnnnnnnnnnnnnnnncaaccctcttcnnnnnnnnnnnnnnnnngaggggttggctnnnnnnnnnnnnnnnngccctccgtggggagcagctccagctgcctgggacagtgctcccagtttgtagggaagccacaccagannnnnnnnnnnnnnnnnnnnnnntccttccttttgacccaccccaggatagtggagagctcttgtctaggcnnnnnnnnnnnnnnnnnnnnnnnnnnnnnnnnntctggactccacacaggnnnnnnnnnnnnnnnnannnnnnnnnnnnnnnnnnnnnnngggtttgaggtggccatgggcagagagcagaaagggagggtgtgggtgtgcgtgcgtgcatgtgctggtgtgtaagggggaaagggtctttactggt

SEQ ID NO: 10908 - DNA, 765 bp, Macaca Fascicularis
  misc_feature (1)...(765): n = A,T,C or G
gctgcattcagaaataggacagtggcatttaaagcctactatctgtaaacaaccttgnnncntacttannnnnnnnnnncgaggcccttctcggtcaaatgttgtcaaaattttaagagagtatttagaagtggaatgggaagttaaaaaaggaagcaaaagaagtttttccaaagatgttatgaagggctctaatccaaaagtaccacannnnnnnnnnnnnnnnnnnnnnnntgtatatgtattgcagtatgtagagagcttttttgagaatccaattctcaattttgaactacctatgaattnnnnnnnnnnnnnnnnnnnnnnnnnnntgagaacaaaaagagaagaaatccgaaacataattctgaagctacaggaagatcagagcaaagagaaaaaaaagcataaggacacttactcaacagaatcannnnnnnnnnnnnnnnnnnnnnnnnnnnnnaatagtatctcagattgaccatttctgttacttgtcagttctaccttcaaaaactaaaaatgactttcaaannnnnnnnnnnnnnnnnnngaactgaagtgctcactactcagtgatttggaaattttgatgcttgtataaatgtcacataattaatttccaaaggcgtatgtattaagtaaaagtctgtaaatatgttaatgaggccaatttttccaacatttataattatttttttcacttgttaggaagcttttgttatgtattttctgttaatagtacctaaaattgcaacttctaaa

SEQ ID NO: 10909 - DNA, 770 bp, Macaca Fascicularis
  misc_feature (1)...(770): n = A,T,C or G
tctctccacacacnnngcctnnnnnnnnnnnnnnnngacactggnnncagcctgggctgggtcccccaaagggaccatccaggtgataacacaggggacatccctgaagaatgctgggaactgcctaagccccgcagtcattgtcggcctcctgaaagaggcttccaagcannnnnnnnnnnnnnnnnnnnnnnnnnnnnnnnnnnnnnnnnnnnctggcctcgatgtcaccacctctcacagccccactgcaccaggggagcaaggcttcggggannnnnnnnnnnnnnnnnnnnnnnnnnnnnnnnnnnnnnnggctgtgggcttggtccagggcactacacctgtactgcaggggctcaatggagctgtcttcaggccagaagtgcctctccgcaggggcctgcccctgctcctattccgaactcagacctctgaccctgcaatgctgcctaccatgattggcctcctggcagaggcaggcgtgcggctgctgtcctaccagacatcnnnnnnnnnnnnnnnggagacctggcacgtcatgggcatctcctccttgctgcccagcctggaagnnnnnnnnnnnnnnntgaccgagnnnnnnnnnntccacttctaaccttggggctcactcactggtccccgcctctggggcttttctgaagaaacctacccactgtgatcaacagggagagaagatccacattcctgggctgaacacaggcctctgacactgcttacactgcactctgaccctgtggtacagcaaa

SEQ ID NO: 10910 - DNA, 961 bp, Macaca Fascicularis
  misc_feature (1)...(961): n = A,T,C or G
aaagcattactgaaannnnnnnnnnnnaaaagaaatactggccctaccaaaaacaaatacttttatgtacattctgaatgctttaagttctgctagaaatattgagatatttatacatgcagagttactttattaatatttgtaattcatgcataagagtattttaatgatagttataactgcagtattggctagcatatggaaagaaaacagctaannnnnnnnnnnnnnnnnnnnnnnnnnnnnnnnnnnnnnnnnnnattttgtaaatatatgtacatattcaggtaagatacggtctcccaagctgagttctagaaatgnnnnnnnnnnnnnnnnnnnnnnngtattgttagtgctcacttggctcactctcctaggtttaagttagcccagagattgtatttactcatggaacactttatttatttcacatttactcagaatgatcctttggattctataaggacatgaggcacaatttgccattctctctccgtttttaaaaacataagcagtgtcagcttnnnnnnnnnnnnnnnnnncagtcagttgtggtaggccagccttgaagccatcgcacagtctagaaaattgtgtagctgagtgtgcagctcacctttaagggtgaagtaaggtaaaagcaattagcagagaccttatctatgtgattatgttgcttcttttgtcagtatgttgaattttatagccctttcaatgaaatgaaaaaaaaaaccaatttgtatattaccaatgtttttagtttaaataaagagtcacccttactactgttgaatttcctcccaagtgtaaatcattctataatggctgtgtctattatagtctattacagtaactgcatgtgtcaccaagtgttctatatcaggctaggataacctagaggcagtaattttttaaatgataaatctaatgaatataaactctcatgataaacctattt

SEQ ID NO: 10911 - DNA, 604 bp, Macaca Fascicularis
  misc_feature (1)...(604): n = A,T,C or G
tcacagctcaaatgctctcccctcccntaagtggaaacnnnntccattcctcccactanctcccctgnnncaggagaaattaggccaggggcaagnnnngctgggccccggatagagtcccagagttgcaatatcccgcgtgctggcgaggacaagtcgtcctgtcccgctaacgttcttgtcttttctttctcttcccaagaaaccagactaaactcctggttnnnnnnnnnnnnnnnnnnnnnnnnnnnnnnnnnnnnnnnggataggaagagagaggcagcagaggctctggcactgcagtgccaggctgaggnnnnnnnnnnnnnnnngggcctgagctctgcctacagaggaaacccccagggcctccctcaccacaactctcaaggaagggcctctgcttcagagctctacaccccaaccttctccatgacccatgggaattctatgaaaaagatgagcgcacacactcggagggctgagcagcactctggaaactatgacttggtgatgcccagttgcacacgaaattacagatgactcaccttattaagggctattgcactgaaaaaaaaaagatggggttgcttactggaaatta

SEQ ID NO: 10912 - DNA, 282 bp, Macaca Fascicularis
ataatataatgaagtacatgtttcattttagagaaataattattactttagacctttccgaatctgagaaagggaggctcgcatgtgttcaaggttagcacccaacagttagaatttcctcaaatcagaagaactggaagataccccccttttgaaatggccctgctgagtcggtttccccgtggccatgtgaactgtatacatatcacacgctgggaaacgccaccgggaagtcaataggaggcagtaaaatttttggtgagcctctgctgtataccacgc

SEQ ID NO: 10913 - DNA, 633 bp, Macaca Fascicularis
  misc_feature (1)...(633): n = A,T,C or G
cccagggggagcccacaccctaaaaagaacccaggtccctgaccattggaggccagggcttccctgcacggcctaaggggagttgggatatcaccccaaagtgacctggccagtgagctgttcagcaggtagccagtgccctgccatctgtgcagagccagccaccttgggggctgaggttcccgctttgaggcccaccccctatgctccccttgactggnnnnnnnnnnnnnnngggaactctctgtggtcagcaaagccactgccatgtaggctgggtgccgtgagaattaagtgctcagagggccaggagcccaggggacaggaaagtgtgtggttttagtaagttcaaaagggacaatcgcttgcagttggtagatctagcgatctagttgggagattatggtgtttaccccctatgaagtattcaatagttctacttgtgaatttgtatttattttgagttatacttgacacagaattccttttttaaaaaaaatactatgtgtgtattttggaaaaaaaaatattcatagatgttaaaatttctgcatggttaccagtttttctcacaacactgaatttggtagcttttcccgaaaaaatcttcacagtgattttttgtctgtatat

SEQ ID NO: 10914 - DNA, 741 bp, Macaca Fascicularis
  misc_feature (1)...(741): n = A,T,C or G
cattgtcattactgacataaggcttgtgcatcatgatgactgcttggataggacactgtatcccctccttatcaagaagcattggctatggaccagaaaatgttttgtttgtaaaatgtatacagctagatgggtgacgaacaatgnnnnnnnnnnnnnnnnnnnnnnatgtttcttttgtgatgtttgcttccgaatgctccactatgattcagaaggcaacaaactgggggaattccttgcttatccttatgttgatcctggaacctttaattaagaatagctacactcacaaaagtaccccctcatgaaataactgttctcttggatggttaccttttttctaagaaacgccactgaggagcaggatccactttgaacagtctgctaaagctaccaaaaaaaattccaaatcacagattttcttataatgattgtacatgtttataacatagttaaatttcacatttattccaaagagtatttaatttagtgctttttacccattgagttgtagtactttatatattctgactttaaatcctttgtcagacacacatattctttctcccaatccatgccttccctattcatnnnnnnnnnnnnnnnnnnttttgctaaagatagaattaatgatacatcaaatagtggaagtgttttgaaaatgctttgaagaatgtgagagctacaccttctaccatgaggcttccaaggttgtattaaaatttgactgaaaaatgg

SEQ ID NO: 10915 - DNA, 206 bp, Macaca Fascicularis
cagtctggcacatccctgccaacacagagctcaccatctcttatacttaagcaaaaaacatcggaaaggggaaagggggatggctgcttctgatatgttccatgacacatattttgaatggagacctctgcaccaggtgttgaaagtgttgaaatatttaaaaacaaatgcttgttgggcaagaatgggattgagaaattgagaat

SEQ ID NO: 10916 - DNA, 750 bp, Macaca Fascicularis
  misc_feature (1)...(750): n = A,T,C or G
agagcaagattttatgntnacaataaaaagaaacgnnnnntcaacacaccttacgtggataactcctataaatgggctggtggtggatttctgtctacagtgggtgaccttctgaaatttgggaatgcaatgctttatggttaccaagtcgggctgttcaagaactcaaatgaaaatcttttacctggatacctcaaaccggaaacaatggttatgatgtggaccccagtccctaacacagagatgtcttgggataaagagggtaaatacgcaatggcgtggggtgtggtggaaaagaagcaaacgtatggttcttgtagaaagcaacgacattatgcttcacatactggaggggccgtgggtgctagtagcgtnntgctggtccttcctgaagaactggatacggagactataaataacaaggttcccccaagaggaatcatcgtttctatcatatgtaacatgcagtctgttggcctcaatagcaccgctttgaagattgcccttgaatttgataaagacagatcagactgataccttaacaccacaggtgcaaaatgagttgttttggggtttttttgaaacattaaagttccaaaacatgaaatttttaagaataaatttgaaatagagtataattgaatgcagagaattatgtacctctaattgcttaattttgtaatggtcttttattgtagaattggttctttatactcagggaagtaattctattgtttttacttttgaaaa

SEQ ID NO: 10917 - DNA, 763 bp, Macaca Fascicularis
  misc_feature (1)...(763): n = A,T,C or G
gacgcagggcggtatcgctgtatgaatcacagctcacactatgctgtgtcataacccagtgaccccctggagctggtggtgacaggagtctacagcaaacccaccctnncagccctgcccagccctgtggtgacgtcaggagggnnnnnnnnnnnnnnnnnngactcacagctggcatttgacggcttcattctgtatcaggaaggagatgaacacccacaacgcctgaactctcagccctgtacccgtgggtcatcccgggctgtcttctccgtgggccccgtgaggggctcctacgggggccagtacagatgctccggtgcacactcacgctctccctatgtgtggtctttacnnnnnnnccccctggagctagtggtctcaggagcagctgagaccctcagcccatcacaaaaccagacagactccaagactggccaacacccacaggattacacagtggagaatnnnnnnnnnnnnnnnnntggctggcttggtcctggtgctcctcgggnnnnnnnngtttgagactcagcnnnnnnnnnnnnnnnnnnnnnnnnnnnnnnnnnnnnnnnnncagcagagaggacaatgctcccttcagagtggtggagcctcagggacagatctgatgatcccaggaagttctggaggacaatctaggacctacattttctgaactgtctgcnnnnnnnnnnnnnnnnnnnnnaatccatattgagtgcagggaaactgtctggggtnnncctagaagatcataaac

SEQ ID NO: 10918 - DNA, 738 bp, Macaca Fascicularis
  misc_feature (1)...(738): n = A,T,C or G
cagggccagcggggtgcagccnnnnnntnnngctgtccctctggccaaggagcatgggccagactccaaagctctgctgtgtttaagagaagtgtgcaggcacgcaccgcaccgcagacggggaatgggaatttccagataactatctttctgtaagaataatttgtgggttcgggagatggcnnnnnnnnnnncttcaggttgggaggggatgccagatcagctagcgcagccctcagtgatgggcaggggtggnnnnnnnnnnnnnggtgcccggtgacatgctggaggaaaatggtggccccccggggcggaccatactggtgggagcggcggggtgggagcccccgagcccgtgggcccccgacgccctccagggtccagtctggctcactcagccattttccgggacagctgctggggtcgaagagctcagggtctggcctctgtgggggaagaggagaggggcatcagccaagcagtgttagtgtgttagtgtctgctgagcctctgtcagctctgcctgatgagggtgagcacgtgctagggtcttaccagtgctaggcctttatcgcctctttgcagtgatgcgatgacagctcactgcagcctcgacnnnnnnnnnnnnnnngatcctcccacatcagcctcctgagtagctgggactacagatgcatgccaccaaaaccagctaatatttctaattctttggtacagacgggatctcactatgtgccc

SEQ ID NO: 10919 - DNA, 1470 bp, Macaca Fascicularis
  misc_feature (1)...(1470): n = A,T,C or G
caatctcatatactgaatagtcactctttaactccattaaataagatacagcaaggggaaggacaatatcgcacaaaatggcgtttcaaattcaggaggggctatttgannnnnnnnnnnnnnnacagaggcggcttgtgggcacttcttgttaaaacatctccatgttaccaacttctgacaagactcttagtataggcttgggcaccaacccaagattaaagtcaagaacctcaatcacttctctacaactacaggtgnnnnnnnnnnnnnnnnnnncaaagatccaaatgaggcaccattcatcacagcttctttctcatggccacctagtgggtaagaggtttctcttcttaaaactacaatttcttaacgtttacaagttatttaacattttctatcatattaaattagcaacataaaacattatcctttatctataaacttctagtctggttctctagagtttatatacacatttttatttctaatctgcaagaaaaaaaaattcctattnnnnnnnnnnnnnnnnnnnnnnnnnnnnnnnnnnnnnnnnnnngcgcatatatatgtatatatatacacacacacacaaaatacacttcaaaaagaagccaacacactttannnnnnnnnnnnnnnnnnnatagattttttaaaaaaagtatgaatacaatttttgttaaaatagaaaatggggaataaaagttannnnnnnnnnnnnnnnnnnnnnnnnntccaaacttttatttgtgcacattcaattgaaaaagataactttnnnnnnntctttggtgcnnnnnnnnnnnnnnnnnnnatgtaaaagactattcacaaataaaacacattagctcaaaatggaaaaaaataacaatgacaacaataaaacaatctaaggtagtgcacactgtgnnnnnnnnnnnnatggggacatgagaattactgcgaaaataaatagaatgtccttttgtaaaagcagcaatgtcatgtcttgtaaacttccttttatattacagcaaggttggaataaaatccaaagggactggagcttacactgtagccgtgannnnnnnnnnnnnnnnnnnnnnnnnnnnnnnnnnnnnnnnnnnnnnnnnnnnnnnnnnnnnnnnnnnnnnnnnnnnnnnnnnnnnnntagagattctaaccaattaagtggtgaattataaaatttctttcctgnnnnnnnnnnnnnnnnnnnnnnnnnnnnnnnnnnnnnnnnnnnnnnnnnntacattgggccctgttactgtgatacttcctgtcgaaaaaatctgtaacgtagctcnnnnnnnnnnnnnnnnnnnnnnnnnnnnnnnnnnnnnnnnnnnnnnnnnnnnnnnnnnnnnnntattgttctttgtgaattctggcaaacggatttcaaatggcatgttacacactgccagaacattaacaaccttaaaatctgtaaatannnnnnnnnnnnct

SEQ ID NO: 10920 - DNA, 602 bp, Macaca Fascicularis
  misc_feature (1)...(602): n = A,T,C or G
cctggaggccacatcctgccccaccccacccctactcccacggacactaaaacgctaataatttattagatctaaagcccctttctccccagcccctgctttcattaaggtatttaaacctgcggatttcaccgctctcccccatgatggagggaggcagggagccccccaacctcagtgaggagagccccgagccggccccggggcaaagaggggtgcagagggagttcccccagatcagcaccccccacccctccccagctagtagcatgaccaggaaagggttaatgagagccgagaggagtacccggtgcgcctggtgctggtggctggagacctgggggcaggtggatctggggctgtccccccccgcccgccgccccggttttttccaccccacagttcctcctgggatccagtcctccagggaagtggagcctccagcccctaggggatgcatgagaggggaggggtgctgagtgggaggaagagtcaggctcagagctggggtggcctgggggtgggggtgggcaagnnnnnnnnnnnnnnnngggtttttgcactgttttttttgttgttgttttggggttttttttgttgtt

SEQ ID NO: 10921 - DNA, 775 bp, Macaca Fascicularis
  misc_feature (1)...(775): n = A,T,C or G
atagattttgttaccagcagcatttgataagaggtccacnnngtctttggtaaacaataaacatttttataacaattgttgtacagtcggctggtgctctaagaacaatagaacacatattggctcaaaccagagtttggggaggttggtaggagggtgggttgagataatgacctaaacgaagtgaccctcacaaaatctatttttgttaagtagatgtatttataatgaagttaaataagcattatttagggatatgttgtttcctataccaaattattttcctgtgtgctattagtagttacaaaatttagctatcctggaatcccagaataacactttctgaaaccatatgactgctctgttcttattcgtgctttcaagcagaggatcaacaaatgatggttnnnnnnnnnnnnnnnnngtcttgatcgttaaaattgtactggcacccagctgtgctcactcgtaactgtctatggctccagctacactataacagcaaaggtaaggagctgcaacacttcatagcctgcaaagcctgaaataatttactatctatcttgtccattannnnnnnnnnnnnnnaactttaaaagaaatgaagtctgaaacctcacttttccttctagccttacaaaaattgcctgacctctcaagacttttaatcacttcagggattcttgtgacattcaaatgagatgtatgtgaaagcaccctatacacagcnnngcactaagtagtagtagcannnnnnagtaccaccgccttttcc

SEQ ID NO: 10922 - DNA, 679 bp, Macaca Fascicularis
  misc_feature (1)...(679): n = A,T,C or G
tccagggcttcagggaattgcgaacccttccctacatcggggtggctgcgcctgaccacaggaattaaggactcgactcgcctgtcttactgagttgtcaggcctaggaacccaattatgaggaacctggggccatgagaagtgaaatgatgagttatccaagtcacacagctaattaagtagcagagctgggattagaactcaggtttcctgcctcccaagattgttannnnnnnnnnnnnnnagcaaacccctagtgacttcttaaagcaaatcatcggacgaccggttgtggtaaaattaaattctggagtggattatcnnnnnnnnnnnnnnnnnnnnnnnnnnnnnatgaatannnnnnnnnnnnnnnnnnnnnnatatgtaaatggacaactgaagaataagtatggggatgcatttatccgaggaaacaatgtgttgtacatcagtacacagaagagacggatgtgaagacaccaaaagagcaacgcttttcatagttggatatatttttttatgaattttttctaatttttccttcttttgtgatacaatttgtcctgtttttataatagttggtgatttttcactgacatgtaagacaaatgtacacaattgtggatttaattgtgaaatgttctgtcacatttaagtttcagtcattatacctcgttgt

SEQ ID NO: 10923 - DNA, 734 bp, Macaca Fascicularis
  misc_feature (1)...(734): n = A,T,C or G
cattcatantnccttnnnaaaatatattcctttgtgttcaacagttaatcaaaaccagagagtctagggcagcctctctggcgttgtcagtgatgtaaattcagtccctgatttttaattttctgtctagtgtcacagatcattgttgcacacaaacatggcatagaaaagaacatgttcagaagccatggggccaagcacatgtggggacggtctcgaatgcgtgatcagannnnnnnnnnnnnnnnnnnnnaagtgagctcagatccagcaccatgttcctcctgacccatcctgtctatcttctcagttgagtttttaatctcactttgggtttccttgtgaagttggagggaagtttataatagcctaacactaccccacccccaactaggaggaacctctgttttcaagagagatgcctgtcctgtgcttggatagtcagtcaattatttgtgtatgaaacaatgtacaaatcaatgttttgaaaataatgatctcagactttctaagttaaattttaaaaattttgattgtttgccatattgggtgggtttactcttagaatcgcatgctgtagaaatgctcaaaagtgcatataggactcagtccttaggtgttctttttctttaagaaataacctcttacagttgtaaccattgcggctctgtccacttctcgttgctgctctgtggcacatatcggaagcagtacagcgcgcggctctacacgct

SEQ ID NO: 10924 - DNA, 889 bp, Macaca Fascicularis
  misc_feature (1)...(889): n = A,T,C or G
atgttggaggtgattttttttccataggagaataccatctgacggctgcacattgtaacagtaaaggcagaaagctatagtgataacctctctcctaaaaggagttaactggnnnnnnnnnnnnnnnnnnnnnttaaatctctgatgtgtcaggtgcagccaaatatcacacgtgatnnnnnnnnnnnnnnnnnnnnnnnnntcccaannnnnnnnattccccccacccccagaagtttacagaaaactgcctcttcaagtgtttgccttattcagnnnttcacttgtgccattaagcaagcactgtagcaaaagccannnnnnnnnnnnnnnnnnnnnnnnnnnnnnnnnnnnnngctccattctctctgtacttggtattgtattttttataaataagatttttatgtaaagcttatttgatttacagggaccttgctgcagtaaataccatctcaattttgtgccactggttcagctgttagcacagtaaaaaaatcatttgtatcacaggggcaaatgctttattaaggtagtaaaagggaacattacttctgctttcaggaagnnnnnnnnnnnnnnnnnnnnnntgcttttaagcaaattaaagtagtaaaagaaaaacttaagtgaaacctttgccatcttaatgttttataatataaannnnnnnnnnnnnnnnnnaagccatggttaacctaaatgtctcatgccccagttcagcaaaaggaggaaaatgtgcctgcctcactgtcatcagtctttctaaatcttttacctttttttttgttgttcttaaggggttgaatttgcctgcattccttgtctttaggggaaattccctttnnnnnnnnnnnnnnnnnnnnnnnnnnnnnnnnnnnnntcttcc

SEQ ID NO: 10925 - DNA, 770 bp, Macaca Fascicularis
  misc_feature (1)...(770): n = A,T,C or G
cagcccctgaccttgcntnnnnngggccctgagggagcaggcagggctgaggctggaggaagaggcggcaccagggtccaggcccaacggggctggctgtccttgcttgctgccttctggnnnnnnnnnnnnnnnnnnnnnnnnnnnnnnnnnnnnnnnnnnnnnnnnngctcaaatgtggtttttagacagatttgttcatagaccctctcaagtgccctctccgagctggtaggcattccagctcctccatgcttcctcggttaaacaaaggacctcagctgcttctcccacttggccaagcagggaggaagaagcttaggcagggccctccttccttcttgccttcaggtgttctctcccaggggctggcgtcaggaggaagcatagaaggcaggtgagcaaacagttggctgggggctcaccagagctgtggagaggggaccctaagacccctcagcctggctcctaccccccacccnnnnnnnnnnnnnnnctgctcactacctcctcagggatggccgctggccacgtcttccttctgcctgagcttcccccctgccacaggccctttcctcaggcaaggtctggcctcaggtgggaagagcagcccttggccagaagtcaagcccagccacgtggagcctagagcgagggcctgaggtctggctgcttgcacctatgctggggccaccgacttctccatcctttctgcttctcaatatcacttgagtcctggggcctgagttttcatgttttaaaacagaacc

SEQ ID NO: 10926 - DNA, 740 bp, Macaca Fascicularis
  misc_feature (1)...(740): n = A,T,C or G
gagatgacttcagtgatgcagaccagctcagagtgggtaatgatggcattttcatgctggcatttttcatggcatttatnnnnaactggcttggattttgtttatccttctgtatcaccaataccatagctggaaggtatggtnnnnnnnnnggatttggcctttccttgatcaaatggatccttattgtcaggttttctgattattttactggatatttcaatggannnnnnnnnntttggtggatatttcttgtacttggtctgctccttttcttcagaggatttgttaattatctaaaagtcagaaannnnnnnnnnnnnnnnnnnnnnnnnnatagaacaaggtatttcttcttattatagagactgcatcaacctgacattcctttcttataccaatgtgaaatttctggatcatctgtaaacctacaactttaatagaagactactaataacagaagactagtgaagaaaagatggagcttcagaattgaatggcagggtggtttatgcttacaagccatttctgttcattctttaagtatctgtatttcatttgttttgcacatacgcatatgtgcccatttgagagatttgcgtatacttgatagaaaccgtaaagttgtagcagttaagtccagtcacatttggttaatcagtgtttgatataattgaaagagttgagtggataaacagtcttccagcttgtaaatgccattgacttctgacctgacattt

SEQ ID NO: 10927 - DNA, 851 bp, Macaca Fascicularis
gcagatacctgagaacggaaggagacgctacagcgcgcagatcctccaaaggcacacgttgcccaccaccccatctctgaccgtgaggccaccctgaggtgctgggccctgggcttctaccctgccgagatcacactgacctggcagcgggacggggaggaacagacccaggacacggagcttgtggagaccaggcctgcaggggatggaaccttccagaagtgggcagctgtggtggtgccttccggagaggagcagagatacacgtgccatgtgcaacacgaagggctgccccagcccctcaccctgagatgggagtcgtcttctcagcccaccatccccattgtgggcatcgttgctggcctggctgtcctagcagttgtggtcactggagctgtggtcgctgctgtaatgtggaagaggaagagctcagatagaaacagagggagctactctcagcctacaatgtgagacagcttccttgtgtgggactgagaagcaagatttgttcatgccttccttttgtgacttcaagaagcctgaattctccttctgcaaagatgtccaaatgtgtcttcacccctgttagcataatgtgaggaggtggggagaccagcctacccccatgtccaccatgacccccttccccgcactaccctgtgtttctacccaattacctttcctgttccagagacattggggctcggatgtctttatctctgtctcaacttcatggtgtactgagctgcaacttcctgcttccctattaaaattagaatctgagtataaatttacttctttaaattattgccattagaggttgatgagttaattagaggaggagattacta

SEQ ID NO: 10928 - DNA, 713 bp, Macaca Fascicularis
  misc_feature (1)...(713): n = A,T,C or G
tttaagtgccagtcagtgannnnnnnnnnnnnnnnnnnnnnnnnggggcgaggnnnnnnnnnnnnnnnnnnnnncaggggtgacaggaagcgtggtgaggcagccagatgggaaggaggaacactgaactcctctggcaaaatgtctcagtctgtcnnnnnnnnnnnnnnnnngttttgtcatagttatggtgttccttctctaggaagggaattccttctcatagctatctctgctcacatagagatgtctgtaggtaacagggtgggctggcttccagtgtgggtgaagatggacaaggtcagaccaatccagggagcacttctttcttgcaggtggacattgcatctgggatggccattgaagggatgtgctatgcccagaacattccaacccgggaccggctagagggcatggcagccttcagggagaagcggccccccacatttgttggtgaatgacccccactttaaccttcagcttgggagatgcatgccctgaagagcaggatccagaaggaagatttgtggccggactgccttcattatttcacctctctaggcttccgtttcttcannnnnnnnnnnnnnnnnnnnnnnnnnnnnnnnnnnnnnctagaaccaaggtgctgatcctaccacctactgctgccttccttagcttcannnnnnnnnnnnnnnnnnnngagggttgggtttgctttggaaaatgcc

SEQ ID NO: 10929 - DNA, 743 bp, Macaca Fascicularis
  misc_feature (1)...(743): n = A,T,C or G
gggtatgagccannnnnnnnnnnnnttgtacgtgaatgtttaatgtgctctcaaaacatggaaaataagtttagtgcacatagctaaatcacaaaacatccaattttctgtttcctcnnnnnnnnnnnnnnnnnnnaccacatcacgtgaccttaacatgatcaatatctttctctgccttgacatttaaataaataaattgagataagtagattagaaaatcattcaaatgataccataatctgtacaaannnnnnnnnnnnnnnnnngcaggggacagggtgcgggcgatggccacgtggccaaggccccacaggaacgcgccgaggtctccctcaccctccaggtgtccttcgcacccaatagtgcgtctgaggaacgaactgcagtttgagcgtcccctgagatgtgcgtagcctccgtgtaaatgtccactcccatggcnnnnnnnnnnnnnnnnngcattttccnnnnnnnnnnnnnnnnnnnnnnaggggacgacggtgcagccacccagccattaccagcagcgtgcggcagacgaaggcagtcgaggtgtggaggtgatcacgcagatacatgtttttgactgtttaatttgaaagtttacattttttatgctttgtgttggtgtgtaatttttgtactcttggtggctagtttttgtcaaatcttttttggaatattgcttaaatgttttgattttatgatagtgaagcttgtattcagnnnnnnnnnattaa

SEQ ID NO: 10930 - DNA, 749 bp, Macaca Fascicularis
  misc_feature (1)...(749): n = A,T,C or G
tcaggcaggcgtacagggtccagagnnnnnnnntcccnnnnnnnnnnnnnnagccatggcctcacctcccgccagtggtggctggacgtggtcctgcagnnnnnnnnnnnnnnnnnnntccaggatgctcaggctgtagcccccatcgctgaacagctgtatgaggacttcagccgcccctgcacctggcaggtgttggatggggctgaggacaccctgagggagtgccgcacacggggtctgaggttggcagtgatctccaactttgaccgacggctagagggcatcctgggggcccttggcctgcgtgaacacttcgagtttgtgctgacctctgaggctgctggctggcccaagccagacccccgaattttccaggaggccttgcggcttgctcatacggaaccagtagtgacagnnnnnnnnnnnnnnnnnnnnnnnnnnnnnnnnnnnnnnnnnnnnnnnnnnngcannnnnnnnnnnnnnnnnnnnnnnnnnnnnnnnnnngaccctgtagtcagggattctgtacctaaagaacacatcctcccctctctggcccatctcctgcctgcccttgactgcctagagggctccaccccagggctttgaggccggtgagggaagtggctgggccctaggccgtggagaaaaccctaaacaaaccttggagacagggagcctctttcttcacagctctggactttccccctctgcctgcagcctttgtcacctattctgataataaa

SEQ ID NO: 10931 - DNA, 729 bp, Macaca Fascicularis
  misc_feature (1)...(729): n = A,T,C or G
tcccgcagagaacccatgccaggagcagggggacgtgatccagatcaagctgagcgagcacacggaggacctgcccaaggcggatggccagggcagcacaaccatgctggtggacacagtgttcgagatgaactatgccacgggtcagtggacacgcttcaagaagtacaagcccatgaccaacgtgtcctagggccacctgcctcacagctggccctcacttgggggctccaagggacgatggctttgccggcttaaattaaccagacagcggacacctggcccacgaggtcccccagccnnnnnnnnnnnnnnnnnnnngcctgttttaagttctagatgcatttctctggggtgttttgggcttatttttaaatttttaatatgggttcctttttgtgtgatttaagacactttttggactcaacgttccatttttgaatgtagtaaattaaccaaaaaagttacaacttcctaattttagtgacagctctacctgttagactcttactttttaaaatcttttctattttcctcgctggggcagtgcccttggcacggtggtactgggggtggggcagggacacctgaccacaccagagtatgggagacggcaggccttgtccccnnnnnnnnnntgcctgggagttttgtattcatcttttgtacagttgtggacatttaagacagtatttgggtacctattttcattgtaaaactatctgaacc

SEQ ID NO: 10932 - DNA, 731 bp, Macaca Fascicularis
  misc_feature (1)...(731): n = A,T,C or G
ttttttgcccctctaagggtatgcttgtgtatcatttgaattcagattnnnnnnnnnnnnnnncatctcaaagttatatatactgggtattaaaattaaaagcaagtgatatnnnnnnnnnnnnnnncttttgaatgtacaaagacccgtgctattgagacaggttttagatattttttatccattctaaannnnnnnnnnnnnnnnnnnnnnnnnnttttctgtatgtataacctgtaaatatccattttgacataggaagaactttggttaagagtaagttctctaattgtgtttgttttaaggaatgaaannnnnnnnnnattttgactacttcattattaaaaattgatagaattttagctcctgagatattnnnnnnnnnnnnnnnnnnnnnnnnnnnnnnnnnnnnnnnnngatacgaaacttgttattgttactacataggcactggtacgaattctcaataagaatgcaatggaacagttaggtagaaccataactacataggcactgnnnnnnnnnnnnnnnnnnnnnnnnnnnaaacagtgaagtgcagtgtttctttttgatgtcttttattttacaactgggccaaaggcacatgatgtatataattagtttatatttacacattagcatannnnnnnnnnnnnnnnnnnnnnnnnnnnnnnaattccgaacattatttatacatgtaaaatgatgatatataagtgaattttgtgctc

SEQ ID NO: 10933 - DNA, 692 bp, Macaca Fascicularis
  misc_feature (1)...(692): n = A,T,C or G
aaaaccgattcaagctagtcaacagtgccantannaggctgacagccatgacactgaaaaccaaccaggtggccattgcacagacccnnnnnnnnnnnnngtcaggccgacagttctgcattgctgtcacccatctaaaagcgcgcactggctgggannnnnnnnnnnnnnnnnnnnnnnnngacctccttcagaacctgcaaaacatcaccgaaggagccaagattccccttattgtgtgtggggacttcaatgcagagccaacagaagaggtctacaaacactttgcttcctctagcctcaacctgaacagcgcctacaagctgctgagtgctgatgggcagtcagaacccnnnnnnnnnnnnnnnnnnntccggacctcaggggagtgcaggcacaccctggattacatctggtattctaaacatgctctgaatgtaaggtcagctctcgatcnnnnnnnnnnnnnnnnnnnnggacccaacaggctaccttccttcaattatccttcagaccacctgtctctagtatgtgacttcagctttactgaggaacccgatggacttttataaatacttgctttgtctttttaatcacaagagtcttaacgggatgtttcaggaaacaaataggataagacaatgccagaggaaggatagaaacatgggaagtttctatcatttcattttctg

SEQ ID NO: 10934 - DNA, 675 bp, Macaca Fascicularis
  misc_feature (1)...(675): n = A,T,C or G
gannngaaaaatccatatcctctgcttctggtgaacattggctcaggggttagcatcttagcagtatattccaaagataattacaaacgggtcacaggtactagtcttggaggaggaactttttttggtctctgttgtcttcttactggctgtaccacttttgaagaagctcttgaaatggcatctcgtggagatagcaccaaagtggataaactagtacgagatatttatggaggggactatgagagnnnnnnnnnnnnnnnctgggctgtggcttcaagggttattttggagctgttggagcactccttgagctgttgaagatcccctgatcgttacctggggaggggttcctgannnnnnnnnnnnnnnnnnnnnnnnnnnnnnnnnnnnnnnnnnnnnnnnnnnnnnntcatgactgtgcactacctgaaacaaagtgagaaaggatgcgtgtatttttctaagtcatcaagataaatccttaagaattcagtctaaactagcaaccaggaaggaaagataatattaaaaacaacaaaaaagtggcccatgtccaagcagtgtgaggatttgctgtatataagttgcctgctttgtatttttgaaatctctgcatcactcactggagatgctttagaagagagctgctctgtgttcagttgactgtggttt

SEQ ID NO: 10935 - DNA, 774 bp, Macaca Fascicularis
  misc_feature (1)...(774): n = A,T,C or G
ttgtaaaaatgtaaagttaatgcatttgtcatatactgtannntnttagctttaccgtatttcattctttaannnnnnnnnnnnnnnnnnnnttagaaatgggatggaaggttcattgaaaaatacctgtaagtaactatcttgttaatatcttccatctgacagttatgactctatnnnnnnnnnnnnnnnttctttttaaaaatattcaatgattagtattgaatgcaatattcctatatattgtactnnnnnnnnnnnnnnngctttcatccatttagtgaaaaaatagtaaaattaagtcggaagaaattgcttacaattttgtaatttgtatttatacgccccaaatgcatcaaatgcagtaggagaataatataatacagcttggtacctaaatatagctaagttggtttttgaatataaaagtttatgaatatttgcattttctgtatttttatgatttgactttttagagtctatgccaaaatatatggctgtaaaacagtactttgtaattataacttatggtcataactgttagtggactacttacagaagcaagagcctgttataatgactgtactttgtgaacaggctgatctgatatgttaagtacagaagtgcttagtatcatgactgtcagaaccattctgctactgagtgagtgtgaaatcacagaccagtgatgttggctaattcacgttaaactgttaggccattgctttgttaatgacttctctaaatgcatagtgtgatgcgatcctctggcat

SEQ ID NO: 10936 - DNA, 723 bp, Macaca Fascicularis
  misc_feature (1)...(723): n = A,T,C or G
tgcacagtgtnnncatnccagcnnnnngnnnaggacatgcgaacannnactggccagccttannnngtgggaacagctcnnnnnntggcccagctagccagcgatgtgntcctcgtggatgggagtgcagtggggaaggtaggggaaacacgaggcacagtgttgacggggcagtgaccagacagtcccgggagccagaaggcccaggtggcccaagtgctcttggtggcccagcttggccagcgcatactttcctcctgcagcaccccttgctgaaggggtcccccattgttttgcttccccagcgcnnnnnnnnnnnnnnnnnnntttgagctcacctgggcccagctcctgtcaannnnnnnnnnnnnnngttggtgtcatgtttggataccagtgttttatatttatacatagagaggattttctaatatagcctattatatataaatagatctatctatatgcacatacatatatacacacacccagccgatctcccgctcccagactgctctcatatgtggggaatgggatgaatccccaactgtgcctcgaccatcaaagccggagctccagggctggaggggggcagctatgtgtcctgacccccaccattcccagagcctgnnnnnnnnnnnnnnnnnnnnnntgcaattgcctggtcttttttttttttctcnnatgtgcctccccatccctcaaatctatgcaccaaagctc

SEQ ID NO: 10937 - DNA, 757 bp, Macaca Fascicularis
  misc_feature (1)...(757): n = A,T,C or G
gcttccccgcaaannnnnnnacannnnnnntgacataaagctcnnnnnnnnacacattccagattcccatccagttccccaaggatttcttttctgtgattattgaaaaaggaagtttgtctgccatgcgtttcctcaccgcggtgagcttagagcatccagagatgctggagaaagcgtcccgggagctgtggatgcgcgtctggtcaaggnnnnnnnnnnnnnnncagccccagagcatcctagcggctgcagagaaggctggcatgtctgcagaacaagcccaggggcttctggaaaagatctcaacgccaaaggtgaagaaccagctgaaggagaccactgaggcagcctgcagatacggggcctttgggctgcccatcaccgtggcccatgtggatggccaaacccacatgatatttggctctgaccggatggagctgctggcgttcctgctgggagagaagtggatgggccctgtgcnnnnnnnnnnnnnnnncagactttaagattgccnnnnnnnnnnnnnnnnnnnnnnnnnnnnnnnnnnnncatctgctgaaccccagctccaccataaggcnnnnnnnnnnnnnnnnnnnnnnctgatagaggtattttctgtggccctgggagctgtctatctttcccctacccccaaggacaccaggaaggggtccaccattagtcatgtggcaacctttacttctatgcctcacaagtgcctttcagagagtccccactctcttcccacaaa

SEQ ID NO: 10938 - DNA, 1296 bp, Macaca Fascicularis
  misc_feature (1)...(1296): n = A,T,C or G
tcatgacagagatnncagatgtcagannnnnnngatttnctacgacatccaaactnctcattnnngatgattcaaggactacactnngttatatgaagaggcaaaatatttcagcttcagnnncatgttgttggagatggaaagatggaaacaggacagagaaactggtcgcttttcaaggccctgtgagtgcctcgtcgtgcgtgtggccccagaccttggagaaaggatcacactaagcggtgacaaatccttgatagaagaagtatttccagaaatcggcgacgtgatgtgtaactctgtcaatgcaggctggaatcacgactcgacccacgtcatcaggtttccactaaatggctattgtcacctcaactcagtccaggtccttgagaggttgcagcaaagaggatttgaaatcgtgggctcctgtgggggaggagtggactcgtcgcagttcagcgaatacgtccttcggcgggaactgaggcggacgccccgcgtaccctccgtcatccggataaagcaagagcctctggactaaatggacatatttcttatgcaaaaaggaaaacacacaaaaccaataactcaaacaaacaaaaaagggacatttatgtgcagttggaacagcaaaccaagtcctggacctaaaatcgaataaaagacacatttatatccaatagagaccacacctgtattcatatgggaacaattggaatagtgatatcctcaaggtgtaaaaaatatataaatatatatatatacatatatatatatatatatgtcaaaaggtaggaaatgcaaaaaagaaaaaaaaaaggtgatagccgcagttggtgctgtgatggccgtgaagtgtcgtaggcctcccgaggtctctgactaataaacaagccatgagcggtgaggacacagtctccttacagtttccattgccaacagccatccattctttctttttcctttgtctttctttttccttttttttaaaaaagaaaaaaaaaaccaaacaccttgaatccaagtttttttgtatatggaggttccacgtccctctttaggctgggaccaggcgggaattcagaaaaaccatcatgagcacattgcaaagatgttagacatgaaattttacatgtagtttgtacagaagtcacacttttttgtccacatcacagatgtgaactttaaatttgttttaaaaatgatcagttttgccaaaggggcacaagaattattccttgttagaattgctccagttcaagtctgctgctttcctacaattannaacggatcaag

SEQ ID NO: 10939 - DNA, 707 bp, Macaca Fascicularis
  misc_feature (1)...(707): n = A,T,C or G
caagatattttaaaaaatcaacagtttctaagcatactaccacagtttttatcacgtctccatcatcctgtggtttctagagattgacagatactatgtttgttttatagatatggtaattaatgaaacaaatttaaattgtcttccattctttctttctcagttcatttctttttgtcttcccactgatagtctttggcagctnnnnnnnnnnnnnnnnnnnnnnnnnnnnnnnnnnngaaaattnnnnnnnnnnnnnttatctttacataaagccaattatatagcagtttgattatgaattctaggtggaagaattagaatagtctttggaatgggttttgggtaaaaccaaaatagggaaaagggtattgttaggaaacttgtcttgatattaagtatttactgcaagtccagtaagccaaaggatcaaacaaaataggttcagggtttcattttaatctcaaagattctgatttttacccatatgtcatcagttcagtttgggacatgtggtgtagcatgtgtgaagaaaatattcattaaaatgtaaaaataaacagttgaaattttccataacactgagcaaatatttgttataattaggatgcctacctttctgggatatttgtaaggtgctgtagtttttttaacatgctcctgaatctcctttattagttgttcttgatcatgtgactgtaatcagg

SEQ ID NO: 10940 - DNA, 697 bp, Macaca Fascicularis
  misc_feature (1)...(697): n = A,T,C or G
gtcaaagatntnctgtagtgctattgaagtannnnnnacaaaacacagttggccctctgtatccatgtactctgcatctgtggattaaaccaattgcagatcaaaaatattagaaaaaatataaaaataatacaaataaaaatgcagtataacagttatttaaatagcatttacactgcattaggtattagtctagagataaagtatacaggaggatgtgcgttggttatatacaaatatgtcattttatgtaagggacttgagtatacttggatttttggtatctatgggttgagggggcggtctgggaaccaataccccatggataccaagggacaactgtacttatttacctttatgatcattgcaagnnnncccagccccccatcccccccattccccgggggagctggggaattcctgccaagcaccttgaatgggaggggcctcacagagggcagggccagggtccagcaggggtggggggttcctgctctgcccctgcccgtccccacccagtcttgccctcccatcctctcatctgttccccgctggagacggaagatcttttattttctattatttataacttcagacttgggccccctgttctttctttcccattaacttgagtgacctgtgtgagagacagacagatgccccatgaggatggctggacaaggacttttacttttta

SEQ ID NO: 10941 - DNA, 686 bp, Macaca Fascicularis
ctttaaagggtataatattaatgtttaaaaatgacaaagatgaattattacaataaatctgatgatgtacacaaactgaaacacacacacataccccctaatgaaaacattggggaaaaacgtatttggttttgttcctttcatcctgtctgtgttatgtgggtggagatggttttcattctttcattactgttttgtttgatcctttatatctgaaatacctttaatttatttaatatctgttgttcagagctctgccatttcttaagtacctgttagtattatttatgtgtatcaggagtgtgtttagtcttttatttgcagtaaaccgatctccaaagatttccttttggaaacgatttttcctctccttaatttttatattccttactgttttactaaatattaagtgttctttgacaattttggtgcttatgtgttttggggaaaaaagtgaaatcaatctgtcattataccagaaagttagttttttaaactctcagatcaaatgtgccttaataaattttttttttcatttagatttcaaacagtgatagacttgccatttcaatacacatcattggagatctgcgtatttgtaaatagcgcgatgctcattggaaaaataaaccagtgaacaatatttttctattgtacttttcagaaccattttgtctcattattcc

SEQ ID NO: 10942 - DNA, 762 bp, Macaca Fascicularis
  misc_feature (1)...(762): n = A,T,C or G
ctnnnnnnnnnnnnnnnnnnnnnnnnnnnnnnnnnntnnnnnnnnnnnnnnnnnnnnnnnnnnnnnnnnnnnnnnnnnnnnnnnnnnnnnnnnnnnnnnnnnnnnnnnnnnnnnnnnnnnnnnnnnnnnnnnnnnnnnnnnnnnnnnnnnnnnnnnnnnnnnnnnngtggtctcaatctcctggccttgtgatccgcccgcctcggcctcccaaagtgctgggattacaggcgtgagccaccgcgcccggcttaaccacatcattttaatgattgtattagattcttctattttcagacatctatattgtttctagattttgatgtgataaataataccattatgacctcctttgcactaaatatttatgtgcatctttggttgtttcctaaggaaaaatttcaagtggaattacttagatcaaaagggtaggcccattttgggggcttctaatgcatgttaccaaaatgttcttcagaaagattttccggttttatgctgtaaagagaatatgaatacttattttgctgtgttcttatcaatattgggtattagtatttttaaaagttgataattgaaagctggtatattatgtgaatttacattttcttgctgcttagtgatgtcctgtatttttcctgtttgtaccatgactgaccaaattgctttttgtgtcctttggcctcaaaactttaaattnnntggtgttcatcttttactccttattttcatcttgctagaaacaggaacagattatataat

SEQ ID NO: 10943 - DNA, 842 bp, Macaca Fascicularis
  misc_feature (1)...(842): n = A,T,C or G
attgttggacagaaaatgacgactttgcagcacagatctcagggcgatcctgaggatcctcacgatgaacattacctgctggccacacagagnnnnnnnnnnnnnnnnnnnnnnnnnnnnnnnnnnnnnnnnnnnnnnnnnnnnnnnnnnnnnnnnnnnnnnnnnnnnnnnnnnnnnncctctgatcttccagaaagactccattcccaagaagtagatttggggtcctcacagggagatggcnnnnnnnnnnnnnnnnnnnnnnnnnnnnnnnnnnnnnnnnnnnnnnnnnngaagactgccatctcgctgtttgaagggaaagccctgggcctggataaagccatccttcatagcatagactgctgttcatccgatgataccaaaaagaagatgtacagctccatcctagtggtgggaggtggtttgatgtttcataaagctcaagaatttctgcagcacagaattctcaacnnnnnnnnnnnnncgttcaggcgaattattgaaaatgtggatgtgatcacaaggcctaaggacatggacccccgactgattgcatggaaaggaggggcagtgttggcttgtttggatacaacacaggaactgtggatttatcagcgagagtggcagcgctttggtgtccgcatgttacgagagcgggctgcgtttgtgtggtgaatggggaggaaatgtcactgctgaagaccaaannnnnnnnnnnnnnnataaaagactcttacagaatatatgtattgtaatttattggcctagatgcttaagtgtcatggacagtaaatgaatttgaactttatgttgaggacatgatactggtttgaaattat

SEQ ID NO: 10944 - DNA, 1042 bp, Macaca Fascicularis
  misc_feature (1)...(1042): n = A,T,C or G
ggagggcgcggagaagatggtgagggaggcggagcagctgcgcttcctgttccggaannnnnnnnnnnnnnnnnnnnnngacgtggacggatactgtgacaccatcgtggctgtggccgaagtgatcaagctgacagacccttctnnnnnnnnnnnnnnnnnntccactctggtcagcaagtatccagacttcagggaggaccccatcggtgcgctgcgggctgtgcgtggggatgccagccgtgacatgaagcagaccttcatggagaccctggagcagggcccggcgcaggccagccccagctacgtgcccctcttcaaggacattgtggtgcccannnnnnnnnnngccaagctgctcaagtagcctcccgcacgcccgtgcacagccccagtccctgccctcagaagcgcgggaaagccgattgctctccttgnnnnnnnnnnnnnnnnnnnnctgcacggcctgtgcttaggcgccagcttgatacaccgggtatgcgtggagtgagcgtcctgaggccacgtgcagaggcccctcattgtgctctcaaagccctgtgtgcgcagggctctgccacatagcctctctggggtgcttgtttgttgcagtggttgaaggcgtgtggggcgcaggggacgtgcacctccgtgcccctctcctccctgggccttcactgcaccccatctgctgtaagtgctcgaaaccctgtcacctaattaaagtttctcggnnnnnnnnnnnnnnngaaaaggccacgcattctcttttctggtgaaggttttctgactagtgatcnnnnnnnnnnnnnnnnnnnnnnnnnnnnnnnnnnnnnnnnnnnnnnnnnnnnnnnnnnnnnnntcctggtctcctcctgtctgacatccccagacttactccttgggttctttgagagatgagacactcaccagctgcacccaggaagccctgtccccacccttaggtgagcagacctctggcaccgggtggtgccagccaagtcagccgtacctggtagacgagcaatggcaggagtgtaaa

SEQ ID NO: 10945 - DNA, 746 bp, Macaca Fascicularis
  misc_feature (1)...(746): n = A,T,C or G
tgaagtgacagaggaaactcagtcttggcctggggaannaggatcgccattagtgacttgggccagttagatgattcactttttgcccccagggatgagaggcaaaagccacttctcatacaagcccctctattgccactaccccacacttgtctagtcctgaaactgcaggaccagtttctctgccaaggggaggagttggagannnnnnnnnnnnngttgtgtgaggacagtagtaggcatctggaatgctcctgtttgatctcccttctgtcacccactcctcacccccagtcactcacatcagagcctggactggccttcaggatgaggatgggggtggcaatgacaccgtgcaggggaaaggactgccccccatgcaccattgcagagaggatgccgccaccatgagctaggtggagtaactggtttttcttgggtggctgatgacatggatgcagcacagactcagccttggcctggagcacatacttgctggtggcctcagtttaccttccccacatcacagattctggatgtgaggaagaggtccctcttcagaaggggcctggccttctgagcagcagattagttccaaagcaggtggcccccgaacccaagcctcacttttctgtgccttcctgagggggttgggccagggaggaaacccaaccctctcctgtgtattctgttatctcttgatgagatcatagcaccatgtcagacttttgtatatgcctagaaaa

SEQ ID NO: 10946 - DNA, 671 bp, Macaca Fascicularis
  misc_feature (1)...(671): n = A,T,C or G
ggagttccagnnnnncnnnnnnnnnnnnnnntcacnnngagggcccccggcctcttgccggccccaacggacctcatccattcagcccctgcaggccaggcccagccactgtcctcccaggcagatccgggcccaggcagttctgcatccatagacaaggcctgggagaatgccaagctgcctgcccgaggctggtcctgaaggcctctctcccactaaccccgccttccagcactttctgtcattccaggctgggaaagtctagagcccgctttggccctttccctgactataaagggcaactgactcccccatcagctcaaacattaagggtacccgggtgcaactgtgcccctgcccccagccacagcctccctgagggcctgtggggctgcctccgccctagcaagggcattcccaggcttcctagtgggtgcagcccactccctctgccgtctgctccgttacctgagggctgggactagagaaatggggtgtcctgcaccccatcagccaggaaagcccaggccgcaggagcaggatgcccgttcgactttacccctcacaccggcccagctgctcacactgccccaccccgagaactctcagctctcgaaggtcattcctgggggtttcttcttcnnnngtggaagtggcttaagagccaaaac

SEQ ID NO: 10947 - DNA, 772 bp, Macaca Fascicularis
  misc_feature (1)...(772): n = A,T,C or G
ctccccggggctcctctagcaagcaataggggtnnnctggtagccaagtagtatcactgcttgcctgtggtgacagagatggtagagatggatcctgagccccnnnnnnnnnnnnnnnnnnncctggttgaaagtgtggcagggagcacctgcagtgccagagctggggtccagtgctgacggggctgccccttccctgtatacagtggccccggtgagtctgtcccctccttccctgggccgctctgaggacgaggcctggccagaagcctgggagtcagcgcctgctacaatcagcgtttcttctatggtttagctccaggcggacgacgtgggctgaagagaggaagctcaacacggagacctttggggtgtcagggaggtttcttcgtggccgcagttctcggggtggattccgaggaggcaggggcaatgggaccacccgtcgcaaccccacttcccacagggccgggactggcagggtgtgagggtgcagccnnnnnnnnnnnnnnnngnnnnnnnnnnnnnnnnnnnnnnnnnnnnnnnnnnnnnnnnnnnnnnacttacagggagaagtggtcgctttgtttctggagtttggaagagtcccatactgctacttatgttttggacttaactgaacttggacatggtctgagttagaaccacttgttttggggaagtattcatnnnnnnnnnnnnnnnggtctctttacctatgtttcctttttagttgcgcatagcctaattctaaggttttggtatttgcaaa

SEQ ID NO: 10948 - DNA, 788 bp, Macaca Fascicularis
  misc_feature (1)...(788): n = A,T,C or G
aggaaatnnnnnatgtacagtgaagtgtgatgagaaagtgaaagtgttttctgtccgtgaacatcttttgaagnngcagcaacaagnnncggtactgccagttcagaaaaggcatcaagtacttcaccagtggaaatatcagagtggcttgaccagaaattaacaaaaagtgatcgaccagagctaacaggtgccaaagtggtggtatctggtggtcgaggcttgaagagtggcgagaactttaagttgttgtatgacttagcagatcaactacatgctgcagttggtgcttcccgannngctgnngatgctggctttgttcccaatgacatgcaagttggacagacaggaaaaatagtagcaccggaactttatattgctgttggaatatctggagccatccaacatttagctgggatgaaagacagcaagacaattgtggctattaataaagacccagaagctccaattttccaagtggcagattatggaatagttgcagatttatttaaggtagttcctgaaatgactgagatattgaagaaaaaatgaatcaggatcatgccttaaaaagaaaaattacgttaaagtattccactgaaatcacagatatttgtgggtactataacaatcattggaaagcacggagagctacatttcataatttgaggaaaattttctaacagatgccagaatgctgtttatgggattactatgtttcctttgaattatttgtggttccaaagcnagttattttttgaaatttttaaattctgtaataaaatcta

SEQ ID NO: 10949 - DNA, 757 bp, Macaca Fascicularis
  misc_feature (1)...(757): n = A,T,C or G
tgccttggaaaaggtattgggaatagttcatagggaagggacaacatggaagaaacagtgatttaaattgtattgaatagggcacataaaatgcattctctaccccgatctggcatatagcttcaaaactgccgtggtgagtgcctgtctcttaattagctgccttaactccacccttactacctgtgggatctttgcctggtttgtcttctctgtgtcctgaagcaaagccagttcctaaaactaaaactccattctagtcttgggaagaaaactttctactcagaactggggaaggagtagaacttatgacttgggcgtctaggctgtctctgtcccctcaactccccgacatgcatttactcctctgccttgggtctacagtcgctgcagcccaccctctctctgcttcagccttacacccaagcagtgcgtctgtgctctccctgtctctaggtcgctgagagaggtgcttttcttcatgaaacctttgggatttggatttccccaggaagatnnnnnnnnnnnnnnnnactcttgggtgtaatctttcccctagacccagaacttcctccccacaaaaatgtctttaaaaaccttcctgagacttaagcattctgccccacttactaactgccagttctccaacactgaagtgggnnnnnnnnnnnnnnnnnnnnnngggggcatctttgtgtaaaagatgcatggagtcaggagatagccaccttcataaactgctctgtgcaaagaggaa

SEQ ID NO: 10950 - DNA, 731 bp, Macaca Fascicularis
  misc_feature (1)...(731): n = A,T,C or G
agatttcacccgttttttttgttggttgnnnnnnnnnnnnnnnnnnnnnnnnnnnnnnnnnnnnnnnnnnnnnnnnnnnnnnnnnnnnnnnnnnnnnnnnnnnnnnnnnnnnnnnnnnnnnnnnnnnnnnnnnnnnnnnnnnnnnnnnnnnnnnnnnnnnnnnnnnnnnnnnnnnnnnnnnnnnnnnnnnnnnnnnnnnnnnnnnnnnnnnnnnnnnnnnnnnnnnnnnnntgatttcttgacctcatgatctgcctgcctctgccgccnnnnnnnnnnnngattacatgnnnnnnnnnnnnnnnnnnnnnnnnnnnnnnnnnnnnnnnnnnnnnnnnnntgtgcctggcccnnnnnnnnnnnntttaagatgtatnnnnnnnnnnnnnnnnnnnnnnnnnnnnnnnnnnnnnnnnnnnnnnntatgttgttgtgacaacaccaaactgattttacggtttttatggaattattcagatgtcaaaattaactgttcaaaatgttctgaatcatgtagctacgtggcaggtaactgtttatgnnnnnnnnnnnnnnnnnnnnnnnnnnnnnnnnnnnnnnnnnnnnnnnnnnnnnnnnnnnnnnnnnnnnnnnnnnnnnnnnnnnnnnnntgcagtgtttggaagcctggcctgggctcttggcgttggcctcttgtagatcaagtaggggaaatgattggtgttnnnnnnngctgctgggacacttgcttt

SEQ ID NO: 10951 - DNA, 754 bp, Macaca Fascicularis
  misc_feature (1)...(754): n = A,T,C or G
acagttatggagaagngnnngcaggagnnncagctgtacaaggaggaagggaaccagcgctaccgggaagggaagtaccgagatgctgtgagtaggtaccatcgagctctgcttcagctgcggggtctggatccgagtctgccctctccattacctaatctcggacctcagggcccggccctcacgcctgaacaagaaaacatactgcataccacccagactgactgctacaacaatctagctgcctgtctccttcagatggagcctgtgaactacgaacgagtgagagaatatagtcagaaagtcctggaacgacagcctgataatgccaaggccttgtatcgggccggagtggcctttttccatctgcaggactatgaccaggcccgccactacctcctggctgcagtcaataggcagcctaaagatgccaacgtccggcggtacctccagctgacacagtcagaactcagcagctaccatagaaaagagaagcagctctacctgggcatgtttggttaacaaagaagaaagatgctcctccagttgaacttaggtggaccattaaacatgcatgaaggagaaacctgaccctcagcaagataaattaaccctatacctctgacccaggtggatttttgtttccagttctgcacaaactttactacttagacagtctgagtctttttctgtctatgctgtttatttctatagcgttcaatacatgttattgttggggatatttgccttgaga

SEQ ID NO: 10952 - DNA, 731 bp, Macaca Fascicularis
catatttacaggtaaatctacttatacacattagtttaggcaacctgtaattatttagagctaaaaaaaacactttttttctaaaggtgaattattttgtaaaatcctagaataatgtagcaaaatcatttccgtattactttaaaatgaaaatttttacttggaaattttattttaatgatgtaaatattctagagtcatggcttaaactttataagtcaaatttccaaaaataaggaaaatatgcatccactgagttacttaaaaatttaatattgaaaattattttaagagaacatttaactgatgctgagttttatagtcctaacaatgttctcataatgtaatagatttataaaattgttatctctatcctgagattaaggagtgcaaccatattgtagttctcttattatgtaaattgatatatcttttttgtaaaatgagggaaatataagtagtcaataaataatgtaggttatattctttcctcttcactacctaaacattttaagctgcaaacaacctattattattgttttgtagcaattttgatgacgtatttgctgatgcacagacattggaattcattatattatctagctatcgtaatacaaatgacctttggatttccctaccacagcggttatcctcccatcaaggaccagaaagttaaactttatggaccacatacatccctgtcttatattcttctttgttggtttctgttt

SEQ ID NO: 10953 - DNA, 768 bp, Macaca Fascicularis
  misc_feature (1)...(768): n = A,T,C or G
cctggatgccagtgagcgtgttcagctcctgcacacccagaacaccagcctgatcaacaccaagnnnagctgagacagacatnnnncaaatgcaaggagagatggaagacattctccaagaagcccgcaatgcagaagagaaggccaagaaggcnnnnnnnnnnnnnnccatgatggctgaggagctgaagaaggaacaggacaccagtgcccatctggagcggatgaagaagaacctggaacagacagtgaaggacctgcagctccgcctggatgaggctgagcagctggccctgaagggcgggaagaagcagatccagaaactggaggccagggttcgtgaacttgaaggtgaagttgaaagtgaacagaagcgcaatgttgaagccgtcaagggtctacgcaaacatgagagaaaagtgaaggaactcagttaccaaactgaggaagaccgcaagaatattctcaggnnnnnnnnnnnngtagatannnnnnnnnnaaaggtgaaagcctacaagagacaagctgaggaagcggaggaacaatccaatgtcaacctctccaaattccgcaagatccagcacgagctggaggaggccgaggaacgggctgacattgctgagtcccaggtcaacaagctccgggtgaagagccgggaggttcacacaaaaatcataagtgaagagtaccacgtcctgatgccatggannnnccaaagaaatgcacaaaatgtgaaaatctttgtcactccattttgtacttattgtg

SEQ ID NO: 10954 - DNA, 749 bp, Macaca Fascicularis
  misc_feature (1)...(749): n = A,T,C or G
cagcgagtttgcctgtgncnngctctactttaccgnnnctgcacacttcaaccgctccatgcgagccctggccaagaccaagggcatgagtctgtcagaacatgccctcagcactgctgtggtccggaacacccatggctgcaagatggggcctggccgagtgctgcccactcccactgagaaggatgtcttcaggctcttaggcctcccctaccgagaacctgctgagcgggactggtgacccatggctgggggtgcggaggagagctgagttggactggctacccctcctggccacccagtggagtactccctccagcctcagctggccaaaccttgctgctccaaccaccagcttcctcagcgagctgggcccagggctctgggcctgaagcgagagccagcatggctcccagtatctacccagtcctctcccagacaggagcaggctgcctcgaggaattttgcaagtggccccttatcccattttaagcaggagcaggtggctgatttgaagccccaggcatcccccttnnnnnnnnnnnnnnnnnctgagctgctgggtggggacagaagctgccggggagagggaagcagctgtgctgtcaacatcgtccaagaccctctggggtaggagaacagccattccacacgtgttccctctacccatgctgcttcctgggcagctggtggtgctgggaatggggtgccccagcctcggtgnnnnnnnngtggaagcccaggggccc

SEQ ID NO: 10955 - DNA, 688 bp, Macaca Fascicularis
  misc_feature (1)...(688): n = A,T,C or G
atcccatacaatttcatctgtgtgcagacaggctccatcctgtcaaccctaacctctctggatgctcttttctcctgggacactgtctntaagctattggccattgccatggtggcattaattcctggaaccctcattaaaaaatttagtcagaaacatctgcaattgaatgaaaccagcactgctaatcacatacacagtagaaaagacacgtgatctggattttctgtttgccacgtccctggactcagttgcttatttgtgtaatggatgtggtcctctaaagcccctcattgtttttaattgccttctataggtgatatggacactgtgcatcaatgtgcagtgtcttgtcagaaaggacactctgctcttgaaggtgtattacatcaggttttcaaaccagccctggtgtagcagacactacaatggatgcctcctagaaaatgctgtttgtggccgggcacannnnnnnnnnnnnnnnnnnnnnnnnnnnnnnnnnnnnnnnnnnnnnnnnnnnnnnnnnnnnnnnnnnnnnnnnnnnnnnnnnnnnnnnnnnnnnnnnnnnnnnnnnnnnnnnnnnnnnnnnnnnnnnnnnnnnnnnnnnnnnnnnnnnnnnnnnnnnnnnnnnnnnnnnnnnnnnnnnnnnnnnnnnnnnnnnnnnnnnnnnnnnnnnnnnnnnnnnnnn

SEQ ID NO: 10956 - DNA, 700 bp, Macaca Fascicularis
  misc_feature (1)...(700): n = A,T,C or G
accaggtagggtnnnnnnnacagagtnnnnnnccccagatatgcaacgccagcgaaagaccaagcgcaaaaccaaagagcagctggctatcctcaannnnnnnnnnnnnnnnnnnnnnnnnnnnnnnnnnnnnnnnnnccaaaagttagaacagatcactggtttacctcggcnnnnnnnnnttcagtggtttggtgacacacgttatgccttgaagcatgggcaactaaaatggtttcgggacaacacagtacctggtgcccctagtttccaagacctagcaattcctacaccaccaccatcaacccgctccttgaatgaaagggctgagacatcacctctgccgatccctccacccccaccggatatannnnnnnnnnnnnnntactgggcagcccaccaacagctacgggaaactgatatccctcaattgagtcaggtatcaaggcttagcacccagcaggtactggattggtttgannnnnnnnnnnnnnnnnnnnnnnnnnnnntagtttgtctagatgaagaagaggaagaggaggaggaagaactgctagaaggtgatgaggaagaagaggaggaggaggaagnnnnnnnnnnnnnnnnnnnnntcatacaagactgagtggggagctgggggaggggaggtctgttatgaaaagatgaaacaacttagtaactgtttaaacaaagaaaccac

SEQ ID NO: 10957 - DNA, 733 bp, Macaca Fascicularis
  misc_feature (1)...(733): n = A,T,C or G
aaggaggcaagcaagcagcagccactgcagtcaggtgggtttagcagaagtctgtgctgggtagagggagattaggggacagcagaagatacgtaaccacttctgccccccttttttgccttatccccagagcaacagctggcccagttgacacaacagctggcccagacagagcagcnnnnnnnnnnnnnnnnggcccagctggaccccctttttgagcggtgaggagagcaatgattctgttaattttgggggaatttgtggcaggagggaggaatggggacataggttgggagccactgagtggacatttcttcagnnnnnctacnnnnnnnnnnnnnnnnnnnnnnnnnnnnnnnnnnnnnnnnnnnnnnnnncacgagctgctgcaagacagcaagccggacaagggtatggaggcttcagaaccaggtgaaggcttgggaggcgagtcnnnnnnnnnnnnnnnnaaagtctctgaaactggaacattcctgatctctccccacagagaccagcagacctcttcctgaggacttttatttaaagcaggacgaggaggaggttggtgacagtcaggactgggaggagcccacaaactggaccacagagacatggaacctatctacttcctgggaggtggagcgggggctacggagaaggtgcagccagactgtggcagagggccccagtcacagccctggctgggaaggagggacgatagctgaaggtg

SEQ ID NO: 10958 - DNA, 695 bp, Macaca Fascicularis
gagagcatgttcaaactgtatgacgctgggcgggatggcttcatcgacctgatggagctgaagctgatgatggagaagctgggggccccccagacccacctgggcctgaagagcatgatcaaggaggtggacgaagacttcgatggcaagctcagcttccgggagttcctgctcattttccacaaggccgcggcgggggagctgcaggaggacagtgggctcatggcgctggcaaagctctccgagatcaatgtggccctggaaggcgtcaaaggtgccaagaacttctttgaagccaaggtccaagccttgtcatcggccagtaagtttgaagcggagttgaaagctgagcaagatgagcggaagcgggaggaggaggagaggcggcttcgccaggcggccttccaggagctcaaggccaacttcagtacatagtcctgctgaccttgccctctgcccacagctgtgcctcacagatgccccaggaagagatgacaggcatcttcatcactgctgccagtcccctcctgagccagcatctccacccatcaccctgtgccagctcccatgccagccttcattcctcccagtgtccaagcccctccgggggtcctggggtgggccagatgcctgcccatctctgtctccggcctctgctcctccaccctccctccttccttcttgcttctcacagc

SEQ ID NO: 10959 - DNA, 725 bp, Macaca Fascicularis
  misc_feature (1)...(725): n = A,T,C or G
tagagaaacccggnnnnngcatcaagtggtcacattaccacnnnnagatatttctattgaaccaaagatacaaaactaggaaactgccagaccatcttgttaggtggacactcttccgcaatcctgggtggcttcctcaagtccgtctaaaggacctcaaactattaataggtatttgaagctgtaattattaaaaacagaagtgctacatcacctgtctttcgccctgactctccaaatgaacataaagacacaccaaaaggttgaaaacagagctagctgggacaatcactgcatctatacaacagccaataccttgaaaaactgggcacaagtacatgaggaattcttatcaaagatcannnnnnnnnnnnnnnnnnnnnnnnnnnnttagctgaggttttgctcatgttgctctgaatttgtaaggacagatcagtgaaccccttagcctgagtagaaagcattttcttcccactgcagtttactacacaatttagacctgattagaagaggcattagcagcacctgaagtagagcctccagaatccactgccctttacatnnnnnnnnnnnnnnntccaccctcaggactggcatactcacgaagacatttcacaatcctaatgcatactttaggttacttacttaaccaagcaatatgctctgtcaaagaacttacttcaagtcaaagcaaaaaaggccttaatgcagaacaaaaacaa

SEQ ID NO: 10960 - DNA, 892 bp, Macaca Fascicularis
  misc_feature (1)...(892): n = A,T,C or G
agaacgtgtcnnnnnnnnnnnnnnnnnnnnnnnnnnnnnnnnnnnnnnnnnnnnnnntccccccannnnnnnnnnntcctcaccaagtccaccaagttgactngcctggtcacagacctggccacactacgacagtgtgaccatcacctggacccgccagaatggcgaagctctgaaaacccacaccaacatctccgagagccaccccaatggcaccttcagcgctgtgggtgaggccagcatctgcgaggacgactggaactccggggagaggttcaggtgcaccgtgacccacacggacctgccctcgccgctgaagcagaccatctccaggcccaagggggtggccatgcacaggcccgatgtctacttgctgccaccagcccgggaacagctgaacctgcgggagtcggccaccatcacctgactggtgacgggcttctctcccgcggacatcttcgtgcagtggatgcagagggggcagcctttgtccccggagaagtatgtgaccagtgccccaatgcctgagccccaggccccaggccggtacttcgcccacagcatcctgaccgtgtctgaagaggactggaacacgggggagacctacacctgcgtcgtggcccatgaggccctgcccaacagggtcaccgagaggaccgtggacaagtccaccggtaaacccaccctgtacaacgtgtccctcgtcatgtccgacacagctggcacctgctactgaccctgctggcctgcccacaggctcagggcggccggccaccctgtgtgtgtgcacgcaaactaaccatgtcaacggggtgagatgttgcatcttataaaattagaaataaaaagatccattcaaaaaaaaaaaaaaaaaaaaaaaaaaaaaaaaagg

SEQ ID NO: 10961 - DNA, 773 bp, Macaca Fascicularis
  misc_feature (1)...(773): n = A,T,C or G
atnnngcannnnncagcgctgctacacgannnnngcaatggggcctctatccacgagttctgcatcaacctgcggcannnnnnacgggacagccgcaagttcctgctgcttggtctgaggccctnnnnnnnnnngaaggacagtcagcacttcgagaacttcctggagaccattggcgtgaaggatggccnnnnnnnnnnnnnnnnnnnnnnnnnnnnnnnnnnnnnnnnnnnnnnnnnnnnnnnnnnnnncaccaccaacgggaacagggccacggnnnnnnnnnnnnnnnnnnnnnnnccctcagagggggatgagtgggaccgcatgatctcagnnnnnnnnnnnnnnnnnnnnnnnnnnggctgcagcatggaccaggactcagcatgatgggcagtggatcggggggcacccacaccttctgcacagtcatcgtaggccttcccagaaggagctgcccagacctgcgtgtcagcccttggttggggccagggagaggctccaggcgcaggtggccctgggtggcccaggtcctctactgtgaaggagcagggagctgccgagggacacgagccccagtgcggggtggaaggctctgccttgtccaccagggctcagccaagccctgcagcgtgtccccgctcggggagggcctggtcgagctggcagggagagccagtcctgtcggctgggcccttggacagctgtnnnnnntgcannnnnnnnnnntattgtaactctcagagacctaaaaaagtttactgcaatgt

SEQ ID NO: 10962 - DNA, 1049 bp, Macaca Fascicularis
  misc_feature (1)...(1049): n = A,T,C or G
ctcataaagggctcntctangggaaaggtgtttgtcatactgcagctgtccttggctctgactggcgtggtgacatcgaccttgtacaacaagatctatcagctcaccatggacatgtttgtgggctcctgctttgctctctcctcctttctctccttcctggccatcatcccaattagcatcgtggcctataaacaagtcccatggtcaccatatggagacatcacagagaaatgaagatgcttacctgcaggagctgaaaacaccagccatggccagacccccagaagacaaaagaagggaccgggnnnnnnnngaccaaagcaacccactgcttaagaaacccacgttccaggcagagttggcctcagtatgacctgctttggctcagggatccctggtggatggggaaaagcattttcctggtgnnnnnnnnnnnnnnnnagctttaagatactcctgttaggcagagattgggttctatgacagcagaacatgaacttaagggttatagacaggctgcatacagcagtcccaggccctgtgagggctttcagactccagctacagcgagcctgccccttttcttcaagggattgtcttgagggctccaaggtatagctaannnnnnnnnnnnnnnnnnnnnnnnnnnnnnnnnnnnnnnnnnnnnnnnnnnnnnnnnnnnagcctgagaggaatgcggaaggaatgttttgtaagaactatcaacagttttgcacgaacaatgtcttttaaattaaaataaaaccttgaaaaaagccagctttctttcctgagtcttccttggctacaaacactcaggagggggatggagctcagacccttgtcttctgggtagttttgttattactgttgcttttaagaagcaaatgtcacaaggctttcttcaatgggatattcaattgagtacttccagtcaacagtgcttcccaaagtgggtggtgtgaagaaagaggagatacattaagagctgttttattcgaggtactcatttttataacctcatttacttggattataaaagcaga

SEQ ID NO: 10963 - DNA, 1055 bp, Macaca Fascicularis
  misc_feature (1)...(1055): n = A,T,C or G
acagacagggatggggctgactgcactggtgggccggctggggggctctttggccccactggcggcnnngctggatggagtgtggctgtcactgcccaagcttgcttatggggggatcgccctgctggctgccggcaccgccctcttgnnnnnnnnnnnnnnnnnnnnnnnnnnnnnnnnnnnnnnnnnnnnnnnngagagaaagagtgccccaaccagnnnnnnnnnnnnnnnnnnnnncnnnnnnnnggtccagaactaagtgggagtggaggcaggccctccacagaagctctgcagcaggggctgggagagcagaagggcaggcccnnnnnnnnaggctgggagtatcgaaccctctgcctagggctggagttgccgccagtaccctctccctgtgctcatccaaccttgattatttggcttctaggaacagttgacttcccagaatgcagtggctgctgggcacccctctcatggctggggaggattctataaataaaggttccccttgggttggggcagtggtgaagagctgtgggaagagccctggataggaagccaccgaatctgccctgggctctgataacaccttcaccannnnnnnnnnnnnnnnccttgggcatgtggctttccctctctgggtctcagtctgttcatttcccaaatggataatgaagcctcttggcaggttctaccatannnnnnnnnnnnnncgctcaaatgagttactgaataaggtgcttctgcttcttctagagatggtgctaaagaaaggactagcatatgagacttctggtaccaatggggctagtgggcatgctgtccactgtgtggtgctaggactgccaatgccaggcccaagggacaaaaagaacatagctttttgttctcatagctggccctgctacctccgaggcaccctgcagggcaatgcatgtcatcccaacccctacactccccatcctccaacccactggtctcatgcccaaagaagagttgaaggcatgggagccaacattttattggagaagccagagaggcaaaaattccaa

SEQ ID NO: 10964 - DNA, 768 bp, Macaca Fascicularis
  misc_feature (1)...(768): n = A,T,C or G
ctgcaataatatnnnnntatagtttaatctaaannnnnncntttgttttgtttaaaacctaaacttgaagtcatattaataaaattaatatattgtacatagtggaaaattttcagtagctaatttaaaatttcaaaaaatgctattaaagaattttgattcatatatttaaactttttagttatgcatgcttcttactaaccaaaaatgataataccattcagtttagtgagcagtatgagaaccaatacctaatccttatgttgctgttgtattttttcctagtggtgtgcctgctcagaaaaacatacactgtatgtgtatacatacctgtgtatatataaaaggtcaatttatatatttttctataggaaaatggaataacaatttccctacctcccataatatgtatttgtccatattaaaatagtcacattgatgataatttctagaactagtttttgagattgtcagccctttgtctaaaataatggcagtattaatgattgacttctgtcactgccatagttnnnnnnnnnnnnnnncttagtagcctttgtctaaagtcctaaagagttcccaaaaaatgtgttgaaatttaattgctaaatagtggttggtgattctttacatcaggaattgtaataattttcttgcaaataagttatttactgctattgatattgaagaattcatcttttactcagttaattttattatatgtatttcaaaaagcatgaatatatgattattcataaagtgtacact

SEQ ID NO: 10965 - DNA, 750 bp, Macaca Fascicularis
  misc_feature (1)...(750): n = A,T,C or G
aaagaatttgtatcnncntccttaacnnnncacccagccattgctcatcctgcactacccactattccagaacgaaaggaagttctgttggaagcatcagaagaaactggaaagagggtttcaaagtttaaagctgccagattgcaacagaaaaactaggccctgtctaggaaatgagaatttacatcctaaaacctagttgtttatttgtttagaatatctatagcaaaataggttacatgtagtttgaaataaggtatcctgagttactttggcaacaagttcttttacccttggtatttgaaaaaatcaaagtaactgtctgaatactttaatattcggcttgttttgttaattctctgaatactgtcaacattcttgtctaagtttgcctttatgatgcagtggcagcattttgaattacttttcaaagaatactgttcatatgcattgtttttgtgtttcaaactaaatacaggcagttttgtgccagctgtgatattgtgcataccatatggaccattttaaagaaaattttaaaatttcaaatagattcaacaattatattacttgctttcacattttaaaggcactttaaaaaaatctacttctcttgtaggttttgcagctagttggctattcaagaaacctcgcccctctgaatgtcatactgtaatctttaaggaagaaagctacatgaattaattgtactctatgggaaaatttctttggaaagatatttgtaaaact

SEQ ID NO: 10966 - DNA, 777 bp, Macaca Fascicularis
  misc_feature (1)...(777): n = A,T,C or G
ccctggcctgnnnnnnnnnnnnnnnnnnnnnnnnnnnnnnnnnnncatggaaatgccnnnnnnnnnnnnnnnnnnnnnnnnnnnnnnnnnnnnnnnnnnnnnnnnnnnnnnnnnnnnnnnnnnnnnnngannnnnnnnnnnaagncnnntagcaaacctcgtgctcnanncgccagcccactccgtacctgtgcccacgtggtctgcgtcaacaatctctggcctatgcaaagaacacaccagtaggtcctccaccagcagcctggccccaggccctgagccaggcccccagcccgccctgcacgtccaggcgcaggtgaacaacagcaacaacaagaagggcaccttcacggannnnnnnnnnnnnnnggtggatgagtggacgagcaagacggtgggggccgcacagctgaagcccannnnnnnnnnnnnnnagcagnnnnnnnnnnngcaggacatggaggcccaggcaggctgggctgcccctggcgaggcacgggctatgaccgcacctcgagcaggagtggggatgccacgtctgcccccagcgcccggccctctctccaccacnnnnnnnnnnnnnnnnnnnnnnnnnnnnnnnnnnnnnnnnnnnnnnnnnnnnnnnnnnnnnnnnnnnnnnnnnnnnnnnnnnnnnnnnnnnnnnnnnnnnnnnnnnnnnnnnnacgtgacggaccctcagggccagctgctcctcctnnnnnnnnnnnnnnnnnttgtaaccactttctaagcattttttattcacaatggaaacac

SEQ ID NO: 10967 - DNA, 453 bp, Macaca Fascicularis
aatacgtgaaccataaaatgtccagtaagatcactgtttagatttgccatagagtacactgcctgcattaagtgaggaaatcaaagtgatattacgaagttcaagatcaaaaaggattataaaacagagtaatattgttggttcaccattgagaccgtgaagatactttgtgttgtcctattagtgttatatgaacataaaaatgcatctctgatgtgttgttcttggcaataaattttgaaaagtaatatcttattaaatttttttgtatgaaaacatggaacagtgcggcctcttttgagcttacgtagttctacccggctttgccttgggcatatgccaccccgcatgagtaatgttaatggtaatcgggggtataataggctctgcgtaacaggcagggaagaagaagtgaaaggcttttcaaccacaaaggtcatttgaagttctcaa

SEQ ID NO: 10968 - DNA, 782 bp, Macaca Fascicularis
  misc_feature (1)...(782): n = A,T,C or G
gacaggcactgcctggcagcaagggcagcagagttgggtactgagatcctgaggagcttgaggtttcgagctggctttagacattggtgggaccaagaatgttttgctggatgccccaatcctaagaaggggtcctgggggtgcatgcagcctatcggggagactccacactgacagtgggcacacggcagcctgcgaagcacagggccaccaccacagcctggcagaggggcacactctgtctggagacctcgctggcagtgctagccaggaaacagagtgaccaagggacaagaagggacttgcccaaagccacccagcaactcagcagcagaaccaagatgggccccaggctcctccatatgttccagggcttaccaccctatcacacgtggccttgtctagacccagtcctgagcaggggagaggctctgagacctgatgccctcctacccacatggttctcccgctgccctgtccactctgctgctacagaggggcaggacctccccagcccatgcttaggaatgcttggcctcttgcaggcaggcagctgtacccaacctggtgggctggggactggagggcgccaggcctcaggaggagccccatagtcctgcctgcagcctgtaaccatcggctgggccctgcaaggcccatactcacaccctgtgggtgatggtcatggtgggtgggtggggactgaccccagcttccaggggannngtcactgtggacgccaaaatggcataactgagacaagggaataagtgacaaaaaac

SEQ ID NO: 10969 - DNA, 705 bp, Macaca Fascicularis
  misc_feature (1)...(705): n = A,T,C or G
acagctgcatcnnngagagtggnnngggctgcaggggtagctggggctcccaagaatgactcgggaatgtcatctccatctnnnnnnttgagagagcagtcctttctctgtgcagctggagnnnnnnnnnnnnnnnnnngggtctaggttcttacgaatgagttcgggaggggctctccggtactgctgggctgggttgagcaagcctatacagacaagtgtgcgtgtggaccatccacacctccggcccccaccccaccctcttcgtctcagcgtgttatgtgcaatgacctatttaagataaacccattccaactacagcagttcagggctgatccaagcactgcctccctcctgctctgtccaggtagnnnnnnnnnnnnactcaacttgagagggaagacttggggttgagggcttgtcatcagaaaaactgaagatggaagttttggccattagacatgagtcctcactctgtgtcctgagcccatgtcattcttcttcttccaacctccctgcccccacacactcaccccagacacaacaccatgtggtctggaggtcccagcccccaccctaaaaagnnnnnnnnnnnnnnnnncaccagacttgggagcccaagggcagtgcctggtgctgctcccatctgccacccctcttctctcctgcaattggtttgtactcactgggctgtgctctcccctg

SEQ ID NO: 10970 - DNA, 761 bp, Macaca Fascicularis
  misc_feature (1)...(761): n = A,T,C or G
tcatcttagactatagtctgtctaagactgnntnctctttaggcaataggccgagttcagaagcagccaggtctggtgagaaatgggcccccataccaaccgtggacttggaatatcaggacagtagtaggcacaggtgtaaaaaggggagatttcagaagacgggcaaaacaactgatgggggaagatatctggggtgtgaagatgagaaaaaaatgatgctgagggacctagtgaaatcaatgaaactcttgagtcttgcttaggctcacaaataagaagtggggaggcttgggaaattaggatatgacacatatgaaaggtttatctaagaagaaagaaacagagataatatatatatagaaagatgtatatagatgtatatatgctcaaatatattgaatgtacagaagggaaatattcagagactttagcattgggggcagatatcttggcctggttatggggtaggacacccagatttttagacttacaatcagtggtccaggtttcaacatggaagtgagatagctgatgaaggatttcaagtctggaaatgggaaagggaggggtagaagttccttttcagaaataaagaggcattcatgaaggcttttgttgaatcttctgctactgataggaccaggaagagaggaactcggaggacaatagggaggggaaatcttggaaaatctaccacttacactgttgtgcccccatccgcagcagcgtcctgccactgtagagccttttaaaataaa

SEQ ID NO: 10971 - DNA, 726 bp, Macaca Fascicularis
  misc_feature (1)...(726): n = A,T,C or G
cggccagtggtcttggcgtgctggcctcggacacgaaggccccagaagtggcgcagccctctatgggcccgaatcttcttcagtcgctccaggtcttcacggagcttgttgnnnnnnnnnnnnnnnaggacctggctatattttccatcctttacatccttctgtctgttcaagaaccagtctgggatcttatactggcgnnnnnnnnnnnnnnnnnnnnnnnnacgttccacctcatccnnnnnnnnnnnnnnnnnnnnnnnngtgaggtcaatgtctgctttcctcaacannnnnnnnnnnnnnnnnnnnnnnnnnnnnnnnnnnnnnnnnnnnnnnnnnnnnnntttccgccacccatcgatgttggtgttgagtactcgnnnnnnnnnnnnnnnnnnnnnnnnnnnnnnnnnnnnnnnnnnnnnnnnnnnnngtggtggcgtgtaggcctccttaaccaatgacgaccttttgcatatgtgcttcccagcctcttttccttctcatgtaatcgttagcacaattgaagttacagtatcttcatgattttgcaatgcaaattttcagnnnnnnnnnnattgtatgaagggacttcgccttcataggaaacatggctctgctaataccttgatttcaaccttctagcctccagacctgtgagagagtnnnnnnnnnnnnnnnnnnnnnnnntagtactttgttttggcagcctaagaaactagt

SEQ ID NO: 10972 - DNA, 678 bp, Macaca Fascicularis
  misc_feature (1)...(678): n = A,T,C or G
cgccaccgccgccgcccctggaagacccagagctcccgccgccccccgcggagttcatggagccgcccccggacttcgtgcccccgcccccgccgtcgtgtgcagggaacgcgggcttggagctgcccccgccgccgccgccgccgcccgcgcccgcccccgactccgccaggccgtctcccgcggtggccaagaggcctcctatgccccccaagaggcacgagaacccagggaccccgggcggggcaggaggcggggagcaagatttcatgtcagacctcatgaaagctttgcaaaagaagagaggtaacgtgtcctagggaggagcatggtgagtgtgccagagggagaagcaccgctgacccggagcgcaggttttgctagtagattatcctgacattttgttcatttcagataaaatgtgatgggaaacttctcactgttgtgctcaagtgcagccataaacattaacccaatagagttcagaatatctgcccaaatgtacatattgctcctatgtattttcacctaaatggaatgtatcttcccttccaggttacctaaagtgctgttttaggttcatttattttattatgttaagaagcatcaaatgaataaaagttaaacgtttttcctgaagannngtatttctagannngattattgggtccatctatc

SEQ ID NO: 10973 - DNA, 788 bp, Macaca Fascicularis
  misc_feature (1)...(788): n = A,T,C or G
agcaagctatagtcagcagactgaccccancnnnnncagcagttccagggatatgggccagcaaccaacttcccaggcaccagctcctgccttttctggtcagcctcaacaactgcctgctcagccgccacagcagtaccaggcgagcaattatcctgcacaaacttacactgcccaaacttctcagcctactaattatactgtggctcctgcctctcaacctggaatggctccaagccaacctggagcctatcaaccaagaccaggttttacttcacttcctggaagtaccatgacccctcctccaagtgggcctaatccttatgcacgtaaccgtcctccctttggtcagggctatacccaacctggacctggttatcgataaggaggctcacctacaccagttaatgtagctgctagctgttggcctcccaaaagactccagtactattttaatttgtattgaagttcagaaatttaaaaagcagagcattttttatgatatcattgttgctgttaattgaaagtataatttgctggaacagaaagaccaaaatgaaagttttttcctccctgcttaaaaatgtagcagcttcttagttactttggaacactactcttacgtgtataaagtgattgactttctagcttcctttgtccagaggatattaaaatgctagggtgaggtttagccatcttacttgcctttttactattaacatgatgtactaaagtagagcccttggagaatacaacaagatattatgtataaaatgtaacactgatag

SEQ ID NO: 10974 - DNA, 663 bp, Macaca Fascicularis
  misc_feature (1)...(663): n = A,T,C or G
gaggcgggagnnnnnnnnaagcaccccacacaccccaccatcatccccagtcccnnnnnnnnnnnnnnnnnccttttctgattcccttcannnnnnnnnnnnnnnattttttgcctctttctctccataacaggtcaagggattggttccaaaataatcaaaaaggtggctgaggtgaggagagggtgggggtgacaagtgaggacctaaagaagcaagggtatatggagggggaggacccgggatgaatgagggagggagaaaaccttttccttttttgaccccagaaaagttagtgatgttttctcccacaggtggccttggataagggctgctcccnnnnnnnnnnnnnnntcctggactggaaccagagggccatggacttgtacaaggccctaggagcccaagatctgacggnnnnnnnnnnnnnnnnnnnnntccgctttgaaggagaggtgatgagaaagttggcaggaaagtgacaccatccccagggggatctctctcttgagtttctccttccccaccagctcaagcactcttcagaaactatttccacaaacactgacgctgaggcctctctggaggaaggagggttgggggtgcctatcctcaagtcctggaagagtagaattgagggagagacctttcttccttgtgagg

SEQ ID NO: 10975 - DNA, 694 bp, Macaca Fascicularis
  misc_feature (1)...(694): n = A,T,C or G
tcaggctgcaggtcacactnnnagacgctgnnnnngccgcatccaccgnnnnnnctgcgcacgttgccctgcaggtccacccccactgcaccgttgcagctctccaggagcaggtgttctnnnnnnnnggtttcccnnnnnnnnnnnnnnnctgggtcattgggcggtgcctgtgtgtgcctgagcgcagccttgcctcctatggagttcggcaggatggggaccctgctttcctctacttgctgtcagctcctcgagaagccccaggtcagtcctcgatgggggtggggtgtgggaggtggggtgcagcccgccagtcctgagctccaccccctcagccacaggacctagccctcagcgcccccagaagatggacggggaagttggacgcttgtttccctcatcattggggctacccccaggcccccagccagctgcctccagcctgcccagtcctctcnnnnnnnnnnnnnnnnnnnnnnnnnnnnnnnnnnnnnnnnnnnnnnnnnnnnnnnnnnnnnnnnnnngtagcacccagaggccctgcacttgggatccccttgcagcttccacctagcaaccaccagaggttacaaggggagagtggcccttccctcataggnnnnnnnnnnnnnnnnccccgccgaactcaggggacctctactgactgcttgctgggacagagtcaccaggg

SEQ ID NO: 10976 - DNA, 763 bp, Macaca Fascicularis
  misc_feature (1)...(763): n = A,T,C or G
cagacgaggactggctgagnnnaggcgctctcacgatccacctgcccagggagggcagtgggggagagacagaagagcaaagcgcattcttcctcagctccacccacctggagatgaatgtagccagagaggaggaaggagggaagctgaagacgccgtggcccctaggccttcactctgctagagttgccacccagaggcttcagcctgacctccagcggtcccaagaacacctactaatttctctccactccttcatggctgggacagttactggttcatatgcaagtaaagatgataatttactcaacaaatatttatcgagcaccttttatgtaccaggcactattctaggtgcttaggatattctcatgtttctgagggattacagcctaggaggattccaccaatcttcacttctagcaggttttttaaacgtgacccttggctatatttcccatcttcacagttcaagcaccccaaacctgccctttctcccctgtagactggcaggtggattggctcccaggtcatcttctctccctctttcccccacgcctttctccctccacaggaaacagatttttcagggccttccacacctgccgctttgtctgtctcttttttttttttaaagtaatattttttagaaatacatgtaaaataccaagaaataatatctgcacctctgccacctctctctcacctcttatttcataaagctggctctttatgttgctttacatgccttaatatatgtttt

SEQ ID NO: 10977 - DNA, 642 bp, Macaca Fascicularis
  misc_feature (1)...(642): n = A,T,C or G
gtatagaccagcaaannnnccnnngcaaggcaagtnncatctcaaatccaagaatgnnngcatcttaaacgctagtttgcntcagcccctagttaacctcaggacttggtttgcatataaaaggtagacanntgatatgttttcacgaataaatattgtcacccagaaaaggttggtgtcacgtaaagcatatttttttaagctttgttttatatatatttttcacatagtttttatagggaaaggttttcaaagaactctcacttctgcctaggtgtttttgggggagccccgttttccatagtgtaattccatttaagaggttgtctagagtctttttaattcatagaaagattttaatatccgagagtagtcaaaataaggatataaactttccacaccttcccgtcgtgacagataaaagcacagaaaggacaccccttgaaatcacgtaacactggtcacttccactttttgtacccgttttaaattctgttagtgtatttacttcacagtaaatatttttgagggtacccctgtattttgcttttgaccccggttctgtgatttggatgtcagcaacttccccaaaaagcaccaatatgttaagttctaatgtcacgacccaatatgtgttattca

SEQ ID NO: 10978 - DNA, 667 bp, Macaca Fascicularis
  misc_feature (1)...(667): n = A,T,C or G
cagtgcattgtagaacagaagataagaactnttctctgaatttgggtctactagactttggtgcagcatatctgtttgttattactaataacaccaatcagggtcttcaggcctggaagactgaagacattccagccaacaaaatgtctattgcatggcagctaccacaatatgccctggttacagctggggaggtcatgttctctgtcacaggtcttgagttttcttattctcaggctccctctagcatgaaatctgtactccaggcagcttggctattgacaattgcagttgggaatatcatcgtgcttgttgtggcacagttcagtggcctggtacagtgggccgaatttattttgttttcctgcctcctgctggtgatctgcctgatcttctccatcatgggctactactatgttcctgtaaagacagaggatatgcagggtccaggagataagcagatttctcacatccaagggaacatgatcaacctagagaccaagaagacaaaactctgatgactccctggattctgtcctgaccccaattcctggtcctgtcttcaagcattttttttttcttctactgcattagacacggacgagatagcatgcatatcagagctgatctcctccacctttctgcaatgacagaagctccaggactg

SEQ ID NO: 10979 - DNA, 748 bp, Macaca Fascicularis
  misc_feature (1)...(748): n = A,T,C or G
caatccacacagacgcccggcagnnccaagacgctgcggccaagcaggaagttgaagagaaggcggcggctcccagccacaccaggttcagcatttaccctcccattccaggagaggagagctctctgaggtgggcgggaaagaaatttgaggagatcccaatcgcacacattaaagcatcctacaacaacacacagatccaggtagtctctgccagtaatgagccccttgcccgtgcttcctgtggcacagagggatttcggaattccaagaagggcacaggcatcgcagcacagacagcaggcatagccgcagcggcgaaagctacacaaaaaggtgtgacccatatccgagttgtggtgaagggcctggggccaggannnnnnnnnnnnnnnnnnnnnnnnnccatggggggcctggaagtgatctcaatcacagacaacaccccaatcccgcacaacggctgccgccccaggaaggctcggaggctgtgatgggaaggaagcttgcacttggacctgacctcaagcctcaactccagtgggaccttgtaaaatgctccctgtcagagctctctccagcatatgcttgttagaggtccttcaaacagtaagggagagctttgcctccttacacagtggcctnnnnnnnnnnnnnnnnnnnnnnnnnnnnnnnnnnnnnngtaagctttgcatctcttacaagaggggagctacaggggcagccgtggcctagacccaacctgtgc

SEQ ID NO: 10980 - DNA, 661 bp, Macaca Fascicularis
agagacatctgttcctgatcttcagaataaactcagtgtccagttgcttcggctggtgggagccgatattcatgccactggttcacccaaagggagggtaggccctcggagacccagcttctctgacaagcagatcagaccaaaaggctgcctcaaagatgtgccacttggaaggaaagtgtagagaagcgtttacatcaaagaagatgcttcctctccagtggacaacgtcacgccactttcaaggcacaccaatggccaggtcccgggtgggacatttgtactgtagcagcacatggcaaaggtgagccagaagcagcctggatgctggccgatctggaggcctttctgaagagcaaggagagggctcaagcccacctccccgcagctctgccccagcccccatgggccacagggaggctcaaggggagtgaattaggtaaacagattcctggaaactcgcatctggatgcagctggaagagttaaatatttagattggtggcttccctggaccactgcgaacacaaacatccacacaccagggctgagttttgtgcaaatgttggggctttgccttttttattaacattttcctctcacgtggtttacatcaatttataataatctacataagtgaaacagaacatagacaaaaaaat

SEQ ID NO: 10981 - DNA, 740 bp, Macaca Fascicularis
  misc_feature (1)...(740): n = A,T,C or G
gaccgcaagcgagagatccacacgagtccgaaattagcagagagctaaaaggaggggcccgaaggcagtgggtcnnngagctagaggcctctttttgcctgcttgacagttcgatacctcaatgcctatactggaatagtgctacttcgatgcagaaaagagttctatcagcttgtgtggtcagctcttcccttcatcacatacctggagaacaaaggacaccgttacccatgctttttcaacacgttacatgtgggagtannnnnnnnnnnnnnnacaagctgttgaccgcagtaactcacatgccaggtacaataagaacatnnnnnnnnnnnnnnnntcagtacaacaggagacagctgttgatcttgttgcagaactgcactgatgaaggagnnnnnnnnnnnnnnnnnnnnnnnnngacaagaagctgcttactagaggaggaggaagagtcaggtgaggaggctgcagaagcaatggagtgaccctcnnnnnnnnnnnnnnnnnnnnnnnnnnnnnnnnnnnnnggcccacttgttgaacagaacaatctgnnnnnnnnnnnnnnnnnnnnnngttttccaagctggatagctgccaacnnnnnnnnnnnnnnnnnnnnnnnnnnnnagtactcagttaaactgaagttgcctttacctagcattccctggttaagtgttgnnnnnnnnnnnnnnnnnnnnnnnntttattgcttggctaagagtagatttaat

SEQ ID NO: 10982 - DNA, 298 bp, Macaca Fascicularis
ctactcctgctgctgctggcgctgtacaccgcgcgcgtggacgggtccaaatgcaagtgctcccggaagggacccaagattcgctaaagcagacgtgaagaagctggaaatgaagccaaagtacccgcactgcgaggagaagatggttatcatcaccaccaagagcgtgtccaggtaccgaaggtcaggagcactgcctgcaccccaagctgcagagcaccaaacgcttcatcaagtggtacaactgcttggaacgagaagcgcagggtctacgaagaatagggtgaaaaatctatga

SEQ ID NO: 10983 - DNA, 939 bp, Macaca Fascicularis
  misc_feature (1)...(939): n = A,T,C or G
aagcagaccaggccccaggagtgnnacctggagacattgttcttttgctacaggagaaagaacatgaggtannnnagagagatgggaatgatttgcacatgacatataaaataggacttgttgaagctctatgtggattnnnnnnnnnnnnnnnnnnnnnnntgatggacgtcnnnnnnnnnnnnnnnnnnnnnnnnnnnnnnntgaaccaggatgtgttcgtgtagttcgaggtgaagggatgccgcagtatcgtaatccctttgaaaaaggtgatctttacataaagtttgatgtgcagtttcctgaaaacaactggatcaacccagacaagctttccgaactagaagatcttctgccatctagaccggaagttcctaacataattggagaaacagaggaggtagagcttcaggaatttgatagcactcgaggctcaggaggtggtcagaggcgtgaagcctataatgatagctctgatgaagaaagcagcagccatcatggacctggannnnnnnnnnnnnnnnnntaaactctgcaaacaaattgcacannnnnnnnnnnnnnnnnnnnnnnnnnnnnnnnnnnnnnnnnnnnnnnnnnnnnngtcttatcaatccagatgaactgagggacatctgttggtctatgtataacttttaaaattggtatagtatctacagagtgtataatttaaactaaccacaaagctttacatcttcatttcgactgttccatagcagaataaagcacttgaaaggaaacaagactccctttcacatgtggatattataagtttcaatcctggtatctgtgcttgatttttatcagttttgtgtagatttttatgtttcatattttaaatttaaatcccacattgtaaagtttgtataatttgtcctgaagctttgtgtttggctgcacttgcataagctgcta

SEQ ID NO: 10984 - DNA, 714 bp, Macaca Fascicularis
ggtgaacatctccaaaacagatgaagcattttttgactctgaaaatgaccctgaaaagtgctgcttgctgttgcagtttattttgaactgtttatacaaaatcttcctttttgatacccagcattttataagtaaagagagagcagaagccttgatgatgcctctggtggatcagctggaaaacaggcttgggggagaagagaaattccaggaacgggtgacaaagcagctgataccgtgcatcgcgcagttttcggtggccatggcggatgactctctttggaaaccactgaactaccagattctgctaaagaccagagatgcctcgcctaaggttcgatttgctgctttgattactgtgttagcactggctgaaaaactaaaggagaattatattgtcttgctaccagaatccattcctttcttagcagagttgatggaagatgaatgtgaagaagtagaacatcagtgccaaaagactattcagcaactggaaactgtcctgggagagccgctccagagctatttctaagactttctgtggtgtttcatactctactcagagttctgatttttcgtatttttatttttgggtgttgggtgccatgttacttttggtgccttaatacacctacgtggtacttaacaaatgttttatcactttacagaattctcacctggtttatgctaccgcataagcctctcctgcctact

SEQ ID NO: 10985 - DNA, 697 bp, Macaca Fascicularis
taaggaagccaggccttctctcttcgttcctcttaggagagtgccaaactcagggacccagcactgggctgggttgggagtagggtgtcccagtggggttggggtgagcaggctgctgggatcccatggcctgagcagagcatgtgggaactgttccgtggcctgtgaactgtcttccttgttctagccaggctgttcaagactgctctccacagcaaggttctggggctcttcgccttcagtgttgtggccctagatatgggcctaaattgggctctaggtctctgtccctggagcttggggctcagaggagcctctgtccagcccctcagtattaccatgtctccctctcaggggtagcagagacagggttgcttataggaagctggcaccctcagctctccctgctactccagcttcctcagcttctgcaaggcactcagggtggggacagcaggatcaagacaaccagttggagcccctgtgttccagagggcctgatgccaaggggtaatgggcccagcagtgcctctggagtccaggccccaacacagccccatggcctctgcaagatggttttgaaaaaggtgatccaagcaggcccctttatctgtacatagtgactgagtggggggtgccggcaagtgtggcagctgcctctgggctgagcacagcctgacccctctagcccctgtaa

SEQ ID NO: 10986 - DNA, 771 bp, Macaca Fascicularis
  misc_feature (1)...(771): n = A,T,C or G
atggtcaaaggtactggggctggccccagaannnnnnnnnnnnnnnnnttaccagcagagggagctacagggagcagtctggtgccttcctatttgtttagcttttaaacttttgagaagtagcaatggatgagagtgggtatacagctgtgtgggctttgtcctagactgaggcttacagacaggaagggtaggagagacctaagccagctcctagacccttgcctgaggaaatcagtccaccagtgtagagggcctcccttcactgcggtatggaccattctattgccagattcttctggtcacagcatgggcctcactggatactcaggattgggctttaagcagacctctgggtgtaacacagcctctttcagcccccagcccaaacagcaggaacaggcataatttcgctgtaccaagcctctttctagaatttttccaacaggttttttggttttttttnnnnnnnnnnnnnnnnnnnnnnnnnnnnnttctgttttgttggagagagggtctctgtcacccaggctggagtgcagtggtgcattcacagctcactgcagcctcaacctcccaggcccacaaggtgagctttgaatgggcatagacagggttcccagcccaatagttgggattggggtataggttctacatggaaaagtatccactctctttccctagtggtcctgtgaccactagaggcatatgagggacaacacactctttttgctctaccacaaggggcaacaaaacagaagctcaccatgt

SEQ ID NO: 10987 - DNA, 706 bp, Macaca Fascicularis
  misc_feature (1)...(706): n = A,T,C or G
tcacgagaaaggcnnnacagcacgtcctcactacccgacgannnnctcctcgtggcttctctctcctccccaagagcaggggtgggcctgtctcgggttcccctgcgggagtcaggaagcgtccttcctacctaccagtcctcccctctgggggccggggacacttcctgggggccttttaggtggttggcgcgggtgcagagcctgagaacctaggggcgcggcctcagggtccccaccnnnnnnnnnnnnnnccgccagtacctgcgcagcggcccggactacgacttcgcgcgctaccggagcacagtgcacgaggtgactcaggccttcgccgccgcctcgcgggaggtgctggcggtggaagcagagctggccgggcctcgcaggcagccgctgctcgccagccacgtgcgcagcctgcaggagctggagcagacgcggctgggcacggtggccnnnnnnnnnnnnnnngagacgccagagttggcggggcaagaggacgctgtagagatgcaccagctgaaaatgaaggtaattaaaaccatggaggcgatcagcgaggttctccaggacctcaggtttgatgcggaatctgccgagtgatggcggctccccagggatgcgccgagggagatgggcaaaaggggcggatggcgtccagcccagccctaaccgccagctggctggggtctcgccccactgc

SEQ ID NO: 10988 - DNA, 228 bp, Macaca Fascicularis
  misc_feature (1)...(228): n = A,T,C or G
gagccacggagacagggaggaaggagcgccacagtgccacctgttgggcctcataaatgcccgtgcagcccatgggggaggggatgaggaagtggagccaccctgcctatgcagggcaaggcagggcctgccccagtggggcttgggaccatctcgaaccaccagcgtggagaagcagaagcaaaagcactcaccaggctgcagcgtcaggcantggcaggggatggt

SEQ ID NO: 10989 - DNA, 750 bp, Macaca Fascicularis
cctggctgtaggccctcactgattccctaaaccttggtggctctgattccagtccccaggtgggactcagggaggaatatggctgagttctgtagtttccagagttggctggtagagccttctagaggttcagaatattagcttcaggatcagctgaggggatggaattggctgaggatcaaatgtatgtaggtgaaaggatagcaggatgttgctaaaggtgatggagagtatgggtttaggacttactcacccgtcagggtggtggtagatctagaacccccaagtgaggctggagagagttaaagtcagtatgaaagatagggttgggacggggtgctttggaatgaaagtgtgaccttagagtgctccttggacctcaggaatgaggacacaggtcctgctggtgtgaagatgagaaggggctcttactcagttaatgatgagtgactatatttaccaaagcccccacctgctgctgggtcccttgtagtgcaggagattggggctaagggcccctcccagagaagggacaccatcaggcctctggctgaggcagttgcatagaggatccacttctacctgcatttcccaaaggactagcaggaggcagccttgagaaacccgcagttcccaagccagcccctggctgttctctcattgtcactgccttctccccaacctctcctctaacccactagagcttgcctgtgtcctgcctcttgcctcttgtagaattcagctctggcc

SEQ ID NO: 10990 - DNA, 770 bp, Macaca Fascicularis
  misc_feature (1)...(770): n = A,T,C or G
gcagggccactgggccataggatgggcatagggtgctctgagtagcttgtcctcaacgcaagcacccaccttgcaatccgagacccagatcctcagagagaccagaggcaggacccagcccccaggcacacacacggatgcaggtccaggcacggtcctgtctgcacagcctggtgggcaccagcatgcatccctggagacaggccctcaggcaccagccnnnnnnnnnnnnnnnnnnnnnnnnnnnnnnnnntctgctacgtgctgggccctggaattacagcagtggccaagaagtaccttagtacccaggtcnnnnnnnnnnnnnnnnnnnnnnnnnnnccccagtcccatgggctcctcacagcaaccccacaagggcagtgccnnnnnnnnnnnnnnnnacacgaggacagggagggtnnnnnnnnnnnnnnnagnnnnnnnnnnnnnncccagggctgggggctacccacacagatggctaggtcgnnnnnnnnnnnccccgcccccgggaatgggccccaggcagggctgctgtgagggccaaggtcttgccatgctggccagtacccannnnnnnnnnnnnnngcacagcccctgtccccgaccccnnnnnnnnnnccactaaccagctctctctcttttgactttcagaccagttgttaaattgcccgcctccgccaagggccccctgggtgtgnnnnnnnnnntccccagccaggctctgtcccctgccatacctagactctgtgtttcatatttttgaa

SEQ ID NO: 10991 - DNA, 749 bp, Macaca Fascicularis
  misc_feature (1)...(749): n = A,T,C or G
gcagtgagagctccagccatgaggactacnnnnnnnnnnnnnnnnnnnnnnnnnnnnnnnnnnnnnnnnnnnnnnnnnnnnnnnnnnnnnnnnnnnnnnnnnnnnnnnnnnnnnnnnnnnnnnnnnnnnnnnnnnnnnnnttgcacgaggagcatgttgaactcttgatggaggaatttgcattcctgaaaaaagaagtggtggggaaagacctgctgaaagggtcactcctcttcnnnnnnnnnnnnnnnnnnnnnnngcggtttggcttccctgcattcagtggcatctctcgcctgacctggctggtctccctctttggggagctttctcttgtgtctgccactttggaagagcgaaaggaagatcagtatatgaaaatgacagnnnnnnnnnnnnnnnnnnnnnnnnnnnctctgtcatggattgaagaaaaagggcctggtttaannnnnnnnnnnnnnnnnnnnnnnnnnnnnnnnnnnnnnnnnnnnnnnnnnnnnncaaaattggggnngaataagaatatatttctgaaagatcaaaatatatttgtccagaaactcttgggccagttctttgagaaggaactggctgctgaaaagaaacgcatcctgcactgcctggggnnnnnnnnnnnnnnnnngaaatattgctgttcaaggaagtaagaagaggaggtgatgcagcacttccaagatggcaccagagtttggttcttctcaagagttgaccatcatctctattct

SEQ ID NO: 10992 - DNA, 778 bp, Macaca Fascicularis
  misc_feature (1)...(778): n = A,T,C or G
agaagagtaagtgagagggtatcagcttatgnnnnnnnnnnnnntcagggctcagtttctatttccctccctcagtannnnnnnnnnnnnnnnnnncattaagcatttggcccaatcagatatctcattttatagtttttttttcccattggtctttaactaagactttcttgtagcaatctcatannnnnnnnnnnnnnnnnnnnnnnnnnatatagtatctgggggagaagacttatnnnnnnnnnnnnnnnnnnnncagccaggcttctgtcatacaggtggatcccgaagcacagaaacataaaaacggtctcccagaaaactatagaccattctccaagtggaattcccacttagggctctggtcactagattgcaacctttgtgtttgtcatcatcctcatctcaccactgtattgctatgccctcccataaaaacacatttatccctagcaagannnnnnnnnnnnnnnnnnnnnnnnnnnnnctaggcttttgtttagcaaagggctgcctttccattgttttcatggtgtatatatttttgtcacnnnnnnnnnnnnatacttgatgttgtcatagaacatcctactttatgatnnnnnnnnnnnnnnnnntcctagatcatnnnnnnnnnnnnatagtagtcataggtcttgactttggggaaagaaaaggaagctgcaggaatatttatctccaaagttnnnnnnnnnnnnnnnnnnnnnnnnnnnnnnnntacaaagtaaaaatnnnnnnnnntnnnttcgatatt

SEQ ID NO: 10993 - DNA, 725 bp, Macaca Fascicularis
  misc_feature (1)...(725): n = A,T,C or G
cctggccatgnnnnngacatttgtgcgggagctgaaacagcagaaccccaggctggtnnnnnnnnnnnnnnnnntcttgggtgacaagtgggatggcgaaggctcgatgtatgtcccggaggacctccttcccgtctacaaagaaaaagtggtgccggttgcagacattatcnnnnnnnnnnnnnnnnnnnnnnnnnnnnnnnnnnnnnngaagatccacagccaggaggaagccttggcggtgatggacatgctgcactctatgggccctgacaccnnnnnnnnnnnnnnnnnngacctgccctccccgcacggcagcgactacctgattgtcctggggagccagaggagnnnnnnnnnnnnnnnnnnnnnnnnnnnnnnnnnnnnnnnnnnnnnnnnnnnnnnnnnnnnnnnnnnnnnngtgggcactggggacctgtttgctgccatgctcctggcgtggacacacaagcaccccaataacctcaaggtggcctgtgagaagaccgtgtctgccttgcaccacgttctgcagannnnnnnnnnnnnnnnnnnnnnnnnnnnnggggaaggagtgaagcccagccccatgcagctggagctgcggatggtgcagagcaaaagggatatcgnnnnnnnnnnnnnnnnnnnnnnggccacggtgctgtgagggccgcgccactcacccgtgacgcgcagcgcgttggtgtctccatgtttgtccc

SEQ ID NO: 10994 - DNA, 761 bp, Macaca Fascicularis
  misc_feature (1)...(761): n = A,T,C or G
gttgttataacataaaagcaccactgttctgttcatttnctagctgttctaattaagaaaactattaagatnnnnnnnnnnnnnnngaaatgtttattgacagatcttttcaaataatgcttttctgattaatagccaaagattttgtatctaattttgtannnnnnnntatacgataagttgacaccacttagatttaaagnnnnnnnnnnnnnnnnnagtacaatagtataaattttataatgatgaatttataatgattaagggacatttctatcaaaatactacaatagttttatgcacaacttcccattaaaaataagatttcttatttgtttgttagtttgtttttactctgggagtaatactttttaaattacctttacatatatagtcgctggtatacttagaatatacaatgatcctggaaactgcggtaacaaaagcacacaatgattatagtaactatcagatacaataaaacaaataaatgtgaaaatagattcatgaaaatgtattcctttaaagtattgttttcctacaggcctatttaacaagatgtttcattttattgtatattttgtacttaatataaatgttgctctaatcagattgcttaaaagcatttatatttatgttgttgaactaatatatgaaataagtaaatgtagctcccacaaggtaaacttcattggtaagattgcactgttttgattatgtaaacatttatacatcctcctgaaaatcaaannnaaagagct

SEQ ID NO: 10995 - DNA, 688 bp, Macaca Fascicularis
  misc_feature (1)...(688): n = A,T,C or G
acaggcatcccccagctgcgatcactaaacctgntnnntgaggaggaaactgagagtcaagagagtgacgattactactagctctggcccatgggggtgggtgagcagctatagtgttcatccctgctcttgaaaagacctggaaaggggagcagattcccctaatggactgctttcatggggatgatcatgggaggcctatttaactccaaggtagcagggtggtaggggagagacaaaagatggaggaggttagggagagaggctgagaccaagaccagtggggtataaaggggcccacgcaggagatgccctggccagtaggacctccaacaggttgttccccaggctgggatgggggccagagcagacacggaggtgcaggcaccaggattctccacttcatccagccctgctccgccacacttctaaatgcccttcctcccaggccctggttcttgctatttcctggtccccaacgtttacatagattgtttgccctttccccaaaatcatattccagaacttttccttctctcttaagccccagttgcacatactgactgcaagtcccctttgctgtctgccctcttttgcacaagagagagcacagcagagcgtggcttagttcagtgcagagagatgggtgaggccagctccagatattataccgctctgtactggacaa

SEQ ID NO: 10996 - DNA, 746 bp, Macaca Fascicularis
  misc_feature (1)...(746): n = A,T,C or G
atgtcaatnnacagcccctggccagcatcaccacagcctggggcccagaaggagccataacctgctgctgcctgatagagggcccagcttgggacacannnnnnnnnnnnnnnnnnnnnngtcaagacggcatggtccgggtttggaagactgaagatgtgaagatgtctgttcctggacggccagcaggagaggaaccctcggctcagcctccaagcccaagaggccacaagtgggagaagaacctggccttgagtcgagagctggacgtcagcattgctttgacagggaagcccagcaaaaccagccccgcggtgacggctctggccgtgtccagaaaccagactaaactcctggttnnnnnnnnnnnnnnnnnnnnnnnnnnnnnnnnnnnnnnnggataggaagagagaggcagcagaggctctggcactgcagtgccaggctgaggnnnnnnnnnnnnnnnngggcctgagctctgcctacagaggaaacccccagggcctccctcaccacaactctcaaggaagggcctctgcttcagagctctacaccccaaccttctccatgacccatgggaattctatgaaaaagatgagcgcacacactcggagggctgagcagcactctggaaannnnnnnnnnnnnnnnnnnnnntgcacacgaaattacagatgactcaccttattaagggctattgcactgaaaaaaaaaagatggggttgcttactggaaattattgtatt

SEQ ID NO: 10997 - DNA, 749 bp, Macaca Fascicularis
  misc_feature (1)...(749): n = A,T,C or G
gagacatcnnnnnnnnnnnnnnnnnagctcatgcagtagttgttggtggctcnnnnnnnnnnnnnnnaaaggtcatgaggtggttttggactgtggtttccagtctgacccaggaggagctggctcggcttcttcagttcacaacaggctcctctcagctannnnnnnnnnnnnnngccgccctctgtnnnnnnnnnnnnnnnnnnnnnnnnnnnnnnnnnnnnnnnnnnnnnnnnnnnnnnnnnnnnnntaaccagctgtgcctccctacatatgactcctnnnnnnnnnnnnnnnnnnnnnnnnnnnnnnnnnnnnnnnnnnnnnnnnnnnnnnnnnnnnnnnnnnnnnnnnnnncctgtcatccacttggctcccatgctcnnnnnnnnnnnnnnnnnnnngttacagacatcataaccactgatcctaacacacataaccnnnnnnnnnnnnnnnnnnnnnnnnnncttgtgtctggaggattgtgtcacctacaagccttgtctttacctcacctgctctctgcccatatctaccacaggccactttggcatggtacttgggggccagctacccttctggcctttagcgtctttgaaggagaccagacatgagtgaatacctaggagagtgnnnnnnnnnnnnnnnaaaattggcagagaccaagccccgctgcagattgctcaggccaggtgaaagggccaggcagttgcnnnnnnnnnnnnnnatatttttacagtaaataa

SEQ ID NO: 10998 - DNA, 782 bp, Macaca Fascicularis
  misc_feature (1)...(782): n = A,T,C or G
ttttttaatgttnnaaacggngnntgtgcatnnnnnnnnnnnnnnnnnngtatttctagggcataaaacagttttcagaaattcatctttatagaaaaccagcatctagcttagcatctttccccttttaatttgtaggcttttaaaggcaaattattcccaccatcacttaacgccgggattatacacattctagaaatgattctgagaggaatgtatagtatggtatactatacatatagtgtactatctacactcacatgatattcttatttacatattttttaaccataagtggcaaatatttaaaaatatttgaaaaacactccagaatctagtacactttatttttagactgaccctgaagtaggttgttcttttaacaaagggtttaatttgggtggggaatataacatatcaaaatacatgaacaaatggaaagttaattctagaaaagcaaagaaattgggtatcatttttgtttcttgggaagctagttttgttgaatgtttagaattgagcaaagattnnnnnnnnnnnnnnnnngtttagaaaaattaactttgtgaatgaacttaagatgtctgtactctatatgtgatgctgtgcagtttgtttttgtatggagagatgtcacctatagccataaccaataaaataaaaactgatgaggcatgcagctttcagcacatcttttatacctgaagaaattaattttgtgttgctatggtgttgaaacatctgagaaaagatgttctgtatctatgtaaacatgatcctta

SEQ ID NO: 10999 - DNA, 755 bp, Macaca Fascicularis
aggtgggcggtgttagattgagaggcacgtacatagggcctgccggaatgacttaaatatttgtctccagtctccactattggctttccagcaaccaaagtacaacactccaagatggattcatcttttcttcctttcccgttcccctggctcagtcctcctccaccaccaggggccccaaaaggcacatcatctgggtctccttatcttgtttgataaggctgctccctgtctccctctgtggcatggactgtttgttcttttgccctatttctcaacatagcacactcatgcactgagaggagggagcattatgggaaagtccctcccttccactcttctctctaacgcctgtgggagagccctagtccctgccgtcatgaaggggtcaggcattggtcacctctgggaccttctccctcactcccctccctcctagctagctttgtctgtcaggtacagtctggtggaagtccaggaggcagcagctcaggacgtggtgttgggggtgtgtgtgtgtgtgtgagtcagaggttccagaaggttccagatttggaatcaaagagtcctgaattcaaatccttgtttttgcacttattgtctggagagctttggataagctgttgaatatctctgagcctcagtttttcattcattcaaatggcactgatgatgtctcccttacaaggtggttgtgaggattaaatgtgatcagcatgtaacatgtctagtgtatattaggctcttaataaaca

SEQ ID NO: 11000 - DNA, 714 bp, Macaca Fascicularis
  misc_feature (1)...(714): n = A,T,C or G
tgatttatgccctccagagcaatgatgatatatgtgcattttttataggactggaacttccttttatgatgatgccccaccctctaattcctgtcagcctacctccagcgtctgtcaccatggcaatgagccagatgaaccacctcagcaccattgcaaatatggcggcagcagcacaagttcagagtcccccatccagagtggagacatcagttattaaggtaattctttttttatacaattattttggcatgttcatcttaagccaccatctattaatccatttttttcttattccataagtacatttgaactctaaaaagctaagtgataataaatagattatttaaagagtagcaagtggccccaggggcacactacttacttaggtaggctagggttgctttaaattctctatatatctattaagatagagaaaaacataggacattaaatgttatagttcagattgtctgtattcttacatgggtagttgtgtgtatgtgtgtgtggtgttatgagcatttatgtgaggagaatcagaagaccagaagggataaattctgccactttctagctctgtcaccttagacatgtaattcaatcttcctgattctagtaaatatctaataaaggcataatctagtgtggattattttgtaaaaactaaatgaagtaataaaatnnnnagtttccacacattcaaaatacact

SEQ ID NO: 11001 - DNA, 659 bp, Macaca Fascicularis
gacttaacaaataagaaatcctcccaaaacttgcgtcgttggtcattggaagctctcaacagggatttggtgcccactggggtcttggtaacaaatggggattatgatcgagaacagtttgctgataaccaaataccgctgttggtaatagggactaagctggaccagattcatgaaacaaagcgccatgaagttttaactaggactgctttcctggctgaggatttcaatccagaagaaattaatttggactgcacaaatccacggtacttagctgcaggttcttccaatgctgtcaagctcagtaggttttttgataaggtcatagagaagagatactttttaagagaaggtaatcagattccaggctttcctgatcggaaaagatttggggcaggaacattaaagagccttcattatgactgagttacactcatcctttggaagagtgagcaagcagtggcagtttttcacagctttcctcttgctgtgttcagttattaccatcacagccttttaacgaaatcatcttaaatgctacccttcagcctcaccctttaatggaaaaatgataggaagtgacaacacgggaggtccaaactttgtccctgttctctgtgttccttacctttctgtccctgtgtagagattatgtaaaa

SEQ ID NO: 11002 - DNA, 768 bp, Macaca Fascicularis
  misc_feature (1)...(768): n = A,T,C or G
gctttcnnncctcaccatccnnncatagctgttgattaccaactcactggacaaccagtgctcattggtggcaccatgggaacctgtagttatgttcttactggcactgaacagggcatgactgagacctttggaacaacctgtcatggagcgggccgtgcannnnnnnnnnnnnnnnnnnnnnnnnntttagatttccaggatgttttagacaaattggcagatannnnnnnnnnnnnnnnnnnnnnntcacccaaactggtgatggaagaggctcctgagtcctataagaatgtgacagatgtggtgaatacctgccatgatgctggaatcagcaagaaagccattaaactgagaccannnnnnnnnnnnnnnggatagaaccttggacagcagggctgccagacaccaccaaccctctgaagtggaagtggactgacgtgctcttctgacatcagactccaggcgggacaagttccaaagtgtgcagctgtaactgctcgtgccaaaatggctgatgcggaggctgctgctttcaggggcctgtgcttataaaataaccttccaggaagaggcacatcnnnnnnnnnnnnnnnnggaggaggaatatgccttctccttggttgttccacagagttttaggaaaatctgttaggcatgggtaggtgtcaaactgccttaggcagtcatacagatctttagccatcagattgaacttctttacaccaagctctgtttatattccgagagggtcatgaagaaagtcta

SEQ ID NO: 11003 - DNA, 743 bp, Macaca Fascicularis
agaatcaattggaaagacttctcaaagagaattgtatgtaacgatgttgtattgattttaaagaaagtaatttaatttgtaaaacttccgttcgtttacactgcacattgaatacaggtaactaattggaaggagaggggaggtcactcttttgatggtggccctgagcctcattctggttccctgctatgctgctttgtatgacccacgaaggatccacttccaggatgacgtgctccatagctatgctgctgatacagggtctgcaacgcagcagcatgaggcctgagctggtcggaggaggtcacaacccttctctgttggtctgccctctgccaaaagactgaagaaccaaccagggaagctgtcctggaggtccctggtcagggagggacatagaatctgtgtcctctgacaactgtgaagccaccctgggctgcagaaaccacagtcttcccagcaattattacaattctatttttactgccctttcaaagcacttaagtattagatctaacgtgtttcagtgtctgtctgaggtggcttaaaaaatcagaacaaaacctctattatccagagtcatgggagagtataccctttccaggaataatgttttgggacactgaaatgaaatcttcccagcattataaattatgtatttaaaaaaaaagaaacttttctgaatgcctacctggcagtgtataccaggcagtgtgccagttaaaaaagataaaagaaaaaga

SEQ ID NO: 11004 - DNA, 734 bp, Macaca Fascicularis
  misc_feature (1)...(734): n = A,T,C or G
aatactgcctgtgtgtgcatacatgcatnnncntggggaaagcatccatggcttctaaaagaggtccctgatccccaaagggcctgaannnctgctctggattgaagccactgcctgcccaagctgccaccccctaatcttcctnnnnnnnnnnnnnnnnnnnnnnnnnnnnnctccctccacgcggcccttggggtcggcagccgagtgtgtgtggtccgcagcacctgctctggaggnnnnnnnnnnnnnnnnnnnnnnnnnnnnnnnnnnnnnnnnnnnnnnnnnnnnnnnnnnnnnnnnnnncacacccctggacttgccagtgcagggccctttgcccccagggccacgctttgcccgtcgtctgttgtgatgtttcttccacagccaggtgcagcctcagatcccnnnnnnnnnnnnnnnnnnnnnnnncacagcttaggacagaaccgggcccagggcaaaggcctctccccagaggatggactagaaggcctgggccacactcgggcatggacctttggggctggggagcgggggcttctcctcttgaatataagaggactgctggccagggggccttcaagagggtctctcctttgctgtggtcannnnnnnnnnnnnnnntatcagccagtcctnnnnnnnnnnnnnnnnnnnntctgtttttgcttttcctcttcttgaccaaagcatgtgccactagctgtccttgaggacctcgtctttag

SEQ ID NO: 11005 - DNA, 319 bp, Macaca Fascicularis
ttcattggcattattcaataaaggatgcatgtattcatttcctgaccctccgcccacttccttctccctccaccacccccagtcatcagctccttccctcatttatttttgttaagttgtgtgaattatttttaaaccatttatcctgtttgtgcatagggtttttaagaagaaacagcacagtgcaatgagcaaatcttttcggggtgtgtgggaggcaagggagggaggacatggagaaaagttctttaaacaaatagcaaactattgaacatgtgtaaaatccctgtatcatttatgaaatatgataaaaagcaat

SEQ ID NO: 11006 - DNA, 750 bp, Macaca Fascicularis
  misc_feature (1)...(750): n = A,T,C or G
gcagaacagacggaaaannnngagaatccattgagatgtcccatcaagctcnatgatttcnanntcttcaaatgcccccagagtgtgaaaggccggaatgacaccttttacctgacacctgagccggtggtggcccccaacagcccaatctggtactcagtccagcctatcagcagagagcagatgggacaaatgctnnnnnnnnnnnnnnnnnnnnnnnnnnnnnnnnnnnnnnnnnnnnnnnnnnnnnnnnnnactatgcactgagatgccttggccatagtgcaagagaaagcagccaggaaaaaccagagagactttcacactaaagaagaggcctccattttttcttttttcttttttttattggtgtagttatgaagcctttcaggctgcttctgtttaaaatgtaaaannnnnnnnnnnnnnnnttgcatcttcataaacctgctgcggcagactcctcagccgatggtggctctgggtttccttgagatcatatgtcctagaaagttgctgactgactctttttttgtctggggcctggggannnnnnnnggactgttaaatgtggcccctttccatcttcaagagagatggaattaatgatgaatggaccctgcaagggaatctccccagctgacttccnnnnnnnnnncagactttgctgaccacaggggaacgatgttcttttctttcttcatgctcaaacannnnnnnnnnnnnnnnnnnnnagaaaaatgaggggaa

SEQ ID NO: 11007 - DNA, 696 bp, Macaca Fascicularis
  misc_feature (1)...(696): n = A,T,C or G
gatggaccagttgactgtaatgctgctaaagggatgttctgtcactggtgttggggcagctggggttnnnnnngctccagagctctggctagtgtgctgggagtgactggatctgaaagggaggcttaggaccgtgaccctcccaggatcacagaggcattcagagagtgcaaggggcnnctgggacacagtattaggaaagtattaggaaagaagcatttctcaccctcttctctgcccctccccagagctgctgcccaaagggagcaaggaggaacagcgggattacgtcttctacctggccgtggggaactaccggctcaaggaatacgagaaggccnnnnnnnnnnnnnnngggttgctgcagacagagccccagaacaaccaggccaaggaactggagcggctcattgacaaggccatgaagaaagatggacttgtgggcatggccattgtgggaggcatggccctcggtgtggcgggactggccggactcatcggacttgctgtgtccaagtccaaatcctgaaggaggcgtgggagcccgtggagaacgctccaggagggcccatccatcctcgctgtcccttccctgttctccccctgcacccctgtctctgtcctctgtggccttcaactaacttctgctcccctgagacccgttcttcagccccaaatcatgtnnntttgggatga

SEQ ID NO: 11008 - DNA, 646 bp, Macaca Fascicularis
  misc_feature (1)...(646): n = A,T,C or G
tgggcaggatcccagggtgaacctgcctgtgaactctgaagtcactagtccagctgggtgcaggaggacttcaagcgtgtggacgaaagaaagactggtggccagaaggcactcaaagggtgtgaaaaagacagtgatgctccccctttccactccagatcctgcccttcctggagcaaggttgagggagtaggtcttgaagagtcccttaatatgtggtagaacaggccaggagttagagaaagggctgacttctgtttacctgctcactggctctaaccagcccagggcccacatcaatgtgaggggaagcctccacctcatgttttcaacttactactggaaactggctgagaacttaacaggcaacatcctttctgtctgcaacagtcacaagcacagaagaggctaggggactagaaagaggccctgcactctagaaagctcagatcaggccgggcgcggtggctcacgcctgtaatcccagcactttgggaggccgaggcgggcggatcacaaggtcaggagatcgagaccatnnnnnnnnnnnnnnnnnnnnnnnnnnnnnnnnnnnnnnnnnnnnnnnnnnnnnnnnnnnnnnnnnnnnnnnnnnnnnnnnnnnnnnnnnnnnnnnnnnnnnnnnnnn

SEQ ID NO: 11009 - DNA, 582 bp, Macaca Fascicularis
  misc_feature (1)...(582): n = A,T,C or G
ccagcccacagggaagnnnngnntgnngaagnnctccccctgccccgcgccggcccttcccatcccttccctgctctctggtggtctaaggacccaagctccctagacttcttccttttccgctgtctgtacgtttcagattacaccagtgtagacctgtactgctggcggggctgggcccctgaannnnnnnnnnnnnnncttagcaagctctgccctaaactgagaaccatgtgctgagggaagggctgaaaggtgaaggctcagcctccctcacatgggtcccgggttacattaggtgccgggctgacaggcatttggccatgctgctttttaagtctgcctttggtggccttctcaggcccacannnnnnnnnnnnnnncgaagtggaaaagctgaccagtgctccacactcggggcacatacctttccatgagcagctcctgcccnnnnnnnnnnnnnnnnnnnnnnnnnnnnnnnnnnnnnnnnnnnnnnnnaggcgttcaagaccacggagaagacaaatcctcatctagaaatgaggacacctcagtgacaaacacccctttttataccgatca

SEQ ID NO: 11010 - DNA, 670 bp, Macaca Fascicularis
  misc_feature (1)...(670): n = A,T,C or G
tgaacatacggagtgtaggtcttgctgtgaaggaatgannngcaatgtagaattacccaccaatcacagtaatgcagtgtttgccataatgcacgctcagagaacatccggcagcagtgcccccacaccctacctaccagtgctcgcatgggtctttgtgcttccattactgtgatgccaccattcctaggagaggcagagaccagcctctaaagcacaagccaaaaactgtgtgaacggcgaactttggagtgaagatcaatcttgcacttggtgaatagtgcacattggaccccaaggcgaaagccagtggtttgctttgataaaatgttcccacatgaggccacaggactgagaatgggaatttggcagggcctgagaagatggtctgacttccaggcttcctggtcaaagagagctacgtttggtcagttatgcagagtggatcctggcaactagtcccacctgattaggcctttagctgaaagaatttcttgacctccttgactgcctcagaggctgccaggtcaaaccctcttgtttatatgattagctcagagcgtctctatgaaatctagcccttcccctcacgagaaagcagttttccccaccaacagactagtgcatgagaaaggcaactgccacgaagaaaattccannttgaactaac

SEQ ID NO: 11011 - DNA, 703 bp, Macaca Fascicularis
  misc_feature (1)...(703): n = A,T,C or G
cccacaaatgacttaccacaaagggggaaatagtgacttactgaatggagaaatgtgtagatacaacttaaaccatgtgattgtattaacatcaaaaataatgggacagtctgggcacggtggccgagnnnnnnnnnnnnnnnnnnnnnnnnnnnnnnnnnnnnnnnnnnnnnnnnnnnnnnnnnnnnnnnnnnnnnnnnnnnnnnnnnnnnnnnnnnnnnnnnnnnnnnnnnnnnnnnnnnnnnnnnnnnnnnnnnnnnnnnnnnnnnnnnnnnnnnnnnnnnnnnnnnnnnnnnnnnnnnnnnnnnncaggaggtccacactgcagtaagcagtgactgcaccactaaaaagacatgaaaactaaatggaatatatgatcctggattggattccagaccaggaacagaaaagctacaaaggacattattgtgacaactggtgaaacctggataaagtttgtagcttagataacagtattgtgtccctgtaaatgtcctgattttaataattgtacagtgattatataagtgaatgtcctatgcattccaaggtattaggagtaaagacacattgtatctatggttcagggaaagagcctgaaatgttttttcccgaacaatttagcagatgtggcaaaatattaatagtttgtgaatctgagtgtaaggtgtatggtaagttctttgtattattaacttct

SEQ ID NO: 11012 - DNA, 642 bp, Macaca Fascicularis
cgggtgtgctgtttgttgatgaggtccacatgctggacattgagtgcttcacctacctgcaccgcgctctggagtcttctatcgcccccatcgtcatctttgcatccaaccgaggcaactgtgtcatcagaggcactgaggacatcacatcccctcacggcatccctcttgaccttctggaccgagtaatgataatccggaccatgctgtatactccacaggaaatgaaacagatcattaaaatccgtgcccagacggagggaatcaacatcagtgaggaggcactgaaccacctgggggagattggcaccaagacgacactgaggtactcagtgcagctgctgaccccggccaacttgcttgctaaaatcaacgggaaggacagcatcgagaaagagcacgtcgaagagatcagtgagcttttctatgatgccaagtcctctgccaaaatcctggctgatcagcaggataagtacatgaagtgagatggctgaggttttcagcagcaagagactccccaggtgtgtctggcctgggtctggcctgtgggcgctcgcccctgggcttggggctgccgtccccactcagggcgtggtctacagcactgtcagttcagtgtggaaagcatttctttttaaatta

SEQ ID NO: 11013 - DNA, 730 bp, Macaca Fascicularis
  misc_feature (1)...(730): n = A,T,C or G
caaaggcatagatnnnnntctatccagtcaggcattgcctgttctttccagtaactactgattcccccacttttctgtcttagaaaattgtgggaatcccccctcactctgcccatgttgcactctctgttcccaaccatgtctctgccctcagctattaactgtactgtgtatttgtcaagttcctatattgtatgtacagggttattcatgtcatcatgagaatgttggaacgcttgttaagtacttaccttttgctagcctcttnnnnnnnnnnnnnnnnnnnntctcatcacaactcagtgagatggaaagtaaaatcctatttgtacaaatgagaaaaccgaactctttagagtaactagctcagtattggctaactggtaaatggcagtgttgggactaaaatccagatttgtctgagatgaaagcccatgctcttatctactctctgtttannnnnnnnnnnnnnntggatgttgatctttgtttcaggttttgattttgttacatgttttttatactgtgtgtattttcctcactctacccttctgctctagattgtctggactcaggagattgtagcagttactggatagttatttttaagataatgattgcttttctctgtttatataagtcatgtgtacttactatagaaagtttgtaagatacaaaaagtataaaaattaaagttatgcactactaacatttanttctcccagattca

SEQ ID NO: 11014 - DNA, 915 bp, Macaca Fascicularis
  misc_feature (1)...(915): n = A,T,C or G
ccactgccctcttgctcagtttcnnggccgccgcaccatccaggcaggttcccaggnnnnnnnnnnnnnnnnnnnnnnnnnnnnnnnnnnnnnnnnnnnnnnnnnnnagaccctgcgtgtggtctttgctgtgctgggaaagggatgttttgggataagcctgacctgcctctccatctacaaggctnnnnnnnnnnnnnnnnnnnnnnnnnnnnnnnnnnntggcattctgcattcggtgggccgactgggggctatgatgggtcnnctgatnnngatgagccgccaagccctgcccctgctgcctcctctcctctatggtgttatctccattgcttccagcctggttgtgctgttcttcctcccggagacccagggacttccgctccctgacactatccaggacctggagagccagaaatcaacagcagcccagggcaatcggcaagaggctgtcactgtggaaagtacctcgctctagaaattgtgcctgcatggagcccctttagtcaaagactcctgggaaaggagttgccacttctccaatcagagggtggaggcgagctgggcgaactcgagggcctggcatggcagaggccaggcatccgcagctgagtggacaccatggccatctgctgtggctgaaggcagctttcacagctcactcctcttctccctgccccaccttaccccagccctacaggagcctgtgcaggcggctatgcccaaccaataacaagatggttcccctccctttccctgccaggctcatgtctttacaccttcactcagccacgccaaccagagactaggttccaatctcaccccaccacatacagagccctcatctgtgaaaagagaatgatcatgtgacccacccccagggcaggtatcagggtgaactnnnnnnagcac

SEQ ID NO: 11015 - DNA, 701 bp, Macaca Fascicularis
  misc_feature (1)...(701): n = A,T,C or G
tgaagagagaaatgtcannngaagaggcaaaaggctttcagccctcnnnnnnnnnnnnnnnnnnnnnnnnnnnnnnnnnnnntgtgataaatttggctgagatggttcacttttaaacatcatctcccacttcctaattctgatcatccttctcttgggggaaaactttaaattcctgnnnnnnnnnnnnnnnnnnnnnnnnnnnnnnnnnnnnnnnnnncaggaacnnnnnnnnnnnnnnnnnnnnnnnnnnccagttattgtggcctcccacacagccaacaaagaagaaaagnnnnnnnnnnnnnnnnactcaaacctccctctaccccatcctcctccccatcaatattnnnnnnnnnnnnnnnnnnnnnnnntttannnnnnnnnnnnnnnnnncagagnnnnnnnnnnnnnnngggaagatgcttttcttgactattaagaaaattttagttcccactttggannnnnnnnnnnnnnnnaactttcctttaacagtactgtaaaacttaattaccctcttttgtttgcagagtttactcgaactagaagtagatttggataatttggaattagaagatattgacacaacagatatcannnnnnnnnnnnnnnntttggatgactgactgtaatgctttccatttacctgactaaacanatcattattatatatagntattgattgctaccctgac

SEQ ID NO: 11016 - DNA, 754 bp, Macaca Fascicularis
  misc_feature (1)...(754): n = A,T,C or G
cttagccatatannnnnnnnnnnnnnnnnnnnnnnnnnnnnnnnnnnnnntttcatatttgtgatgatggacattttgctcgattggagcatgcataatatcttgtggtacctgtgtggaatttcagctttcctcatgcaaaaggnnnnnnnnnnnnnnnnctacttgaagaagtggtcagctaaaggaatccaggttgttggttggactgttaatacctttgatgaaaagagttactacgaatcccnnnnnnnnnnnnnnnnnnnnnnnnnnngcatggtggaagactgcgaacctcacttctagacttttaccctgggatgaaacgggttcagaaactgccaggggcctcannnnnnnnnntcaaaataccctttgtgctagcccaggccctggggaatcaggtgactcacacagatnnnnnnnnnnnnnnnnncatttttacctgaaccaaagcaaannnnnnnnnnnnnnnnnnnnnnnnnnnnnnnnnnnnnnnnnnnnntgttgctcttgaaaatctaggtctgaaaaaatgcacaatagcccctgccctgccctagctgaggcacacagggagacccagtgaggataagcacagattgaattgtacaatttgcagatgcagatgnnnnnnnntggnnnnnnnnnnnnnnnnnnnnnnnnnnnnnnnaaaacttgccacagttatttcaaatatttgtatttagctatgttaacatgtactgtagacatcaaacttgtggccatacta

SEQ ID NO: 11017 - DNA, 1151 bp, Macaca Fascicularis
  misc_feature (1)...(1151): n = A,T,C or G
acttngnctnngtnnnnnntcgaaatnacttcaagaaggaggaactgaattnnacccacatctgtgagtacacgcagaagtccggtgtctccagggccagacacttcttccttcaaggagagaaacagtttctgcttttcacagagcgcttccatttctacaaaaggtatacaataaaaggcatcaggaacctgattttctatgaactgccgacatatccacacttttacagtgaaatctgtaatatgctgagagccaccaacagaggagaagaggccacgtggacctgcactgttctctactccaagtatgatgcccagaggttagctgccgtggttggtgtggagcgggcagcacagatgctacaatccaagaagaatgtccacctcttcattactggagaaaaatgaaattttgttggacaggaagtggtatttggcatgatacacaatgtttgattctatgccacttggacccaattctgattacttacagaagaaggattgatacaaagaaagtgcatgagtcaatgtcagtattatctgacatttctttcttttcaggttatgtgtccctgaaaagttaaatgtaaaccagattttggtaaatcacatttttcagaagtgaagagggggctagaaggactctgagaagttggtagaagaaaacttccacttgtgaatatttttatgagacataaattcttttattacaatttacctctaatttattacacttagtaaattcttccagatttttctatttgtttgacactttcttaaagtaagaatacacatcattgcttgtgagaactggttatgagacattggaatacttcctgctgctacatgtcatcttaattttggatggcatgggttttgtaaaacttactttcccccagccaaacttttttgaaaccttagataatccaccttaattcagcctagaagagtacattgattcactgatctttttttatgttcataatagtaaatgttttagttttgttcaaatatatgcttaaaatcacgttatttaaaaaacatatctgctctgtctcaagaagtaattttgttgaaactccatgttaaaatatccatcttcaacagtagagtcttcataatagctggtcattttttgagtcataacag

SEQ ID NO: 11018 - DNA, 531 bp, Macaca Fascicularis
ataatgccagtgtcaagagatattttctcactacactcttcctgttcagattcgccataggattttatatgctgctcaagggagtgggtgtagacatcttatggactctggagaaagcccagaggtggtgcgagcggccagaatgggtccacattgacaccacgccctttgccagcgtcttcaagaacctgggcaccctctttggcgtggggctggctctcaactccagcatgtacagggaaagctgcaaggggaaactcggcaagtggctcccactctgcgtctgctctatagtagcctctctcgtcttcttgcacctctttgactccttgaaacccccgtctcaagtcgagatggtgttttacgtcttgtctttttgcaagagtgcggtagtgcccctggcatctgtcagtgtcatcccctattgcctcgcccagatcttgggccagccacacaagaagtcattgtaagggatgtggagtcttcagtatttcaagtcaacaactgtgccagggattgagggggagtagt

SEQ ID NO: 11019 - DNA, 723 bp, Macaca Fascicularis
  misc_feature (1)...(723): n = A,T,C or G
acagcagagattgactgcagcctggcagagtacattgacgtgannngcgccattctagacatccctgtctacaagagtcggattcagtccctccatctgctgttttccctctactcagaattcaagaactcccannnnnnnnnnnnnnnnnnnnnnnnnnnnnnnnnnnncactccttcatccaactccacctcccaagcaggagacatggagacattaaccttcagnnnnnnnnnnnnnnnagctgctgtttcaaggccgagctggcccctctgccccagctgagatggannnnnnnnnnnnnnntacttgatgtccttgcctatgccacagcttgggtcagggccagtgcatgccctgctgccctctctgccagaggnnnnnnnnnnnnnnnnnnnnnnnnnnnnnnnnngcctcagattgctgtccctggcgagttaatgcatctgtaccactgtggggatttgagttagaagaattggaatttctgagatcccatggagtttggattgggaggaaagcttaaaagatttcctttttgtgggagggatggaattgttttctttccttcgtaaagttagtgggtaaaaattttataaatcaaatgctctattatattgtcagattattctgctatttaatatgacagagaaaaggctggcggcagagacacaggaactttgcttagtaatgggcattaaatgaagagtagttaaagcaaac

SEQ ID NO: 11020 - DNA, 744 bp, Macaca Fascicularis
  misc_feature (1)...(744): n = A,T,C or G
agtggatggagacaggaccacaggaatgggctttcactttcactcccatgaggaggcttccaggcagcctggttcctcctagggggaaggcctgggtccagggcatcttaagttcatccaccagctccgtgagccacacagatatcccagaaaatattcctttcttacacaaggcttctgnnnnnnnnnnnnnntgcccctcttccctgaataaccaagaacatgttctataaacccagtttttgacacatgtcaacacctgctcttcaaagccccttttgaaactcagttttgtgccaagtcttctgtatctaattacctnnnnnnnnnnnnnnnnnnnntttctaaagagacgtgcccagtcatcctggtgcttgtacttctcttgcatgtcatgaaggaccttggatttactgagaactcagccgtggccttggctttgatacttacatgtgtcagcccttgggccgattgttgatcatccagagccccagttctgtacttgtgaaatggagacagcagttctcatcctcctagcccatggagtggttgtgaagctggattgaaatatgcatgtgactaagccatgtagctaaaagtgagggatgacttgtattttggatcacttattttaattctacttataatccatggcttagaatctttatttaaacattgtttctatcaaactagaaaggttcagcatttctgtcatttacttctgctatgatacccaagaactta

SEQ ID NO: 11021 - DNA, 740 bp, Macaca Fascicularis
  misc_feature (1)...(740): n = A,T,C or G
catctgtaaaatggggagaatnannnngnnnncgttacagggttgttgggaagattaaataagctgatctactgcaannnnnnnnnnnnnnnnnnnnnnnnnaacagaaatgctcaacaagggccagaggcggttagctggctaggtacgctaggtacttcatacatgtttttgaacgaataaatggattggtaattaactgaaagcatacgtgacatacttactaaatgtctttcatctatgtgagggagaaattctcaactgtatacagagaaggacttaatcctctgaaacagacaaactgaactgagtcagcctggacttggaggctactctcagttgtgttaggctcaaggccacnnnnnnnnnnnnnctggaaactaatatctgcatgttactnnnnnnnnnnnnnnnnnnnncagtatgtcacattaacatgtagtaaccagtgtgtgttcaaggcctcctagtttatccatcaatgaaggctctcaaagctctaaagagacaatcttctaaaccacaaaacacagctatccttctctcctccatggccatcatatacccatcctttttaatcctctgagcaatgtacaaggtctagaatttctatttctctagtctaaaatgtatacccatgtctggatttgagatgtttgcacatttgtttctaaggaatacatgatgtactcagactacagtagccttctgtttctcatctttaatatgtctgaaatgtc

SEQ ID NO: 11022 - DNA, 731 bp, Macaca Fascicularis
  misc_feature (1)...(731): n = A,T,C or G
agccagagcaaagagagntnnngagtgacctggcaacctaggaaggcttgctttnnttnnnggttcattctggttcattcctctacaaggcccagannnnnnnnnnnnnnnnttactgtgatggtgaacctatccacagacccacagactagaatttggctgcctcaaataaactcatacaacttgtctttgagtcttgaaacctggtttcaactaaattgtttttatttttagaatgtctaaaacgtgacagttcaaaaaataataatttgcatgcatttgagaagtgttcatctcataggaagaattttaaaagctgctttctgggcagtannnnnnnnnnnnnnnntgtgtttttctttaatcaatagaaacagaagcctannnnnnnnnnnnnnnngctacccttcaggataatacaaatcaaactgaaaacaggtttcaaaaggcagatgcttctgtgtcacacttgtcaggtnnnnnnnnnnnnnnnnnnnnnnnnnnnnnnnnnnnnnnnnnnnnnattgcgtcggaagctagtttttcatctagtgaaggaagtcctttgtcaaggcatgaaaacaaaaagaaacccatgatcaagttaaaatctaatgcccnnnnnnnnnnnnnnnnnnnnnnnnnnnnagaaattgaggctgctttacgccctagaaaccataacaccgatgattctgatgatttttatgactaacatgctgtgacatctg

SEQ ID NO: 11023 - DNA, 747 bp, Macaca Fascicularis
  misc_feature (1)...(747): n = A,T,C or G
aagttcagtttaaagccaaaaagcatggtggggaggggcctttcctgtgtcctgggatggggagccagagctctgtggcaggctggagggtttggggtgcactttagtttggggcaggacaggagccgcagggctgttttagttgtgattggcctggtgtggctgctgctcccaaatgaaggggtcagggttggctgtgctgggccctcagcccgcgtgcccggccctggcttgtctgccctcaagcccagtgggtggcgctgccgtaggctctggctcggctccctgctccctgcacccagctgggcatacgcttggggtctgcagtctgaatgtatccctctcctcgttcgaacctaagctccctaacgcacagtgggcggggcggggctgggggaagttacaggtgccgatgtgatgtcacttctctggagcccagctcccttcctggtctgagactagctctgggggtggtgggggcccccacaggccccgctcttcccgcgccccccttcctgtgctgctgctctgtgcctgctgtcagagccctggttggggaggacgtgaccaccctgagacctggaggagacgggcgtccgcctgggtttacggagagctgcttttgggtgtggtctgnnnnnnnnnnnnnnntcaaaggggatgggcgtgagctagcaagcaaagtatccccaccgctgagcaagaactttttcttgtttttaaaccatcacgtcctcattcacatga

SEQ ID NO: 11024 - DNA, 757 bp, Macaca Fascicularis
  misc_feature (1)...(757): n = A,T,C or G
gctggccccaatgcctgctgagccatttgacaacactacctacaagaacctccagcatcatgactacaccacgtacaccttcttagacctaaacctcgatctctccaaattcagnnnnnnnnnnnnnnnnnnnnnnnnnnnnnnnnnnnnnnnnnnnnnnnnnnnnnnnnnnnnnnnnnnnaaccttccactgtcttcgctgcatcctggagtgcaaaaataaaatccactcgagtaacaaagcccagtgtgcatcatcagtttcacttttacttgtttttttgagacagggtctcactctgtcacccaggccggannnnnnnnnnnnnnnnnnggctcactacaacctccgcctcctgggttcaagtgattctcctaccttagcctcctgagtagctgnnnnnnnnnnnnnnnnnnnnnnnnnnnnnnnnnnnnnnnnnnnnnnnnnnnnnnnnnnnnnnnnnnnnnnnnnnnnnnnnnnnnnnnnnnnnnnnnnnnnnnnnnnnnnnnnnnnnnnnnnnnnnnnnnnnnnnnnnnnnnnnnnnnnnnnnnnnnnnnnnnnnngtccactttcatgctttttacagtaagtggtgaattagcaacagtaatgctgattatccaacatatattttggaatatctactgtgtgcaaggaattcttctttaaggttatggatcgctggacaaatccatataattagagaattttaagcgctttacagccgtatgattctactgtactgagcccagtcaa

SEQ ID NO: 11025 - DNA, 632 bp, Macaca Fascicularis
  misc_feature (1)...(632): n = A,T,C or G
taannnnnnnnnnnnnnnnnnnnnnnnnnnnnnnnnnnnnnnnnnnnnnnnnnnnnnnnnnnnnnnnnnnnnnnnnnnnatcatttgtctcaaaaaaaaaaaaaaaaatnnnnnnnnnaggtctatcaagcttgacacatctgtgtcatcatgcnnnnnnnnnnggaannnnnnnnnnnnnnngnnnnnnnnnnnnnnnnnnnnnnnnatgagttactatcaaatgccagtgagaatcttcgtatagaataacctgggcccaagtgatttcagtaaaaaacttccctttctttggtttaattttctatgtgcttttaggtgcgaatccagatatgcggtcttnnnnnnnnnnnnnnntacacagttcttttagttactgtacactctgtttgttcaataaactgcatatcaacttccctcaaaagctgacttttttgggtctcttacataccataaagtaggtcattgaannnnnnnnnnnnnnnnnnnnnnnnnnttggttaaattcttctggtatggactcttgccttatatagaggtttctatttttcttaagtcagcatcaatacaatggccggagtttctgtttttgcaacaagaaggtgttggtattttatgtagggtaaatgtga

SEQ ID NO: 11026 - DNA, 763 bp, Macaca Fascicularis
  misc_feature (1)...(763): n = A,T,C or G
gacacagcnannnnnnnngcggactnncaggcttcctactagagaacacgattcctggcacacagcttgagcgaggnnnaggtcaagggctaccatctgttttcactgcgcaagaggctcgaatgcctcagaagcccagggagaaggctgctcaagtgtacagacttcctttccccatccaaaacctgtgtccctgcatcccccagcctctccgctgcctctgcccactgcctgaagaccctggggatgaggaaggaggctcctctgagccagaagagatggcagacttgcttcctggctcaggggagccatgccctgaatctagcagagaagggtttaggtcccagaaatgaccggtatgcctacttctgctctggttaatttagcactaactctcatctgctggagaatcagctcccaaactgttctttctcgtaggcagagggtatgtgtgtgtatattacatgggcccgcctagaggttccatttcccagtaggttgggttgcctttccttgtcttaattaggcctaactattccagagcagaggccatgatttagcggaccatgaatgaatgagattttgcctgtgtactatcaacgccacttgaaccccagcattcactttaatacttattgagcatctcccatgtgcaaggtcctggaactacagggttaagacagggtccatgccctctcaaggcgtttacggtttaaaaagacctttgtaattactaacgaaaatgcaaagcagaaagcagtct

SEQ ID NO: 11027 - DNA, 747 bp, Macaca Fascicularis
  misc_feature (1)...(747): n = A,T,C or G
ctgcctggctccctccacccccaactgcacccatgagactcggtccaagagtccattccccaggtgggagtcaactgccagggaggtctttcccaccaaacatctttcagctgctgggaggtgaccatagggctctgcttttaaagatatggctgcttcaaaggccagactcacaggaaggacctcttccagggagattagcggtgatggaaaggagagttaaaatgacctcatgtccttcttgtccacggttttgttgagttttcactcttttaatgcaagggtctcacactgtgaaccacttaggatgtgatcactttcaggtggnnnnnnnnnnnnnnnnnnnnnnnnnnagttcatttaaaaaagatatctatttgaaagttctcagagttgtacatatgtttcaccatacaggatctgtacctaaaactttctttcctaaaccattcaccaagagccaatatctaggcattttcttggtagcacaaattttcttattgcttaggaaattgtcctcattatttctgtgtgtaagacttaagtgagttcggtctttaaggaaagcaacgctcctctgaaatgcttgtcttttttctgttgccgaaatagctggtcctttttcgggagttagatgtatagagtgtttgtatgtaaacatttcttgtaggcatcaccatgaacaaagatatattttctatttatttattatatgtgcacttcaagaagtccactgtcagagaaata

SEQ ID NO: 11028 - DNA, 768 bp, Macaca Fascicularis
  misc_feature (1)...(768): n = A,T,C or G
ccacagacactggacacagagcagcagtgggacacaccatgtcccagagagaatgctgaggctgcctttgtcatctgtgggaccctctatgtcgtctacaacacccgtcctgccagtcgggcccgcatccagnnnnnnnnnnnnnnnnnnnnnnccctgacccctgaacgggcagcactcccttattttccccgcagatacggtgcccatgccagcctccgctataatccccgagaacgccagctctatgcctgggatgatggctaccagattgtctataagctggagatgaggaagaaagaggaggaggtttgaggagctagtcttgttttttgcatctttcttgctcccatacatttatattatatccccactaaatttcctgttcctcattcttcaaatgtgggccagttgtggctcaaatcctctacatttttagccaatggcaatcaaattcttgcagctcctttgtttcatacagaactccagatcctgagtaatccttgtagagctcaaagagtcaaaaccctcaatgttccctcctgctctcctgccccacgtcaacaaatttcagactaagatgacccagacccggagcactgaccttgtatgggggcaggccccaggagcaggcagcagtgttcttgccctcagagtgacttggggagggagaaataggaggagacgtccagctctgccctctcttcctcactcctcccttcagtgtcctgaggaacaggantttctccacnngttttgtatgcaaca

SEQ ID NO: 11029 - DNA, 695 bp, Macaca Fascicularis
  misc_feature (1)...(695): n = A,T,C or G
acagagtcgaggctggccgtcgttgaagtcctcaccagtactgcaccacttttcctcaccnnnnnnnnnnnnnnnnnnnnnnnnnnnnnnnnnnnnnntctctggaagtgtgtccttacccttctgcagagtgaggagcaagctgttagnnnnnnnnnnnnggaaactgtgacaactgccatgtcacaagaaaatnnnnnnnnnnnnnnnnnncaggcgcannnnnnnnnnnnnnnnnnnnnnnnnnnnnnnnnnnnnnnnnnnnnnnnnnnnnnnnnnnnnnnnnnnnnnnnnnnnnnnnnnnnnnnnnnnnnnnnnnnnnnnnnnnnnnnnnnnnnnnnnnnnnnnnnnnnnnnnnnnnnnnnnnnnnnnnnnnnnnnnnnnnnnnnnnnnnnnnnnnnnnnnnnnnnnnnnnnnnnnnnnnnnnnnnnnnnnnnnnnnnnnnnnnnnnnnnnnnnnnnnnnnnnnnnnnnnnnnnnnnnnnnnnnnnnnnnnnnnnnnnnnnnnncaatattgtcttgttttaccatctctcaaggatatcaagtgctggtggtaacttcacattcattcaacatacaaggattttgtagaatcactgctgatgttttcctctttggtgttccacgttaattatcattgagtcttaactaccttaaaagtacatgttgtttctttttccccaaatcagtggt

SEQ ID NO: 11030 - DNA, 734 bp, Macaca Fascicularis
  misc_feature (1)...(734): n = A,T,C or G
taacctggaactggagttggcaatacctagttnnnnnnnnnnnnctggagtatcattctttatgtatttatatgtatgttttaagtaatcctcctcctgtatctattgtatatttttttcttaatgtttaaggaaatgtgcaggatactacatgctttttgtatcacacagtatatgacnnnnnnnnnnnnnnnnnnnngccttggggagctttaagcctcagttataacccgcgaaaaacagagcttcctagaagtnnnnnnnnnnntcaaggtacaattctttaaaattcactaatnnnnnnnnnnnnnnnnnnnnnnnnnnnnnnnnnnnnnnnnnnnnnnnnnncgcacggtgtgctaaaactaaaaagcattttgaaacatacagaatgttctattgccattgggaactttttctttctaacccagtggaggttcgaaagaagttatattctggtagcaaattaactttacatcctttttcctacttgttatggttgtttgggctgataagtatgcttaatcctgaggcaaagtagtgaaatgttttatatgttatgaagaaaagaattgttgtaagtttttgattgtactcttatatgctggactgcattcacacacagcatgaaataagtcaggttctttacaaatggtattttgataaatactggattgtgtttgtgccattcttttaagaacaatgttgcaacacattgattggataagttgtga

SEQ ID NO: 11031 - DNA, 673 bp, Macaca Fascicularis
  misc_feature (1)...(673): n = A,T,C or G
ggcatgagctnnntgcaggaccggnatgnncgtannnnnnggttccagggngntcctggacccttggcaccnnnnnnnnnnnnnnnnnnnnnnnnnnaggctaagagagcagaaaggacttcacacctgcaagggctacagcacccttctccactctatccccctgcaaccctgggagtcacccctgggcaggataggaccctccaactcnnnnnnnnnnnnnnngcagggcgcaaatcccgcaaaaagaaatccaaggccacacagccgagtcctgaggacagagtggaggacccttcgcctccaagcaaggccctttccaggacacgaagggcaaagagagaccttcctgagaggactgcaactcagcggcctgaggggcccagcctccagcaggacccagaagttcccacagtgcccaagaaagggaggagaaaggggcgacaggcggcttccggccaccgcagaccccggaaggtcaaggctgacaccccatccttggacccggaggggacctcagcctcttagcaggagggtctccttgctgcactcaccctttcttgtcttgccctgaatcttggggtctgaattcnnnnnnnnnnnnnnnnnnnnnnnnnnnnnnnnnnnnnnnnnnnnnnnnnnnnnacaactctcatgtttttaattgtacccc

SEQ ID NO: 11032 - DNA, 758 bp, Macaca Fascicularis
  misc_feature (1)...(758): n = A,T,C or G
tcaaccaacgctgaaaaaagacagggccgataagctaacaccagacagacaacactgggaaacagaggctattattgtcccctaaaccaaatactgaaagtgaaagtccagaacgggttcccacctgctggggtgaaggggccgaggagggtgagtgcgaggagtgtgggagtggcctnnnnnnnnnnnnnnntgaaccttcttccggcctcccacagactcaaatgctcagaccagctcttccgaaaaccaggccttgtctccaagaccagagatagtggggagacttcttggcttggtgaggaaaagcggacatcagctggtcagacaaactctctgaacccctccgtccaccactttctccactgtcctccgagccagcaggaatggcagctgccacaccgccctaaaagcacactcattccctcacttgccgcagtgccctcccaggctctcaacaggggagagtgcggtgtttcctgcaggccaggccggctgcctctgcttaaccaaagccacactctgggctccagagtggggatgacatgcactcagctcttggctccactgggatgggaggagaggacagggaaatgtcaaaggcggggagggtgacagtggccacccaaggcccacgttctttgttctttgtcacagggactgaaaacctctcctcatgttctgctttcgattcgttaagagagcaacattttacccacacacgaataaagttttcccttgaggaaacaacagcttaa

SEQ ID NO: 11033 - DNA, 767 bp, Macaca Fascicularis
  misc_feature (1)...(767): n = A,T,C or G
cacacatgtgctatagcattgcttcccttaaaacaattagaatacaaaaaagagtctcttgacatgtagacctcttctctattttctcagaggcagccaatatcaggaaaccaaaattaattatcagagtctctatatgcatcttgctaacagaagagttgtgtggtgttttctacatgttaaaaaaggttcacagattccaaaatactgcaccagtgggtttcaaaattcaaactaggttccacagagccccaggataccataggagtatcttagaggttaatgtaaagagaaagggcactgccagataccagcggtcctgggctctacacataacttgaaccattaaagttcaaccaaagtaattccacttttatcttatttgtagattggggctccacacaaaatttaattttaaaaatggtttccactgttaaagaaccattatattaggctgaacttacatccataaggttatgttgcacccaaagggctgtgttaagaagtcaactattgccnnnnnnnnnnnnnnnnnnnnnnnnnnnnnnnnnnnnnnnnnnnnnnnnnnnnnnnnnnnnnnnnnnnnnnnnnnnnnnnnnnnnnnnnnnnnnnnnnnnnnnnnnnnnnnnnnnnnnnnnnnnnnnnnnnaaaaaaaattagctgggtatagtggcgtgtgactgtagtcccagctactcaggaggctgaggcaagagaattgcttgaacctgggaggcggaggtcatggtgagccaagatggcaccac

SEQ ID NO: 11034 - DNA, 693 bp, Macaca Fascicularis
cactttgattagagtgggaaaagcctgaagcctttatcatgtggttgctgatgtgtataattattaatgaaatgttcactcctagtcccttttgaggcttagaatttcaaccacgtgtcaggccagacagtattataaactgtgctttgctgtgtgagacagcacatttgtaaatgatgcttgctgcctgccattttcaacctattctctcttaagagtgctaggtaccaaattgtcaaagtttgtttttagttatattccttttgaggctggtaaaaaatttaaatgtaactttgtgggaaccctgattcatatttagaaaatgtaaatgtctgtagcactttcttgcagttaatttgaaaactttggatgctgaactttgttttgtcaatgatttagatgatttaaaaatgcatgtgtgattttaattttgtaattgttttgacaagcataatttacttggacaactttgtaggtagccttaacttctggtcaagtttgtttttcatataaatatatatacatatatatatacatgttatgtatggttgtaaattcatacacttattacacgaatgtgttactgtatacaaaactcttaatgctttattctcaaatgctgggttgaaaaatgtttgaaagccttttaaaatatatatctttataaagtaatattcaggatgatgataaaaa

SEQ ID NO: 11035 - DNA, 758 bp, Macaca Fascicularis
cttcggactgtccccaccagtgttcacctaaaagggtagggactgggccttgtgtggcttcctagtgtgctggcaaccccatcacccagcaaggcacaggctcctgtatttgagactaggatagcttcatcttgagcctgagccttagaatctatagaggatcctggagtcggatctagccatggctggcagaggtttctagggtggtccccagctgtggcgtgaactgaggacgacccggggcagctggcaggagagagccttggcctgacctggcacagaaagggcagcttcagtctctgcagtgtccattgtctgctgttccttcgagggttccaggctgtgtgtggggcccaagcatgtcccacccaccccgcctgggcccaggcagcacctggagcccacagagtctgtgcatagctaggaaacccggctcagattgccaccaccggggcactggctggtctgtcttggtccatgttaaccctccacctccacccacctcctcccttggcctctttccccaccccaaccattctttctttttcctttaacccaatggagactttttgatgcatcattttctttgctgtgccaaagcaggtcagaagagggagaggaggggctggggatgaggggcagaccatggccaaggggccagctgccccctcattcatcactctgaccttcacagggacagatctgatttatttatttggttaaaaaaaaaaaaaaaaaaggaacagaaacaacttgca

SEQ ID NO: 11036 - DNA, 721 bp, Macaca Fascicularis
  misc_feature (1)...(721): n = A,T,C or G
tgcggctgatgaagcccnnnnnccggaacatcagagccttgacacgcagcaggagggcggggaggaggaggcaggcnnngtggcccaacaggccatagctgtggcagagccctccacttccgaatgcctccgcattgagcctgacaccactgccctgagcaccaatcatgannnnnnnnnnnnnnncgtccagatcctccggaattgtttacggtacttcctgcctccaagtttccccatctccaagaagcagctgnnnnnnnnnnnnnnngatgagctaatatctttccctnnnnnnnnnnnnttcaagcaatatgaagtagggctccaaaacctgtgcaattcctaccagagccgtgctgactcccgggccaaggcctccgaggaaagcctgcgtacctccgagaggaagctccgcgagacggaggagaagctgcagaagctgaggaccaacatcgtggcactcctgcaaaaggtgcaggaggacatagacatcaacacagatgatgagctggacgcctacattgaggacctcatcaccaagggggactgaaggcgggagagagagcagctcccctgcccacctgcccttcaaccctgtagctgcagggggagggggcttcattcatgggttggtggtcgcaccttggtttgacttacaggggacatttgtgtttttggagggaaagataccctgattctttgaatcttcctccttaag

SEQ ID NO: 11037 - DNA, 1022 bp, Macaca Fascicularis
  misc_feature (1)...(1022): n = A,T,C or G
ctgttcatctgtcaacagataattattgagaatcttctctgtacctagttctnnnnnagatactagagacacatctatgataagacaaaattgatgtgtacagtgatcttgtatattactgattgtaaactgacaaaacacatatgaaaaaaatatataaaaagaaaaacttcaagtacttaataatgccataaaaagatagactgaagagatatgattgaaagtcacctagtcaagacaatgcatgagacnnnnnnnnnnnnnnntctttggggaggtactgcttgagagccgataaattagaaagccttnnnnnnnnnnnnnnnnnnnnnnnnnttttcactttttatgccctgttttgattaacataaattcttaatttcaacccagtcacatataccaatatttttatttaacgcaacttaaagattttataatatcaaatattatttcagaatagcaatgttatgtattgttgaaaaaaatccttctcttgtatctcttctagaagctttagagttctgcctttgacacttnnnnnnnnnnnnnnnnnnnnnnnnnattttctgcatgatttgaatatctttataaagacttggttatcccaacaccatttacttcaaaactttttcattccccagtgatatgccatgcaacacctctaatatagcaagttctaataaaagcaaatacatgctaatttgctttctatactgtttggtttgtttatattggtctatctgtgtataaatatcacactgttctacttattagcactacatagtgttttttgatatctggaggatcaaatcctcccacgttgtaccctttctcttttaatcgggtttgagctagccttggtcccctgaattttaagattagttggttgggttctgcacacatccacacaccctgctgggatactgattgggattgtataaggagattgaatctttgtaatactatgtttttcagtccaagaacttggcataccacacattgtatatctatttatttaccat

SEQ ID NO: 11038 - DNA, 716 bp, Macaca Fascicularis
  misc_feature (1)...(716): n = A,T,C or G
caactttgtactcaacagatgttctgaaattaataaatacaaactttatnnnnnnnnnnnnnnnnnnnnnnntaaccggagatcagctgatcagattcgacccatcttnnnnnnngatgttgacccccatagtcttcctcctggttctaacttttctatgacagcaggagattttcaagagatttattcagaatgcaatacctgggactgtattgctacctgtttcttcatnnnnnnnnnnnnnnnnnnnnnnnnnnnnnnnnnnnnnnnnnnnnnnnnnnnnnnnnnnggtggaatttggataaatctaggtcctctgctgtaccactttgaaaatctggcaaannnnnnnnnnnnnnnnnnnagctatgaggatataaaaaacgttgttttgcagtatggattcaaggtagaggtggaaaaagaatctgtattgtcaacatatactgtgaatgatctctctatgatgaaatactactatgaatgtgtcttgtttgtggtccgtaagccacaataatggtctcaagtgatagnnnggnngaaaaaatttacgtaagaacaaatgctgaaataaacgactcaaaatcaactatcagtgatgacaggacacaacttcaaatcagtggtgccttcttattcctaacaaaatttagaaatagtgtctattttcttaatatgtctattgctttttcagaaatatactatgccatgcagat

SEQ ID NO: 11039 - DNA, 654 bp, Macaca Fascicularis
tgaagacatgaaggaagtgatagaaatcgatcagttttcctacccagtgtatcgtgcctttctccagtacctctacacagacacagtggacctgccgcctgaagatgctataggtcttctggatttggcgacatcttactgtgaaaacagactgaaaaaactttgtcagcacattatcaagagaggaattactgtggagaatgccttttcgctattctctgctgcagtcagatatgatgcagaggtaacataaacaacaaacagaaaccaaaccacccttaactcccttcatgctcgtctccccctcttctctcgtgagacatggaaaacgatgagtcacttcacttctgtttagggaatcagtgaacccattgaaaactgaaatctgcccttgcttcttaattccctgttcattgtttcaaaagtcgttgttcctctaagtaagacaggaaacgaaccaaggtcctagcagctgtcctgcaggttggaacataaggtgccacactaactggactaacaaacagcatattttagtttcaggtctttctcagtgtcagcatatgtgtttacttcaagactcaccttgctgtcttcccacctcggccctgtcataagctggggatgcgtatgatttgtatctctgtacgctctgca

SEQ ID NO: 11040 - DNA, 761 bp, Macaca Fascicularis
  misc_feature (1)...(761): n = A,T,C or G
acaggaagggcttccggctgctcctggccagccccaggtccnnnnnnnnnnnnttccaggagcagcagaatgagggccacggggnnnnnnnnnnnnnnnnnnnnnnnnnnnnnnnaaacnnnnnnnnnnnnnnnnnnnnnnnnnnnnnnnnnnnnnnnnnagaacataattcatttgtggagagatgcattgactggaannnnnnnnnnnnnnnnnnnnnnnnnnnnnnnnnnnnnnnnnnnnnnnnnnnnnnnnnnnnnnncttcaagctcaaagagttctccaaggccgaagnnnnnnnnnnnnnnnnnnnnnnnnnnnnnnnnnnnnnnnnnnnnnnnggcatccccaagcccttcgggcccatcatcaacggccgctgctgcctggaggagaaggtgcgatccctgctggagcctctgggcctccagtgcactttcatcaatgacttctacannnnnnnnnnnnnnnnnnnnnnnnnnnnnnnnnnnnnnnnnnnnnnnagaaagcccttctccttcaagtgnnnnnnnnnnnngccctgaacccatcttccctggcgtcctctcccnnnnnnnnnnnnnnnnnnnnnncctctgcagggtggcaagcaagagctcttgtggatattgtggctccctgggggcagccagccctcccagccctggcttgctttcttcttctgtgtcccagtttcccactctgaagaccccaagatggtcctagcattgcacactcagttctgctctaagaagctgcaa

SEQ ID NO: 11041 - DNA, 776 bp, Macaca Fascicularis
  misc_feature (1)...(776): n = A,T,C or G
tcaagcttgnnnatagtgacntttnctacagtgtgaccttagggtacagctagatgttttannnncagcggctttcgnnnnnnnnnnnnnnnnnnaggacaaaagatcctggctaactgttcttctccctaccaggtagacctgtttggtatagcagatttagcacatttacttttgttcaaggaacacctacaggtcttctgggatgggtccttctggaaacttagccaaaatatttctgagctaaaagatggtgaattgtggaataaattctttgtgcgnnnnnnnnnnnnnnnngatgaggccacagtgtctgttctgagggagcttgcagcagaaatgaatggggtttttgacactacattccaaagtcacctgaacaaagccttatggaaggtagggaagttaactagtcctggggctttgctctttcagtgagctaggcagtgaagtctcacagattcctgcctcagagcaatggttgtattgtggaacactggaactgtatatgctgtaatttaatttaggacacatttagatgcactaccattgcttttctgctttttggtagacgtatatttcgaatatacgaaaaactgacattttttacacagtgatatgcttactcatggccttgtctaacttttaagaagaactattttattctaaacaggctcattacaaatggttaccttgttatttaacccatttgtctctacttttccctgtacttttcccatttgtaatttgtaaaatgttctcttacgatcaccatg

SEQ ID NO: 11042 - DNA, 738 bp, Macaca Fascicularis
tgcaacgaccatcatgtctctgtgaccacacgattacccattagcttccacacccctctgcctgccaggaagctgaggctcaaagaagagaactgagaggaggggaacaacaggccgtggaggcccccgtgggccaggcagtgtgctgggcactctctgtaagttccccatcccaccctgtcccggtgggacggctccaatccctccttagcagatgcacaggcagcacttagggcacctgaccagggtcctcaagcaggacttgaacccaggtgccctgactccagctcttggacttccagatggaccctgtcctgcctgggggcaagggaagtgcaaggataggaggttctagtccaacgaggtcacagccctcagcaaactgtcaaaggctttatggaaggcgggccattctgagtattcctcagatcggggaagcccccacaactcagggcaggacagtcagggactgtccggcagctgccctcaggtagggggatgaaagggaatgccatatgtctgggctcggggtaggggacattgctgagcctggtctcatttcattctcaaatcaaacagtggaggtaggtgagcttatctccactgtacagatgaggaaactgaggttcagagaactggttgcccaggtcacacagcttggaggaagcagaataaagaatgctatctgtctccaaacccatgcttccaccatcatgccatcctatcaagacagctaac

SEQ ID NO: 11043 - DNA, 694 bp, Macaca Fascicularis
  misc_feature (1)...(694): n = A,T,C or G
cgggggtccctggnnnnnnnnnnnnnnnnggggaggccccaagggccccttggaggcagcgcccccaccttgggnnnnnnnnnnnnnnntagggggacccctagagtcaggccaccactggccctggggagagtcaaaggcccccgagggtgcccagccccccacactgtgactcctcacactcnnnnnnnnnnnnnnnggtgggggccctgggacgtttttaaacctagggtttggagtctggactaagctccatccacgtcactcacaagtttctgtttatatttctagctttttttaataaaataaaaaaaaagacagaaaacagnnnnnnnnnnnnnnnnnnggcctggcacgccggtctgtgcctgcccgccccgccctggcccaccggccccactccctgggcgcagagtcacacccactcacccttccgccaacagtccaggtcacacagcagcagtcannngtaacagnnntgcacatacacactcggtctcacactcacctgtgggttttggttccgttcaatttgggtttttaactttacagggnnnnnnnnnnnnnnnntccttttgtatggagtttcatccggggggtttcaccccctgctccagtcctgaggcctcctgaccctgacgttgtgatacaccccacagagatctatgtttcttatattattattgataataat

SEQ ID NO: 11044 - DNA, 1005 bp, Macaca Fascicularis
  misc_feature (1)...(1005): n = A,T,C or G
agcctcccttggtagagaggaggcttatccacnnnntgcacgcctgccgnnnnngncctgctgggcagcccttcagtgtggctggcgttggggccactgagttgcctctatctttccctccttgtctggccccagtggtctggggagcccccaggcacacctaagcgtcgcggagcattattctgccacggccctgcatactgaccccggaaggctggacagccccagccaccaccttcagcctagcctgtcccccaaggatggcaaagctcagcaggggtctgagggtagccggccagaagaggcaggaacctcctgcccacgtttagacccctacttctttgctgcccccaccctgccagagctgatgtttccaataccaggatgtcttcacagggcacagcccctgcagagggtcttggttatttggaagaggacacagtatcccctctggccagagtatgtcagagaaggaagagtagggcttttttgtttctgtttttgttttttttttttttttaaaggtgcttgcttgtttaatgtaaataatagaaagccttaatatcttttctgtaacacggagtaatattttaatgtcatgttttggatgtacataatatatttataacaaagcagcaagagtctacttaaccttggctgcctcgtggtgtttcctggctgggtggggtgggggggttatcaaggagcctgagacgtgaggcccgactcactccattcccagctcccccaacccgggccttagnnnnnnnnnnnnnnnnnnnnnnnnnnnnnnnnnnnnnnnnnnnnnnncaaagccttttggaggggattgggtgaggacagtggtctttcttattgatcatgatgataaagtaacgatggctgatccctgtttgtgacttccnnnnnnnnnnnnnnnctggcacctggtgtgtgccaggctctctcctgtacacaggtacagcggggaaagaaccaacaaagacctgtcctggtggggcgacc

SEQ ID NO: 11045 - DNA, 707 bp, Macaca Fascicularis
  misc_feature (1)...(707): n = A,T,C or G
gcagtactgtttggaaaccaagatcctgtggatacggtggtgcggacagagattgtnnnnnnnnnnnnnnnnnnnnnnnnnnnnnngaaggacaannnnnnnnnnnnnnnnnnnnnnnnnnnngggatgaacttcatggctcannnnnnnnnnnnnnnnnnnnnnnnnnnnnnnnnnnnnnnnnnnnnnnnnnnnnnnnnnnnnnnnnnnnnnnnntactggaggcccaactcccagattctgagctgcaacaagtgtgcgacgtcctttaaagataacgacactaagcatcactgccgagcctgtggggagggcttctgtgacggctgctcatcaaagacccggccagtgcctgagcggggctggggccctgcgccggtgcgggtgtgtgacaactgctacgnnnnnnnnnnnnnnnnnnnngctattaccgaggcgcaggtggacgatgaaggcgggacactcattgcgcggaaggtgggcgaagccgtgcagaacactctgggagctgtggtgacggccattgacataccactaggtctggtcaaggacgcggccaggcctgcgtactgggtgcctgaccacgaaatcctgcactgccacaactgccggaaggagttcagcatcaagctctccaagcaccactgccgggcctgcggacagggcttctgtgacgagtgctcccacgaccgccgggctgtcccttc

SEQ ID NO: 11046 - DNA, 456 bp, Macaca Fascicularis
  misc_feature (1)...(456): n = A,T,C or G
cccctcaagaaagtgtggagtctgcagggcctctagatgtgctgggccccagtctccaagggcgagaatggaccctgatggacttggacatggagctgtccttgatgcagcccttggttccagagccgggtgagcctgagctggcggtcaaggggttaaattctccaagcccagggaaggaccccacgctcggggccccactcctgctggatgtccaggcagccttgggaggcccagccctggnnnnnnnnnnnnnnnnnnnnnnnnnnnnnnnnnnnnnnnnnnnnnnnnnctcatacttgggctctgaagccagtccctccccatgagaccccgcgcctctgaaggggcttggaaccagtccgcaggctgcacatccttcttggcttcnnggcgccccctggcgggagtgagcgaagcccctactattcaacggcctctctccactaccccgac

SEQ ID NO: 11047 - DNA, 672 bp, Macaca Fascicularis
  misc_feature (1)...(672): n = A,T,C or G
gcctccccaaaaaactatggatgggaaagaaaggagttaggggcctgacaaaaaatacagactgaatgagcaactcaagtcatctttttctaaaaattaccaactgctgattacagctgaaatggaaccaagtgtttgttttctgatttttttttttaatagctgtttgacaaattagtctttgtgagctgagtaaaaggggaaatttctaaacctagtgcactgtttggccagtgtccacagcctctttcctggctgtgttttagagaaagggatttgaactataggcttgcctcctgttctcattctcacaaagctgccttgactgtggcctgcaaccacgagtgccatgctttcaggccttctgtggccaacnnnnnnnnnnnnnnnnggcctgcctcnnnnnnnnnnnnnnnnnngtgaatggagcctccttcagagggggtcacaggtctttgggactcaacctgggctttaatgtgtaggaaaagccttctggccacccagagagccagagccctgcttgctgtattctgtgctcccttcttcctgctgggttttagccataatagagccctgtacaatttgggagtgagatttctgcaaagaaggtgaaaaataatttttctataatttgtaaagtnnnnnnnnnnnnnnnnnnnnnntttttac

SEQ ID NO: 11048 - DNA, 737 bp, Macaca Fascicularis
  misc_feature (1)...(737): n = A,T,C or G
tgctgccatgaaactgccttaannnnnnnnnnnnnnnnnnggtttataaaggtatctcagtaaagactgctttttgaatgcatatgattttgcatcagctagactgagttgattctgaccagacttgatggttttaagtcggaaccaataaattttaaaaggagaaaaaataagttgacctagtagtataaaatatgaagctttaatggtactttgctatgaaaagaaaacactgtattccttacgcaaaacacatgtatctttcattatttataataagtggcctctcttagctcagttactcaattcatacgtagtattttttaaagtaattttatatctgtgtaccaccacatgtatttcatattactgtttcacatgtacagctttctacttctttgtaagaacaccaaccaaccaaggtttaagtgagtaataggcttgagcaccgggtggcagatgttctgtgcagtgtggttcaagtttctgtaaccacacttcaatgcattgctaatatggaatttaagataccatacacagtctctcatggacctatctctattgtagaattatgacttatgtcttacttgccaaattgttctgaatgtgactttttttgctgatttgctgggtttgggattaactagcattattttgccacctttatattgtatttataaaaaaaaaaaaaaaagtactatcatactactttggattgttgtgctggtgtaatgtgg

SEQ ID NO: 11049 - DNA, 713 bp, Macaca Fascicularis
gagccaggagcttattgaggacaggacccatgtctgattcttctcagtgccctctacccaaagcccagcacagagtaggcctgtttgttgaatgaatgaatgaatgaatgaagcaaatatagataggtgagagggtagagcacctgctctgtgagctgctttcctgcccacctgtttcctttctttcctagctgtggggaccactttaaccctgatggagcatctcatgggggcccccaggactctgaccggcacctcggagacctgggcaatgtccatgctgatgctgacggctgcgccatcttcagaatggaggatgagaagctgaaggtgtgggatgtgattggccgcagcctggttattgatgagggagaagatgacctaggccggggaggccatcccttatccaagatcacagggaactctgggcagaggttggcctgcggcatcattgcacgctctgctggcctcttccagaaccccaagcagatctgctcttgcgatggcctcaccatctgggaggagcgaggccggcccatcgctggcaagggccgaaaggagtcagcccagccccctgcccacctttgagcaggacctcaccttggctctgttgctgtcctccagggcgagcactttcctcttccagagggggccagagggaccttgcctgcccagtctttggagcgctcagtacagggcaggagctgctgcgg

SEQ ID NO: 11050 - DNA, 1205 bp, Macaca Fascicularis
  misc_feature (1)...(1205): n = A,T,C or G
agcggggcacnnnntacttcaannaaggcaaatacaagcaagctttactacagtataagaagattgtgtcnangctggannntgagtctagtttttccagtgaggaagcacagaaggcacaggcccttcgactggcctctcacctcaacctggccatgtgtcatctgaaactacaggccttctccgcggccatcgaaagctgtaacaaggccctagaattggacagcaacaatgagaagggcctcttccgccggggagaggcccacctggccgtgaatgactttgaactggcacgggnnnnnnnnnnnnnnnnnnnnnagctctaccccaacaacaaagctgccaagacccagctggctgtgtgccagcagcggatcagaaggcagcttgcccgggagnnnnnnnnnnnnnnnnntatgtttgagaggctggctgaggaggagaacaaggccaaggcagaggcctcctcaggagaccaccccactgacacagagatgaaggaggagcagaagagcaacacggcagggagccagtctcaggtggagacagaagcatagcccctctccaccagccctactcctgcggctgcctgcccccagtctcccccctccaccctgttagttttgtaaaaactgaagaattttgagtgaattagacctttatttttctatctggttggatggtggctttagggggaagggggaaaggagtaggctgggggattgaggtggggaatcattttagctggtgtcaccccctcttcccttccccctttgcacatgaacatatgtccatccatacatattcatcagaatgttaatttattttgctccctctgttaggtccattttccaagggtagaagaggcaagtggtagggatggggtctgatatgaacccagggtggagagggagactcctgggcagccgttttcctcatcctttccctctcccagtccatttccaaacgtggcctccatgtgggtgctagggacatgggaaaaaccactgctatgccatttcttctctgttcccttcctcacccccaacggtgtggctgatgtcttctggtgtgatggtgaccaccccttgttccctgttctggtatttcccctgtcagtttcccctctcagccaggttgtgtcccgaaatcccctcagcctcttttccgcacgttgctgaaggtcacaagcttgcctcaagtcc

SEQ ID NO: 11051 - DNA, 629 bp, Macaca Fascicularis
  misc_feature (1)...(629): n = A,T,C or G
caaatcccccctgcccgccggggtccgagcccggcccctccgggctggaaatcggcagcctgctgctgcccctgctgctcctgctgctgctgctgctctnnnnnnnnnnnnnnnnnnnncggcccttctttcccctgaccgccactctgggcctggccggcttcaccctgctcctcagtctcctnnnnnnnnnnnnnnngaccccgtagtgcctccgggcgtttggcagnagtngccggcccctctggaccgtatagctccccgcgccgcagcgggagctgctgcctgcccaggcccgtctctccggcctgcctcttcccgctgccctggagcccagccctgcgccgcagaagactccaggggctggcagaggccccgccctgcgaccaccggggctcggggccacctcccggggctgctggccctcagtccgcactgggagtgggctcctcggggtcgggcatctgctgtcgctgcctcggccccgggcagagcccggccgcccccggggcccgtcttagcgttctgccggaggacccagccgcctccaatccctgacagctccttggcctgagttggggacgccaggacggtgggaggcaggtgaaggggaggggcataggagttcc

SEQ ID NO: 11052 - DNA, 813 bp, Macaca Fascicularis
  misc_feature (1)...(813): n = A,T,C or G
ccagagcaatgcccataatgcttagagaatgttnncctaaaagacttgcagaatcactctgtccttggaagtttcatatattgtttgatataaagtgttagatatgatttccaatattggagcatatcaaaaagtattaaaaccaaaaaggaccannnnnnnnnnnnnnnnnnnnnnnnngaccaataaatgaaagagttagtattaaaactcatcacttttccattcccaatctagtgctagatgtatacatctttctttttgattcttcctaacaaaatattttctgggttaaaaccccaaccaattcattgggttgtagccaaaggttcactctgaagaagctttaatatttaaataaaatcatattgactgtttccaacctggaatataatattcagatataaaacagttttgtcagtctttcttagtgcctgtgtggatttttgtgaaaatgtaaaagagaaaacttatatactatttcccttgaaattttaaactatattttctttacaggtatttataatnnnnnnnnnnnnnnnnnaaacagaattttaaagagcataataaattatattaaagaactgaaagttttcctgagaataagaaagtttcatccaataaaatatttttgaaaggcatgttcctctgtcaatgaaaaaaagtacatgtatgtgttgtgatattaaaagtgacatttgtctaatagcctaatacaacgtgtagctgagtttaacatgtgcggtcttgnnnnnnnnnnnnnnnnttccacattatacatttgatgtattgaccagaatatgtaaaatatgc

SEQ ID NO: 11053 - DNA, 745 bp, Macaca Fascicularis
  misc_feature (1)...(745): n = A,T,C or G
ctgtagaccccagtggccctgcagccgcagcgggaatgaaaggtctgtcagtttgtcgtctctgtcaatgggcttaacnnnnnnnnnnnnnnntaccggaccgtgagcaatctgattctgacgggcccacggacgattgtcatggaagtcatggaggagttagagtgctgagctcctgggcctcccagccctccagcggcctgtggatgatcgaagccagaatgacacaaagcaatgcaatggcaagatttccatgcaaatggatggttttggacatacgaatcttctccgcacatacatgtctaaagttgagttttatannnnnnnnnnnnnnnnnncgggtatcatatctttttaaaaaaatgtcagtgtagaaaacatttgggaaaccgttttcctacatgatagaactgccttactagatttctatttgtagttctcattcattgttttttatcttagtttgcattgttttgtatcttagtgtgttgaaatgcttctctagcacaaacagccacatctaaagtccccttcctcagagtcaatagagtagttgttaaaggttttaannnnnnnnttctccaaaattagcatgcaactatttaatagggagtctagatttcaccaagattcaaatcaaagcaacatttaaaggaataagacctgctcactagcattttcaaggggattctaaagcattcaagtgcttaaaatccataaaagatgacttcttaattcctgcctt

SEQ ID NO: 11054 - DNA, 1051 bp, Macaca Fascicularis
  misc_feature (1)...(1051): n = A,T,C or G
taccnnnnnnnnnnnnnnnnnctagtgaaagtgtgtgtttacatctgacatannnnnnnnnnnnnnnnnnnnngatttaaatttgggaaggggtgggggatgtcctcaattagaacttttgatcggcctggctggtaccgtctagtactatgcagcggtcctcaagttggagaaaatgtgcctttcattcattacctctctggagacttcttgctggaatgaacagtgtgctcagggactatttggaactggatgtttttgaaatattttatacttagagatattcnnnnnnnnnnnnnnnnnnnnnnnnnctccccgagctgattgtttgcaagtgtgtttgttccagagtgtggaagtatcaagacatgggcatcacgtaaattggctttgtttgctattctgnnnnnnnnaaccaacgagtgtaatggagaaggcaggtcatctcttactgtttctaaaacaacttaaaaggtatagattgggaagaggtgggtgatccagctttctccttttggattgaggctatgtacttggtgggggcaggggagggaatatattatactactattcagttgggatagtgggaaaaacaaagagtatatagggtatctacccagcctagaaagcannnnnnnnnnnnnnnnnnnnnnnnnnnnnnnnnnnnnnnngccatgaccnnnnnnnnnnnnnnnagaagccaggctagagaaataaaatcctgaattacattttagtaattgttttcaagacacaaaaaataaaacatttcattattcttgtatattgacatatttttcttnnnnnnnnnnnnnnnnnngtgannnnnnnnntaatggctggctgtaaatttaatcttgattcctctgtcaagtagacctaaaactcactgtaagatatttcagttttttccttaaaatgatgatttcaagcctcctaaatatttgcacgagacttctttcttaggaaagaagaaaaggctcaccttggctactgttgtcggcttacagtcatcacataccccctgaaatatccgacactggaaatgaag

SEQ ID NO: 11055 - DNA, 750 bp, Macaca Fascicularis
  misc_feature (1)...(750): n = A,T,C or G
caaggcgcagtatgaggagatggccaaatgcagccgggctgaggctgaggcctggtaccagaccaagtttgagaccctccaggctcaagctgggaagcatggggacgacctccggaatacccggaacgagatttcnnnnnnnnnnnnnnnnnnnnnnnnnnnnnnnnnnnnnnnnnnnnnnnncaagaaccagcgtgccaagttggaggccgccattgccgaggctgaggagcgtggggagctggcactcaaggatgctcgtgccaagcaggaggagctggaagctgccctgcagcggaccaagcaggatatggtgcggcagctgcgtgagtaccaggaactcatgagcgtgaagctggccctggacatcgagatcgccacctaccgcaagctgctggagggcgaggagagccggttggccggagatggagtgggagccgtgaatatctnnnnnnnnnnnnnnnnnnnnnnnnnnnnnnnnggtggtggcattgggctgaccctcgggggaaccatgggcagcaatgcccnnnnnnnnnnnnnnnnnnnnnnnnnnnnnnnnnnnnaggcttactcaatccggaccacatccaccagtcgcaggagtgcccgcaactgagctgcttcccaccactccattcctccagccaccacccacagtcacaagaagattcccatccctgcctccnnnnnnnnnncccaagaccatgagacagtctggaaagtgatgtcagaatannnnaaaaaaaa

SEQ ID NO: 11056 - DNA, 761 bp, Macaca Fascicularis
  misc_feature (1)...(761): n = A,T,C or G
gacacatgnnnnnnngctgctggctatcannnntccccagcgcagcagnnnnngagccccttcaggcccagnnnnnnnnnnnnnnnnnnnnnnnnnnnnnnnnnnnnnnnnnnnnnnnnnnnnnnnnnnnnnnnncctgacaggaacggtctgtagatggacatgatcaatactaaggaaagcagcagacagagacgctccggcaccccagccccactgtcagcgtccagcgtgcgggccccccagagcacagctcacacgaacactcaccctgccccgccccgggccggagggtannnnnnnnnncactttgcactcnnnnnnnnnnnnnnnactttcatggctgccctctggcagggcaggtcagtgactctgtaggagcannnnnnnnnnnnnnnnnnnnnnnnnnnnnnnnnnnnnnnnnnnnnnnngcatgtgactcctcaaacctcctccagatttctctaatagcaaccacttccccattgccccagcttagcctcttctcccaggggagctactcaggactcatgtagcattaagtcagctgtgaattgtcaggggggtgtcagctagcctcaacctcctggggcgggggacgccgagactccttgggagaagctcatccccacgtcttgccaagacagcctttgtccagctgtccacagcgagccagactgctcccggggagacagccccggcccccagcacataaagaactgcagcgttggtactgcagtgtgggttgtagagaactcttg

SEQ ID NO: 11057 - DNA, 709 bp, Macaca Fascicularis
  misc_feature (1)...(709): n = A,T,C or G
acatccgtgcccccaacgggcccgaagccaaccctgtgaagcagnnnnnnnnnnnnnnnnnnnnnnnctacctcggcgtnnnnnnnnnnnnnnnnagggagcagggtgctggggccaccggcttccttgaatggtgggtcatcgagctgcaggagtgccggaccgactgcaacctgctgcccatggtcatcttcagcgacaaagtcagcccaccgagcctcggcttcctggctggctacgggatcatggggctgtatgtctccatcgtgctggtcatcggcaagttcgnnnnnnnnnnnnncagcgagatctcannnnnnnnnnnnnnnnnnnnnnnnccgtgcgtnnnnnnnnnnnnnnnnnnnnnnnnnnnnnnnnnnnnnnnnnnnnnnnnnnnnnnnnnnnnnnnnnnggaggagttgtacgccaagctcatcttcctctaccgctcaccagagaccatgatcaagtggactcgtgagaaggagtaggagctgctgctggcgcccgagagggaaggagccggcctgctgggcagcgtggccacagggggaggcactcctcaggccgggggagccactgccccatccaaggccgccagctgtgatgcatcctcccggnnnnnnnnnnnnnnnnnnnnnntgtcagaggaggacactgcatccccatggccggggtggtgctgccacccgctacatgtactgtagag

SEQ ID NO: 11058 - DNA, 710 bp, Macaca Fascicularis
  misc_feature (1)...(710): n = A,T,C or G
catnnnnnnnnnnnnnnnagagtcnngannnnnnnattttgagatggaacagtggaggagaacattgatgtcatcattttgcaacaggatatagtttctcttttcccttccttgaagattcacttgttaaagtagagaataatatggtctcactgtataagtacannnnnnnnnnnnnnnnnnagaagtcaacctttgcatgcannnnnnnnnnnnnnnncctaggttccattttccnnnnnnnnnnnnnnnnngctcgttgggtgacaagagttttcaaaggcttgtgtcacctgccctcagagagaactatgatgatnnnnnnnnnnnnnnnnaatgaaaaaagaattgacctgtttggagaaagcnnnnnnnnnnnnnnnnnnnnnnnnnnngttgactacttggatgagctcgccttagagataggtgcgaagccagatttctgctctctcttgttcaaagatcctaaactggctgtgagactgtttttcggaccctgcaactcctatcagtatcgcctagctgggcctgggcaatgggaaggagccaggagtgccatcttcacccagaaacaaaggatactgaagccactnnnnnnnnnnnnnnnnnnnnnnnnnnnnaatttcccagtttcctttctgttgaaaatcctgggccttgttgctgttgttgtggcctttttctgccaacttcaatggtcctagtca

SEQ ID NO: 11059 - DNA, 770 bp, Macaca Fascicularis
  misc_feature (1)...(770): n = A,T,C or G
cagcaccgaggtnngagctgtgagaannnccagannnnnnnncgcatgaatgacccagaataccaggcccagggcctagcaatgtatcnnnnnnnnnnnnnnnnnnnnnnnnnnnnnnnnnnnnnnnnntatgccctggcccgaggaggctgcatgcactttcactgtacccagtgccgcnnnnnnnnnnnnnnnnnnnnnnacaatgccttttatgccaagaataaatgtccagaccctaactgcagggnnnnnnnnnnnnnnnnnnnccaccaccctcgannnnnnnnnnnnnnnnnnnnnnnnnnnnnnnnnnnnnnnnnnnnnnnnnnnnnnnnnnnnnnnnnnnnnntgtttaatacagagcctcnnnnnnnnnnccgggcagtccctggaggtggctgccgagtaatggagcagaaggaggttcccaatgggctcagggatgaagcttgtggcaaggaaactccagctggctatgctggcctgtgccaggcacactacaaagagtatcttgtgagcctcatcaatgcccactctctggacccagccaccctgtatgaggtggaagaactggagacggccactgagcgctacctacacgtacgcccccagcctttggctggagaggatccccctgcctaccaggcccgcttgttacagaagctgacagaagaggtacccttgggacagagtatcccccgcaggaggaagtagctgagagtaagggtcccgatgagggtcccatggcctactccctcaggaacagc

SEQ ID NO: 11060 - DNA, 763 bp, Macaca Fascicularis
atgtggttactattttcagtgcacccaattactgttaccgttgtgggaaccaggctgctatcatggaattagatgacactttaaaatattccttccttcagtttgacccagcgcctcgtcgtggcgagcctcatgttacacggcgcaccccagactacttcctataaatttctcctgggaaacctgcctttgtatgtggaagtatacctggctttttaaaatatatgtatttaaaaacaaaaagcaacagtaatctatgtgtttctgtaacaaattgggatctgtcttggcattaaaccacatcatggaccaaatgtgccatactaatgatgagcatttagcacaatttgagactgaaatttagtacactatgttctagataggtcagtctaacagtttgcctgctgtatttatagtaaccattttcctctggactgttcaagcaaaaaaggtaactaactgcttcatctccttttgcgcttacttggaaattttagttatagtgtttaactggcatggattaatagagttggagttttatttttaagaaaaattcacaagctaacatccactaatccattaccctttattttattgaaatgtgtaattaacttaactgaagaaaaggttcttgggagtatgttgtcataacatttaaagagatttcctttcatttaaactaaattactgttttatgttgatctgcatatttctgtatatttgtcatggcagtgcttgcatcctatttggtgtactcagcaaa

SEQ ID NO: 11061 - DNA, 763 bp, Macaca Fascicularis
  misc_feature (1)...(763): n = A,T,C or G
ctagaaatgtcattccaatgatcannnctggaaacaggctgccataaccacttttccttcctgtagactcagctcacctgtatattaaactgttcttggcatcttgaaacacctatttctactcaggtactcattttcctattagtgattcacctttctgatccttttaaaccagttttcccctaaggggggaaattttacttaacctctagtatctgaacaactgtcaatatttgaattgtttccccatttgcttttacctgtactgtattcttggtcatctcaaatggcatctaaacccagctactttgcattccagaagtttccattccctccaattccacctaatttttcatctgtcctagttactggctctttcttcttcatgtcttatttctcttgctttgggagcttaaaagattttacaagacctaattttgggctccttccttggagccaccattaccccgccgagaagagtggannnnnnnnnnnnntcctgtttcactccaccaacacctccgtgagtctcatcatcggctgcgcgatgatgcnnnnnnnnnnnnnnnnnnnnnnnnnnnnnnnagagtaacggctctgctgccagggtttctctgggctcattcttccactgacttaattatgatctatgcctaacagagccccagtacaactattttgcagaatggctgttaccctagaattactatagcacatattgagacatagttgtactccctagtagataggaactgaccccaac

SEQ ID NO: 11062 - DNA, 1178 bp, Macaca Fascicularis
  misc_feature (1)...(1178): n = A,T,C or G
accagcacactgacnnncagcgagacagactgnnnnnnnnnnnnnnnnnnnnnnnnnnnnntggatcacaggggcctgaccttccagaagaacgtgtccnnnnnnnnnnnnnnnnnnnnnnnnnnnnnnnnnnnnnnnnnnnnnntccccccannnnnnnnnnnnnnnnnnnnnnnnnnnnnnnnnnnnnnnnnnnnnnnnnnnnnnnnnnnnnnnnnnnnnnnnnnnnnnnnnnnnnnnnnnnnnnnnnnagaannnnnnnnnnnnnnnaacccacaccaacatctccgagagccacccnnnnnnnnnnnnnnnnnnnnnngggtgaggccagcatctgcgaggacgactggaactccggggagaggttcaggtgcaccgtgacccacacggacctgccctcgccnnngaagcagaccatctccaggcccaagggggtggccatgcacaggcccgatgtctacttgctgccaccagcccgggaacagctgaacctgcgggagtcggccaccatcacctgcctggtgacgggcttctctcccgcggacatcttcgtgcagtggatgcagagggggcagcctttgtccccggagaagtatgtgaccagtgccccaatgcctgagccccaggccccaggccggtacttcgcccacagcatcctgaccgtgtctgaagaggactggaacacgggggagacctacacctgcgtcgtggcccatgaggccctgcccaacagggtcaccgagaggaccgtggacaagtccaccgagggggaggtgagtgctgacgaggagggctttgagaacctgtgggccactgcctccaccttcatcgtcctcttcctcttgagcctcttctacagtaccactgtcaccttgttcaaggtgaaatgatcccaacagaagaacatcggaaaccagagacaggaactcaaaggggcgctgcctccgggtctggggtcccggcctgcgtggcctgttggcgcgtgtttctcttccctgcccggcctccagctatgtgctctaacacaggcttccttctagagaggcaggggcgggctggcgtgcggaccacgacgggggctccaccccacaccgctttgctntgtatacgcttgtgccctgaaaaaaaatatgcacattttatccatgaaaaaaaaaaaaaaaaaaaaaaaaagg

SEQ ID NO: 11063 - DNA, 757 bp, Macaca Fascicularis
  misc_feature (1)...(757): n = A,T,C or G
aaggacgtgcnnnnnncgntgctcgcccgctannnnnnnnnnnnnnnnnnnnngtgacccaggccccactggggcaggcggcactggcgggcgggtgggaggtgggggtggctgcagggacccctagtgtccctggtctatctctccagcctcggctcacacgcgagtgagtcgggagacggacggcccgctgctggctgctctcttctctgcctctcaccaggacagccgcccccccagggtactcctgcccttgcttgactcagtttccctcttttgaaagggaaggagcaaaacggccatttgggatgccagggtggatgacaaggtgaagaaatcaggggattgaggacttgggtgggtgggcatctctcaggaccccatctccaggcatgtcatctcctgggcaggggtctgggaccctctgtgggtgacgcacaccctgggatggggctagtagagcctttaggcgccttcaggcgtggactctggtgcactctagtggnnnnnnnnnnnnnnnnnnnnnnnnnnnnnnnnnnnnnnnnnnnnnnnnnnnnnnnnnnnnnnnnnnnnnnnnnnnnnnngaaaacactgtcgctcnnnnnnnnnnnnnnnnnnnnnnnnnnnnnnnnnnnnnnnnnnnnnnnnngaaaacgcggcccacaagcatcccctcgtcctttgcaggcggggggcgggcnnnnnnnntcttaaccttttgtatttattccatcaccnnnnnnnnngctccgtgcgg

SEQ ID NO: 11064 - DNA, 733 bp, Macaca Fascicularis
  misc_feature (1)...(733): n = A,T,C or G
caccttcagctatcgtccctccttcccagccagggctgtgactggggccctctgccacagtctggctgcaccttctccgtagcccccgctccacctcccaggaagtagataggttccatgtctctgtggtccagtttgtgggctcctcccagtcctgactgtcaccaacctcctcctcgtcctgctttaaataaaagtcctcaggaagaggtctgctggtctctgtggggagagatcaggaatgttccagtttcagagactttnnnnnnnnnnnnnnnngactcgcctcccaagccttcacctggttctgaagcctccatacccttgtccggcttgctgtcttgcagcagctcgtgnnnnnnnnnnnnnnnnnnnnnnnnnnnnnnnnnnnnnnnnnnnnnnnnngtagnnnnnctgaagaaatgtccactcagtggctcccaacctatgtccccattcctccctcctgccacaaattcccccaaaattaacagaatcattgctctcctcaccgctcaaaaagggggtccagctgggccnnnnnnnnnnnnnnnngctgctctgtctgggccagctgttgtgtcaactgggccagctgttgctctggggataaggcaaaaaaggggggcagaagtggttacgtatcttctgctgtcccctaatctccctctacccagcacagacttctgctaaacccacctgactgcagtggctgctgcttgcttgcctcctt

SEQ ID NO: 11065 - DNA, 150 bp, Macaca Fascicularis
  misc_feature (1)...(150): n = A,T,C or G
agtccacctgccggcctgattcctgcatcatggaataaccacgtggctaccttctatcctctgttccctaaatggtggtggcacttatcctgaagnnnnnnnnnnnnnnnctttgaaactactttattttactaatttaaactattttgt

SEQ ID NO: 11066 - DNA, 672 bp, Macaca Fascicularis
  misc_feature (1)...(672): n = A,T,C or G
catcaggacctagaactacacatnnnctgactatacggnnnnnnnnnnnnnnnagtgacttttccaagagnnntagagnnnnnnnnnnnattcctctcttcagaactacgtctcccggaagcctctgtgctgccttagccttgattccccgttccccatcattgttggccgtctgggaagtggactacatttcccgtgagccactggggcacagctccgtaggtacttggcctggaacgccccagggcctgctgggagttgtagagcggcttccacctcaccgctgcctccgttgttccgcagtacggaatcagagcccannnnnnnnnnnnnnnnnnnnnnnnnnnnnnnnnnnnnnnnnnnnnnnnnnnnnnnnnnnntctcatcacgccagcacttacctccctaccaatgactcacctgaagtgcaatactaaataaaaggccagcgggcggtgtctgggtctctggcgccccccatgtggttgcgacacccccaaagccataagggccgacccaggcatcttggtccccagcccctcgtctcgggttcaggtccgccccttgctccttgtcgtgaggtcaaggatacaccttggccccgactccggatctctccattctcaggccagaccgccggtgtgccgttgagtttttttttccctctctgtc

SEQ ID NO: 11067 - DNA, 703 bp, Macaca Fascicularis
  misc_feature (1)...(703): n = A,T,C or G
gcctgaatgttgctggctgttcatgacaccccctggccatgcagtgctgggtatttttctagaaagttcctcctttctcgcttttgcagacggctgaggccctgcagcccacgctacagccggagatgcagctcgagcacggggccatccagatccagtgagcggtgcccgcggtacgaggagcgcccggcaccaggagcccctcgctggctccgcccatggcccggcccccatgcgccctgctctctcggcctcagcacaggcagcggctgcacgggttctgctgaagtgcatctgaaggctgctgcctccgcggggaagagcgccctatcaactgaaagagcagtcgccgccgcccccagccggagacctttcgtttgagtcatgctgttggtgtcggaggacggaggggaggcacagtgcggagagnnnnnnnnnnnnnnnnnnnnnnnnnnnnnnnnnnnnnnnnnnnnnnaaacagctttttttaatttgctatggtgtttataacaaaaaagaaaatttgaaaaaaaaaatcccaggggagtagcaggagccctttgctgtgtgctctgnnnnnnnnnnnnngacaggagccctttgctgtgtgctctgttcagtgtcatgaggcaggtgtttgcaaagccagctctcggttnnnnnnnnnnnnnnnnnnnntacttttctaggggaaatgctctca

SEQ ID NO: 11068 - DNA, 699 bp, Macaca Fascicularis
  misc_feature (1)...(699): n = A,T,C or G
gctagaaaacccnnnnnnnnnnnnnnnnnnnaacacaacagcctcacaattccgagtccagcatgtgcttcggaggccagcctggaggtgaccgatttattgctcactgctttggaaaatccagtaaaatgtgctgaggacaatatggaacaaaaggagacagatagaattatttgttcaactaacattcttcataaagctgatcagacactccgaaggattgtatctcagacaatgaagggagcaaaagatgaacaagtgcttcctcacaacttgaagcttctagcagaagaacttaacaagctcaaagcagagtttttggaagacctaaaacaaggaaacaaaaaatacctgtgctttcagcaaaccattgacatatcagatgtcnnnnnnnnnnnnnnnnnnnngaaagataatattgtacagaagtatttttcaaagcagcattaaaatttctgaattgccaatcaaatgtctcattttgtatgggaacgcatatgggcttccagnnnnnnnnnnnnnnnnnnnnnnaatggacaaagatgacatcgatgaggtttttcacctgtttcaaaagaaaaatgatggagagactacaagagtagttcatttacggaaagtttgcttgtccattcattggacnnnnnnnnnttgatcaaaaagaaaaatgctttcagaaagtcatatttgcatagcata

SEQ ID NO: 11069 - DNA, 739 bp, Macaca Fascicularis
  misc_feature (1)...(739): n = A,T,C or G
attccagcagccgtgaaatgaacttaccaagatgcagtaaacttacagaactatgtagaagaaaagcttattcccacttggaactggatggtcagtattatggattctactgaagctcaattacnnnnnnnnnnnnnnnnnnnnnnnnnnnnnnnnnnnnnnnnnnnnnnnnnnnnnnnnnnnnnnnnnnagaattcagcgagaagagagaggatgactgcgcgagaagaagctagcttacgaacacttgaaggcagannnnnnnnnnnnnnnnnnngcgcccgtcaagggatgatgtctgcacgaggagacttcctaaattatgctctgtctctaatgnnnnnnnnnnnnnnnnnnnnttctgatgttcttccagttttggatgtttgctcattgaagcatgtggcatatgtttttcaagcacttatatactggattaaggcaatgaatcagcagacaacattggatacacctcaactagaacgcaaaaggacgcgagaactcttggaactgggtattgataatgaagattcagaacatgaaaatgatgatgacaccaatcaaagttagtgcacagaaaatctgctaatctacttcnnnnnnnnnnnnnnncagtagttccccttcaagctttttaacttcattattttctgtctgggtgggaatttctcttttcttctctatgtctcatttcttacattttctgtccatttgtgcttacacattcttgcattataca

SEQ ID NO: 11070 - DNA, 734 bp, Macaca Fascicularis
  misc_feature (1)...(734): n = A,T,C or G
tttttcannnnnnnnnnnnnnnnnnnnnnnnnnnnnnnnnacctgtgcagcattgctnnnatctataatgcnaactannngaagatgttaatgaagaggcagtacatgcatgtacttcagcacggctcacaaaagccaggtgtcctcactcatcacagaagccgccttagctctcgttactcacagaaacagcattacccttgcactacatggcgacaccaactggagagannnnnnnnnnnnnnnnnnnnnnnnnnnnnnnnnnnnncacctgaaatgctcatacagcattccctttggcggccagtgagaaacaaagaagggataaaaactggatatgcatctaaaacaagatgtaagtcactgaagatttttagaagaccaaggaaactgttcatgcaaacagtttcttcaaatgattctgaatcatacatgagtgaagaaaaaaaggaagaagatttactaaataagtttatgcaatcaatgtcaattgaagaacagggagaacatctgatgttaacttgacagtcttgtcttgtgtattgaattcgtaccaaaggtgagggtaaaggggttgtgggttgtgtcctgtatgtttaggatggtattgttattcattaaatcattaagtaatttaggtttgttcatgaaatcttaaaacaatgtaattggtctgatgtagttccatgtagccaatgatatttatgtaagaaaatttacatgtaacatatact

SEQ ID NO: 11071 - DNA, 1275 bp, Macaca Fascicularis
  misc_feature (1)...(1275): n = A,T,C or G
tccatgtttgcgattggcttttgttttactgccctaatgggaatgttcaattctatatttgatggtagannnnnnnnnnnnnnnnnttttacccctctttcttacatccaaggactgtctnnnnnnnnnnngctgggagatgataccacagactgttccttcattttcctgtatattctctgtactatgtcaattcgacagaacattcagaagattctcggccttgccccttcacgagccgccaccaagcaggcaggtggatttcttggcccaccacctccttctgggaagttctcctgaactcaagcagaactctttagtttctatcattctttctagacacannnnnnnnngactggcaaatgtttttcagcaagagccacaggtagccttactacttgggcctctttctagtttcgaattatttctaggccttttgggtatgattagagtgaaaatgnnnnnnnnnnnnnnnnnnngtgcttttggtcctagatgatttttatcaaataagtggattgattagttaagttcaggtgatatttatgtaatgaaaagcaaatagcatccttcttgtttcatttacataagcattttctgtgggaccgactctcaaggccctgtgtatgccctgcgagttgctctctaagcgcatttagagatttagaagaaaaatttagtttgtataacccttaattgtaactgtttgttttgttgttgttttatttcaagccaaatatatgacataagatcaataaagaggccaaatttttagctattttatgtacaaggagagatctgtttcattttgttttgccatatttctagatgtaagttttagcatgggccaggaaggactaaaataaaagtttttaaagtactgtagtttttgccatacttgactcatatactcaaaatacagacttgtcctagtgtaggaattggaaagcaagagtggaaaggaacgtaataactcgtgggagtttaaaaatgagggtcttggcaagtaacactgatgtctgaaaaaaaaattaaatataaataaataaataaaaataagggtcctnnnnnnntctcttcatatcctcttacagtctctcagattcttgtggggacagtcttagatccccctcggaggcaaggttatagttatatgttatnnnnnnnnnnnnnnnnncttttagtcacaatagccttcagtttctgccatgccccttcataagggaggaggatgtttgtaccatgatcctcccctataatctatggaattaggag

SEQ ID NO: 11072 - DNA, 731 bp, Macaca Fascicularis
  misc_feature (1)...(731): n = A,T,C or G
gccggaccaagattgcacagctaaagtctggcagagactccacggtatgactgtacgcactgggcctgtccacagtgcgagcgactccctgaggggaacggcgcggagttcaggattccaagcacaaagcggtcttttacattccaacctgttgcctgccagccctttctggattactgatagaaaatcatgcaaaacctcccaacctttctaaggacaagactactgtggattcaagtgctttaatgactatttatgctttgactgtgagaatagggagcagtgccatgggacatttctaggtgtagagaaagaagaaactgcaatggaaaaatttgtatgatttccnnnnnnnnnnnnnnnnnnnnnnnnnnnnnnnnnnnnnnagtcatttctatttgcaaaaggattcgtaacaaannnnnnnnnnnnnnnnnnnnnnnnnnnnnnnnnnnttaaattttaatgcagcatcttcagaacttgtcctgatggtgtcttattgtgtcagcaccaaatatgtgtgcattatttgtggatgttctttgtcacaggaagattcttcttctgttgccttattgtttttttttttaattgaagtctcatctccgtctttgtactggaatcgaaatcataagataaacagatcaaacgtgcttaagagctaactcgtgacactatgcagtattgtttgaagacctgttgttcaacctccgtctctttatgtaact

SEQ ID NO: 11073 - DNA, 756 bp, Macaca Fascicularis
  misc_feature (1)...(756): n = A,T,C or G
gacatcatgaggctgtggacctgctggatgggctggtggacganncggacccagatgtagatttccccaactccttccatgccttccagacagcggagggcatccggaaggcccacccagacaaggactggttccagcttgttgggctcctgcacgacctggggaaggtcctggccctgttcggggagccccagtgggcggtcgtcggagacaccttccctnnagnnnnncgtccccaggcttccgtggttttccgcgactccaccttccaggacaaccctgacctccaggatcctcgatacagcacagaactcggcatgtatcagccccactgcgggctcgacagggtcctcatgtcctggggccacgatgagtacatgtaccaggtgatgaagtttaacaagttctcactgcccccggaggcnnnnnnnnnnnnnnnnnnnnnnccagcaggacctgggtgcagccagcaggacctggccatgctgccctggcaagttcgacctctacnnnnnnnnnnnnnnnnnnnnnnnnnnnnnnnnnnnnnnnncctactaccaggggctcattgacaagtactnnnnnnnnnnnnnnnnnnnntgaccctcctgccacccaagctgctgctggacccaggcctggccctccgcctgtctggagaggtctggccctgggcagacagccgccatcagggttcaccttggtgggggaccccactcacccccttagggtcgccacccctcgggcaacttgtgc

SEQ ID NO: 11074 - DNA, 769 bp, Macaca Fascicularis
  misc_feature (1)...(769): n = A,T,C or G
cacatgtgaaaactcntnnnggagagaagtccttgaaatgcaaagaatgtggaagatcctttagaaattcctcatgccttaatgatcacattcaaattcacactggaataaaaccacacaaatgtacatactgtgggaaagccttcactagatcaactcaacttactgaacatgtaagaactcacactggaataaaaccctatgaatgtaaggaatgtggccaagccttcgctcagtactcgggcctttctatacacatacgaagtcannnnnnnnagaaaccctatcagtgtaaggaatgtgggaaagccttcactacatccacaagccttattcaacatataagaattcacacaggagagaagccttatgaatgtgttgaatgtgggaagaccttcattacttcttcccgtcgtagtaaacatttgaaaactcacagtggagaaaagccctttgtatgcaagatatgtgggaaagcatttctgtattcctcacgccttaacgttcacctgcgaactcataccggagagaaacccttcgtatgtaaagaatgtgggaaagcatttgctgtttcctcacgcctaagtagacatgaaagaattcacactggggagaaaccccatgaatgtaagagtatgagtgnnnnnnnnnnnnnnnnnnnnnnnnnnnnnnnnnnattggcaatgacaccaaagattatcagatttgtcctaaatgccttgcggaggttgtaatggctnnnnggattggctttggatgccatcctgaa

SEQ ID NO: 11075 - DNA, 716 bp, Macaca Fascicularis
  misc_feature (1)...(716): n = A,T,C or G
cagtttgctcnnnnnnnnnnnnnnnnnnnnnnnnnnnnnnnnnnnnnnnnnnnnnnnnnnnnnnnnnnnnnctggaaggagcgtgaaagaagaggcccagaacctcatcaggcacttcttccatggccgggctcggtgtgagagtgaagctgactggcacggnnnntgtgnnncnnnnnnnnnnnnnnnnnnnnnnnnnnnnnnnnnnnnnnnnnnnnnnnnnnnnnnnnnnnnnnnnnnccgggcctcgcctgcttttctgagtcctcctcccttccaaccatacttggctttggggatgaccccagacaccccctgaatccaggtcagaggtcagcccacctttctttctgcttgcaaagcctatagacccttctcagagcctccctgcctctcctggccctcatggctgggttttnnnnnnnnnnnnnnnnnnacagaaggtggagggtggtgnnnnnnnnnncagaagaaggtgaagnnnnnnnnnnnnnnnnnnnnnnnntaagtcaggacaagnnnnnnnnnnnnnnnnnnnnnggacctattcaggggaacctcaggtcctccacccactccccatccannnnnnnnnnnnnnnnnnnnnnnnnnnnnnnnnnnnnnnnnnnnnnnnnnnnnnnnnnnnnnnnnnnnnnnnnnnnnnnnnnnnnnnnnnnnnnnnnnnnnnnnnnnntgtttgggagaggaataaagtc

SEQ ID NO: 11076 - DNA, 711 bp, Macaca Fascicularis
  misc_feature (1)...(711): n = A,T,C or G
gtgatccatcccannnctaatattttgtgaatttatgactttgccttcagatgaggctaagctatacacaaaacagtataaactagggtactgcctcatacctctcgtaggctctcccaaatctctgtaccttccactcaacccttaattgaaccaagctttagtcagggggtctgagtatctaccagaatgtcaggagactcatcttgcacagtcannnnnnnnnnnnnnnnnnnnnnnttgtgctgaaacagctcttctgagaacttccaaccactcatgctctaacctggggacagccatcccgtgcctcagaataagtaccaattcataggtcatgcatggtactcttgtccccaagaaaagttaggaaggttgtcagctgagtgaggggaggtgccttctgggtatctctgtgttggtgtatnnnnnnnnnnnnnnnnnnaacaagaaaaatactatttgccatgctattaccttggcagatgtatgggtgatagtcatctgtatttgagttgagatggtcagtgggttgtaaattccnnnnnnnnnnnnnnnnnnnnnnnnctgagttacgtaaacttgtgagcaacacagagttaatttatggaggaatcaaagctgnnnnnnnnnnnnnnnnnnnnttggttttgtgcacacagttgcatgcatggcaagctgttaatctctgggtgnnnnnnnnnnnnnnna

SEQ ID NO: 11077 - DNA, 790 bp, Macaca Fascicularis
cagtgagatgagatgtagtaacagtcagtccaaaaatgtactgtgtactgtggaggaattgcgtctgggttaacagatcagcttatgagacagacattctcaccatttggacaaattatggaaataagagttttcccagaaaagggctattcatttgtcagattttcaacccatgaaagtgcagcccatgccattgtttcggtgaacggtactacgattgaaggacatgtggttaaatgctattggggtaaagaatctcctgatatgactaaaaacttccaacaggtcgactatagtcagtggggccaatggagccaagtgtatggaaacccacaacagtatggacagtatatggcaaatgggtggcaagtaccgccttatggagtatacgggcaaccatggaatcaacaaggatttggagtagatcaatcaccttctgctgcttggatgggtggatttggtgctcagcctccccaaggacaagctcctccccctgtaatacctcctcctaaccaagctggatatggtatggcaagttaccaaacacagtgagccgggactcttaaaaaaaattgtaattcacgataggcttcgattccctgtgacactctgaagacatgaaagtagacatcggaaaatgaaaatatttattttaaaaattgaaatgtttggaacctttagcacagatttgctttggtgaaggacacatgtcttctagttctgcctttttaagtttttgttcatgatggatatgaacatgatttttctttgtgtacaaaaactaaaataa

SEQ ID NO: 11078 - DNA, 651 bp, Macaca Fascicularis
  misc_feature (1)...(651): n = A,T,C or G
gcggtggagtccacttaacaaccacttcggaggaacacagctcggnnnnnnnnnnnnnnngcgtnnnnnnnnnnnnnnngcattccgctgctgagcctcccacactcatctcccctcaagctccagcctcatcaccctcatccctatcaacnnnnnnnnnnnnnnnnntttctgcctccattactaccaaccacagctccactgtgaccagcacccaacctactggagctccaactgcatcagagtcaccgacagaggagtccaactctgatcacacacccacctcacctgccacagctgagccagtgccccaggagaaaacatccccaacaactgtgtcaggcaaagtgatgtgtgagcttatagacatggagaccaccaccannnnnnnnnnnnnnnnnnnnnnnnnnnnnnnnnnnnnnnnnnnnnnnnnnnnnnnnnnnnnnnnnaccgtgacagtcatcgccgtggtgctgctggtgtttggagttgcggcctaccnnnnnnnnnnnnnnnnnnnctatggaaggcttttggacgaccacgactacgggtcctggggaaactacaacaaccccctgtacgatgactcctaacaacggaatatggnnngggatgaggatgaactgttctttatttataagtgcttat

SEQ ID NO: 11079 - DNA, 766 bp, Macaca Fascicularis
  misc_feature (1)...(766): n = A,T,C or G
aagaccctatgaaaaannnngttgaaaaagaagagaagnnnaaaatcacccagcaggagagtacagatgaggccgtgcaggagccgagtcaattaatttcattagaggaagaaaaccagcgcaaggaatcctctagttttaagnnnnnnnnnnnnnnnnnnnnnnnnnnnnnnttagacaaaagcgctacacatactgcaggctcaggacccatagatgaannnnnnnnnatgaaacctgnnnnnnnnnnnnnnnnnnnaccagtggcagggaccccggaacccgaaggtgctgacaaannnnnnnnnnnnnnnnnnngtgagatcttcaatgcttcctccctggaagagggcgagttcagcaaagagtgggccgctgtgtttggggacggccaagtgaaggagccagcagcgcccactatggccctgggagagccagaccccaagccccagacaggctcaggtttccttccttcgcagcttttagaccaaaatatgaaagacttacaggcctcgctacaagaacctgctaaggctgcctcagacctgactgcctggttcagcctcttcgctgacctcgacccactctcaaatcctgatgctgttgggaaaaccgataaagaacacgaattgctcaatgcatgaatctgtactcttcgggagggcactcacatgccgcccccagcagctcccccggcggtagcagaagtataaagtgatcagtatgctgttttaataattacgtgccattttaataaaatgaaagg

SEQ ID NO: 11080 - DNA, 705 bp, Macaca Fascicularis
  misc_feature (1)...(705): n = A,T,C or G
gccaaggtgatggtggcctcnnnnnnnnagnncacagtgcgcttnnnnnnnnnnnnnnnggaggagctgtgcctgcatcccgctgaccatcaggtgtactttggacagctgctaggcatgtgtgaccagatcagcttcccgctgggccaggctggctaccccgtgtacaagtacgtgccctacggccccgtgatggaggtgctgccctacttgtcccgtcgcgccctggagaacagcagcctcatgaagggcgcccgtcgggagcggcagctgctatggcgggaactcttgcggcggctccgaactggcaacctcttccgtcgccctgcctagcacccgccagcccaccctcggcctccaggcccccccgcgcccaccccaggccgtcaccacagttgtaacaaaccccatcctcacatagactcaccttttttcactccacacnnnnnnnnnnnntggaggtggggtcaggtgcctcccagtcctgcccagggtctgggcactcaggtgtgggccaaacctgctacctgcctgggatagctgcagggaacggttgggaactctccccggatgtgtgggcccaaggcccctacctctgtgacccccatgtccttgggcctagaggattgtccgccttctgccagggccagcccacacagcccgagccccttggggagcagaggccgggctggggaggccctgcct

SEQ ID NO: 11081 - DNA, 652 bp, Macaca Fascicularis
  misc_feature (1)...(652): n = A,T,C or G
tggatgccaagaagcctattggagccatcnnnaaggggcataagcctaggccccacccagtgcccgactatgagcttaagtacccaccggtgagcagtgagagggagcggagccgctacgccgcagtgttccaggaccagtacggagagttcgtggagctccagcgggaggtggggtgtgcacaggcaaagctcaggcagctggaggccctgctgagctccctgcccccaccccaaagccagaaggaggcccaagttgcagcccgggtttggagggagtttgagaagaagcnnnnnnnnnnnnnnnncctggacaagcaggctcgctgccactacctgaagggtaaactgaggcatctcaagactcagatccagaaattcaatgaccaaggagacagcgagggctctgtgtacttctgagtgcccctgcagatgggcagagggctgcatggggatgcaggccccttgcttttcttggtatctcctcagcctttcctcttgcagctccccctaccaggggtagctttctccaggattnnnnnnnnnnnnnnnntttggactcggcgctgacagctcctcctccaggaaggccttccaggtcttcctcctctgggccctctagctttgaccctatagggactccagatctcaac

SEQ ID NO: 11082 - DNA, 757 bp, Macaca Fascicularis
  misc_feature (1)...(757): n = A,T,C or G
actttagtgatgaggcatgtgaatgattgntnnnagtaggtatatacttagtggaatggtatattttatggaagagaattcattggaggtgagattgaagtatattgtgaagtgggatttgaacagcacatatgctctggtttgctcaaataactgcagtttatgcttgcttctcaattttgtttctgttacctaaacgggagcttctagaattatgaaggccatacctgccacatttataaaataatggttttattcctgcccccaaatcatcaggttcctcgggtttaagagaagcggtctcacagacgggaatagaagttgtggtggaggtgatttgggatagactgagttccctatgcaagtggatgtgagctcctcatagaaaccagacctactgtgttagacagtaacctctaacctcacctcctccaagcccaagtgtacagccctgctgggttacctggtgactgaatttcccagattcactctaaactcgaggtagtgacccaaataaactgggagaggagcgtgtcaaggaggaaaagctgttgaaaatctttctcctatttaagagaaatatatgccctagagctgctccagcacccttggtttctgatttttttaatattgaatatggattacaagaatgaaatcagatgactgcaaaaatgtttataannnnnnnnnnnnnnnnnttttggtataaagctgtgaacttcataactttgtaaagcaagatataacatgcctcatc

SEQ ID NO: 11083 - DNA, 695 bp, Macaca Fascicularis
  misc_feature (1)...(695): n = A,T,C or G
cacagccctggttgggggcgggtacttcnntccttacgtgcacttggccccccacgctttagaccggggcctggggggatacggggcagcgctggtggtggccgtggctgcggtgggcgatagcgggcgcccggctggtctgcgggtggctggcagaccaaggctgggtgcctctcccgcggctgctggccgtattcggggctctgactgggctggggctgtgggtagtgggactggtgcccgtggtggggggcgaagagagttgggggggtcccctgctggccgcggctgtggcctatgggctgagcgcgggcagttacgccccgctggttttcggtgtgctccccgggctggtgggcatcggaggtgtggtgcaggccacgggactggtgatgatgctgatgagcctcggagggctcctgggccctcccctatcaggcttcctaagggatgagacaggagacttcaccacctctttcctggtgtctggctctttgatcctctccggcagcttcatctacatagggttgcccaaggcgctgccctcctgtggtccagcctcccctccagccacgcctcccccagagaggggggagctgcttcccgctccccaggcagtcttgctgtccccaggaggccctcgctccactctggacaccacttgttgattattttccnnntttgagcccctcccc

SEQ ID NO: 11084 - DNA, 696 bp, Macaca Fascicularis
  misc_feature (1)...(696): n = A,T,C or G
aggtaaagcaaggtggaagaggagggaggaaggccgcnctgaggagaataccccggagtctgggcagcacagggggcccagggaggctggaggaggccagaatgctgggtgggctgggaagagcttctggaactgggggaggggctgtcactagggggttgaggcccaggcttctgtctggccgtgggtgcctgctgattgccccttgtcacccagacggacatcgtgaaagccatcgcccgcctcattgagttctataagcacgagagctgtggccagtgcaccccatgccgcgagggtgagcagcgggcaggctgggggtttgcttgccgtggcttcacttaacctccaccccaccatgtggcctgcacccctcaagcaccatcccacatcctggctgnnnnnnnnnnnnnnncctctcttgtggctgtggctgcaggtgtggactggatgaacaaggtgatggctcgtttcgtgaggggggacgcccggccggccgagattgactccctgnnnnnnnnnnnnnngcagatagaagnnnnnnnnnnnnnnnnnctgggtgacggggctgcctggcctgtgcagggtcnnnnnnnnnnnnnnnnnccggagcttgaggannnnnnnnnnnnnnnnnnnnagcagcatcaggcccggcaggctgcctcttagcccaccaccctggcctgctgtcct

SEQ ID NO: 11085 - DNA, 757 bp, Macaca Fascicularis
  misc_feature (1)...(757): n = A,T,C or G
gacctcaaggcagcacctgtagggaccatgagaatgaactgctgaacaaacagagtgttcctgctcattttgtcgccttgaatgggagcaaactgaacattaaccttaagatnnnannnnnnnnnnnnnnnnnnnnnnnnnnnnnnnnnnnnnnnnnnnncatgttccccaactnnncagatgtcagggaggtnnnnnnnnnnnnnnnnnnnnnnnnnnnnnnnnnngaggnnnnnnnnnnnnnnnnnggagaatctgggggagcagttttccttgagcggagattcaggttttttcaggtgggtctggtgagctggggtctttacaacccctgccttggntnngttgacaaaaactcccgcaaaagggcccctcgtagcaaggtcccgccgccacgagactttcacatcaatctcttccgcatgcagcnnnnnnnnnnnnnnnnnnnnngggatgtcctgaattttttacccctttagtcatggccactgagccctctgctgtcctgttagaatccgccccccctccatcttctacctctgaatgcccacccttagactctgtgacccatgccgtctcctagttgagtaaatctgggtctctaggatgccaggggcagcgcacacaagctgggaaatcctcagggctcctaccagcgggactgcctcgctgccccacctcccgctccttggcctgtccccaaattcctcccctggttgacttgactcatgctcatttcactttcatatggaatttc

SEQ ID NO: 11086 - DNA, 1011 bp, Macaca Fascicularis
  misc_feature (1)...(1011): n = A,T,C or G
atgaggatacaatctaccacctacagccaagtggcagatttgttattggtgggcctcagggtgatgctggtttgactggacggaaaatcattgtggacacttatggcggttggggnnnnnnnnnnnnnggtgccttttcaggaaaggattataccaaggtnnnnnnnnnnnnnnnntatgctgctnnnnnnnnnnnnnnnnnnnnnnnnnnnnnnnnnnnnnnnnnnagggttcttgttcaggtctcttatgctattggagtttctcatccattatctatctccattttccattatggtacctctcagaagagtgagagagagctattagagattgtgaagaagaatttcgatctccgccctggggtcattgtcagggatctggatctgaagaagccaatttatcagaggactgcagcctatggccactttggtagggacagcttcccatgggaagtgcccaaaaagcttaaatattgaaagtgttagccttttttccccagacttgttggcgtaggctacagagaagccttcaagctctgagggaaagggccctccttcctaaattttcctgtcctctttcagctcctgatcacttgcagtcactctagtcaatgacatgaattttagcttttgtgggggactgtaagttgggcttgctattctgtccctaggtgttttgttcaccattataatgaatttagtgagcataggtgatccatgtaactgcctagaaacaacactgtagtaaataatgctttgaaattgaatctttgtgccctatcacccaacgctccaaagtcataattgcattgactttccnnnnnnnnnnnnnnnntgtccttgtaatgtgcacgtaaagtacttgtagttccacttatagcctgtctggcaatgccacagccctgtcagcatgaatttgtaatgtcttgagctctattatgaatgtgaagccttccccttaccctccctgtaacttgatccacttctaattatgtagctcttttgtcag

SEQ ID NO: 11087 - DNA, 689 bp, Macaca Fascicularis
  misc_feature (1)...(689): n = A,T,C or G
gtggaagccggcattcagtatcagaagcgcttatggtcatatccaagctcaatatctgggtcaatccacaccctctaagaactgtggcgctcctccccgtctctcgttgatttgggagaatatggttttctaataaatctgtggatgttcnnnnnnnnnnnnnnnnnnnnnnnnnatagacattcagagtagaaccacttgtggattggaataacnnnnnnnnnnnnnnnnnnnnnnnnnnngcattttagttattattttaaaatagaaactaccccaccgactcatctttccttctctaagcacaaagtgatttggttatttgggtacataagaatgtaacagaattaagacgcagttgctgtgaaaacagtttgggttatttgggggttctgtccactttttaaatttttcttttttggatgtgtaaatgtatcaatgatgaggtaagtgcgcgatgctaagctgtnnnnnnnnnnnnnnnnnnnccccaccggagtctaagccggctttcctctattttggtttatttttgccacgtttaacacaaatggtaaactcctccacgtgcttcctgcgtccgtgcaagccgcctcggcgctgcctgcgtnnnnnnnnnnnnnnngtagcgnnnnnnnnnnnnnnnnnnnnnnnnnnnnnnnnnnnnnnnnnnnnnttatttttgtaaa

SEQ ID NO: 11088 - DNA, 794 bp, Macaca Fascicularis
  misc_feature (1)...(794): n = A,T,C or G
agggacaagaagttnnnnntaaagtgtacttcatgaagcagnnnnnnnnnnnnnnntnnnnnnnnnnnnnnnnnntacacgcagtggccaataatcaagataaactnnnnnnnnnnnnnnnatcagnnnnnnnnnnnnntcnttttgaaacagagaaaatgtcccctgaagacagagcaaaatgctttgaaaagaatgaggccatccaggcagcccatgcatgccgtggcacaggnnnncaatgtcgggtagatgacaaggtgaatttccatttcattctgtttaacaacgtggatggccacctctatgaactggaaggacgaatgccttttccnnnnnnnnnnnnnnnccgttcagagggnnnnnnnnnnnnnnnnnctgccaaggtatgcagannattccccgagcgtgagcaaggagaagtccgcttttctgccgtggctctctgcaaggcagcctaattctctgtgggagggactttgctgatttcccctcttcccttcaacgtgaaaatatatactgccccccccccccatgcagtgtacaatgcttcagtacttgtgaaacacagctgttccgttctgcagacacgccttcccctcagccacaccnnnnnnnnnnnnnnnnnnnngagtgcacagctgnnnnnnnnnnnnnnnnnnngtgagcttcagnnnnnnnnnnattnnnnnnngtgtatgtcncgtatccaatatctaacgnnnnnnnnnnnnactttggtttctgtctgtaagttaagaccttggatgtggtttaattgtttgtcctcaaaa

SEQ ID NO: 11089 - DNA, 709 bp, Macaca Fascicularis
  misc_feature (1)...(709): n = A,T,C or G
gcagtgtnnnnnnnnnnnnnnnnnnnnnnnnnnnnnnnnnnnnnattttctactgttaagagtaatcctctttcttgctggtgtttctaaagaaaagaatcagaaatcaatctttctactaatgtaaatttgagattatttttaaaaatggaataaaagaggttttggtcatttgctttattttattattttaaagctactgtgattgatagcattgtaagaatcgggacaatattgtattcaactgttttattttttatatttttaaaatttaaagtataattagtttttataattttcatcagatttttgttatattttttggaagtgaaacttttagcaagtggttgtctagtttttactaatccctaatttttttttccagtgtattgctcatattatcagaaggaaaagttatttaagtatgtcagttaattgtactacttggctgaatttccatatagtttttactgtgtatggggaggttgtagtatttattatagcattttaaataagggtaattcattttttattaaagtcattttcacgttaagttcctatttttgtatgttctactcttaagttatataacacagttccttttttaaaagaattcatttgttgaagtgctagtggaaaattaatgttattaaatagtttgcaaatgactatttataccagtatgcatataatttttaaatatttgtaa

SEQ ID NO: 11090 - DNA, 701 bp, Macaca Fascicularis
  misc_feature (1)...(701): n = A,T,C or G
cagaaacagaccnnnnnnnnnnnnnnnnnnnnnngaacttctcaagaagaattgctagcagaagtggtccagggacaaagtaggacccccagaataagtccccccattaaagaagaggaaacaaaaggagattctgtagaaaaaaatcaagctgagatgagtgaactgagtgtggcacagaaaccagaaaaacttnnnnnnnnnnnnnnnnnnnnnnnnnnntgtaaaaatggggatgagtgtgcctaccatcaccccatctcaccctgcaaagccttccccaattgtaaatttgctgaaaaatgtttgtttgttcacccaaattgtaaatatgatgcaaagtgtactaaaccnnnnnnnnnnnnnnnnnnnnnnnnnnnnnnnnnnnnnnnnnngtctccaaaaccnnnnnnnnnnnnnnnnnnnnnnnnnnnnnnnnnnnnnnnnnnnnnnnnnnnnnnnnnnnnnnnnnagatggaatgtcccttctatcatccaaaacactgtaggtttaacactcagtgtacaagaccggactgcacattctaccatcccaccattaatgttccaccacgacatnnnnnnnnnnnnnnnnnnnnnnnaaccagcgaatagcacccagtcctgcctggcagaagatcatgcagtttggaagtttccatgtactgatgaaagacactctannnnnnnnnnnaaatctt

SEQ ID NO: 11091 - DNA, 1266 bp, Macaca Fascicularis
  misc_feature (1)...(1266): n = A,T,C or G
attgatacaaaaacnnnnncatcacagcatannnnnnnnnnnnncatgccattntnnnatattacacaaaagatgcaatgcctatcaacaannnnnnnnnnnnnnnncggggacnnnnnnnnnnnnnnnnnnnnnnnnnnnnnnnnaatgacagatggaatgaaactagagcccagctgcttgcacaaatggatgttagtatgggaggaagagtggcagaggagcttatatttggaactgaccatattacaacaggtgcttccagtgattttgataatgccactaaaatagcaaagcggatggttaccaaatttggaatgagtgaaaagcttggagttatgacctacagtgatacannnnnnnnnnnnnnnnaaacccaatctgccattgaacaagaaataagaatccttctaagggactcatatgaacgagcaaaacatatcttgaaaactcatgcaaaggagcataagaatcttgcagaagctttattgacctatgagactttggatgccaaagagattcaaattgttattgaggggaaaaagttggaagtgagatgataactctcttgatatggatgcttgctggttttattgcaagaatataagtagcattgcagtagtctacttttgcaacactttcccctcattcttgacgtggtgtaattgaagggtgtgaaatgctttgtcaatcatttgtcacatttatccagttttggttattctcattatgacacctaatgcaaattagcatcccatggcaaatatattttgaaaaaataaagaactatcaggatttaaaacagctagtttgaggaatgtcaatgagttattaagttgaaagtaactaatgattttatgtttggttactctactagatgtgataaaaannnnnnnnnnnnnnnnnnnnnnnnnnnnnnnnnnnnnnnnnnnnnnnnnnnnnnnnnnnnnnnngaccatgaataaaatgttttttaatctaaatgtagagaagttgggatcaaaagcagtcttggaaacacnnnnnnnnnnnnnnnnnnnnnnnnnnnnnnnnnnnnnnnnnnnnnnnnnnnnnnnnnnnnctttgggaggctgaggtgggtgaatcacttcaggccaggagttcgagaccagaantggccaaagtggtgaaaccttgtattttccagaatacaaaaaaaaaaaagggtgcgtgcagttgatcctacctgtaataccagcagattcggaggacaaggcgggcaaatnnnnngaggtggaganttga

SEQ ID NO: 11092 - DNA, 693 bp, Macaca Fascicularis
acagaaaaatgggagttttctgttccatttcatcaggctctgaaaggcttccatcccgcacccctctgtaccataagaacattaaaagctgaaattcaggttggtttgaagcctgggcaaggggaacagctcatggcctctgagccctgctggtggaccagtggaaagtatggaatatttcagtacgatggtcccctttgacttgatttaggagctctcagttgcatagaaagatgacgagcaccttttcatccccagaaaaggagcgcgtgaattgagtcgcctggcggctggctctgtacgcgctctgggaagcttggcttctccgtgcccatctacatgcgcactggatgatttttctttttaacattttgccccactacactgttttggggatagatgggttaagccagttagagataattacatttatattggaattttagcaactttttttcaggttaaatacatcatttcaagtgcttttaatgaacttaattggttaggaagcaaaaaataagcgagttctgcttttagttaaccctatttttttcttaaatagtgcactgcatggtatttaatattccaggaagcatgaagttttattttgcttgattttgggctcatgaaataatagctctgtgaaaatgcacatcttaatgactctctgtaaagaggcattccttacaactg

SEQ ID NO: 11093 - DNA, 737 bp, Macaca Fascicularis
  misc_feature (1)...(737): n = A,T,C or G
atccagcatttttgaaagcttctgaaaaggacctagcccctcnncctgaagaatgccttcagctcctcagcagagcnnnnnnnnnnnnnnnnnnnnnnnnnnnnnnnnnnnnnnnnnnnnnnnnnnnnnnnnnnnnnnnnnnngtcaaattattatgtgaccaaaaaaagaaacaactagaagatctcaattattgtcgagaggagaggaaaagtctgcgggnnnnnnnnnnnnnnnnngctgacaaatatgaggaagctaaagaaaaacaagaggatatcatgaacaggatgaaaaaagtacttcacagttttcactctgagctccnnnnnnnnnnnnnnagtgagcgagacannnnnnnnnnnnnnnnnnnnnnnnnnnnnnnnnnnnnnnnnnnnnnnnnnnnnnnnnnnnnnnntactatgaaaaaggactatcagcagcgaaagatggagaaggtgttgagtcttcaaaaacccaccattactctcagtgcctaccagnnnnnnnnnnnnnnnnnnnnnntgaaggaggagggtgaacacataagggaaatggtgaagcaaatcaatgatatccgcaatcatgtaaacttctgacaccannnnnnnnnnnntcannnnnnnnnnnnnnnnnnnnnnnnnnnnaaacccatattgtaaaacaggtagcattatctaatttataaaaaggcattttggatgacctttggtgtggttgttcatctttttaaatat

SEQ ID NO: 11094 - DNA, 673 bp, Macaca Fascicularis
  misc_feature (1)...(673): n = A,T,C or G
gnnnnnnnnnnnnnnnnnnnnnnngcagtatnnnnnnnnnnnnnnnnnnnnnnnnnacacccnnncgcccgattgnnnnnnnnnnnnnnnnnnnnnnnccgtcctgtgtgtcacacctttcgcccccaannnnnnnnnnnnnnnnnnnnnnnnnnnnnnnnnaagcggaggggccagctgtgcacggagccatttggatggtgggggggattnnctgtatcaggagtgactttgttgctccacacagcctcccgttgcaggtgctttggaaggagatgctgccttggagctggagaatttgtggaccacattcaagcgtgtggcgcaggcatctccccatccttttcgctccgaatcacagnnnagcacattctcctnnnnnnnnnnnaaagggttcctcgcggctggtttagattgtggttgtttgttttgcttctaataggactgttttgtttcaaaaaggaaacaagttttgtgtttgctgtgtacnnnnnnnnnnnnnnnnnnnnnnnnnnnnnntttgagggcttaaggcctgatgannnnnnnnnnnnnnnnnnnnnnnntcttaattggtacatttanntagtctgttctgtataacagcaaaaaaaaaaaaaaaggaaaactgtaggaaatgttctgttctttttgaaannnnnnnnnnnnnnnc

SEQ ID NO: 11095 - DNA, 747 bp, Macaca Fascicularis
  misc_feature (1)...(747): n = A,T,C or G
atataaatatatatgaatatatttttnnngnnnnntacacctggaggttgcatggactgtacgaccggcatgtctttatattgtatacagattttgcacgccaaactcggcagctttggggaagaagaaaaatgcctttttgttcccctctcatgacatttgcagatacaaaagatggaaatttttctgtaaaacaaaaccttgaaggagaggggggggnnnnnnnnnnnnnnnngaacttattcttaagaaattgtactttttattgtaagaaaaataaaaaggactacttaaacatttgtcatattaagaaaaaagtttatctagcacttgtgacataccaataatagagtttattgtatttatgtggaaacagtgttttagggaaactactcagaattcagagtgaactgcctgtctctctcttgagttgatttggaggaattttgttccgttttgttttgtttgtctccttttatctccttccacgggccaggcgagcaccgcccgccctcactggccttgtgacggtttattctgattgagaactgggcggactcgaaagagtccccttttccgcacagctgtgttgactttttaattacttttaggtgatttatggctaagatttcactttaagcagtcgtgaactgtgcgagcactgtggtttaaaattatactttgcatcgaaaggaaaccatttcttcattgtaacgaagctgagcttgttcttagctcggcctcaca

SEQ ID NO: 11096 - DNA, 677 bp, Macaca Fascicularis
  misc_feature (1)...(677): n = A,T,C or G
atgagaaattaacattcttatagttacatctggaaatgagcatttgaaatagataatcctttaagccttgtggcaaaatttttgtggcttttatttaactttgaaaggttattatgcactaaccttttttggtggctaattagggtttaaatacagaaacaagatttcaaataaaactgtctttggcagtgagtaaatagcatattttgaagtagagttgtatactttttcatacaatgtttgggaatttttttcctgaagtaataatttattccacatctgcatcagtgaaagctatctacctatcctgagtccatcttaaagggaaaaaaaaaaaaaaaccttatctcttgcctttatttttaattttccactctttgattaatttgttttaagctctgtgttggaaaaaaggggtagtgcattttaagttgaccttcatatgcttttaaaataagacaaatctacttgataatgtacctttatttgatctcaagttgtataaaaccaataaatttgtgttactgcagtagtaatcttatgcacacggtgatttcatgttatatatgcaaagtagttaggcaactgttttcttagttacagaagtgtcaggcttcacttttgtgcagtagaaacaaaagtaggctacagtctgnnnnnnnnnnnnnnncagtttc

SEQ ID NO: 11097 - DNA, 753 bp, Macaca Fascicularis
  misc_feature (1)...(753): n = A,T,C or G
tagtattttgcaagatttaatcggttgtacacctggtgcccctcacttgcttcagtcatggttatttgatggagaaanngannnntcatcactgaaggagagagaaaagatgtgtgtctgattggtcctggaatttttgagctgtgccatttatggtactctttgcctatgcatcctctttttagattttttaaaaattttatcttactgtttttataatttctattgggaagaggcttgtgaccagtaccaatcttgagtttctttttctgtctannnnnnnnnnnnnnnnnnnnnngaaatgtcatttatctactcacnnnnnnnnnnnnnaaaaaatcaaatgtcagtcctagcagatgttgcatgtaaattggtagcaagtaatgattacagcccagaggattaagaattttgtaacagaaagctctgctatgttttaatattttatatacaattatgataattagcattgtcagactataaacctttgctttttaaagtttatttttactatttctttatcactgtttattgtatcatcaccattgatttcataatgtaaatactatatattgaacaaattaaatgtcaaatttttttattaccatagtccatgttaatagtggggctttcaggtgtttagagatttttttgttgttgttgttaacattcattgcaaaagtactagatggtgtannnnnnnnnnnnnnnnnnnnnnnnnnnncccctaatatgtatactatcttttta

SEQ ID NO: 11098 - DNA, 687 bp, Macaca Fascicularis
  misc_feature (1)...(687): n = A,T,C or G
gcaaccaaagagctacatttaaaaggttcgcttggcaaaaatattccatttgggaactcactgccttataaaggctctnnnnnnnnnnnnnnnnnnnnnnnactgannnnnnnnnnnnnnnnnncttatatcactaaaataggatcatgttttaattgtgagaaacagggctgnnnnnnnnnnnnnnnnnnnnnnataccagcaccttgggaggttgaagcaggcgaatcacctgagggcagnnnnnnnnnnnnnnnnnnnnnnnnnnnnnnnnnnnnnnnnnnnnnnnnnnnnnnnnnnnnnnnnnnnnnnnnnnnnnnnnnnnnnnnnnnnnnnnnnnnnnnnnnnnnnnnnnnnnnnnnnnnnnnnnnnnnnnnnnnnnnnnnnnnnnnnnnnnnnnnnnnnnnnnnnnnnnnnnnnnnnnnnnnnnnnnnnnnnnnnnnnnnnnnnnncaaaaaaaaacaaaaaaaaatatgagaaacagaaatatttaaaaattttaaatgaggaataagaatggagatgttgtaacattctaccagattatggatagattgatctgaaaatgaacctcaactcaagggtggtcagctcaatgctttccagaacatggacttttggattctttggggtactttgactgaatttatttttctaccnnntatatgttttatatgctgctggtgc

SEQ ID NO: 11099 - DNA, 706 bp, Macaca Fascicularis
  misc_feature (1)...(706): n = A,T,C or G
tgaattgtaagctctatgtgtcagggaaggtggctttcttttcaccactataatcccaggaactagcacagtgcctggcccttagctattgaacaaacacgctcaagtccctggatatcaatcatccagagtatgcctctttagctggtccctgatccttgtaaaacagacaggttggaactaaccatccaccaaaaggcgacatgcaacctaaattaaaccaagatcccaaaggccttggtcaaatacattagcaaaagccaaatgagaggcaggcgtagtggcacatgcctgtagctccagctacttgtggggaggaggatcacttgaacccaggagttcgagcccagcatgggcaacctagcaagagtctgtctcttaaataaataaataaatgtttaaagtcaaatgaagatgtttcttcctattttcttaagatgtgtatttctggccnnnnnnnnnnnnnnnnnnnnnnnnnnnnnnnnnnnnnnnnnnnnnnnnnnnnnnnnnnnnnnnnnnnnnnnnnnnnnnnnnnnnnnnnnnnnnnnnnnnnnnnnnnnnnnnnnnnnnnnnnnnnnnnnnnnnnnnnnnnnnnnnnnnnnnnnnnnnnnnnnnnnnnnnnnnnnnnnnnnnnnnnnnnnnnnnnnnnnnnnnnnnnnnnnnnnnnnnnnnnnnnnnnnnnnnnnnnnnnnnnnnnnnnnnnnnn

SEQ ID NO: 11100 - DNA, 737 bp, Macaca Fascicularis
  misc_feature (1)...(737): n = A,T,C or G
aatgagtgcaggcgctgatgaggctcactttgagaacaggaagaaggaggaggaggagctcgtttctctgaaggacaggatcgagagacgtcgggcagagcgggccgaacagcagcgcatccggaatgagcgggagaaggagcggcagaaccgccnnnnnnnngagagggctcgacgagaggaggaggagaacaggaggaaggctgaggatgaggcccggaagaagaaggctttgtccaacatgatgcattttgggggttacatccagaagcaggcccagacagagcggaaaagtgggaagaggcagaccgagcgggaaaagaagaagaagattctggctgagaggaggaaggtgctggccatcgaccacccgaatgaagatcagctgagggagaaggccaaggagctgtggcagagcatccataacttggaggcagaaaagttggactcnnnggagaagttcaagcagcagaaatacgagatcaatgttctccgaaacaggatcaacgataaccagaaagtctccaagacccgcgggaaggccaaagtcaccgggcgctggaagtagggcccagcctccttcaccaaagatctgctcctcgatcacacctgtctccggcctgcactcccccagttcctgggtcctcctgggctccctggacagctcctgttggaaatggggagctggtctaggtgggagccacccctcctgcctgcccccacacccactcacgccc

SEQ ID NO: 11101 - DNA, 690 bp, Macaca Fascicularis
  misc_feature (1)...(690): n = A,T,C or G
gnnnnnnnnnnnnnnnnnnnnnnnnnnnnnnnnnggacgtgaacggcaagtacacggccgacgggaaagaggtgctggagtatttgggtaaccctgctaattacccggtgtccattcgatttggccggccccgcctcacttctaatgagaagctcatgctggcctccatgttccactcgctgtttgccatcggctcccagctgtctcctgaacagggaagctcaggcattgagatgctggagacagacacattcaaattgcactgctaccagacactgacagggatcaagtttgtggttctagcagatcctaggcaagctggaatagattctcttctccgaaagatttatgagannnnnnnnnnnnttgcccttaagaatccattctactccttagaaatgcccatcaggtgtgagctctttgaccagaacctgaagctagccctggaggtggcagagaaggctggaacttttggacctgggtcataggctgaacctgtgatggacccccaaattctgagagttcctgcaaaaggaatactgcagtggaaaccccagcannnnnnnnnnnnnnntggaaaatgggagaatgcggaccctgaagacaaaactgattcctgagccttaacactgtgttctttccttctgtatataccatggtcttactttccagctctgtgtggatttattt

SEQ ID NO: 11102 - DNA, 986 bp, Macaca Fascicularis
  misc_feature (1)...(986): n = A,T,C or G
ttcatcgggttttaactnnaagtctgagtaaatacaacggtgaatgcaagattcantnnattttcatcaccatggggcgtaccctgttgttgagttctctgggtcagacctctacagacttctcagatggatcctaggtctctgggcttgccgtgaaattactcgctgctcagggagagagttgaaatggtggcatcctccccctctgttgttccggctgtgtcccctaactctgttgctccggctgtgtcccctaactctgttgctccggcagtgtcccctaactctgttgctccggctgtgtccctcactctgttgctctggctgcagctcattctgttggagctcctcattcagctggtcactgtggtcagagggtgttggcctgctccttcctcaagtcttcttaaagccacgtatttttgtggagcatttttcttcctggctctcctcaagttgttttcctttcttcgctgtcttgggagtcttcttcgtgcttccggacgtcggttgagagaaggacttcttcttccttgtcttgttggtgttggctggtggttgctcttcaacaactgtaccggaggctctcagttttctcttcatcttcaacaagtcaatctatctcaaggatctcacgttgcannnnnnnnnnnnnnngccactgggcctggagttccagttccagtgtctggagagtccaccnnnnnnnnnnaatctcatgctggttggcagttgtcagcagaagccgaggcctgcccatcagttctttactctgaggtgttagaatggaataaaaatataaatacttatactagttttcatggcttctgcttaatattgggtattgttttgttttgttttggtggtgataggcttaccttacattaaaccaggcnnnnnnnnnnnnnnnnnnnnnnnnnnnnnnnnnnnnnnnnnnnnnnnnnnnnnnnnnnnnnaggacagtcaggtccacacctggggccgtt

SEQ ID NO: 11103 - DNA, 578 bp, Macaca Fascicularis
  misc_feature (1)...(578): n = A,T,C or G
catngcntnnnnnnnnnnnnnnnnnnnnnnnnnnnnnnnnnnnnnnnnnnnnnnnnnnntgtatnnctgcaaggtaagtattattatcccagttttgctgatgtggagatggagttgcagagaaattaagagatatactcaannnnnnnnnnnnnnngtgtcgtggagccatattttgaatcctgtgagagacttcagtgccgatgatcagatgagcggaccatcaaaccatgccggaggtggagtgtgttactcttggggctggaatgagcatggcatgtgcggagatggcannnnnnnnnnnnnnnnggccccgaagccggtgcaggctctgctgtcatcatcaggactccttgtgggctgtggggctggccactccctggccctcnnnnnnnnnnnnnnnnnccctgcattggtccaggaccccaaggtcacctacctttccccagatgccaccgaggacactgaatctcaggaagccatggacaaagagagaaactggaaggaaagacaatcagaaacttcaacccaaagccaatctgactggtccagaaatgggggactgtgatagagaatct

SEQ ID NO: 11104 - DNA, 768 bp, Macaca Fascicularis
  misc_feature (1)...(768): n = A,T,C or G
gcgctagagcagcttctgnnnnttatgaccagcaggaccaagaccaagtgtcagatgtctgcaactcaccgctnnncaagtacatggacaatgactatgctaagctgggcctgagtttggtggttccaggagggggaatcaagaagaaatcacccgcaacaccacaggccaagcctgatggtgtcannnnnnnnnnnnnnnnnnnnnnnnnnnnnnnntactcaggaggactatgctagtattttgcttgctgaaaagaaaagggaaacaaaggtaaaaatcctgacatgccatttcaaggacttgggaatagattagggatatacgtacttcattacagtcatgttggatcctaataaagacttaggatctttagttaccatctccccaaatcactcattgtatccattacctgtgaagcatatctttttctttccataagagcttttctaagacaccagcaggaatttacagaaaatggactgtctatgttttaatatagctgatgaaaaactttgcaagccaaattatacataaattatgttctaaacaaaaggggtaataagcataggtattcttctctcttggacgcttgtaagttactgttagtgaattgttttttacatttaataattgnnnnnnnaagtaatgtttactgataaaaaattatttcaaaatttgttttggaaaggaaatttacccccatgatgttagatacatttaaattatcaagtcttttcagagatgagatggagacaggaagttatt

SEQ ID NO: 11105 - DNA, 651 bp, Macaca Fascicularis
  misc_feature (1)...(651): n = A,T,C or G
ttttccgcaagttccacnnanctccccttcctgccctcaactgaannnnnnnnnnnnnnnnnnnnnnnnnnnnnnggcttggatgcgcctcttctcaagcactgggagtttgatgcaccaagccctctcccagagactacagagaacgtggtgtgtgccctgggcctgattgtgggtctggtgggnnnnnnnnnnnnnnnnnnnntcatcatcaaggctccccccaggcccctttcccctgcagcttctcaggtgagactgacctgtctcacccagcagccactgcccagccgcactccaggcaagggccagtgtgcctgctcctgaccactgcaatcccagcgcccaaggaaggccacttctcaactggcagaacttctggagtttagaattggaattacttccttactagtgtcttttggcttaaattttgtcttttgaagttgaatgcttaatcccgggaaagacgaaggtctttccagtttagaaaaggctctgtaccaaggaggaaccacaggagctgggacctgcctgcccctgtcttttccccttggttttgtgttacaagagttgttggagacagtttcagatgattatttaatttgtaaatattgtacaaattttaatagcttaaattgtatatacagccaa

SEQ ID NO: 11106 - DNA, 874 bp, Macaca Fascicularis
  misc_feature (1)...(874): n = A,T,C or G
cannnnnnnnnnnnnnnnaagcctatactaagctgacagataacatttttctggagattttatactctactgatcccaaattgaaagacgcacgagagattttaaaaaaaattgannnnnnnnnnnnnnnnaagtatgtgggtgagacccagccaacggaacaagtaaagattaaaaaggaggactatgaatctcttccaaaagaggttgccgctgctaaacccagagaattgctggaagtaaaactggaggctgaagattttatagtggatgttatcaacatggattatggaatgcaagaaaataatccaattgatcatgttagcttctattgtaagactgaccccaacacaccaatcaggattacgaaaaaccaggtttcacgacttctgccagagaaatttgcagagcagnnnnnnnnagtatattgtaagaagatggacagaaagagtttgtatgccgcaaaacaacattttgttcagtggtgcgcagacagaaatttcaccaagcctcaggatggcgatgttatagccccactcataacacctcagaaaaaggaatggaactacaggacttcagtccaaagtccaactcgcctccgagaagcatccaaaagcagactnnnnnnnnnnnnnnntgacccaaagtgaacgtctgtagtcggctgtttacaaactccctcccctgcacaattcatttaggggcttcactcctagaattctgcacaattatgataactcatgctttaattttgcagtttgaatgtacacgcatgctgaagctaagtaatttttaatcaaagaaataagatggtattaggcaaatcttactatactatgaaaagtattaccttgcctatttttagtattattaa

SEQ ID NO: 11107 - DNA, 680 bp, Macaca Fascicularis
  misc_feature (1)...(680): n = A,T,C or G
ggacgagctgtnnnnccgcgagggcgagtcggtcannntgctgcggagggacggacccgaggagaccgactggtggtgggccgcactgcacggccaggagggctacgtgccgcggaaatacttcgggctcttccccagggtgaagcctcaaaggagtaaagtctagcaggatagaaggaggtttctgaggccgacagaaacaagcaatcttgccttccctgcagaccaccccctgttttttgctgcctttatctgcnnnnnnnnnnnnnnnnnnnnnngttctcgccaccggttctctgttnnnnnnnnnnnnnnngggagaaggaggaccccagccctaagtttaggaatctgccttagccctgggaggtccgggaggggctggaaatcacnnnnnnnnnnnnnnnnnnnnnntctgccaaatcagatcccgtccaaagtgcctcccatgcctactgccaccatcacatcccccagcaagccacccacatgcccagcagagcctgggatgggcgaccacaccactggatatttctgggggtcaccactgactccatctctcccagcagtcttggggtctgggtgagaaacnnnnnnnnnnnnnnnnnnccctgcccctcctctccccaattaagtgccttcacacagcactggtttaatgtnnnaaacaaaatagggaa

SEQ ID NO: 11108 - DNA, 723 bp, Macaca Fascicularis
  misc_feature (1)...(723): n = A,T,C or G
tgtgctgtgtgttatcttagactcccccttgtggnnnctgagagccctggactctgggcctggccttgccggttactacactgtaggactctaggcaactgacttgacttgtagtgcttccgtttcttctctgcaaagtgggatttgttgcagataatgtgcctgacatgtggcagtggcccagtcagctgcattcccgacaggcccacagctggtgcaggaggacacatctggctgacgggctgctctgggatcggtctcctcctctctgctgcacctgggcatgggcgcctgtgaccccctccattccctactcaacatggccatctgagacaccttgcaggagctaaagcaggtcgtctgggccagggcttccaggagtgtgggactctgctgacaaataagtggatttgggtcacatcccaaacacagcactgagcaccatcaagtcaccccgggaagaggactggtttgcagtggcctttcaattctctgaactgcgcccgggagtaagtcttggtttggtactactgtgtctttcacgtctctctaacatttgctgagcttccttatcaacagaaagggaaggcaggaagcccagagcttgaggagacaatagtctccagctagactttaataccattgtacagcttgttgtgtttatttttgttgctctctatttatggcaagtgatactgcttttttcacatacactggaatata

SEQ ID NO: 11109 - DNA, 779 bp, Macaca Fascicularis
  misc_feature (1)...(779): n = A,T,C or G
ctgacgccaaaatccgcncngaannnngaacagggtgcagccctcggggtcccggctgcagnnnccggcactttgcctnnnnnnnnnnnnnnnnntcgcggccagatggctctgcttccttcctgcaaggtgttgcagagaagagccgggagcggctgatcaggaacacgtgcgaggcggtggtcctgggcacattgcacccccgcacctccatcactgtggtgctgcaggttgtcagcgatgctggctctctcctggcctgttgtctgaatgccgcctgcatggcattggtggatgcaggtgtgcccatgcgggctctcttctgtggggtcacctgcgccctagactctgatgggactctcgtactggatcctacatccaagcaagaaaaggaggcccgggcagtcctgacctttgccctggacagcgtggaacggaagctgctgatgtccagcaccaaggggctctactcggactctgagctccagcagtgcctggctgcggcccaggccgcttcgcaacacgtcttccgcttctaccgggaatcgctgcagaggcgttactccaagagctgaggcaagctggggcaaagggccgctcccactgcctccacccactcaccccctgtagcctgaagcaaaccagcagcccagccttgcctctctgtcctgtgggctcctgtgagcctgcagctctgtaaccacagggctcctgtggggaggccttggcctgtgacagcccccagcaaggataacattcagaggagctcacatttagga

SEQ ID NO: 11110 - DNA, 716 bp, Macaca Fascicularis
  misc_feature (1)...(716): n = A,T,C or G
tttaataggtannnnnnnnnnnnnnnnnnnnnnnnnnnaaaaaaaaatacaaacnnnnnnnnnnnnnnnnnnnnnctgggaacccctgcatccttccccctcacccaagggcagtgggcatgaatctactttttaaaaatgattaattttggccatccttgcagaaaagagcctaaaattgggtgatttacnnnnnnnnnnnnnnnnnnnnnnnnnnnnnnnnnnnnnnnnctgaactctatgcagtaatctcctatcattagggctacatgctttcttgttctgtcttttaaatattatatcggggtaaaggagagggctcctcctgaaatggttcaagaaagaagacagacttgtggctttaaaagggtgggnnnnnnnnnnnnnnnccctaaaagcaaatgacaagacaaaggcatacagaccccagggaaatacccagttcccacaccnnnnnnnnnnnnnnnnnnnnnnnnnnnnnnnnnnnnnnnnnnnnnnnnnnnnctaccccctatttctttggtattgtcaaaagacaagattcaggccgggcgcggtggctcatgcctgtaatccagcactttggaaggccaagacgggnnnnnnnnnnnnnnnnnnnnnnnnnnnnnnagcctgggcaacatggtgaaaccccgtctctactaaaaatacaaaaaagaattagttgggccaggtgtggtggtgtgtgcctgtaa

SEQ ID NO: 11111 - DNA, 756 bp, Macaca Fascicularis
  misc_feature (1)...(756): n = A,T,C or G
agaccaagacaagccagcacaggatgagtacagcgtgcttnnnnnagcatgtggagccagcagtggtgtatcgggnnnngctgcaccggggccttnnnnnnnnnnnnnnnnnnnnnnnnnnnnnnnnnnnnnnnnnnnnnnnnnnnnnnnnnnnnnnnnnnnnnnnnnnnnnnnnnnnnnnnnnnnnnnnnnnnnnnnnnnnnnnnnaggaactgctgtgttataagtaccagggcccagagtcggggctccctgaggcccagcacgggttccgcctgctgtggcagcggggcttctccagtcccctgctggccatggctcacgtggacctgaccggggacgggctgcaggagcttgccgtggtctccctgaagggcgtgcacatcctgcagcacagcctgatccaggcctcggagctggtcttgacccggcttcgacgtcaagtggagcagaggagacgtcggctacaggggtcggaggacgaggcaggtgcagggccagctgagaatgcagcctcttaagtacccacgcacccactctccccagacctggggcgactcatggcgtgctcaccgccacccgctggtgggggttgtcctgaaggacaggatgctgtcctcagacctccccagggtggtgaagctgtgccctgagaccccagctaacccacttctctctctgtgcctcagtgtccctattgaaagcagggatgatcccgacccaccctgtccactctcgatgagaactggctaactg

SEQ ID NO: 11112 - DNA, 725 bp, Macaca Fascicularis
  misc_feature (1)...(725): n = A,T,C or G
ccttacaacagacagtgagagaaagagttgttctatctcgatatgtccaaaacaagggggtcagggtatggagtttatgagggttcaagatatttggttcagggccagggccagtttttttgtgttttgagcaacaacctgaataccttttcaaggctctggcttgggctcaagcctccaggggnnnnnnnnnnnnccaggtcacagggcaatcaagttactctgtgtttctttgtcaggacacagaaaaaaagtggggaagctgggggaccctataaggatcctgggcaggaaagcagggattgtgttcatttgagggtttcactgtcagtgagagtctcagcttccatnnnnnnnnnnnnnnnggctgcaactgaaatcagagctgggacacagtgcaccagaagctaaattcttgatgccannnnnnnnnnnncctgccccattcacatctccttcacgtccattagttggcaaaagcagaaaggtgagagagaagatgacctaagtgtgaccgaactccannnnnnnnnnnnnnnaccgaagtcagagcaatgaaccagcccctcctttgaccaaggaggaaggagcaggtaagcaggaaaaccggggtcccagacaggaccctaatgatcctgaatccatggattnnnatccatcctctccttacacccttcctggacacagtctcacctctcattttccnnnnnnnnnnnnnnnnnnnc

SEQ ID NO: 11113 - DNA, 677 bp, Macaca Fascicularis
  misc_feature (1)...(677): n = A,T,C or G
atacacaacacacttgacctttaaaattgccttttccatttaaaatgagctgtacacccagctagatgagcagctggtctaagttgtcaccatttttttaactcttgtgcccacttgccaccaatctgtcattcctgtttgatgacaccagtcatctnnnnnnnnnnnnnnnnntgctaaagactagcaggaagacctcaggactgtgggccacctgtcaggggagtgagggggcnnnnnnnnnnnnnnnnnnnnnnnnnnnnaacagtgctggggccaaggactggaatgcaagtttgaccatcagctgatgtttcctgtaaacataaagatgaaatggtcgccttttgagactttcgtaatgcagtgacttaagctgcaggagtgggtggagaggtttgttttatagtcttgaacaaggtttctgctgacttctgtgtctgtctggtttctttacagttcctcagcactttgtttgcccccttaaactttgtcatggagaaagtggagagcatcctcccatccagtctgtggcaccagctaacacggatctgagagaagccccgtcctccagtcacctcacccgctgctgccactgtctcctccgtgccaactccttgtggaccgcaagaaagcatgacttgaaaaagggaagccattccgagatttaaaatgtc

SEQ ID NO: 11114 - DNA, 657 bp, Macaca Fascicularis
  misc_feature (1)...(657): n = A,T,C or G
tgaaaatccagccatgacaagnnnnnnnnnnnnntgtaaagtaccatctgaattgatttccctttttaataaagaatgggatagagagattcttcttaatatccttaccctatttgagaatataaatgacaacatataaaatgaggggcgtnnnnnnnnnnnnnnngaattcagcggaagttcactttttttcttattcaaagagtgtggagtttgtgttaagaaaatcaaagcactagcaaatctcaatgatatggtggtgaaagtaaaagtctcgaaagtattaaccaaactctaatttggagtctgtcccaaagagtattgaggtatttgcacttggtatgatgtgttttgtaaattctttgtttttcattgtgaatatatggtaaagagatattttcagctgttattttggaataatgactatcatatatcataacagtgactgatgttggttttaatggttgggttgaggatgaaccattttaatgatgccaaatggaatattagtacttgtacacagaaagaatttattgatttgatcttattacctagattgagatatttttactctttcttctacctaaactgacaatnnnnnnnnnnnnnnnnnngaataagatacacttttatattagtttatatttgttaatataa

SEQ ID NO: 11115 - DNA, 759 bp, Macaca Fascicularis
  misc_feature (1)...(759): n = A,T,C or G
gnnnnnnnnnnnnnnnctaagaacannngcattcttcnnntatccttgctccgggttttagttttgtgcttagttaaaccttttccaggaaaaagaatttccccatacaaataagcatgagactatacgtaaaaataaccttgcagaagctgatggggcgaactcaagcttcttcactcacagaaccctagatacacgtggagtttgcattcttattcattagggaggacagtttctttgaaaacagttattcagttataaataatataggagtattttgataatatacttgttgtttaatgtttaacatttcttagaaaataatggaatgagaatttaagcctcaaatttgaacatgtggcttgaattaagaagaaaattatggcatatattaaaagcaggcttccatgaaagactcaaaaagctgcctgggaggtggatggaacttgagcctgtcaagaggcaaaggaatccacgtatcctccgcttaaaaactcaccatggaggagaattaagtcctacttttaaagagtttctttataaaatttgctgtctaagattaatagcattcaaagatccccagacttcatagaatactcaggaaaagcatttaaagggtgatgtacacatgtattctttcacacatttgccttgacaaacttctttcactcgcgtcttttacactgactttttttttgtgggggcgggaggggactctggtatcaaattctttaatnnnnnntatannnnnnntgacat

SEQ ID NO: 11116 - DNA, 198 bp, Macaca Fascicularis
aaaatcccaagtgtaggtaaaacatgcagacattcagatatataggccaactcttagtaataatatgaaatatacttaaagagcttttaaaactttgtatttttgtacaaaaccattgctcttttacaatttttttcctttttttttttttttttgtcatacacccgacataatacatggagccaaagaacacacaat

SEQ ID NO: 11117 - DNA, 728 bp, Macaca Fascicularis
  misc_feature (1)...(728): n = A,T,C or G
agatgagtnnnnnnnnnnnntgtcagattgtgtaaggagcatcatgggaagtctggccttaccaaggcagtgaaggagagtacaattacannnnnnnnnnnnnnntatgaatttctgtcctttgtacgacagcagactcctccagggctctgtccacttgcaggaaattcagttcatgaagataagaagtttcttgacaaatacatgccccagttcatgaaacatcttcattatagaataattgatgtgagcactgttaaagnnnnnnnnnnncgctggtatccagaagaatatgaatttgcaccaaagaaggctgcttcnnnnnnngcacttgacgacattagcgaaagcatcaaagaacttcagttttaccgaaataacatcttcaagaaaaaaatagatgaaaagaagaggaaaattatagaaaatggggaaaatgagaagacnnnnnnnnnnnnnnnnnnnnnnnnctgccactacatagttnnnnnnnnnnnnnnnnnnnnnnntttttttttttctcacgctgatggcttggcagagcaccttcggttaacttgcacctccagattgattactcaagcagacagcacacgaaatactatttttctcctaatatgctgtttccattatgacacagcagctcctttgtaagtaccaggtcatgtccatcccttggtacatatatgcatttgcttttaaatcatttcttttgtttaaataaataa

SEQ ID NO: 11118 - DNA, 1057 bp, Macaca Fascicularis
  misc_feature (1)...(1057): n = A,T,C or G
gctgatcaccaagccgcagaanctgaatgatgnnnacggaccccccagcaacttcctcgagatcgatgtgagcaacccgcagacggtgggggtcggccggggccgcttcaccacttacgaaatcagggtcaagacaaatcttcctattttcaagctgaaagaatctactgttannnnnnnnnnnnnnnnnnttgaatggctgcgaagtgaattagaaagagagagcaaggtcgtagttcccccactccctgggaaagcgtttttgcgtcagcttccttttagaggagatgatggaatatttgatgacaattttattgaggaaagaaaacaagggctggagcagtttataaacaaggtcgctggtcatcctctggcacagaatgaacgttgtcttcacatgtttttacaagatgaaataatagataaaagctatactccatctaaaataagacatgcctgaaatttggcaagaaggggcaaaaatgtgactattaatgattgataagcaccagtgaagaagttctaacttttagcatgctgcacagaaactggtataacatgccttcagtatactaacactcatatgctcagttttgttttgttttggcagttgacaagaagttaatttgctttagtgaaaatccctcattccagcctttctatataaatagctcttcnnnnnnnnnnnnnnnnnnnnnnnnnnnnnnnnnnacaaacctgttattccaatgtaatctgcagtgtcctaactaaagttactggcttggtcttatttgcacagtttttgtgtcttgtttgcttcttgcatctgattaactagaatatttctctttcccccttttaatgtgtgatgtcacttgacccaatttatgtgtaggagcannnnnnnnnnnnnnnccagtactgcacacatcagatacatacttgtgtgcagnnnagtatcttcctgcaggcttgtaatacccttcacnnnnnnnnnnnatgagggaaatctttatattctgtataaaaacaaaatcaaatttatatactaaaatcatttgtctaaaaatttaag

SEQ ID NO: 11119 - DNA, 761 bp, Macaca Fascicularis
aacctgtgaaacagttgactttggctgaaggtgggagccggtgtgggagcttttactgctgttttgctggtggctctgacctgctacttctggaaaaagaatcaaaaactggaatacaaatattccaagttagtaatgacgactaactcaaaagagtgtgaactcccagctgcagacagttgtgctatcatggaaggagaagataatgaagaagaagttgtatattccaataaacagtcactactaggaaaactcaaatctttggcaaccaaggaaaaagaagaccattttgaatctgttcaactgaaaacctcaagatccccaaatatatgaagagacagtgctgtagccttgagactaatgaacaaagaaacctgctctagttttacaggaccatattttagggtctgtcctcatacctgtcacattggtgatctcacagaggagggccatgccgccgaaaagggaaagagattgaaacatttgattgccttatcacatggtcaagtaccttgccaaataaaagaaagcaaatgatttgggtctcaactgaagatgaagctcaactcaggaagagatttatctgtatatacacgtaactgaaaaccaagtttaagcccaccaatgcactgctgatgcatgccatataattaatgggtaacttttattctttataatgtctacataacaagtgtgatttggagggcacatgtgagcatatgcattatgatcccaattttatgttttttctcttgtttata

SEQ ID NO: 11120 - DNA, 760 bp, Macaca Fascicularis
  misc_feature (1)...(760): n = A,T,C or G
gcagtgaagtgctgtgcatcnttggagctggggtccaggcctacannnnnnnnnnnnnnnnnacagagcagttctcctttaaggaggtgaggatatggaaccgcaccaaagaaaatgcagagaagtttgcagacacagtgcaaggagaggtacaggtctgttcttcggtccaggaggctgtggcaggtgcagatgtgatcatcacagtcaccctggcaacagagcccattttgtttggtgaatgggtgaagccaggggctcacatcaatgctgtcggagccagccgacctgactggagagaactggatgatgagctcatgaaggaagctgtgctgtacgtggattcccaggaggctgccctgaaggagtctggagatgnnnnnnnnnnnnnnnncgagatctttgctgagctgggagaagtgattaagggagtgaagccagcccactgtgagaagaccacagtgttcaagtctttgggaatggcagtggaagacacagttgcagccaaactgatctatgattcctggtcatctggtaaatagaacaaaggaacttggtgttgagatggatgctcgaggaatgttgctgctggttctcataatttctagagtaaatgaggaagtccagtccccagtgaactctccttttgtgcttattgcgttttaccttaagtgctgagatcctcatttaggtttgtagttggaaagcaaaactagccatttcttctgctataccaagttataatagcattcatttccct

SEQ ID NO: 11121 - DNA, 587 bp, Macaca Fascicularis
  misc_feature (1)...(587): n = A,T,C or G
gcatgggcgcgggacccatgggtgnnccannntggctgccntccaccgagacaccacggctgcctccgggcacccagcggcatnnnnnnnnnnnnnggggactggcccacatcccggggagggctccaggcagcaggnnnnnnnnnnnnnnnnnnnnnnnnnnnnnnnnnnnnnnnnaggggcggcagcctggggtgtccaannnnnnnnnnnnnnnnnnnaggaaatgaagaagaaaaaatctctttttggcccaaccgctgtgaacggtgctgtgaaaacgtctgggggaggtgttccggggggagtcgcggggtggaggggacaagacaattgtagccgctgccagacccctccataaggcacagatttgacgggtcccctctcctcataaaaggccactccaggatgggcgcggtggctcacacgtattatcccagcaccctgggaggccaaggcagacggatcacctgaggtcaggaatacaagaccagggctggccaacatggtgaaaccccatctccaccaaaaatacaaaaactagctgggcatggtggcaggcacctgcaagcccagttactcgggag

SEQ ID NO: 11122 - DNA, 1381 bp, Macaca Fascicularis
  misc_feature (1)...(1381): n = A,T,C or G
gcagtttannnnnnnnnnnnnnnnnnnggggagaggggtttcgccagtcnnnncagattgagtctgtgctgnnnaaggaggactaccatcctgcaactctttttctaattggggcacagagaggatgtcagtaaagaaaagttgaagnnnnnnnnnnnnnnnnnnnnnnnnntggagaagatagaatcttaaaatacatttggagttttatctgttttacaagtgcattgatggcctaagttcctcctattttctgctgtttgatctctaaggaactcctgttgctaaatatgaagagtatggaacattcatatggtctctgtgaagcatggggggagggaatacatttctttttcttataggctttatgctcaaatgnnnnnnnnnnnnnnnnaagaatcatgttgcattttaaatgcagccagcttaagtagaannnnnnnnnnnnnnnnttaattttcaggaaccattttgaattatgaaaatattcccagttgaagaaattattcaataagtaaaagctaagaaatgtcattgaaatcataaggcagtttaagcataaattgataaaaatagctgtgtactactaattaatagaaaatcattcaaccaagagaagagtcaaatgaatatcatttgtttattggctagtgagtttctttgtaaccttgattttattaagtaatattcggttagtatgtcctgttaataaaaatgaacaaaattaattttgctatgttcaggtgtcttgataaaataacaacgccccagtgttgttgcttatgtttagcactaaattttaacacagggtcagtgagtccaggttttaacttctgcatgcctggatgggatgaaatataattcattgttaaattaatgcatatttgtatttattaatcactgtgacaacattaaccatctgttctnnnnnnnnnnnnnnnnnnnnnnnntcnnnnnnnnnnnnnnnnnnnnnnnnnntggtattagatcaaggnnnnnnnnnnnnnnnnnnnnnnnnnnnnnnnnnnnnnnnnntgaagtggggcacacagnnnnnnnnnnnnnnnngaggaagagcagctgagagatagggtcagtgaatgtggttcagcctgctacctctcctgtcttcatagaaacattgccttagaattattgtatgacactttttttgttggttaagctgtaaagttttgttctttgtgaacatgggtattttgaggggagggtggaaggagtaaggaagtgctccttttacaagaatttcgatgcatgagtgtctgttgtagggttcagatgatctagtaaagtgttttagaacccctttttatcccatgcaccatttggtaaacataaaagtcacaattctgctaatgtcatt

SEQ ID NO: 11123 - DNA, 753 bp, Macaca Fascicularis
  misc_feature (1)...(753): n = A,T,C or G
actccagccccctgggagcactcggctggcctgctcctcacctgggctggccccctgctctttgccagtctgcccgctctggggtggaaccactggacccctggtgccaactgcagctcccaggctatcttcccagccccctacctctacctcgaagtctatgggcttctgctgcccgctgtgggtgctgctgccctcctctctgtccgcgtgctggtcactgcccaccgccagctgcaggacatccgccggttggagcgggcagtgtgccgcgatgagccctcggccctggcccaggcccttacctggnnnnnnnnnnnnnnnnnnnnnnnnnnnnnnnnnctcttcgggctgtgctggggaccctacgtggccacactgctcctctcagtcctggcctatgagcagcgcccacccctggggcctgggactctgttgtccctcatctccctgggaagtgccagtgcagcggcagtgcccgtggccatggggctgggcgatcggcgctacacagccccctggagggcagccgcccaaagatgcctgcaggggctgcggggaagagcctcccgggacagtcccggccccagcactgcctaccacccaagcagccaaagcagcgtcgacctggacttgaactaaaggaagggcctctgctgactcctaccagagcatccatccagctcagccacccagcctgtctccactgggccccacttctctggatcagagaccctgcctctatttgacccc

SEQ ID NO: 11124 - DNA, 711 bp, Macaca Fascicularis
  misc_feature (1)...(711): n = A,T,C or G
gatgtagcatatcgaagataattttataccgcattnntatggattattttgtaatgcgtgattccgtctgctgaggaggagggaggggctccagggaacgccacccaccttcagtgaggttgctccccagctgagcgcaccgggcatgggatgtggaggctggcgccacaccctgtgcctctccaaggctgggcgcgtggggcatccggagtctctctgggcctcagatgtccgtctgccacctcttgctaaggctctagccagaagggagggtgagggtagaagaaagttattcctgaagaaaaaaagaatgaaaagtcattgtactgaactgtttttatatttttaaaagttactatttaaaggttggtttgattgttgcgtcttaattgcctcaacccccagtttgtcagtcccccccgcaggaaaacagccaggccagtgtcgctctcacattctggagcctgggccatttcccgtccatgtgagctcttcttatctcacagcattcccacgcgctgctccccccgccccccagatacccaacagcgcagcgggggtttcacaatcccacactgcgtcacctcccatccaagcgccagggagggtgtggggtaggagctaagacttcctctggacagatggacagggcagagttcactgaggggaaggaagaccacaggttaacaccaaagtattgtacagctgtca

SEQ ID NO: 11125 - DNA, 775 bp, Macaca Fascicularis
  misc_feature (1)...(775): n = A,T,C or G
agaagatggtggagtgtgtcccagaagatggtggagtctgtgttccggaactttgacgtnnnnnnnnnnnnnnnnnnnncacaggaagattccagatcatccgtgggaacttcccttacctcagcgcctttggggacctcgaccagannnnnnnnnnnnnnnnnnnnnnnnnnnnnntggtgtcctatttcctgcgctccagctctgtgctggggggccgcatgnnnnnnnnnnnnnnnttccaggagagcaactccttgcgcccggtcgcctgccgccactgcaaagccctgatcctgggcatctacaagcagggcctcaaatgccgagcctgtggtgtgaactgccacaagcagtgcaaggatcgcctgtcagttgagtgtcggcgcagggcccagagtgtaagcctggaggggtctgcaccctcaccctcacccacacacagccaccatcaccgcgccttcagcttctccctgccccgccctggcaggcgaggctccaggcctccagagatccgtgaggaggaggtacagaccgtggaggatggggtttttgacatccacttgtaatagatgctgtggttggatcaaggactcattcctgccttggagaaaagacttcaaccagagcaggaagcctgggggtgttggggctggagactggggctgggggtgggatatgagggtagcatgcagctgagggcagggccagggctggcgtccctaaggttgtnnnnnnncttgtgaatatttgtattttcnnngatggaataaaa

SEQ ID NO: 11126 - DNA, 731 bp, Macaca Fascicularis
  misc_feature (1)...(731): n = A,T,C or G
ctgctgtggctcccagaccgcagagtaggcctggccggacaggccctggtgccgaatttctcacctgtccttgctggggacaggtttgtgcctcgacacgaagacgaacttgagctggaagtggatgaccctctgctagtggagctccaggctgaagactactggtacgaggcctacaacatgcgcaccggtgcccggggcgtctttcctgcctattacgccatcgaggtcaccaaggagcccgagcacatggcaggtagcgttccctgcctggcctgtgcccccagccaccacatctgtctgccccgacttgctgctgggtgaacgtgtactccagatcttagccagacaggtggggggctgagtggaggtgattttaggtccttttcacgatcgagcaaagtgaggcccggccaagttgggcagccagggattgtggcagcctgtgtgggctctgccattccctgtgcctcacccgccctcctttgcttggctgctcagctccctcctgctgtttctgcccctcctcaattcacacttgctttccagccctggccaaaaacagtgactgggtggnnnnnnnnnnnnnnnnnnnnnnnnnnnnnnnnnnnnnnnnnnnnnnnnnnngcaatgacgtcctctgtgccgctatgcaaaaggtacctgagccctctcccttctcctcccttggatgctccctggggcagnnnaatacaggtgtctagaggcag

SEQ ID NO: 11127 - DNA, 692 bp, Macaca Fascicularis
  misc_feature (1)...(692): n = A,T,C or G
aatgaaaaaaaattttttttgtttttaagaaacaagaaaacagaactgcctttgcactaaattagtgacttggacttttgcccagtgaagacaggctgtgacactctggatgtctcggtgtgtgtagacacacatcgtggactcctaacgcaggaaggacttcaaacttatgctgagaccttggggtcaaggaacatttcattgggttttttgtccgcccccatctcccttgctcannnnnnnnnnnnnnnttaattctcctgctgccacnnnnnnnnnnnnnnnnnnntgtacagtttacagttgaagagcaaacagaaaggttttctcttggtgggatatgcagaacttgggatgtgtgtatatataaatatataatatatataaatatatataatactgacttaaaaaatcaaatcccccgacatacattttttttaatctgtgccaaaaatgtgttttcagaggaaatcttattttcatattcagactttgtattnnnnnnnnnnnnnnnnnnnnnnnnnnnggnnnnnnnnnnnnnctgctcccgcgatgtggaagtgtcacatggcacctgtacaaaaagactggctaacccctcttcctgttaccttgacctcttccccaacttcctaacacttattaatttatgaaactgtttttctcagcngnnagttttgttttgtgtgtcc

SEQ ID NO: 11128 - DNA, 621 bp, Macaca Fascicularis
tgaagaaagtcaggctgccctcccgctgtgaaccccctggaaccacctgtactgtctctggctggggcactaccacgagcccagatgtgacctttccctctgacctcatgtgcgtggatgtcaagctcatctcctcccaggactgcacgaaggtttataaggacatgctgggaaattccatgctgtgcgctggcatccccaactccaagaaaaacgcctgcaatggtgactcggggggaccgttggtgtgcagaggtaccctgcaaggtctggtgtcctggggaactttcccttgcggccaacccaacgacccaggagtctacactcaagtctgcaagttcaccaagtggataaatgacaccatcaaaaagcatcgctaacaccccaccaagagttaaataactgtgtgcttcgaacagaaaatgcacaggagtaaggacgctgatgacccgtaaagtcatatttgactttacctttcctcagagatatatttaaacctcatgccctgtttgtaaaccgaatcaaagttggtaaagacctaaaaccaaaacaagtaaggaaacaaaaccctcagtgctggagaagactcagtgagaccgtcactctcaaacactggaagtg

SEQ ID NO: 11129 - DNA, 783 bp, Macaca Fascicularis
  misc_feature (1)...(783): n = A,T,C or G
cagtatgagcnnnnnnnnntgatcgcgcacgtgggagtggcagactccggtcattactgtgtctatatccggaatgctgtggatggaaaatggttctgcttcaatgactccaatatttgcttggtgtcctgggaagacatccagtgtacctacggaaatcctaactaccactggcaggaaactgcgtatcttctggtttacatgaagatggaatgctaacagatatgcccaaaaccttcagagattgacacgctatcattttccactccgttcctggatctatggagtcttctgagtcttctaagagattttgtaatgaaagannnnnnnnnnnnnnnctatataactcagccttatttataatcagggatattaccaaaatatttaacaatgagggtcctcaggtcctgatcagtcagaatggatgctttcaccagtggactcggccatgtggctgctcagtcctgggtgcttcctgctgtgcaagacgttagccctttagttagcaggctgtggggagtccaggtgctcccagtggggagagcagcggcagtgggaggcatctgggggccaaaggtcagtggcagggggtatttcagtattttataactgctatgaccagactcatgtgtactggctgaatatcagtgctgtttgtaatttttcactttgagaaccgacgttaattctatataaatcaagtgtttagtaactgttattcatttattcagcaaatatttattgatcacctattctccataaaatagtgtgataaacacaatc

SEQ ID NO: 11130 - DNA, 881 bp, Macaca Fascicularis
  misc_feature (1)...(881): n = A,T,C or G
gaagagcaacacgattctggnatcccaggagggnnnnnnnnnnnnnnnnnnnnnnnnnnnnnnnnnnnnnnnnnnnnnnnnnnnnnnnnnnnagtcactggataaagagcacagatgtatcgtcagacatgagaataataaaaatggagtgatcaagaaattatctttcctccaataaagacagatgtcnaccacagggatcccaaagacagtttttcaaaagacgcaaatgatgtcaccacagtggatcccaaagacaattattcagaagatgcagannnnnnnnnnnnnnnnnatcccaaagacaattattcagaannnnnnaatgatgcactactgctgcagctcacaaacacctctgcatattacatgtacctcctcctgctcctcaagagtgaggtctattttgccatcatcgccgtctgtctgcttagaagaacggctgtctgctgcaatggagagagatcgtaacagacggtggcacaaggacgccatctttttctcatcggctattgtgcctagaagtgtcttctgaggatctagttgggctttctttccgggtttgggctatttcagttctcatgtgtgtactattctatcattgttgtaaaatggttttcaaaccagtgggcacacggaaaacctcactnngtgatgacaatgaggaatagccatggcagtccccagcaccactctctccatagtctccacagctcctccnnnnnnnnnnnnnnnnnnnnnnnnnnnnnnnnnnnnnnnnnagcttctagccttgtccctcccttagtgttctttaatnngataactgcctggaagcctttcattttacatgtcctgaagcagccttctttgctagttgaattacgtggtgtattttccta

SEQ ID NO: 11131 - DNA, 171 bp, Macaca Fascicularis
cagacacccagctgccgaggcaaaaaggagtcaggcgctccctctttcttgaagagggtagaagtcagggcgccggagcccgggcctggaacgccctcacccccaacctccagtctccgcgttttgcgattttaattttggcgggaggggaagcggatgagaggagagaga

SEQ ID NO: 11132 - DNA, 751 bp, Macaca Fascicularis
  misc_feature (1)...(751): n = A,T,C or G
ctgannacaacannnngagtgaggaggaaagaggcagcagcagannnnnnnnnnnnnnnnaatacccnctggnnnnnnnnnnnnnnnnnnnnnnnnnnnnnncnnncgacctggattnnnnnnnnnnnncttnnnnnnnnnnnnnnnnnnnnnnnnccacaagcccttgagggctctgagtccaggnnnnnnnnnnnnnnngacatccttttaggtttcctagcttaacacgtgcaaggaaaagcatatcaagcatgtcaggcagcacaatcctaccacagtgaaaacttatgttaaaggagtgagtcttttccannnnnnnnnnnnnnnntttgcctcaatcaaaagtgaccctacagtttgaaagaaaaaaaaaaatgtgtaaaaaggaaggtttctttagctttagcttcttggcccaggaatttttcctnnnnnnnnnnnnnnnnnnnnnnnnnnnnnnngaaggagaggttcccgtttcattagcagtaagtttctgctctgccataccaccaggctgcctgcctctgggaaaaccctgttccttttgatcgaatctaaaagggggactgtgggtcccttgtagnnnnnnnnnnnnnnnnnnnnnnnnnnnnnnnnnnnnnnnnnnnnnnnnnnnnnnntgggagatttcagttaacagctatttcggcttccaaactctggtaatagttgtgannnnnnnnnnnnnnnnnnnnnnnnnnnnnggccaagaaacaatgtgtatgaa

SEQ ID NO: 11133 - DNA, 724 bp, Macaca Fascicularis
  misc_feature (1)...(724): n = A,T,C or G
gnnnnnnnnnnnnnnnnngcagagtgtcaggccatnnntnatggatgagtatgagaagactgaggaagaattacaannnnnnnnnnnnnnnnnnnnngagaaatttcaaaatcnnnnnnnnnnnnnnnnnnnnnnnnnnnnnnnnnnnnnnnnnnnnnnnnnnnnnnnnnnnnnagctaaaaacactctctgcctgatacagaacaagctcaaggaggaagagaagcgcctgctgaagagtggaagtaacgatgactcggacgtagacatccaggaggatgacgaatccgacagtgagttggaagaaaggcggctgcccaagccgcggacagccatggaggtgctcatgcaaggaagacccggnnnnnnnnnnnnnggcacgatgcaaggtggagactccgatgacaatgaggactcggaggagagtgaaatcgacatggaannnnnnnnnnnnnnnnnnnntgatgatttggaagatgagagcatttctctctcaccaaccaagcccaatcgaagggtccggaaacctgaacccctggatgagagtgacaatgacttctgaccctcttgccaagggaccctggcagattaaaaccctcagacttgtaggtaaatgggaacttagaaggttagnnnnnnnnnnnnnnnnntgttcactaagctggctggactcatgattactgaagcaatacttatttctgcttcagcctcctatgttgcatcc

SEQ ID NO: 11134 - DNA, 788 bp, Macaca Fascicularis
  misc_feature (1)...(788): n = A,T,C or G
tcggggtgagatgggggtagaaatgccttttattcttgagttcacgtaagatacaagttttagacagggcttgaaggactggattggccaaacctcacatcagccatcagagctgtcttccaaggagacacaccccaaatcctggctacatcccagcctgtggttacagtgcagacagttaggccatgtgagccattgttgccagcacagcacgtcctccccctatagaccagtgccacagggagtgcctgctgccccacctgactgtggccccctccccgatccatccatctccagggagcaagacagagacccaggaatggaaagcggagttcctaacnnnnnnnnnnnnnnnccatcagttgcccccagtacctctaagcaagtagctttccacatttgctataagatcagaggagagatggtgttgggagccctttggagaacgccacattctcccagaccccctgcatctatcnnnnnnnnnnnnnnnnnntttctctgatcttgtgctcagcatgatacttttttaatagaagtcttctcttttgtgcactctgctaatcatgtgggtgagtgagtcgaacagctgggagcacctgtgctagttttacagattgcctcctaatggcgcggctcaaaacgaaaccaagtggtgaggacttgtttctgacccactggtctctaccaccacaaagaagctagtttaggagaaaccagcttttactgttttttaagaattactgcttcaccctgtcaagttaacaaggaatgcctgtgccaataaa

SEQ ID NO: 11135 - DNA, 763 bp, Macaca Fascicularis
  misc_feature (1)...(763): n = A,T,C or G
gacaccacaattgtgcnnnnngtgnnnnnnnnnngccatgactgcgnnnanggctctggccatgagctctgcccaggcccacaagcccttcccctgggctctcccaggcagggagaatggggagagggacctccttgtgtccggcagagacctgtggacctggcctccccactcccagctctcttgcactgcaggccctggggccagcccgcacacgccatgcctcctgtctcaacactgacagctgtgcctagccccggatgcccgcacctgccaggtgctgcccctggggcaagggccccagcagccctacggtgaccgccacactgtgccttacatctgccaggggcccgggccgtgctgtccctgcagcacgcctccttgcagggatctgagccaccctccccacacagccctgcaccccgcccctggggttggcagcctcagttggcccctggcagaggaacaaggacacagacattccctcagtgtgggagcaggggacacagggagaggacagttgtccctggggagggccccctggccccaggcaaccttagcccctcagaacagggagtcccaggacccagggggagtctggggagcctgtctcttgtggcttcctggggtgggaggcacatgggcacagcaataccctagggaaagtgggaggtggtgctggtgctctctctaggcccaccatgctgggagaggcggacggggcctggggctccagcctgggactgctgcgatggggtatcac

SEQ ID NO: 11136 - DNA, 762 bp, Macaca Fascicularis
  misc_feature (1)...(762): n = A,T,C or G
annntaagactgctgggaaggaaacaggccccattttgtatatagttgcaacttaaactttttggcttgcaaaatatttttgtaataaagatttcnnnnnnnnnnnnnnnnnnnccggtgttcagtattcttgtctttgtgagcgtgtcccgggaccgcgtcaggggctgcccgccctcctgccaaggcctggaagaggattgaatggaccccagggtttggaaacaacctacagcatttgagcttctcacttaggttttagagacatacgattttggtttcccctggctcagaaggagccagtgtaaggttgagataaaattccatacagacaactgagtttggatctcggctctgctgctttgtagctgtgggaattcaaacagcacctctttgagacttgggccccacgtctgcacagtggggcaggaagagtccctgccagggtgactgtgcggattcaaggaggctgggagcactgagcccatgcttggcactgggcaggccatcactgaggcttgtgtctttccttcctgccctgaccctgcatagctgagtctcgtggcctcttacactgatgggatcttggacacctggctccccctcctggggcctcactttccttccccaccaaatgcagaaatctaatgcttgtcttgtaatatccttgccagatgactgatgtcaagtgctggtttatagnnnnnnnnnnnnnnnnnnnnnattcccctctctccctccactagatcactaatgatatta

SEQ ID NO: 11137 - DNA, 746 bp, Macaca Fascicularis
  misc_feature (1)...(746): n = A,T,C or G
cataaccatacattgaaattcatacaaaaaataatgaccagtaatgtcatttcaaatgtaaattcctgaatgtaccactaaaattgnnntagttgctatcagtttgtttatatactattctaaaatattttactagttaaataattttttaatcttcctgatactgaaagacagcgtatatttttttcaaaataaagttttaggaaatttgctttttcctttttctttcaggttgatcttctattaaaatgattcctgtttattagagaaggaaaatttagttactatacatcttatatttgcacagtttattaaagttagtgccctaaagttacctgcttttctttgtggcatatgaggcatctgctgtcttcagattttcttacagttttgtgatttatagtgctaatgattggtgtgccttattctctgagggaggatggagggttcataaagcaatgccttatccacagcagattttcttgtatattaagttaaacagaattctgtataaattattatgaaggttcaagttctttaggggagtttttttttcttgttgttaacaatttggttgcaatctattatattttgcaattgactagatattacagtctacttatttttcaagagtaattattatataagtttggttggtataatggtaaatattatatagtgggggtaaatttgattagagttttttcttaagcatctgactttagaaatccgtnnnaaataaagtc

SEQ ID NO: 11138 - DNA, 749 bp, Macaca Fascicularis
  misc_feature (1)...(749): n = A,T,C or G
gccnnnnnnnnnnnnnnnnnnnnnnnnngaaggtgacaggcaaggaccccctggagcagttcggcatatccgaggaggccaggttccagctgagtggcttgcaggcatgagcacagggcatggcggtcggcgtgcagctggacaggactggccctgcccggccgtgagtcgcttggccatgcctggattttgtttggtttttggtttttgnnnnnnnnnnnnnnnnnnntgcccaggatagagtnnnnnnnnnnnnnnnnnnnnnnnnnccttgaccttctggactcacgtgatccccttgcctcagcttcccaagtcgcnnnnnnnnnnnnnnnnnnnnnnnnnnnncagccatcacacctggatttcggtgggaggtttttggtttggagacatccaaagcctgaagccagctgggtgtcggcaggggctgcattttgtgaaactgcccagcaagctgccctctccggggccccaggacccacctgactggnnnnnnnnnnnnnnnnnnnnnnnnnnnnnnnnnacacgccttcccacgggtgccccgcctgagttgtgtgcatccggggcctggcgagcccctgggctggtggcgtggcgccctgcccctgctgatgaatgtacagagccagacaaagctgtgaatggcatgggggccgagcccccaccagctgtgaattctcctgcagacaggagggccctggttgtgcgcctggggaagtggttgccctggggtcagggtgctt

SEQ ID NO: 11139 - DNA, 718 bp, Macaca Fascicularis
  misc_feature (1)...(718): n = A,T,C or G
catgatgagacaaacannnnnnnnnnnnnnnnnnnnncaggctccttcctgcacaagtggtcatcctctgatgacatccgggtcctcccagcccaaagccgggccctcgggggtcctcctgagtacctgggacaaagacacaggttggaggatgaggcggacgaggaggaggctgaaggtggtggggggctggccagccttcgccaattcttggagagtggggttctggggtcaggtgggggacccccacggggccctggcttcttccgggaggagatcaccaccttcatcgatgagacacctctgccttctccgactgcctcaccagggcactctcctcgtcggccccggccactgggcctctcaccccgccgactctcccttgggtcccctgagagcagagccgttggacttcctttgggactaagtgcagggagacgctgctccctgacgggggccgaagaaagtgcaagggcttggggaggatcctggggcccaggcaaccctatctttccccagctgaccctgtgagcccaagcaggcctgctgaactcagaggaggannnnnnnnnnnnnnnnnnnnnnnnnnnnnnctgagagtagggcagctgcctccagactctggggagatgggcgctagatttggggctcagaaggccctgctctctcccatccaagtgaccagatgccctactcaccttccatcacccctagcaat

SEQ ID NO: 11140 - DNA, 757 bp, Macaca Fascicularis
  misc_feature (1)...(757): n = A,T,C or G
aggtgccgatgcaannnnnnnnnnnnnnnnnnnnnnnnnnnnnnnnnnnnnnnnnnnnnnnccatggcacatgccagcccagcagccaggcaggcttcacctgcgagtgccaggaaggatggatggggcccctctgtgaccaacgnnnnnnnnnnnnnnnnnntggaaataaatgtgtacatggcacctgcttgcccatcaatgcattctcctacagctgtaagtgcttggagggccatggaggcgtcctctgtgatgaagaggnnnnnnnnnnnnnnnnnnnnnnnnnnnnnnagtgcaagcatgggaagtgcaggctttcaggcctagggcagccctactgtgaatgcagcagcggatacacgggggannnnnnnnnncgagaaatctcttgtcgaggggaacggataagagattattaccaaaagcagcagggctatgctgcttgccagacaaccaagaaggtgtcccgattagagtgcagaggtgggtgtgcaggagggcagtgctgtggacctctgagaagcaagcggcggaaatactctttcgaatgcactgacgggtcctcctttgtggacgaggttgagaaggtggtgaagtgcggctgtacgaggtgtgcgtcctaagcacgctcccggcagctcnnnnnnnnnnnnnnnnngtatacttcttgaccatgttggactaattaaggcttcatagtggaaatatttgaaatatattgtaaaatacagaacagacttnnntttattatgag

SEQ ID NO: 11141 - DNA, 1124 bp, Macaca Fascicularis
  misc_feature (1)...(1124): n = A,T,C or G
tgggcnnnnngccattccagtagcaaagnnnnnctgcactgtatttgccaatgannncaatcctgaatctcataaatggctgttgcacaactgtaaattaaataaagtnnnnnnnnnnnnnnnnnnnnnnnnnttggatgggaaagacttcctccaaggaccagtcaaagaagagttaatacagctgatgagtctgtcaaaagaaagaaaaccctctgtgcacattgtcatgaacttgccagcaaaagctatagagtttcctagtgctttcaaatggcttttannnnnnnnnnnnngcagcaatgagtnnnnnnnnnnnnnnnnnnnnnnnnnnnnnnnnaaagatgctaaccctgctaaggatgttcggcaaagggctggagctgtgttaggcatttctatggaggcatgcagttcagttcacctggtaagaaatgtggccccgaacaaggaaatgctgtgcatcacctttcagattcnngctgctgtactctacaagaaccagaccaaaaatccagagaatcatgaagatccacctcttaaacgtcagaggacagctgaagccttttcagacgaaaaaacacaaattgcttcaaacacttaattggaaatgttttctccatctccctaccagacttacatgtagtgaaatataatgtgtattatttaataaaattttagtgttcagtttttactattgaacccttatactttgccttattttataaattgaggattaccaattaaactttaagtctaccaaacacattccctattatctaaattagaatatacaattattttataacatatctaatttttattaaaaatgaataaatattttctctcagggaaaatcacttttgaaggcagggtgattgagtactgactaagaagttactaacaccactttatagttgtcctttacataactactcctttactgccgattaactatcaccataaaagtaataaaaaatggaattatttagaacagggcaggcaaactacatcctgcaggccaaatctggcccaccacctgttttcatatggtctgtggcctaataatgttcttacattttccattggtgaaaaataagagaacattttgtgacatgtgaaaa

SEQ ID NO: 11142 - DNA, 758 bp, Macaca Fascicularis
  misc_feature (1)...(758): n = A,T,C or G
agccaaacacaaataagtatctgtggcctagtgataggactctaccttttctcctggaagcagttactgaacatccaggagtacaaatccttcccatcattcccatgtggaaaggcctgtcccatcaaggagaacatgtggcatctctgatccttaacattgagaacatttgttggatatgttcgtttattcagtagtcatttattgagcacctactgtacatgccttggtactgttcaagctgtgggagatatagcagtaaacaaacaatatagagcagaaagttaaatattttatggttcatatgtgaaaaagtaattatgtttataaataggctaactgctggatgttaccatcaagtaagaaagcaacaggtaagataggctttctctctccctataccaagtagtttatacctacacagattgggcaattctagctaaagaaaatatatttaaagtatttcttaggccaggcacannnnnnnnnnnnnnnnnnnnnnnnnnnnnnnnnnnnnnnnnnnnnnnnnnnnnnnnnnnnnnnnnnnnnnnnnnnnnnnnnnnnnnnnnnnnnnnnnnnnnnnnnnnnnnnnnnnnnnnnnnnnnnnnnnnnnnnncggcatgtggctatactcagctactcagggggctgaaacaggagaatcgcttgaacctgggaggttgcagtgagctgagattgtgcagttgcactccaacctgggcaacaagagcgaaatcccgtctaaaaaaaaaaaaaaa

SEQ ID NO: 11143 - DNA, 727 bp, Macaca Fascicularis
  misc_feature (1)...(727): n = A,T,C or G
gacatgtatgnncnnnnnactgtgtgtgtagatttatagtttttgtagtggcaggaataaaacaatccnnnntacatattcnnnnnnnnnnnnnnnnccctcaccccccaaaacaagttgatgagagggttttattcttcccatgtagctgtctatgaggaattggctgtgtctgggtgggttatgggatgtgggcatccctgggttcttagaagcagctcttatgctacttatagagatgggattgattttatttttttaaagtgcttaattcaccattacgagaannnnnnnnnnnnnnnnnnntgcagcccagctcactttgaggaagaagnnnnnnnnnnnnnnnnnnnnnnnnnnnnnnnnnnnnnnnnnnnnnnnnnnnnnnnnnnnnnnnnnnnnnnnnnnnntttggcttgcctttataatgcccactcccttctccccggctccccagtgatggggcatatatgagagaggagtgtttttctatcatagatgccatagggtaaagtttggggatgaaggagagcttaaaggcatttcagttaagttagaaaactgacnnnnnnnnnnnngaaatctttgctacttttcccaccccaaacagcctgggtcctgacatcttctgccctgggcccccttctcttgatgtggaaagtatgaatgcagtatttatagatttctaaggttttaacatccagtatcaggaggaatatcagaaata

SEQ ID NO: 11144 - DNA, 591 bp, Macaca Fascicularis
  misc_feature (1)...(591): n = A,T,C or G
ggctctggcaccctgtggagctggtctgtgtccccgagaagaagagtcagtcacaaggggatctccatctgatccagctgtttgaagcttctcattgttctcnnnnnnnnnngcaggaaacttgagatcctggtgaagacttctggaggaatccctgacggtcttccataggagacgatgccgtgggccacattgttacacagcagggggcctccggagtcccccctgaaggcagacttccgttcccgccggtcccccnnnnnnnnnnnnnnnccgccgtcgtagaaagagaagaggcggaggcactccctatccctctgcactctcagctgcacctctcggagtctgtctgttctcctcgtctggctgaccaagccccagccagccacagtgcactgcgtcccgggtctcagtctctcctgggtgctaggcagagccactggtctcacatttcgattccgtctgactcttcggctcagctgcaataacatgatgtcattatggatggtctgctgattatatccagggtgggggatggctctgcgcgcagtgatatgttgctgggtgttttcccgtctccggatattgtgg

SEQ ID NO: 11145 - DNA, 777 bp, Macaca Fascicularis
  misc_feature (1)...(777): n = A,T,C or G
tgatgtggcagcaagaggtctgatggagagcccgccagactatnccgcgcctccccggggccgatttggcatccccctgctgcccggtgcacctgaaacgccttctcatcgtggtggtggtggtggtccttgtcgttgtggtgattgtgggagccctgctcatgggtctccacatgagccagaaacacacggagatggttctggagatgagcatcggggctccggaagcccagcaacacctggcccggagtgggcacctgggtaccactgccaccttctctgttggctccactggcctcgtggtgtatgactaccagcggctcctgatcgcctacaagccagcccgnggcacctggtgatacatcatgaagacagctccggagagcatccccagtcttgaggcgctcactagaaaagtccagaacttgcagaccnnnnnnnnnnnnnnnnacctctaagctggaccaggtggaggggcgagatgcaggctcagcaccctccagaggggacctggccttcctgggcatggccgtgagcaccctgtgtggcgaggtgccgctctactacatctaggactcctcaagtggtcagtggaagccccagggggacaggaaacgccctgggcaaagggtcttttgcagctttagcagacatgcaagaagctgcttctgcccacaacgcagggacaggccccggagaaattggagtttgggtagaggatgggagcgggcagaggtggtgcccaggggccctggaactcctgccacaacagaataa

SEQ ID NO: 11146 - DNA, 651 bp, Macaca Fascicularis
  misc_feature (1)...(651): n = A,T,C or G
taccaaagcctggacggttgggagaagnnnaagctcacagaggannntttggagccgagggtggagggaaggaccagtagggtcacacttatatcaacgtttggagcctacattttgtttggggtgggatggaagcaggtgatattnnnnnnnnnnnnnnnnnnnnnnnnnnnnnnnnnnnnnnnnnnnnnttggggtgcaagaccagattgggtgagtggacaggcaagtccccaggctatagcctaagttaacagcagagggcccgtcaggcctcacacactcatcaccgcagttagaggccgctcaggggctgctggtggnnnnnnnnnnnnnnnnaattttgggtgacctgggttccgggggcnnnnnnnnnnnnnnnnnnnnnnnnnagactggcgccaagctgctgcggacactgagctcacccacagagcccgtgaagaggtttggccgctaccactttgtgcctggaaccacagctgtcctgacccaaaccgtgaannnnnnnnnnnnnnagttagtggaggaaactgtgcaggctatggaggtggagtaaaataggttgaggcttagagcttggaacaagggggaataaacccagaaaatacagttaaaaaaaaaaaaaaaaaaaaaaaaaaaaaaaaaagg

SEQ ID NO: 11147 - DNA, 757 bp, Macaca Fascicularis
  misc_feature (1)...(757): n = A,T,C or G
tacgagttggcaagggtnnggccgacacgcagatggtcgagtggagcccatccatgctgtagtgttgccacgagggaannnnnnnnnnnngtgtgtggagacgctgcagaagcggaccagggttggcaaggctggcaccaacaagccccccaggtgccggggaagaggggcccggcgtgggggccgcccaccccctcggaatgtgtttgacttcnnnnnnnnnnnnnnncaaggccaggctcctggggccctagaggccggggcagccccggcggggaggaggagcaaggacannnnnnnnnnnnnnnnnnnnnncaagcgggcgctgagcctgcggcnnnnnnnnnnnnnnnagaagnnnnnnnnnnnnnnnnnnnnnnnnaggagcatccaggaggctctcacccgcaacgctggccggcatagcgtggcgtcagcccagctgcaggagaagctggcaggagcccagcgccagctggggcagctccgggctcaggaannnnnnnnnnnnnnnnnnnnnaggaaggcagacacccacaagaagatgactgagttctagagaaccctgcaagcactatggatgaagtgtgggannnnnnnnnnnnnnnnnnnnnnnnnnnnnnnnnttgcccaaggaggggccggcctgctggcctggggcgtgcggaccctgctgagtggagacggggctgcagggtcctgtctggacactttcttgcccacctgccagtgtcttgggcatttccnnggcaaggac

SEQ ID NO: 11148 - DNA, 741 bp, Macaca Fascicularis
  misc_feature (1)...(741): n = A,T,C or G
aagttcccgtgggtcacttgctactcctaacagaaggttcttctgcctaagaagttataccatgctttgttatttcttttcctgttggagccttaccttaatttcatcttctgtaacagtgaagannnnnnnnnnnnnnnnnnnnnnnnnnnnnnnnnnnnnnnnnnnnnnnnnggatttgacaccatctgctatggtgtctggaggataaagattgggcatcagttcccccttcagcttggactggtagcagtcatctgcattcaagggttcagcagcatatactttcacactaggtttcagagcctgggaagaggaatattaagacatcttacaacaaaccacaacattgcctgtatgtctaaaagaaaataggggcagggtgtggtggcttatgcctgtaatcccaacactttgggagcccaaggcaggtagatcagctgaggtcaggagttcgagaccagcctggccaacatggtgaaatgcagtctcaactaaaaatacaaaaattagccaggcatggtggtgggcacctgtaatcccagctacttgagaggctgaggtaggagaatcgcttgaactcgggaggcataggttgcagtgagctgagatcacaccactacactccagcctaggcaacagagctatactatctcaaaaaaaagaaaagaaaataggaacaataagtaatacatttctgcccaagtaagagcctttcattttatggatataatgaaaata

SEQ ID NO: 11149 - DNA, 738 bp, Macaca Fascicularis
  misc_feature (1)...(738): n = A,T,C or G
agcagacgaannnngtcccagcagatcgnnncccgcgtngnnncggcggccacgcagctgcggcatttcttcctggtagaagacctcnnnnnnnnnnnnnnnnnnnnnnnnnncttctacatcttgaccttcgnnnnnnnnnnnnnnnatggtttgacgcttctcattctgggagtgatcggtctattcaccatccccctgctgtaccggcagcaccaggctcagatcgaccagtatgtggggttggtgaccaatcagttgagccacatcaaagctaagatccgagctaaaatcccagggaccggagccctggcctctgcagcagccgcagtctcnnnnnnnnnnnnnnnnnnnnnnnnnnnacggtgtctctgcccgtaggacgcctgcccccacccccagcagccctctgccctcctccatctcccgtccgttcccacccactcccctcctcggcctgagtcttttcccggtgggtgtcaggatcactcccactagggactctgcgctaattacctgagcggccaggactacatttcccaagaggctctgctccaggagtccaggaaagacgaggcaccttggccgcggggcctgctgggacttgtagttgcctagacagggcaccaccctgcacttccggacccgccgctggaggcgctgtgaggcgtaggtgtctcctggacgctactagcccctacgccggggctttgcatggggcccaggggaggcctgagc

SEQ ID NO: 11150 - DNA, 702 bp, Macaca Fascicularis
ccacacacacggccactgcggccatgtgggcctgtcagcactgcacgttcatgaaccagccaggcacgggccactgcgagatgtgcagcctccccaggacctagggtgcctgccctctgctggctaggaccgggcccagcccagcccttcctgaagccagaagcgttgctcagtgtgttccctataactgccccacagtgggcagccctggagggacaagggctggctgtcctgggctccctgacccactgaagcttctcagcacgttcctccttggagagcgggtgccacggctggtattcagcacgctgagtgcagtcccagactggaaacgcagagcggcccctcatgcctaatcctgttgacaagccccccactgtgttggaaggacctctcacctctatacggcacctgcaattggggagcatagggaggggctgatgctgccaccacccagccttttccttcctttcaatgctttttgtttggcctccccgccccccggcgtttttctggctgggagctcttggttgcccctggtctgactgcttggtggcagacaccctgcctgtgagggccactttcctctgccgggagctgtttgggggggatgccgtggccctggacacagctcccctctgcaggtctgcaggtcggtttgctgcctgccctccttctctcacccgatgtccaggtgggatt

SEQ ID NO: 11151 - DNA, 771 bp, Macaca Fascicularis
  misc_feature (1)...(771): n = A,T,C or G
atatcacataaagatctgtttcagaatgtaaaaagtacatctagatgtgttgcagaaagcaagtatccagtatgactggcatnnnnnnnnnnnnnnnnnaatcacttgtaaatagtctgcttttaaaggagggcatgttccgttttctgtgaattaaaacacgctcatgtgtggacacacacgcacaaacacacgcacgtgcgcacacagtgacagaagggatttgtgttaattttctttcccctctgaccttcttacggtctcttggtccctttgcttctgttgtcagtgtgttgaattgcaaaccgtgtactgctgtaaatactatgtttacttnnnnnnnnnnnnnnnnnnnnnnnnnnnnnnnnnattaatagtaatgaatcaatgaataannnnnnnnnnnnnnnnnntgaggctttcnnnnnnnnnnnnnnnnnnnnnnngagtgcggattgccagagacacctnnnnnnnnnnnnnnnnnnnnnnnnnnnnnnnntggnnnnnnnnnnnnnnnnnnnnnnnnnnctgctgcttggtggaaaggaaacggagaggatgaaggttnnnnnnnnnnnnnnnnnnnnnnnnnnnnnntttattgtgtgtggtggtggttgtggttcttataataatgcaagcatacccccgcttgagtctcaattgaagataaaagaatgtactgagtaagcaaagccagtggagagtatttcacgaaaatactttgtaaatgaaatgccagtagtgttcaaagttgtattttaaaag

SEQ ID NO: 11152 - DNA, 712 bp, Macaca Fascicularis
  misc_feature (1)...(712): n = A,T,C or G
gagtaatctaatnnnnnnnctagctaatggaaaatgattttacttagcagtgttatcttggtgtgttaagagttaggtttaacataaaggttattttctcctgatatagatcannnnnnnnnnnnnnnnnnnnnnnnnnnnnnnagttggtaagcttccaggaaaaagtacaggcagaaagagtttgaaacttgaatagctcccagatttcagtcttttcctgtttttgttaactttgggttaaaaaaaaaannnnnnnattggttttaattgaaggaaagatttgtactacagctcttttgttgtaaagagttgtattgttcttttcccccaaagtggtttcagaaatatttaaggagatgtaagatctttacaaaaagacacttgatatttgttttcaaaccagtatacaagannnnnnnnnnnnctgcatagagggaggagagggaaaatgttttgtaagaaaccaatcaagataaaggacagtgaagtaatccgtaccttgcgttttgttttgatttaataacataacaaataaccaacccttccctgaaaacctcacatgcatacatacacatatatacacacacaaagagagttaatcaactgannnnnnnnnnnnnnnnnnnnnnnnagaattgcaattttaacacacataaaggataaacttttagaaacttatcttacannngtgtattttataaaattaaag

SEQ ID NO: 11153 - DNA, 732 bp, Macaca Fascicularis
  misc_feature (1)...(732): n = A,T,C or G
tgcccaactgctgcgtgatccaccaggatgacttcttcaagccccaagaccaaatagcagttggggaagannnnnnnnnnnnnnnnnnnnnnnnnnagtccctggacatggaggnnnnnnnnnnnnnnnnnnnggcctggctgagcagcccacagaagttcgcccgtgcccacggagtcagcgtccagccagaggcctcggacacccacatcctcctcctggannnnnnnnnnnnnnnnnnnnnnnnnnnnnnnnnnnnnnnnnnnnnnnnnnnnnnnnnnnnnnnngtcccgtatgaagagtgcaagtggaggagaagtacccgcaactacaccgtccctgatccccccggcctcttcgacggccacgtgtggcccatgtaccagaagtataggcaggagatggaggccannnnnnnnnnnnnnnnnnnnnnnnnnnnnnnnnnnnnnnnnnaggagctctnnnnnnnnnnnnnnnnnnnnnnnnnnnnnnnnnnnnnnnnnnnnnnnncaggaatcagccccctcctcggcttgcccagccaggccacagggacccggacgcggatgcggccacagaacagccaggcctgcggcgtcccagccggacattgtgtgactgtttccctaagcgggaggtctgtacgttggagaatggaggccccactcccagttgggtgtcccagagctcagggactgagccccaaggtgcctctgtaactcgctgcagcta

SEQ ID NO: 11154 - DNA, 723 bp, Macaca Fascicularis
  misc_feature (1)...(723): n = A,T,C or G
gcaagatacatggctccagaagtcctagnnnnnnnnnnnnnnttggagaatgtagagtcctttaagcagaccgatgtctactccatggctcnnnnnnnnnnnnnnnnnnnatcgcgctgtaatgcggtgggagaagtaaaagattatgagcctccatttggttccaaggtgcgggagcacccctgtgtcgaaagcatgaaggacaacgtgttgagagatcgaggacgaccagaaattcccnnnnnnnnnnnnnnnnnnnagggcatccagatggtgtgtgagacattgactgagtgctgggaccacgacccagaggcccgcctcacagcccannnnnnnnnnnnnnnnnnnnnnnnnnnnnnnnnnctggacaggctctcggggaggagctgctccgaggagaagattnnnnnnnacggctccctaaacactaccaaatagctcttctggggcaggctgggccatgtccaaagaggctgcccctctcaccaaagaacagaggcagcaggannnnnnnnnnnnnnnnntgcttcctggaaaaccaagggggtcactcccctccctgtaagctgtggggataagcagaaacaacagcagcagggagtaggtgacatcgagcattctatgcctttgacattgtcataggataagctgtgttagcacttcctctaggaaatgagattaatttttacaacagccatataacatttgcactttattaat

SEQ ID NO: 11155 - DNA, 676 bp, Macaca Fascicularis
  misc_feature (1)...(676): n = A,T,C or G
ggcatttatattgttagtttctacagagcaacaaaatatcttcccttcattcatcatagccagatgggaaaatagaannnnnatgctgcctgaaatgtaactgactggaatttacatataaattgaaaaccaaagtccttttctttctattaccaaataccatcaaatgctctgctcactgactttcaaggcagtggatgtgggactggaaggagcaatgactcaacttcacttcttggtactactcttgctcctttgtacgtgaactcctgctatctcagaggctctaaacagcattttgtataacgtgcaaatgccttaccctcctgtacccatcctcttaccccattctccctaccttgtcagaaagaggggctattttcatttccccaatcatgttctgaatttatgtggtagatttgtttccttaaatttgaatctgtgtatgtgtatttggggtgaggggcatgtaaaaaggcagccctcatcactaaagaattaaaagaaatgtacgccttataaaaatgtagagatttaagagtacatatcacactggggctgggtgtggagatgtgtgnnnnnnnnnnnnnnnnttaaaaaaaaaaaaaaaggaacacatccaccaatctgagtcatatagaagtcacgaagtatacagannntaaaaaaaaagctc

SEQ ID NO: 11156 - DNA, 754 bp, Macaca Fascicularis
  misc_feature (1)...(754): n = A,T,C or G
agagaaggggaccgtgattagggnnnnnnnanntcacaaggacaaaaactctttgagtttcggagaggagtgaagaggtgtgtgagcatctgctccctggccnnnnncatggacnncatgttcctctccgcctccagcaacacggagaccgtgcacatcttcaaactcgagactgtgaaagaaaaacccccagaggagcccaccacctggaccagctacttcgggaaagtgctcatggcctccaccagctacctgccttcccaagtgacagaaatgttcaaccagggcagagccttcgccacggtccgcctgccattctgcggccacaaaaacatctgctcgctagccacaattcagaagatcccgcggttgttggtgggtgcctccgatgggtacctgtacatgtacaacctggacccccaggagggcggcgagtgcgccctgatgaagcagcaccggctagatggcagcctggagacggccaatgagatcttggactctgcctctcacgactgccccttagtcactcagacatacggcgcagccacagcaaaagcctacacagacgacctgggtgctgtgggtggcgcctgcctggaggacgaggccagtgccctgcgcctggatgaggacagcgagcacccgcccatgattcttcggactgactgaacttgacctgtgacctctgacccggggagcagagaacactggcttcacagaggactttgtgcattgctgctatgaacttgacctg

SEQ ID NO: 11157 - DNA, 748 bp, Macaca Fascicularis
  misc_feature (1)...(748): n = A,T,C or G
gtttaacatcaggnngaccacactgagtccagtatgccagttggcaccagatgatatggacttggaatgaggccaacagggttcatcaggatgtaagaggagagaggaatccacaggaccaccagagaggagagggaannnnnnnnnnnnnnnagagatagaggaagtggaaccagagaactgggagggaccaaggttgtaagggtggctaagtcccaccataacatccaagggaacctgggaaatgatggctcatttccacccaaccccaggatttccagagcacacagccacaggcctggacctgggacaaagatgaatgaagaacatggactcatgtggatgtggtttggctcaggtgtctctgcagttggcaaggagtcagtactcagtccctgagtgtgggtgaagtttgaggtcttggctgagccgaggagtaatggaccaggtctacctcagcattcaggttcaatggggacaccagtggcttcaaacttcctggtctcatgatgtctttagacaccttacaaatgatggaggattccaaagagtttttgtttatttgagttaatatttgttggtatttaaggcattagagaatgaaactaagaaatgttgtaatttattacctttacaacagttatttatattatatacatttacaacgtttattaatttatattaaagtaacatgaataagccaactctaggttaatataagtagaatgtttgtgaaaaaataagtaag

SEQ ID NO: 11158 - DNA, 1054 bp, Macaca Fascicularis
  misc_feature (1)...(1054): n = A,T,C or G
agtgtggnnnnnnnnnnagctcacnnnnnnnnnnnnnnnntggctcaagtgatcctcccnnnnnnnnnnnnnnnntagttgggactacccacatgcaccaccatgcatggctaattttttgtttttttggcttttctgtttttttaagtagacacgannnnnnnnnnnnnnnnnnnnnnnnnnnncaaactccaagcagtcttcccaccttggcttcctcaagtgttgaaattatagcgtgaaccactgtcaggctcttttgtcagtgctatcaacctctaacatcctcacaccagacaagacaggtgtctgtattacaactttattacaaaattataaagcagagctctgtaacaaaataatacacatttgggtttgctttaacctccaagtaagtctgagaaaatcttaatgtaagccacttgaagtaacaattcacatccaagaaatttccacaaatttatacaatgtatattgagcactagttcctgtacagcttactcttattagtttggatccaactattccaatgtattatgaaccagtcagctatctgtcttttgaaacaagtcttaactgaaatttcagagcaatcagcaaaagctacggaataactgtaagaattagatgtttccatgataattaaaaccaaggatccatgaggggcaggagggaagattcaaagattttaaaaaattaaattttagatcttggttaaatatgaactggaatgggatcctggaactcccaacttttatttggtgtaataaaaatgatgcaaaaaaaaaaaaaaatcagggttgtttgacaccttttttcctaaggggaaactttccccaaagggggataaaagacttaaaaggcaaaatgagtaaacgacctcagttttaattcttactgaggttactaaccagctatcagtgtattattttcgggttggaagaagaggtaaggcttcaacagagnaagcatgttgtaagtagagggccagcttntgcccataagttactgctatatcttaactgaattgcacatacatatatctgttttacag

SEQ ID NO: 11159 - DNA, 1208 bp, Macaca Fascicularis
  misc_feature (1)...(1208): n = A,T,C or G
tggatgatgaaggagatgatgacccagttccnnnnnnnnnnnnnnnnncagcaatattaaaaaaggtcattcagtggtgcacccaccaccaaggannnnnnnnnnnnnnnnnnnnnnnnnnnnnnnnnnnnnnnnnnnnnnnnnnnnnnnnnnnnnnnnnnnnnngaattcnnnnnnnnnnnnnnnggaacactttttgaactcattctggctgcaaactacttagacatcaaaggtttgcttgatgttacatgcaagactgttgccaatatgatcaaggggaagactcctgaggagattcgcaagaccttcaatatcaaaaatgactttactgaagaggaggaagcccaggtacgcaaagagaaccagtggtgtgaagagaagtgaaatgttgtgcctgacactataacactgtaaggattgttccaannnctagttgcactgctctgttanaaattgttaatattagacaaacagtagacaaatgcagcagcaagtcaattgtattagcagaatattgtcctcattgcatgtgtagtttgagtatcgattccaaacctatggctgagtttcttttagtatgatcgaaagtttcttttttctttgctctgaataaaactgaactgtgggttctctgtaagtggcattttgggctttccctcttttttgtaaagcaatttctgcctagtttattgtccagttaactttagtgaccttttgaaagttggcattgtaaataaaacaagttgcaaaaaagttttttggaatagaattaacaaaatattctctttattcatgagttggaaannnnnnnnnnnnnnnnnnnnnnnaatgttctgagtggaattactaggatgtcttccagcctcctgcagtcaaggagtaccactgtattagcctgtaggtagcagggctcccttcattgcatctgaggacttgttttctttttctttaattttatttttaatcctcttagttttaaatatattgcctagagactcagttactacctagtttgtgggtttttgggagaaatgtaactggacagtttgttagcttttcaattaaaaaagacacttaaccnnnnnnnnnnnnnnnnnnnnnnnaatcagtgttcccacgtggggaaaattattcacactacttgcatgtaaaaaataatttaacttttatcattaaaatatgtggtaaaacccagcaaagcatcc

SEQ ID NO: 11160 - DNA, 752 bp, Macaca Fascicularis
  misc_feature (1)...(752): n = A,T,C or G
aattcaagannnnngnaaattcnnnnnntggagaagctttacgatcaggacaaggacgacgatcttcaccacctgggcactattaccagaaatcaaaatatgactcaaatgtgagtggtcaatcatttgtgacatcctcagcagcagacaacatagaaatgcttcctcattatgagccaattccattnnnnnnnnnnnnnnnnnnnnnnnctagaaacttctcttgaaatgaatttcaacattttattgtccaactcaaagtaaacaaatatggagatacttgggatgagtgaaaaattacatcattggacctactgaaggagtttcaacatcccgcttcatctaggtggnnatgattacctgcatgctttgagatcagcagcagtcttcataaacacatttaaaacaagatcctgggtttttgtggtttgacttctctggcgtgttaaaaaaaaacgcaggtttttagtgttaatattgtgtaaatgtccttaccttggggattcatttgaatgatggtattataccatgactgtatacagtttgtgaaattgttgcaagggcaaagacactcataaaaccagcaagagattacagtgctctagaatcagcatatatgaaaataaatgatatctgcatgttgaattggggtgggtggggggagcaagcataatttttaagtgtgaagctttacattaagaaattattaaaaagcttttttcctccgngtatttgctgnnnatcttaatgtt

SEQ ID NO: 11161 - DNA, 699 bp, Macaca Fascicularis
  misc_feature (1)...(699): n = A,T,C or G
tcannnnnnnnnnatgcttaaacacacacctatctcacacacaaactgagtagagaaaagatttgtaccaaacaggatcagaggcatatcaatggactggaaattgtgaaaaaggtataaatatcctagaccttgatcaactcactttaaactggtctctgattcctcatctgtcaaatgggtataagaccctctgtacttcccatggtgattttgagcagcatgtgcataatgtatctgaaaacagtttgacaagcacttgaaggcatttttactaaattattagttttgtaattcagttttatccaggaaaatactttatctcctccgatctgctgaattaatttatatagtcacatgttccatgacacaacgttttaccaaggaaaaatgaagaaattcctaaatttgaaatagcccacaagatctagcgtcatctggagttgctgttattgtcgttgttgtctatgatttggaggatatgtaagtactcgtacatgtgctttaactctgggtgaaaaatcccgaccagtgagtctttaaaaccatattagacacattgggcaaagtactgagcagaagctttgaatgtagctgttgttattttaatgctttgctttctaatgaactttgtatgtccttagcctctgccgggaacagagtgttcatatgctgttagaattttttatgtaaaataaa

SEQ ID NO: 11162 - DNA, 832 bp, Macaca Fascicularis
  misc_feature (1)...(832): n = A,T,C or G
tttcacaacatcaggcaatggagcgagagagtacaggaannntaactccttctggtacattccatcagnnnnnnnnnnnnnnntacatggactttcctaaagttgggggtatgcctttttctgtgtatgggaatgcaatgattcctccagtagcacctatcnnnnnnnnnnnnntatatcccaaatttaatagcactcatgcagtttttaaaagttttatttcaataaaaaatatgctatacatatacactgtaaaatacatggccctaaaatcataggtgtggactggaccctgggcacctcacatgaacagtgtgcatatgaaccagcttggctgatgaggatcagcttgttagcctgcagattccttttcatttggaggaaatcacaagtggccgaaaacaaaaattatgctcccaaatcattctactgatgtgcttgactgaagtgtgtaggctttttgcagaagatcttactaactgacctattttctgtgaacatttgtgactgcccattccccatcatcatccgttttaccttagttagcatttttcttatcatttttctttttttctttccctcttccccttcggacataactttctgttgaagctgttctttggctggttggttttagtactgtaaactgcttctgagcaaacacggaaatttagcaaaattatgtaaacttgatcttgaagttttagaatggcaaataaatgtacaattgtttacataacagaaaaggctaagcagaaagtaaatttcaatatgtcagtatagaggctctactttatgtagaaannnnttaatgtgagatatcaccctccca

SEQ ID NO: 11163 - DNA, 697 bp, Macaca Fascicularis
  misc_feature (1)...(697): n = A,T,C or G
aannnnnnnnnnnnnnnnnnnnnnnnactgtcgactcnnnnnnnnnnnnnnacctcaagacgttnnnnnnnngacacaagtatannnnnatttctggctttttnaattaatctagaaaatgaaaagatggagttgtattttgatgaaaatctttgtactttttaatgttatttggaattgtaagttctatcagtgacttctgaatcctaaaatgccccctctgtagaaccnnnnnnnnnnnnnnnnnnnnnnnnnngccccactatttttattttcttatgtaagtttgcatatcagtcatgactagtgcctagaaagcaatgtgatggtcaagatctcatgacattatatttgactttctttcagatcatttaggatacttttaatctcaatccatcaatcaagtattttttgggtgtatgctgtagctgaaagagtatgtacgtatgtataaggatagagagggccgggcgcggtggctcaagcctgtaatcccagcactttgggaggccgagacgggcggatcacgaggtcagnnnnnnnnnnnnnnnnnnnnnnnnnnnnnnnnnnnnnnnnnnnnnnnnnnnnnnnnnnnnnnnnnnnnnnnnnnnnnnnnnnnnnnnnnnnnnnnnnnnnnnnnnnnnnnnnnnnnnnnnnnnnnnnnnnnnnnnnnnnnnnnnnnnnnnnnnnnnnnntg

SEQ ID NO: 11164 - DNA, 1202 bp, Macaca Fascicularis
  misc_feature (1)...(1202): n = A,T,C or G
acagcacattgtcaaatgnnctggaaagctgtggagtttttgatgaagagcgacgagcacgattgcttcagtnnntnnnnnnnnnnnnnnnngtgcctctgcagggcttcaaagcattgcaaggtgctgcaggcccgagactctttaccatacannnnnnnnnnnnnnnnnnnnnnnnnnnnnnnnnnnnnnnnnnnnnnnnnnnnnnnnnnnnnnnnnnnnnnnnnnnnnnnnnnnnnnnnnnnnnnnnnaagctgctaacagccattgaagaaacatgtggatttgctgtggaatgacgagcttcaaggatttgcccaggactctatttatacaaccctgactgacagtctnnnnnnnnnnnngnnnnnnnnnnnnnnnnnatacaggaaaacaaccccccccccttttttttttttttttacattttaggacactgtgaggggaaaggacaattttgaaattccttttcaaggaannnnnnnnnnnnatgctttgccatgaggnnnnnnnnnnnnnnnatttaaacttaatatcttgaacctaaagaatgctgacttttcctacatttccagagttaggcagtattctacacttaaagactactactatttttataaaaggtaatctattcaaattgcttcacagattttaagtctctcaaacatcaagacaacttcagcagtcggtacaagtcacatttcattttgattgaatacataattttgaacagctcctgtacttgctctttgtaaaaaataaaaataaaaaattattttgaactattctacctttgtaaacaattggctaaaagaatcatctttaagaaattaagccatttacatgtttgtgtttttctatggcagagcattatattttgcattatatgtttcagcttagtctaagtgggtcttttttacattttnnnnnnnnnnnnnnnnnggaatacagctatataattttggttgtcaaattcctaatgcaaacgtttagtctaaacttagtcatttatttgcgacaataagatgtgttcaggggctctctgtttttaagagactctttaaaaacaaacaaacaaaaaaaactaatgtttttatcttgaatcaatgagattagtattttggatttacttttaatcttaaaatactgcatttttatagcttctnncnnncatgtggatgggatgggattttcattatttg

SEQ ID NO: 11165 - DNA, 717 bp, Macaca Fascicularis
  misc_feature (1)...(717): n = A,T,C or G
ctcaagcaataatactggaaatnntacaactgaaacctccagtaccttagaggtaagaactcagggccctatcctcacagcaagtggcaaaaaccctgtaatgnnnnnnnnnnaaaaaagaagaggtctcaagtatgaactcatctcagagactggtggaagccatgacaannnnnnnnnnnnnnnnntagaagtagatggacagaaannnnnnnnnnnnnnnccaaataagaaagtggcaaaggcgagtgcagctttagctgccttggagaagctgtnnnnnnnnnnnnnnnnnnnnnnnnnnnnnnnnnnnnnnnnnatccctnnnnnnnnnnnnnnnnnnnnnnnnnnnnnnnnnnnnnnnnnnnnnnctgttcggggcagaggnnnnnnnnnnnnnnnnnnnnnnnnnnntgttggnnnnnnnnnnnnnnnnnnnnnnnnnnnnnnnnnctatgnnnnnnnnnnnnnnnacagcacagctgcccctgcctatggtttacccaagagaatggttctgttacccgttatgaaatttccaacatatcctgttccccactactcattcttttagcaaatgacagaagctaattcctattgaacaacaatacagtacaatacagaatgttagagaaaaagcctttttatcctgctttctttgaacacatacttgatcaaaattatttgtaaagaacatctttcctactttttgattta

SEQ ID NO: 11166 - DNA, 763 bp, Macaca Fascicularis
  misc_feature (1)...(763): n = A,T,C or G
ttaaagtatagccaaaccattaaaaaaaaaaaaatcctcagtatagcttgcaattaagacctagatcacagtatttaaatgttttgtgttttatacatgaggtcagtgcgannnnnnnnnnnnnnnnnnnnnnnnnnnnnncacctccataaagttacctagagttgttgagttggnnnnnnnnnnnnnnnnnnnnnnnnnnnccaatcattagggagaggcaacaaggtaactcagcctttcctcctcctatcagcacaaagaaactcaaagctgtattttccctttctgttccaaagcagtctnnnnnnnnnnnnnnnnnnnnnnnnnnnnnnnnnnntcaacacgtttttttttaatgttttaattactatagtgttatgtaaagatttgattcagcagctaatgtttctgaactttacttattaattttcagtgtccttaagggttttgtggtgttatcaaagcaaaaagaaaatgctnnnnnnnnnnnnnnnnnnnnnnnnnnnnnnnnnnnnnnnnnnnnnnnnnnnnnnnnaaatagcatcttatgctaattagccctgctaaactatgtatagaggaaattgttcaagtattggatttgaaagtaagtgacttatnnnnnnnnnnnnnnnnnnnnnnnnnaaacactgtattatgaaaagctaaattatatacatcattgtaactatgtagaaaatgtagactaatgtataatcaaaatgctaaggatttttatatggccttgtnnnnggggagt

SEQ ID NO: 11167 - DNA, 728 bp, Macaca Fascicularis
  misc_feature (1)...(728): n = A,T,C or G
taacacagactaccgggtcacctggtacacatcttggagccctngnnnagattgtgcaggggannnnnnnnnnnnnnnnnnnnnnnnnnnnnnnnnnnnnnncaccatctataccgcccgcctctactactcccagtatccgaattaccagcaggggctccgcagcctgagtgagaaaggggtctctgtgaagattatggactacgaagattttaaatattgttgggaaaagtttgtgtacgatgatggtgagccattcaagccttggaaaggactaaaaaccagctttcgatttctgaaaagacgcctacgggagattcttcagtgaggggtctccccgggcctcatggtctgtctcctctagcctcctgctcatgctacgtgggcctcccctccaccctggaccagctctgtttctgcctggtcatcctgagcccctcctgccctcagggccattccactgtgctcccctgcctcaccgcctcctccccgctctcccaggctcttccttcagaggcccctttctgcctccatggctacccatccaccccctcagaccccattcctccagcctgcgtgcccctgacctggctcttcccatctccccagcataaccaaatcttactaaactcaacctaggctgggcatggtgactcacgcctgtaatcccccagcactttaggaggcaaaggtggcagaatcgctgagcccaggagtccaagaccagc

SEQ ID NO: 11168 - DNA, 723 bp, Macaca Fascicularis
  misc_feature (1)...(723): n = A,T,C or G
tactctggttgttaagcaaagaaaatactggggtcagtggtgagccccacccacactcgccagaatctccactgtagtccccctaacaaacagcccttcactcnnnctcccacttcagcaatttgtattttgnnnnnnnnnnnnnnnnatcagagtgttttaaatcatcacgccctggcttatccctggccaagccaggacacggggtgcttcagtgggtctgtcaccctctctccttgaagcatgtcgcttttatttatttacttttactctcaccctgctcctgtgccagcaggggctacttcaaggccaaggtccaggatgagaacttgtgacccagcctcagttttctccacttctttctccctctttctcccgctcactctagcaaggtgcctggggagacttgaacagatgtttcattttggcctgnnnnnnnnnnnnnnnccaggcctccaatgcactgtgacctctggcttccccagcagctttcccagagaggcagaggggccttccacagcctgggttctgctgctgcctcctgcctgctgcagctgcagcattctgaggggcaacgtggaggaagggccagggatgcatgggattttaactttttcatcaaaccttccgcgtggcaannnnnnnnnnnnnnntcttcaggtgtcttctggatttctggtgatggatagagaaatctttttatgttacagttttaaattatgt

SEQ ID NO: 11169 - DNA, 737 bp, Macaca Fascicularis
  misc_feature (1)...(737): n = A,T,C or G
ggcccggaagatnnnnacttcagtgcttggactacagagcaggcagccggtgttcctctttattggnnnnnnnnnnttcaactgctgtacttttctctctggcttcttgctattggctgggactcaagatggaaacatttatcagctggatgtgaggagtccaggggctccggtacaagtcatccacagatcaggagcaccagttctatccctgctaagtttcagagatggattcattgctagccaaggtgatggaagctgttttattgtccagcaagacttagactatgtcactgagctcactggggctgactgtgaccctgtgtacaaggtagccacatgggagaagcagatctacacatgctgtcgagatggtcttgtacgacgctaccagctttctgacctctgacttcttggaaagagcaatcctggttagtgaaaaggtttgacnnnnnnnnnnnnnnnnnnnnnnnnnnnnnnnaccttcccaaggaccatggcccttagtgtcttgggcaccccttggaaatcacagaaagtcagctgtactggctatatggaactctcatgccaagacctactttgaactgaataggaaggtcactgggcccactgcatttgtcccaacttctccttgtataaacgtaccccagcaacacagggcaaggatatagatgcttttagtttgttcttaaaccagttgtgttaaatgtttacaaggatctcagtactaaaac

SEQ ID NO: 11170 - DNA, 723 bp, Macaca Fascicularis
  misc_feature (1)...(723): n = A,T,C or G
cnnnnnnnnnnnnnncagcnntccatnnagcaaaggctgacgctttggatgtgcagtagtcgatnnnancggggatggcagacagtgccagcacggagttgaggcacacgatgtggccgttctgcagctccagcatacgcggcaggaaggccttggtggtccagaactggcccagggtgttgatgtgttgggacttgaggagggcatcgtnnnnnnnnnnnnnnnnnnnnnttccgtggaccacggcggcattgttnnnnnnnnnnnnnnnnnnncccacattctctcggacagccttggccgtctggtacacctcctcccggttgcccacatcgcagatgaagtaatggcactcagtgcccatctgccggatatcatccgtcgtctccttcaggcatttctcagtccggccccagagaacaatctttctggcgccgcgctctgcgaactcgcgggcgagatgacgcccgatgcctctcccgccgcctgtgatgannnnnnnnnctcgcgacaggtcccgcagcttggcgggcagcnnnnnnnnnnnnnnnnnnnnnnnnnnnnnnnnnnnnntttgtagagggaacaccaccagagcgcccagccgtttccacaccatcctccgcgcagcggagccggccagggggcgaaagtccccgggccgagcaatacaggaattaaaaaacaccccgaacaataaatagtaaaccgaataaggagaga

SEQ ID NO: 11171 - DNA, 761 bp, Macaca Fascicularis
  misc_feature (1)...(761): n = A,T,C or G
gacatggcagnnnngnnnnnnnnnnnnnnnnnggactgggnnnnnntcttctccctggctgtccnnnnnnnnnnnnnnnnntgtgttgagtggtgggcctatgagatcgggagcttcctcatggggctgctcagcgnnnnnnnnnnnnnnnnnnnnnnnnnnnnnnnngaggtggccactgtgacctacatgattcccttggggctcagcatcggggtctgtgtccgagtggggatggctctgggggctgcggacactgtgcaggccaagcgctnnnnnnnnnnnnnnnnnnnnnnnnnnnnnnnnnnnnnnnnnnnnnnnnnnnnnnnnnnnnnnnnnnnnnnnnnnnnnnnnnnnnnnnnnnnnnnnnnnnnnnnnnatgtnnttgccctggtgagccaggtcttgccggtttatagagtctttcacgtgtatgaagccgtctgttgtgtctatggcggagtcataagaggaactgggaagcaggcctttggtgccgctgtgaannnnnnnnnnnnnnnnnnnatcggcctaccactgggcatccttctgacctttctgnnnnnnnnnnnnnnnnnnnnnntctggctgggcatgctggcctgtgtcttcctgnnnnnnnnnnnnnttgttgcctatactgcccggctggactggaagcttgccgcagaggagacagccccatctgtggaaaaccaaacaaacacaaagaactcaaaccagtctgaacccggatgaacccccgagcgtgtgccttgact

SEQ ID NO: 11172 - DNA, 675 bp, Macaca Fascicularis
  misc_feature (1)...(675): n = A,T,C or G
ccctacccaccaccactctctctcacctcccactgtgtcctgtggatgtgtggatgtgtgtgtatttgggtgtgtaaatgttggttcttccactactggattttgtaatctaggagaaatcactttttgtgggggctttggttttgctccattacattttcatttttttctgagcattgactgacctgaaagctgcacaaaatgtagaagacatagcacctgccaaggaatagggaataagggcacttacattaatgtgaattagtaattgtggtatagaaatgttttatagtgaaagattcagatttgctttttaagaaaaatgccaaaagctatttaaataacttgaggtaacattgtaggttttgatttttctcaatttaagatacagaaatacagcaagccttaatataaagttnnnnnnnnnnnnnnnnagtattttttaaggtggagaaatgcaggaattgtataaccagaattgtttctgcctttagcttttcagaacttgagatgtggctgcactggactgggtttgtaaatgttaggactagagaatgtttgctcttgttaattatgaattaattggttattaagtttagaatgcatttttacaagtatgtatcaaattgtgtttagtaacttgagtgtatgcannnnnnnnnnnnnnnnnnntag

SEQ ID NO: 11173 - DNA, 735 bp, Macaca Fascicularis
  misc_feature (1)...(735): n = A,T,C or G
tgagaaatgtgactcagcagatcaacgancgcaagcgacgtttagagaatattgacaagattgctcagtggnnnnnnnnnnnnnnnnnnnnggagggcgaggacatcctagacaggagctcggnnnnnnnnnnnnnnnnngagatggcctggatctaccagccctacggccgcaaccagcagcgggtcttcttcctgtttgaccaccagatggtcctctgcaagaaggacctaatccggagagacatcctatactacaaaggccgcattgacatggataaatatgaggtagttgacattgaggatggcagagatgatgactttaatgtcagcatgaagaatgccttcaagcttcacaacaaggagactgannnnnnnnnnnnnnnnnnnnnnnnnnnnnnnnnnnnnnnnnnnnnnnnnctcagggnnnnnnnnnnnnnnnggaaaatggtacaggaagatgaaaaaatcggctttgaaatttctgaaaaccagaagaggcaggctgcaatgactgtgagaaaagtccctaagcaaaaaggtgtcaactctgcccgctcagttcctccgtcctacccaccaccgcaggacnnnnnnnnnnnnnnnnnnnncctggtccccgacggcatnnnnnnnnnnnnnnnnnnnnnnnnnnnnnaacccaagcgnnnnnnnnnnnnnnnnnnnnnnnnnnnnnnnnnnnnaacccccttcaaaaaatgatacctacagggag

SEQ ID NO: 11174 - DNA, 751 bp, Macaca Fascicularis
  misc_feature (1)...(751): n = A,T,C or G
atttcatcaggaagttcagaaaatacatcagcagaacagatatacaggagaaaagtgcaaaaatactgatcaggaagagtctaccatttcatccaagaatcctgttcattttcaacattttnnnnnnnnnnnnnnnnnnnnnnnnnnnnnngtacaaatcgtggaccaagatgagactgatgaccagcctgaatgtccctatggaccatcctgttataggaagaatcctcagcacaagatagaatatagacatagtacacttccagtgagaaatgttttagatgaagataatgataatgttgggcaacccagtgagtatgacctgaacgacagctttctagatgatgaggaagaagactatgagccaacagatgaagattctgactgggaaccaggaaaggaagatgaagagaaggaagacgtggaagagcttttgaaagaagcaaaacagtttatgaaaagaaaatagtaactaacttctgtagtcatgtgtgccttacatttactttttnnnnnnnnnnnnnnntttatgaactaaggaggtacttaagtgacagttatttccttcttttgatagttaatgacttctactactgactctttacaagtgagacattgaaacgtcagccttcagtataatagatggaattttttgttgccttnnnnnnnnnnnnnnnnnnnnngcatctggaaataggaagacagagaaggtagagtaaaaatggatatttttgatgtactttgtatattg

SEQ ID NO: 11175 - DNA, 758 bp, Macaca Fascicularis
  misc_feature (1)...(758): n = A,T,C or G
gcagagatgttttttaatgagatcccaccatctatctcagtgagtctggcagactttttagttcctgagttaaatttgtaannnnnnnnnnnnnnnnnnnnnnnnnnnnnnatgtatgactcaatctttcaatatgtggttttcaaaaaattgttgaagacatgacttcatagcaatatataaagaataaattaaaatcgacagattgagtattcaacattgcaaaatcaattttttacctatttcctaccaatttcacattnnnnnnnnnnntgttcatnnnnnnnnnnnnnnnagaatttgaaaacagttcagatatcaagaaagattaaaaattagggaaattctgatatcaccataaagcagtattttacattnnnnnnnnnnnnnnnngataaagtcatcatacacaaaaagaataaatatttataactttctctataaggtccatatacactgtatatattgaaacaatctgaatgactagtagatttcatatgaccattgttatttccagtcaaaagtagggaaacactttctccaatacttgtattttatgctacatgtaatgaagttggacctttttattatttagtaattcctatatgttcctatactttttatttccaagatgactgctctattgtttcatgttgtttttagcaatatatctccatgagatatgtactttgtttcatattgaaaagtataaaatttatctttcaattcctgtgtgtgtatcctatggttatctgtat

SEQ ID NO: 11176 - DNA, 700 bp, Macaca Fascicularis
  misc_feature (1)...(700): n = A,T,C or G
ttccccagtgtttcccatggtgtttttgcatccagagttgacnnnnnnnnnnnnnnnnnttgaatttactcagttttatagattaaaaatgtgcattttatataaaaatgcattttatataaaaatatatggctacatatacgtatatatatataaaacgcacacttttaatctctatatggcagcatttttgaggttttatatctgtcagtgtaccctcaactgcctcctttttgcagagaatgatccccacaagaactggtctaagaacactgtctgctcatggattatacttaaaatcnnnnnnnnnnnnnnataacaaaggttgggattttcagagtcctnnnnnnnnnnnnnnnnaccttaacaaatagggaatttggcagggaagacacctgggtttttaattcagaatcctatttatatactgttaaaatttgaggtactgtagtttatataaaagtcagatgtttagatattatatttcagtactaggagcttctttgcannnnnnnnnnnnnnnaattaagtaataaatataaaagtgattgtccataaattatcattgaattttttgtttattttgtagtatttctgtatttatctgcactttgtgtatatatacacacgtacatgtgccaacatgtaaataacttcatgtttattcctaatctgaattgccacaatatttttaatgtat

SEQ ID NO: 11177 - DNA, 759 bp, Macaca Fascicularis
  misc_feature (1)...(759): n = A,T,C or G
gagaacagtttgaagcaaatgggtnnnnnttaaaagaccatacccttttgtgttattctactctaaatttcatggactagaaatgtgtgttgatgcaaggacttttggaaatgannnnnnnnnnnnnnngcggtcttgtacacccaatgcagaggtgaggcatgaaattcaagatggaaccatacatctttatatttattctatacaaagtattccaaagggaactgaaattactattgcctttgattttgactatgggaattgtaagtacaaggtggactgtgcatgcctcaaagaaaacccagagtgccctgttctaaaacgtagttctgaatccatggaaaatatcagtagtggttatgagaccagacggaaaaaaggaaaaaaagacaaagatatttcaaaagaaaaagatacacaaaatcagaatattactttggattgtgaaggaacaaccaacaaaatgaagagcccagaaactaaacaaagaaagctttctccattgagactatcagtatcaaataatcaggaaccagattttattgatgatatagaagaaaaaactcctgttagtaatgaagtagaaatggaatcagaggagcagattgcagaaaggaaaaggaagatggtaagttgggaagctactagtttgnnnnnnnnnnnnnnnnnnnnnnnnnnnnnnnnnnnnnnnnnnnnnnnnnnnnnnnnnnnnnnnntctttgaagttagctaaatgatgtgccctattgagctattttt

SEQ ID NO: 11178 - DNA, 717 bp, Macaca Fascicularis
  misc_feature (1)...(717): n = A,T,C or G
catgccaacnnnnnccaagtgagttcagnnncagggtatcntgccctaaaagataaacagtcaaatgccacccagctgttcactagtgatgtgtggcaaatcaaatcaactgttgaaaaaggggtgagtttcctgtgctacaagcatctgtcactgttggtacgtgcaggaggcttctgctgggtatgttttggaagtgagtgtcactacttggctttgcttagcagattctgcttcacagttgttctttgacctgctgacttgtgacttgcagaaacataggcagtagtcctagcctggtaaagaccctccatcaccctcataagtttgcttcctatgcaggtttgggagaggaggcccattgggctcttggatggaatcctttcccctattaaacaaaccagagacttagaatcagtgctgactcaggatctcctggtttggaatcgtaatgtgcctcgatcctttttccaagcaggcctcaccagtctttctgtttcctgcttcacccctgcaatgagccaagaaccaacactacatccacctagaactgcagaagggcttgtggtttcaaccaagacccatcctgagcaagggacttggcttggtgcttttgatcccaaagttcccacactggcagtgacctgctggggcaatggcatctgtcatggtgttttctccagcaggtggagattactatggaacctacatatgggt

SEQ ID NO: 11179 - DNA, 720 bp, Macaca Fascicularis
  misc_feature (1)...(720): n = A,T,C or G
ataaaacttaatttcntnnntttaaatggtgggggtgggtgggtgnnnngggctaggggctgttccctgtctctgtgggtttctaagctctgggcaaagtggtggtagcggggagggagggggaagttaagggggccacctccattctggggaatttatatttgaattgaggctttggccttaacacccaggaacttttttattacaatcgcttaggaagtaaagccttgtctccctccctgttctctgcctcttgtacccctctggcccacccactctgccccactcccagcccttctcagccccagccctgcctgccctgcccctccagggggccatgagtgcctaggtttctcataccccacaaggtcacagcaggggagggagggacaattttataatgaaccaaaaattccatgtgttggggggtggggggcggaggagggtgaggggtgccgcccatgggccacagatctctacaagtgcctgctatccctctcccactccccaccccagcaccggtccaaccccttcacccccagctgctcctaggactggcccatgggcaggcgggtggggggatgggaagggggtaccctgaaaccaaactggaagcctcctctgcctcccagctggggcctctggagtggggtggggggctgtggtcaagccttattctgtattggggactgagggtgggggtagtagaggggccgctgg

SEQ ID NO: 11180 - DNA, 1032 bp, Macaca Fascicularis
ccacccaccactgtgcgtttctgatttccacatgtctccagctccctcgcaaggtggggctcaggctggaggaggaggaaggattgagatcctcttgctcctctaaggcccaagctctttcggcaccttttagacttgaacgggaggctgctcatccgccctctccggtccaccctggtgaaagagctgttccccacccccagggagctcctgtccctgtcagcctttgctgtcccctgtccccaacggagactctgtcacccatgggctccccctgccatcgtgtgcttcacgtggccccatgcatgcccgcctctctgcatggtctcttgggaaaagagatacgttgcctccgccagcccgactgccctccccacccaccttccacatgtgaccactgcaatgaggacgctccttctgtccccacctgttccgaagacaaaccaacctccgtttcttttataaacagtcggctttttcttaacaagccctcactgtacagaacagcccgttgatggtttatttggggtccccctctccccccagcccttttttctgttggtttagcacaaatacttccctcctccggcacctccaaacctaccccacagtcagtgtacttgttttatatatatttaatcttattcaatggaaaccatgcttttgtcgttttatactttgctaggtagactttattaccccccgacgatgccctcatttttttaaaaaaggaaaaaaaaagaaattgggttccagtcttaattcattttccgtgccaggttttatttcgtgtgtgtgcgagtgtgttccgttttgtgttttgttttttgttgttgtttttagttgtttggttttcttttttttctccccgcgcccctccagtcccatacttcacagcactctggtgcaggaagaagcagaagaaaaaaagaaaaagaaaaaaaaaaaagaaacaagacatgccacctttcccctggcactgttgcttttcctgatggttaatactactgtcacgtagctgtgtacaaagag

SEQ ID NO: 11181 - DNA, 759 bp, Macaca Fascicularis
  misc_feature (1)...(759): n = A,T,C or G
catgtagatggtggagaaataggtggggagagaggaacaaccattaacatagtatcatgtttaataagtatggccttgatttcagtagatgtaatggaagccaaattaaattgatacagaacccatttctcagaatcttttttttttttttttggnnnnnnnnnnnnnnnnnnnnnnnnnnnnnnnnnnnnnnnnnnnnnnnnnnnnnnnnnnnnnnnnnnnnnnnnnnnnnnnnnnnnnnnnnnnnnnnnnnnnnnnnnnnnnnnnnnnnnnnnnnnnnnnnnnnnnnnnnnnnnnnnnnnnnnnnnnnnnnnnnnnnnnnnnnnnnnnnnnnnnnnnnnnnnnnnnnnnnnnnnnctcacctcaggtgatctgcccnnnnnnnnnnnnnnnnnnnnnnnnnnnnnnnnnnnnnntcattttgcccagccatcagaaagattgttaatcctatgaactcccttttgtaggagagaaagggccactctgtaggggcagccctgtccaggtaaagttgttttcagcctcctgtctactgttaagtgaggaagtcacagcaagacagagagtattgctggagggtgagagaactgtggagaccaactgccacatagcaagagcccagctcttgggaacgttgagatgtaagctcagggttacacagttccaaatcttgggaaggggcttttcagacacactgtttgctttctgctgagataaggaatgcatcactctgccagagtatgcatgcgctccagc

SEQ ID NO: 11182 - DNA, 741 bp, Macaca Fascicularis
  misc_feature (1)...(741): n = A,T,C or G
gaatcagcnnncagaggctgggctgagctttgtggggaagagnnnnnnnnnnnnnnnnnnnnnnnnnnnnnnnnnnnncgcccccatctcatggccttctctaaacacagatggccccaggggcagtgggtggtctctgtcctccctgaagccagtttggactctacgggtatcctgagatgtgccctgtgccttcccgagggctgggtcaggcggtggggccagcagggggggaggaggaggagggggactcaggccttgttggggttgtacccgcctgctgctttgtggtctcacacctgctctgggagcttccaacccacctgttttggaatgtcccactgcagccgcgtaggaggtgggagcgcagggttcggtttgcccaggcagtgcccagtctccgtgtagcccaggtggaagctgtctgtgcccaggacaaactgcagggagaggatgaggctgagaggccggcctcatcccctccagcctgccctgcaggttccctctgcaaggctattacctcccagaggtgcccaatgatgggagcatctgcccacgcannnnnnnnnnnnnnnnnnnnnnnnnnnnncttgaaggaaataagagtgaaggatttgtcaaaccacctgcggggagagtagacacatgaagaaccaaagctgggaatgtccagagaagcnnnnnnnnnaaccccaacctttaaccctaactcggatgttaccctaacannnccctaacacc

SEQ ID NO: 11183 - DNA, 366 bp, Macaca Fascicularis
cagcgtagacctccgcgccgagcgctccgtactcatcccggagacctaccaggccaacaattgccagggcgtgtgcgactggccgcagtccgaccgcaacccgcgctacggcaaccacgtggtgctgctgctgaagatgcaggcccgtggggccgccctggcgcgccccccctgatgcgtgcccactgcctacgcgggcaagctgctcatcagcctgtcggaggagcgcatcagacgcgcaccacagtgcccaacatggtggccaccgagtgtggctgccggtgacccctgcgcctagcggactcctgccccgaggggccggacgtgccccagctcgcgccccttcccatatttattcggacccca

SEQ ID NO: 11184 - DNA, 727 bp, Macaca Fascicularis
  misc_feature (1)...(727): n = A,T,C or G
ggggaatgctgnnnnnctggccttggcagatgtttctcagaggattcatcctcctctctctgtcagctggacatcagtnnnnnnnnnnnnnnnnnnnnnnnnnntctggagttcgccaagcggctggagcgctggggccgtggagcctttggtcacttnnnnnnnnnnnnnnnnnnnnnnnnnnnnnnnnnagtcacagccagggaagccatccggcgactccgggnnnnnnnnnnnnnnnttagcgactcatgggactcatcccaggccttcgcagattatgttagcaccatgtgatggggcccgtacctcacagtctcatgctcggtaccatcagcttgcagggnnnnnnnnnnnnnnnnnnnnnnnnnnnnnnnnnnnnnnctatctttctctttctgtcaccttttgtctcttttttccttcttcccttgcactgaggtcctggaggccttgatgaggcccagcaaagaggcattctcacagctgggtttagtgtctttgggccccttacnnnnnnnnnnnnnnnnnnnnnnnnnnnnnnnnnnnnnnnnnnnnntcattgctgaagagacgccctcccctgcccctgggttcctgccttccctcctcaagcaggcacccaggctttagagaagtatagggggcttcttccctgctgggcttaccacactgctctcaggcctcaaaccctttcatacctttattcttttttttaaccaaaaaa

SEQ ID NO: 11185 - DNA, 764 bp, Macaca Fascicularis
  misc_feature (1)...(764): n = A,T,C or G
cacaagacacagacaatcagaccaaagtatttgctgtaataactaagaaaaaagaagaaaaaccactcgactataaatacagatattttcgtcgtgtccnnnnacaagaagcagatcagagttttcatgtggggctacagctatgttccagtggccaccagaggttcannnnnnnnnnnnnnnnnnnnnnnnnnnnnnnnattacttacaaatcaactggtgagactgcagtgagtgcttttgagattgacaaaatgtacacccccttgttcttcgccagagtannnnnnnnnnnnnnnnnnnnnnnnnggcctctgtagagcctcaagtccagtcctctatcacttttgcatgaattaaagtatatagcgcaaaagagcacctaagttataaatgtgtatatatatatatatggaattggaacttattttaaattgttggagttcttttaagaagagtataaattgattattttttttatttaaagggatagttgattcttggggtgttttgaaattaagttggagttaatttgcttaagcatatttatgttgtgagaaaccttcatatgaagtttatcatgccctttttcaagcagatttatgagcagatttctgtcacataagtcgtcttctacttgnnnnnnnnnnnnnnnnnnnnnnnnnnnnnnnnnnnnnnnnnnnnnnnnnnnttatttcccgcatggcataatgtttttgcactaaaggctcaaagtgtgagaacctgttctggatttgtttgaa

SEQ ID NO: 11186 - DNA, 652 bp, Macaca Fascicularis
  misc_feature (1)...(652): n = A,T,C or G
acatggccaccaagtaggaatggnnggtgacaagacagaaggctaannnaggaagcgtaatcttgtgcacctgacaaatagaataaaggatcaaaatcgaaggcaggctgtaagagtatcaagaaattcttaaaaaccaaaaagtgatttggaagcacaaaacttatagttaatgctacccagtgtcatgatgggccaagaacatcgtggcttcctaagctagaaaatgccatataccaaaattttaaatggaattccaatcaatctccccttctgtcagaaaaaataggaactcatttttttcagcggtggagaggaagagaggggatcatgggacatggaaacagcagttatattagtatttttgttatgataaatttcgtgtttnnnnnnnnnnnnnnnnnnnnngctgccaagagggaataaggaataaatttcaaaaaatgtacaatttcctttagagaagtttccgaaccaaaagactaatttacatgaaaagctgtagagaaagtagttgaaaagtccattcataaaacttttattccacttacatgaatttaatacacgtgttcttaacaattatgcttggattgttcatgaaaatttcataagacattaaacaaagctagccatcatctcannnnnnnnnnnc

SEQ ID NO: 11187 - DNA, 741 bp, Macaca Fascicularis
  misc_feature (1)...(741): n = A,T,C or G
cnnnntcatgggtcnnnnnnnnnnnntcttgatggtttgtaaggtgccagcctgtaaagtggctgtggtgaggctgacttggtgtggctggggatactagccttattggtccnnnnnnnnnnnnnnnnnnnnnnnncaggcctcctgtgttgtacagcaggatctttagttttagccacttctcagaaaggaacctggagagccagccacctttttgctctgaagttgggatacgctgtgactgggactgaggcctcagcggccttcctagagannnnnnnnnnnnnnnnnnnnnnnnnntctggcttatttgtccctaatgccccagccttacgcccttcttgttcattcagatctataagattggccagggctannnnnnnnnnnnnnnnnnnnnnnnnnnnnnnnnnnnnnnnnnnnnnnnnnnnnnnnnnnnnnnnnnnnnnnnnnnnnnnnnnnnnnnnttgtccactatggtgaagtgaccaatgattttgtcatgctgaaaggctgtgtggtgggaaccaagaagcgggtgctcaccctccgcaagtccttgctggtgcagacgaagcggcgggctctggagaagattgaccttaagnnnnnnnnnnnnnnnnnnnnnnnnnnnnnnnnnnnnttccagaccatggaagagaagaaagcattcatgggaccactcaagaaagaccgaattgcaaaggaagaaggagcttaatgcgaggagcagatttgcagctg

SEQ ID NO: 11188 - DNA, 732 bp, Macaca Fascicularis
  misc_feature (1)...(732): n = A,T,C or G
agtccagaaacagtatagatgtgatgtgtgtgattatacaagcacaacatatgttggtgtcagaaaccacaggcgaatccataacnctgataagccgtacagatgctctctgtgtgggtatgtgtgtagccatcctccttctttgaagtctcatatgtggaaacatgcaagtgaccaaaattacaactacgaacaagtaaacaaggctattaacgacgcaatttcacaaagtggcagagttctggggaaatcccctggaaagactccattaaagagcagtgaagagagttctgatcccatcactggaagttcggaaaatgcagtgtcatctgcagaactgatttcccagactcccactgaagttctgggtcccagcgagaatgaaaaactgagccctacaagtaatacctcatatagtttagaaaaaatctccagtctggcccctcctggtatggagtactgcgttttactcttctgctgttgtatttgtggttttgaatcaaccagcaaagaaaacctcttggatcatatgaaagagcacgagggtgaaattgtaaacatcatcctgaataaggaccacaacacagctctaaacacaaattaggtggaataatgactcaaacacgaaagcagtagaagaggattccttcaccacagtttcacatttgcgctgtcaaacaacttcctagccacagaagaaatcattgatgtgattttcgagaaaatgacaga

SEQ ID NO: 11189 - DNA, 735 bp, Macaca Fascicularis
  misc_feature (1)...(735): n = A,T,C or G
gtgcncnnnccgcncngntggttcnntnnncctgtctgtcaacctggctgcatcaaatccaaagccacactgcactggaactctgtctctgatgctgatttgcactctgctggaattctgcctagctgtgctcactgctgnnnnnnnnnnnnnnnnnactgtgtctgacttccctggagtgtgcttttcctgcctcacagttattcctgtccccaaagatgannnnnnnnnnnnnnnatgaagagctattgacttcttggggaaaaaagggagaaatattaattggaaagttgatttttatgataatatggaaaacctaaccattataaaaaggtgaacttgagtttcctaaatgtaagcatttaaagtaatgaatatttgttttaaaaaagtatttcactgtcatttatgatatgtgttcattgggggatctcttggtttgcctgatattgnnnnnnnnnnnnnnncagggctgtaaattaccatttactaggctagccaaatagtcttagacatgtcccagaaaactaggcagaatgatgattcaatggatcatggtgaagcaaaggatacagctttttcttatacccctcnnnnnnnnnnnnnngttaactgatttgctgtggtgctcagactcttttgtcacaggtgctactgatttatcccatgtattttactcanttagtgcataaagnnaaccccataatgaagtctcagagtgttgaaggtagctgg

SEQ ID NO: 11190 - DNA, 748 bp, Macaca Fascicularis
agtaatatagcacagagtcatgaatgacaatccccctaaccattcctcttcatatctgcctcttccccttaccattgtaattccccaaactggtcataaaggtgctctgtcaagatattggggactgacatcttaagctctcacctggctgcagtaggaaaggccaaactgacaaaaaaaaaataaattatttataaagatgatatggtaaaatgtacctttgccctgggtcggggtgggtccagtcagtctcagatttataagcatttaggagcctaggtaaaagctgctagtattcttttaaaagttatatatatgacttgcaatgatagaaaactccttccaattaaatggcattttataatattatgtgtgtacttcacagtgttaaaaataccctcataccttattgcatttgatcctcatagagagaaagtgcattttaaccagtactctgggtgcaataaacaatacgtaagaaatttaagcatatccagtgagcatatccaattccagcatatccagtgagttttggcagtgtgtttatgtggaatgtttaaggatacacagttgtactttatataaattgattcttgttctccttaaatgtgacatgaaataactgtgctgctacattatactggaagttaacaagggaaaagggaagagctcttggctcccttgaggttctgctagtggtgttaggagtggttacaactgagcttttagtaaccatttaaccatatgt

SEQ ID NO: 11191 - DNA, 816 bp, Macaca Fascicularis
  misc_feature (1)...(816): n = A,T,C or G
tgggacagtgatacaccaagaagaagaagaagaagaagaaagcaaaagaggtagaattggtttctgnnnnnnnnnnnnnnnnngaagcattgtgtccagctggaggagaaactaaagccttattaagaaaacatgttatagatccttttgttgctgagagagtggaacataggtcctagacagggtgaagagttccggcacattttagctgctactttgannnnnnnnnnnnnnnacctggtgtnntcatcccatcttgtcctgttttaaggataggggtgatgagagaggcagagtttatcccaatgacttctcggtttgagcctcaccttcagacccagtaactgtccgcagctgtgtgctagtggttgtcttaacatcatagtcctagtttgcatttttttatcccctctgtttataaggtttgtaaaacaaaacaaaaaactaagtctgctcagcgaaatggtgtagaaccgtaaataagtgatagaagagtgtcactgaattttgtctctgaattcagtataactgagttttgtccatgctggtgtctgacgggcctggtggttttccatcttgttctggccttgaggtcagtcctttgcacttcctcaaagcttctgtacagtgttcacctaaatccatctgactacttgttcctgtgccgtcttgttttaggcctcgtttacttttaaagaatgaaattgttcattgctgggagaagaatgttgtaatttttacttattaaagtcaatttgttaagtttttaatgtattcctgttgggttttcttgttggtgatctcatgctagcagag

SEQ ID NO: 11192 - DNA, 784 bp, Macaca Fascicularis
  misc_feature (1)...(784): n = A,T,C or G
atgagtccatgctgtagactgtatggtcccggggcgctggattggggagcgtgatggaattatgcataagatgacatcatctctggaactcttggcaaggcctttggctgtgtgggtggctacatcgccagcacccgtgacttggtggacatggtgcgctcctatgctgnnnnnnncatctttaccacttctctgccccccatggtgctctctggagctctagaatctgtgcggctgctcaagggagaggagggccaagccctgaggcgagcccaccnnnnnnnnnncaagcacatgcgccagnnnnnnnnggacaggggccttcctgtcatcccctgccccagccacatcatccccatccgggtgggcaatgcagcactcaacannnnnnnnnntgatctcctgctctccaagcatggcatctatgngcagaccttcaactacccaactgtcccccggggtgaagagctcctgcgcctggcaccctccccccaccacagccctcagatgatggaagattgtgtggagaagctgctgctggcttggactgaggtggggatgccccnnnnnnnnnnnnnnnnnnnnnnnnnnnnnttctgtcgccgtcctgtacacttcgagctcatgagtgagtgggaacgttcctacttcgggaatatggggccccagtatgtcaccacctatgcctgagaagccaactgcctaggattcacaccccacctgcacttcacttgggtccaggcctcctctgtcttctgctttgttgtgtgcctctagctgaatg

SEQ ID NO: 11193 - DNA, 604 bp, Macaca Fascicularis
  misc_feature (1)...(604): n = A,T,C or G
gtgttttgacatttctgtatgttcgatgcntnntatactcaagttcnnnnnnnnnnntgaaatttacaatcggggtgctcatccaggcttctgatgtgtttttgagtgatgaaagaataagggaagaaaacaactttctatcttgtgccttacgaaatataattatacacatttcatatgcatgtatatttgtatgtgtatatgtttagttgcatcactctttgcactagtggctatcctttattaaatataaaatannnnnnnnnnnnnnnnnnnnttttccccagatggcccatcagaagcggttcatcgaacggaagtacagacaagagttaaaagaaatgaggtgggaaagagagcatcaagagagagagccagatgagactgaagacgtcaagaaataaaggagggcatgcaagtgtggagnnnnnnnnnnnnnnnnnnnnnnnnnnnnnnnnnnnnnnnnnnnnnctagttttcctacagacaatgaatgaagtgtgctcattgaaataaaatacaagtcaaattgctgttgttttaatgatctgtttttagctggatggtctttattacaaaggattagatttttcttctatttaat

SEQ ID NO: 11194 - DNA, 709 bp, Macaca Fascicularis
  misc_feature (1)...(709): n = A,T,C or G
ggaccaagggccaagtctggatcaatgggttaacttgggccggtactggacaaagcgggggccacaacagaccctctacgtgccaagattcctgctgtttcctaggggagccctcaacaaaatcacattgctagaactagaaaatgtacctctccagccccaagtccaatttttggataagcctatcctcaatagcactagtactttgcacaggacacatatcaattccctttcagctgatacactgagtgcctctgaaccaatggagttaagtgggcactgaaagaaaggtaggccnnnnnnnnnnnnnnnnnnnnnnnnnnnnnnnnnnnnnnnnnnnnnnnnnnnnnnnnnnnnnnnnnnnnnnnnnnnnnnnnnnnnnnnnnnnnnnnnnnnnnnnnnnnnnnnnnnnnnnnnnnnnnnnnnnnnnnnnnnnnnnnnnnnnnnnnnnnnnnnnnnnnnnnnnnnnnnnnnnnnnnnnnnnnnnnnnnnnnnnnnnnnnnnnnnnnnnnnnnnnnnnnnnnnnnnnnnnnnnnnnnnnnnnnnnnnnnnnnnnnnnnnnnnnnnnnnnnnnnnnnnnnnnnnnnngtaacccttggacctgggacatggagtgggcaggatcccttggtgctggccatggtgaccataaggaactaaaggccacaatgcctctgaatgtaagtacaagtacacattccttgccaaa

SEQ ID NO: 11195 - DNA, 773 bp, Macaca Fascicularis
  misc_feature (1)...(773): n = A,T,C or G
agggctnnnnnnnnnnnnnnnnnnaatncnntcagaaggcccacagtgtagagaaaccttttaagtgtgaggagtgtgggcagggtttcaatcagagctcacgacttcagattcaccagctgatccataagggtgagaaaccatacaaatgtgaagagtgtggcaagggatttagtcgtagagcagatcttaaaattcactgtaggatccacacaggagagaaaccatataattgtgaggagtgtgggaaggtcttcaggcaggcctcaaatcttttggccnnnnnnnnnnnnnnnngtggagaaaaaccattcaaatgtgaagagtgtgggaagagttttggtcggagtgcacatcttcaagcccatcaaaaagtccacactggagaaaagccatacaaatgtgatgagtgtgggaagggctnnnnnnnnnnnnnnnnncttgacatgcatcagagggtgcacacgggagaaaaaccatataaatgtggggagtgtggtaagtacttcagtcaggcatcaagtcttcagcttcatcagagtgtccacacaggagagaaaccatacaaatgtgatatgtgtggtaaagtcttcagtcgttcttcacaactannnnnnnnnnnnnnnnnnnncactggggaaaaaccttataaatgtgagatatgtggtaagagcttcagttggcgatcgaatcttacaannnnnnnnnnnnnnnnnnnnnnnnntaaatcctataaaaatagtaggggtggtaagaacatcagagaatccaca

SEQ ID NO: 11196 - DNA, 708 bp, Macaca Fascicularis
  misc_feature (1)...(708): n = A,T,C or G
tgcaaaagtaaaccagttgaagacttttgtatttttgactttgctagtttgtggcagagtggagaggacgggtggatatttcaaatttttttnnnnnnnnnnnnnnnnnnnnnnnnnnnnnnnnnnnnncgactctaggcttccagtttgtgtttggtttttattcttattatgattattattatattattttattttagttgttgtgctaagctcnnnnnnnnnnnnnnnnnnnnnnnnnnnnataaaatgattaatgacaggttggggttcccctgtgcttttaccagtagcatgaccccttctgaagccattggtagaaagtaccttgtcctccaaaaagctaacatacagttttgnnnnnnnnnngaaacttttgtagcaatctggtctacagacttttaactcaagaagctaaggctagacttgttaccttcgttgaatgatgttagttgactgtactgtaatgttgtatcaactgaattgaatgtttgcctttaaacaatgaattttctttttctttccttttttttgtaataaagaggcttagaacaagctaacaggcaatagaaatatgtatatcaaattttttaatgtaacaaactacatgttaattgttatcttattctttttatctttagtagacacttttaaaagaaaagacaattctgttgtgtttcactcaccaacnncgtggtgtataatgaa

SEQ ID NO: 11197 - DNA, 735 bp, Macaca Fascicularis
acataaactggattgctaaactatgctaaatataaaatgttcacatatttttattatggtaaaaagttttctaaatatgttctacatatgtttcttatttatttgcctctgaaggaaggttggcctgaagaactgaaagaacctcctgtttgcaagacaggccgaagcatgtaatacttttgtaccatatgagacttatatgaaataaaatttttaaaaaataaggaatcagagctatcaatgaagtatttcaatgaaatgtttcaatttaataaacagttatgttgttttaaagtttatgttaatgatgagggaggcaaagactccccttggactttttatttattttaaattaagtacatgttataggatgatgggtgctgaaataaactgccctcaccatataacaaagcgaccttgataaagcagtgaactcagagtctgatatttataagcattcccttaaatggaagtacatggcttgttagtgtaaggtcttttaaataatgatggaaaccccacagtgtcacagcaagaattaagctttccatttcctaaggaccccatactttaagttgaacattatctgtgtcttccttgttggtacccttgtgagctgaggtaaaccactgggataactgctgctcgtgctttgcgaattgcagcagaatgagaaagccttgactatatatatagtcattgtaagcaaaaaggactgaccaatactactgccaa

SEQ ID NO: 11198 - DNA, 684 bp, Macaca Fascicularis
  misc_feature (1)...(684): n = A,T,C or G
agcgctgctggcagccactgctggacccgttgcgggcctgtctgccgctgggaccccgagcgctgcccagtggcttcccccttcacacagacatcctcgggctgctgctcctccacctggaactnnnnnnnnnnnnnnnnnnnnnnnnnnnnnnnnnnnnnnnnnnnnnnnnnnnnnnncagcgccggcgcctcctccgaaacttctataccctggtcacctccacgcacttcccaccagagccagggccaccagagaagacagaagatgaggtctaccaggcccagctgcccagagcctgctacctggtgttggggactgaggaaccaggcaaaggagtgcgtctggtggccctgcagctgggggttcggcggctgctgctgctgctgtctccccagagtcccagccatgggctgcgaagcctagccacccacactctgcatgccctcaccccacttctttgactacctagcagtgggtgatggacacagacatggggctgttagcgtctctctgtttattcgctcacaataatacacagcccctggatggggagggggtaggaggggctacaacagggtggggtgggaggggaggaggcatccactttccttgcccctctcccctctgtgcttgggaggggggaagggagggagggggctccccctaaccccccagaatgta

SEQ ID NO: 11199 - DNA, 757 bp, Macaca Fascicularis
  misc_feature (1)...(757): n = A,T,C or G
ggannnnnnnnncatgggctactatgactacatcagcccacgcttcatgaccatcctgaggcgcacgcggcccatatggtatgtcggccgggacccagcggctgcaccagccacaggaaacaggaacactcacttggtgtcactgaagaagtttnnnnnnnnnnnnnnnnatctccaggcctttgagggcaagacattttagaactgggcaagacctgtgtaggtctcgctgtgggtcggctggggaccaaggaggtgatggaaaggggaggggtggaactcccgcccagaagagggnnnnnnnnnnnnnnnnnnnnnnnnnnnncacacagtgacaggaccaaagagccagcactgctggccttnnnnnnnnnnnnnnnnnnnnnnnnnnnnnnnnnnnnnnnnnnnnnnnnnnnnnnnnnnnnnnnnnnnnnnnatcccccnnnnnnnnnnnnnnnnnnnnnnnnnnttgtgcggcttctccacctgtgtctcaagacggataccctgagacctgtgtctgtggctgctcccatcctggcagccctggctgctgctcgccacaccctcgctcatctgtagattcaaagcgatgttctcttctgtgctcttagaagtagggagttgagcagtgactgccagggacagtgaacctgcggggtgatgtgtttgcgctctgttttatggggcattcttgcaagatgtgtnnnnnnctgtggaaatgcagccacannntcatgnnnnnnnaagnnnnaaa

SEQ ID NO: 11200 - DNA, 556 bp, Macaca Fascicularis
  misc_feature (1)...(556): n = A,T,C or G
agaaaccatccagattccagccagcctcggnnngggnnncatttcacgggnnngaaagtgatgnnnaggcaaacattgacaatacannnnttgcctgaaataggaacccattatttccagtgagctactgaaaatacatttttaaagagaaaatactgattatctcccatatgagaagtcattaactggaaatctccctagaatactttcatcactttggaaacaaagataggctcttttgtgctgtgttatctnnnnnnnnnnnnnnnnccttaaccaactaggtaccctgagtttacatacaggagaatgatggaaggaagggagggagggaggaaggaaaggaggagaaaaatgtgtcttcagctggcagcatttattttaaatccttagcactgcatttgaatggtattaaaaagcataacttccatagatgagctgttgttaggaaggcaccaaagaatctcctctgcactaaacaggagaatggaaagaaaagtctccattgagtacatatcatatcagttttaggaatcaattatgttgatatgtcaaa

SEQ ID NO: 11201 - DNA, 749 bp, Macaca Fascicularis
  misc_feature (1)...(749): n = A,T,C or G
attggacttacagttcccatggctggggaagcctcagaaccatggtggtggcaagagaaaatgaagcagcaaaagtggaaacccctgataaacccatcagatctcatgagacttattcactatcactagaatagcacaggaaagaccagcccnnnnnnnnnnnnnnnntccccctgggtccctcccacnnnnnnnnnnnnnnntgggagatacagttcaagttgagatgtgggtggcagcacagctaaaccataccacacttttaatgtcactgtgttcgtggtgagacgtgacagtgttaatgaggaagacatcaaggcactggggctacagattgctggaatcgcacacatatcatgagttgcttggaccacccagcccaatttctgaaggagcccatcttcctcagatgctaggggcccagagcattctctttgggacctccttagagaccggaggggtcgtccagcccctctcattgacactgaggggcagctgctccagccagtcagatccatttggtttcaggtctgtggcccctcccgcaccaaccccagcgtgatgatcgatgacctcctaaccccatgttcaccaggggacccaggagccatggagatgacttggatggatgtccctggggacaaactcttagagcctgtggtttgcatggtaagtgactgacgaaggagggaagagggctgcacagagcccagaaaattgggggcttgggcccagaataaaacagcctt

SEQ ID NO: 11202 - DNA, 627 bp, Macaca Fascicularis
  misc_feature (1)...(627): n = A,T,C or G
tggannnntgnntgggccggtngtctgccattccttntgcaattacatgggtttcccggctgtttgcgcggccttggagcacccgcagaggcggcccctgctggcaggatatgncttgggtgtgggactcttcctccttctgctccannnnnnnnnnnnnnnnnnnnnnnnnnncagccttcccctttgtgtgcttttggagcgggcaggggactcagaggcgcccctgtgctcctgacctacactcctggatacaacatgaactctcaccggctccccagccctccccaccaaggggtactgcaggggagggactggctggggtccccgagatctcaggaatttttgtaggggattgaagccagagctagttgaatcccagggaccaagagaaaggagcagatatccaaagggtgcagcccctttcgaaaggggtgtttacgagcagctgtgagtgnnnnnnnnnnnnnnnnnncccaggagccacacactcccttcctcactttggactgctgcttctcttagctcctctgcctctcaaaagctgctcgggggtttttttatttataaaacctctccccacccccaccccccaacttcctgggttttctcattgtctttttgcat

SEQ ID NO: 11203 - DNA, 760 bp, Macaca Fascicularis
  misc_feature (1)...(760): n = A,T,C or G
tggatgagcaggacgtnncngccgctgagcagatgtgctttgagaccagcgccaagaccggctacaatgtggannnnnnnnnnnnnnncctgtttgacctggtggnnnnnnnnatcttacagcagagagccgagnnnnnnnnnnnnnnnnnnnntatatctagtcagaagccgcccaagaggaccagatctgggtgttgtgcctgactttcgagggcctcctggactcagactgtgcatgtgggaaggggtctgaccaggcaggctgtgatctgaaaggagcaaggaacaccaaggaattatttttccagagtgacacacgcagcagaatgttggagtggaaacgatggctggctgtgaagaggannnnnnnnnnngtggtctcctcggtctctgtcagaggggtggggaggtggggaaacaggaatcttctgcaaagcccaatctgcagagtcgagagccctggcactctctgcctcactgcccggcactggtcctttgcagccagcctgcgacggcccctcannnnnnnnnnnnnnnnnnnnnnnnnnnnnnnnnncacctctgaccctttcggcaccctgggttgttaccacgtcctnnnnnnnnnnnntttcttgttcccaagcgtttctcttcactgtgagttgtctttggtcctcccacttggtacttgtatcttgatgcttgataatcctgactnnnnnnnnnnncatttgtacaaaatcaggaataactgtttttatactgattgcagcaat

SEQ ID NO: 11204 - DNA, 750 bp, Macaca Fascicularis
  misc_feature (1)...(750): n = A,T,C or G
tgaacttgatcatnnncnggcccaaatatgaagataaatgataactttttggagtttgtttcctatttgtagtcacatctgcttcctaaatcattttctaaattacgcctgcaattaggcattggtcaggggtgaacgactcttttcacagagagtagccaactagagaccttnnnnnnnnnnnnnnnnnnnnnnnnnnnnnnnnnnnatnnnnnnnnnngaagtagctgttgtcgtcaaagaaactttgtcatcggagaaacttttcttgtatacatgagactcaacatcaggatacgcagcttaaagatgggaattcagatatgaaagaacacaggcaaggaggcactgagggagaaagacacagactttattgctctgtggctcattgttactggaatattctaaaactcttgttcacatgctattaagacttataaagcagcaacagctgaggcgcaccaggacacaacttccatttctttaacatctgttcccttaacatcgccgaaatgatttacttttgaagacatgccttgcagtgtggctagctgtgagaagaaagcagnnnnnnnnnnnnnnnnnnnnnnnnnnnnnnnnnnnnnnnnnnnnnnnnnnntgtgactctgaaaccttggtgctcgccccttggccacagagctcagacccacgtaacccactggctcctgcattaacccagaaatacctcgcttgtatctgtgcacttagctgggaacttacccactgtag

SEQ ID NO: 11205 - DNA, 733 bp, Macaca Fascicularis
  misc_feature (1)...(733): n = A,T,C or G
gcagctgcagaagnnnnnnnnctgggcgtgccacagcgccccagcaggtcctctccaacggcgcccctgtctccaacttcacctacagccccgacaccaaggtcctggacatccctgtctcgctgttggtgggagagcagtttctcatcagctggtcttagcagggcggagtgtgtgaagtctctccggagggagactggttccccagggcagcagagcctgtgtgtgggcagcagctatgtgtgggcctgggggttggatgcgtcacctggagctaagcactgacccgagctcccacatcgctcgtttctacctcctgggccggggctctgactcccaacatgtctaggagaggtttctccctctatcgcgccgtgggccggggccccggagggctgctctgcgttagtaagattgtcaggtttgcccccctcacctgttgccggtgtgcgggcagcattagccacccccctccatctgtccccagcactggagaaaggggtgctcggatggaggtgtgggatgtgcgcctcagttcctgcctcacgcctgctgctccaccccaacaccaccacagcccggctgcccagagggctggatgcctgctggtccccgagcgagccccggaactcaggaaaattcacaagacttgggagattctaaatctgaagtgcaattgtttttaataaaaggggcattggaaaaaaaaaaaaaaaaaaaaaaaaaaaaaagg

SEQ ID NO: 11206 - DNA, 764 bp, Macaca Fascicularis
tacccatgcctgggcccctcccctcagggcccatggtaacgaacccctaggaaggagagaccgggtgtcaggggtgcacagtccacagtgagctgaagagcaaggtttcatggcaacatggcccggcccctcaccctccgtccccacaacgggacccgtggggcctgcctttgcagggcacagatgaccaaagtcccttcctgcttcctgttccctgtcttgctctggggagaaagaggggcctgatgagactccacacgggtagacacatcaccaggtgcatctgcaggccccgggctggctgcttgcacacaggagaagggcagcgggagggagcgtgcgtgtgagtgtgagtgtgtgtgtgtgtgtgtgtgcgcgcgcatggaaatccgggcattggatgtctgactccctccccacccaagcgaggaaggacccctcaccacccccatcggcgggacagtttacttgccaacttgccgtgtttttgccaaaaccaagattttgaaggaaatgagtggccagcgccagggcccaggccatgtggcctgcccagcctcagcgtcactcggtggcagggtggggtggggggtgggcagcagcatcccagcctagagacgcttcactttccttctctgtaaccagactttgagaaattgttcatttcatcaggctctgttcctcaatggccttttgctacgtgcctcccaagaaatttgtctctttttgtataaatgacaaagtgtgaaaatgtattccgaaaa

SEQ ID NO: 11207 - DNA, 754 bp, Macaca Fascicularis
  misc_feature (1)...(754): n = A,T,C or G
atgagatgaaggacaacctgntcctggacatgtatttggctccccacgtcaggaccctgtacacccagattcgcaaccgtgccctcatccagtatttcagtccctacgtgtcagccgacatgcataggatggcggcggccttcaacaccacagtggctgccctggaggacgagctgacacagctaatcctggaggggctgatcagtgcccgcgtggactcgcacagcaagatcctctatgcccgggatgnnnnnnnnnnnagcaccacctttgagaagtctttgctgatgggcaaggagtnnnnnnnnnnnnnnnnnnnnnnnnnnntgcgggcagctgtgctccgcaaccagatccatgtcaagtccccgcccagagaagggagccagggggagctgactccagccaacagccagtctcggatgagcaccaacatgtgaggggtggaccttggcctccaggacatctgcaccccctcccgatctccacggacctcctgacctccaggcggctcagtgctgcctgcagcccagctaagaggcctggccactgggtgccccccagcctgcatgcccttgctggggctggggaggcaggcggctgctagttgtggcccttcctggaaggagagnnnnnnnnnnnnnnnccctgtgggtttccgtccccagggagcagactgtgcggcacccaggcgcagcggccccgcttcccagacccctcctgttcccgccttggtcagggcagacaagtgggc

SEQ ID NO: 11208 - DNA, 913 bp, Macaca Fascicularis
  misc_feature (1)...(913): n = A,T,C or G
ctgcnaaanannnngtagtttggagatcctgnngggcattattctaacatgtagacagttagttggaaatttttggacataatattaaatgagtggtatctgtgaaattggttatattaggtggcttgactaggtttttttctataattgtatatggactgcattttttaaaaaaccacatatgcctttatgctagattgtaaaaaaaaattgtattacaatgcataagacatgtttttccctcatatgctagacttttcctagcatttcgtatttctgtgttgtcagtgtgtgatttttaaatcagaatttggtttaaaaaaatatggttgtaatatatgtgagaaatagtttggtgtttaccttatgaaaataaaggattgtaagtaaggtttcccacgcaccttatagcagaattcaatataatataatacactactttctgttttcaaacagataaatcataatatagtctgtattgtctgtaagatctatctcgtaaaccacattcttgacaactatttacttttgagtagtttgtattttaatatgtgacttttgtcttgaaaagtagtatagtcatagacttgtgcaaaacaaatttcaaatttatagatattaagtttgtaatgaaagaatcaaatgtgtatgtaaaaatactttttaccagtctggaacttgggaaaaatccaaggaatttgcaacatagattttaatgagctggtaaacacaaatcatgtcaataaaggtagtcaggatattttatccttagcattgcttctgcatcctgtgtgggattccaattcttgagtatgttcttttaaaaatcttaagaaccttttttcgttattaacatgtgtttactttcagcaaatatttgtattactgcttgattctgtgaaattcacagtag

SEQ ID NO: 11209 - DNA, 838 bp, Macaca Fascicularis
  misc_feature (1)...(838): n = A,T,C or G
gccgggcatgccgtgggatcctgggcagggaagnctctgggggtcggagacaccgctccttagcacccacgcagaacaccctgagggtcccagggggctctggagagagtggggtgggaggaagacttggcgccttcctagggaaggaaacgagcgcttcatcttgattctccgagaagcgtctgagaagtgctttaagtgtgtttgcatgcgccaggcggtgggcagcggggccctgtccagccctctcctgccatccttccccaagtgatgtccaccgccttgtcaccagcgacctgcctgtcatgcccacaccctgaggaagcatggggacccagacaggccgtggtcaggcccacgccaccggcccggttcggccacagcttcccatgtgcttgctgacatacgtgtgcctgtgtgtggtgtctgttgctgtgtcgtgaaactgtgaccatcactcagtccaaacaagtcagtggccctcgaggccacagttatgcaactttcagtgtgtgtcataacggcgtcactgctttttaaactcaataactctttattttagtaaaatgtcccaggagtcctcgaagctacgcggacttgcagaggttttattttttggccttagaatctgcagaaattaggaggcaccgagcccagggcagcagcctcggccccggattgcgtttgccttagcggatatgtttatacagatgaatataaaatgcttttttttcctttgggctttttgcttttttttccccccccttctcaccttcccttccccccgccccaccccccacaaaaaaaaagctacttcttcattccgtggtacgattat

SEQ ID NO: 11210 - DNA, 748 bp, Macaca Fascicularis
  misc_feature (1)...(748): n = A,T,C or G
caggtcaggtaccttggtggtcagctactagttcttccagccctcattgaggttaacaagnnnnnnnnnnnnnnnnnttctttggnnnantcaggcnnnngctttgtgactttcccacagagactggaatgcctcggcctgagaccactggcctattttctcagctgccctcttgaggtcctttaatactcaaattcccagctccccactgaggtgttttgatgcttgccttttgacctccccatcccctttagtccctgcttactgctttgacgttcacatcctcagtgtctcggtctttcttgccgagaaagcacagtagtctgggactgggcatttatcttctctgactgaaaatatctccttggtcttaaggaaaatactaacattgaactcactgacatgatcttagcttcttaaatcagactttgtggcttaaaagtttgggggttttctttgaaagtttccagccctattcagaaagcaactcttggctgtgtgcatttttcaactccaagcagcccaagggtaagtaaacaaaaaagtatagaagaaggtcagactttcttgtcagtttctgagaaacctggnnnnnnnnnnnnnnnnnnnnnnnnnaccagtattggattttattgaatttggtatgtgaccaaggtgggcctaaaggatggcgcaggtcctgggcaggagagaatttttccttatcacataactgtaatgtttggttgctcagcattagtgatggaag

SEQ ID NO: 11211 - DNA, 771 bp, Macaca Fascicularis
  misc_feature (1)...(771): n = A,T,C or G
taaatgttgtgcctatgctaccgaaatgcttcggaaaaaagggcgagttaagaaagcccacaaatccaagacccattgagaagttggtgggaaataaggtaaaattttgaactattccctagtcagttccaaacttgaaaacagaatcagtgttaaannnnnnnnnnnnnnnnnnnnntacatttgcannaattaatcagccccagagtgctttaaaaaattatcttaaataaaaataatagaatcactagtcagtaaagatatttgaatatgtatcatgcccctccggtgtcttcgatcaggatgacacatgccatctttgagaggatgtgcagacaggctggcgttctacatgccttttcttactcggaaacatgacctgtttgggagtgcaggattcaaaggtggtcccaccgctgtccctattgcaaatggcagttttaatcttatcttttggcttctgtagatggttgcgattgatccttaaccaataatggttggttctcatctctgtccgtgcttcataggcgcccccttgtgtgtttaaagaggggaaactttgtacctttagagcataggtgaaatgagtgaatggcttggagtgcactgagaacagcatacgatctaatgctttgaggaaaaagaatgatgctgtaaaattgatgggtggtgtgtttgagaagataatcattgcttatgtcaaatggagctgaatttcataaaaacccaaaatacagtgatgaagtgctgggcnngctgtatttttttctt

SEQ ID NO: 11212 - DNA, 749 bp, Macaca Fascicularis
  misc_feature (1)...(749): n = A,T,C or G
gctggagtacagtggtgtnnnnnnnnnnnnnnnnaacctctgcttcctgggttcaagtaattctcttgcctcagcctctaatttttgtatttttagtagagacggggttttagcaatttggccaggatggtcttgatctcttgacctcgtgatctgcccgccatggcctcccaaagtgctgagattacaggcctgagccactgcgtcatccgagaccctgtctttaaaaaaaaaaaagttctccagaggaattggagtagggagggaactcacaaatggctttatggagaagatggcgttggaataaagttttgaggaatgcgatggagattttttggtaggaacagaagagtatctgaacaaagggattaggttgggcaaagacatgaggcagcaaagtttagtatgtctggaaacagcaaatagcccagttgagctgtagggaaacatttgtgttgggtgatggttgggaggtaggttggaaagagaaaggtagaagagctagaggtcagtaggtgggttnnnnnnnnnnnnnnngagagtttggactttatcctgttnnnnnnnnnnnnnnnnnnnnnnnnngtgagcagagttttgataggaccaagggaaatggaaacagcattcataagattataaaactatcatataatcatgacgtgttaagggtctgggctgtgatgctggttgtgnnnnntgaaaagggtaaagataaannnnncaaaacannnnnnnatttactggac

SEQ ID NO: 11213 - DNA, 794 bp, Macaca Fascicularis
  misc_feature (1)...(794): n = A,T,C or G
atgagcctggtaccaatttngtctatnnnnagnnngatggcatcatggccntnnnnnannnnactctgtccgtggacggggctaccacagctatgcagggcatggtgcaggagggcgccctcaccagccccatcttcagcgtcnnnnnnagcgaccagcagggctccagcgggggagcggttgtctttgggggtgtggacagcagcctgtacacggggcagatctactgggcgcctgtcacccnnnnnnnnnnnnnnnnnnnnnnnnntgaagagtttattattggcggccaggcctccggctggtgttctgagggttgccaggatatcgtggatacaggcacctctctgctcactgtgccccagcagtacatgagcgctcttctgcaggccactggggcccaggaggacgagtatggacagtttctcgtgaactgtaacagcatccagaatctgcccaccttgaccttcatcatcaatggcgtggagttccctctnnnnnnnnnnnnnnnnnnnnnnnnnnnnnncggctactgcaccgtgggggtcgagcccacctacctgtccgcccagaacagccagcccctgtggatcctcggggatgtcttcctcaggtcctactattccgtctacgacttgagcaacaacagggtgggctttgccactgctgcctagacttgctgcctcgacacgtgggctcccctcttcctcttggccctgcaccctcctggggcattgtatctgtctttccactctggattcagccttcctttttcggactctggacttctctat

SEQ ID NO: 11214 - DNA, 801 bp, Macaca Fascicularis
  misc_feature (1)...(801): n = A,T,C or G
aagagttgattttantnnntgttttaaaacttagtaaaacaaatattcagaagtaacttgataagaaatgaatgtttctaaagaagtttctaaagatttggaaaatgctccttgtcacattagttagtgtgcaccctacaaaaagtgaccttttaatataaattaagaatatttttataattggaatatacttttcttaaaaaaaaaggaacagatagtttcatctagaatgaaagttccacatatgcatcagtgaatataggtatctacacatacttacctacttatatggatatctgtatagataatttgtattagagtattatatagattcttagaagggtcgcaagtaagtttcattttttatctgggctatatacagtccttaaatgcataaaagaaataatgccatgattttatttcagcaaaaataattttatttattttgcctatttatagttaaaatatttttctttagtttgaaaatgtgtattaaagttatgtttttgagttacgagagtcttataactacttgaatttttagttaaaatatcttaatgtaggttatagtcactttagatggaagattacctcacatatgttttcttcagtattacttaagattgtttatttagtggccgagtttttttcttttcagcctagaggcagatatcttaccatctggtatttatggtctatcttgtatttaaatatatgtacacatataaaagttgatactgtggcagtaaactattaaaagttttcactgttcaaaaaaaaaaaaaaaaaaaaaaaaaaagg

SEQ ID NO: 11215 - DNA, 675 bp, Macaca Fascicularis
  misc_feature (1)...(675): n = A,T,C or G
caggaagcctagctccaagcacgcagtctgtagacatttttgcctttgcccttgnnnnnnnnnnnnnnnnnnnnnttcacaaaagctgcaaagacagaacatgccgtgtgcctttagttagcacagcgggcagcctcagtgaaactcttaggtaaagcagtaagttctggaacccagagctactgagtatttcgnnnnnnnnnnnnnnnttttgctatacttatctgcaattcaattacaccactattcaaataattcccctcctaaaaccaaaaaggagggaaacgtcaactccattgcaattatttatcttcctcttctatctctgttatacaccggggcatagaatgctcgtatacatctctttaacaaccaccaaccttaagccatgtagatgaagttagtgcatcaacgggatacagttccatattgccttaaacctccttgttttagacacactaacatttatgcccaattgcagattattctgcagagatggaattgcatgtttgtgttgtatatttagtatgaacttttttcagaatataatatttcttagttatcaaaagcagttggaaaacgtttgcaagactatgaatatagaattgctgcttttatattttaactgcagattgtgaatttcactgccttatattatttatttctgaaacaaaa

SEQ ID NO: 11216 - DNA, 793 bp, Macaca Fascicularis
cgagccggcagagcaagtggagctggcgtgtgaaaaagcaaccggctggcccacgtgtccgagccgagcacctgtgtctatgcactgacgttcgagaccccccttgtctgccacccccacgccttgctagtgtacccgaccctgccagaggccctgcagcggcggtgggaccaggtggagcaggacctggccgacgagctgatcaccgcccagggccatgagaagttgctgcggacactgtttgaggacgcgggctacttcaaggccccagaagaaaacgaacccacccagctggagggaggtcctgacagcttggggctggagaccctggaaaactgcaggaaggctcataaagaactgtcaaaggagatcaaaaggctcaaaggtttgctcacccagcacggcatcccctatgtgaggcccacagaaacttccagcttggagcacttgggccacaagacacccagagccaagcctccagagcagctgcggggcgacccgggactgcgtgggagtttgtgaccctatggtgggaaggcagaggtggacacggccgagagccctggagattggctggtaggacccccagggaccagcgggccaggcttgtgctcaagagaagcagacgaaacaaagattcaaggttttaattaattcccatactgataaaaataattccatgaattctgtaaaccattgcataaatgctataatgtaaaaaaatttaacaagtgttaattttaaacagttcactacaagtaaatgattataaatcctaccttccgggttaaaa

SEQ ID NO: 11217 - DNA, 714 bp, Macaca Fascicularis
  misc_feature (1)...(714): n = A,T,C or G
tannnnnnnnnnnnnnnnnnnnnnnnnnnnnnnnnnnnnnnnnnnnnnnnnnnnnnnnnnnnnnnnnnnnnnnnnnnnnnnnnnnnnnnnnnnnnnnnnnnnnnnnnnnnnnnnnnntgccnnnnnnnnnnnnnnnnnttcgaagcaattgatgagattgagatcctggttttcagaaacgattagagtgatttatgtaagttgggaggggtttttttgatagggttggtaaggtcttaaccttaaaggaaaggcatacagagnnnnnnnnnnnnnnnnnnnnnnnnnnnnnncaaagaagcctgaggtaatggaggaaaggtaagaattgattctgacagaatcttgagnnnnnnnnnnnnnnnnnnnnnnagaagtcactgtgtccnnnnnnnnnnnnnnnnnnnnnnnnnnnnnnnnnnnnnnnnnnatgggatctcaacgaaggcaaacacctttacacgctagannnnnnnnnnnnnnnnnnnnccctgtgcttcagccctnnnnnnnnnnnnnnnnnnnnnnnnnnnnnccccagcatcaagatctgggatttggagggaaagatcattgtagatgaactgaagcaagaagttatcagtaccagcagcaaggcagaaccaccgcnnnnnnnnctccctggcctggtctgccgatggccagactctgtttgctggctacacagacaacctggtacgagtatggcaggtg

SEQ ID NO: 11218 - DNA, 691 bp, Macaca Fascicularis
  misc_feature (1)...(691): n = A,T,C or G
atgcccagcccagacgaatgcgtcaaactccgnnnnnnnnnnnnnnntgccatcgtgagtacctggcttgcagtttcttcaaaaaacattgacatcacagaacacatagacnnnnnnnnnnnnnnnnnnnnnnnnnnnnnnnnnnnnnnnnnnnnnnnnnnnnnnnntacgagtatgcataccctggaccacttgcatggggtttccaaccgagccagcctgcactacacaggggagagtcagctaacagaggtattacaaaatctcggcaaagaccaatatccacaacagtcgcttgaacaaattggcacccgaattgccaaagttttggaaaagaaccagacatcctgggtcctctccagcatggcagccctctactggagggtgnnnnnnnnnnnnnnnnnnnnnnnnnnnnncctccgccaggctctgcactatgcaccacaccagatgaaggatgtgcccctnnnnnnnnnnnnnnnnnnnnnnnnnnatgccaagctctggaatgacgccgtcatagtggccaccatggcagtagagatcgcaccacactttgctgtgaaccacttcactctgggcaatgtctacgtggcaatggaagaatttgnnnnnnnnnnnnnnnnnnnnnnnnnnnnnnnnnnnnnnnnnnnnnnnnnnnnnnnnnnnnnnnnnnnaatccagaccatcc

SEQ ID NO: 11219 - DNA, 139 bp, Macaca Fascicularis
caggcccaggggctggccctgaaaaggctcactgcaaatacgtgccttagtttctcagagcctgtcacaaaggctggctgatcccaaaggtctcaactcctcatcatttcaatggtgtctctgttctcaggctgcctcc

SEQ ID NO: 11220 - DNA, 704 bp, Macaca Fascicularis
  misc_feature (1)...(704): n = A,T,C or G
ctcacgcagnccactgttgcacagggtggggggctgttaacaacctgcaccccctttgatgccctcagggcatgaagtgggnnnnnnnnnnnnnnnnnnnnnngcaggaccacaccccagnnnnnnnnnnnnnnnnnnnnnnnnnnnnnnnnnnnnnnnnnnnnnnnnnnnnnnnnnnnnnnnntcctctttcttcccnnnnnnnnnnnnnnnnnnnntgtccccttgagctacaatgtcactccctactgtcttcgcttagttcttttcctcccaggctggacatttgctnnnnnnnnngcattctgtttgaggcccctccccagagagggcnnnnnnnnnnnnnnnnnnnnnnnnnnnnnnnnnnnnnnnnnnnnnnnnnnnngagccctgcagagggagggcagctgaggcaggaatggcggagaggcaaccttctactctgtggggtagctttggcgtttcccttggatgattgggctggagtgggtgggcagagtgcagcctcctnnnnnnnncttgaatcatcttccctggggtccttcccccaagtcatagagggttgatggtagagctcggctggaacttaggtgcgcctgtttgtcacttcctgctgctcatttagtccccaggggagtggtggtggtacccatggtgggcacttcttgcctggggtggannnnntcnnnatcacgaagcgctgc

SEQ ID NO: 11221 - DNA, 677 bp, Macaca Fascicularis
  misc_feature (1)...(677): n = A,T,C or G
agatgtagtannnnnncaggggtctggcggacccctcctgtnnccactccagtcacattttctgcttttgaggcagaggtgacattaggacgtttacagcctccacatgaattgagtgttcatttacctcagtattaccgtgttcatttttgtcctcgtgctacagttagctccctgctgcctcctgcaggtcttacttcagctcttgcctgtgacccacacagcttctgggctctgcctctgctctaagaagtgctgtgggggcagagaaccaggaaggacatgctgttgggaatgtacacctgggcagaggcggccctgttaagatatgactatagccacggccagggactggatccatgggtctctggaatctgaaacctcacaaatgccagtcttgacccctagcagcagagataagaataaaggggttggtttgctattaagtcagatggggcctctctccttgtcatgctgtaccctgatgggtaacagacagggattgaccatcttactgttgtacaggtagcaggtggtgttggattatcccatatgaagctgggacagctgttcctttctcatagtgataacttgggtctgttgtcctctaaggaacgtgaaacatacacttcttaagctgaaccacgtaaacttgaaattctgcgcactgggagaaa

SEQ ID NO: 11222 - DNA, 726 bp, Macaca Fascicularis
  misc_feature (1)...(726): n = A,T,C or G
tgtggcccacagcacttccacggtgactcctggttcaggaatcccnnnnncnctccagaggcttcccagggccctcggtgcccatgnnnctgcccacctggaggcctgagtaaggagtggctcagcctcatgctcccacactgcccctgctctttgccctgtatcccatgaggctaggagacaggagccctgggtttgagccctgcctcccccaactgcctaatgtgggaacccaagcaagacccttctacnnnnnnnnnnnnnnnnnnnnnnnnnnnnnnnnnnnnnnnnnnnnnnnnnnnnnnnnnnnnnnntcctgagggtcattcatcccatgcccagctcccccacatcctactcctaactgatgtgaccctacccgaggccgccttggcttttgtgtcaccctgttccatcccatcaccccaaacacaccctagtccttcagccttgggctctggcatctgagcctgagcgctgcccctgctgtgggaaaggtagggaagaaggggatctccctcctgggcccacccagccgcctttgcccactcagggagcaggtcatgcatgccagtccctgttgccgcatggagctcctcagcccactgacctctccgtgcctggtgcgggccaggcccccgtcttctgcctgcctctgcttccctgtcatgcatggtggtggtgtttctacggtgtctggttctgtgcccgtctctgagacagtct

SEQ ID NO: 11223 - DNA, 740 bp, Macaca Fascicularis
  misc_feature (1)...(740): n = A,T,C or G
catgatcaccgccatcntcctgggcttnnncggnctcttgctgggcatagcgggnnngcgctgcaccaacattgggggcctggagctctccaggaaagccaagctggcggccactgcaggggccttccacattctggccggtatctgcgggatggtggccatctcctggtacgccttcaacatcacccgggacttcttcgaccccttgtatcccggaaccaagtacgaactgggccccgcactctacttaggctggagcgcctccctgatctccatcctgggtggcctctgcctctgctccacctgctgctgcggctctcacgaggaccccgccgccagcgcccggctgccctannnnnnnnnnnnnnnnnnnnnnnnnnnnnnnnnnnnnnnnnnnnnnnnnnnnnnnnnnnnnnnnnnnnnnnnnnnnnnnnnnnnnnnnnnnnnnctctggcccgtaggccccactggccttcccagtgccccaaggagaggggtcctggcctgggcccattcccctgtagtaacctcaggggccggccacgccctgctcccggagcccagccttggccacgcccccgtgtcttgcactcccgcggcccctgcaggtcaagaactgctcttgggaagtcgcatatccccccccctgaggctggatccctcatcttctgaccttgggttctgggctgtgaaggggacggaggtgtccccgcacgtttgtattcnnnnnnatacatgca

SEQ ID NO: 11224 - DNA, 715 bp, Macaca Fascicularis
caaagaacagaccaattaaaatacttctttgcagaagtggtgtagttctacaaagtggcaaatgaagttcaacttaatgttctctataatgtattattttattatggtttttttttttacaattagcctttttttagttaatttttgtcaaatgaaacgacttcaggcaagtctcttttataatggtttttccagtgccatttattctagtttatcatgttttgcatgcttgaaagtatgaatgtgctctttcctaaaacatggcaaatgaatagatgtagagaataaagatattacttacaagatgaaatgattagattagaagtgtctctttattaaactttgtcagcctgactgggtacaattcttttgttaatttgcagtgtggtttgtagacacgtatacatgttgtcaataataagattttgcaactggatgacacaagattttacttgaacagcgaagggcaaaaatcatgattgtggaagacattttttaaatctgattttgcagtgatcacttttaaaccctgtagtgatgtaagactaaaatgtaattgctaagattttgttggttaatgtaaagatacgacttttctgcactgtactctcttcataggattgtaaaggtgttctaatacaattgcatgatgtagtaagcctcttaaatatgtgtgttaaatatattgagtttggattaaaatgttgatctgatt

SEQ ID NO: 11225 - DNA, 608 bp, Macaca Fascicularis
  misc_feature (1)...(608): n = A,T,C or G
aggagactggagatgagtgccaggggtgccttccctggaggagctgggggcctgaggacgttggaggagatgagtgtgatgagggctcaacatggggcaggacactgggactggcaaggaggtgactggctgactgggatggaggcaacatttaggaacaggcccagattctggcttggatggctgtgaggaaaggaataggcttttctttttttcttgctttttttttttttagatggagttttgttcttgttgcccaggctgaagtgcaatggtgtggtctcagttcactgcaaccttcgcctcccaggttcaagcgattctcctgcctcagcctcccaaggagctgggattacaggcgcctgnnnnnnnnnnnnnnnnnnnnnnnnnnnnnnnnnnnnnnnnnnnnnnnnnnnnnnnnnnnnnnnnnnnnnnnnnnnnnnnnnnnnnnnnnnnnnnnnnnnnnnnnnnnnnnnnnnnnnnnnnnnnnnnnnnnnnnnnnnnnncgtgcctggctgccttttctgagataggttgagggactatgatgaaactgatttgggatccagcaatcccacttctggatatttacccaaaatatttaaaat

SEQ ID NO: 11226 - DNA, 760 bp, Macaca Fascicularis
  misc_feature (1)...(760): n = A,T,C or G
gagccagccccgtgccaggcactaaggacgccacgcagatcgtggagacagagatgggtgatggaacttggaagacannnnagttaccaaaatactttaaaagtctttgcatcccaaattgtattaataattatnttcttgacttttggctgtaagattttgtgtaatttttgaatttggtgttttctagaatttttaaaggccactttgatttagttttaaatttcaaatatgtttaaaaatagcaattaaaattatgtaagcaaggagcctgtttatagatcatgccttgaaacctctagaactaatctgggtgacttttaaaaaaaatgctaatgagtctgaagctttttattaaatcttgtaatttagagacaatttttaattttcacctcatgctgaaggctgactcctttaacttgccaccaaagattttttttttgaacacttagttctttttgtgtgttaattatctaagcctaattaatagatatacaagtatatctaacttagctttgccacaatttgatcaccatgaagccaaagctggcatagagtaatgggctctagatagcatgtatgttgtattggtgaaaaatgtgtgtgtgtgtatatatacatttttatccccaatgtagagtatatgactaggtcttgtaaacgtatgaaatggctaaaagcccacactgtttgacaaatgttatgtaaccctgccaaagttctgatggccaccacagatttgctgtttgaattatgtatg

SEQ ID NO: 11227 - DNA, 525 bp, Macaca Fascicularis
  misc_feature (1)...(525): n = A,T,C or G
gtgaactccaacaaataagtcttctccacagcgnnnnnnnnnnnnnnnnnactcaaagctgattctgccagtggggctggggacagaagtgggtggggagggcgaaatcatggagggcctggggagggggctggagcgggagagggtcagggtcctgcccatcagagtggggccgcctgcgtcctnnnnnnnnnnnnnnnnnnnngggtggggggcagctcttgcctccctgtgtgtgtgagacggtgtccctcaccatctcccagtgccaggcacagtnnnnnnnncctgatggagaatgaactagacaggacaggctggggagaggggagggtcccatgnnngggacaccctgctgattccaaacgaggtggcccgtccatcccacttcctgcagctagtgggagggggactggagaagccctgggagattgaggggatgagcaaaggctcagaaacatggagggccggggtgggggacttgcataggttgatgagngnnnnnnnnntacttanntaaacctg

SEQ ID NO: 11228 - DNA, 759 bp, Macaca Fascicularis
  misc_feature (1)...(759): n = A,T,C or G
agacaaagtaatactttgcttgtaaacagatgtggtagagataaagttatctaacaaattggttatattctaaaatcagatctgctttggaaattattgcgtctgatacatatctaagtaaacacaacattacttggagggttgcagtttctaagtatacttttggagagcatgaacagcagtctagaatactagaaacatctacttgggtagcttggtaccattatcctgtggaannnnnnnnnnnnnnnnnnnnntcattgatgggacatgaagacatgtttggaaatgagattatttcctgcgtaaaaaaaaattcctacaatgtgaaacgaattatttgatcctgatgtatgggacagcatatctgtaccagtgctctaaatgacaaaagctagggtgacaagtacatgttcctttttgaaagaagcaannnnnnnnnnnnnnnnnnnnnnnnnnnnnnnnnnnnnnnnnnnnnnnnnnnnnnnnnnnnnnnnnnnnnnnnnnnnnnnnnnnnnnnnaaaatatgcagttttttgagcccacgaatagttgtcatttcctttatgtgcctgttagtaaaaaatagtattgtgtatttgctcagtatttgaactgtaagccctatttatactgttccatacaaaagctatttttcaaaaattaatttgaaccaaaactactattacagggaaaatttgccaaaacatgtcccctcacacaggctacacgtgatactgtattntgttcaatgtaaat

SEQ ID NO: 11229 - DNA, 748 bp, Macaca Fascicularis
  misc_feature (1)...(748): n = A,T,C or G
gatgagtccaagagcgtctgcaggnnngcagggacaagccaggaannnnnnnnnnnnnnnnnnnnnnnnntcgcctggggcagtgggccatcggctacgtgagctcagatggcannnnnnnnnnnnnnntccctgccaacaaacccctgtcccaggtgctcctggagggacagaaggatggcttctacctctacccagatggaaagaaccacaacccagacctgaccgagctcgaccaggcagaagcccagcagcgcatccacgtatcagaggagcagctgcagctctactgggccatggactccannnnnnnnnnnnnnnnnnnnnnnnnnnngagcaacaaggatgtgaagatcgagccgtgcgggcacctgctctgcagccgctgcctggctgcctggcagcactcggatagccagacctgccccttctgccgctgcaagatcaagggctgnnnnnnnnnnnnnnnnnnnnnnnnnnnnnnnnnnnnnnnnnnnnnnnnnnnngaggacggcagtgaccaggaaggcagagagttggagctggagcaggcgcccgttttggctcctcagttgcccccacggccagatctgccccccaggaaacccagaaatgcccagccaaacgtgagactcctaaaggggagctcccctccagctgccctgggaccccaggaccctgccccggcctgaaggccagggcaccgagatgtgctgctaaagggcaccccaagggctggaagggggtt

SEQ ID NO: 11230 - DNA, 704 bp, Macaca Fascicularis
  misc_feature (1)...(704): n = A,T,C or G
gcagcgcttcgtgatnnngannnnntccaccccaggcaagaagtgcccaccatgggtaccaccaccactcccctggggactaaatgagcagcaggaagtgacaaacaggcgcacctaagttccagccgagctctaccatcaaccctctatgacttgggggaaggaccccagggaagatgattcaagnnnnnnnnaggaggctgcactctgcccacccactccagcccaatcatccaagggaaacgccaaagctaccccacagagtagaaggttgcctctccgccattcctgcctcagctgccctccctctgcagggctcnnnnnnnnnnnnnnnnnnnnnnnnnnnnnnnnnnnnnnnnnnnnnnnnnnnngccctctctggggaggggcctcaaacagaatgcnnnnnnnnnagcaaatgtccagcctgggaggaaaagaactaagcgaagacagtagggagtgacattgtagctcaaggggacannnnnnnnnnnnnnnnnnnngggaagaaagaggannnnnnnnnnnnnnnnnnnnnnnnnnnnnnnnnnnnnnnnnnnnnnnnnnnnnnnnnnnnnnnnctggggtgtggtcctgcnnnnnnnnnnnnnnnnnnnnnncccacttcatgccctgagggcatcaaagggggtgcaggttgttaacagccccccaccctgtgcaacagtggnctgcgtgag

SEQ ID NO: 11231 - DNA, 712 bp, Macaca Fascicularis
  misc_feature (1)...(712): n = A,T,C or G
tacccctacctgnnnnnnnnnnnnnnnnnnnnnnnnnnagatgccgaaagttcagtataaatcgaactgtaaaccatccacatttgcatatcctgcccctctggaagtaccaaaagaaaaagaaaaggaaaaggtttctactgctgtgttatctataactgccaaggctaaaaagaaggaaaaagaaaaggaaaaaaaggaggaggagaaaatggaagtggatgaggcagagaaaaaggaagaaaaagagaagaaaaaagaacctgagccaaacttccagttattggataacccagcccgagttatgcctccccagcttaaggtcctaaccatcccagagacctgtagataccaccctctcaaaccactctctattggaggcatcatcattattaaggataccagcgaagacatcgaggagctggtggaacctgtggcagcacatcgtccaaaaatagaggaggaggaacaagagccagaacccccagaaccatctgagtatattgatgattaaggaccagagcatctcatttgcttatgtgaagaagaagattgtccaggctcatattgggaatgattatgaggaaattagtggtgagacgtcctattcaatgcatgtatcgttgcctcttcggtgacctgaagaaccctgtctccaagtctttggttgaagagaagatatatgactgtttagtgtgctctttcacagaac

SEQ ID NO: 11232 - DNA, 715 bp, Macaca Fascicularis
  misc_feature (1)...(715): n = A,T,C or G
gtattatggcactcnccgaatnnnnntgnaggcgtttcctctacagacatagtgttacagggaagtgaaatgcaaatgtgcaatttttttaaaggagcttttaaacaatgtaatagttggtgttgagaacatcagttgccttagtctaagatttcataaggctgagtttgcacgcttggacttcagttgtgctagcatgtaaagaatggtggactttaaaaccatgagaggtatcattacaagtcacctggaacagactcaaagaacaggttctttgggcaacagacaaagaagaatcaagttctgtgccgtcccgtgagtgtgtctgagtaccattcactggcgttgctgcttagtctgggacgtgtgtgtgactcttaacaatcgctgtctgaaaatgagagagaagacgtcggaagcacgttgtgttcataatgtactccacaatggccagtccaattgctatctatttttttatccagaggcttaattaaatgatgtggtaaaatgatgtttgagcattaagacaatgtaattctttatttctggnnnnnnnnnnnnnnnnnattaaatttatctgtttaaaaaaaatgacaaaagttaccaccaaaaccccctttcccatcttgcactgtttgttttggatcgggtttgggggaaagagatgttttttaattgtctactttgtttgaacacttttgttgtggttcnnngt

SEQ ID NO: 11233 - DNA, 542 bp, Macaca Fascicularis
  misc_feature (1)...(542): n = A,T,C or G
ccccannnnnnnnnnnnnnnnnacttnnngagccagcccccagccgcagcccngaagctgcgggaacaccgagacccctcatccttcnnnnnnnnnnnnngtgcaggcatcatgggccagatgcctgcggaccgctttccttccacagagagaactgcactaccttcggtagtactttaattattgttttccctagcagctgtgacctccataagacactgaagatacttctcgggaaaggatcatcgccgttgaaatgaaaagagagacaaaaaaaaaaaaaaagtagaacccacatgaagctctgaaaccaaacagcatcctgacataagcttcccagaggcagaagagactggagcaaagttggaaacacagagaagcatggcttcccctcagcacagaccctccagactgggtttcagagccacaccacccaccctcccacacagtcggccacagggagaactggtgctaaccagggtgcttgctttggtcacgttcaacgcactacagagctacgacacagggaaaccttaggagaa

SEQ ID NO: 11234 - DNA, 698 bp, Macaca Fascicularis
  misc_feature (1)...(698): n = A,T,C or G
caggacacagttganngnnnnnatagggctgtgacannnnngctgagccccgcgggtgtccgtagaggggactctgggccaggtactgcactggacactgctcatccctgggtgtcgggcaggtggctgcaccctaggccaggtgcggaggcctggcaggcaggcttggcatggtcggccgggccggggcacatgctgggtcgccgctggctgcaccttctccgcacagatgcctcggagcagcgggtgggcgtgggccgcgcagtgcggcggggccttggctaccacacgcggcatcgctccttggggtgcatgggggtgccctgggcacagtggaacgtgtctgcaaaggcggccaggttctgcagtgaccccagtaccctgtgggtgggcgggtgtgacagcaggagcattgccatcttggacaaacacggtcattttaagttccccgtgattaaaaaccagcccaaaacatcagcctaatggctcatgtcagtatgaccagaaacatttcaactgtgagataaacccccatctgaccagaaacatgccaatcctgagaataacctcccttacaaccagagatattccaattctgcaataaaactttccttcacacagaaacattcccagcctgtggtaggctcccccttcctaaacccttaaatacccttagtcggtaagagaatgctcttggc

SEQ ID NO: 11235 - DNA, 1379 bp, Macaca Fascicularis
  misc_feature (1)...(1379): n = A,T,C or G
tgttttgaacagtggggtgtgagaccaaggccctcctggatcactactatgtatggaggcaaaaacatcagttcacactcaaacattgntttcagcaatnnnnnnntagacccctggtcaggaggtggagtaactaaggatatcacagacactnnnnnnnnnnnnnnnatctcagagggggcccaccactnnnnnnnnnnnnccaagaatgccttagatcccacgtctgtgctgttagcccgtgccttggaagtcagacatatgaagaattggatcagagatttctatgaccgtgcaggaaagcagcactgagaaacttttgattgttttcagtttcttcttttatgttctcaccaccacattcccattcactttggttttctacgtgtagttaccttctcttgtgtatcattagatttgatgggccaaggttgagatagaatagagggtgatgacggtaagagcaactgtcccatgaatgtgatttcctgggttctcactgtctttgcaccatgtctaggaagaatcttcttgataactctcccacgccatcagtggccttcataaccggagcagagctcctgattgcttttcataagagggagagttactttctttgtatctctgcaagcagagatttctttttggctttgaggttgaagtctctttagcccatttgtaagtccccatccctaccctacacaaagtaaaagcagaagatagattaaaaaatgatgtaattgcagctggtaggatgtctggtgccaatccaggaagtgagagccatttcttttgtactggatttaatgactttgaactgtgcnnnnnnnnaagaatacagctggaccttatacctgtgtgttgcttctgaagctcactccggctccggctgttgggaatgctgtgtgcactgggcttagctggttttggaaagtcctttaattttttctcttccacttggcagcttttcttagttctgggatgttggccactgtggtactgccagtaagaaatctggcctttttctgctccatttctctttgtttctaaggtcagttttgtggtaatttggttgaattctgccagtttaggaaaatgactctgttttgtctttttaaatctgagcaagctttatgctgtagtcactaattatatttcagtaagaagcctttaaaaattgatgaatcagctgttcccaaagtagaatatagtaatatttagcttttaaattttttaaattttattttctgatagttgttactgccgtcattaaaanagannntgttagacactaacaggcaggtgcacgagaacttttctgtataactcccaaaagacaagctcgaccacattcatgtcagtgtcagcatattgacata

SEQ ID NO: 11236 - DNA, 725 bp, Macaca Fascicularis
  misc_feature (1)...(725): n = A,T,C or G
ctgaagaggatgggcattgaggtcaaaggaggaatattcctatgggatccacagccctcgagccccnnnnnnnnnnnnnnnncacctcctgcaggagagccgagcttccctgtcgttcaccaggacctgggccatgtannnnnnnnnnnnnnnnnnnnnnnnnnnnngagcagccacaaacctcccgnnncagggcgaacctccagctgccagtcccgaggcttccacgtgtcagagcaaatgtgatggcccagaagaggagctctgtcacaggagagaggccagggctttcagtgaaggtgagcaggagaagtgtggttccgagacccctcacaccaggaggaactctaggtgggacaagaggagaccggagcaggaggacagcagttccaagaaaagaaagcttttataggaaagcccaatgacatgggccagcagccacagcatattgtaaactgaagatgaccagctcgggggaccatctagataagcttatttgttttttgtaaggagcttgtgcgctgttggaaaacacggaaaatgcatccttaatgcctgagcctctggtcatcttcagtactttctgtcatttgcaaaagctttcagagggcattgtgtatcagtaataatgtccttgaagtcagagactggaaatgttgatctcttactcttctatagacaaggaggtcagactggagtgaatgttgtaaaagttaaatgtatat

SEQ ID NO: 11237 - DNA, 667 bp, Macaca Fascicularis
  misc_feature (1)...(667): n = A,T,C or G
gcccctccccgcnnnncgtccggcttccnnnnnnnnnnnnnnnnnnnnnnnnnnnnnnnnnnnnnntgccccggtgtgaccgcggggggcggcccggggccgctgggcggtacctccacacccgcccccacgcgttctccggaccttcgggcctcagggcgcctagaaggcaaggacgcagacctgaaggcggccggtgagcggggcgggttctgctgggtcgggaagaaaaataattctgcaaggtagtttgttttttattaattcgcgcttggccacctcatctgtaaagagattctaaaagcgagatctggaaaagtgctttgtagactccnnnnnnnnnnnnnnntcctttgnnnnnnnnnnnnnnnnnnnnnnnnnnnnnnnnnntcttaaaggtgaagacacggagacccttcctccagggacnnnnnnnnnnnnnnnnnnnctctcatctgctgccgcatgtgtccactttgcctttaaggagttcttaaaggcaagggcctggaagcccttgnnnnnnnnnnnnnnnnnnnnnnnnnnnnnnnnnnccctttaagattattaaaggtaaggggtggacagactnnnnnnnnnnnnnnnnnnnnnnnnnnnnnnccctttgggccagggcccagggggcaccagcaagaggccaccnnnc

SEQ ID NO: 11238 - DNA, 770 bp, Macaca Fascicularis
  misc_feature (1)...(770): n = A,T,C or G
gtcaaacannnnnnnnnnnnnnnnnnnnnnnnnnnnnnnnnnnnnnnnnnnnnnnctaagggcttttgggattttgacgggacctgcaagggagaagacactgagaagccgatgatctgcaagcatttgctcttgtttccacatcannnctgggatatttcagctgttgttnnnnnnnnnnaagcgatcaactaaaagcacttgtttcaagttttgttctgcactccgaagactgcagttgtagattcagctgaatagccacgggaagtgaccaagcagacacccgattggagtccgttgaatatttataccctccgtggagcccttcnnnnnnnnnnnnnnnnnnnnntttcctctagcaaatacttctttctccttgcttgcctccgccatgatatttgaataagagatggccagaggataacacttaccttttaaaaactaagctaaaaagnnnnnnnnnnnnnnnnnnnnnnnnnnnnnnnnnnnnnnnnnnnnnnnnnnnnnnnnnnnnnnnnnnnnnnnnnnnnnnnnnnnnnnnnnntaacccccagaatgcaaaatcaggnnnnnnnnnnnnnnnnnnnnnnnnnnnnnnnnnnnnnnnnnnnnnnnnnnnnnnnnnnnnnnnnnnnnnncagcaacggaaatccatccacaaaggatgcagtgccccaacttgtannnnnnnnnnnnnnncatgtgataatttactgaagaaatctagtgtactttaaatttttttcataaaagtttacattgtattgtag

SEQ ID NO: 11239 - DNA, 762 bp, Macaca Fascicularis
  misc_feature (1)...(762): n = A,T,C or G
aaccagaggtcaagacaagcaggatgaggatgaggaagtccctgatcgnnnnnnnnacctagatgagcaggcagggacncnnnngnnncccagtccttttgccacctcacagagctcagagatacatggatgggcaccttgcaccacgccgccgtctgttgccccccacacnnnnnnnnnnnnnnncctccttcaccatccagtgtctgcagcgccagggcagttgtgaggatttacccatcccaggcacnnnnnnnnnnnnnnnnaattcagggcccaatagggctcagggttcctgggcaacaccacctcagcggggtcggctcctgtatgctccgctgttgttggtggaagagggtgcagcgggggaggggtacctcggcagatccagtggcccactgcgcaccttcacctgtctgcacgtgcctggaacccactcggaccccagtcatgggaagaggggcagtgccgacagcttggtggaggctgtgctcatatcggagggtctgggcctctttgctcgagacccacgtttcgtggccctggccaagcaggagattgcagatgcatgtcgcctgacactgnnnnnnnnnnnnnnnnnnnnnnnnnnnnnnnnnnnnnnnnnnnnnnnnnnnntctatagcgacgaggagtccatcctttcccgcttcgacgaggaggacttgggagacgagatggcctgcgtccatgccctctgaattctcacccttccccaactgctcaataaacctcctgccctcc

SEQ ID NO: 11240 - DNA, 787 bp, Macaca Fascicularis
  misc_feature (1)...(787): n = A,T,C or G
tcannnnnnnnnnnnnnnatgtcctcatgacaannnnnnntccagcnnncannnnnnnnnnnnnnnnnnnnnnnnnnnntgagtgcctcctactggggctaccctactgcactccttcaggggcctgatggctgccccttccccagacagggctggactnnnnnnnnnnnnnnnnnnccctctgtttgnnnnnnnnnnnnatgccggatagcagnnnnnnnnnnnnnnnnnnnnnaacacccgggcatgtttgtcgtcgtcctacaaatgaggaaactgaggctatgnnnnnnnnnnnnnnnnnnnnnnnnnnnngcactgagctcctcttttgtcctctgagaccccatctccattctcactgagttgccctctccttccctgacctccacccacatttccctccttagagatccaggagggatggaacgtttttaaacttcaacacccaccaggctctaagtggtccagccaaagtcctcggcattgacaggcagctggggggacacaatccatggacaaggccatcccggccatgggagaccccagtcccgaggtcttgcctgcaggagtactggggtccctcttggagccctnnnnnnnnnnnnnnnatctctaggaaacctatctctgagttttgggaccaggtcggtttgggtttgaatcctgccttttcttgctcactgtgtgaccaagtgacaaaatccttctgaacctgtgttctcccactgtaccagggctgtttggtccccgtgagtgccaagcatacaggaggggctcaataaat

SEQ ID NO: 11241 - DNA, 663 bp, Macaca Fascicularis
agtttttaaggaaatgatgtgcttcatatacacggggaaggctccaaacctcgacaaaatggctgatgatttgttggcagctgctgacaagtatgccctggagcgtttaaaggtcatgtgtgaggatgccctctgcagtaacctgtccgtggagaatgctgcagaaattctcatcctggctgacctccacagcgcagatcagttgaaaactcaggcagtggatttcatcaactatcatgcttcggatgtcttagagacctctgggtggaagtcaatggtggtgtcacatcctcacttggtggctgaggcataccgctctctggcttcagcacagtgcccttttctgggacccccacgcaaacgcctgaagcaatcctaagatcctgcttgttgtaagactccgtttaatttccagaagcagcagccactgttgctgccactgaccaccaggtagacagcgcaatctgtggagcttttactctgttgtgaggggaagagactgcattgtggccccagactcttaaaacagcactaaataacttgggggaaacggggggagggaagggcccaggactcggggctgttcaacctaatgaaaaccctgttgctgcgtcactgtgttccctttggcctggccaagtttgatactgtggggattcagtt

SEQ ID NO: 11242 - DNA, 726 bp, Macaca Fascicularis
  misc_feature (1)...(726): n = A,T,C or G
tggagagatccaggtggtggacgctgccagcctgctggccnnnnngccccaggtggagactgtcaccatctnncaggtccgctggcagccggccgcctctgagcgggaggggcccccttnnnngctccagctcagctgcaccctgcactggtccttcatcctctcacaagtccgttgcttccgaatccactactggggagggacgagtgatgactctccgggcagggagctgccgaggccagagatgcccacgttcctggggtnnnnnnnnnnnnnnnngtaccggatagtggnnnnnnnnnnnnnnnccgccgggcccgggcaggaccgtcgcgtggagtttctggtggagcctgtcccgaaggaagggttccgggtacctcaggccgagtggggcagggcggctctgctttattcaggccccgcatgagtggatgctaaagccgggtggtctcctggcctccggctgaggcctcttcccggctctctgctcctggcctgcgctggacctgctacgtgccggcagtggcggcgagaccccggtcccggggctgggggaggacccctggctgaatgctgtggatttctggccgggggcggtgggaacaggaaaccaggccgtgggatcgcagcgttggttactgcgaggcgagtggccctctgtttctgccttgtctctccnnnncggtacatggttcccaggtgaaaataaaggaggggaagaag

SEQ ID NO: 11243 - DNA, 737 bp, Macaca Fascicularis
  misc_feature (1)...(737): n = A,T,C or G
cttttcagttaagactgaagctgtcagagaggtaagcacatnnnntatagatgtaaggaaagtgatgattttttaatatctgtgaatttaggatgtgcatctcttttcagaggtgtgctagtaaaacctgagggattaactaagcacactgggatgtgtctcttacagttggcttctgtctttcatgttacctgttagtgttgatctcttaaagcagatatttcttgtttgttgaatttgtgaacagtatagatctcagcccaccaatgccaagacaaaattatttttcttatacttatttttattaaacaaaatgaaaaagannnnnnnnnnnnnnnngatcctgaaaataaaactaacagtccagcattttgtcattgtttttcacaattgacctatctcaaaaccgctattcctaagtaatgctcaaaaatgatgggtaatctggatactttttccttataccttctcctaggaaaactttaaaaccttcaaaaagacaaacctaccaataggaataacaaattaaatgtcaagagaatannnnnnnnnnnnnnatataaatgtatgtgtctcaagtttaactatacaaaaatttgttacttgttttttaaactctatcatactagttaaacctactcatggctnnnnctgcgaagtacttacggaaagcaagaatgtttttgttcattttctaatgtgtgtgtttctacttgcatatgtttgcttcaacaaaa

SEQ ID NO: 11244 - DNA, 733 bp, Macaca Fascicularis
  misc_feature (1)...(733): n = A,T,C or G
taccacnnnnnnnnnnnnnnnnnnnnaggcgctggagcgcgtgttcgagcgcacgcactaccccgacgcctttgtgcgcgaggagcttgcccggcgcgtcaacctcagcgaggcgcgcgtccaggtctgnnncnagaaccgccgtgcnnnnnnnnnnnnnnncgaaagggccatgctggccagccgctccgcctcactgctcaagtcctacagnnnnnnnnnnnnnnnnnnnnnnnnnnnnnnnnnccggcccaccgccctgagtccggattatctctcctggacagcctcatccccctacagcacagtgccaccctacagccctgggagctcaggccccacaaccccgggggtcaacatggccaacagcatcgccagcctccgtctcaaggccaaggagttcagcctgcaccacagccaggtgcctacggtgaactgacgtccagtcccaccaggacccagccacctccctgggtggacagcaacagaaaagggggcagacgcccaggaagtgaccttctcctggatgggctctcctggcccgtctctccagcctggacccccgagcccgcgaggctgttgaggcccccacagccgggcccagctcttctgtcctcggccgccagagactacagcccacaacccttggaggggttgggccggannnnnnnnnnnnnnnnnnnnnnnnnnnnnnnnnnnnnntattaaaaccaaaaagcttttgtcttaagaa

SEQ ID NO: 11245 - DNA, 458 bp, Macaca Fascicularis
cccacctgatggcacaggagcttcctcatcgcctctcgcaactcactggtgcttatttccccatcaccattggtgtcaaactctcggaaagcatctcgcagttcctttacaccaatcatatctgctgtatctgtcaggagtttaggccccattagctccacgaagtcatcaaaatctacgtggccacccaggttcatgttgatctggtgggacagttcgatgagctccatctcagtgggcatgtagcccatggtgcgcatgcagttgcacaggtcccggcagttgatgtagccatccttgtccttgtcgaattgtgtgaaggcctgtcggagctgttcgatttcgtttggtagcagtgatctatgcgtgaaacaaaagatacatgctcctattagtagccgacagagagaccctggaagtcatcaaaatatgtaacctgggggccatccaagggggag

SEQ ID NO: 11246 - DNA, 783 bp, Macaca Fascicularis
  misc_feature (1)...(783): n = A,T,C or G
cgggattgacatttggnnnnngnnnnnatcnnaacnacggtgagctccacctccgtggaataaatggagattcagcgtgggtactgaatccagcacatctgtgtaagtaacggaacagtaaacactccacattcttccgtttttcactttcacctacatatttgtatgtttttctgtataacagccttttccttccgtttctaactactgttaaaattaatatgccattacctttgctgttagtgacagcagtatgattttattacatatgattagagggatgagacagacattcacctgtatgttacttttaatgggcaaaaaatgggcctttgactctaaatagcactttcaggggttcaagaagtaatcagtatgcaaggcagtcttttatacaataattgaagtgttccctttttcataattcctctacatcccagtaaccctaaggaagttgctaacttaaaaaaccgcatcctagtttctgtgaatttagtaaataaacaaagacgtggaaaataggaagtgaacccattattttaaattctcgtaagtagcattcatgtaataaacaggtttttagtttgttcttcatattgacatgtcatttgaaagaaatgttagtagttactaaaattatgttactctgtttttcagaaatcaaactacttatgaaaagtactaacagaacttgttaacctttctaaccttcaccattaactgtgaaatatatgccatttgtgcacatgtgtccacttcattttgtataatcacagttgtgtt

SEQ ID NO: 11247 - DNA, 687 bp, Macaca Fascicularis
tcacgtgttaaaaaactcaaaagtgactactcagatatgttggaaagcaaaccagtcacattgaagactatcagaatattaccttgtgtttataggttaacttgtttttgtacacatcttgagttagttatttctggcatctctttgcttaaaattgagtttcttgtaaatgcgactgataagcgaggttagaagtggaagaaattcagtcctgtgcatgtcctataatctgacgccctgaaagcaagtttcctttcgtcattcacatgctcttgtcctgccgtgatgcttcagttgtatggtagcaagtaaacgtgttaacatggtgaacagtagtaatattctatcatagagtattagcccttgcaagttttcagggcatcttttccgacttcagtttttgtgctaaagaatgtgaacagttgttagatgttctcagtgattcagctttaaaacacatttctcgtggtgattcatttcaaaatcctgaatgagtctgactgaaaaatacaaaagagagcagctacgcagctgtgtgcatcgaggtgctcctggggtgtgtgccaaacgaaacccaggggtgaactgcactcttgaagagaccaaagcctgcaactgtccaacttctaatttcaaaacgggtccattacggcttcattgtgttaacaggctgacaccatgactagt

SEQ ID NO: 11248 - DNA, 730 bp, Macaca Fascicularis
  misc_feature (1)...(730): n = A,T,C or G
ccagatcacttatccaaaatctttccaaatcaattatattttgctgcttttctttaattccctaaaagccatagcttctannnnnnnnnnnnnnntacagtctcaccagaagttgaaccaatacaggtagaaaaaggaagccccccattaacannnnnnnnnnngtagagccaatgtttttaactggtggtatttttttaaacttaccaatataagtatttttaaaggttctatttttcaaagtcatgacaatgattgttcttgttttctctcatagaatagactgccatgggataaagagtggtccctagcttctatttttccaagtaaataagtagaacatgttcttgggattataccattaaatgttaattttcttgaagaagaaagattgttgtctgccaggattttatgttagcactcggattgaggcagaaaacggaagcaccaagtttaacactgggatggcgcgggttgtgttcctggaggtttgaagtgggccttcctgccttttgaggggaaaactgactgtttcgaacatatcctggattagttgggttgttttgtattgaggatccctagaagacaagagagtcttggaaagggctgctggnnnnnnnnnnnnnnnnnnnnnnnnnnnnnnnnnnnnnnnnngaggaagttttcctcaagtggggttcagtctctaattttcctgtctgttattagtttgttctgagttatttggatt

SEQ ID NO: 11249 - DNA, 719 bp, Macaca Fascicularis
  misc_feature (1)...(719): n = A,T,C or G
attgagacattggtaactgcaattnctttaattaaacaatccaaagtgtccnnnnnnnnnnnttgcaaagttctcattagttctttgcaagattgccttcatggaattgagtccaagtcttacggttctggatcaagaagacgtgaacgatcaagagagagggaccatagtagatcacgagaaaagagtcggcgtcataaatcccgtagtagagaccgtcatgacgattattatagagagagaagcagagaacgagagaggcaccgggnnnnnnnnnnnnnnnnnnnnnnnnnnnnnnnnnnnnnnnnnnnnnnnnnnnnnnnnnnnnnnnnnnnnnnnnnngatcaccttccaagacaaaacannnnnnnnnnnnnnnnnnnnnnnnnnnnnnnnnnnnnnnnnncttnnnnnnnnnnnnnnnctgtaaggattcatggataaaatgaacaggaatnnnnnnnaannnnnnnnnnnnnnataaatggtaaccagtagctctacttttattttttatgttgcttaactgttttatttgaaggaaacctgtgtgatttaaaaagttatagcttttgcaactttattactggttatatacatttggccattatannnnnnnagcaattggaaaaaaagtcaagtaaatgcttgtttttgtagtagtttgttcttgttaaaaatgtttatatgataatgtctgtnnnnnnnnnnnnnnnnat

SEQ ID NO: 11250 - DNA, 675 bp, Macaca Fascicularis
  misc_feature (1)...(675): n = A,T,C or G
taaacgtnnnnnnnnnnnnnnnnnnnnnnntnnnnnagatggtgaggaatnnntacagcagctgaaatttgtattgcaagatatggaatctgatattattcctgaggattatgatgagagaggagaattatatgatgatgttgatcatcctctaccaataagcaatccaccaacaagcagtcaaccaatagatgatgaaatttatgaagaacttccagaagaagaagaggacagtgctccagtgaaagtggaagaacaaaggaagatgagtcaggatagtgttcatcacacctcaggggataagagcaatgattatgctaatttttaccagggattgtgggattgtactggagctttttctgatgagttgtnnnnnnnnnnnnnnnnnnnnnnnnnnattcttagcaaggaatacaatagatacggctggtgggtaggagaaatgaagggagccattggcttggtgcctaaagcctacataatggagatgtatgatatttgagagtcctggaaaaggaaaattattttgcttgtttgcaaatgctttggatttagaagtnnnnnnnnnnnnnnnntgacagctcctaacctctccttgttttgttaaacattacttgtctttaactgttattttatgcagtcgctcattaaaatattcctttnatgtgaaattaa

SEQ ID NO: 11251 - DNA, 1281 bp, Macaca Fascicularis
  misc_feature (1)...(1281): n = A,T,C or G
ctcctttccccgcaacaacattagcnnnnnnnnnctctccatgatcagcatgggactcttttccatcgctccactcatttatggcagcatggagatgttccctgctgcacagcagctctaccgccannnnnnnnnnnnnnntttcctcttcggtttttctgctgtttccgtcatgtacctggtgttggtgttggcagtccaagtgcatnnnnnnnnnnnnnnnnnnnnnaagaagctcctagactcttggttcaccagtacacaggagaagannnnnnnnnnnnnnnngtcggactgcgctttagagtgaagcctggacctcccattgaatgaaaggacagtagtacagcggttctaaattccttctggtgattttagcannnnnnnnnnnnnnnnnnnnnnnnnnnnnngccaaagttctgnnnnnnnnnnnnnnnnnnnnnnnnnnnnnnnnnnnntataatttatttctggttggctagaactgnnnnnnnnnnnnnnnnnaaacaaacttcagctgtttgaagttgaactttgaggtttttctttaagaatgagcttcatcgttgcctcctctcggtcattctccccatttccatccattacctcttagccattgagactgaaggaaatagggaataaatcaaattacttcctgtgtaggtcatggatcannaaacatttgggaagctgctccctcggcaggctgtggtctcttctgcaaagcattttaattaaaaacctcagtaaccgtgcccacactgtgccttgtgtttggggcttgatagagtgtgaaaggtgtgttgcttgaaagatgaggccttagacactaggagatgatgggtagaagccccttgagaaacctagcagtggccatagagaagtagattgggtatggggaacctaagtcatagttctaacctacagctgattggtaagaactatgggccagacatttaatctctccctctannnnnnnnnncattctcatttatctagcttaggttatgggctcttttagttggatattcacatttatcattcagtgttaactgagtatcagttgtgagtccactactgtataatggcatccaaaagaattttaaagtacctctgtttatagggagtttacaatctagtagaaacttgttattcatgtgaaacaaccagtgaacatagtatctaatgatgtggagcaaatacattaaaaataggaagnnnnnnnnnnntgattaaattaaaggccctttcacacctgaaattctgacacagtatttatgc

SEQ ID NO: 11252 - DNA, 728 bp, Macaca Fascicularis
  misc_feature (1)...(728): n = A,T,C or G
aaaggttattcaagaagnnnnngcgaaaganntgctgagaagaccatttgatttaatgttggtcgtgtgtctcctcctggcaactgnnnnnnnnnnnnnnnnnnnnnnnnnnnnnnnnnnnnncccatctgagctctgccgattatatacgcaatttcaagagccctatctaaaggatnnnnnnnnnnnnnnnnnnnttcagatgctggcatatatgttctattctgttccttactttgtgactgcactgtatggcttagtggttccnnnnnnnnnnnnnnnnnnnnacatcacattgatacatgctggaggtctggctcaggctcagttttctcacattggtgcttctcttcatgctagaactgcttatgtctacagagtccccgaagaagcaaaaatcctttttttagcattaaacatagcatatggagttcttcctcagctcttggtctatcgttgtatctacaaaccagagttcttcataaaaacaaaggcagaagaaaaagtggaataaaaatattacttcatgttcctttctaaattactaacttttgttatactggtactgatattatgtcccatttcattctcttctcatacatgaatacttaagaatatgtacattcttgctctgcactgtatgtgtgagctatatggtactgtgtaaatttttgaagcaaaatggaaattcttgagaaagtctgtttaaagaaatatattcaaaatca

SEQ ID NO: 11253 - DNA, 772 bp, Macaca Fascicularis
  misc_feature (1)...(772): n = A,T,C or G
ataaaatgtatgaccactggggccggagtatctatttctannnnnnnnnnnncttctgaaactgcagcagtggcttagaaagtcaaattccaaacccagannnnnnnnnnnnnnncccgcagcgttctcctttgagcaagccgagctctccttgttaccgtgttctatctgtgtcttcaggagtctcatggcctgaaggaccacctcgacctgatgcagagccttctgaggaggggcaacaggaggcattctgtggccagccaaaaggtaccccnnnnnnnnagcaattcctctgaacaaaatgtaaagccagcccatccactgttaatcatccatcacttcccattttatggaattacttttaaaatacatttggcctctgcccttcagaagactcgtttttaaggtggatgcttctgtgtctgtgtatgttacgagtctacatgacacagttggatttcttctgccaaacctgtgtaggcattttataagctacatgttgtaatttttaccgacgttaattattttgacaaatatttcatatattttcattgaaatgcacagatctgcttnnnnnnnnnnnnnnnnnnnnnnnnnnacatttgccttaaattttttcgacctcgtctttctccatattgtcccgctcccctgtttgacgacagtgcatttgccttgtcacctgtgagctggagagaacccagatgttgtttattgaatctacaactcggaaagagaaatcaatgaagcaaatacaatgtaaccctaaata

SEQ ID NO: 11254 - DNA, 739 bp, Macaca Fascicularis
  misc_feature (1)...(739): n = A,T,C or G
ccannnnnnnnnnnnngnatctnncnnnnncattatgatcccataaaaactgcccaagggtctctcttaagnnaggcttacagactgnnnnnnnnnctgatggaagtttgtaaagaaaaaaattttccnntgaagctttgaaaaaagcaaatatcacctttgagtacatgtttgaagaagtgccgattgtaattaaaaatnnnnnnnnnnnnnnnnnnnnnnngtgggaacttannnnnaagtcagatgttgcagataaacatgagttgttcagccttgccagcagcaatcatttggggaagaatctacagttgatgatggacagagtggatgaaatgagccaagatatagttaaatacaatacatacatgaggaatactagtaaacaacagcagcagaaacatcagtatcagcagcgtcgnnnnnnnnnnnnnnnnnnnnnnnnnnnnnnnggagaacccccnnnnnnnnnnnnggacctgtccaaactcttcaaaccgccacagccccctgccaggatggactcnnnnnnnnnnnnnnnnnnnnnnnnnnnnnnnnnnnngaacatcaaggagttcactgcccaaaacttaggcaagctcttcatggcccaggctcttcaagaatacaacaactaagaaaaggaagtttccagaaaagaagttgacatgaactcttgaaatcacaccagggcaactcttnnnnnnnnnnnnnnnnnnnnntgaaaagcacagaggat

SEQ ID NO: 11255 - DNA, 708 bp, Macaca Fascicularis
  misc_feature (1)...(708): n = A,T,C or G
tcactgaagcggagatgnncagggacccagaggannnnnagaagctgctgcggannctggagcatgagagccggcgcctggaggctgtcctggcgtggcggcgcgcagagccggtcttctggcagtggatggctcgaggctgtggacgggggccagagtggagtgccgcgcggcgggcctctcgggagactgtggaaaaggagctgggagctctgcagcggtgctgggagcaagacagtggcccagccccggcccatgggccacaccgactggtgagacgagaggannnnnnnnnnnnnnnncgggacctgcgggcagctgagctgatcaggacactgaggagccaggaggcctgcctggaggcggtgctacgtcaactacagggacagtgtcggcaggaactggccgggctagcgggagccctgcctggcctcnnnnnnnnnnnnnnncctggacgctgagggcctgtggacgggccctcatgtgggaagcctgccctggcccggcctggctgggtcctggaggagcagattccaaggccaggtggccacagggacgatgcagatacagagcccacatnnnnnnnnnnnnccaggggctggggctgggctgactcttgctggagcccgggcccgtggccagcagcactggggannnnnnnnnnnnnnnnnnnnnggaggtcgtgacaggcccggcctgnnngtctgg

SEQ ID NO: 11256 - DNA, 621 bp, Macaca Fascicularis
tcccccaccacccaaatcacccaccaccctcgagtgtccagagcatcttcagtagtaggtgacgagcccccaaccttcctgccatccactacagcctcaaagatctcagctctggagaagctgctcaagcctcggacagccagctacaaccaccacaccaggctgcacaggcagaggtaagagaacactgtccaggatctagatgtaggctggaattaggagatccactgaaacccactgcaatgcccattattagacaccctccttggctttgtctctaggccactgtgaaatataccacctatgaatatagctcattaactcattagctcttttaacaaaaacacacttgtcaatgccccagcattgatcctgtagcaactagtgagacccagctcttcctgtcactcagattcattcaaatctattttgatggggaagaactaaatgagaataaaaataaacttaactattaaactagtaatgtaaaattactttcactcatttccttttactgttttaatgtggctactaggaaatttaaaattacatatgtgactcacatgtctcctggacagcactggtctaaaggctggggtgcagtccagggaagtactgcaa

SEQ ID NO: 11257 - DNA, 561 bp, Macaca Fascicularis
  misc_feature (1)...(561): n = A,T,C or G
acggggtcgnnngcctcaatggaaacgaggtgcccgagggggnnnnnnnnnnnnnnnnnnnnagcgtttcaaggaggccctgcaggatcctttcacactgtgccttgccaatgtgcctggcnnnnnnnnnnnnnnnnnnnnnnnnnnnnnnnnnnnnnnnnnnnnnnnnnnnnnnnnnnnnnagcactacttctccagccggggcattnnnnnnnnnnnnnnnnnnnnnnnnnnnnnnnnnnnnnnnnnnnnnnctgtctttgtgcctcagtggcgcttcagtaaggattccaaagtcagagagagtcacttcctgcaaaagctgtattccctcagcctgctctccctcacaccctcacgagtcatggatggcaagaggatctcctcctatgatgacagatttcacagattacccaagatatggaaccttctttccacacctgcattgaaacagaattgaaactgaagattgagttcgttttaatgaatgttaaaggcatgtgtctgcccagttgtgnnnnnnnnnnnnnnnnnnnnnnntaatataaattgggaattgcc

SEQ ID NO: 11258 - DNA, 743 bp, Macaca Fascicularis
  misc_feature (1)...(743): n = A,T,C or G
gcaacagaaagggaagggttccaagcctctaaaaatgtgccttgtgatcaggagtgtgctccaaaccaaatatgtgcgctgccctttcgaggccagtgagctcagcccccaaggctttaaaagccacatttcagcaagagaaagcgccgagagctcgcaggttcnnnnnnnnnnnnnnnnnnctggtttctctccttagaaaagtaggtttcttggcttgatgtagattggcttgctttgatttttagtgaagggaatgtacgtaaaacaaaatagggcttggctggtcaaaggagacaggaaggaagaaaggaaggatggatggatggatagatggatggatggatggtattttcatgtaaattgcagagaaaacaaaaccaaagctgattggaaacaatgagttgctggtgtctgaggggaaaggacgcagttttgggcagctttgagaagcggtacaagagtgctgtgcctgtgtgtccatccctggagccagccagtgcatttattttaaactcttagaagcaacttcttggcccaggaatgcgagacccctgaggtgggtccacgcgtctctctacgcttccttctctccgtgggataccgggctcgtgcctctgtgcccattctcttctcacgcgtatccatgagttttaatttcactttctgatcacggtacgtccataaannnaagtattacacttaattgaagtattcttttttgtaatcgttttttagaagga

SEQ ID NO: 11259 - DNA, 721 bp, Macaca Fascicularis
actgccactttcaccatacagaaaaaagctggtggagccaaagcatcagtaagaaaggctatgcagtctccagttaccttccgaaaaggctctaatgctccgtgtcgtagtcagcagcatacaaaaaaacatggaaatgctggacttgcacctcagaccaagcaggtgtgtgtggagtatgagagagaggagactgtggtgagtccctggacgataccttcagaaatccgtaagattcttcatgacagccacaattcccttctacaagacttgtctccaactgaagaggaagagccagagcatccttttggggtgggcggcatggacagcgtgtctgagagcactggcagcatcctcagcaagctggactggaatgccatcgaagacatggtggccagcgtggaggaccagggcctgtctgtccactgggccctggacctgtaagacctggatatcattctgtttccatacacaggccagcacctcagtaatgtggttctgaaagattaacaggtttaagggacagaagcaatgaaagaagcaatgtgaattttccatctgctatcatattgttacctggattagccatttcaagaggaaaaataaacatttctcaataactttgccttcatggggaaaaggttgactattgatatattatatgtttttgtatttgatgcatcattaagcataatttttaaaatgataagtacctttcaag

SEQ ID NO: 11260 - DNA, 735 bp, Macaca Fascicularis
  misc_feature (1)...(735): n = A,T,C or G
tgtgagtcgcggtatcatnnnnnnnnnnnnnnnnnnnnnnnnnnnnnnnnnnnnnnnnnnnnngaatactctacgtcccgcggcttccgcagcgaggtggacatgttcgtgccccaggccgtgctacagtttctctgttttaaaannnnnnnnnnnnnnnnnnnnnnnnnnnnnnncatacacccagaagcacccgtccatcgaggacgggcctccatttgtgnnnnnnnnnnnnnnnnnnnnnnnnnnnnnnnnnnnnnctgtggacggtgggaagctaacggtgttcactgtgatatgtgagcagtaccagccatccctccggcgtgacccgatgtacaacgagtacctcgaccgcataggacagctgttttttggcgtcccgcccaagcagacgtcttcctacggaggcctgctcggnnnnnnnnnnnnnnncctcatgggctcctcagagcaggaggagggagaggagagccccagcgacggcagcccgatcgagctggactgaagcggccgggccacatggagacnnnnnnnnnnnnnnnnnntcgagggacgtttcagaggcgagtcctgggtggctcctcgcctgggggctcccggccctgaggctggcggtggccgcgtgccggcgcgtgtctgttactgtgcggcggcttagggtggcgcggctgtgggttgctgtgctgctggggcccgggagcggggcctcgcccctgctggccgccgcgtccc

SEQ ID NO: 11261 - DNA, 656 bp, Macaca Fascicularis
  misc_feature (1)...(656): n = A,T,C or G
gcgctctcagggctnnnngaagacatgcntaatgaggcgantgggcccctcnnnncttcaagaggccccctggaccttcatgagcaaaaggatataccaggaggggtcctcaagannnnagatggcagcatggaacccaggtcganatgggannnnnngaggctcatcccacctcagacatacctgcaagctgagggtgaagagggccggaacttggagaagagacggaatcttctgaactgcctcatcgtccgaatcctcnnnnnnnnnnnnnnnnnnnnnnnnnnnnnnnnnnnnnnnnnnnnnnnnnnnnnnnnnnnnnnnnagaagggcccatgtcctcccaggggtttggtcagcagccttggtagggggtctgcctgcagcagcactgacgtcctctcctgcatcctgcacctcctgggcaagggcacgctgagacgccatgatgaccggccgcaggtgctgtcctatgcagtccctgtgactgtcatggagcctcacaccgagtccctgaacccaggctcctcaggccccaacccacccctcaccttccataccctgcagattcgctcccggggtgtgccctatgccnnnnnnnnnnnnnnnnnnnnnnnnnnnnnnnnnnnnnnnnnctggacttggggtcaggggaa

SEQ ID NO: 11262 - DNA, 738 bp, Macaca Fascicularis
  misc_feature (1)...(738): n = A,T,C or G
agacagtgatgtgaaaagagactgnnnngaataaatgttcccctatgattctctaaggcagtggttctcgagcttgaattttcattaggaaatnnnnnnnnnnnnnngtaaccagattcatgtatctgccacatgcacctatctcttgctgaattgctttaatagaacaatgagagcaagtttgtctaattaataccaacctggcaacttgaataacaataaatacaattnnnnnnnnnnnnnnnnnnnngcaaaagtttgtcattcacctcaatggagtgacttgatattagatggtaacagtaggtgatggttgatacgaaaatggataggaaagaagcgttttctgaaagttatattcttttgaaccactttctaaaccaagtttttaatcttggggctcataattacctttcacttaaattacacttaaagatataacacagaaaaacgccttaaggacaaaataaaggccaaacacctgagcgctttgaaatgcatgaaaatggtgcagctgtaccctggagccttgactcaagggctctagaaaatgttccctttgtaccccccacacttggtgcatgttcacaaagcaaatatggcctgcaattcaaatttgttctatgtgatattctctgagtaaaaactcttatgtgcagaaaattgtctttgctcaaaatggtaatgccaaaatgtaaatttatatataatttgcatttagtgcattttttgctaaaa

SEQ ID NO: 11263 - DNA, 759 bp, Macaca Fascicularis
  misc_feature (1)...(759): n = A,T,C or G
gtcctcagtagacannnnntaaannnnnagacagatacctcgcaccnnnnntccccctccaccagccgtccttnnnacgctgccccacacgtggggtcacaactgcatannnnntagagctcccaaatgaagaagaaaaaaataaacctaaataaaaaatgaattcttcctttcctcttcctctcctcctctctgtgcccgccctcccattcccgcctgaaggaggatccagctgccttgaaccagccacagatcgtttccataaaagagagtacaaagtcaggtttccgcagcactgtgctccagccatgtgccctggtgtcactgtcggaggtgccaatagttcactggaggagctgctcctgctctccaataggactatgaataagttaacagtttccttggacagtgccatcctcagggtcggctctgtcacacggcgccttcccactcgccctggggctccacggagccgttggtcaccttcttgactttcttcatactttccatcaccccagatgttgtcacactgaacaaggaaagaagaaacaattaggaacatctcagagtctcttagtaaaaggccatgtctgccacagcacggtggttaggactgatgatgggcgttggttttcgaaacaggcgaatctaagtttgattcctggcccattccttactagctgtgtaaccttggccaagtcacttgacctctctgtgcttaattctcactttccagaactgtcatgaggaaaaatgaga

SEQ ID NO: 11264 - DNA, 1020 bp, Macaca Fascicularis
  misc_feature (1)...(1020): n = A,T,C or G
gacttggagaatgtgatccagggctaccacgttagccaagaaccctggaacagcagcgtcacactcacatnnnnggnnnnngctnntttccagagctttgccaagtttagcaaatttggagatgacctgtactctggctggttggcggcagcccttggtaccaacctgcaggtccagttctggcacaaaactgtaggcgtcctgccctctaactgctcggatatctggcaggttgtgaatgtgaaccagatagctttccctggaccgggtggcccaagcttcaacagcacagaggaccactccaaatggtgcgtgtccccaaaagggccctggacgtgcgtgggtgacatgaatcggaaccagggagaggagcaacggggtgggggcacgctgtgtgcccagctgccagccctctggaaggccttccagccgctagtgaagaactaccagccctgtaatggcatggccaggaagcccagcagacattacaagatctaaccctcacggccaggtgcagtggctcacgtatgtaatcccagcactttgggaagccaaggagggaggatcacttgaactcaggaatttgagaccagcctgggcaacatagtgagactgcagctctactagaacttaaaaaaaagttagnnnnnnnnnnnnnnnnnacgcctgtagtcccagctactgaagccagaggaacgatgaaccagggagatcatggtcacagtgaactatgatactccaacctcggtcacatagcaagaccctgtttcaaaaaaaaaaaaaaggtaggggggnnnnnnnnnnnnnnnnnnnnnnnnnnnnnnnnnnnnnnnnnnnnnnnnnnnnnnnnnnnnnnnnnnnnnnnnnnnnnnngaccagcctggccaacatggtgaaaccccatatccattaaaaatatttaaaaattagccaggcatggtggcatgtgtctgtggtcccagctacttgggaggctgaggcaggagaattgcttgaacccaggaggcagaggtagccatg

SEQ ID NO: 11265 - DNA, 475 bp, Macaca Fascicularis
accccggccgcgaccccagcaggtcaggcgcgggcgccccgacaccagtacccatcttatagcagctctgaacctccaaaggcaccccgttctagcgcgggccgagggggagtgtgcgcgtggggcggggagggggggtgcagcgagctcccccacgctcggagttcagcccagcgcccgaagtaaacttccttcccgctggcagcagggccgggaggcggaggctgggccgggggccccggggcgcggcgcggggagcgccaggggccccttgcggtccggcggggacgacctccgcccgcacccacgcctcatggggctcccgggtcccggcggtggctgggatccccggaaaagccgggacggagaagccaggccggcatgcccgccctccttcccccgggaggacccaacaactccggaaagatcctgccgggagatgtgctcgctttcgccggggcagcgggggaaagcc

SEQ ID NO: 11266 - DNA, 697 bp, Macaca Fascicularis
catcaaggggtgaaactgcttgaaaacagacatcaacagcaaagtacctttaagccagaagaaattcttaccaagactctgggtttcagtgttgcccaagcaactagctcattgatttctgctggaaaaggtgtcttcgttacgaaaggattggtaccaaaaggcgcagtcgtatctatgtatcctggtacagtatatcagaagtatgagccgatctttttccagtccattggaaatccatttatttttagatgcctggatggggtactcattgatgggaatgacaaaggaatatcaaaagttgtgtacagatcttgcaatgggagggatcgactcggccctttaaaaatgagtgatagtacatggctaacatcagaaattcataaccctctggctgtgggacagtatgtcaacaattgttccaatgacagagcagctaatgtctgttatcaggaatttgatgtgcctgcagttttccctgtagaactgaagcagtatcttccaaacattgcctacagctatgacaaacaaagtcttcaatttcagaactgaagtttttaccctcatccatcatttcctcttcttcaagagttctttcatcatcatagtcatggaccaacatctcagcagtggggtcaaaatcatgatcttcagaagacaaagacccaactggaataaaacaaactgaatcacttta

SEQ ID NO: 11267 - DNA, 793 bp, Macaca Fascicularis
  misc_feature (1)...(793): n = A,T,C or G
agctcctcatgtgaataccagcccccgagttnnncntngggtacaagagcaggagtggggcaagagattggaaataaagnnnnntccttgtgaactaacatattttagccataactgtttgtgatgtacacaatgttaagggatttatatgcagtgggtttttctgggagaaagttattcagctcttgagcaagtttaagtctggctgaatcctgaggccactgtgaatttgctgatgttcttccaactcagttgagtgattttaaggttttccaaatcttctatggctctttttttttaatatatacatatatatatatatctctttctggtagatcacatgtagatgtacagtgtgtatgttaagctgaatttcaaccaactttattactaagaccagcctagcggggtattcatctttgatgttcttccttttcacctttcagaatcggcactggctggcccgctcctgagagccctagttttctagttttccatttccagattgcgtcagcattacagtaactaactctttttaaccaaccgtgatgccacgtaacttacccagtggacgaaagcaggagtgactaacacatcgtaggagggaaagtccagtgtacctgtcatcacggacgcactgtggtcacagactggaataggagattctacagccctgctccctggtgtgcatcttactggatgaggttgccgtgactgaggtagttaaatacatgctaatttaaaaatgcaggtgttttgcatttgatttctaccaagnnnntgaaatgttgag

SEQ ID NO: 11268 - DNA, 1157 bp, Macaca Fascicularis
  misc_feature (1)...(1157): n = A,T,C or G
gaagtgtcgattagagttggtggaaatacacagccaagtaaagttttgaacnnnaaaaatgtagaagctattggacttcttggaggacaaaagagcaaagcagattatgagctatacaacaaagcctctaatnnngataaggttgctagtacagcgtttgccgaaaatagaaattctgagactaacgatactaatgggacccatgaatctgatagaaacaaggaatccagtgaccaaacaggcgttaatattagtggatttgagaacaaaatttcatatgtagtgcaaagcttaaaggagtatgaggggaagtggttgctttttgatgattctgaagtcaaagttactgaagagaaggactttctgaattctctttccccttctacatctcctacttctactccctacttgctattttataagaaattatagggtgagtgtattttccttgtgtatatattaaacacacccacacaaacattggtaaagttgattatatcaaagagtctttagcttatcttttgaagctactggatattattggtctctctaggtttttatataaatagtgaaatttgaattactgaaaaccatgttaatttttagaattcattttcctcagtagagactagtgatgcattagcttctgggaacaaacttgtatcggttcttaattaaattatccaaaacggaagcatttaaacacttggatttacaccaatcttttgtgtttgctttttaaaataaagtgctcgtatttgtattctccatattttggagtaattatctacatgatgtttatagttcctgtggtttttcacccaagaagcannnnnnnnnnnnnnnnnnnnnnntttataagnnnnnnnnnnnnnnnnnnttgggctatgtcagaggcacaaagtctagaatgtgtgtattaacaatagtgtacattttgtgccttgattcacttagaaataagtnnnnnnnnnnnnnnnnnnnnnngcccttctatcttcacaagaattttatatgtatttatgaagatgattctgtactctagtataatcttttnnnnnnnnnnntaatttgtatctctttannnnnnnnnnnnnnnnnnctgtatatagtatatcaaacttagaggtgtgaccttaaatttaactttttttaaa

SEQ ID NO: 11269 - DNA, 793 bp, Macaca Fascicularis
  misc_feature (1)...(793): n = A,T,C or G
cagcgctggctgnnngnggctagtgcggctgtggccgttgggggcaggagctgnnnnagctggcnntgcagtcatcgggcccagcctgcctctggccctggccatgcccttgcccgagcctgagcccctgcccctcccgctggaggtcgtccgcggccttctgcccccactgcgcattcctgaactcctgtccctgcgtcctcggccccggccccctcggccagagccaccccctggcctcatggctcttgaggtcccagagcccctgggtgaagacaagaagaaggggaagccagagaaattgaaannnnnnnnnnnnnnnnnnnnnnnnnnnngctgggaggaccccagcctgctggagtnnnnnnnnnnnnnnnnnnnnnnnnnnnnnnnggatctgggcnnnnnnnnnnnnnnnnnnnnnnnnnnncgcgccttcagccgcttcccatccttccttannnnnnnnnnnnnnnnnnncaagcgcacaggcaagaccaaaggctacggcttcgtcagcttcaaggaccccagcgactacgtgcgcgccatgcgtgagacnanntgggaannnntgnnnnnnnnncccatcaagctnnnnnnnnnnnnntggaaggaccggaatctggacgtggtccgcaagaagcagaaggaaaagaagaagctgggtctgagatagggtctgtggccaggcacccgctcccacctggccgggcgctggctcctccctcagttcnnnnnnnnnnnnncccagctgtccacgcatcccctgcccaaaaccagtctcaaaaaa

SEQ ID NO: 11270 - DNA, 700 bp, Macaca Fascicularis
  misc_feature (1)...(700): n = A,T,C or G
taaaagcagcagacaggaactgaatccaaaccccggcgccaactgacttgtataatctagtggcctaaactgtaagcctcatttttctcacctgtaaaagtagattgtgagaggatgggtataaggagcttcataaacctggatgagatgtttgagagggagggaacaatggttaccctcaaagctattaggaggcaggagacaagaatattccacaaagccacttcaacaaacacaggagcctgttgctgagtcccagaagggacagtggttggtggcttccagacacttagtgtcctcaagaatccaacaagcatcttcatcatcctggtctgcccccagctaagtccagcgttaagtgttctgtgggctccaagcccagcctgggatggaggaggagaagggagaaaaatattactgatacattatcaaattacaaaacnnnnnnnnnnnnnnnnnnnnnnnnnnnnnnnnnnnnnnnnnnnnnnnnnnnnnnnnnnnnnnnnnnnnnnnnnnnnnnnnnnnnnnngacacccctaactacaaaaataaattagtcagggatagtggcacaggcatgtagttccaactactcagaaggctgagctgggaggactgcttgagccctgggnnnnnnnnnnnnnnnnnnnntgtgataagctgctgtactcgtgctaaaaattaatgtggtattctttgc

SEQ ID NO: 11271 - DNA, 714 bp, Macaca Fascicularis
cgctgctggccaatgtgagcggggagctgggggggcggctggatctgttggaggagcaggtggcaggggccatgcaggcatgcgggcagctctgctctggggcccctggggagcaggactctcaggtcagcgagatcctcagtgccttggaacgcagggtgctggacagtgagggacagctgcggctggtgggctcaggcctgcacacggtggaagcagcgggggaggcccggcaggccatgctggagggactacaaggggttgtgggccggctccaggatcgtgtagatgcccaggacgagacagctgcagagttcacgttacggctgaatctcactgcggcccggctaggccaactggaggggctgctgcaggcccatggggatgagggatgtggggcctgtggtggagttcaagaggaactaggccgccttcgggatggtgtggagcgctgctcctgccccctgttgcctcctcggggtcctggggctggtccaggtgttgggggaccaagccgtgggcccctggacggcttcagcgtgtttgggggcagctcaggctcagccctgcaggccctgcaaggagagctttctgaggttattctcaccttcagctccctcaatgactcactgaatgagctccaggcagagtccctggggctccaggctcccccgcgcgggcgccgcccaccgccgtactaaacgatccaggaat

SEQ ID NO: 11272 - DNA, 679 bp, Macaca Fascicularis
  misc_feature (1)...(679): n = A,T,C or G
caccaaggagcagnnnnaccagcaggccatggaagaggccgcctggcaccacatgccccaccnnnctgacnnngagcgtatccggcagtacctcccccggaacccctgtccgacgcccccctaccaccaccagatgccacccccacactcggacactgtggagttctaccagcgcctgtcgaccgagacactcttcttcatcttctactatctggagggcactaaggcacagtacctggcagccaaggccctaaagaagcagtcgtggcgattccacaccaagtacatgatgtggttccagaggcacgaggagcccaagaccatcactgacgagtttgagcagggcacctacatctactttgactacgagaagtggggccagcggaagaaggaaggcttcacctttgagtaccgctacctggaggaccgggacctccagtgacaccggcccctccctctacccaccccctnnnnnnnnnnnnnnnnnnnnctgcccaggcgagggccctgccctggaagactggagggaggccccaggccaggggcacccccctctcccaggaagcagggaggggccgggaggttttcctctcagccccaccctgggggcccgggggcgagggctgcccctcctcccctccccagtgagggacattttttggtaaaccctattttcatt

SEQ ID NO: 11273 - DNA, 766 bp, Macaca Fascicularis
  misc_feature (1)...(766): n = A,T,C or G
gagacacagaggttgcaggtcaagatcacaccactgcannnnnnnnnnnnnncagaaccagaccttgtctcaaaaaataaaaaaaaatgaaaacaaagtaaggaatcctttaaaagcatgttgagaaagtattttttggtatgaatgggtgacgggccttttnnnnnnnnnnnnnnnnnnacaagcataagtacttagcctgtatggtgaaggtgtgtgaaactcccaagttgctaacatcatcttccttattttcagccagggctgttactgcatttagcatggctctgatgagacagtggagagttcctgacagcatagtatactnnnnnnnnnnnnnnnnnnnnnnnntaccaaaaatgacaatcagggattcaaaaagaatttttggtcattaaatcgattgtatattattactttttaatctaagtatttatcacaggactttaacaccatatatttccctgccagtttttctccccttttggtttgatagttaaaacatttttcataattagtgctgtacatttgattgcaaacaatttggtgatacttctaaactataactgtaaatctctagaattctgtgaatttcaacattatttgaagtgttcttccgttatatttacatgtgttgtaaatatgtaannnnnnnnnnnnnnnnnnnnnnnnnnnnnnnnnnaaactgctcccagttacatatcagtgagtttgaattattgaagaaatgttgacaaagttgagtgtttgattttatataacaagc

SEQ ID NO: 11274 - DNA, 676 bp, Macaca Fascicularis
  misc_feature (1)...(676): n = A,T,C or G
gatnnacagatgcaggcattgataccctcnttnnctttaggaaactaaactgcttnnnnnnnnnnnnnnnnnnnnnnnnnnnnnnnnnnnnnnnnnnnnnnnnnnnnnnnnnncacataggccttgttcannnnnnnnnnnnnnnnnnnnnnnttgatcatagtaactgcaagacagagggctgggctgaccagatcgttctgcagtgggagcgtgtgactgcggaagctgtgaagccacgggaaacctcagagcctagaacgacagctcagcgcttctatgggaagcggtctcgagcagaagccccactgaagtgtcccctggcagacccccacatgaactcttctgagaaactccagttctataaagagaaagccnnnnnnnnnnnnnnnccagtgttgaaacacgaagctatctcaagccaggagtcaaagaagagcaagaagagaccttttgaggagtcagagacagaacagaataattcttcacaaccttcaaagcagaaatatgtatgtcttgctgtggatgactgggacttgttaaattcctattgattagtagatacaggttgacnnnnnnnnnnnnnnnnnnnnnnnnnnttgagtaaaggagactgaggatgatttactttttgtttgaatttacctatggcattagcatagcaagcagatatttc

SEQ ID NO: 11275 - DNA, 838 bp, Macaca Fascicularis
  misc_feature (1)...(838): n = A,T,C or G
tccatcccnnnnnnnnnnnnnnnnnnnnnnnnnnnnntgcacagaatccaatgctgnnnnnnnnnnnnnnnntgaaaccatagcatgctactcttcacagnnnnnnnnnnnnnnnnnnnnnnngcactgcaaggccnctnnncttcattgtgagatgcacataacaatgtttaggatattgcagtgtaggcttttttaaagaccaaaggtagctgaatggttttttaaaaaatgagtacaactctagcattttgaagttccagttatataaatgtatttgtttaccagtaggtttgtgaaattggttctttgtatgggggacggtcctttnnnnnnnnnnnnnnncttttcaaaagtggtggaaattggcagctggggtactttcagtttggattgatagccatcacaccccagataaaatgcagagtattctatagttgcactttataaatggtggttaaatggaaatgttcaagccattttatagttgtgatacacaatataannnnnnnnnnnntgtcaaagtattcctccagtaaaaattgtgtagtttgctgcccgtgatgagcaaaaagtatttatcttgggtttatctgaatgatcaggatgagatttaatgcccgtatcttaccagtgcagttatctccagggccggttcaccctttcgagtgagtcacatgcagggagtgtgaaagtcagnnnnnnnnnnnnnnnnnnnnnnnnnnnnnnnnnnnntgttcacagatatttatttactaatgctttttttttcttaagagttatgggataggaaaatgaagtgtttgctcttcatttactaaatgattataaacttgag

SEQ ID NO: 11276 - DNA, 716 bp, Macaca Fascicularis
cagtggcgtcatggtaattgagcttcatctcacaaggaagaagaaatggtggcctcggccctggagacagtttcagaaaagggatccctaacatcggaagagtttgctaagcttgtgggaatgtctgtcctcctagccaaagaaaggttgctgcttgcagagaagatgggccatctttgccgtgatgactcagtggaaggcctgcgtttttacccaaatttatttatgacacagagctaagggttttgtatttaaaatcctttttgtccatatgcttgcgtcatgtagaggttgtatgacattgagctaagagataaacccgatcaactgagaatttattagaacttcacagtgcaatgtaaatctcttttaatttctcactaaatatggtccaggaaatttatttaggatatgcataggaaaattcagaaaagtgaatgccaatatgaatttaaaatcatgctgtagttgtgcagaaccctcagagtttaacttgaaatatagtggattttaacttgatcctcaaatctaatcattttataaagaagggaatttagttttgcagagaataaaaagagaagttgcatgttcagacaggttagattattttgatgtgactgaaattcactgactacacatgacaatgttgggacaaaatatactgcagcttgctatatgaggctcctcccaggggcttttagaagcagtcataggca

SEQ ID NO: 11277 - DNA, 770 bp, Macaca Fascicularis
  misc_feature (1)...(770): n = A,T,C or G
gacttatcttgattctgaagagagaacttctgttgatatagtatgctctgaaggagagaacagcaattcaacagaacaagattcatatagtaactttcaggtttatcatagtcaattaaatatgtcccatcagtttagtcattttaatgttctcactcatcagacatttttggggacaccatatgccctttcatcaagtcagtctcaagaaaatgaaaattacttcttatctgcttatactcaaagcttggatagagataaatctccacctcccttaagtggagggnnnnnnnnnnnnnnnnnnnnnnnnnnnnnnnnnnnnnnactatagtaacttttttttttaaaatagattgttgtggactttgtttattaacaatttatatttcattctctaaacaaaaggttcttgttctttctcaaatgttttttcttttatttnnnnnnnnnnnnnnnnnnacagttgaagcatctaaaaattgaaataaatatatatttttaacatatattgtnnnnnnnnnnnnnnnnnnnnnnncttctgagttttacttttgtatgttacctgtagttaggcttcaaattgaagcctgttttatgtgtaaaatcagatgcttgcaggaggacggtaaacagcaaaggctttacttcttttgctctaatgtcacctgatacaaagtacttttgttgaagtgaattattttgatttaggcttttgtatagtgnttttacacaggtataagcnnnnnnnnnnnnnnntaatatttacagga

SEQ ID NO: 11278 - DNA, 762 bp, Macaca Fascicularis
  misc_feature (1)...(762): n = A,T,C or G
gtatctaaatacaataggaaaacagatggcgaactttgaacttctggaccaaatttgtgtttgcctttgtcttcttaacagccaaactgtaaattatggagtataaatattcaacagaggagctctttatggaaatcaccatagcagaatagactctgattaaccaaatatgcactgaaaagtacttggtaaacatttccgctccccctttccccaatccttttcaagttcccattatggcctaaagtcagagttctctttacagcatttatactttttctcttccctgcgcacacagcccgagttctcttacctacgcatgcctaaggataggtgtctgtaaatgtgacagagggagacctttgttnnnnnnnnnnnnnnnnnnctctctctgcatctttctgctcccagatccctgactgnnnnnnnnnnnnnnnaacagcatctgtagcaacggacctctctattcacttgcgttgccttgtcagttacacggcctagcaggaagaagagtgtctcctctgtgttctaaaacgacgtattattccatcctgttttatttcaccttatctaagaaatagatgaaagtattatttttaaaattatgaaacagaacatatgtatgggagcgtatataagggatgtgtccagtttcaagaataaccaagaatgcccgcgcatccacctctcagctcaannnngagtgtgaccgttgannnnntcccggtcatgaatgnnnnnntgtttttaacatggcagcat

SEQ ID NO: 11279 - DNA, 760 bp, Macaca Fascicularis
cagagcaaaaagaagaaatatggaaagactctctcttgcttgtggtggaatggctgtgaattcttttgaagatctcactgtagattgcttgggacatgctggtcttgtgtatgagtatacgttaggtgaagaaaagttcacttttatcgaggagtgtgttaaccctcactctgttaccttgttggttagaggaccaaataagcatactctcacacaaatcaaggatgccataagagatggacttcgtgctatcaaaaatgccattgaagatggttgtatggttcctggagctggtgcaattgaagtggcaatggctgaagctctcgttacatataagaacagtataaaaggaagagctcgtcttggagtccaggcttttgctgatgccttactcattattcccaaggttcttgctcagaatgttggttatgacccacaggaaacactagtaaaagttcaggctgagcatgtcgagtcaaaacaacttgtgggcatagatttgaatacaggtgagccaatggtagcagcagatgcaggagtttgggataattattgtgtaaaaaaacaacttcttcactcttgcacagtgatcgccaccaacattctcctggttgatgaaattatgcgagctgggatgtcttctctcaaaggatgattgaattcaaaatcaacccttctagaagatgaaatttagtacactttagatctgactactattgtgtagcctgagccattctgaatttctacacaataaatgcag

SEQ ID NO: 11280 - DNA, 701 bp, Macaca Fascicularis
gtgagcttagtttcttgggccaggcctttacaataatgctcgtctacgtgtggagccgaaggaacccctatgtccgcatgaacttcttcggccttctcaacttccaggccccctttctgccctgggtgctcatgggcttttccttgttgttggggaactcaatcattgtggaccttttgggtattgcagttggacacatttattttttcttggaagatgtatttcccaatcagcctggtggaataagaattctgaaaacaccatctattttgaaagctatttttgatacaccagatgaggatccaaattacaatccactacctgaagaacggccaggaggcttcgcctggggtgagggccagcgccttggaggttaaagcagcagtgccaataatgagacccagctgggaaggactcagtgatacccactgggattcttttatcctttgttgcaaaagtgtggacacttttgacagcttggcagattttaactccagaagcactttatgaaatggtacactgactaatccagaagacatttccaacagtttgccagtggttcctcactatgctggtactgaaagtgtaatttctcggagccaaaaaactggagaaacaaatatcctgccacctccaacaagtacatgagtacttgatttttatggtataaggcagggccttttcttcctcttgatagatga

SEQ ID NO: 11281 - DNA, 634 bp, Macaca Fascicularis
  misc_feature (1)...(634): n = A,T,C or G
ggtnnnnnnnnnnnnnnnnaatctcatccctttcccacatgcacttctctcctatcaccttcccccaagattannngaacagggtccatggccactcaacccgtcagattgtgctgtccccacctgccacatacagtcatgccatacgcctggtcactgaatcatgcaaaactggcctcggcccctaaaaatgagtgaaaaggaaagcccaggatatgacaaggagccctggtgggtttctggggaaaaacacagcactccccacctttcttctgttcatatccagggccccacctcagatcaaagcagctctggatgagatgggacccacagctctccctccgcaaggtgacttttagcaacctcatttccacagtggtttgtactgtggtgcaccagggccctgctgagcagatacacactgctcaaataaagttcccatcctcaatgactcacttgtcaaatagtggactaatgaaccctctgccaaaaaaacacaaagtgcttccgtgagaccaatcttgtgctaataagcgttgagactgatgcttaaaaagtcacaccacaacaaatactgattgagggtgctgcatgtgctgggtacatttcttggtaaatgggaatcagtagtgaa

SEQ ID NO: 11282 - DNA, 662 bp, Macaca Fascicularis
  misc_feature (1)...(662): n = A,T,C or G
tagtaacgctgatcagtgcttttgnnnnnnctcaactacctccaaaaccgttgaatatattctttgctgtatgcatctctttgagtagtattactgnnnnnnnnnnnnnnnnnnnnnnnnnnnnnnnnnnnnnngaaccaaaatttagaaagctaatatactatatcatattttctatcatcatgttgtgtatatgtnnnnnnnnnnnnnnnnnnnnngtgggaaggtgaggctgccaannnnnnnnnnnnnnnaggactcttcaaaatgatacattaggacagtgagtaatttttggataaggtatgctgaagaatctcctgcagaagtctgatacatgattttcatgttaattgtaaatgtaattccctcttgcaagggagacatagcctagatcactttnnnnnnnnnnnnnnnnnnnnnnnnngtacctaaacattccaacccttaaagctcaaacagcacaacatttcacttttgaaatgaacatttttataatgtaattgcacggcaaaaggctatgtaacaaacaaatcttgcattttaagacaaatattcttttatttctgttaaactgaatatacagttgttcnnnnnnnnnnnnnnnnnnnnnnnnnnnnnnnnnnnnnnntcacgttaacaaaacagacaggaaaagacaa

SEQ ID NO: 11283 - DNA, 1362 bp, Macaca Fascicularis
  misc_feature (1)...(1362): n = A,T,C or G
caggtgggaatgaacttgccagnnnncaggctcgttcagctgtgaccatctgtgcggtcagtgtacactcaggtctcctcccnnnnnnnnnnnnnnnnnnnnnnnnntccctttggcgccccctggaggcagagcactgagctggcccctgggtagactcccacagggaggaaggagctggcctcaggtatgggnnnnnnnnnnnnnnnngggccttcagaaggcctgtgtgggggccccaggaagccttagctgaagccgggagactcactctccatctcaggaagttctagcccttgccctcagggagccatggttgagggtgaggcccaacacctgccttaggggccctgggtgggcaagtctgggccctggggcagggagggagactcaggcccacacttgggtattttctaatttcagacaaacacatactcagcgtgcactcactgattcctacacattgccaagatttcacacatgtgaccagaggccaccaaagtccctgtgacctttgtgactaggatcctaatttctctattttctcctgagtgcctgggtctgtgttacttggggcagcatggataatgtttagttctgtgacactgttttttggggggtggcacctggttctctggattcctgggctggtgtcaggcccattactgtaatgccgggagcagtaaagctcagctctgtgtaatgagtgatgctatggcttgctcaggtcttatgatccaatccttttctacatcggcccttgttttgttttaaggctagtcttatctggcctggttatttccctgcggggaggagagagtttattaatctgctcccagcccaacctattgccaccccacctcactgggacctgctgcttgggaggcagcagatacggagccaccagcagtggcttcctggccctgtgcttggggtggggggaagctggggtcacatgtggcccttgccttctgagcagctcccagtgccagggctttgagatttttccacgtgataaaagaaaagggaggtagggaagttccaattccctttttattttgctggttggtatctgtaaatgtttaacaaatatctaagcatgtatgtatcaatgccaagaatttcaaagtctccaacaatatgaggcttttaggatgtttatattccttcatccctcttgtttcccaggttttgcaggggaaaaaaagtctggaattatagatacagcttattattaaatttgttcttgcataatgtctcttctattacaaaaattctttctttataaactgcattagaggtttgcaacaaccacatcatttccattaacttagatttaagttttactggattcattgctca

SEQ ID NO: 11284 - DNA, 751 bp, Macaca Fascicularis
  misc_feature (1)...(751): n = A,T,C or G
cagccccaaaaggtttgcattgcttgagatcagcatgactcaggatatccctgaatcccctcacttatggagcctatgaagatggggagaaggagacatcagcgaattcctgccccatatcacgctcactccaaggtagagaatggtgtgttgnnnnnnnnnnnnnnnggatcctgagaaagatggtagggggcagcgggtggagggcagaagaggccgtgctgttgaatccattccatttttcactctttgtcattttctttctctctgctctttcgatgtctgttttccagtctgtttgtgtgtctctatctctctcctcctttgaacctatctccctgcttcctctgtctctaattttgagtgtgtgtctnnnnnnnnnnnnnnnnnnnnnnnnnnnnaattctctttagatcatgtgtgtgtaaatttcaccagtttacccttccaaccttagccctctcccctgcaactgtggtgctatcagtttgctcttgagactggggtttctgcagccagtaagtcacctgctcttgtccgcaagcttacctaccttgtttggttgggtgattaagctgtcaccccttttgatgagaaccctttgctttcagtaatgtcctcatatttctttccattcttacctgtgtcatgttctgttgagtactgcagccactgcccgctcccaaatccatctacgtgtagaatgtactgtagattgtaagaatgtaatatatatttataaacttactga

SEQ ID NO: 11285 - DNA, 688 bp, Macaca Fascicularis
acatgccaaagccatcaatttcaactttggctatgccaaggccaacaatggcatctgtgttctgcgttttgatgacaccaaccctgagaaggaggaagcaaagttcttcagtgccatctgtgatatggtggcctggctgggctacacaccttacaaagtgacgtatgcctctgactattttgaccagctatatgcgtgggctgtggagctcatccgcaggggtctggcttatgtgtgccaccagcgagtagaggagctcaaaggccataatactctgccctcactctggaggtgacctgcagacgggcagatgctggagagaagccaaaggcctttattcactgggtgtcacagcctttgatgtgtgaggttcgcctctatgagcgactattccagcacaagaaccctgaagatcctactgaggtgcctggtggattcttaagtgacctgaacctggcatcactacacgtggtggaggcagcattagtggactgctctgtggccctggcaagacccttcgacaagttccagtttgagcgtcttggatacttctccgtggatccagatagccatcagggaaagcttgtttttaaccgaactgtcacactgaaggaagacccaggaaaggtgtgagctggaagcactgaacctacctcatcctggaggttggggctaccttcgccacccc

SEQ ID NO: 11286 - DNA, 1235 bp, Macaca Fascicularis
  misc_feature (1)...(1235): n = A,T,C or G
ggctcagagaaggatgacgactcattaatttacataacagcaatagtactcaccaggaaagggatataaaccgaaacttcgatgaaaatgaaattcctcnnnnnnnnnnnnnnnnnnnnnnnnnttcccagcagatcattcggtcttcaaccttcccacaaactgatgttctttcaagttcacttgaggcagaacacagattgttaaaggaaatgggctggcaggaagacagtgaaaatgatgaaacatgtgctcccttaactgaggatgaaatgagagaattccaagttattagtgaacagttacagaagaatggtctgagaaannnnnnnnnnnnnnnnnnnnnnnnnnntctgtgacttcaagtttggaccttggaagaacagcactttcaaacccacaactgagaatgatgacacagagacaagtagcagtgacacatcagatgatgacgatgtgtgaaggatttcctaacagctttagaaatcttagtgtgatacatctctcatacagtttggggtgaattgtaaaaatgaagaactataatttatgtagtgaaataccccatttagaagaggattttttgggggacttcaatacgaagaaaaccaagaatgttttgttgggctgtgtnnnnnnnnnnnnnnnnnnnnnnnnnnnnnnnnnnnnnnnnnnnnnnnnnnnnnnnnnnnnttgactttcttcatcactgcaacatttctctgactagcaatgtgacgatgtaacaaatgagattttctcatttaataataaaaaattgtgtaatgttnnnnnnnnnnnnnnnnnnaaaatgtccaggtcttaagaaaaaaggcagcttacactgttttgcttgcagnnnnnnnnnnntttcgtacaatggaaatctttaagtccactttgtgcggtccccctctcctccccccaaaaaacaaacaaaaaaaccaaaaaggaaaatgtagcatgttggctaaaactggagcaaagtgnnnnnnnnnnnnnnnnnnnnnnnnnnnnnnnnnctattcaccttttaaaacataaattgctctttagccatttgtagtgcagtaaatgttacaggaaaagacttgccacattttcttccaaattttaagaggtgattttcaaaagctttattggggtatgttgtcagaccagggttttcagagttgatggaagagagtcttgtgggaaaacttattttgataaattattacacacgcagaaaaact

SEQ ID NO: 11287 - DNA, 977 bp, Macaca Fascicularis
  misc_feature (1)...(977): n = A,T,C or G
agagagtaaggccttgggctatgctgtgacctgcccaaaatttgacactggttaagagcagaggctgcgtcaggctcttaaagtcatgtgtnnnnnnnntggacgctatactgtccagccaggacagaagacttctgnnnnnnnnnnnnnnnnnnnnnnnnnatcctaaatccagtagcctcccaggcaaaatatagcaatctctgccacaactaccagattaaaagcaacaatccgagtagaaaaatctgttgcctgatatacataacaccaatcagaccatgtggatttttctctgaattgactgattttgtttttttcttactgaaaatggacctgcctttcactgnnnnnnnnnnnnnnngagtcttagctgttttctttaagcacctattttttttcccattgggaaatggctgatgagttcacatttagggatgtacacacgcagatggcagacgtctcctcactcatccagccccaaatctgagccttgacgcaggccaagtggaaaaatacttccccgcccccctcccctgttcccacttcctcatctggcactatgcatgtctcagtcaccctccacagcactcagtgccatcaacgttccctgaacattggctttctctttctgactcctgcctgttttagtccactatatattgctgtatttgcttaannnnnnnnnnnnnnntgttaaaatgtgaaattgtaatttttaaaaaggctacaattaaattttagccaatgccactcaccaaatctttgcacctagtagatagatcaatgtaaaaacaaatacctaactgtacagtgagtgtgggggaaatgtagtaacctagttagtagtcttcaatataaccaattgtacaaggggaagtggtgtttacctacttgttcatcaccattattgaaagccgtactgatcagttagttgacaacgggcattttttttttctttgcttcatggaatgatt

SEQ ID NO: 11288 - DNA, 770 bp, Macaca Fascicularis
  misc_feature (1)...(770): n = A,T,C or G
gagcaagagtgtgagnnnnnnnnnnnnnnnnnnnnnnncagagagtnnnntgtagcttgttcnannnaannnnncaggtgggtgnnnnnnagtggtgggagaagantngaaggtaagtgaaggtaaggaatgtgtggtgggcctcagatcccaggctcattcctcaaatcagttcttacttccctcacttatctttgtttaaataaggttagtacattcactagggacaaaggggtttttctaaataaatggcataaaaaagaactggttgtctttctttaaagaaaggcttagttacaggattctgtgattaaaatccttaaatattgggtagctgtagtatcagtttttgaaccacagtaatgggaagaaagacaaatggattcctttagaagtagaatttctatttgcaggatgagttgggtagggaaaggggtcggggttcatcaggtgaactcaacactgatgagactagaacctcactttatgatataagcacaatacttattcagtgtggtgactggggtagattgtgaagcaaccctccttatgcccactgccttttagaatcatttgtttaattcacggtagttgtatgaagacatactattattgaatgaaatttaatatgtacttgaaaacatgcttttgtcccttctcttcatctggtctaattcaagaacattgttttaatggctgctgacaatgaaccatctgtctgagtctaaaaccaagcttgggtttctaagccacatgaccttgattgttaa

SEQ ID NO: 11289 - DNA, 657 bp, Macaca Fascicularis
  misc_feature (1)...(657): n = A,T,C or G
ggttcatgcnnnnnaagcagccaacactttagttagggcatcatcagccaacactttagtgttggctgctttggaggcatgaacccatgcaagcggtagttccaaagttcagtatgtaccctcaaatgaacaatcaagcaggtaaaattacccttgaaaaaaaatcccttagaccacccataaatgacagtgactttttcagtatggactcatcatagccagttttccttttgaagttggaactgatcacccttttgtcatctgtaccagatcagtagttggcttgtgttacattttgtgtgtgtgtgcgcgtgttttaaaccagtgcatataaattgtatgttaaatgtaagtaactttaaggtgacttatctcttcacagtaatcaagcctcatataattcatgctttttaaattcagccagccccccgccatctctctgaaattttattatgtaaataatttgtgttccctgatcagtcatttaagttctttgttgtatgtcatctcttctctagcaggaattggcaaacttttttgtaaaggggtagaaagtgaagattttaggctttgcaggccatatgacctctgctgcaaatgctcaaccctgctgttgtaatgtaaaagctgccacagacactgcgtgaacacgaatga

SEQ ID NO: 11290 - DNA, 645 bp, Macaca Fascicularis
  misc_feature (1)...(645): n = A,T,C or G
agcagaagtgtgannnnnnnnnnnnnnnnnnnnnnnnnnnnnnnnnnntgtacttagtttgaaatggtgcaggcttagtcttaagcctccaaaggcctggatttgaacagctttagaaatgcaggnnnnnnnnnnnnnnnnnnccttcagaagccaactctgcagatggggctaggactatgggcttttagcagcccccaggtgaccctaacgtatcagccgcggactcaggacctacccggtgatgctgttgatctctcaaaggtcttccaaaactcaacagagccagaagtagccgcctgctcagcggctcaggtgccagctctgttctgatccaccaggggtccgtnnnnnnnnnnnnnnnnccgcggggcacctccctgnnnnnnnnnnnnnnnnnnnnnnnnnnnnnnactcaccagaccgtcnnnnnnnnnnnnnnnnngaaagccgtgcgtgcgcgtgttatttatttaagtgcgcctgtgtgcgcgggcgtggnnnnnnnnnnnnnnnnnnnnnnnnnnnnnnnnnnnnnnnntacagtcttgtgtgcctggcgagaagaatattttctatttttttaagtcatttcatgtttctgtctggggannnnnnnnnnnntatcactgatgtgggttgaga

SEQ ID NO: 11291 - DNA, 701 bp, Macaca Fascicularis
  misc_feature (1)...(701): n = A,T,C or G
atgtaaacttgtgtnnnnnnnnntgaaatgattcatattaactgttgggtgnnnnnnnnnnnnnnnnaaggggctgcttactatagggttaactatgtatattcattgttaagagttaacttgtggtttggctgtttcctggattttataacatatacatgnnnnnnnnnnnnnnnnnntgaaaggaagcatacctttattaagatgctattaaaattgaacatcaagtataatatttcatttggattctttttttggttaatgcctaaaatgcctatttgggattttttttttttaattaagagaagctctcttctgtgtagaacagttgttcnnnnnnnnnnnnnnnttttgttttcctgttgcatgacagatttaactattatttccagcagtggaggtgctgtcagagtccagtgttctagaagaggcagtgtctaaagcctaattttacttttctaattctggtagctaccaccttccaccccaatcatttgaaccattcnnntcttatcaccccnnnnnnnnnnnnnnnnnnnnnnggtccagcacactcccccgacccccgaggacacacccagacgccccagggacccctgggaagggaaggcagcttggcttctcctgcccctgggtcctgctccctgctttgacaatcagccatcctcgtctgctctcctctctcttccaacacagcccgt

SEQ ID NO: 11292 - DNA, 763 bp, Macaca Fascicularis
  misc_feature (1)...(763): n = A,T,C or G
tcctctgatgtgggaccaaaatcaaaagtgcccccaagtacacaagttaagaaaggagaggagactgaagagacaagttcaagtaaattgttggtaaaagcagaagagctagagaaacctaaagaaacagaaaaagttnnnnnnnnnnnnnnnnnnnnnnnnnnnnnnnnagaagtacgggtgactaaggaagtggatgctacatctaaagaggccaaatccttcttcaagcagaatgagaaagaaaaaccaccagctaatgtcccttcagctctgccgtcactccctgctgggtcagggttaaaaagatcaagtgnnnnnnnnnnncttttggggaaaattggtgccaagaaacagaaaatgagcaccctcgagaagtccaaactggactgggagagcttcaaggaggaagaggggatnnnnnnnnnnnnnnncatccataatcgagggaaagaggggtacattgaacggaaagccttccnnnnnnnnnnnnnnnnnnnnnnnnttgaaattgagcgagatnnnnnnnnnnnnnnnnnnnnnnnnnnnnnnnnnnnnnaaaatcaagagcagcttaatcctgtttacaatgtgagctttttgtgcgtctgtgaaatgttttccagtgtttctcatcatctgtttcccagcaaggtctttttttttttctacattgaagttctgtctatgtatcttaatcacaaatggtttcattcactttacttttaaaaatttgtccttaaatgaataaataaaataaaag

SEQ ID NO: 11293 - DNA, 1158 bp, Macaca Fascicularis
  misc_feature (1)...(1158): n = A,T,C or G
taaattgatgcctgtgatcatgatcatcatgagagatcacacttacgccaagtgtcagaatgcncttcagcaagtggttgctcggcaggggcggcctgtggtaatttgtgataaggaggatactgagaccattaagaatacaaaaagaacaatcaaggtgccccactcggtggactgcttgcagggcattctcagcgtgatccctttacagctgctggctttccaccttgctgtgctgagaggctatgatgttgatttcccacggaatcttgccaaatctgtgactgtagagtgaagaatatctgtacaaaatatacgaaactgtacaattaagcaacacaagacaccttttgtatttaaaaccttgatttaaaatatcaccccttgaagccttttttagtaaatccttatttatatatcagttataattattccactcaatatgtgatttttgtgaagttacctcttacattttccagtaatttgtggaggactttgaatgatggaatctattggaatctgtatcagaaagattttagccattattttctttaaagaatgctgggtgttgcatttctggaccctccacttcaatgtgagaagacagtatgtttctaaaaatttgtgcttgtttcaccatgcttcattcagaccaatgaaagagtagtgcatttaattggagtatctaaagccagtggcattgtatgctcatacttggacagttagggaaggttttgccaagttatataaagagaagatgtgatttattttgaaatttgtttctgttttgtttttaaatcaaaccgtaaaacttaaaactgaaaaattttcttggtaggatttatatctaagtttggttagccttagtttctcagacttgttgtctattacctgtaggtggaagaaatttaggaagcaaaatattatagtagtgcattggtgggtctcnnnnnnnnnnnnnnnnnnnnnnnnnnnnnnncacaaactttaaatttgagctgctttcgacaactgacaatatgattttaaatttgaagatgggatgtgtacatgttgggtatcctacttctttgtgttttcatctcctaaaaatggttttcatttccttgtatctgtagtcttttattttttaaatgactgctaaatgacatattttat

SEQ ID NO: 11294 - DNA, 742 bp, Macaca Fascicularis
  misc_feature (1)...(742): n = A,T,C or G
gtgtttatgaagaacagtgagtacctagaactgnnnnnnnnnnnnnnnnnnnnnnnnnnnngtgcatttctttacagagctgtgtcatgccatcctttgggcnnnctgctggaaaagtagaatcaagtctcaaataatgcctttttaattgtatcctctagtattatagatataggacannnnnnnnnnnnnnntctgtgaatgtaaaatatcttgtacctgctttatgatacgtagtagtgaccgtgctttatcagagctgtttttaataatgttattctagaatgttttatttccagatgatgattcagaagctaattttaaaaaatggtgccaggtaccacaacagtaacannnnnnnncaattttctggggttttgttttttaccttcccccccccccccttttttttaaatggagtgtgctggatgtctctataattttattcagatgnnnncagaacctggaaaagctgttgctgctattgatgcataacatactgctattggtctttttatataaatatatatatatatatacatatatatatataatttgaatttttggaaactttagctgtgctgtcaactttggaaaaagtatcccagtttactgtgttgagttggcattgtacagaaattaacagccatattggtctagaaacgttaaacttaattttttccatttgtacaggggtaacgcactgtattaaatatgtaaggtcttatctacatgggctcac

SEQ ID NO: 11295 - DNA, 714 bp, Macaca Fascicularis
cagggcagctcctgccactcgccaggggccagcatgccagtccaggcagagcaggtggctggctgtctggccgtctcggcccgcctctccacaggaccctggaccagggcggtgcggggcgcggccgtgaggaggcaggtggaggaactgcgggtttccacagggccgtgtcgccacggctcctctgatcctttagggttggcgagcatctctggaaatagcttttgcagaggagtggtgggaggaatggaggaggacagtctgtcacctccccgtccccgccactttgtgtagatcctacctggagggaatggctttaggcacttttgtgctagagcttgtgagggtgacagaagagggtccaggctggaaacctgaactttctggtgggaggaccaggcggtgcctgccaaggtctgggcatgtttgggctggcgctggagcctgtccagctggcccgggccctggcctggttctcacaagtgtttcctagacggagaggcacatgggtcagtattagtctatttatcagaggtgtaaataatctatgtatagtttttctccttttagattattttgtatttgtttaaaagtaagttttgtcaaaatacaaaaatataaagaaatgactgaaagttgttgacagggtttttaagaaattataattattctaattgtttttgtttgtttgtttttgcctcgaaactagcgcca

SEQ ID NO: 11296 - DNA, 732 bp, Macaca Fascicularis
  misc_feature (1)...(732): n = A,T,C or G
acacacacggtctgcagtgacagcggcttggaagtgctctaccagagttgcgatccattacaagattttggcttttctattgaaaagtgttccaagcaattaaaatcaaatatcaacattagatttggaataattctgagagaggacatcaaagagctatttcttgacctagctctcatgtctcaaggctcgtctgtgttgaatttctcctatcccatctgtgaggtggctctgcccaagttttctttctgtggaagaaggaaaggagagcagatttactatgctgggcctgtcaataatcctgaatttactattcctcagggagaataccaggttttgctggaactgtatactgaaaaacggtccaccgtggcctgtgccaatgctaccatcatgtgctcctgaccgtggcctgtagcaaaactcatagccagcttcatctcacgggacctccaagctcctctgactgaacctgctgtgggagaagaagcagccgatgacagagagaggctctacaaagaagcccccccaaaaagtgcagctgctaattttagtcccaggaccagacatccccagaatccacagatgtaatgaagtccccgaatgtatctgtttctaaggagcctcttggcagcccctaagcagtcttgtgggtccatcctttttgnnnnnnnnnnnnnnnnnnnnnnnnctcacctgcttttcaacttcttaggagtgcttcctcacagt

SEQ ID NO: 11297 - DNA, 765 bp, Macaca Fascicularis
  misc_feature (1)...(765): n = A,T,C or G
tcacacttgcaccacccatggacccatctgtgcccatctggattattatatttggtgtgatattttgcatcgtcatagttgcaattacacnnnnnnnnnnnnnnnnnnnnnnncaacgtagaaggtaagatatttaaaaggagcgattgaaagagcattttcttatttcctcatgacttggacaaatcaggagaagatttnnnnnnnnnnnnnnnnnnnnnnttaaatttgaaactttgaaaaannnnnnnnnnnnnnnnnntatcacttatgctcttgtcttcagatatatttgagagtccaatgtcccttacttaactaggctccttccacgactacctttccttctattctgtaccacataaatgtttcatatccaggcttaattttaatatctgtgttgtgattttgtaagctgggtataaggagctaaacagactttttgggtaggcagagttaatctttggtagtcatccacatccaaatgccagcagtttcatagttccatgcctccctaccttggcttacctcttgttagcccagtgcatgcggactaccatcttgtcccagatgcttttgtactgttatacttccctccctttgatggacactcatcccttgtgtgcctatgatattgaatagagctgtgttgctcgtggcctnnnnnnnnnnnnnnnnnnnnnnnnnnnnnnnnnnnactcgtttaacatgtaggttgccttggccctactgcaaacccactaaattagaatctctgaagggatg

SEQ ID NO: 11298 - DNA, 717 bp, Macaca Fascicularis
  misc_feature (1)...(717): n = A,T,C or G
gtatattgtttatttaatttcttttnaagaagaaaaaagttcgtcttcacaaggtgcttcagacttggttttttagctagaaaccagaagactgcgggagggaatgtaaggcagagaactgtgagtctaattttattactgtttttttcactacctactcccacaatggacaatcagttgaggcaaactacaataaaacatttacaaccagatggttacaaataaagtagaagggaagatcagaaaacctaagaaatgatcatagctcctgtttactgtggacttgctagatttgaggtacctagttcagaactcactagtcaccatctcaaagcctgtcaacatcactgcatattggaggagatgactgtggtaggacccaaggaagagacatgtgcctgaacagtcgtcactgtatttccaagcttcctggcaaccagtgggaaaagagaaacatgcgaggctgtaggaagagggaagcttttccttttcacctacaggaattaaccattctcttccttatgcaaagattgaggaatgcaacaatataaagaagacaagtccccagatgggtagggagcagtcatatctcacccctagatgttcattccagcagaagaaaaagaaaagaaggtgttggggtaggattcttcagagattaccctggtactttctcatcagacactagcttgaagtaagaggagaattatgctttgc

SEQ ID NO: 11299 - DNA, 726 bp, Macaca Fascicularis
  misc_feature (1)...(726): n = A,T,C or G
aaggtgatggtgctcagcttctnnncacannnnnntcccctaccaggtggaagagtctgactccatgtgttatgcctaggaccaatggcagtggttcgtccactcctcccctttttcatctgcacagagttgagggaaatgggagaatctgtgctgagaagacttagacccaggagcccctttcacaggcccctagttgggaagactggatgagagtggagcctcccttttccctcttctatccttgttacttgaacaatctcaatctctaagtggtgggtggggatatnnnnnnnnnnnnnnnnnnnnnnnncaggagagagaacttttttggtctcggagcttggggtctcaagaattcaagtggccccatctctctctcaggcaagcccaaagctcaggtcccatataccacccttagatcctgtctcctagtctgcctatgtctttctctgctatatgtttctgtcctgctgtctgtctgtcaaaagtctcacagagagagggcctcagggagctgctgaggggtgctgagcctggctcagggagctgggacctctcccctccaacacacatactcacagggctttcctccttgcccctcctacactaggagcaagaggagggggctgcaatgacactctggggttttaagacccaaggcacattcaatgcaaggggagcaaggatgggacaactccatcttctgctgcccatggaaaaaaa

SEQ ID NO: 11300 - DNA, 684 bp, Macaca Fascicularis
tatgctagtcgggctccggtacctagaagtagaaccagtatccagacagaagaagagaaactgaggccagcattaccacctccgggactttatcgtcttccgccttggccatcttcttccttcatcatctctcctctttaatttcttcttttctgttccatcgtcagcccctttattcacttttagcctctttgtttttttaatttttaaaatttaaagatatgcatacagaaaagtatataacatgtatgtacaatttaaagaataattttaaagtgaatactatgtaactccatccaagtcaagaaattgccagctcctcggaaacccactgtgtctccttcccccacctgcaacctctttccaggattcccatttccagccttcccctttttcccttttattttcatgccttgatttgacttgtgtggtgggaacatgtgaactatgaaacttaaacctgctgcccacccagagcagctgtgaccaagggctgcctcaaggggttgtccacgcaggttgggctcctctctgctgctggacccaagactctgaaccttccaagggacaggcagttcttctaagaagggctcccctgtgtgtgagcaagaccatggctctccctctgtctacagatgcatgagggttggaagagtctgggctgtttttagaccttctggtcag

SEQ ID NO: 11301 - DNA, 731 bp, Macaca Fascicularis
  misc_feature (1)...(731): n = A,T,C or G
cgggatggggactttgagaacccagtcccatacactggggcagttaaggttggagccatccagcgctggctgaaggggcaaggggtctacctaggtatgcctggttgcctgcctgtatatgacgctctcgccggggagttcatcagggcctctggtgtggagggccgccaggccctcttgaagcgggggcaggacaacctctcaagtgtgaaggagactgagaagaagtgggccgagcaatacctgaagatcatggggaagatcttagaccaaggggaggacttcccagcatcagagatgactcggattgccaggctgattgagaagaacaagatgagtgatgggaagaaggaggagctccagaagagtttaaacatcctgacngccttccagaagaagggggccgagaaagaggagctttaaaaggccgtctgtggttttccagggtttggtggggatagggaggggagagttaacctgctggctgtgagtcccttgtggaatataagggggtagtgggaaaagtggtactaacccacgattctgagccctgagtatgcctggacattgatgctgatgtgaccatgcttgggatgtctctagctggtctggggatagctggagcacttactcaggtggctggtgaaatgacccctcagaaggaattagtgctatagaggagagaggagtatacggcccaggtcttgacaggtgtaatctcatcaataaag

SEQ ID NO: 11302 - DNA, 731 bp, Macaca Fascicularis
  misc_feature (1)...(731): n = A,T,C or G
agggccaggcctnnnnacaactgggtgcccaaaaagtggcaattagtgaatttagcaggtgtcttgagctgctcttccggaccacacctgaggaaaaagaacaaggggcagcttccaacggtgagcagggatgtaagtcagatgtggcactgcagcagcttcgggcagccgccctaattagtcgtggactggaatgggtagccagcggccaggataccaaagccttacaggacttcctcctcggtgtgcagatgtgcccaggtaatcgagacacttactttcacctgcatcagactctgaagaggctagatcggagggatgaggccactgcactctggtggaggctggaggcccaaactaaggggccacaggaagatgctacgtggtctctccccctgtacctagaaagctatttgagctggatccgcccctctgatcgtgatgctttccttgaagagtttcggacatctctgccaaagtcttgtgacctgtagctgccacgtttccaagagcttgagctggggccccattgggctgtctctctgtggggagggctttctgcttcaccattgttaggaatgtgaccattcctatannnnnnnnnnnnnnntgaggttggtggtaggcctgtgaaatttgccctaattactaccattctggttttggaggaaacaatctctgccaccaccaagtcattggcttcgctcgaggcacctttcttcctgttcccc

SEQ ID NO: 11303 - DNA, 773 bp, Macaca Fascicularis
  misc_feature (1)...(773): n = A,T,C or G
ccattagtttgtgtagcaaagtgcgatgtgaaaatgttcaccagaatgagaaactgagatttcnnncagtaatggtgaatatttggctctttaaacctaaaactcttcattgagtagcttgtatttgaacaagactggttaaacatttgcctttacttctcattttgctttactgtcaaagtttaacaccttccaactactcatgtgtgtcctgtaacacaggggattgaacgtatgagagggaaaggcaaaggaaaaaggaagccagatactgggagaattactaacttctcatacttccccacattgagaagcattcggagtgtatttagcctgtaggtgttgtgatatgcaaatattccattccctggttactggcattcctaagattcttcatggtattttcaaactttggataaatttacagattagaaagatatctgacagttacctctgnnnnnnnnnnnnnnnnnnnnnnnnntgctggaaaggatctttggctaggtggaccattagttttattcagtagtggcatttcctattttctcaaagccctttcagttataaccaccccactatggaatcagtatttagttacacatttgtataagaacctgtattttgaaaaacacatttgtgtatatttcctggaattatttgcctgttaaacagtgtctttcgtgtgctctccccagattgtaaacgctgtaagaagcagccctggctgcctgtatctgtatcccttgtgaaactctgaaaacactgaataacta

SEQ ID NO: 11304 - DNA, 754 bp, Macaca Fascicularis
  misc_feature (1)...(754): n = A,T,C or G
gcaagaaaataatttactacnnncttacataatgtatttataaagtttttccagataaactaatcaaataaattagaacaatgtgacaacattacaaatttaatttgttagctgcattccttctgatgttnnnnnnnnnnnnnnnnnnnnnnnnnnnnnnnnnnnntctgaagtctgtgtgttgctgctgtccccagtgatggtggacttctctttgccttacctgatcacaaattatgttggggaaaataaagatttaatatttctttcaatagaaaaagaatttggttttgctcgtttaagagcaatgagaaaatgatggaatgttgactnnnnnnnnnnnnnnngacacggactttcatggaagtccttgctctgcgtggcatctgtcagcttttcacctttcattcttcttctnnnnnnnnnnnnnnnnnnnnnnnnnnnnnnnnnnnnactttcatttgctaatataaattcaattttattttaccattttagagactactaaagattaaatgtagaaggagagggtgcacatgtttttatgtggagtgttaaaaaagataaatttataccacggtaacgtgcagcttttatgaagagagaaattggttaaactgctaggttgaatgagagacttcatctattggactatttgttttaatnnnnnnnnnnnnnctttagtaacagcttgtaatttgttaaaacattaatttgggggttttccctattttcagttgtccatgtacacagt

SEQ ID NO: 11305 - DNA, 742 bp, Macaca Fascicularis
  misc_feature (1)...(742): n = A,T,C or G
agaaattcacagagannnnggccatttttgaggatgggaccacatttgagggcattgactgtgtaatctttgcaacagnnnnnnnnnnnnnnnnnnnnnnnnnnnnnnnnnnnnnnnncaaaaacagaaaccatgagatcattttatttaaaggagtctttnnnnnnnnnnnnnnnnnnnnnnnnnnnnnnnnnnnnnnnnnnnnnnnnnnncttggggctgccattcccacagttgacctccagtcccgctgggcagcacgagtaataaagggaacttgtactttgccttctatggaagacatgatgaatgatattaatgagaaaatggagagaaagcgcaaatggtnnnnnnnnnnnnnnnnnnnnnnnnnnnnnnnnnnnntttatatggatgaactctcctccttcattggggtaaagcccaacnnnnnnnnnnnnnnnnnnnnnnnnnnnnnnnnnnnnnnnnnnnnnnattttggcccttgtagttcctaccagtttaggctggtgggcccagggaagtggccaggagccagaaatgccatcctgacccagtgggaccggtcgttgaaacccttgcagacacgagttgtcgggagtcttcagaagcctcgcttctttttccannnnnnnnnnnnnnntgcaattcctattctgttaattgctgttttccttgcattgacgtaatcaccattttctctaggatttctgaaagttgctgacaatacccagacaacggc

SEQ ID NO: 11306 - DNA, 781 bp, Macaca Fascicularis
  misc_feature (1)...(781): n = A,T,C or G
atccagacagcaatccatacagcttacttgataatacagaatcagatcagactgcagacactgatgccagcgaatctcatcacagtactaaccgtcgtaggcggtcnnnnnnnnnnaggactgatgaagatgctgttcttatggatggaatgactgaatctgatacagcttcagttaatgaaaatgggctaggtatgtaagcacttagggaaaagaaatacatatatatatatataaattgtatactattgttagtgtatgaagctttttnnnnnnnnnnnnnnnnnnnnnnnnnnnnnnnnnnnnnnngtgtttacttggaacaaggtagatagcttttgtctgtcttaaatgtttagttctcagatttcttatagccaaattatttgaaacttggagggttaaagtgccctttgatgccattaaatcagtacggcaaggtacttagtgcttttattgtccccaagctaaaatcgggctttcatcttacctcttttaaaataattataaatgacactggtaaaggtatatatatcaagagtaggcattaattttcaagggctaaaannnnnnnnnnnnnnnnnnaaaccaaactgtactagagaggaaaactgtgtccctgaatgatggcagtttaagtctgnnnnnnnnnnnnnnnnnnnnnnnnnnnnnnnnnnnnnnnnnnnaattccatttttaatccatttggaatgctgaaagctacaaaaatgtatttcctgtcagtaaacatttgttgttttatttttggtgttaataaaag

SEQ ID NO: 11307 - DNA, 698 bp, Macaca Fascicularis
  misc_feature (1)...(698): n = A,T,C or G
gnnncccagaggacctgtccccggggcctcgcnnnnnnnnnnnnnnnctgtgtcgcctgtgccgtccgaacgacggggtgcctgcccagcgtggaagccacggcagctggtgaagggcgctcaggagagccgtcttcagctgggctggggttggggctcctttgaggacaacctgccagtgtggccctggagagctgccagcagctcttgggacggacttgctgggaggctgaggggctttggacctgctgtcttttccatttcctagagtttacgtcattgtcttgaggcttccaggattttttgtttttttgccaaagtagaaaaggcaggtggggggcggctggtggggagtgtggtccccgccccctcagtcccgcccgtccctcgcagcccacacggaggccgcagcggtgtcgtggctgttacgtgcaggaacgtggagaccccgactttggctcactgcgtttggtgtttttttttttcagaacttgggagccnnnnnnnnnnnnnnnnnnnnnnnnnnnnnnnnnnnnnttccctccagcctccccaaaatcaaccctggcgttgagacaacgtcctgtccgtcgtgggtaacagccttggggagggctcagagctctgcagagccatggccgggtgggggctgcctcagtcctgtcctcttggcnnnnnnnnnnnnnnnnnnnnnaacc

SEQ ID NO: 11308 - DNA, 745 bp, Macaca Fascicularis
  misc_feature (1)...(745): n = A,T,C or G
atttcctagaatttttaatattctggctaccagataacatctcccagatgttcccaaacccagaaggggcataaaactcctgtcagacgacacattccaattttggtttggcatatatggtcaatggctgtaaggctggtactccagnnnnnnnnncccnnnnnnnnnnnnnnnnnnaaggcagtgaatggagtagggaggaacgtggctgaaaaagggaagggtcaaggccaataaggacatgtgctttctttggttccacagtgttggaggctggggtagcctttgaccgggagtgggacccggaggtgaggccagctctcagacatcaaccaaaggacccactgcatctccctccttcccctgccaacaaaggtacaagtagatgttgacaccccctcagacatggaaggagacccatttttttctttttctagttctgcataaatggccttaaacaaaatatgctaacaggctccttgcctctcccgaaggcagcccaccacagaagccctgccacagcccaagaggttagatgctgccaggatctgtttccgccacagagcagctctgtgcagcacattcctgccaaccaccccaagtgcttcagggcttccgaggcagtgacagtgagggcagcggcacttctgggtcaccgtnnnacaggtctctgcctcaagacacggattgacaagctctctgagtgggccaggagctccttaatgtgagccaagccagccctgcc

SEQ ID NO: 11309 - DNA, 715 bp, Macaca Fascicularis
  misc_feature (1)...(715): n = A,T,C or G
gccctgcttggttnnngccnnnnnnnnnnnnnnntgcttactgnnnngcagtaagatgacgtcctacctggaaagccaggcagaaattgtattgccnnnnnnnnnnnnnnnnnnnnnnnnnnnnnnnnnnnnnnnnnnnnnnngagccttcagaatctccaaaagagatgtcaccaatacatagagcacactggggtgttaggagagacctctgcataccctgagaggctacttggaaaggcattttcccaggagagctctgtcgggtggctgcacttcagccccgcacctacaccacagtgtctccttgggtatgttcttgggcaaggaatctcaaagccagagaagctgtaagctgcctgccgggcctgaggagctccagccagggaagactggatgtgaggagacgagtcactgtcaccaggtcacagaatgactgaggtgatggtaggatgagaggaacagatgcccttctttaattggttctcaatcaacttctcagaggctttggagaatgggacagtggctttctagcctttgaatgtccagataaaattttttggtcttggcccctgtactattttacctctaaattttggcattttttttccccctgcaattaaagtgttttactttatttattgaactttatcattgaaagctgttnnnnnnnnnnnnnnnnnnnnnnnnnnnnncttttttctttacctgtgcc

SEQ ID NO: 11310 - DNA, 741 bp, Macaca Fascicularis
ccagcatggacacccccatccagctctttgccctgtgcctgcaggtttccacctccctcctccaagccctccctgttcacccggcaacctcagctcaagaccccgctttcatgaagccctctctgcaaactcagccaatgggcctccctcctgctgtgggcccatctctcctccctgcaaagggcagctgagggtttgggtcacctgctcctggagctgtctaccacggaaaatcatgcagccagcagaaagcgcatcggcttctcccgagggtggactctcctggaaggcccacccctgcgcctgcctcttcagagcaagccaggccctaaaactcctcccttcagccgatggccagatgcccagagaggctgggagctaagacacaaatagcgcagcctgggatgcccacatgacccttccaggcctctcatctgcctgtgtgtctgaggccatgacatgctgagcacctactatgtgccaggcacagcacaaagtgactcagatccctcctgaatgttttggtgccctcctgatggtgatgggtgagttctgagttcacacgaggctggctgcttaagagtctgggacctcctcctgctctctcttgctcccgctttcgccatgtgacgtgcctgctcccccttcaccttctgccacggatggaagctccctgtgaccctcaccagaagcagaggctggcaccacgcttcctctacagcctgcagaaccatgagccaa

SEQ ID NO: 11311 - DNA, 765 bp, Macaca Fascicularis
  misc_feature (1)...(765): n = A,T,C or G
aagcagaggccacannnnnnnnnnnnnnnnnataactgcctgggctaggggtgtcacttcctagaatgggaagnnnnnnnnnnnnnnnnnnnnnnnnnnnnnnnncccactgtgcctttcccctnnnnnnnnnnnntgacagtgactcctctctctctagctctgcctgtttcttccccctactctaagctactcttccttgagccctccctggctgctgcttcttccctcatccgtcagatgcaatctgtgggccgcccctctcccctggccgctaagcagcctccattgatttccgctcgtgtttataggatttccnnnnnnnnnnnnnnnnnnnnnnnnnnnnnnnnnnnnnnnnnnnnnccccctcnnnnnnnnnnnnnnnnnnnnnnnnnnnnnnnnnnctaaaccgccttacagctgagttagacgatgaggggaggcagcagggatttccctgccttggggtgtgggaaatagaagcaagttgaggaaatggttgggaatcccagttagaactctagaaattctaatctgattttgccactgtgcccagctttggcccagannnnnnnnnnnnnnnnnnnnnnnnnnnnnnnnnnnnnnnnnnnnnnnnnnnnnnnnnnnnnnnnnaaccagcagccgccccatccccgcccctgtgttgagacnnnnnnnnnnnnnnnnnnggaagatgcatacctcttatgtaagaatgcttttcccttgctgttattcatacacatttccactccaaatataccc

SEQ ID NO: 11312 - DNA, 743 bp, Macaca Fascicularis
  misc_feature (1)...(743): n = A,T,C or G
gtttttaattacattaattgaaatgtgtttaagagatgatttcagcatattttgtatataaaaaaaaaaggattagtattgggccaatggccaaaaggtaatattactaccatgtagattgttatagttcaaattgtcccacttcccccagaattttagaaactagaattctgggagatactgtatcagctgtagttgggtaattccaagtgctgatagtactattcatcttttttattactgtgtcagatgaaacaaataccaagttgcaaaagatgcagatttttattatataatggttttaggcataaattattaacaagccatgccttgtatgtttcatcttacatttttctttagaactaaactataatagattttggaaaacgatttgatgtgcttgctcacttgattcacttggtcagatatttgaatgatggtattacctagattctaatccttgattctagttatataataaataataatatagaatgtgaaaatatgtttgggcacttactgtttatattatgtagtagcctccatcatgatacactacatttatgaattgagcagttgtgtaattgtaattattattgctgttcatgtaacaaaacatgcttatgatagtagcaaacaaatagaaatgcccccaaaatgctatttttttaattcagttgtaactattactcttgtagttgtgtangacacaataaaannnnngcacatcaaatcgtttccaa

SEQ ID NO: 11313 - DNA, 1228 bp, Macaca Fascicularis
  misc_feature (1)...(1228): n = A,T,C or G
agatgaccagctcataaaagagtttcttagtggttcttactgctttcatgggggtgttggttggtggaaatatgaattctgctatggcaaatatgtacatcaataccatgaggacaaggatagtgggaaaacctctgtggttgtcgggacatggaaccaagaagagcatattgaatgggctaagaagaatactgctagagcttatcatcttcaagatgatggtacccagacagtcaggatggtgtcacatttttatggaaatggagatatttgtgatataactgacaaaccaagacaggtgactgtaaaactaaagtgtaaagaatcagattcgcctcacgctgttactgtatatatgctagagcctcactcctgtcaatatattcttggggttgaatctccagtgatctgtaaaatcttagatacagcagatgaaaatggacttctttctctccccaactaaaggatattcaagttaggggaaagaaaagatcattgaaagccatgataatttctgtccgaccgtgtctcattatagagttctcagccattggacctcttctaaaagatcgtataaaatgactctcaaacactttgtgaatatatatgtgtatataagaggttattgataaacttctaaggcagacatttgtctcgctctttttcatttttattgtgtcttataaactgattgtttttcttgcttggatactgtgattccaaaataaatctcatccaagcaagttagagtccagcctaatcaaatgtcataattgttgtacctattgaaagtttttaaataatagatttattatgtaaattataatgtatataactagctaatgaagtaaaattcatgaagaaagaaattgataggtttaaatgagagaccatgtaaaatatgtaaattctagtgcctgaaatcctttcaacagatttttatatnnnnnnnnnnnnnnncaaggtgttaaagtagaaactgggcacatggtagaggctcacatgggagttgtcctcacccttgttaatcttaagaaactcttatttataataggttgcttctctctcagaacttctatctatttcttttttcttcttatgtttactctcagagtatctatctgatgtagacagttggcgatgcttcctctgagactcagaatggtttgctctaacaaaacactgtgctgtctatcccttgcacttgcctactgtaatatagatttca

SEQ ID NO: 11314 - DNA, 1419 bp, Macaca Fascicularis
  misc_feature (1)...(1419): n = A,T,C or G
attccgttgctcaggctggactgcagtggctcaatcatagctcactgcagcctcaaactccagggctcaagtgatcctcccacctcagcctcctgagtagctgggactacaggtgcacgccatcacgcccagctaatagtcctttttttttttttttttgagatggagtcatnnnnnnnnnctctgttgnnnnnnnnnnnnnnnnnnnnnnnnnnnnnnnnnnnnnnnnnnnnnnnnnnnnnnnnnnnnnnnnnnnnnnnnnnnnnnnnnnnnnnnnnnnnnnnnnnnnnnnnnnnnnnnnnnnnnnnnnnnnnnnnnnnnnnnnnnnnnnnnnnnnnnnnnnnnnnnnnnnnnnnnnnnnnnnnncaaactcctgacctcaggcgatctgcccgacttggcctcccgaagtgctgcttttgcagacaggagccaccgtgcccagcctagtctcacattttataggctcccaaaccacagcagaacatctggctgcctcttccctccgcacccatcgcgccagtgggtgtgctggctgtaggtgggggtggctgtgcccgggttcctgggagcacctggtgattcatggtcacttaccctcaaacacctgaccctggggcctctgcaggtttcctggtgttgtcacaaagggaggaagcgcacctgtggctggccggtcacctggtcagagccaaggcaggcagggccttccnnnnnnnnnnnnnnnnnncaggcacaagtctgcaggctgctcaggtccccatctgattattttttctcaaagggacttcctctaatacaatcacagcaaccctggcctcggccccgccctgtccctgccatgcaacttcacaactcagctgggaggcctccaagtccccagggctcacacaccttctggggtgctatggactgaaccggctccaaggcattgagtgtgcgggaaactcaccgttggaggtgctcctgccctgcagggagcctgaaggctgtgggagggccctgaccccaaggcctatggagctccctaggctcctctggccacacctcaccacacaccctctccttnnnnnnnnnnnnnnngtttgtggaagtcccaggcaatcactgtgtccacatgagcgaaccccagcatgtggccagtatcatcagctccttcttacagcacaaacannnnnnnnnnnnnnnnnnnnnnnnnnnnnnnnnnnnnnnnnnnnnnnnnnnnnnnnnnnnnnnnnnnnnnnnnnnnnnnnnnnnnnnnnnnnnnnnnnctagggtgnnnnnnngggaaggagtgagactccaacttcaacatctgtgacctcaaggnnnnnnnnnnnnnnnnnnnnnnnnnnnnnnnnnnnnnnnnnnnnnaatctccannnnnnnnnngggaggaagggcaggctggggccacct

SEQ ID NO: 11315 - DNA, 740 bp, Macaca Fascicularis
atggcctttacttgctggtgaggtgtcataggtagaaatgggctggcccttcagatttgggggtgtggtgagtggcaagtaagggcagaattttagaagaaccagagtcacctgctgactctattgagattgttacacccagaatccttttgtagtttttttgtgggtttttttttttttttgagacggagtcttgctctgtcacccaggctagagtgcagtggtgtaatcttggctcactgcaacctgtgcttcctgggttcaagcaattctcctgtctcagcctccccagtagctgggattacagcacccaccaccatgcccagctaatttttgtatttttagtagaaatggtttcaccatgttagtcaggctggtctcgaactcctggacctcaagtgatccacctgcctcagcctcctaaagtggtggcattacatgtgtgagccaccatgccctgccaccagaattcctgttgtagtatggtgagacttttggttaccacctcatgaagaatatgcttcgtgcatagtcctattcataatggtattgtcacagctgttaagttcaggacacgatccaaatcataaacgttgagcatgcccaccacatttttgtttatagggagagggacccaccacacatccacacgtgccagaggtccctcctcccagaggagaggccacgtgtctgtagaaggttaaagctgccaacatgtgaacatcccagaattatgactc

SEQ ID NO: 11316 - DNA, 889 bp, Macaca Fascicularis
  misc_feature (1)...(889): n = A,T,C or G
attggccaacatagctgnggnaaagccaacctggaaatcatgacaaagcgctccaacaatactccaatcaccaannnnnnnnnnnnnnnnnnnnngctcacaaacagccctgtggaactgggagagcccaacgtcctcatctgtttcatcgacaagttctnnccaccagtggtcaaagttacatggcttaaaaatggaaaacctgtcaccacaggagtgtcagagacagtcttcctgcccagggaagaccaccttttccgcaagttccactatctccccttcctgccctcaactgaannnnnnnnnnnnnnnnnnnnnnnnnnnnngggcttggatgcgcctcttctcaagcactgggagtttgatgcaccaagccctctcccagagactacagagaacgtggtgtgtgccctgggcctgattgtgggtctggtgggtctggatcatcaagggnnnnnnnnnnnnnnnnnnnncagaacgcagggggcctctgtgagacatatgcaggtgatggtgtttcttagagagaagatcactgaagaaacttctgctttaatgactttacaaagctggcaatattccagtccttgacctcagtgaaggcagtgatcttcagcattttccagccctatagccaccccaagtgtggttatgcctcctcgattgctccatactctaacatctagctggcttccctctctattgccttttcctgtatctattttcctctatttcccacattttattatcaccatgcaacgcctctggaataaaacatactggagactgtctcggctatggaactttttgaacatcccacggggacatctcttgtgtactttttgtttaaggtttcctcaaactgtgattttttctgaacacaataaaa

SEQ ID NO: 11317 - DNA, 733 bp, Macaca Fascicularis
  misc_feature (1)...(733): n = A,T,C or G
tgaatttgaataataaaaccagaggaaatgcacacagggcatgagcaactgaggcaaacctttgtggaaatgaattgttctaccatgaatttttgctttagtattttaataagaattannnnnnnnnnnnnnnncttggggtgagagggagctgaggatgtctgaggagggaatagtattgcagggaagacggagaaaacagtagaatgacagttttgaatatactctttacttttcagtgatacaatcttcttatgcactttaaggctttttaattttgtttgagaatgtaaatgtatactgtaagtctagctttactatctactatgcctacttcaccatctcttaaggactcagcatttgttcacagtcaggctgcaagagagggtagatcatgaacagtcacccctgctggctgtagccccacagaggcaatcacgcccaataggttcaggagaagctaagcggaaatggagggcggaaggtgtcatctgtgggactgtctgggcctgttacccatcctgctatcgatttcttattaattaatcttgatgattcttattaattaatcacattttcaggaaattcagatgaggcaagaaaattttatcggcctgggtaagcctgaaagcattccaaattaggcttagactgtgcaaagggcttagctaagttatnnnnnnnnnnncccatcaattaaacaaatattattgaacagttactgcatgccatg

SEQ ID NO: 11318 - DNA, 743 bp, Macaca Fascicularis
  misc_feature (1)...(743): n = A,T,C or G
gagcctggcacataagcacccagcctgcatctnnnaggaggaagtggaggggacatcgctgctccccagaaacccactctatcctcaccctgttttgtgcccttcccctcgcctgctagggctgcggcttctgacttctagaagactaaggctggtcttcgtttgcttgtttgcccacctttggctgatgcccagagaacctgggcacttgctgcctgatgcctacccctgccagtcattcctccactcacccagtgggaggtgggatgtgagacagcgcgcactggaaaatccagaaaaccgggaacagggatttgcccttcacaattctccccagatcctctcccctggacacaggagacccacagggcaggaccctaagatctggggaaaggaggtcctgagaaccttgaggtacccttagatccttttccatccactctcctatggaggattccaagtcaccattnnnnnnnnnnnnnnnnacagggtacaggaataagnnnnnnnnnnnnnnnnnnnnnnnnattttgggagtcttcccttaatcaccttgctcctctcgggtgcctggaagatggactggcagagacttctttgttgcgtnnnnnnnnnnnnnnnnnnnnnnnnnnnntagtatatatccccagtggggcacttggtagggggcgccaggttttccttgtcccccagttgctctgcccccttcccctttttccctgactccaggcctgaacccctcc

SEQ ID NO: 11319 - DNA, 756 bp, Macaca Fascicularis
  misc_feature (1)...(756): n = A,T,C or G
catggctgttatctgtctttatgatttcatgattagacaatgtggaattacataacaggcattgcactaaaagtgatgtgatttatgcatttatgcatgagaactaaatagatttttagattcctacttaaacaaaaactttccatgacagtagcatactgatgaaacaacacacacacacataaaacaacagcaacaacaacagaacaacaacaaagcatgctcagtattgagacactgtcaagattaagttataccagcaaaagtgcagtagtgtcacttttttcctgtcaatatatagagacttctaaatcataatcatcctttttttaaaaaaaagaattttaaaaaagatggatttgacacactcaccatttaatcatttccagcaacatatatgtttggctgaaattatgttaaatggatgtaatatagggtttgtttgctgcttttgatggctacgttttggagaaagcaatcttgctgtgaaacagtgtggatgtaaattttataaggctgactcttactaaccaccatttcccctgtggtttgttatcagtacaattctttgttgcttaatctagagctatgcacaccaaattgctgagatgtttagtagctgataaagaaaccttttaaaaaataatataaatgaatgaaatataaactgtgagataaatatcattatagcatgtaatattaaattcctcctgtctcctctgtcagtttgtgannnnnnattgacattttgtagct

SEQ ID NO: 11320 - DNA, 690 bp, Macaca Fascicularis
  misc_feature (1)...(690): n = A,T,C or G
ggagccaaagtatttaagagttcttcggggaacatttcattgtactgttgcagcatttttgatttnnnnnggacaaatattggcaaatttgacatgatttgggatagaggagcattagttgccattaatccaggtgatcgcaaacgctatgcagatacaatgttatccctcctgggaaagaagtttcaatatctcctgtgtgttttttcttatgatccaactaaacatccaggtccaccattttatgttccacatgctgaaattgaaaagttgcttggtaaaatatgcaatatacattgtctagagaaggttaatgcttttgaagaacgacataaaagttggggaattgactatctttttgaaaagttgtatctacttacagaaaagtaaatgagacatagataaaataaaatcacattgacatgtttttgaggaattgaaaattctgctaacacctgaaaatgtaacagattaattttttaaattgtttataaatcatatgatagatctttactaaaaatggctttttagtaaagccgtttactttttctaaaaaagttttagaagaaaaagatgtaactaaacttttaaagtagctccttaggagaggacattatgatgtggaagattatacctgtgtgtcgtgcagattacaagatactttaccaatcagcatgtgttacctgtaca

SEQ ID NO: 11321 - DNA, 727 bp, Macaca Fascicularis
  misc_feature (1)...(727): n = A,T,C or G
gcagccgagtccaggccccgggcacctccacnnnnngggacctggaccacttctccaacagcgacaactgccgggaggtgctcctcgagaagcggcgaggggagggcctgggcgtggccctggtggagtcgggctggggctccctgctgcccacagccnnnnnnnnnnnnnnnnnnnnnnnnnnnnnnnnnnnnnnnnnnggagccctcagcatcggggaccgcctgaccgccatcaatgggaccagcctggtggggctgcctctggccgcgtgccaggccgccgtccgcgagacgaagtcgcagacgtcggtgacactcagcatcgtccactgcccgcccgtcaccaccgccatcatccaccggccccacactcgcgagcaactgggcttctgcgtggaggacggcatcatctgcagccttctccgcggcggcatcgccgagcgcgggggcatccgtgtgggccaccgcatcattgagatcaatgggcagagcgtggtggnnnnnnnnnnnnnnnnnnnnnnnnnnctgctcaccgaggcctacggnnnnnnnnnnnnnnngacgatgccagccgccacataccgcctcctcacaggccaggagcagcccgtgtacctgtgaccaccatgtcccttgcctgccactgtgccttcgcctccatggccccggagccccatcctgggcctgccttggctggccaggaccccagcggttcttggtcctgt

SEQ ID NO: 11322 - DNA, 731 bp, Macaca Fascicularis
  misc_feature (1)...(731): n = A,T,C or G
cagatacagacannnccaagattgacaacagagnnnnnnnnnnnnnnnnnnnnnnnnnnnnnnnnnnnnnnnnnnnnnnnnnnnnnntacattnnnnnntaaagagagaagacacatctgatgagactgaaagttctttgttgttttagattgtagaatggtattgaattggtctgtggaaattgcattgcttttatttctttgtgtaatcaagtttaagtaataggggatatataatcataagcattttagggtgggagggactattaagtaattttaagtgggtggggttatttagaatgttagaataatattgtgtattagatatcgctataagtgggcatgtgtacttacttgtgaccctttaccctgtaattgctatccttaaagatttcaaataactcagagggaactgcagggagaccaacttatttagagtgaattggacatggataaaaaccctagtgggagaaagttcaaaggtgattagattaatagtttaatagaggatgagtgccctttgataaattactgctagaatgaaattatcaatgatggatggtaaattttcatggaagttataaaagtgataaataaaaacccttgcttttacccctgtcagtagccctcctcctaccactgaaccccattacccctaccccctccttctaactttattgctgtattctcttcactctatattgctctctatttgctaatattgcattgct

SEQ ID NO: 11323 - DNA, 757 bp, Macaca Fascicularis
  misc_feature (1)...(757): n = A,T,C or G
aaatattgaaaaattaaaaacgtcagtgnnnnctgtttgttaatattagggttgtaaggtgttgtttttaggtatggactgtgattccttcccccaccctccgttctccagcggtttcccggtgttagaactcgctctctttgagtgactggctacaagggcctgagaggtggccggccagggttggagccggaggggactgagccccacctgaggtgccatgtcatacaggtagagggccgctgggaaacaccgggcagtggcttctgtgatttattttcttgatgttaacttctcagagcagggcgattgggacatcaccagccagagcgcaagaagccaccctgcccacgggggaggagggacccacatggggcccccttggcagtttgttcccccagcttccatatgccttcagggaaaggtcacagctgggggggaagggaggggacacctgtcacccctggcaggtggcgagatcagatgggggctccctgctgcccccaggccggggagcctgaagccctcagcatcggcatctgagcctcctgccctccagggcacgcttccccctcttgctgcagcatacaggacggcaggcagtgaccttgtcactgtacttgcatcagagacaaaggagaccagctttggccccgctgcgggaaacgggggagggcccagggccagcgcattgtgcactggtttactttaaaatgtacagattcttctcgttaaattcatgatagattttttatta

SEQ ID NO: 11324 - DNA, 713 bp, Macaca Fascicularis
  misc_feature (1)...(713): n = A,T,C or G
gaaatcatagaattactcaaaaagctggttgggcttgagagcttctcattagcctttgcctctgtacagaaacaggctaatgagaaaagggcactccggaaaaagaggaaggccctggagtttgtaactaatcctgatattgctgccaagaaaaaaatgaagaaacacaaaaataaaagtgaagcaaagaagagaaagatagagttcctgcgtccaggctataaggccaagagacaaaaaagtcacagcctgaaagatttagcaatggtggagtaatgtctccctgtgctgatacaagcatgaactttctggaatattcttctagtctgaaattacagcaggctggtgggggggttcctttcttttttttttttttttcaagacaaggtctcactctgtcacccagggtggagtgcagtgatgagatcacagctcaccgcagcctccacctgggttcaagtgatcctgtcacctcagcctcccaagtagctgtgcccccnnnnnnnnnnnnnnnnnnnnnnnnnnnnnnnnnnnnnnnnnnnnnnnnnnnnnnnnnnnnnnnnnnnnnnnnnnnnnnnnnnnnnnnnnnnnnnnnnnnnnnnnnnnnnnnnnnnnnnnnnnnnnnnnnnnnnnnnnnnnnnnnnnnnncgtgcccaaccaggttttaatttaagttaaactttggataggttgtataatatatagtttaatgt

SEQ ID NO: 11325 - DNA, 694 bp, Macaca Fascicularis
  misc_feature (1)...(694): n = A,T,C or G
aggactcttggctcctgccgggttcctgctcaggctggaattgggaaaatatgcaggtgacatttgttcattctctaatcctgtccactcacccatccatttcctcactcaatggagatttgccgaatgaataaatgacacctttgaggccccaggtgaagcggggccctcctccggcctctaccttgggcctcgcctctgtcctcaggtcctctcagaggcagatacccaggggagnnnnnnnnnnnnnnnnattctagcttccgattccattcccagcccctgggttaaggtccctggagaggtggtatcagtgggggtgaggaagggcgtcttcctgactcctctgccccatgctggaaggacnnnnnnnnnnnnnntgggccagaggccaggcaggtggaggggctttggggaccagaaggggagaggtgctcccagagcctctctgctgtaagacctcagcttttcctgaaagacaggactctggggtgtgtggtgccaggcccaccagagtcaggccacccactgggcttggcaggagatagggagccccatcacctgaccacagccccccaccaacattcccccaaaatgcagcctaggaggccacagtgctcttcttcctgcccggaccaaaatgttccttttagtcctcaatgttttatattatttttgtgttgaaaacctcaat

SEQ ID NO: 11326 - DNA, 728 bp, Macaca Fascicularis
  misc_feature (1)...(728): n = A,T,C or G
cactcgctgatggaaagaggtcaaggccggcctttctatcagtggtcccgagctgttcaaatccgaaccaacctggaccttgtcttggactggctacagggagctgggctgggcgacattgccactgagttcttccggaaactctccatggctgtgaacctgctctgtgtgccccgcacttccctgctcaaggcttcctggagcagcctaagaatggaccaccccaccttgacccccgcccagctgcaccatctgctcagccactaccagctgggccctggcctccagccgccagccgcgtgggaccctccccctgcagagcgggaggctgtggacacaggtgacatcttcgaaagcttctcctcgcacccgcccctcatcctgcccctggggagctcgcgcctgcgcctcactggtccagtgacgaacgacgccttgcattgtgaactccgcaggctacgccgcctnnnnnnnnnnnnnnngcagcaggagctaccagccaattatcgccatgggcctcccgtggccgcgtctccatgagaaccaataccaaacgagagcgcgcaccttgaaatgtcgcgggcttccactgacaggagcccgcctgggcgcagagctttatgggagttgtagttcttgtcgcgcgtggactgttgggagattgagttttcgggaagcagcggatgggacggtgggagcatgggcttaggatgtgaatgccaaggaca

SEQ ID NO: 11327 - DNA, 732 bp, Macaca Fascicularis
  misc_feature (1)...(732): n = A,T,C or G
gcccagggacccctgnnntccccaggnnnnnnnntctgccgctgacagtcgtctcagaagcccctttcccagaagaggctggtcttgagaaggctcgtctctttgcccctgaagtcagtttcaggggaaggatgtgaaaattttcccttttgaggttacagccttttatnnnnnnnnnnnnnnnnnnacnnnnnnnnnnnnnnnnnnnnnnnnnnnnnnnnnnntacagttggcatctgccacgaaggaagcaccagcctcgccgggccagcaggggcnnnnnnnnnnnnnnnnnnnnttgaatgttatgggtttatgggtgttcctggaacttgtctttgtgcgttcgttgctgtttgtgttaccctcactgtccctatgtcccacccacgtcctccggcactcaggcagcacttagtgaggacgagccctcacccctcttgtcttcctccccggcagcgcccgcagcgggccgtttacacgttggggccggcacctggcgctctcgggagccactgcagcgtctgcctgctgcctggactcgcaggcctcgctaggtcacaagacgctgtcactcagccggatcagtattgacccaccaggggaggtagggatcggtgagagacgccggcctcagactttttcnnnnnnnnnnnncagagagcggggccacgtgtcacccacgtctgcgcttggtcacccgccctccctaccctgtgtgtgntcacgtca

SEQ ID NO: 11328 - DNA, 749 bp, Macaca Fascicularis
  misc_feature (1)...(749): n = A,T,C or G
gtgcttcaaagaactnnagnctgctttctatagataatgaagaagaaatgaanntnctgactgccattttaccttcctcatggattggtgtgtttcgtaacagcagtcatcatccatgnnnnnnnnnnnnnnnnctgactttcaaacatgagataaaagagtcagataatgctgaacacaactgtgcaatgctacatgcacgtggactcaaatcaaannnnnnnnnnnnnnnnnnnnnnnnnnnnngtaagcataagctttagaagtaaaacatttgcgtttgcagtgcatcagataaattttatatttctcaaaatagaaataatattatgattgcataaatcttaaaatgaattacattatttgctctaataagaaaattctaaatcaattattgaagtaggatacacacaattactaaagtacaaatatcccagcatttgtgtcgggctcattttgcaaaacatgannnnnnnnnnnnnnnnnntttctaaaagttgcatgttatatgagtcagtttctatgaagtatcaagaacaatcaaacccatggagacacaaagtagaatagtggttgccaatgcctaagggaggtggaaataggaggagaccactaattgatagaaagtttcttcgtgtcatgatgaaaactttctaaatttcagtagtggtgatggttgtaactctgtgaatatactaaacatcattgatttttaatcattttaagtggatgaaatttatgctttgtac

SEQ ID NO: 11329 - DNA, 731 bp, Macaca Fascicularis
  misc_feature (1)...(731): n = A,T,C or G
cttgcatccagcttnnnaattacaatgggaggtttaggtttcataatcctggaccgatcgaatgcaccaaatatcccaaaactcaatagatttcttcttctgttcattggattcgtctgtgtcctactgagttttttcatggctagagtattcatgagaatgaaactgccgggctatctgatgggttagagtgccttagagaagaaatcagtggatactggatttgctcctgtcaatgaagttttaaaggctgtaccaatcctccagtatgacatgtggaaaagaatgaagagcagcagtaaaagaaatatctagtgaaaaaacaggaagcgtattgaagcttgcactagaatttcttcttgatattaaagagacaagtttatcacagtatttttgtttttcctgctgacctattgctataccaacaatgttgagtggcattttctttttagtttttcatttcttaaagaaaatatactccatatctacaactataatatcaaataaagtgattgttttttacaacccccttaacattttttggagatgacatttctgattttcagaaattaacataaaatccagaagcaagattccataagctgagaactgtggacagctgatcagctttacctgtggtgctttgcctttaactagagtgtgtgatggtagattatttcagatatgtatgtaagactgtttcctgaacaataagaggaagaaaggagcag

SEQ ID NO: 11330 - DNA, 739 bp, Macaca Fascicularis
aagtgagatgagcaaaaattgcaggtaatgatggaggctcaaaacatccagatgctatgtaaaaacatgccaaagcaaagcagaggcttttgttgcagataaggctgtgtttttgcttaaagaccaattgtgtagatgcttaggacataaatggtggggatcgctattgaaattaaattaaattattataagtaggactcagttctgtaacacatctaatgatatgttttgatacagatgcatccaagaagtcagattcaaatccactgactgaaatacttaagtgtcctactaaagtggtcctactaaggaacatggttggtgcgggagaggtggatgaagacttggaagttgaaaccaaggaagaatgtgaaaaatatggcaaagttggaaaatgtgtgatatttgaaattcctggtgcccctgatgatgaagcagtacggatatttttagaatttgagagagttgaatcagcaattaaagcggttgttgacttgaatgggaggtattttggtggacgggtggtaaaagcatgtttctacaatttggacaaattcagggtcttggatttggcagaacaagtttgattttaagaactagagcacgagtcatctccggtgatccttaaatgaactgcaggctgagaaaagaaggaaaaaggtcacagcctccatggctgttgcataccaagactcttggaaggacttctaagatatatgttgattgatcccttttttat

SEQ ID NO: 11331 - DNA, 700 bp, Macaca Fascicularis
  misc_feature (1)...(700): n = A,T,C or G
cnnnnnnnnnnnngacatcaatgcggtggnntnnntccccaacggctatgccttcaccaccggctctgatgacgccacgtgccgcctcttcgacctgcgggccgatcaggagctcctcatgtactcccatgacaacatcanntgtggcatcacctctgttgccttctcgcgcagcggccggctgctgctcgctggctacgacgacttcaactgcaacatctgggatgccatgaagggcgaccgtgcaggggtcctcgctggccatgacaaccgtgtgagctgccttggggtcaccgacgatggcatggctgtggccactggctcctgggactccttcctcaagatctggaactaacggccccacccctgctgggcccaggccgggaggggccctgcccacgcccacactacaggccagggctgaggggctgggcgcactcccagcccccttccctgggccacggggccttgggtccctgccctcccacccaggtttggttcctcccggggcccccactgtggagataaaaaggggatggaatgggggaaaaggaggggcaggaggccctcatccttctgctgccctggggttggggcctcacccctctggaggcccagaggcaggaggtggaaaccccaggagctggcttttttaaaactggttttattttaatttttattatattttcagtttccataa

SEQ ID NO: 11332 - DNA, 692 bp, Macaca Fascicularis
  misc_feature (1)...(692): n = A,T,C or G
gcnnntgcctccgcccccagagtcggggcctggacagcctggctgggagggggctccccagccctctcccccaccgccaggtccctccacagctgccacaggcaggtgagggaaccctgagaacatgccaggactcatagtaccccctcaggacatggacagtatgtgggggcaggaaggttatctcctctcgggtaaagccatttcgtcccctccagtttggggcggaatgaggcctgctcctcttgtaaatacccccttcccttgaagctccctcccggtgctggggggcagctgaggggccgcaggggcagtctccctcctccaagcccctgtacataacctggagtgtgtgaccttcagagcttttcactttatgcaaaatggctcctgtgagggctgcaagctggagggtggtgtgggccttgggccacagggaggcgcctgtggaatacggggagttcatgcaccccttttttccccagaggggctggactcaggttagtttgggggtgggggctcctgcactttgccacaggcacggggagggttttctcctcaccccctctgccctcccaacttgggttgtactttctaagaaggtgattccccctgcccttgcccccttccccagaacaaaacatgttgatcatgtgcaatatttcttactgtgccgagaagccacaatgagc

SEQ ID NO: 11333 - DNA, 760 bp, Macaca Fascicularis
  misc_feature (1)...(760): n = A,T,C or G
gccaggattaagcnnnnncaaagcacaagcattgtgtgnnnctgtgactgcagagaagagagaactttgcttccgttttgtgtttaaaaaaccaacatggaagcaggtgatcccgagagaggcctctagcatgggtgacccagccgacctcaggccggtttccacactgccacaactttgttcaaagttgcccccaattggaaccnnnnnnnnnnnnnnngagagtctttcatgaggagaggaggagactgaattactctaagcaaaatgtgaaaagtaaggaaatcagcctttcatcccagtcctaagtaactgtcagccgaaggnnnnnnnnnnnacaggcaaacccgtgattttggtgctccttgtaactcagccctgcaaagcaaagtcccattgatttaagttgtttgcatttgtactggcaaggcaaaatatttttattaccttttctattattgtatgagcttttgttgtttacttggaggttttgtcttttactacaagtttggaactatttattattgcttggtatttgtgctctgtttaagaaacaggcactttttttttttattatggataaaatgttgannnnnnnnnnnnnnnnncaatatggcttagtaaaatatttattgttcctttattctctgtacaagattttgggcctctttttttccttnnnnnnnnnnnnnnnnnnnnnncatgtgtctgccatttcatttgtacgcttgttcaaaanncaagtttgttctggtttcaa

SEQ ID NO: 11334 - DNA, 707 bp, Macaca Fascicularis
  misc_feature (1)...(707): n = A,T,C or G
aggcagcacatacagccccacaagtggtgtggctggaccatgtggacaggatccagtcagcagcccctgtggctagaggaacaccagcacaaacgacagcctcaagtctcctccgagctctatatccatttggggatgaaatctactttgacagctagcaaggcaacgtgcagctgctgttgaatgacgacagcaattcaggaaagacttaaatatgaaagcaaattgaacacatcagggccagtttattatcagaaaagagataaggcttattgactagccaatatgtcattaaaattaaggtttatagtgtgaagcttttttaaaatttaattttgannnnnnnnnnnnnnnnnnnnnnnnnnnnnnnnnnnnnnnnnnnnnnnnnnnnnnnnnnnnnnnnnnnnnnnnnnnnnnnnnnnnnnnnnnnnnnnnnnnnnnnnnnnnnnnnnnnnnnnnnnnnnnnnnnnnnnnnnnnnnnnnnnnnnnnnnnnnnnnnnnnnnnnnnnnnngtcaggctggtctcgaactcctgacctcaagtgatctgcccttgtcggcctcccaaagtgttgggattacaggcgtgagccatcgtgcccagcctatatagtgtgaagcttttaggaaaatcagaacagggtagatagacagctattaaaaacaatgtttaaatggaataatgttgaatgtttacaggctgtaag

SEQ ID NO: 11335 - DNA, 653 bp, Macaca Fascicularis
  misc_feature (1)...(653): n = A,T,C or G
gannnnnccccgggcagannntcccagcgggcccttctgcaccccccagtctcccgtctccctcgcgcaggagggcaccacgcagatctggaagaggcagtctcgggaagtggaggccgggggcatccagacggtggaggatgagcacgtggccgagctgaccctgatgggggagggggacatcagcagccccaacagcaccttgctgccgccaccctccggcccccaggacgtgccaggaccttccagaccagaaagcgggacccacggcagccgagacctcccggtcaacagaatcatcgacgtggatcttgtaactggcctggcgcccgggnnnnnnnnnnnnnnnnnnnnggcacaggctggtcctgggagggcgcaggccggtggtgggtctcctacgtcagacctccctggcctgagccccgtcccaggtgagcccgtgaagcccaaggccagcgcgcaccacgccaccttcgtctgagctgccctggcctggccaactctcccgtggacatgtcggggtggggcagcccccgtggagtctgtgagcctcagaggggccaccgcagccgccaacaccctcaggagccaggagggcagggggtgacctcgctggaggcactggccccggacattcactatgctggccc

SEQ ID NO: 11336 - DNA, 1274 bp, Macaca Fascicularis
  misc_feature (1)...(1274): n = A,T,C or G
agacagaaatcaagaacaagatgcaacagaaatcacagaagaaagcagaacttcttgataatgaaaaaccagctgctgtggttgctcccattacaacgggctatacagtgaaaatcagtaattatggatgggatcagnnnnnnnnnnnnnnnaaaatctacattaccttgagtggagtgcatcaagttcccannnnnnnnnnnnnnnnnnnnnnnnnnnnnnnnnnnnnnnnnnnnnnnnnnnnnnnnnnnnnnnnnnnnnnnnnnnnnnnnnnnnnnnnnnnnnnnnnnnnnnnnnnnnnnnnnnnnnnnnnnnnnaaaaaagtcaagactgatacagttcttatattgtgtagaaagaaagtggaaaacacaaggtgggattacctgacccaggttgaaaaagagtgcaaagaaaaagagaagccctcctatgacactgaaacagatcctagtgagggattgatgaatgttctaaagaaaatttatgaannnnnnnnnnnnnnnnnnnngagaaccattaataaagcctgggtggaatcaagagagaagcaagccaaaggagacacggaattttgagactttgaggtccttttgggaactgtgatgtgatgtggaaatactgatgtttccagtaagggaatattggtgagctgcatatataaatttgacagatagctatttacatagccttctaagtaaaggcagtgaattctccatttcctactggaggatttatttaaataaaatatgcttattaaacactcctgcaaagatggttttattagtaccttggtcattttgttcaaggaagggttataattgcattctcatgtgaaatataaaaagcaagtcttgcccaataaaaacgctacattgtgtgtattttngtttcagctaagaattggaaaagtatttgcttgcctttaagttactgacatcagcttccaccagtgtaaaaattgagtaaaacctgaagttttgcataaaatgcagatcggtacctgtgcttgaaggttgctgtagagcatctgaccccttattaccaccttaagcaatgtgtatgccatgcattaccatgcactaattcaatcacaggtgtttctatctagattgaaatatgtttgtcaatgaatatagaatagaaactaaatctaaacatgacaataatagacacacatctttgtatggtaccagttagtnnnnnnnnnnnnnnnatggtttatgaaagtaataaccataaagcaaaaaataatctgaaagcccgtctattcc

SEQ ID NO: 11337 - DNA, 718 bp, Macaca Fascicularis
  misc_feature (1)...(718): n = A,T,C or G
tggacgagaaccaattggaggatgcctgcgagcacctggcggagtacttggaagcctattggaaggccacacatccgcccagcagcacgccacccaatccgctgctgaaccgcaccatggctaccgcagccctggctgccagccctgcccctgtctccaacctccagggaccctaccttgcttccggggaccagccgctggaacgggccaccggggagcacgccagcgtgcacgagtacccaggggagctgggccagcccccaggcctttaccccagcagccacccaccaggccgggcaggcacgctacgggcactgtcccgccaagncnnttttgatgccgacacccccggcagccgaaactctgcctacacggagctgggagactcatgtgtggacatggagactgacccctcagaggggccagggcttggagaccctgcagggggtggcacccccccagcccgacagggatcctgggaggacgaggaagaagactatgaggaagagctgaccgacaaccggaaccggggccggaataaggcccgctactgcgctgagggtgggggtccagttttggggcgcaacaagaacgagctggagggctggggacgaggcgtctacatccgctgagaggcaggggccacacggcgggaggaagggctctgagcccaggggaggggaggggagggagcgaggggctcacacccaacatgtat

SEQ ID NO: 11338 - DNA, 759 bp, Macaca Fascicularis
  misc_feature (1)...(759): n = A,T,C or G
gtcagagcggtggagatgtgaacgtggagatggatgccgcacctggcgtggnnnngagccgcannnngaatgagatgcgcgaccnnncgagcagatgcagagaaannnnnnnnnnnnnnngaggcctggttcctgagcaagaccgaggagctaaacaaagaagnnnnnnnnnnnnnnnnnnnnnnncagagcagccgcactgaggtgacggagctccggagggtgttccagggcctggagattgagctgcagtcccagctcagcatgaaannnnnnnnnnagaacagcctggaggagacnnnnnnnnnnnnnnnnnnnnnnntgtcccagatccagggactgatcagcagcgtggaggagcagctggcccagctacgttgtgagatggagcagcagagccaggagtaccagatcctgctggacgtgaagacgcggctggannnnnnnnnnnnnnnntaccgccgcctgctggagggcgaggacgcccacctttcctcccagcacgcatctggccaatcctattcttcccgcgaggtcttcacctcctcctcgtcttcttcgagccgtcagacccggcccatcctcaaggagcagggctcatccagcttcagccagggccagagctcctccaactgagctgcctccaccacagcctcctgcccaccagctggcctcacctcctgaaggcccaggtcaggaccctgctctcatggcgccgttcccagctgtctcccctgctcctccgctggtggtgggcta

SEQ ID NO: 11339 - DNA, 723 bp, Macaca Fascicularis
aggtggccaccaacatcatgcgagcctggttgttccagcacctgtcgcacccgtacccctcagaagagcagaagaagcagctggcgcaggacacggggctcaccatcctgcaagtcaacaactggttcattaacgcccggagacgcatcgtgcaaccgatgatcgatcaatccaaccgcacagggcagggtgcagccttcagcccagagggccagcccatcggaggctacaccgagacgcagccacacgtggccgtccggcctccgggatcagtggggatgagtttgaacttggaaggagaatggcattatctatagaggctggatgcaggagaggtagacccagcctccagctgtgacccccagcctcacacctggttctggttcccgcctggtcctccagcttcaggaccccacctccaaaggcccctccgctcaacgcctacctccctagggccctgctgggacatgagtgcccacccaagaggctctcaaggacaccggcaaggcctccaggccctgagccccacttctgccttcacctctgcctgggacctgagctgggctcctgggccttgccagaagatggcggctagggcctcgccgccgggacagagaagggacggggtggctgggcagtcagggaaggagggtcgcccagatctgacattttggagagattccttcaccctcctgtccccccacctcccttctctaattcttc

SEQ ID NO: 11340 - DNA, 465 bp, Macaca Fascicularis
  misc_feature (1)...(465): n = A,T,C or G
gaggtgcgatgcagannnnngtgaagaccctcnctggcaagaccgtcccccnnnnggtggagcccagcgacaccattgataatgtcaagccagagatccaggctaaggaatgcatcnnnnnnnnnnnnnnnnggnnnatcttggaggtgccccagcaggaggtttgccccacccggtgatggagcctggggggcacaggtgcccctggggaggagcagggcgcaacccattcccccagccccggctgacctggcccagcggtttggccctgctggcctgagcagggagacaggggagcaaaggacgccaagctggaggcccgaggccagccggcctctcgagagtcagagcagcagctgaatnnnnnnntggggnnnaggtgtgctgccaccagtagggcagggacccggacagccaggtgaccactagccctggggacactcttgccgtaaacacatccccagg

SEQ ID NO: 11341 - DNA, 694 bp, Macaca Fascicularis
  misc_feature (1)...(694): n = A,T,C or G
gtacaggtcatagatgataagnnnnncgtcctaccccctnnnacagaaggagacattggcgtcagggtcaaacccatcaagcctataggcatcttctctggctatgtggtgagaaactgtgctcctcctcctctgttcctcagtgaggatggggagcactaaatggggtgagggaggccaaatgttctgaaacttccaagaggcattagatgtgaagacaaagagtgtccagttttcaagaatatatgctttgccagtggaagaannnnnnnnnnnnnnnnnnnnnnnnnnnnnagcctatctctgtgacctcattggaagacttatttttcttcaattagccctcagacttctcaagaactctctgtttcatgcccaaaatattattgaccctgaactatacacagcaccattcccccaagggcagccttgccccctcccataggtatcaaccccatgctctannnnnnnnnnnnnnnnnnnagcctgccagnnnnnnnnnattgagnnnnnnnnnnnnnnntggaggaatccctatcttcagatcttgggaaggtnnnnnnnnnnnnnnnnnnnntccggccacctcacttgacaggtgaggatgttggagccagagannnnnnnnnnnnnnnnnnnnnnnnnnnnnnnnnnagtggacagagaagaccccnnngggcatgccttctgatcc

SEQ ID NO: 11342 - DNA, 700 bp, Macaca Fascicularis
  misc_feature (1)...(700): n = A,T,C or G
ggttcccggttggaggnnnnnnnnccagcctcaatctcgagtccacagtcatgccctaccttcaggtgttatcnnnnnnnnnagaaggagtgcggaagnnnnnnnnnnnnnnnnnnnnnnnnnnnnnnnnnnnnnnnnnnnnnnnnnnnnnggacgacatcctgcccgagcttggggtgcggtttgaagaccacgaaggnnnnnnnnnnnnnnnnnnnntggtagacagaaataccttattaaaagagagagaagaaaagagacaggttgaagaggagaagaggaagaagaaagaggaggcggcccggaggaaacaggaacaagaagcagcaaagctggccaannnnnnnnnnnnnnntagtgagatgttcttgtcagaaaccgacaaatactccaagtttgatgaaaatggtctgcccacacatgacgcggagggcaaagagctcagcaaagggcaagccaagaaggtgaagaagctcttcgaggctcaggagaagctctacaaggaatatttgcagatgcctcagaatggnnnnnnnnagtgaggggcgcaggannnnnnnnnnnnnnnnttgcggactagcggctcctgtctgcctcagtgacaacgctccaatgctccagtcatgcttacagttgcccttgggtcctaaattaagagttgtgttnnnnnnnnntcatgtcgtcannggctctgaga

SEQ ID NO: 11343 - DNA, 1219 bp, Macaca Fascicularis
  misc_feature (1)...(1219): n = A,T,C or G
caggagaaaaannnagggaacaagtgctggaaacagtgaaaaacaatatcgagtggctaaaacaacatagaaacaccatcagagaatggtttttaaatttacttaagagtggttaatgtgtccaatgttagagtttaattttgtgaatctattatttctcctcttaagcatttggtggccnnnnnnnnnnnnnnnnnnnnnnnnnccttataaacagataatgtttttactaagcactgtgtttatatgtcttgcaaagcctttaaattgttcctctttgtttatgaagaaagatactaatagagtatttaatatactcagggatttctcctaagtgtacttcataggagattctttacaaactgaagataatgtaatagttattttaatatctttaaatatcattctttgtatcttaaatctgtgaagtagaacaatttggtcttagctttacatttttagtaccaaagaaacaccacttaatcttctctcttgattgatttttaaagtttaaataccagtacttgagggaccaatattaccatcttaatctttattttattattcagaattacacagacctaatatcattttattcacatatgtcttactactttaaatcctaccaaagtaacctgggcttaagttttacttgaggattgcatgaattagccaaaagaatggctgactgttgcctttgctcttataaaatcaacaagggaactctcctctccttttaaaaataaatctaaatgattatcttgaaaaagtattgttttccagtgtcactttactcttgaataaaaatgactgcagtgttccccatataatttaacacattgcaaatatgattcaagaatctggcctttttcatgcttggtactctcttatcttgctccattccttacaaagctccttcaaatatgctatgaaattaaagggaacatagtgcttaactctgctccatggattttagaggaaaaaagctaaataattggaaactgttcaggaaagagagaaggcagattatttcttaaaactaaatggaattagaatttagctttgacttcacctagcaatctaagtgtgaaaatggggagacccgtgggcatccnnnnnnnnnnnnnnnnnnnnnnnnnatatatctccttatagatcaattttatgtataaacccttagatcctaatccatacagaatagcactgatcaaatttatag

SEQ ID NO: 11344 - DNA, 717 bp, Macaca Fascicularis
  misc_feature (1)...(717): n = A,T,C or G
gcattatgactttttttttaatagatatnnnnttcctgcacttgacatnnttcggttgtcaattaaacaccccagtgtgaatgagaacttctgcaatgaaaaggaagggactcagttcagcagtcatcttatcaatcttctgaaccctaaaggaaagccnnnnnnnnnnnnnnnngctctcaggactttttgcaattgttttattggccaggcaggacaaaaactcatgatgtcccagagggaatcactgatgtcccatgcaatagaactgaaatcagggagcaataagaacattcacattgctctggctacattggccctgaactattctgtttgttttcataaagaccataacattgaagggnnnnnnnnnnnnnnntcactaattagcacaatcttggaagtagtacaagacttagaagccacttttagacttcttgtggctcttggaacacttatcagtgatgattcaaatgctgtacaattagccaagtctttaggtgttgattctcaaataaaaaagtattcctcagtatcagaaccagctaaagtaagtgannnnnnnnnnnnnnnnntaaatttgctgtagcagtggggaagggggacggatatttttaattgattagtgtttttttcctcacatttgacatgactgataacagatgattaaaaaagaaaatactgtggattaagtaaaattttacatcttgtaaagtg

SEQ ID NO: 11345 - DNA, 756 bp, Macaca Fascicularis
  misc_feature (1)...(756): n = A,T,C or G
gctgggtcacagagcagggtcannntgcaagcnnnaagctggggagccctgcgcggagtcaacctgacagcgactgcacttgctcctctctgcccatcagacacaagctctcacagcgctaaggaagcaggcccaggctggcaggcatctgggcttgcaggaggccaactgctgagacctcctctccatcccccttattcagtggaaggtgacgggggatctgaggctgtgtctctgccttgtctttagaggacttcagcgtccaagactggggcctacccttctcaccagcactaaatgcactaacaaggactcctgacctgcagccccagactcgccgtagtataagcctaacaagcaacatgtagcaccttagtcttcgttccaggagagctgagcaagctcgtgaaaccattctccttcctttaaacaccgttccaaccaacctctccctggagccaacctgtaaaaagtgggttatgattgttgaccgcatggtcttccctccctgcattttagacataccagttactgaaaacaaatcagttttaagtgacttctcaatgctgaaaagcctgtccaggtttccttcactttcccaagcctctctctgtaatactccctttgggcgaagctaacctcagtgctgactgcctccctgaccctgctgactaggcacatgggacacgaaggagggagggaagtgaggccttgcctggcaagttgtcatgtggttggtggtgaccgttttatttt

SEQ ID NO: 11346 - DNA, 718 bp, Macaca Fascicularis
  misc_feature (1)...(718): n = A,T,C or G
acagccccgacagcctggaaaacattcctgagaagtggaccccagaggtgaagcacttctgccccaacgtgcccatcatcctggtggggaataagaaggacctgaggcaagatgagcacaccaggagagagctggccaagatgaagcaggagcccgttaggtctgaggaaggccgggnnnnnnnnnnnnnnnnnnnnngcctttggctaccttgagtgctcagccaagaccaaagagggagtgcgggaggtgtttgagatggccactcgggctggcctccaggtccgcaagaacaagcgccggaggggctgtcccattatctgagatccccaaggcctttccaaacatgccccctcccttcaacaggggtacagaaattatccccctacaaccccagcctccttagggcnnnnnnnnnnnnnnnnnccttttccgttccctcctgcccaggactgcattgaggtttcgtagccctgaggtggtggggtggtgcgggccctccctcccagtgctctgggaaccaggcctatgccctgcccttcctcagggcccctggggctcttgcccctttgacctttcccaaaggatggtcacacaccagcactttatacacttctggctcacaggaaagtatctgcagtaggggacccagagtcccaggcccctggagttgtttttggcaggggccttgtctctcactgcattggtcaggggggca

SEQ ID NO: 11347 - DNA, 827 bp, Macaca Fascicularis
  misc_feature (1)...(827): n = A,T,C or G
acacagtgcgcgtcaaggcnnnnntcgccatctcctgtctggtnnnagagcaggaggcagggctgctgcagttcctccgcctggacggcttctctgtgttgatgcgggccatgcagcagcaggtgcagaagctcaaggtcaaatcggcatttctgctgcagaacctgctggtgggccaccccgaacacaaagggaccctgtgctccatggggatggtccagcagctggtggccctggtgcggacagagcacagccccttccacgagcacgtgcttggagccctgtgcagcctggtgacagacttcccgcagggcgtgcgcgagtgtcgggagccagaactgggcctggaggagcttctccgccaccgctgtcagctgctgcagcagcatgaggagtaccaggaggagctggagttctgcgaaaagctgctacagacctgtttctccagcccgacggacgacagcatggatcggtgaaaccgggtggcttcttgcccctttctccgtgggaaccccaggcctcttgcctccctccccacctacaaggccctctcccaagggatcgcacggcctaggtgcctggacccagggcgtgccagcccgtctctgtgcagtccctggaagggccgctgagaaaggcaccagctccttggatcccacctcccatgctctcactctcatccccgttctcttgtccacacagctcttccaataaaggtgtttctcttccttctcctcctccttcactgccgcctttgtcacctcctttggagggtgcatgggggacgggaggaggggcacgagtttaagggacttggggagccactg

SEQ ID NO: 11348 - DNA, 577 bp, Macaca Fascicularis
  misc_feature (1)...(577): n = A,T,C or G
tcacacaagaagaaaggagaaaagaatatggccagtcaagttcaaaaagaaaacagaaaaaaaanctctcaagagagaagctnnnnnnnnnnnnnnnnnngactggaaggatagacnnnnnnnnnnnnaactcaaaggtcatgatgagcatccaaaaggcaagannnnnnnnnnnncagaagtccagatcaaaaggaaaacnnnnnnnnnnnnnnnnnnnnnntcactgttctaagctccccgtgacctgtggtgaggcgaaagggattttatataagaagaaaatgaaacacggatcctcagtgaagtgcattcagaatgaggatggaacttggttaacactaaaagaatttgaaatggaaggaaaaggaagaaacacaaagaactggaatcggagtatacgttgcggaggaacgaccctagcagagctgctgaaagtattataatgacaagcgacagatagaatggacttttgctctgtcctccaagaataaatctcaagagagagttaaatagcaagtgaatttctactaccctctnnnnnnnnnnnnnnnnnnnnnnnnnnnnntggaggctc

SEQ ID NO: 11349 - DNA, 694 bp, Macaca Fascicularis
  misc_feature (1)...(694): n = A,T,C or G
aggtcatcagttcagaagcnnnnnnnnnnnnnnnntcctttgggtttagggtagatccattgtatgaaatgggaatnncntagaggccaatgcctgcttttgctcctttcgtctcaaatgtagtatcagaaactctaaaaaatggtaaagcgtggttgcttattatgttcagatggagagtagggtatacagttaattcatgttggaaagtttagatgaacattaaaagacttttgcaaagtcaaaggattaagagagaagaggaaggaatctgaagcaaagagctcagaactcatcttaaactccttagtaactatgtgtgtctnnnnnnnnnnnnnnnnnnnnnnnnnnnnnnnnnnnnnnnnnnnnnnnnnnnnnnnnnnnnnnntacaaannnnnnnnnnnnnnnnnnncttgacctcagtgaaggcagtgatcttcagcattttccagccctatagccaccnnnnnnnnnnnnnnnnnnnnnnnnnnnnnnnnnnnnnnnnnnnnnnnnnnnnnnnncctctctattgccttttcctgtatctattttcctctatttcccacattttattatcaccatgcaacgcctctggaataaaacatannnnnnnnnnnnnnnnnnatgnnnnnnnnnnnnnnnnnnnnnnnnnnnnnnnnnnnnnnctttttgtttnnnnnnnnnnnnnnntgt

SEQ ID NO: 11350 - DNA, 595 bp, Macaca Fascicularis
agaagtgggatatggaatgttcatttggcagccaaggagaaggaagaatgaattctttataaagtcaggtcagtgatttgctggtgatcaaataagctgaatgctactgttttatgaataaattcagagggtctcatccctaaagtcagctcttggtgagcagcaaaacattctagaaaggcctgcggtcaggagaccgccggaaactcctcagctccccactttgcaagcaatgggtacttcctcatcgagcgcggaaagaacatgtgtggcctggctgcctgcgcctcctaccccatccctctggtgtgagccatggctgccgcagtgcagactggcggagaaggagagaaacgagcagcctgggcctgggtggaaatcctgccctggaggaaattgtggggagatccactgggaccgccagcgttctgccctcacctctgtgcccagcctagaaacctatagagaaggaggagttccaccacgagctcacctacgtctgtgacgcaaagatcaccagccatgtgccttagcgtccttcttaacagactcaaaccacatggaccacgaacattctttctgtccagaagggcta

SEQ ID NO: 11351 - DNA, 605 bp, Macaca Fascicularis
  misc_feature (1)...(605): n = A,T,C or G
tctttgcatatgtatggtactgaaaaatcaatatacatctttaatcctttttaggttgtcctttaaagagtttttgactagtttctttttcttgacagttcttctctttggacacatgggccttcttagagggttcagtctaggccccggctctcctggccctgtgttgagggtagctggtccctctgtccctgtgtctgctagcactagactttgttgctacacagattgatccattgggtacataggctaattaatgtgagtctttttccttgttaaaaggagtccctcttgctgaaagtacatgattactattgctgtagtgttaggaaagtattaagtttgtgctgaaaatccattgccatttggtacaaatgccatttgttctnnnnnnnnnnnnnnnnnnnncgagtgtgtttgtacacaaacccttaggatggtgagttgaagcatcaccctcacgctatcttcagtgacgggtgacagctcagggagatggcaggcagattnnnctcttaagtcattattctctgttactcnnnnnnnnnnnnnnnccctttcctctnnnncagtcagtctaagtctcgtaatctgctttgctgtct

SEQ ID NO: 11352 - DNA, 755 bp, Macaca Fascicularis
  misc_feature (1)...(755): n = A,T,C or G
agcgtgatnnnnaaatgcaatgatatnnnnnnnnnnnnnnnnnnnnnnnnnnnnnnnntagagctgannnacgagataaatattccccaggttggaaattcaatcactgggagctcaagggagttcccattagacttgaagttgggccacgtgatatgaagagctgtcagtttgtagctgtcagacgagatactggagaaaagctgacagttgctgaaaatgaggcagagactaaactccaagctattttggaagacatccatgtcacccttttcacaagggcttctgaagaccttaagactcatatggttgtggctaatacaatggaagactttcagaagatactagattctggaaagattgttcagattccattctgtggggaaattgactgtgaggactggatcaaaaagnnnnnnnnnnnnnnnnaagatcttgaacctggtgctccatccatgggagctaaaagcctttgcatccccttcaaaccactctgnnnnnnnnnnnnnnnnnnnnnnnntgtctgtggcaagaaccctgccaagttctacaccttatttggtcgcagctactgagggatgaacaaaacccccctcttcaactcccctcactttttaaaacattgaaattagtatcttctcagatacagaccgttttatgatttttttaaaaagtaaaagttctaaaatgaagtcacacgagacaattattcttatgcctaagttaacagtggataaaatactntcnggtaaaca

SEQ ID NO: 11353 - DNA, 322 bp, Macaca Fascicularis
cagcgtctagaggtggggatgcagaatgcaggggtgcccggagggaagggcgcccgcagcccgggggcggaccgtgacaatgcgcgcaatccaaatacagttcaccagaaagacacggcagagcctcccgcatgttacaaaggctgacacagaccagcagcgtgttgtgttggtgggggtgggggggggaggatgtgaccaccgatgacgagggcagtcagctggcgggcggggggtcccctgctgaccactgattatactgactcgtctcgggggccgataaattaagggagaagtcttgaataagtcgtcgtgtgtacct

SEQ ID NO: 11354 - DNA, 339 bp, Macaca Fascicularis
cgaggggaccaaggaggtgattcgctatgcattggccgttgtcaagtacaatgagaaggagatcttgagggtacacaatggcctggaaatttaccagtacgtgcgctttttcaccaagaccatctccaacagccggaagctgatgaacatcgccttcaacgacatgaacccctttcgcatgaaacagctgcagcagctgcgcatggtccaccgggagcggctggaggctgagctacgggagctggagcagcttaaggccgagtacatggagaggcggacatcccagcgcagagccatgtccgacggctgcgccagcgaggacgaggtggagggggaggc

SEQ ID NO: 11355 - DNA, 732 bp, Macaca Fascicularis
  misc_feature (1)...(732): n = A,T,C or G
ctgactatgtgcactgaagtaaatggggttggggagnnnacannnnatatttataatgnnnnnnnggtaccatattttaaatgttaattaatgcaggtgatttattcaaacattcgttctagcttaagctggaataagaagtggtcatttcagaagttttcatttggaattccttcctctcccttgttcccaagttggcagtagtagtaggtnnnnnnnnnnnnnnntctgggtaatctcttatgggtgggaggtgagtttgatagtgcaataatcagtgatctgtagaccctcatgcacgattcaagtttcactnnnnnnnnnnnnnnnnnnattgtacattggccattccaaacctgcggagaactttgttgtcaattcctgnnnnnnnnnnnnnnnnnnnnnnnnnnnnnnnnnnnnnnnnnnnnnnnnnnnnnnntgcctctggactgacaccctccttaatgagtcctgatgaaacagcctttcttacatccttccctcattcccatgattggagaaatgattcattgggtgatgagtgttggggttttctgtactcgtgttgccatcttgagatgtttaaacatttgggggttagagcaactgttagcgtctctatgggcaatcagtagaacttacacattctaggaaatctttctttgtaagtaattcatttggtctcaagtgattctcttcatgttgtctcttgatgtacataccccatagcaa

SEQ ID NO: 11356 - DNA, 752 bp, Macaca Fascicularis
  misc_feature (1)...(752): n = A,T,C or G
caggtagcacttannnnnnnnnnnnatctcagccctctactgagtgccttagccaagcagtttctttcaaagaagccagtgggcgaaaagcagggactgccactcccaattcagatcacactgttaaaagttgtgttttgaaattttatgtttagttgcacaaactgnnnnnnnnnnnnnnnnnnttgaggaagatatgattggagaatcaagagtgtagaagaataaatactgttttactgtccaaagacatgtttatagtgctctgtacatgttcctttcctttgtaatctctggcgagatgctttaggaagataaaagtttgaggagaacaaacaagaattctgaagtaagcacagagttgaagtttatacccatgtcacatggttttcaaattacttagaagcaaggaatggtgtttttttaaaacctaattgaagtatattcaaatactttaatgtataaaataaatatacaatatacttgtatagcagtttctgcttcacatttttcaaatttaatgtttatattagagatctatgtataaatatgtattttgtcaaatttgttacttaaatatannnnnnnnnnnnnnntctggaagtttgtttaaatgacaggaagaagtgtatatgaatttaagaaaattttttaagctgcaaaaatgtatttgctataaaatgagaagtctcacttatagaagttctttattgctcactttttaaaaaattgactcttgaaatctgtaaaaa

SEQ ID NO: 11357 - DNA, 836 bp, Macaca Fascicularis
  misc_feature (1)...(836): n = A,T,C or G
gaaagggtgtttttgtagagctggtttccaaagcgcctggcnnnnttacttcacattctcaagtggcagtttcattatttagaatgcaaggtggacatcttttggatatctttttctatatattttctaaagctttacatatgagagggtatagggaactttttttccttaatatcagaaagcaaaaaaaaaaataaaaccacaattgagatttgcctttcaaaccctcaggtttgcctctaaccaggnnnnnnnnnnnnnnnnnnnagtactggaatactggaaccgaggagaccttggtccttttgtttttgttctggactcttgggagtggaaaatgggaatgagtttattcctactggagtttagttccaatgcatttggctccagaaagaccccagtgccttttgacaatggccagggttttccctacttcctgccagtctttcccaaaggaaactcattccaaatacttacctgttcccctggagtcctagaaggaaaatggaattctggttcatactgtggtcccttgtaacctcaggtctttaatgtgatcactttcaaatttaaaagatccaggtggaaatatttttactataataataattctacaaaatacctgaattcttaacactgttatatttcagtataagtggtggctttttcttttcatgtctttgatctggttttattcctgtaattcacagccacctgattttgtgaaggggggggaataatacgtggtttttgtacaaacatgtttctcagtgtgttgttattttggagaaaatgaggggagggagtttggcgagattggagaaaatgaatgaaga

SEQ ID NO: 11358 - DNA, 729 bp, Macaca Fascicularis
  misc_feature (1)...(729): n = A,T,C or G
aaatggagtgtaaaagtcactttccttnnnnnnnnaatatattggtgaaatgnnnaaagactacatttatgctgtaacaccgttannnnnnnnnnnnnnnnnnnncagagaccnnnnnnnnnnnnnnnnnnnnagnnnnnnnnnnnnnnncatgtcacttggggtttatggatttggttgtgaagattcgctgaatcacttgttgaactatgtatggcccaatgtgtttgagacatctcctcatgtnnnnnnnnnnnnnnnnggagccctagagggtctgagagttgctattggaccatgtagaatgttgcagtattgtttacagggtctgtttcacccagcccggaaagtcagagatgtatattggaaaatttacaactctatctacattggttcccaggatgctctcatagcacattacccaagaatctacaacgatgataagaacacctatattcgttatgaacttgactatatcttataattttattgtttattttgtgtttaatgcacagctacttcacaccttaaacttgctttgatttggtgatgtaaacttttaaacattgcagatcagtgtagaactggtcatagaggaagagctagaaatccagtagcatgatttttaaataacctgtctttgtttttgatgttaagcagtaaatgccagtagtgaccaagaacacagtgattacatacactatactggagggatttcatttttaattc

SEQ ID NO: 11359 - DNA, 452 bp, Macaca Fascicularis
  misc_feature (1)...(452): n = A,T,C or G
ctgggacagaggactgctgtctgccctctctggtcgccctgcctagctagaagagctgtgaccccagccatgaggaccctcgtcatccttgctgccattctcctggtggccctgcaggcccaggatgagccactccaggcaagaactgacgaggctactgcagcccaggagcagattccaacagacaacccagaagtggttgnnnnnnnnnnnnnnnnnnnnnnnnnngctccaaaggattcagtcccaggcttaaggaaaaacatggcctcctattgcagaatacnnnnnnnnntagcaggagaacgtcgctatggaacctgcttnnnnnnnnnnnnnnnctgggcattctgctgctgagcttgcagaaaaaaaaaaaagaaaaatgagctcaaaatttgcttcgagaggtatagggaattgctatcaactcctgtaccttctgctcaatt

SEQ ID NO: 11360 - DNA, 764 bp, Macaca Fascicularis
  misc_feature (1)...(764): n = A,T,C or G
gtgtccagagggnngnattcnnccgcnnngataagaggatcgaggcagaagaagnnnnnnnnnnnnnnnatggccagaagcccagcggtgctacggaaccgattactgtgaagtttgccaacaaccccagccagaagtccagccaggccctgctctcccagctctaccagtcccccaaccggcgctacccaggtccgcttcaccaccaggctcagagnnnnnnnnnnnnnnnnnnnnntaatatggcctatggcgtaaagaggttctccccaattaccattgatggaatgacaagccttgtgggaatgaacatccctggtcacacaggaactgggtggtgcatctttgtctacaacctgtcccctgattccgatgagagtgtcctctggcagctctttggcccctttnnnnnnnnnnnnnnnnnnnnnnngatccgtgacttcaacaccaacaagtgcaagggatttggctttgtcacnnnnnnnnnnnnngatgaggcggccatggccatcgccagccnnnnnnnnnnnnnnnnnnnnnnnnnagtgttgcaagtttcctttaaaaccaacaaagcccacaagtcctgaatttcccattcttacttactaaaatatatatagaaatatatacgaacaaaacacacgcgcgcacacacacacatacacaaaagagagagaaacaaacttttcaaggcttatattcaannnnnnnnnnnnnnnnnnnnnnnnttgcctaagtattaaaacattggattatcctga

SEQ ID NO: 11361 - DNA, 284 bp, Macaca Fascicularis
tcagcaatgttcttttcttgtaagggcaagttatagcctgcacatcgacatcatgggttccctttgtctttcaaactccaaggttcccttgtggccctctatcttaccgagcgaaggcctcatggagaccttacccccggctgtttggacttcgtatactttaaataatttaactacccttaattacttaaaaaaaaaaaaaaagctttatgattttcataacttattgctgattttaatggattgttaatttcagtcctgtagttttattttatgtttagata

SEQ ID NO: 11362 - DNA, 456 bp, Macaca Fascicularis
tggaaggggttcacacagtattatgcccgcgtgggtgtccacacagtcttctcattcatatttttggagcagatgaacaaggcgtacaggggtgtcttcttcagtgggtgaagtggccgggggctctcacttgcgcgttgtgtgtatggccactgcgccctgggggcgtggggtctgctgccctggacccctctatttatttcccttccacagtgtggttttttcttctgcggtaaaggagttggtgtgttttaccccccgttccagcttgccctgttcttcttgatcttgtgatttttctgtctctgggtattcttgcagggagatgaaaaacttctcgaggatttttggcctctccctgggttttagtttcagggcacacaggacagcagaagatctcccttttcattggggaaaccacggcagaaatgaggggatagggaggagcagaagcca

SEQ ID NO: 11363 - DNA, 716 bp, Macaca Fascicularis
  misc_feature (1)...(716): n = A,T,C or G
gtagactcagtggggtctctctgcccaagatccctgacatnnnnnnnnnnngtcttttccatatgatttgtctgtgttttccatatgatttgtctgtgaaagaannnnnnnnnnnnnnnnnnnnnnnnnnnnnnnnnnnnnnnnnngctatatgagggccaaaacacaaatccctttgctaaaaagaaccatattattttgattctcaaagaagaggcctttgagtgttagagaaaggagtgaaggaggcaggtgggagatgggtatttctatttttaaatccagtgaaattatcttgagtctacatattatttttaaaacacaaaaattgttcggctgtaggtgaactgacccaggctggacttgcgaggaggaaactccagggcnnnnnnnnnnnnnnnnnnnnnnnnnnntgcccgtgctcaccttggtcaggtacagcactgaaaggtatgaagcaccggcaggaggtggacacagtctctcatgaatgctggcacaaaactgccttaaaatattcatagttaatacaggtatacctatttttatttactttgtaagaaacaagctcaaggggcttccttttaaattttgtctataggaaatggctgaaaactgaaggtagatggtgttatagttaataatgaatgctgtatataagcatcttgctttgtaaaaataaaatattgtggttttgttttaaacatttaacgttc

SEQ ID NO: 11364 - DNA, 1245 bp, Macaca Fascicularis
  misc_feature (1)...(1245): n = A,T,C or G
acacacaggatgtcaagcatgtggtgtggcannnaagtcaggagnncttagcnnnnnnnnnnnnnnnnnnnnnnnnnnnnnnnnaccgggaggaagaggatgactgggtnnnnnnnnnnnnccttgagggccatgaatnnactgtgtggagcttggcctttgacccgagtggccagcgcctggcgtcttgtagtgatgaccgcactgtgcgcatctggcgtcagtatctaccggacaatgaacaaggcgtggcatgcagcggctctgaccccagttggaaatgtatctgtactttgtcgggcttccactcaagnnnnnnnnnnnnnnnnnnnnnnnnnnnnnnnnnnnnnnnnnnnnnnnnnnnnnnnnnnnnnnnnnnnnnnnnnnnnnnnnnnnnnnntcccaactcggatccacaacagcccaccttctccctgacagcccacttgcatcaggcccattcccagnnnnnnnnnnnnnnnnnnnnnnnnnnnnnggagccagggctgctggcctcctgcagtgatgatggggaggtggccttctggaagtaccagcggcctgaaggcctctgagctaccttgacttcggacagagtaatgactccccagaaaacgccgtaagactttcccagcccttgagaggaccaggaaagaggctcacttctcttcagacttgggtagaagtatggagccacagannntgctctccttcccctcctttgacgtgaggccttcagtaaagagctatnnnnnatcagtanntnnntataccacagatttttcttgcattagggcacagtgttaaattttttggaggtaaatatactatttataattgttatatatagtaggagggggtgtgtgtctcaggcctttctgaagttgtaagacttaaataatccatctgcatcccaagtcctattttataaggagatcataaaagnnnnnnnnnnnnnnnnnnnnnnnnnnnntaggtcctgccttcccggtttatgtaaatctttgcatttaagacattcaatcaatactgaaggaaattttttttctgaatgtaggnnnnnnnnnnnnnnnnnnnnnnnnncccttagaaaccctcatatactcctgcaccgttaagctgtgatggcaacgggtgatagaaaaaaaaaaaaatggggagccgggcgtggtggctcacgcctgtaatcccagcactttgggaggccgaggcgggtagatcacaaggtcaggagaccgagaccac

SEQ ID NO: 11365 - DNA, 398 bp, Macaca Fascicularis
  misc_feature (1)...(398): n = A,T,C or G
gttgcaagaaaacacattatatctcacctcttctgtcagccaaaggcacctgtgagccaaactggattgaattggcctgaaacaattactgcaattaccagttatttattgcagcttttgtatccttttatttaagagccagtgaaaagctctcttctggctggacatgtnnnnnnnnnnnnnnnnnnnnnnnnnnnnnnnnnnnnnnnnnnnnnnnnnnnnnnnnnnnnnnnnnnnnnnnnnnnnnnnnnnnnnnnnnnnnnnnnnnnnnnnnnnnnnnnnnnnnnnnnnnnnnnnnnnnnnnnnnnncctgcacctgtaatcccagctgctcggaaggctgcgaatagcttggacttggggggcggaggttgcagtgagccaagctcgcgacacac

SEQ ID NO: 11366 - DNA, 782 bp, Macaca Fascicularis
  misc_feature (1)...(782): n = A,T,C or G
acagggcactgaccctnnncagtcagaccaagtggcagagctgcttggggagagtgatggtagaaggacgtcccaggagggccctggggacagtgtgaaattcgagggaggtgaagatgcttctgtggctgtggannnnnnnnnnnnnnnnnnngggaccctgcagaggagtggctctctgggcaagatnnnnnnnnnnnnnnnnngaagcagtgaaatcctggtgaggaagctccaggggactgannnnnnnnnnnnnnnnnnnnnnnnnnnnnnnnnnnnnnnnnnnnnnnnnnnnnnnnnnnnnnnnnnnnnnnnnnnnnnnnnntcccggggcctcagtgccagctccatggatcnnnnnnnnnnnnnnngacattcaacccagtccccaggtctgctgggtccccctacccctatagccctcacagcattccccattgctcctggctcttccccacccctaggtgggacagtgaaggggagcagtttaaccagnnnnnnnnnnnnnnncttagggtttcagctccctcctcaggaatccctcttaggaaggaccctcaggacaccctctccgcaccctgtggtcctctagagtagctagctctgaggcccccaaggnnnnnnnnnnnnnnnnnnnnnnnnnnnnnnnnnnnnnnnnnnctggcttttcagtcagagggttgagggctggccagccaagctgccttgccttggccgctcttattccctccctctgctgtctcacttcaggtccatgtatttcacttttcttaaataaa

SEQ ID NO: 11367 - DNA, 707 bp, Macaca Fascicularis
  misc_feature (1)...(707): n = A,T,C or G
gannnacccaaaggtgaagcacannntcaggtcaacagataannnactagagactgtccccagagaacagaactgggccctgaggcccaccattgccctttcctgagagtcccagcccagtgaaaggaacacagttgacatgttgnnnnnnnnnnnnnnnttgcctgtatgcgtaaaagagctctctgtttcaggctcatgtacagtcaggaatggttccttctcatccaactgcccatgcgccaatgatgctaatgacgacacagccacccggcggtccccaggccgccctcgctcaaagtgcactacagcccattccagtctcgacaactgcgcatttcccctatatgacgcacccttcagtacaagcccaccaccaacagcagttgtaaggctgccctggaggaaacgaaaggccaaattccctcctcccttctactgcttctaccannnnnnnnnnnnnnnnactagaatttcatttattttgtttttaaaatatatatgttgatttcttgtaacatccaataggaatgctaacagttcacttgcagtggaagatatttggaccgagtagaggcatttaggaacttgggggctattccataattccatacgctgtttcagagtcccacaggtaccccagctctgcttgccgaaactggaagttatttattttttaataannnnttgaaagtcatgaacacatc

SEQ ID NO: 11368 - DNA, 720 bp, Macaca Fascicularis
  misc_feature (1)...(720): n = A,T,C or G
cagctgcaacatggggcagccctgtgtgagtgggtgtgtgtcatcgatatcctcanntnctatggcannnncagctatgagtttggggcagtctnnncagacacactggtggctgcattgcagcctacccctggccgggcctgcaagtcctccgggagcagcagcacctccacccacctcaactgtgcccccgagagcatcgctatgatctaaggtctggggagggtggctggcccggcctctgcagcaccccaccccatatcttctttgcatttattttgtaccaaaaacaattttgagaaagtattctgttgggatacgggcttcgtcacttctggagaagtggccatcccatgtccacctgtgccatagaggagtgggccctgccagctgccatagctgcatgacctgctttcccaccccacagtgttgttttgtttttaaaggtcacctgtcctcactcacccagccagcccttcaggtgccttctactcccagtgccaaagccagaccactggggtttcctgctgcaggaattgggggctgggaacagcagaggggatagaagtctggtggaggtggagtgggcacgccttagcctacggaaaggcccatttctgggcccactgagctgcactgggattcttcactctgcccctcacttccgttagggcaaataacacagcagaaccacgtgggtattttagtacttttttttta

SEQ ID NO: 11369 - DNA, 756 bp, Macaca Fascicularis
agtgtgatacagccaattgtaaaagactgcaaagaggctgacttatccttgtataatgagtttcgactgtggaaggatgagcccacaatggacaggacatgtcctttcttagacaaaatctaccaggaagatatctttccgtgtttaacattctcaaaaagcgagttggcttcagctgttctggaggctgtggaaaacaatactctaagcattgaaccagtgggattacaacctatccggtttgtgaaagcttctgcagttgaatgcggaggaccaaaaaaatgtgctctcactggccagagtaagtcctgtaaacacagaattaaattaggggactcaagcaactattattatatttctcctttttgcagatacaggatcacttctgtatgtaacttttttacatacattcgatacattcagcagggactcgtgaaacagcaggatgttgatcagatgttttgggaagttatgcagttgagaaaagagatgtcattggcaaagctgggttatttcaaagaggaactctgatgttctgcgtgggaccatgcctgaactctctgaataactgaaaaatggctgaatatttttatggttacttgatatttatttccaaggagtgggcctaagacttttttccccttttgcaaattgctctaagaagtaccatgatttcttttaaactgatctatgctgtgtttgcttattctttagttgaatacactatgaaggattacaggtgtactagtgaatgta

SEQ ID NO: 11370 - DNA, 778 bp, Macaca Fascicularis
  misc_feature (1)...(778): n = A,T,C or G
ccatagtagaccaggagggcacagcactgcacctgcagacaagcctgccagcccttnctgaagcggatacccaggaactaacccagatcctgaggaggatgaaggggctggccctggaggctgagagtgagctagagagacaannnnnnnnnnnnnnnnnnnnngcagcagctgtggacagagcaaccttgaccatcgacaagcacaacaggcggatgaagaagctgacctaggggcagagtgtccctgcattcctgtctctgcctgcacatccccctgagatggaggactgagagtcggtgccagggcnnnnnnnnnnnnnnnnnnnnnnnnnnnnncttcctctggatggggctgctactgtggggccacctccacactaggggcctccataggtgcgcgctatgcctgccccccactcggctctccctgttgccggacaggacccggccacatgttctgcagatgccgcagaagtgtggaccatggcgggaccccaaggacacttggcacaggcctggaagaggccaatgcgctgccctcgtcttgtctnnnnnnnnnnnnnnnnnnnnnnnnnnnnnnnnnnnnnnnnnnngaatttgtgagtgaagttagaannnnnnnnnnnnnnnnnnnnnnnnnnnnnnnnnnnnnataaacacccagctgttcttttatcgnnnnnnnnnnnnnnnnnnnnnnnnnnnnnatgactgcacctttcaaacagaaatactgatttctgcttttatggccccatttccatccanngaaataa

SEQ ID NO: 11371 - DNA, 752 bp, Macaca Fascicularis
  misc_feature (1)...(752): n = A,T,C or G
cagcctacctgcnnnncnntgaggcgtnnnngcccagnnnnnggccgactcgctcaccgtctacctggtagtggcattggcctcagtgtcgtcgctgttcctcttgtcggtgctcctgttcgtggcggtgcggctgttcaggaggagcagagctgcctcggtgggtcgctgctcggtgcccaagggcccctttccaggacatctggtggacgtgagcggcaccgggaccctatcccagagctaccagtacgaggtgtgtctgacaggaggttacgggacaaatgagttcaaatttctgaagccgattatccccaattttcaagttcatgacactggtaagaatatgggggaaattgagaactttcgaaatagctttggatttaacatagaataaaacaatttattttaaatttctaatttttagttattttttgnnnnnnnnnnnnnnnttttgcataatcttttgtggatttttggttgtattgtagttgcatgcatgattatagctcttgtttttctcacagtttctttaaaaatctttattagtggctataatgacatggaaatgtaatctgtgttttctggtttttcatttatttggtcaaaatgttatattaatggagttattgctatttttgctgtgataatggtatcgttatgtaagacaatgttctcaattatttggatatgcaaactaaagtattaagagctaatgtcattatatatgtaacttaaatctagacaccatcaaa

SEQ ID NO: 11372 - DNA, 780 bp, Macaca Fascicularis
  misc_feature (1)...(780): n = A,T,C or G
atgcttactatggnnnnntgnnnngagaaaaagataagtaatcatatatggagcttttatagtgcaggataaaaaagtactttaannnnnnnnnnnnnnnnnnnnnnnnnnnnnnnnnnncttcggacgtgtgtaaagttgctggtgtccaagtggaagcccatgggcacggcggacnnnnnnnnnnnnnnnnnnnnnnnnnnnnnncaggaagaagaccctgtcttagggattattggacaagggtggaaagtcaattgtgggtcaagagaaaaaagatataaaggcatagcctcctcaaccccnnnnnnnnnnnnnnnnnnnttagatggcagaatggccttgggctcccatagacaccatcagaccctggcagactgggccggctggggggcgaggtggggagagcgcggccactccccgtggaagaannnnnnnnnnnnnnntctcacggtctcgtattgtggtcagaggagctcacacaacacgcccagtgtactggagtttatgacagacctcattgaatgaggccttgacttccagggaaaaaaacgcctcacacaaaatccataaaattggtcatgggaattctcagaataggcctgagtattttttcagaagtgatggaacataactgttcatgagttccatgtggcatttggagctctgggctttcagtttttgctttgttttccaagtcacgactgggtgtaccattcttgtggcnngcagaaacatctcagcatggaataaggttttttttatgcaaaaacaacctgc

SEQ ID NO: 11373 - DNA, 756 bp, Macaca Fascicularis
  misc_feature (1)...(756): n = A,T,C or G
aaaagtacannntnnnnnnnnnnnnnnnnnnnnnnatcatcttccagagtaaaatgcaaatcccatcaggccacnnnnnnnnnnnnnnnngatannnnnnnnnnnnnnnnttttcttcccccaatcatagctcacaaaccttcgttgctatttgttcctaagtaacaaatcatttttcctcctccctccccaaaccccaaggaactctcactcttgctcaagctgttctgtccccttaataccaccccgatacannnnnnnnnnnnnnnnnnnnnnnnnnnnnnaagattcagctcagaagtcaccttctctcgtgaatgttttgattccctgaggctacttcattttgctatggctgaaaaatcctagattttctaaacaaaacctgtttgaatcttggttctgatatggactgggagagagactgggtcannnnnnnnnnnnnnnnnnnnnnnnnnnnntcgtctgttaagtgggattattacctgcctttcataatcaccagggaataaagtggaataatgttgataagagtacnnnnnnnnnnnnagtaggtggcagatgttaatgcccttcctcccttgcactgcgacccctgtgtctacctctagtattgtaacgaccacatagtattgaaatagccactttacttgtctggcttcctttcnnnnnnnnnnnnnnnnnnnnnnnnnnnnnnnnnnnnctatttaactttgtattcccaggtcctagctcaggagtggcaaataagaataa

SEQ ID NO: 11374 - DNA, 675 bp, Macaca Fascicularis
  misc_feature (1)...(675): n = A,T,C or G
caagctagaatttgccccgaaagctgtgctgaacagaaaccgcccagagaagaattgatggaggacacagggccctacggtnnnactgtgggcggtgacttgtcctgctaccatgttgacagagccccagaacccacatctaattggctttgttgcttattctggcccctcccacaccacacagccacacaaatactggctnnnnnnnnnnnnnnnnnnnnnnnnnnnnnnnnncaaagggccagtgaagaggaaggccgcatctgttgtnnnnnnnnnnnnnnnnctcaggcatctgagtttactggtgcactgctgggaggagtgttatgagannnnnnntggctgtcaatctctgtgggcaggcggtttggcctcgagtgggaatggctgggatttgggtgttgcctttaggagggatacctgcatgtctagttccagtctgcactgggaagaattcaaatatgcacctggctcccttcactgttttgccctatcctttgtgctcattcttactgaaatctgtcttgtcagctcaggaatgggattcccccgggaaggaaagcatttttctgttctgggaagcccagactgttcactttggggcagggacgaacatgtgcctcgtgaatttgcttgaaaacagtccccgtcatctacccccatcactgtaga

SEQ ID NO: 11375 - DNA, 745 bp, Macaca Fascicularis
  misc_feature (1)...(745): n = A,T,C or G
aaaactgaacagnagccatgangtccnaggtcaagtnnnnnnnnnnnaactccagcccagcaaccttgaggccgatcagccactgcaggcaatcatggagatgggtgccgtggcagcagacaagggcaagaaaaatgctggaaatggggaagatccccacacagaaacccagcagccagaagccacagcannnnnnnnnnnnnnnnnnnnnngcacgacagacacccctggtaacccaannnnnnnnnnnnnnnngccccgtaaaaatcagactcagaaccaatgtgtgctttagggaattttaagttgcatgcatttcagagactttaagtcagttggtttttattattannnnnnnnnnnnnnnnnnnnttgggtggaggcaaaacactaataaaagggctaaaaaggaaaatgaagcttttcttctatattcttactctgtacaaataaagaagttgcttgttgtttcagaagtttaaccccgttgcttgttattctggagccctgtctacttgggcaccctccacctgttagctgtggttgtgcgctatcttctgtagctctggactgaaggggtagatggggagtcaattacccatcacataaatatgaaacacatttatcagaaatnnnnnnnnnnnnnnnngatgattttcttcatctcatatttaaaatacctaactttaaagagagtaaaatgtgccagaggccataggaatatctgtatgttggatgattttaat

SEQ ID NO: 11376 - DNA, 102 bp, Macaca Fascicularis
tcatgttgtccaaataaacttaaccatccttcattctcaagacctctgaagggctggctgcagaactgagacctttgcttatgcaaatcagaaaaatagaat

SEQ ID NO: 11377 - DNA, 747 bp, Macaca Fascicularis
  misc_feature (1)...(747): n = A,T,C or G
ctacagtgctacaggaaaggatgacnannnnntcaaggttaggaaacgtaaagctgcttnnnnnnnnnnnnnnnnnnnnnnnnnnnnnnnnnnnnnnnnnnnnnnncatgtcgatatgaaacagtaattattgagcccatccacacactgggtactgtttaaaggattttccaagtaagaagactgttcttctcccgttacctgactcgccaattacacaaagatgcctttaattatgtttaagactaaatgaaagcatttggggcaacttaaaaattactggcttattcccaaattggacatttatctggaatctaacttcaacccccannnnnnnnnnnnnnnnnagagcacaagctaggtcaggtgcggtggctcacgtccgcaatcccaggattttgggaggctgaggcaggacgactgtttgaacacaggagttcaaggccattctgggcagcatggtgaaacactgtctctataaatattttaaaaatttgccaggcgtgnnnnnnnnnnnnnnnnnnnnnnnnnnnnnnnnnnnnnnnnnnnnnnnnnnnnnnnnnnnnnnnnnnnnnnnnnnnnnnnnnnnnnnnnnnnnnnnnnnnnnnnnnnnnnnnnnnnnnnnnnnnnnnnnntgggggtgggggcaggcgcctgtaatctcagctactagggaagctgaggcaggagaannncttgaacccgggagacggaggttgcagtgagccaagatcgggccatcgcact

SEQ ID NO: 11378 - DNA, 677 bp, Macaca Fascicularis
  misc_feature (1)...(677): n = A,T,C or G
ccagttattttttgcctcattagacatcaagaaatggagaaagactgaaagttaagatattcttcatgtttccttcttatttatgctattttcttctctttatagctccattcttctttcagtcttcnnnnnnnnnnnnnnncttttccttatgctaaggatagcccttacactcatgccatctgtgctgtcaagggctgctggttggtgctggtacaaggagcccacnnnnnnnnnnnnnnnnnnttgtctgccctgtnnnnnnnnnnnnnnnnnnnnnnnnnnnnnnnnnnttcnnnnnnnnnnnnnnnnnnnnnnnnnnnnnnnnnnnnnttttacagaactgccaaatagtcaaaatgttgccaaatatttattccttttgcctaagttaagctacccagttcagttgctttttattttnnnnnnnnnnnnnnnnnnnnnnnnnnnnnnnnnnnnnnnnnnnnnnnnnnnnnnnnnnnnnnnnnnnnnntccctaatctcaannnnnnnnnnnnnnnnnnnnnnnttctcctcctgtgctatcttctcttctatccaagtagaatgtatgccaggagctccttccttctagcaatttctactaaaatgtccaaatagaatgttttcttttacaatcaaattactgtatttattaatttgctagaatcccgtaa

SEQ ID NO: 11379 - DNA, 661 bp, Macaca Fascicularis
  misc_feature (1)...(661): n = A,T,C or G
tgaccaattttcactgagacactgactttctatacctgcatatatgtaccttgatttttaaagaattttggataaacttgcttgtgtttggcacaaagagagcacaaagtagaggccttaaagttctcttcagctgatatagaaagagattattttgactggtctttatggtcttcagcaaaagaaattacaataatcactgttttgggggagctaataattgaaggtagtttaatttgannnnnnnnnnnnnnnnnnnnnnnnnnnnnntatgtctatgctcattagcaaaggatgtagtgcacctccctgactactttaggatttccttttcagattttatttaacttgttaacctctggaatgcctaaaattaaataaaaatactgttttgagtttatattgagctatgtattttgtctgtgtgtaatctgttatatatatgtattgtatagagtttatattgagctgtatataatagccaatatttggggctctatgcttggaacatttttagaaaaatattctattttgattatatggtccaggaattaatctcattttnnnnnnnnnnnnnnnntggagtcgggtggtacagttttgagtaccaactggtctgatgtaggtaaaaggaaagtgaaatcaaccctcctgatgatat

SEQ ID NO: 11380 - DNA, 728 bp, Macaca Fascicularis
  misc_feature (1)...(728): n = A,T,C or G
aggggcggggcctggaggtgctcatgggagnnngcgctttgtttcctaggattcttgggacgagcttcttattggtgacgtggaactgaaaaggttgatggcttgttccagatgcattttaaccacagtggacccagacaccggcgtcannnnnnnnnnnnnnnnnnnnnnnnnnnnnnnnnnnnnnnnccagtgnnnnnnnnnnnnnnnaaagttatatggaaaatcaccactctttgggcagtattttnnnnnnnnnnnnnnngggaccatcaaagtgggagaccctgtgtacctgctgggccagtaatgggagctgtatgtcctggaatattagatgcctttaaaaaatgttctcnnnnnnnnnnnnnnnnnnagcatggtgtttcagaactgagacctcaacattttctttaaatttgtgattttcacatttttcctcttttggacttctcgtgtnnnnnnnnnnnnnnnnnnnnnnnnnnnnngcaaagaaatacagtcttgataacttagtaggctttcagtaagacacttaagtgacaagacaggattctgaaaactccctgtttaactgattatggaatagttctttctcctgctttgccatttatctaccaagagtgcagacttccatcctgtcactaccactcatgagggaaagagaagaagagaaagaggaagagtgggtaggccagaagaatgtcctagaatgtgttattacccct

SEQ ID NO: 11381 - DNA, 729 bp, Macaca Fascicularis
  misc_feature (1)...(729): n = A,T,C or G
cagnnnnnnnncctggagtacaccaaccagaccactcaggtggtgcccctgcgggccgtggtggccgtgnnngagctgcagctctccaccagctgggtggactttgggacctgctttgtgagccagcagcgagtccgggaggtctacctgatgaacctgagcggctgccgaagctactggactannnnnnnnnnnnnnnnnnngccacccaaggccgctgtggccttcggcgtctccccaagcagtgggctgctagaagcacgatctgccaatgcacccccaacctccatcgccttgcaggttttcttcactgccaggagtagtgagctgtacgagtccacgatggtggtggaaggtgtgcttggtgagaagtcctgcaccctgcggctccggggccaaggctcttatgatgagagatacatgttgcctcaccagccctgaggctccgccccagccctcagccctaggccccagctggagaataaacattgcccagggattaggaggagatcttcagcacaaagacacagacctggggacctctgggcagctcctgaaatggaagaacccccttccacaatggtctcagcctaggccttcatgatatgtcctcacagctaacacaaaggataggctacaccacagtagagaccaccgcattgagaatcactactcattgcatagcgaagaccagtatggcaaaattagcctggaaaaaaaccacagcca

SEQ ID NO: 11382 - DNA, 761 bp, Macaca Fascicularis
  misc_feature (1)...(761): n = A,T,C or G
tcacagtcacattacagtgaaagtactggagagcccagaagtgaaatcaaagtggagctaattctcagacaaaaggatgtttnnnctggtgcaactcccttttttgctgttatccgcaagcatttaagctatgttgctnnnnnnnnnnnnnnnnnnnnnngctaataatgtgtaatttattcagtacttactaggtatgttatttctgaaacttttagttgtttctagtatatttctgtaagtgcaaattnnnnnnnnnnnnnnnnnnnnnnnnnnnnnnnncgcagaccttatggtcagagcattccccctcctacaacaggactacccccaagccgccagcaatcacccttttcagtctctccttgtcaaacaaactagtggaaataatgaatgcaaatgtggcatttctacaggcattttctaagaccttaattgttagtatgttttctaatctannnnnnnnnnnnnnnnnnnnnnnnnnnnnatnnnnnnnnnnnnnnnnnnnnnnnnaggaaaaactggtctcctgaacttcaaaaagaaaaaaaaaatcatattggagaggttcaatcctaaaaactggaactaacaaaacaagaatccagaaagacagatttccaaaataacaaacctgtataacacggtcttcacttgtaatttcaattgcatctnnnnnnnnnnnnnnnncagtgaatacagagttacaagccctttatgagtaaacaaaaaaaggaatgattaatgtaaatactacaaaa

SEQ ID NO: 11383 - DNA, 768 bp, Macaca Fascicularis
  misc_feature (1)...(768): n = A,T,C or G
gacatgggctgcagnnnccctgagcacagggcgcaccaggaagcaagccataggcagttctgtgagtcaaagaatgggcnnnnntatccccagggagctggccagttagattatgggtccaaagggattccagacacttctgagccagtcagctaccataactctggagtgaaatannnnnnnnnnnnnnnnnnnnctttaagactgaaccacaaagaggtgaggctctccaaagagatggagcgaccttgggctaggcagccttctgccccagagaaacactccannnnnnnnnnnnnggaggaagaacacctcactcagtcaatggtcccaccccctaaaccagagaggagtcatagcctcaaactccatcacacccagaacgtggagagggaccccagtgtgctgtaccaataccaaccgcacggcaagcgccagagcannnnnnnnnnnnnnnnnnnnnnnnnnnnnnnnnnnnnnnnnnnccccctgcctcagcaccagcggggaggctttgcagggggcggcatggggacgtatgtgccccccgnnnnnnnnnnnnnnnnnnnnnnnnnntatgctacagctttgggtcaaggggccttcctgcctacagagtggtccttgcagcatcctgaaacacagatccatgcagaatgagccctggagcaatagagttgaagcagcnnnnnnnnnnnnnnnnnnnnnnctatttttttcaataaccaaaaagattaaaaaacaaaaaatacnnaaaaccccggccac

SEQ ID NO: 11384 - DNA, 953 bp, Macaca Fascicularis
  misc_feature (1)...(953): n = A,T,C or G
actgactgcatactannnanaactaatgagacatgaaccctggggtttcgagagnnnnnnnctgcagcnnnnnnnnnnnnnnaattttgggaaaactaaataacctggtaaaagagtggatacgagaaatcagtgaaagcaagaatcttccacaatctgtaattgaaaatgttggaggaaaaatttttnnnnnnnnnnnnnnnnnnnnnnnnnnnnnnnnaaaaggtgctgatattgatgcgttgtgtgttgcaccaagacatgttgatcgaagtgactttttcacctcattctatgataagttgaaattacaggaagaagtaaaagatttaagagctgttgaagaggcattcgtaccagttattaaactctgttttgatgggatagagattgatattttgtttgcaagattagcactgcagacaattccagaagatctggatctacgagatgacagtctgcttaaaaatttagatataagatgtataagaagtcttaacggttgcagggtaaccgatgaaattttacatctagtaccaaacattgacaacttcaggttaactctgagagctatcaaacnnnnnnnnnnnnnccacaacatctattccaatatattaggtttcctcggtggtgtttcctgggctatgctagtagcannnnnnnnnnnnnnnnnnnnnnnnnnnnnnnnnnnnnntnnttgtacataaatttttcttggtattttctaaatggtatgtgtttagattatattaaaataaaattgattgtagacactgaagtttagtcttatttctatgacatttctgcagctggtttcagattcaaattttagttnnnnnnntagtcatgtaggcagccttggagatcacattgtatttaaaatggcaaactgaaactctatttcttttccnnannntggccaggatagtaaggcagattctatttgtgcttcc

SEQ ID NO: 11385 - DNA, 740 bp, Macaca Fascicularis
  misc_feature (1)...(740): n = A,T,C or G
gctgtgcagatcactgtgtccactactatgatcntcgtaacactaaacagccaatcatggtattcaaaggacaccgtaaagcagtctcttacgnnnnnnnnnnnnnnnnnnnggaaattgtctctgcctctacagacagtcagctaaaactgtggaatgtaggaaaaccgtactgcctacgttctttcaagggtcatatcaatgaannnnnnnnnnnnnnnnnngcttccaatggagattatatagcttgtggaagtgnnnnnnnnnnnntgnnnnnnnnnnnnnnnnnnnnnnnnnnnnnnnnnnnaacttttaagtttgatacagtcaaaagtgttctggacaaagaccgaaaagaagatgatacaaatgaatttgttagtgctgtgtgctggagggcacnnnnnnnnnnnnnnnnnnnnnnnnnnnnnnnnnnnnnnnnnnnnnnnnnnnnnnaggtgctagaattggtatgaagggttaactcaagtcaaattgtacttgatcctgctgaaatacatctgcagctgacaatgagagaagaaacagaaaatgtcatgtgatgtctctcccataagtcatcatgggttttggatttgttttgaatatttttttctttttttcttttccctcctttatgacctttgggacattgggactacccagccagctctccaccatcagtgtaactccatggacattgctgctcttggtggtgtggttatctaatttttgtgata

SEQ ID NO: 11386 - DNA, 757 bp, Macaca Fascicularis
  misc_feature (1)...(757): n = A,T,C or G
aaacacactgacggagagcgaggcccgctacagctcccagctgtcncagttacagagcctgatcaccaatgtggagtcgcagctggcggagatccgctgnnnnnnnnnnnnnnnnnnnnnnnnnnnnnnnnnnnnnnnnnnnnnnngtgcccggctggagtgtgagatcaacacgtaccggagcctcctggagagcgaggactgcaagctcccctccaacccctgtgccacaacaaatgcatgtgacaagtccattgggccctgtatctctaatccctgtggcccacgtgctcggtgcgggccttgcaacacttttgggtgctagaggccccatgaccaggaggagaagaaaggcatcagtcacacctcaactctacttcatcccaacatctccaacagtgaacacactttggaaagaggcagaaactttctatcagccctggcttccaggggtcagctctaacctcccactgtattccctggcttgattcttcagcataaggctgcaaaatctgtcttctgagtcacatagagagacctacagcaggatcaagatcaagtaatatctatcatcataaagacgcatttgcataacatgttatacttgaacaaaacttatctaaatgcaatttagggaaaattcaattaattnnnnnnnnnnnnatgggcatgctatgaaacagaacataattggaataaatcttccttgtcactcttggtctttggagacgcaatagaaatcctttgtaacctccta

SEQ ID NO: 11387 - DNA, 729 bp, Macaca Fascicularis
  misc_feature (1)...(729): n = A,T,C or G
gccatataaatatgtacatgtgtatatagatttttaggggaaggagagagggaagggtcagggtagagacacccctcccttgcccctttcctgggcccagacgttggggggagggagggaaaggatttttacatttttttaaactattttctgaatggaacaagctgggccaaggggccccaggccctgtcctctgtccctcacatccctttgctccgttcattcattcaaaaaagcatttcttgagcaccttctgtgcccagcattatgctaggcacaccagctaagtgtgtgtgtgggggggtcnnnnnnnnnnnncnnnnnnnnnnnnnnncccacccgacttcaccggtgcctttgcgggatctgtaggaggtgggaccttttgtggggtttggggatctccagggagcccgaccaagctgtccccctcccctgtgccaacccatcccctacagccccctgctggctgggggcagctcccaggatatcctgccttccgactcttgtttctgaagcccctcctcctaacatggcaattccggaggtcaaggccttgggctccccccgggtctaacggttaaggggacccacataccagtgccaagggggatgtcaaatggcgatgtcgttgtgcccccttaccccagagcaggtgggggggcgagtatggttggcctgcatcaggtggccttcccatttaagtgccttctctttgacagagcccca

SEQ ID NO: 11388 - DNA, 889 bp, Macaca Fascicularis
  misc_feature (1)...(889): n = A,T,C or G
aatgtacttgannnnnngaaatacgaagctantcagttaacttnnnnnnnnnnnnnnnnnnnnnnnnnnnnnnnnnnnnnnnnnnnngtacctggtggcaaagctactttggtgatgaagaaaggagatgtggagggcagtcagtctcaagatgaaggagaagggagcggtgagagtgagaggggttctggctcacaaagcagtgtcccatcagttgaccagtttactggagttggaattagggtgtcatttannnnnnnnnnnnnnnnnnnnnnnnnnnnnnnnnnnnnnnnnnnnnnnnngaaatccttggtagctcttgctctgatttttgccattcagaaatgtgacccagctccattttacttgtttgatgagattgannnnnnnnnnnnnnnnnnnnncagaaaggctgtgtcagatatgattatggaacttgctgtacatgctcagtttattacaactacttttaggcctgaactgcttgagtcagctgacaaattctatggcgtaaagttcagaaataaggttagtcatattgatgtgatcacagcagagatggccaaagactttgtagaagatgataccacacatggttaattggaaaatactacctactggtttgggagatgtgtatagtaatgattctcatacccaggaactgtgaatttaaacctaaatatttggccattattaatagttttcagacttaaagcatcatagtccttttatatttgtctttgtattttataagatactctgtaatgtcatgtttgtacttaatagtttaagaattttatttcctgtacaactttttgtaaaatgtcctgctattttaaatcttttgaaacatgctaaatattctttcctaattgttttatcacttata

SEQ ID NO: 11389 - DNA, 707 bp, Macaca Fascicularis
  misc_feature (1)...(707): n = A,T,C or G
cagggagcagcctgcnnngtctcacgctgattggctctcctaattttgggtacaggtcagttcaccgggacctggaggcccagattgcgatcgtgacagagaacgaggccctnnnnnnnnnnnnnnnnnnnnnnnnngagcannnnnnnnnnnnnnnnnnggtggtgtcctctgccaccttcgagcagccgagtcgccaggtgaagctgtgggtgaagatggtgactccactgatcaagaacttcttctgaggacagacaggttaaaggtccagacgtaggtggggccgcggatgcgtgttttgtacacgggacactcatagatgttcttggtctccatgcggtccacaggaatggccttgatgaagatgacaggcatggctggggtcagctccttcagccgcgnnnnnnnnnnnnnnnnngtctgggtgtcccagcgagcccctgcagggacagtatggctgagggccggnnnnnnnnnnnnnnnnnaagggaggggtcctccctttgcannnnnnnnnnnnnncccnnnnnnnnnnnnnncaggtgccacagcaggaagcagaggccttcgtaggtgatggcgtgcatgttgtaactaccccgtctcgctgggcacaaggaaccgctcagctaaagccctcgggttccatccgtttaaatctgtggcgttttcagagcctcatctgtcagccttaatgtcagtgg

SEQ ID NO: 11390 - DNA, 780 bp, Macaca Fascicularis
  misc_feature (1)...(780): n = A,T,C or G
ttagatgacgtgatcaaaagagcaaacaatacttnntatggcttnncggcaggagtctnnnaccaannnnnnnnnnnngccgtaaccatctcctctgctctgcaggcaggaacagtgtgggtgaattgctatggcgtggtaactgcccagtgtccctttggtggattcaagatgtnnnnnnatggacgagaactgggagagtacggtttccatgaatacacagaggtcaaaacagtcacggtgaaaatctctcagaagaactcataaagaaaatacaagagtggagagaagctcttcaatagctaagcatctcctacagtcactaatatagtagattttaaagacaaaatttttcttttcttgatttttttaaacataagctaaatcatattagtattaatgctacccatagaaaacttgacatgtagcttgttctgaaagcattatttgccttctgaaatgtgacccccaagtcctatcctaaataaaaaagacaaatttggatgtatgatctctctagctttgccatagttatggggtttttctttgtagctgcttttccaggataatcattttatagaaagggaacagttgcatttagcttctttcccttagtgactccttgaagtacttaacatacatgttaaccacagtaaattgctctgttcccagtagttataaagtccttggactgttttgaaaaatttcctaggatgtcagtctgcttgtcaaatgaaataatccctgtaatatgtagctctatgggtagtattaatacta

SEQ ID NO: 11391 - DNA, 717 bp, Macaca Fascicularis
  misc_feature (1)...(717): n = A,T,C or G
gcgcctgctgacggcgcggccctggagcacagcgaggaagacggctccatttacgagatggccgacgaccccgacgnnngggtgcgcagccggccctgcgcccgcgacgcccaccgcaaggagatttgctccgtggccatcannnccggtgggcagggctaccgcaacttcggcagcgcactgggcagcagtgggaggccggccccgtgtggggagaccaacagcaccctcctcatctggcaggtgcccttgatgctatagcccctcccgtctcccctcagagggcacagctgcaggcctgnnnnnnnnnnnnnnnnnnncttgtgctctagagacctgcacgggatgtgtggttgggcctggactctccagaaactacttgggcagagcaaaggaaaacctcttctttttaaaaaaaattttcagagtgttttggggagaagttttagggcttggggagagggaggacacatctggaggaaatggccttctttttaaaagcaaaaaacacaaaacctcacaactgcctggcaagcccagtatcacttgtttgggccctagcggggctccaaggcagccacacatccctcctggaagggtgtgtgcatgtgagtgtgtgcgagtgtgtgggctggtgtgtgaatatctataaatacgtatatatggtgtatattatatgtgtataaataaagtctgtacatattggagctctgggag

SEQ ID NO: 11392 - DNA, 708 bp, Macaca Fascicularis
  misc_feature (1)...(708): n = A,T,C or G
tacatttgaagcagttgatataatgggtttatactttaaaagagatatggtgccatgaagttggggagttgggtgaattttccnnnnnnnnnnnnnnnnnnnnnnnnnnnnaatgccctttaacttctaggttttgtgcaagaagttcattttctgagtaaaagttattttcatatatgttgggggaaaattaactcatcaaaaaagaatcttattaggtatttgaactctgaaactaacagataagacttatatgtaccttattagagcaccaaaactaatttgctaaaatcttttgtttnnnnnnnnnnnnnngatgcttaatacacagtctgttctcctgtgtctannnnnnnnnnnnnnntttgcttttctgttttgtatcctggtagcagctgttgagtgactttcattggagattggaaaggaagtgaggagaaagtgttcttgtttagtgttttatttcctataataggatgctgccnnnnnnnnnnnnnnnntatgtcctgttcactaaatattccaggtaattgaaagaaaataaaatggatgggctccgttaaaaccagctcaaaaataaattcttgtcagtaaagatttcttgtcaagatgtcttggattgcacttttgttgaggaaagacagtgtaaatagttaaagaatgtggataaaattgaaacatttggttgtggaactgtgtgtggtttta

SEQ ID NO: 11393 - DNA, 752 bp, Macaca Fascicularis
cagtgagggtgacgtcggcgccccgcgtcagtagcatgcggatcacctcgatgtgcttgtgctctgcagcccagatgatgggcgtccacccccccactgtcctgtgggtgggaagggagtgagggtgggggcggctgggcctgctcaccaaagctgcaaatggtcaagattggctgtgtgtgtgaatcccagctccaccattcacgagctgtgggacccgggccaggagctggtcatggaggcgcgtgcctgtagtcccagctactcatgtgactgagatgggagtgtcgcttgagcccaggatttcgagaatgcagtgaactatgactgtctgtgaattgctactgtacttcagcctgggtgacacagcaagactctgtctcttaaaacaaaaaacaaacaaaaatttcctcagtctgcccattcacaagtcctagaagcagtgaccacccagtaataataaacactccgaggtccatagactattctctaaaacatgtttctggccggcgcagtggccagatcacgcctgtaatcccagcacgctgggaggccgaggtgggtggatcatgaggtcaggagttcaagatcagcctggccaatatggtgaaaacccatctctactaaaaatacaaaaattagctgggcacggtggctggtgcctataatcccagctactcaggaggctgaggcaagagaatcactgaacccaggaggtggaggttgcagtgagccaagatcacgcaatgcac

SEQ ID NO: 11394 - DNA, 788 bp, Macaca Fascicularis
  misc_feature (1)...(788): n = A,T,C or G
gtagaagtgattgacctaaccatagacagttnanntgatgaagaggaagaagagccatctgccaagaggacctgtccttccctttctcccacatcaccactaaataataaaggcattttaagtcttccacatcaagcatctccagtatcccgcaccccaagccttcctgctgtagacacaagctacattaatacctccctcatccaagactataggcatcctttccacatgacacccatgccttatgacttacaaggattagatttctttcctttcttatcaggagacaatcagcattacaacacctccttgcttgccgcnnnnnnnnnnnnnnnnnnnnnnnnnnnnnacctcctacactcgtctcggttttttccgtatacctcttcacagatgtttcttgatcagttaagtgcaggaggcagtacttctctgccaaccaccaatggcagcagtagtggcagtaacagcagcctggtttcttccaacagcctaagggagagccatagccacaccgtcacaaacaggagcagcacggacacggcatccatctttggcatcataccagacattatttcactggactgattcccaggccctgctgcttccatccccaccccagatcaaatgaacttggcagaaagaagagaactttgtgctctgttttaccttactctgtttagaaaagtatacaagtgtgtttttttcctttttttagggaaaaaattaaaagaaatgtacagagaacaaaactatattttcagttttacttttgtatataaatctaa

SEQ ID NO: 11395 - DNA, 768 bp, Macaca Fascicularis
  misc_feature (1)...(768): n = A,T,C or G
caacggaaaccatncnnngnngcnnnnnnnnnnnnnnnntgattaaaaggctgaactgcatgaatctgctaattcccattatttctccttaatatgttacttatctactttttatttcctttcattcactaagtcatttgagactgacagctttgcaggtagcagtagtgtgtgctgctattgtagaatatacatgtgtagagtttttgattagtttaacagtgcactggtgaagaggacatgttagagcaacataagtaaactacttgaaaaaaattgtatatattacctaactcctagtgtagtactggttctaacaagtaacaagcaagttttaaaattttaatattttggctttcattacttcatcttaattatagctttgtatgttactcttatttaatataatctctattgtattgatttcttctgtatttaccttttggattttgtaaaacagaagtttaagaccacaagttagaagaaaggtcacatatttcaaacacaactagatggggctctgaaagatttgtatctctgtgcttgaacttgaatggccttaaacctgtttcagcttnnnnnnnnnnnnnnnnnnnnnnnnnnnnnnnnnnnnnctggtgtaacttatgtgactctagtgcttaacagctgccattgaagctaataattcagttctgtagagttagaataccttttgttgttgaagatgtgaatgaagtatgcatgtgcattgactgttgaattcacttttgtgccattttgaaaaca

SEQ ID NO: 11396 - DNA, 790 bp, Macaca Fascicularis
  misc_feature (1)...(790): n = A,T,C or G
cttacacacagttgtcaaannnnnnnnnnnnnagaccaatcacnnnnnnaggacatacctcccaactnncctgactcttttgttattgaaaaaacaaacaaacaaaaactcctttatgatgatattcaacttgagtgggtattttttttcccactttggtcctggatataatgaaatgatacatattaggataaattttcactgtgtatannnnnnnnatgaacacacatgccnnnnnnnnnnnnnnnnnnnnnnnnnncattttgggttacgataattaaccttgattcatgtattgggaagctacagggactacgtaatgcctgcttatcacataggaaaattatgtccataattctgagctcccttcttcaaaagtttcctcctgggttttctatgttctctctttatcctgaaatacatttattaggttgtgaggtatgtttaaggagtagaagccgggggtnnnnnnnnnnnnnnnnnnnnnnnnnnnnnnnnnnnnnnnnnnnnnnnnnnnnnnnnnnnnnnnnnnnnnnnnnnnnnnnnnnnnnnnnnnnnnnnnnntcaatatctataattctatgatttttttttaattatgggaaattaatgaaagatgtttacatgagtaatgtttgcccttactgtgttatgaatgagttttttgtagtgtgtctgggtgcatgatgcaagagagtaggaaaaatgtttctgaaacaaaacttgacaaatatttgtaatgaaagtaaatttaaagattgctataattgcgctatagaaacaatgcaag

SEQ ID NO: 11397 - DNA, 1356 bp, Macaca Fascicularis
  misc_feature (1)...(1356): n = A,T,C or G
gagcatctcaggacatcatcctgaaacttgnnnnnnnnnnnnnnnnnnnnnnnnnnnnnnnnnnnnnnncattgggtttatgccaacaaaaggagagggagccataggttctctagattacactcctgaggaaagaagagcacttgccaaaaaatcacaagatttctgttgtgaaggatgtggctctgccatgaaggatgtcctgttgcctttaaaatctggnnnnnnnnnnnnnnnnnnnnnnnnnnnnnnnnnnnaactggctaggcaaatcagttttaaggcagaagtcaattcatctggaaagactatttctgannnnnnnnnnnnnnnctctttttcactaactgatttacaagatgatnnnnnnnnnnnnnnnnnnnnnnnnnnnnnnnnnnnnnnnnatggagtccagaattcctcggcagcatcctttcatcaacctacccaacctgtagctaagaatacctccatgagccctcgacagcgccgggcccagcagcagagtcagagaaggtcttctacttcaccagatggaatccagggccgccagccaagagacacccacactgatcatggcggatcagctgtactgattgtcatcctgactttggcattggcagctcttatattccgacgaatatatctggccaatgaatacatatttgactttgagttataatattgttttgtgacttaagagctgtgactcaactgcttcattaaacattctgcattgggtataatctaagaattgtttacaaaaaagttattttgtatttacccttcattcctttttgatccttataagtttagtataaatatatctagacattcatactatgtctagcagttatgtcctgcttaaagggaccggaagtcaaagttccttgtctcactatttgatctgctttgcagggaaataacttgttttttctcatgctttaccttctttttatgtaaatttgtaatactttcctatatagctctttgaaatttttggataaaagatgatgttttaagttctagtgagtattactagttactcaataccacttattgagtacactgtttctacgtatgtagaatgtatagggatagaagagttaaaaagggaaagcaaaactcctcaagtagcttccttaaaatgtcatttataggagatgtttataggaattgcnnnnnnnnnnactttatttgtgtcctaaacattcttcagtgaaaataattttatttcagtcaaacatttatgaggaaatgagatcacatctttgtcactggatgctacttgaagagggagtactttnnnnnnnnnnnnnnnngctgttatcatcaccgctccctgccccctgctgc

SEQ ID NO: 11398 - DNA, 727 bp, Macaca Fascicularis
  misc_feature (1)...(727): n = A,T,C or G
cagtcctcagtgaanagaaaggaaagcgttaaggactttagacagaacggcattgtgtaactnnnnnnnnnnnnnnnnnnnnnnnnnnnnaggcatttaggtaaaattttctaatacctaaaaattgtcaaaaacagtcgataaggcttctgctggtccaaagactattttggttcacctcctcttttttcctctttttttttttttttttcctgagacagtcttactgggtcgcccaggctggtgttcannnnnnnnnnnnnnnnnnnnnnnnnnctccgtnncangggnncaagtgattctcgtgcatcagtctcccgaatagctggaatnnnnnnnnnnnnnnnnnnnnnnnnnnnnnnnnnnnnnnnnnnnnnnnnnnnnnnnnnnnnnnnnnnnnnnnnnnnnnnnnnnnnnnnnnnnnnnnnnnnnnnnnnnnnnnnnnnnnnnnnnnnnnnnnnnnnnnngcagacgagccaccatacccgtccttcttttttgcccttaaaagtaagggatgtgggtttgtttaaaaaaaacaaaaaaacaaaagcgaaagaaaaaagcagcatacatatgcaaaactatatatatgtatatgtagagaaatacttcccnnctgatgatttttaaannggcttctgtattggatattgtgttttaaccataattttaannnattnnatggaatcatgaacagggaagaactcnnntacaactatgcaga

SEQ ID NO: 11399 - DNA, 729 bp, Macaca Fascicularis
  misc_feature (1)...(729): n = A,T,C or G
attgctnnnnnnnnnnnnnnncaaccagggctgggcaggnnntagggtgtgtggaccaaacccntntggggttggcaaagctgcctgtcaggcctccaggtgggggcccttggacacagggagcagaccctctgcctcacagggcaggagtagctgcctcctgggttctctggatttcttctcccaacaactacaaccctggacttgcctccccaggcctcttgcctgtaaatagaagcccgcaaactgtacagattttcagaggcatcgagactgggccccgggagttgccatctgagagccgatggccccagcatcccccaggtgcctgcctggcaccacagtgaccctggcctcagcgtggcaaatgcatgtaaatatttttcgtaggcggcgtggctccagagagccccctgaagacagtgtccctccctctggtgagtcctttctcctgtacagaactggctaggggtgggtgggagtctgccgttccctcccccaggccttccctgccccttctctcccctgtaacctgtttattaactgtacctgtcctgagttcatggccaaaaccttaaataaggaaaaagacagtggaaaaaagagaccaaggcgcctgccccgctgcgggtactcacctgttccagccnnntgaaggaactggttttgtttttgttttttttttttttgagtttttttttgtttttagttctttagttttttaacact

SEQ ID NO: 11400 - DNA, 711 bp, Macaca Fascicularis
  misc_feature (1)...(711): n = A,T,C or G
ctccatnnngatttaatacatagactccttgtggccacccctnntatcgagcaannnnnnnnnnnnatcttggtggggaggattataagctttttgacttggagtggtagccccgttctgaggacattaggttgaagtcttagttggaccaggttcacaaattttaagaggtaggtgattgataatataagnnnnnnnnnnnnnnnnnnnnnnnnnntcccagcttcttgcctcccttcagaattcagaaacgtattatatcagcccttgagaacccctagttcccaaccccacaaagggcnnnnnnnnnnnnnnnnntttatttttatgtatttgattccttttaggaagaaaatatccacccccttacaagcatttctgnnnnnnnnnnnnnnnntttggcccaaggctgggggctatgttttgtgtgtgtgtataaatttgcactgaagtcttgtttcagaaaccagaccactgaggagagcctgctgagctgaggccatggcctgcgtggcttggggaaatgagttggtggataccttctgggcttttgaacttgcccctcccccatttccctctcccccatgtgtctgaccctgtcttacccatttnnnnnnnnnnnnnnnnnnnnnnnnnnnnnnnnnnnnnnnnnnnnnnnnnnnnnnntttgatttctggaaggcatgtagtttcaacttgtaacaaaaatat

SEQ ID NO: 11401 - DNA, 759 bp, Macaca Fascicularis
  misc_feature (1)...(759): n = A,T,C or G
agatgagacgnatccttcatgnnnnnnncagcnnnnnnnnnnnnnnnnctgtgatcactccagtggtgaagggtgtggctctgtgtcttccagagagactgctcccttccctccagcagcactccaggtcccacccatgttggacaaaggaacagggcttggactgaagtcatgtttataccctctgaattggagggcagtgccagggcatttaccgaagatgggaaggaccaagcctcaacatccccagggctgcgggggtcttgtttgctgcacgtggcagtatagctggagaggaagcctggggcgcgtcctgtgtggtgccaagaccccacccctgccccttttccttccaggnnnnnnnnnnnnnnngtttatggtgggctcggggggaggagacactaagggccccacaggcttgtcttcatggtgttgcaagccaagctggcccctgcctgttcctgtagctttggggccaggtcagccatggccccacctaccagaactgtgctctgccggcagctgtgcttgtgccaaacccagggcctcagcgaccatgacttctgctaaaannnnnnnnnnnnnnnnnnnnnnnnnnnnnnnnnnnnnnnnnnnnnntgttgaggggctctctttggagcaacctaagagccgactgtaccacccaactgtgagccctcagtcccttcnnnnnnnnnnnnntcattgtgaattgtggaaacgcctctggggataagctgaggtgactaaatgatatat

SEQ ID NO: 11402 - DNA, 752 bp, Macaca Fascicularis
cttcaatgccatctgttagacacttcaatattttacatggttttcaatgtacactgtaccaaaatttctataaataaataactttgtacataaaagtaatacttcctctttcacattgcctctcagaagcagcaaattcacatattttgtggaagtaagattagtcagttaactgtcaacaaaattctaaatatgcttaccttttgaacagtgatgacacctgacagtaattgttaactattttctccgtaactcccttcagcttttggccaaaggaacattttaaggaccttgtttctatgtaagttttactaaattacacattggcacttacaagatggttagctaccagtctcaaaagtgcaaatatacccagaacccaggtcaaggtctaagtcttttccagtcccagctcagtttcatctgtgcgtgggaatggcatggacaggcctgctctggatcctcagtagaaataaggtagccctgaaaagaaagaacttcctcctttctatcccccaaggccaatgtaatactcactcattatattggcagaacgaaaacagcactatagaaaaatccacaggtaccaacaccagcagcctttaccttaattaaaagtctcaactagcgatcgaatgatactgagaaggccacatttgcttttatcataaaatctgaggaggaggaaaggcagtgcttcattaactgttctgaccatttgcttgtgatgggttacaccctcattctatgcc

SEQ ID NO: 11403 - DNA, 743 bp, Macaca Fascicularis
  misc_feature (1)...(743): n = A,T,C or G
gccgacggtgacngnnngcgtgccactgccannnncccgacctggggggcctggaggnnnngaggcagcgggagaaacgccccaacatggcgcagcgggggagcccaggagnnnnnnnnnnnnnnnnnnnnnnnnnnnnnnnnnnnnnnnnnntgtacgagtccttcctctaccggcgggagaaggcagccggggagaaggtgtattggacctgccgggaccaggcccgcatgggctgccgcagccgcgccatcacccagggccggcgggtcatggtcatgcgcagacactgccacccacccgacctgggtggcctggaggccctgcggcagcgggagcacttccccaacctggcacagtgggacagtccagaacccctccgaccnnnnnnnnnnnnnnngacttccctggggggcaggttcctggtgcacgagtccttcctctataggaaggagaaggcggccggggagaaggtgtactggatgtgccgggaccaggctcggctgggctgccgcagccgcgccatcacccagggccaccgcgtcatggtcatgcgcagccactgccaccagcccgacctggcaggcctggaggccttgaggcgaaaggagcggctccccagcacggcccagcaggaggatccagaaaagattcaagttcnnnnnnnnnnnnnnncgtgtcctcccgaaagccagccgatgtatgggtaattgtattagttatctaatggtgcatgaccaata

SEQ ID NO: 11404 - DNA, 713 bp, Macaca Fascicularis
  misc_feature (1)...(713): n = A,T,C or G
agcnctgctgccacctttnnnnnnnnnnnnnnnnnnntnnnnnnnnnnnnnnnnnnnnnnntactggtggcctcgcttcttcccattgaaactactcttgtctacttagatctcttcttgctggctgtgactcctccccgactagtgaccaaggtgcttttcttcctcccaggcccagtgggtagaatctattcccacccagcgctgaggagagtggtagagagaggagacagagagagaacatgatttttggccttgtggcagcacatcctcacacccaaagaagtctgtaaatgttccagaacaacctagagaacnnnnnnnnnnnnnnnnnnnnnnnnnnaaggatgggagactgggatagcttcctatcacagaattgtgctccatcaaaaagatactaagggatttccttctgggcctcagttctgtttgtaagatggagaataatcctctctgtgaccnnnnnnnnnnnnnnnnnngaggctaagagagtatcaagtccctaggtgtagaggaaaagtggaaaagagtagtactattgtccagtgccattaaagtggtaaaagtgggagccagtgtgcttcgaaaccaaattagaaacacattccttgggaaggcaaagttttttgggacttgatcatacattttgtatggttgggagtcctctcttcgggagattatatcctgtttaaggagacctcttttcagtt

SEQ ID NO: 11405 - DNA, 766 bp, Macaca Fascicularis
  misc_feature (1)...(766): n = A,T,C or G
agctcgagtccccgaggacatcagggcagccctgaggcttactgcaagaagtannnnnnnnnnnnnnnnnnncggaccctcagttggaagcacaccctgggcctgnngaccatgnnnnnnnnnnnnnnnnnnngcacgctgtctgtggcgnnnnnnnnnnnnnnnnnnnnnnnnnnnnnnnnnnnnnggaccaagccagctggaccctggaggaactgagcaaggcagtgaagatgcccgtggcnnnnnnnnnnnnnnnnatgtctgtgtggctgcagcagggcgtgctgcgcgaggagccccccggcaccttctgtgtcattgaggaggagcggcctcaggaccgggacaacatggtgctcctggacagtgacgacgagagcgactccggcatggnnnnnnnnnnnnnnnnnnnngaggaggagctgctgctcttctggacatacatccaggccatgctgaccaacctggagagcctctcgctggatcgtatctacaatannnnnnnnnnnnnnnnnnnnnnnnnnnnnnnnnnnnnnnnnnnnnncctgcaggagctgcagggctacctacagaagaaggtgcgggaccagcagctcgtctactcggccggcgtctaccgcctgcccaagaactgcagctgatgcacccgcccgcctgcccgccaggtgctgccctgcaggtgctctcgtcctcccatgccagcccctgcccgcctgtgtcccagaatgcactgctcaggggcacgcccactcccacccccaca

SEQ ID NO: 11406 - DNA, 729 bp, Macaca Fascicularis
accgaggcaggaacgctgacgataagcatgtgtcctttctgagaacctgccaccatctaataaactgtgtcctttctgagaacctgccaccatctaataaactgtgtcctttctgagaacctgccaccatctaataaacttggactgctgagtgggaaggtgacaggtgggaaagcagtaggcctgtgactggcactgcttgggggcctgggtagtacccaatggacatgacagtcacagtgttgttggccttcagggactcgcgggccccgccaagagtgcagaagaatatgcgcaacaactccaaggactcagagtactggcaggccctgaccacggtaatcccttcctccaagcagaacctctgggatgccctctacacagccttggagaagtaccacattgtcttgacccagagggccaagctgctgctggaaaacagttctctggagcagcggaacacagagctgcaggcgctgctgcagcagtatctgaactccaagatcaactcggaactgcaagttcctcccactcaggtgttgcgggtacccacaaaatagagctggaactccaaaggctgatgtgttagggctggcctgatgctggtgtctatgcgggagccagctcatatcacccactgggacgcacctgggccggctctctggattttccagggctgtctttatagcctgtcgaaataaggagccagaggagttacctgttcctgca

SEQ ID NO: 11407 - DNA, 981 bp, Macaca Fascicularis
  misc_feature (1)...(981): n = A,T,C or G
agaatctacagcagnnnnctgccttcaattcctatacctgctcctccgattctgctttgggtcccaccagcaccgagggccacggggccctctccctttctcctctcagcagaagtccaggttcccatgcagactttctgctgacccctctgtcacccactgccagtcagggcagtccctcattctgcgttgggagtctggaagaagactctcccttcccttcctttgcccagatgctgagggttggaaaagcaaaagcagatgtgtggcccaaaactgctccaaagaaagatgagaacagcttagttcctcctgcccctgtggagagcgatggggagagtgataattcagaccgtgttcctgtgcccagttttcaaaattccttcagccaagctattgaagcagccttcatgaaactggacacaccagctactgcagatcccctctctgaagagaaaggaggaaagaaaagaaaaaaacagaaacagaagctcctgttcagcacctcagtcgtccacaccaagtgacactactggcccaggctaccttctccatctggtttttggtttttgttttttacccccatgcttttgtttggctgctgtaatttttaagtatttgagtttgaacggattagctctggggggagggtgtttccacaatgtgagggggaaccaagaaaattttaaatacagtgtattttccagcttcctgtctttacaccaaaataaagtattgacacaannnnnnnnnnnnnnnnnnnnnnnnnnnnnnnnnnnnnntttagtctttttgacccatgtgtaattaatttttctcaacccaaaataagactgaatcccttcgagatgcattagagcagtccaacccggaannnnnnnnnnnnnnnnnnnnnnnngcatcatgtcaggccttcctgggctcagcacacctctgtcttttaaaaaacagctgaatctttactacctatttagtcttctg

SEQ ID NO: 11408 - DNA, 704 bp, Macaca Fascicularis
  misc_feature (1)...(704): n = A,T,C or G
cacagccaatgtggaacagagcccagggccaggcagactggggcagcgactagaaaaggaaaactaaagnnnnnnnnnnaggatcaggaannnnnnnnnnnnnnnnntgaagctcttgagctcttaggaaggttcccgtggttggaaagaacataatggttaacaaatatcccggcgtccagggattgtccagctatagtgtgggtggccccctgcactctgattatggaacctgtgcaagggtattgagtgtgaggctgaggtgggacatttgctgagccaggagagcagatgtgaatggcaggcaggtaacatgcatacacgaagctggctggatgtaaggcagtagcggggagcggcatgctgtctaacagttgttagctccaggtggttgttgccatgtgggaatggattttctcatttatttcttcagagaagctggaaacctagatatttgtgtgaaannnnnnnnnnnnnnnnnnnnnnnnnnnnntttttaaagacgcttaggcagctaaggaaataatacttgcaggtttaatttgctctataggctagcagtttgcagtctatgtttaatgaatggtatagaagtttggggaaaggtgccatcttgaannnnnnnnnnnnntggttggcattttagctgcgtgtagtatgtgtcctttctagacttggagtatggctttggttggtccgtgaat

SEQ ID NO: 11409 - DNA, 717 bp, Macaca Fascicularis
  misc_feature (1)...(717): n = A,T,C or G
ggccccagccgcacggcgagccgccggggggtccggatgctgttgatggagtaatgaatggtgaatactannnnnnnnnnnnnnnnnnnnnnnnnnnnnnnnnnnctatttcacaagtggatcgattgcagtcagagnntgaaagtatccgtaaatggagagannnnnnnnnnnnnnnnnnggaagcccttgatgccaattctcggaagcaagaagcagagtggaaagaaaaggcaataaaggagctagaagagtggtatgcaagacaggacgagcagctacagaaaacaaaagcaaacaacagggcagcagaagaagcctttgtaaatgacattgacgannnnnnnnnnnnnactgagtgggaacgggtggcccggctgtgtgactttaaccccaagtctagcaagcaggccaaagacgtatcccgcatgcactcagtcctcatctccctcaagcaggccccgctggtgcactgaagagccaccctgtggaaacactacatctgcaatataatcctactcagtgaagctcttcacagtcattggattaattatgttgagttcttttggaccaaacctttttgtctttagagttgatcattgtttgtgattgcatgtttccttcaactgtgttctccctggcattcagagaggagggggaggagcaagaggaaggggagggaagcctcccaacagtagcctcaacctgtgcttttgt

SEQ ID NO: 11410 - DNA, 769 bp, Macaca Fascicularis
  misc_feature (1)...(769): n = A,T,C or G
atgtagtatgaannnnnggaagagtggattcagcnnngataatggagaactcagaagctaccaagatccatccaatgcccagnnnntggagtctatccgcagaggggaggtgccagcagagctgcggaggctagctcacggtggacaggtgaacttggatatggaggaccatcgggacgaggactttgtgaagcccaaaggnnnnnnnnannnnnnnnnnnnnnnnnnnnnnnnnnnnnnnnnnnnnnccccccaggtgttgagtaccagctctccagcccaacaggcagaaaatgaagccaaagccagctcttccatcttaatcgacgaatcagagcctaccacaaacatccaaattcggcttgcagacggcgggaggctggtgcagaaatttaaccacagccacaggatcagcgacatccgactcttcatcgtggatgcccggccagccatggctgccaccagctttatcctcatgactactttcnnnnnnnnnnnnnnnnnnnnnnnnnnnnnnnnnnnnnnnnnnnnnnnnnnnnnnnnnnnnnnnnnnnnnnnnnnnnnnnnnnnnnnnnnnnnnnnnnnnnnnnnnnnnnnnnnnnnnnnnnccatggccagtggccatgccccatgaggatcgcccctcctgcccccttgtgcacacccagcagtccagtgcgacgtctcctctatagctctgggttcttagatcttggttggacatttgttttcnnnnttagttgcatttcctgggtttttgtgacgatca

SEQ ID NO: 11411 - DNA, 710 bp, Macaca Fascicularis
  misc_feature (1)...(710): n = A,T,C or G
caagatgctccaggaaaatcgcgagggtcgggcggccccccgacagtccagctcctttcggctctnncaggaagccctggaggctgaggagagaggtggcacgccagccttcctgcccagctcactgagcccccagtcctccctgcccgcctccagggccctggccacccctcccaagctccacacttgtgagaagtgcagtaccagcatcgcgaaccaggctgtgcgcatccaggagggccggtatcgccaccccggctgctacacctgcgccgactgtgggctgaacctgaagatgcgcgggcacttctgggtgggtgatgagctgtactgtgagaagcatgcccgccagcgctactccgcacctgccaccctcagctctcgggcttgagcccaccatgccctcagcctgcctccctgctgggccagggtcatgcctatataagctggcatggcagggacaatggtgggcagttgctcttacatgagctaagtttggagacctgaggcccctttgtcctcactgggtgggccaaggtctgggacctgtgttggactgtgggagtctcaccctcaccctgccaggcctctcccctgcaggactggtactgcactagtctgaggtggccactgcctttgatgaaccnnngtgtgccagggtataagtagggtcgaacacagaagtgggaaggagagaggtgggccagggg

SEQ ID NO: 11412 - DNA, 387 bp, Macaca Fascicularis
gactttgccctcagcaaagatgcctccccggtggtgagcacgtcaggagaccacaaagagaaagtattttgtgtccagagacgcgaccgttaaagggtgcagaccccgcccgtgtgtctggtgttgaggggacggagggacacctgcccccgcccgccagcagaggcactagggcacagagggaagaggagggtggggccccggatgactttccagcgtcttcaaatgacatgctcccctctcttttttttttctttagagagccagaccagggccctctcccccttgcccagagatggtgggcccttcagagggagggggggacacgtttttctttcacattcatatgctggtgtgagccacggggggtgtatatgtatgtgggga

SEQ ID NO: 11413 - DNA, 757 bp, Macaca Fascicularis
  misc_feature (1)...(757): n = A,T,C or G
cagtggtccnnnnnnnnnnnnnnncattctaatgcaatgtcctggctccacccttggccagctgtcctggtttcaccctccagcatgttctcacccaacaatgacagctgagtggagtgggaagggaagtcattctaaagagtccaaagtcagtagtgccacatctggtttataaagtaagagatccagtggggcaatactatttttgtatgtcaacctagataggattataaagcaagactgatttcttctgtggtttatgaatggaccttaaggtagttacaaacaggaaattccaagaaagcataacacaatgacaacatggtgaaaaaagtgcagtactacttccaaggtagctagtgtaaaggacacttgagtttttaaaaatgtggttaaatattttatgtggaatttgatgagtttgtatgttaaatatcactgcttgctgcttttactagaaccaagttaagggacacattagaaacagaacagtttaatatcactgacttcagagcaaaatgagctcgggtgactgcatattatgatggtaaatatggctttaattacaaacatgaggaatgattcactgaagatgagatgaaaaggacggatgtgatgtgaaaaacccaaacattttggcactgaacgatggctannntgttccaaatattccatcttttaagatgaactgcttaattattgcctcgctacccangattccattctttggaataattttnataatttcataactgtg

SEQ ID NO: 11414 - DNA, 917 bp, Macaca Fascicularis
  misc_feature (1)...(917): n = A,T,C or G
aagtaatgcatattccaggtaagacacttggaaaacagaacaacacagaaaaagccctcagtatctatccatcatccagagacagccactaacaatttggtataggccctttctttgaacatgtacccgaagacatctatatataattacattttaataagacttatacagtgaaggtatgaaatatcctgcttttctcacttaacaaagtatatcatgactatttcccaaatcaacaaatcatctcctacataagttttaatggctacatggtattctcttcccgtttttggatatctggattatttctaattgtttgctattaaatatccctgttacattcatcttctctgcttatctctttagggatagattcctagaaattgaattgttagatcagcttatgcgagtgtatttttaaggcttctccctttagaaaagtttcgcctttcacactcccaacaggaaagcgcacatgcctgtttcctcatacttgggacagcataaaacttgtattcattctcatttttgctcctctcttcctttttcttgggagtttttaaggaatgcagaaccagatgactcagctagtcctgtctnnnnnnnnnnnnnnnnctgacaccttgctattcccttttattcttggcagagtggtaccctgaagacagccctgctggactacatcaaacgctgccgtcctggagacagtgagaagcacaatatgattgccctgtgcttcagcatgtgccgggagattggcgagaaccacgaggnnnnnnnnnnnnnnnnnnnnnnnnnnnttgagtctcagccctggggtgagtgaggtcacagcagcactaccagaacagtgctgctagccgggtaaatgcttatcccaggctgnntgcatnnntgatctcactcactgcaactct

SEQ ID NO: 11415 - DNA, 618 bp, Macaca Fascicularis
  misc_feature (1)...(618): n = A,T,C or G
agaaatggccagcgccctaagcctnnccttactctacactccnnnnnnnnnnnnnnnnnnnnnntgcttctctttcgggtggtggtggttgttaatttcaggaatttagaagaatcattgctccgaccaatccactgtctcctgagttttctttattcatgttaagatggcaagaatcagagaacagggagacttggtgtgctttctaaaagcagctgacaggaggggacccacgttcacctgcaaagttgaagccagcccagctccaagagggcacatgggaaggcggggannnnnnnnnnnnnnnnnnnnnnnngggcttcactggggttccagacccctcgtgctgctgctccatctcgccccaccccagcattagtcaaaatgttctagggttttttggttggttggttggttcttaaaatcaaagaaaatggtcagactggaccccttatctctctctctacagactgcttcatggactctttgctgttgacgttgatctcctggtagcatgaccttttggcctttgtaagacacacagcctttctgtatcaagcccctgtctaacctacgaccccagagtgactgacggctgtgtatttctgtagaatgctg

SEQ ID NO: 11416 - DNA, 765 bp, Macaca Fascicularis
  misc_feature (1)...(765): n = A,T,C or G
attcagttcagctgtgnncangacgtnncctnnnnnnnncagccgatgtatgggacatcanngacgtcagactggacggcgagtcnnnnnnnnnnnnnnnnnnnnnnnnnnnnnnnnnnnnnnnnnnnnnggtggcttcccatccatacgggtgctnnnnnnnnnnnnnnnnnnnnnnnnnnnnnnnnnnnncattcttccaaagcatcgatggtcttcgcatcttctcagggtgtcccctgggaggaattcttggatggtgtccttgtgtcggcggagaagagtgctcagagctggcgcttgcagactcgggtgtcgtggggcaggnnnnnnnnnnnnnnnnnnnnnnnnnnnnnnnnnnnnnnnnnncttggacatnnnnnnnnnnnnnnnnnnnnnnnnnnnnnnnnnnnnnnnnnnnnnnnnnnnnnnnnnnnnnnnnnnnnnnnnnnnnnggccgcgcnnnnnnnnnnnnnnnnnnnnnnnnnnnnnnagaggtgcctccccttctgtcaggaagctgcnnnnnnnnnnnncagcagtcagagggagcagtccggagaagcaagatgaccccaccgggactgcagagcctcctgcttactaacaaggacccgtcctcagccgcgaggtccctcactcccaccctgtaattgtgggnnnnnnnnnnnnnnnnnnnnnnnnnnntggcaggttggccacggagcccaccatccattgcaaggctggacagcccgggcacccccgcttctcctctgcttgtac

SEQ ID NO: 11417 - DNA, 763 bp, Macaca Fascicularis
  misc_feature (1)...(763): n = A,T,C or G
tgtcctgccaaacnnnnaagccatacatccaggacattgagatggaagactatgatctgggtgggggcaggataacatagcttctccttacccagtgggtcccttcgatgctgagggtggtgagtatgtcactatgcaagggccttgagactgtttgctgtgggctctcctccagcttgcccagggcccacccagctgcctctggggttacccctctctgcttgtggtttttctgttggagatctgtaggtccttttcctgcctccttcacatttcctccccagcttttgtggccacaacatatcagtgttatttgggtgttttggcaactcaggggccttcggatgatcttgaacctttgtgttcagccagagcccctgtgccctggtaggctttggggttagtatctctcaggtaccctcagagccacctctgcctgtcatcgtctgatgaggctccctcccaacctgatccaaaagctgggctcacgagtttacccctgggatgggggatnnnnnnnnnnnnnnnnnnnnnnnnnnntgctctctggcaccccagctcactgcaagtctcaggagggataaccagatttctactcattcccctttcactcccacatcacacagaaaaatggcattcctctctgtctctccctggcattggagagggcagactgtgcacagttcactagggtccaaatacagaaggggccaggggccaggggcttgcagcttcctgaggggtctctggcccagttcctaga

SEQ ID NO: 11418 - DNA, 780 bp, Macaca Fascicularis
  misc_feature (1)...(780): n = A,T,C or G
ggaggaaacaaaccgagcaccccctgctcctgccaggcacttccggtgggaacatgccagacagccgacgatcgcacccagcccacctgtggaggtgccttccttctcaggccacagaaataaaccccagtgtactgcttattgttagcacaacatcaccagaaaacgataacgacagccaagcaggacagttaagtagaacttccacaccccaaactcagggagccctataaccttaaggagggagcatttgctacacaaaaacactatccacagccagggatgatgtagacacaagaataaataaggagaaaggggaccctagaattcatgtcccttacgcctcacagcgactaagcctggaaagctggttggtctagcatctacgcacaatatgtacaccttgttgggagagatgggggcagcccaggaaagctcctcagcaggctgaagagggagcaagatgggctgaggggagcttggggttcatgctgcggtaggannnnnnnnnnnnnnnnnnnnnnnnnnnnngggtgggaaagcaacaacacggacactgtcccaccctcaatcccccactggcacagggtcagacgatctgggtcaaagaaatggtggggcccttgtgatcatcnaagcgatccatggtcttgagactgaggatcatgtgcaggccgtaggtgaagatgaagagcatgaacagggaggtcagcagccccatccnnnnnnnnnngggnnnnaagctggcacagtcactggcatannnnnnntgctccccat

SEQ ID NO: 11419 - DNA, 741 bp, Macaca Fascicularis
  misc_feature (1)...(741): n = A,T,C or G
gccaaggacctagctacgnnnnnnnnnngacatgatgttctcctgaagannntctttgattgccacaaagaattccagacagttccattctacattttctcagagtcctatggaggaaaaatggnnnnnnnnnnnnnnnnnnnnnnnnnnnnnnctgttcagcaagggaccatcaagtgcaacttttccggggttgccttgggcgattcctggatctcccctgttgtttttcagtggcactcnnnnnnnnnnnnnnnnnnnnnnnnnnnnnnnnnnnnnnnnnnnnnnnnnnnnnnnnnnnnnnnnnnnnnnnnnnnnnnnnnnnnnnnnnntctattgaacaacgcannnnnnnnnnnnngattcggtgctctcctggggaccttnnnnnnnnnnnnnnnctcttctcgaagacaannnnnnnnnnnnnnngtccgaggttgcagagcaagtcctgagtgccgtaaataaggggctctacagagaggccannnnnnnnnnnnnnnnngcagaaatgatcattgaacgggtaaaaaggggacaaactcagaggccagcgtgcttggctttttctggtgggtacagggtannnnnnnnnnnnnnnnnnnnnnnnnnnnnnnnnnnagcctccccacgtatctgcaaatgattgcatgctaaataatacatctcttgggtctgagcagtgatgtagtggcttcttacagagtcagaaagccacccaggcctgcaagacttgct

SEQ ID NO: 11420 - DNA, 701 bp, Macaca Fascicularis
cataacaatgaggaacaacatgatcaagtgctgaaaaccagattggaagaaaaagttgaacaccttgaggaaggacctatgatagaaaaacttagcaaaatgttctttacaactaagcaccgttggtatcctcatggacagtatcacagacgtcgtacgaatctgaatcctccaaaagacagatgatgctgaggttcctgggggaatcaaagagaaatgtgcctcatttgccatttgagaaaatgtagtctggtgtattcactaatatacagtaaagtaataatgataaaatatcttttcatatattagaatgtgtacttttatataaagtagttatggatttgatgttcttatttagagaaacctattttctttttttctttttcgattttagtctttcatttatgtacagtctccaatttacgacttttccatagtgccaaagccatacatattcagtagaatatcaataaattacatgagaaattcaacactttattataaaagcgggctttgtgttagataattttgctcaactgtaggctactgtaagtgttctgagcatatttaagataggctagcattttcaatttacaatattttcaactgatagtaggtttattgggatgtaactctaccataagttgagaaacatctctttttgggtgtctactgtgatttaagtatttttaatcatcagc

SEQ ID NO: 11421 - DNA, 711 bp, Macaca Fascicularis
  misc_feature (1)...(711): n = A,T,C or G
atgacgagannnnnntttgcacagcattaataagaacctgataaagaaccatagtctgttgatagccagctcagnnnnnnnnnngaagcttggtgcaccctccagtgagacacaaggtctctcgtttaccaaagttaagaacagagctggtgcattaattaatagtcttggatatctggccatgggtaacctcattgtaactatcattagaatgggcagagatgatcttgaagtgtcacatacactaaaatccaaacactatgtcagatgggagtaaaatccattaaagaactggaaaaaaataattataagatgataagcaaatgtttcagcccagtgtcaattcagtgaaaaaaattaatgctgtgtaaaatgggttgaattagtttgcaaactatataaagatatatgcagtaaaaagtctgttaatgcacaccctgtgggaatggagtgttctaaccaattgccttttcttgttatctgagctctcctgtattatcatactcagataaccaaattaaaagaattagaatatgatttttaatacacttaacattaaactcttctaactctttcttctttctgtgataattcacaagatagttatnnnnnnnnnnnnnnnctgagtccttattataaaaaatcagttatcactataccatgctataggagactgggcgaaacctgtacaatgacaaccctggaannnnc

SEQ ID NO: 11422 - DNA, 711 bp, Macaca Fascicularis
  misc_feature (1)...(711): n = A,T,C or G
agntnnngcgcagnnnccgcaaacccttcagtgatatcattgagcccaagtttgaatttgctgtcaagttcaacgccctggaacttgacgacagtgacctggccctattcattgcggccatcattctgtgtggaggtgagtgagagtgtggcaggcgggctggcccggcacacccagtcgtcctggaggctggcccgcgctgcagggcactgtgcctgagctctgacagtgtggggaagtgtccctttgatcttggcagtggaacatgcaaggcactgactgaccatgcaggattagctccatctcattatgtatgtagatggaggtggagatagaaaagagactcagccagacgtgnnnnnnnnnnnnnnnnnnnnnnnnnnnnnnnnnnnnnnnnnnnnnnnnnnnnnnnnnnnnnnnnnnnnnnnnnnnnnnnnnnnnnnnnnnnnnnnnnnnnnnnnnnnnnnnnnnnnnnnnnnnnnnnnnnnnnnnnnnnncacgcacctgtaatcccagctacttgggaggctgagccaggagaatcggagaggtggaggttgcagtgagccaaaatcccagcactgcactccaacctgggtgacagagcgagaccctgtctcaaaaaaaaggaaaaggactaacaggcagtatgctgtcatgttaatgtggggtggaaaaattgtctgcattgtctctgcatttttaaatcca

SEQ ID NO: 11423 - DNA, 707 bp, Macaca Fascicularis
ttcctccactgggaatgctggctgggagagccgtgactaccagactttcctcaggctccttggcatgttagtctgaagtgttcttgagcactgtactactaacccaacaactgtgactagctggtcatgccattcagggctggtgtggcattcgtgtgtgtgtgtgtgtgtgtgtttcctgtttgccccgcagtgcattgtgggatccaagagtgggttgtgtgtgtgtgtgtgtgtgtcagagggagatctggcaggtacccctttgagagtagctgtggtcagagctgtgtggtcagtgcattatgttggatgaggtccaggaacccagagccacccagcagacaccactgtggcttgccagccgccaagatggagaagcttgtgcccctatagagtgtctccccaggaccagaccctgagccactcgcttcctctgtgctgtgacaacattggtgccaggggagatggtgtttttcaaagggacctactgtagccactttaatttacaattaagagccttagtttgacttaagacttttataggcttttcattttgtatttttgtgtatgcgtgcatatagcagctactctgtagcagaggtgggtagagagtcttaatagtatcatgttgtatgcagatgtcacatcggcctctgcaaaaactgtactgtcttgtttctgcatcagacttaagtagtcatgtg

SEQ ID NO: 11424 - DNA, 649 bp, Macaca Fascicularis
ctttcttcagagtataagatgtttacctcatctttttacttttgtgtgtgtagttctttcaagttgtagaaaacattttaatgtaatttaaactcaaaaacttgaatacaggacaatgcttgccttttcatgtacgtactacattttttgctaagaaatactgatatttctgtttagttaaggtagaaatacttcttatttatacatttaggaaagcaaataatgcctactactccgactttcatagaagctacttttaaatcagaatatttaatttttgatattcatataattaatagaagttgcatttatatttttatggggcatagttccttatgtgttttttaatgtattttcatactacacattgaatttgtatgtttttaaaattattacatctagacaactgtaaatattatttttttagctagtgcaaacctagtacctgccatttttactaattttttctttaaaaaaagcaaaaaagcacattgacctaagtttaaaattaaataagtttatttttaacaaaaaatgcctgaaaacaggtaaattatttaagtcattaaaatattgagaaatttgaaatttttactatttctatttccacaattccaaatatttatcttggtgtatatattgttcttta

SEQ ID NO: 11425 - DNA, 689 bp, Macaca Fascicularis
  misc_feature (1)...(689): n = A,T,C or G
cagtacacannnntnnnnntccacccaccttgcnctcccctgtggtccagctccaccccctgcttcctgaccnntctgctccaacacccacccctaccagccctcttctaaacacatcccacacccactcccagaatctgtctcaggaagggtaaggttctcagannnnnnnnnnnnnnnnnnnnnnnnnngtacagctcccttccctgcagggagcnnnnnnnnnnnnnnnnnnnnnnnnnncctactttctcctgaaacccaaagccctggtaaaagggatacacaggactgaaaagggaatcacttttcactgtacattataagccttcagaagctatttttttaagctatcaacaatattcatcagagcagctagatctttggtctgttttctgcagaaacttgcaactcactcgttctctatgtgctctttttctnnnnnnnnnnnnnnnnnnnnnnnnnnnnnnnngcatttgaacagagggagagaccttgcatcagaaaaggtcttgcatcagaaaacagagaaagggtaatttcctttgcttcaagttcaaggccttccaacgcccccatcccctttactatcattctcagtgggactctgatcccacattcttaacagatctttcctcttgagaaatgaataagctgcctctcagagatgctgtccctatgcaatagac

SEQ ID NO: 11426 - DNA, 684 bp, Macaca Fascicularis
  misc_feature (1)...(684): n = A,T,C or G
cagcngnnnnntagattgggtcatcatggggtnnnnnnnnnnnnnnnncccctgctctgcttttggccttggatatggaaacctcaaccactttgttttccaacaagcctctttgcctttcttaccaccaccaccaccaccaccgccaccgccacccagctccgggaatggaccagcccctcccctactccctcctgctctggtgcctgccgggggcctggcccctggtgggggtcggggagcgcttttgnnnnnnnnnnnnnnnnnnnnnnnnctgaacaagacccctggggccccagagagctcagcgctgcagcccccacctcagagctcagagggactggtgggggccctgatgcacgtgatgcagaagaggagcagagccatccactcctccgacgaaggggaggaccaggcnnnnnnnnnngatgaagatgatgaatgggatgactgagtggctgagttacttgctgccctgtgctcctccccgcaggacacggctccccctccacctgctctgtgcccaccctccactctcctcttccaggcccccaatccccatttcttcctcaccagtccctccaatgctgtcatccctgcctggtcctcacactcaccctagcaatcccaaggccctttttatacaaaaattctcagttctcttcactcaaggatttttaaaga

SEQ ID NO: 11427 - DNA, 745 bp, Macaca Fascicularis
  misc_feature (1)...(745): n = A,T,C or G
gaccccccagcagcgacgnnngcagcagcggcgcctacagcaccgtctgcggcttcgggcacagatgcggctgcggcgcctcaacgccaccaccaccctaggcccccacactgtgccttccacgctgccccctgcccctgccaccaccctgagcactaccatagagccctggggccttgtacccccaaccaccgctggctgggaggagtcggagactgagacctacacagaggtggtgacagagtttgggaccgaggtggagcccgagtttgggaccaaggtggagcccgagtttgagacccagttggagactgagtttgagacccagctggagcctgagtttgagacccagctggagcctgagtttgaggaagaggaagaggaggaggaggaggaggaagaggagatagccactggccaggcattccccttcacaacagttgagacctacacagtgaactttggggacttctgagatcagggtcctaccaaggccccagcccagctcaagctacagcagtagtacttcccaagcctgctgaccacagtcacatcacccatcagcacacggaaggcccctggtgtggacactgaaaggaagggctggtcctgcccctttgagggggtgcaaacatgaccgggacctaagagccagaggctgtgtggaggctcctgctccacctgccagtctcgtaagagatggggttgctgcagtgttgtagtagtggcagagggagggagccga

SEQ ID NO: 11428 - DNA, 178 bp, Macaca Fascicularis
tatccctcaaggagccattcttgaaggagctgagcaggaaatctatgtcaaggtctgccgagacaacagcatcctcccaccttttgataaagagaaaggcgaaacactgctgagtccctcggtgacgtgtggtccccatggcctcaagttcctgaagcctgggagctgcgcttaccac

SEQ ID NO: 11429 - DNA, 664 bp, Macaca Fascicularis
  misc_feature (1)...(664): n = A,T,C or G
actccaccttcacctacatgaaccccgcccagcgcnnnatgtacacccccatcgccgacannnctggggttccttccatcccgcagacccacagcccgcagcactgggaacaacccgtctacacacagctcacccgaccttgaggaggcctcctatgaagggcgaagatggccgagatgatcctaaaaataaccgaagaaagagaggaccaaccagaattccccttggacatttgtgggttttgttttttatttcgttttttgttttcttcttcttcttcttccttaaagacatttaagctaaaggcaactcgtacccaaatttccaagacagagacatgacctatccaagcgcattacccacttgtggccaatcagtggccaggccaaccttggctaaannnnnnnnnnnnnnnnnngagaaactggactttttaaaccctcttcagagcaannnnnnnnnnnnatggagaatcgtgtgatcagtgtgctaaatctctctgcctgtttggactttgtaattatttttttagcagtaattaaagaaaaaagtcctctgtgaggaatattctctattttaaatatttttagtatgtactgtgtatgattcattaccattttgaggggatttataccatatttctagataaaattaaatgctctta

SEQ ID NO: 11430 - DNA, 741 bp, Macaca Fascicularis
  misc_feature (1)...(741): n = A,T,C or G
gtgatgaattcccaaatgaagagatggctgagcannnctaccacagcaaaaacaatgcaggcagttaacaagaagatggatccacaaaagacattacaaacaatgcagaatttccagaaggaaaacatgaaaatggagatgactgaagaaatgatcaatgacacnnnnnnnnnnnnnnnnnnnnnnnnnnnnnnnnnngaagaaagccaggatattgtgaatcaannnnnnnnnnnnnnnnnnnnngaaatttctggaaagatggccaaagctccatcagctgctggaagcttaccatctgcctctacttcaaaggctacaatctcagatgaagagattgaannnnnnnnnnnnnnnnnaggagtagattagtcaaaaaaagtcataatattttgcttacttataattatgtaatataaaccaagcacagtgcagatttcttttacnnnnnnnnnnnnnnnnnnnnnaaaaaaaaatggagactgtgagtgaacagttgtttcctaacccatggctattttgaatcttttgccaaagaatnnnnnnnnnnnaaaaatggaaacagtttggattttaattagaactatttaggagtgatgatgtgtaaaaagttgacttctcttttgcatggcacagagaaattatattccttacttcatgtcagtttatgttctaaatctttttcactgaatataaaaatcttgttaannnnnnnnnnnnnccaactaaagagggtgaaaa

SEQ ID NO: 11431 - DNA, 762 bp, Macaca Fascicularis
  misc_feature (1)...(762): n = A,T,C or G
tatcagcacgtctaacagaaccaggagggagatgctgctacagaaaggccctggacctggccagagagttttacctcagggacctgttgcaatgagagtggcaaaattagcaattaatcaagggatggaggtcgatttagtaacagggttagccatagaagaagcttgttatgctcagaccattccaacgaaagnnnnnnnnnnnnnnnttcttgcttttaaagagaaaaggccccctcgctataaaggagaataaaaggaagagaaattcttaagatgccaatgtactaaatgtacttctggaagtgtctttcgggtccactctatgcctcagcacatggaatctcaatgaccaaagtgaagagcaaattattcatatagtgtagtaagcatctggaatggacccatccgtgtacttcattcaaatgtgtaaatgtcatattcattcagatttgtaaagctagtagtgtatattgtcagaaacagaatcaaagttagatatacatttttaaatatttactgcatatgcggctttctgttcttaatttttttaatgtgaataatttatatattgcacattctagggaataatattgattgtatgtctactgtgnnnnnnnnngaaaataaaatttctatataccaaaaatgtgaagttataccaaataaagtttctaagtaattaatgcatacgaccagatacatatacatatatctaaacctgaaaaatgaactgatggatattctgagtgaaaactacct

SEQ ID NO: 11432 - DNA, 785 bp, Macaca Fascicularis
  misc_feature (1)...(785): n = A,T,C or G
agcacccaagcatgcaatngnnngtcccccntgcnagcctnnncnnttcatgtttgtgttttgtttgaggggatatttttcataattattaaaagacaggccnnnnnnnnnnnnnnnnnnnnnnnnnnnnnnnnnnnnnnnnnnnnnnnnnnnnnnnnnnnnnnnnnnnnnnnnnnnnnnnnnnnnnnnnnnnnnnnnnnnnnnnnnnnnnnnnnnnnnnnnnnnnnnnnnnnnnnnnnnnnnnnnnnnnnnnnnnnnnnnnnnnnnnnnnnnnnnnnnnnnnnnnnnnnnnnnnnnnnnnnnnnnnnnnnnnnnnnnnnnnnnnnnnnnnnnnnnnnnnnnnnnnnnnnnnnnnnnnnnnnnnnnnnnnnnnnnnnnnnncacaataaataaaaaacagaagacagaaagcaaggggtgcctaaatcgagactcggggtccacaccaggcagtggggttgcaacccagcacctggtaggctccatttcttcccaagcccgagcagagggtcatgcgggccccacatgaggagcagccagggcccacagggggcaccacctgtggacagccctcctgtccccaagctttcaggcaggcactgaaacgcaccgaacttctacgctctgctggtcagtggcggctgtcccctccccagcccagccgcccggccacatgtgtctgcctggcccgtacacaccgggggttccggggttgggagctgaaccatccccacctcagggttatatttcctcctccctttccctccccgccaagagctctgccg

SEQ ID NO: 11433 - DNA, 735 bp, Macaca Fascicularis
  misc_feature (1)...(735): n = A,T,C or G
agaagcaaatgtgnnncactttgaaatttganccannnnnnnnnnnnnnnnnnnnnnnnnattgcaggatgcacggattctgcattccgtggcaatagattctggtttcaggaactctggcataacagtgggaaagagaggaaaaattatgttggctgtccggagtacacatggcttagaagttccattaagccataaaggaaaactgatggtgacagaggaatatattgacttcctgttaaatgtggcaaatcaaaaaatggaggaaaacaagaaaagaattgagaggttttataactgcctacatcatgctttggaaagggaaactatgactaacttacatcccaagatcaaagagaaaaataactcatcatatactcataataaacaaagaaacccagaaaaagcacatgcccagtgtattactaaagaaaatgataaagaacttgaaaatgatgatgacgatctaggaatcaatattaccatcttccctgaaggctactaagctttggttctgacgtgtcttnnnnnnnnnnnnnnnagtaggttttataaagctgctctttataagaatattttagtttgttgagtgtaccagccatttagaaaaataannnnnnnnnnnnnnnnattttagagaaacctatcttaatgaaaatagatgtctttttaaaatagctttgtgtgtttgctcattgaatactgccttttttagtcacagagatttatgcaaaa

SEQ ID NO: 11434 - DNA, 755 bp, Macaca Fascicularis
  misc_feature (1)...(755): n = A,T,C or G
annnnnnnnnnnnnnngctgaagtgttctctgttcgtgcatcnctgggacatgcagatggatggacgaaatggccaaatactggctcccttgnnnnnnnnnnnnnnnagcagagaccaccatagccatttgctccatgatcatgggtggagtgtttgagaagtttcctaaactgaaagtgtgtttcgcacatggcggtggtgccttccccttcacagtgggaagaatctcccatggattcagcatgcgcccagatctgtgtgcccaggacaacccaatgaacccgaagaaataccttggttccttttacacagatgctttggttcnnnnnnnnnnnnnnnnnnnnnnnntaacagatgtcataggaaaggataaagtcattttgggaaccgattacccctttccattaggtgagctggaacctgggaaactaatagagtccatggaagaatttgatgaagaaacaaagaataaacnnnnnnnnnnnnnnnnnnnnnnnnnnnngggtnnnnnnnnnnnnnnnnnnnnnnnnnnnnnnnnnnnnnnnnnnnaaactttcaaaaggatatttcatttttgtttctaaatatgtatcaacaggtattaacaaaatcctattttgaactgttttactcagaaatagaatctccaaaatatcctaaaattattcataataaaaatgattcataagtgttttcattctgaaaagcagtacttcatttcatgtgcaaataaaaaattattttcccagtgctc

SEQ ID NO: 11435 - DNA, 734 bp, Macaca Fascicularis
  misc_feature (1)...(734): n = A,T,C or G
gattaaaaataaaatgtcgcatgtaaaggctgaaggcacgctttatcagaatggcttgctcttaggttcctttccattatgtcaaaggtccaggctccagtaggagagaaagaactcctcataggaatactgaagaagtgggaggaaccaagctgacacaggcctcactgcaatttgatatgcctgnnnnnnnnnnnnnnnnnnnnnnnnnnnnnnnnnnnnnnnnnnnnnnacctaggagttttgttaaacagattatgtgtgtgagtttcccattttatgcaattaaccaaatcaaccaaaaaaaagtgaccatgaagtcctgtatttgtctttttactacnnnnnnnnnnnnnnnnnnnnntgagtactgtagtaatccattttaagggagccttatttcagaaatatttcaaactggtgcaaatggaaaagactttctcttttcctttaaggctaaagacaagaatgnnnnnnnnnnnnnnnnnnnnnnnnnnnnnnnnnnnnnnnnnnnnnnnnnnnnnnnnnnnnnnnnnnnnnnnnnnnnnngtgtcccaacctgttgccattgattttttggnnnnnnnnnnnnnnnnnnnnnnnnnnnnnnnnnnnnnnnnnnnnnnnnnnnnnnnncgttgtctcccttctactgtgtagaatactttgacttaattttcttccagatacagggggatacctgcctgtttttcaaagtgtttatttactgctgt

SEQ ID NO: 11436 - DNA, 721 bp, Macaca Fascicularis
  misc_feature (1)...(721): n = A,T,C or G
ggggggaccccagctcctgtgcccacctctttnnntctgcnncctggcccctccagctacctgcttcctggcagcctccctctggggggctgcggttcaactccccccacccccaccgggctggctgccacgtctgacaagagagagggcagcagcagctctgagggccgtggggacacagataagtatctgaagaagctgcacacacaggagcgggcggtggaggaggtgaagctggccatcaagccatactatcagaagaaggacatcaccaaggaggagtacaaggacatcctgaggaaggccgtccacaagatctgccacagcaaaagtggggagatcaacccggtgaaggtgagcaacctggtgcgggcctacgtccagcgctaccgctacttccgcaagcacggtcgcaagccaggggaccccccagggcccccacggccgcccaaggagccagggcccccggacaagggtggcccgggcctgcccctgccccctctctgagagccctggccagctcttcgcccctcgcctctttgaaattctggacatatttatggctccacctccccacctcnnnnnnnnnnnnnnnnnnnnnttgggggagggttgctgcagggaagaggagagccccctgcccttccctgccccgtgcccaccccccttgcccccaagcctgtccccagtgcccctcccttctgttcgtgcccctctcccc

SEQ ID NO: 11437 - DNA, 772 bp, Macaca Fascicularis
  misc_feature (1)...(772): n = A,T,C or G
tgaagnnnnnnnnnnnnnnnnngattctgaaacagactccagtgatgaagataacaaaaggagagcaaagaaagccaagaaaaaggaaaagaagaagaaacacagatcgaagaaatataagaaaaagaagtctaagaagagcagaaaagagtccagtgattcaagctctaaagaatcccaagaagagtttctggaaaatccctggaaggnnnnnnnnnnnnnngaagaaccctcagatttnnnnnnnnnnnnggctccaaaaacacttacctctcaagatgataaacctttgaactatggccatgctcnnnnnnnnnnnnnnngcgcagctatggctgaatatgtaaaagctggaaaacgtatcccacgaagaggtgaaattggcttgacaagtgaagaaattgcatcatttgaatgctcaggttatgtaatgagtggtagcaggcatcgccgaatggaggctgtgcgactgcgaaaagagaaccagatctatagtgctgatgagaagagagcccttgcatcctttaaccaagaagagagacgaaagagagagaacaagattctggccagttttcgggaaatggtttacagaaagaccaaagggaaggatgacaaataaggattttnnnnnnnnnnnnnnnacatttttaacaacaaaaannnnnnnnnnnnnnnnacacatacatagaaaaagattattatgttctgagaaagctttacagtgctactgtgccttctatnnnttctttcagtncttcaataaaaagctact

SEQ ID NO: 11438 - DNA, 1724 bp, Macaca Fascicularis
  misc_feature (1)...(1724): n = A,T,C or G
gctccctctttccccacatggcccccagtgtagaaggacacactgtaccaccctctgctgggtctggaagacaccgtgcccgtctcaagagcaagcaccggccgtgttgcagaggcgagacatcaatctttgggtgcaaaatttcttcagggggggggggggggtgtctcgtcatagacggacaaaaatcatcgctggggaacctttcccgtgggcttttttcctttctctctttgcctttagtttgcccgacaccagcagaaaagtggaccttgggggttggttctgctcccggcccccttgttcggcccctgccggcacacgggcggctcaccctggacactgtgacgcgcatgggcaaggccagcgcccggggcttctgaaccgagcggggcatttcgttttgtttttgcttttccccgtcttaggctcccgatctttgactgccttcccatggcgatctataagttgaaagatttttttttaatcacctcataatgatggagttaaaagtaaaccgtgcagaccatggggtccctgttgtgcgctgcgtcgtcccactggccctgtgccctggagggtgggcggcttatggtgccacagcccctggcagggacggccggcccgccccggtaactgatggacagatgcaggatgacagaggcagccctcgcttcagctgaacgcttccattgctgctggttctgagaccccccgccccggaccccccagacttagaagaacaaactgaggaacagacccagccagagcagcagggattccagaagctgcccgtgaaggccagaagctgcccgtgaagggaggaggagaggatccggtcggcagcagccccgagcaggaagctggagtggggactgttgcggggtttttctgttgtggtttattttattaaattctttccttttttctattcatttcgatggacgcaatcttaagccaccctggccttgttcctagcaggtgaacgtgcacaggtgtgtggaggtcgggaggcgccgtccaggtgtgcggccagccgctgcgcacagacttcaggttttccgtttgggtctagtttagaacctgtccttaaacctcggggttgctgtcaggatttgctttcagacttttttttttttgtaactccctttagagtctacaaaaatgttttaaaaggatcaggtctgcttttagtttcatttttgtttctttcccgtcccactctttaaaaactggttccatgaggaaaggcagaagccgttctgtgtcttcttcacgctgggccggcttcttgctgttgcgagggcgtcctgtgcccacttacatgcgtgtgtctccgtgaggactgggttccaccggtctcaattgagctccagccctggtttttctacccatgcagttaggggatttaatttaaatttttttttgtagggccgccgccttcaaacacaactgctacaacgttctaataaaggctcatttaacccccaggctcctttcgtgtgaatatcctcagtctgtaggaaacttttttgatacaccatagaagacctagttttggaaaatattatctagtttnnnnnnnnnnnnnnncnnnaaatttctcactgatttttgtttttttgtgcgtaacttggatgggctgaagaaggtgagggcagggtggggaagggtggctttcattccaagatccagggatttggggaaaaggaaggaatttgatg

SEQ ID NO: 11439 - DNA, 750 bp, Macaca Fascicularis
  misc_feature (1)...(750): n = A,T,C or G
ttaaaagcagtgagtacttggaaatggccgggtgannnnnnnnnnnnnnnnnnnnnnaaactcgcacggnnattcgcaagtggaatggagagaagatgtcttacttaaagaactggggagaaggttggggtttcgtgccttctgacagagcacttgtctttgtggataaccatgataatcaacgaggacatggggctggnnnnnnnnnnnnnnnnnncttctgggacgccaggctgtataaaatggcagttggatttatgcttgctcatccttatggatttacacgagtaatgtcaagctaccgttggccaagaaattttcaaaatggaaaagatgttaatgattgggttgggccaccaaataataatggagtaattaaagaagttactattaatccagacactacttgtggcaatgactgggtctgtgaacatcgatggcgccaaataaggaacatggttgctttccgcaatgtagtggatggtcagccttttacaaactggtatgataatgggagcaaccaagtggcttttggaagaggaaacaaaggattcnnnnnnnnnnnnnnnnnnnnnnggtcattttcttcnnnnnnnnnnnnnnnnnnnnnnnnnnnnnnnnnnnnnnnnnnnnnnnctggagataaaattgatggcaattgcacaggcattaaaatctnnnnnnnnnnnnnnnnnnnnnnnnnnnnnnnnnnnnnnnnctctgctgaagatccatttattgcaattcatg

SEQ ID NO: 11440 - DNA, 723 bp, Macaca Fascicularis
  misc_feature (1)...(723): n = A,T,C or G
catgcatactgggctccaaacttctgggctttgtacaatgctttggacaaagtgctgtctgtcatcggtttgaaattgaaatttcttgatcccaacaatattcccaaggcctcaatgacaagtggtttggttcagcagtttcaacacacagtccttccctcagtgactcccttgacaaccctcatctgcacactgattgccatattgccctctattttctgtctttggtttaaaccccaagggcccagaggctttctccgatgtctaactctttgtgccttgagctcctttatgtttggttggcatgttcatgaaaaagccatacttctagcaattctcccaatgagccttttgtctgtgcaaaaagcaggagatgcttcgatttttctgattctgaccacaacaggacattattccctctttcctctgcttttcactgcaccagaacttcccattaaaatcttactcatgttactattcaccatatatagtatttcgtcactgaagactttattcagaaaagaaaaacctctttttaattggatggaaactttctacctgctcggcctggggcctctggaagtctgctgtgaatttgtattccctttcacctcctggaaggtgaagtaccccttcctccctttgttactaacctcagtgtattgtgcagtaggcatcacatatgcttggttcaaacntgtatgtttcagtattgattgaccc

SEQ ID NO: 11441 - DNA, 713 bp, Macaca Fascicularis
  misc_feature (1)...(713): n = A,T,C or G
agatgcagaaatgtgctttgacatcatttgaaacctaaattttcttatgttgtgattatattaaaaagggataaaagaagagtgtcaaacatgattaaatatattgtacttatttatgttgaatacatattaagacaaaattatactttgagtatataatttgttaaatattactttatatggtaattgtgtataatttcgtatattggtaaaatttaaaactacactttagaatttttttatcttaagtttggggtgagtggggtcgatgagactgattgaatagaaaagggctaatggcccaaacatgacatagatttcttttttcagtcagaggccttatttgatattttataaataaatgacaagtttttattttgaaactttttttattgtttttgggaaagtatcccttaatttaatgacacattcattcagatactttttatccctgataataaagaaacgaaataagctacacaattgagattaagtctgnnnnnnnnnnnnnnnnnnnntctgctataaaagattgcttgataaataattatttttgtaaacaagttggattaacttactggtctttttgcttggatatgaatttaaggtcttcatgtttaaaaagacatttactttgttatttagtgacacttttccatctttttttttggttattgttaaactagaaccttaagtttatgtttgcaggtatg

SEQ ID NO: 11442 - DNA, 694 bp, Macaca Fascicularis
  misc_feature (1)...(694): n = A,T,C or G
acccgaggtgagaccctggcgntnnnncaggtgaacggaagcaaggtggtgaggaagcactcagggacggacagaactgtgtgaagcccgccgggccccaccccgcgctgtccatgcactgtgagcaccactaggaaatctcagccacaccttttctgtttaattcccatgcatgccaaactcttttcacacctaccgaccaattctcctgctcctcttgccctcttcttcacaccaaaatatgattgtgtccctgctgcagaatatgtatttcctaattgctgtggccaaacgcctgtgtgccgaatcgcttgcttctgatcccgctccgtgtaacccaagtgcgctgcggacaaagccccggccacggctgcgtcactcctgatgttcacaatgccacatagtcacacacctaattctcaagtcggagcaacacataccatccttgaccttatcctcaggctccagggcagcctggccgagcagcccctgctccctcctggagacccctgtcacctcccgacttcctcctggagaccccgtcacctcctgaccaacccttcccagggcggcaccgatcaccgagcagccgtgcgtgtatctcaaggaactaaataagatgacgctcctcctcatggcactacaacctggatgtgtgttcatattttttttgttagttttatccaaaatgttt

SEQ ID NO: 11443 - DNA, 689 bp, Macaca Fascicularis
  misc_feature (1)...(689): n = A,T,C or G
gctggaagagttcagccccatggctgggggttatggagtgatgggtgacgnnnnnnnnnnnnnttatactgttcacgaagcctggaatgaagccaccaatgtttacttgatagttatccttgttagcttcggtctcttcatgtatgccaaaaggaacaaaaggagaattatgaggatattcagcgtgccacctacagaggaaactttgtcagagcccaacttttatgacacaataagcaagattcgtttgagacaacaactggaaatgtattccatttcaagaaagtacgactatcagcagccacaaaaccaagctgacagtgtgcagctctcattggaatgaagcctcagaaaatgagcaacagannnnnnnnnnnnaagctcctgattctttctactaaatcgtgaacagctttaaaaacatttctgtctgcataaaattattttacttgtgacttttccccaattgttttgtgcattgttttgcttttttaaattgcatctccaagtcattgttaggtaaatacaggtggctcaaaaggccttgacacagggaacctgcacatatccaggatatatgtnnnnnnnnnnnnnnnnnnnnnnnnnnnnnnnnnnnnnnnnnnnnnaggatacaatcagtgagaaataaaaacacatcttgggaagcgggaatcctggagttnnnnnca

SEQ ID NO: 11444 - DNA, 793 bp, Macaca Fascicularis
  misc_feature (1)...(793): n = A,T,C or G
tatgcatagtgacaactcannnnngagctttttggtcttgttctgatttggaaggtgaattgagcaggtctgctgctgttggcctcctgagttcatttagttaaagcacatgtannnnnnnnnnnnnnnnnnnnnnnnnnnnnnnnnnnnnnnnacctacttacctacctacctgcgacttcctttttccttattctnnnnnnnnnnnnnnnnccctaaaattttaagtacgatggtgaacgttctaatttcagaaccaatcacaagtcatgtagtgtggtagaattaaaggaggacacgagcctgcttctgttacctccaagtggtaacaggactgatgccgaaatgtcaccaggtcctttcagtcttcacagtggagaactcttggccaaaggttttttggggaaggaggaggaaaccagctatctggttaaggttaacaccagatggtgcccctcatcagtgtccttttaaaaaatatttactgtagtccgataagatagcagctgtacaaaatgactaaaaaatattttaggatcatacgatgtatatcttggttcatcttcaaaatcggagactgatctttgaaactagtggtttttannnnnnnnnnnnnnnnnnnnaggagtagagtgtatgcactactgttttaaaagaattagtgtgagtgtgtttttgtatgaatgagcccattcatggtaagtcttaagcttgttggaaataatgtacccatgtagactagcaaaatagtatgtagatgtgatctcagttgtaaatagaaaaatctaatcaa

SEQ ID NO: 11445 - DNA, 630 bp, Macaca Fascicularis
cagaggaggcggctatggaggagaccgaggaggtggctatggaggagatcgaggtggctatggaggagaccgaggaggcggctatggcggagaccgaggcggctatggaggagatcgaggaggttacggaggagatcgaggaggttatggaggagatcgaggaggctatggaggagacagaagccgggggggctatggaggagaccgtggtggtggcagtggctacggtggagaccgaagtggaggctatggaggagacaggagtggtggcggctatggaggagaccgaggtgggggctacggaggagaccgaggtggctatggaggcaaaatgggaggaagaaacgactacagaaatgatcagcgcaaccgaccatactgatgactgttttgaatgttcctttgtctctgacatgatccatagtgaaattgccagagttttgcctgctgctttcctcgtggcctcttcttgggtagtgaaattaagtgacatttggatttttatttgggtgggagggctgggacagtttttcttttagaaatgtctgttgagagttccccctttagtttccaaccttctccccaacccttggagctaaatgcgttgtaaaatattgccaaaatgaaaag

SEQ ID NO: 11446 - DNA, 633 bp, Macaca Fascicularis
  misc_feature (1)...(633): n = A,T,C or G
ggaaggagaaccacttcgagggcattgccctggtggagaaggccctgcaggctgcgtatggcgccagcacccccagcatgacctcggccnnnnnnnnnnnnnnnnnnnnnnnnnnnnnnnnnnnnnnnnnnnnnnnnnnnnnnnnnnnnnnnnnnnnnnnnnnnnnnnnnnnnnnnnnncttctgccacctgggctgaagcaattcttttgtctcagcctcctgagtagctgnnnnnnnnnnnnngcgccaccatgcccagggtgcccatggggacgcagtcatcctgggcatgtccagcnnnnnnnnnnnnnnnnnnnnnnnnnnnnnnnnnnnnnnnnnnnnnnnnnnnnnnnnnnnnnnnnnnnnnnnnnnnnnnnnnnnnaatttgnnnnnnnnnnnnnnnnnnnnnnnnnnnnnnnnnnnccatcgtttctcaggctgcccaaggctcttctgtaacctctttttgtctctcacgctttctttaatttagaactgcctcagtacattcttaggaatggaactatttgaacaaaaacgtaacagtagagtcaccaccaaatnnnagaataaaacctcnnnnnggatgctgtgtgttagtctgtttgcgttgctataaaagaatacctga

SEQ ID NO: 11447 - DNA, 712 bp, Macaca Fascicularis
  misc_feature (1)...(712): n = A,T,C or G
gcaccgatgccnnnnnnnnnnnnnnnnnnnnnnnnnnnnnnnnnnnnnnnnnnnnnnnnnnnnnnnnnnnnnnttgtcgtccaccatggagacatgcactctggacactttgtcacttaccgacggtccccaccttcggccaggaaccctctcnnnnnnnnnnnnnnnnnnnnntgggtctccgannnnnnnnnnnnnnnnnnnnnnntgcaggaggtcctgtcctccagcgcctacctgctgttctatgagcgcgtcctttccaggatgcaacaccagagccaggagtacaagtctgaagaatgacttcgccctcctacaaggctagagctgatggcactgtcttcacactgtccgggaaaaaagtaaaactgtactgttgtgtgtgcaagcagccgcactggagccnnnnnnnnnnnnnnnntgttctgagagcaggctccacctgggagccagccccaattcataccaaatcaggctccctgaacagctctgttcatgtgtgtagaaggtactgttgttgtattaagaaagcattcatgatgtctggagtgtctttttactcatctnnnnnnnnnnnnnnaaagaatgcagattcttnnnnnnnnnnnnnnnatattgtaatgttaggtgttctcagaggggaagcacctttgtgtaatcagcgtttccacccagatcttttatttttaataagcaggccctataaaaa

SEQ ID NO: 11448 - DNA, 713 bp, Macaca Fascicularis
  misc_feature (1)...(713): n = A,T,C or G
acggannnnnnnnnnnnnnnnnnnnnnnnnnnnnngatgtccgtctgcctttctggttttctccgggagactgttggagagcccttctatttgctggtgacgactctgaaccagaaaattaacaagggtcccgtggatgtaatcacttgcaaagctctgtacacacttaatgaagactggctgttgtgnnnnnnnnnnnnnnnnnnnnnnnnnnnnnnnnnngtcgtctnnnnnnnnnnnnnnnnnnnnnnnnnnnnnnnnnnnnnnnnnnnnnnntcagtcaatgttctcgactgtgacaccataggccaagccaaagaaaagattttccaagcattcttaagcaaaaatggttctccttatggacttcagcttaatgaaattggtcttgagcttcaagtgggcacacgacagaaagaacttctgnnnnnnnnnnnttcctctgtgattcttgaagatggaatcacaaagctaaacaccattggccactatgagtaggggcccagaggatgctccctgcctcacaggactaggggacgattaatgagtcactcttagaagagaatttggagctcctcnnnnnnnnnnnnnnnnnnnnnnnnnttaacactctgcattccagggcacttttcaaaaannncatttctgtccttacctcagcagcagctgacttgtgctaaaaagaaaacggaaacnnncccccacaaacatcg

SEQ ID NO: 11449 - DNA, 715 bp, Macaca Fascicularis
  misc_feature (1)...(715): n = A,T,C or G
ccggaagcaatgaggcgggaagggtggtagaggccccttcggccggaacccggggggcggggcttgtggctgtagttgatggggcgtaggtgggccctgcgcccacagctacctgggtaaggcccaagatggctgccctcgtgtgaagtcggcggggacggttcctgtcgtcatcttgagggccacgtctggccctcactcctggacttatttggtgtgttgttgaagcggggagactagagaaatggcagggagcctcttatctggggcaggcaggcgcctgtggaactgggtgcctctggcgtgcagaagcttctctcttggtgtgccgagattgatcggtataaggctcactctcccgccccccaaagtggttgatcgttggaacgagaagagggccatgtnnnnnnnnnnnnnnnnnnncgggatcctgggaaactttgaaaagcaccccaaagaactgatcagggggcccatatggcttcgaggttggaaagggaatgaattgcaacgttgtatccgaaagaagaaaatggttggaagtagaatgttcnnnnnnnnnnnnnnnaaccttcataaacgcatccgctatctctacaaacactttaaccgacgtgggaggtttcggtagaagagaaagctgagaacttcggaaaaggctcatctgtcaccctggagaagggaaactgtactcttccctgtgaggaaacagctt

SEQ ID NO: 11450 - DNA, 711 bp, Macaca Fascicularis
  misc_feature (1)...(711): n = A,T,C or G
gtgataggataaagttggccatgtannnaaaaaagattatttgnnnnnnnnnnnnnnnnnnnnnnnctgaaagacaatcaaggtgatatgtaatttcctcannnnnnnnnnnnnnnnnnnncactaaacaaagttatttttctttttaagagatacttacatttcaatttattgtttgaaatgccgatcaagagaannnnnnnnnnnnnnncagtttttactcagtgactgttgtagcgtcttcctgtttannnnnnnnnntggtnnnnnnnnnnnnnnnnnnnnnnnnnnnnnnnnnnnnnnnnnnnnnnnnnnnnnnnnnnntgctttgctgcacagcaggacctgtgctttgagattttttttttctcttttaaaatatcctgtaactacaatgatggtaaagccatgttaaatgacttgattgtacttggagtaattgcacatttttttctatgcataaaaaaatgatgcagctgttgagaaaatgaattaaaatctttttcattttgcagaaggaaatgatggaatttttctatacctcagtatgtgtcaactgagagtcatatacattagttttaatgtcttaatattgagaatcaggttgcaaaagtgatgagttattatctatggaaatgtgagaaatatctaatagcctgtaaaggctgagaaataagtatcaaaatagtttaggaaaatgagagaacagta

SEQ ID NO: 11451 - DNA, 751 bp, Macaca Fascicularis
  misc_feature (1)...(751): n = A,T,C or G
gggatgtgtnnnaaccaatgctgctgaatttcagaccaagactgaggaggaagagattgatcggaccccttnnnnnnnnntggaaccatctgatgaagaatcctcagaagaagaggaagagnnnnnnnnnnnnnnnnnnnnnnnnnnnnnnnnnnnnnnnnnnnnnnnnnnnnnnnnnnnnnnnnnnnnnnnnnnnnnnnnnnnnntcagtgcctgctggaatggagacccctgaactcannnnnnnnnnnnnnnagaagatcgaggaggcgatggatggaagtgagacacctcannnnnnnnnnnnnnnnnnnnnnnnnngaacagccactgttgggggagccatgatgggatcaacccacatttatgatatgtccacggttatgagccggaagggcccagctcctgaactgcaaggtgtnnnnnnnnnnnnnnnnnnnnnnnngttggagcttgatcctatggccatgacccagaagtatgaggagcatgtgcgggagcagcaggctcaagtagagaaggaggacttcagcgacatggtggctgagcatgctgccaaacagaagcaaaagaaacggaaagctcagccccaggacagccgtgggggcagcaagaaatacaaagagttcaagttttaggtcccctcatgctggccctttttttggccctccgtctggatgcctgggcttcacaaaagagccatctctcccgcagttcccaaggacttgtcatttcatgttcttattttaga

SEQ ID NO: 11452 - DNA, 404 bp, Macaca Fascicularis
  misc_feature (1)...(404): n = A,T,C or G
atgaagatcatatacgtgaaaattnnnnnaaaacgtataaagcactatacaaattcaaaactccncngagccattatccttgctctgatggtggggttttggggatgagagggtgctgtccatttctcaagttttccattgtgtgaaacaaagaaggttatcaagaagcctttctcgtagccttctgtaggaattctcacggtcaagtgaggacntncggccccagctttgctngagagaaagctttcccgcctggttgatactctgccacgagagagggctttctcaggacctgnnnnnnnnnnnnnnnncaactgcagaaaatgtcctcccttgtggcttcctcagctcctgctcttggcctgaagtcccagcgattgatggcnnnnnnnnnnnnnnnactt

SEQ ID NO: 11453 - DNA, 777 bp, Macaca Fascicularis
  misc_feature (1)...(777): n = A,T,C or G
gacatggcacaggcagagtggcancnnccacagaacagagtgtgtgttatgattacgaggagccagcagttgagcctaagatccttctacctacctggtattggcatttgaggtaggaaaccctcnnnnnnnnnnnnnnnnnngaaaagtgaaaagacagcacagttcctttaagaaccggcaacaaggctggaggctgtatgtatgcagcagagtcagcaaggtacatgatgctgtctttcaaaaggacttttctctcctagccgactgacctcttccttacaagaaactaagacatctgttgagtnnnnnnnnnnnnnnnaagccttggtttaactggggnnnnnnnnnnnnnnnnnngtttattagtcctcaaggcaaacataaatattagatgaataatccaactttaatagtatacatttaaaagaaaaaaaataaaagtcctgtaagttgaggcccagcctggtgagtactgcagctgcatttgcccaaagggaatccagaacaagtccctccctgtattttgttcttgagaggggtcagtctagaagccagatcctatcagtatgaggagcagcagcccagggttgtctggctcagcaccaaggatttttttttaaaaaggaagagtttcttagatgagtaattgttactgaagacagtcagtgataaccactgaccacatgctattaatacactatgtgtcctttttagaataaagattatgtatcatcattcctttggagaaaattgttattcaggtataaaaacgag

SEQ ID NO: 11454 - DNA, 727 bp, Macaca Fascicularis
  misc_feature (1)...(727): n = A,T,C or G
gagagtgtgannntnnnnnnnnnnnncttgtggagccgctgaccattgggacagtaaaaannnnnnnnnnnnnnnnnnnnntattcagcggggctccaaaaagcatctattgctgnnnnnnnnnnnnnnnnnnnnntgggggatttttatcaaagatcctgtgcagaaaaatgaattcatctcagaatactgtggagagattatttctcaagatgaagctgacagaagagggaaagtatatgataaatacatgtgcagctttctgttcaacttgaacaatgattttgtggtggatgcaacccgcaagggcaacaaaattcgttttgcaaatcattcggtaannnnnnnnnnnnnnnnnnnnnnnnnnnnnnnnnnnnnnnnnnacaggataggtatttttgccaagagagccatccagactggtgaagagctgttttttgattacagatacagccaggctgnnnnnnnnnnnnnnnnnnnnnnnnnnnnnnnnntggaaatcccttgacatctgctacctcctccccctcctctctgaaacagctgccttagcttcaggaacctcgagtactgtgggcaatttagaaaaagaaaatgcagtttgaaattctgaatttgcaaagtactgtaagaataatttatagtaatgagtttaaaaatcaactttttattgccttctcaccagctgcaaagtgttttgtaccagtgaatttttgcaataatgcag

SEQ ID NO: 11455 - DNA, 721 bp, Macaca Fascicularis
  misc_feature (1)...(721): n = A,T,C or G
tcatgaatagcgnnntccggtatgtgaaggagaacggaggcctggactntgaggaatcctatccatatgtagcaatggatggaatctgtaagtacagacctgagaattctgttgctaatgacaccggcttcgaggtggtcccagctggaaaggagaaggcnnnnnnnnnnnnnnnngcaactgtggggcccatcnnnnnnnnnnnnnnnnnnnnnnnnnnntccttccagttctacaaatnnnnnnnnnnntttgaaccagactgcagcagcaaaaacctggatcatggtgttctggtggttggnnnnnnnnntgaaggagcaaattcagataacaacaannnnnnnnnnnnnnnnnnnnnnnnnnnnnnnnnnnnnnnnnnnnnnnnnnnnnnnnnnnnnnnnnnnnnnnnnnnnnnnnnnnnnnnnnnnnnnnnnnnnnnnnnntaccccactgtgtgagctgatggatggtgaggaggaaggacgtaaggacagcatgtctgggggagttttatcttgacactgaccaaatgcttattgtgtaagataaaccacttgaatcattgaggatccaagttgagatttgaaatctgtgacgtttttacaagggtaaaatgttaccagtattttaattactgttatacacagctttatgatatcaaagactcattgcttaattctaagacttttgaattttcatttttaaaaagatgtacaaa

SEQ ID NO: 11456 - DNA, 740 bp, Macaca Fascicularis
  misc_feature (1)...(740): n = A,T,C or G
acaannnnnnnnnagagaagctagaagcnnnnnntgaatgacccccagagccnnnntgagaaggtctggagtttgggggaaggggacagctgggtgtgttccaggccatgctggaggtacccctgagacacaggcgctgcccattccccttgcctgggctnnnnnnnnnnnnnnnnctttttagnnnnnnnnnnnntgcccaaccctgactcagagaacaagggtggcttggacccctgggaatcaggccgccaagggctgagctccnnnnnnnnnnnnnnnnnnagaaacagaattcaagacatacttaattttgaatttctccttgccacgttaataaagccaaaagcagcaggtgccattcatggcaatacacttcactgaacccacttgctcccaaaacgacgtcagcccgaggcactgctacgccagcagctgccacatgggatggcggctcaggcactccctccaggattctgccccgactgtccacaaactcctttgtttgtgctggaacttgggcttctccagctgccaagcaggagtcagtaggaccgtgactgtgcctccctcaggggggaccctgggcggggttccaaggcctgtgagctgggaaaggacagatgaggggacctcgtgccttcttactgtcatgcagtgaccctgccttatgttgccgaaataagcaactcttaggtttgcctgactgccttatgctggtaaagaannngggattcaac

SEQ ID NO: 11457 - DNA, 782 bp, Macaca Fascicularis
  misc_feature (1)...(782): n = A,T,C or G
ggcagaccagtgagagcaccaaccannnnnnnctgtgtggtccattctgnnnnnnnnnnnnnnnnnngccatcggtgnnnggcagatgcggcacctcaagagcttctnnnaagccaagaagcttgtgtagctgtcccaggtgtcacgacccatcctcccaggctgggggagaaaggacctcctggannnnnnnnnnnnnnnnnnnncnnnnnnnnnnnnnnnnnnnnnnnnnnnnnnagaggggctgcaggcacccacaggcacaannnnnnnnnnnnnnnnnnnnnnnnnnnnnntgagcaggtggtggnnnnnnnnnnnnncctctctctctggcctctgggccctttgcagtaatcacccaggggctggtaatgtccctcctcttggcacctccgaatcacagtgttactgatcagggatgtgaggctgctgtcgggggtggggggagggggatgggcaggcaagccagtcttctgtcttccttnnnnnnnttagggtttgagcgggttggggtatggtgcctgtcatacctacctgccaccctgggaacctcactgttctctatttcagcctagacctgctgatcccagggtgtgtgtgagttgagggtgggtggaggggtttgcagtgtgggcatgtggccctgcatttgacctcagcttcttcacatggttgtccattctggggcttaaagaactgggaccagaccaagtagaggccttggtgctggttgaggtggggcctgcagagttttactgatttcattttcaataaattaa

SEQ ID NO: 11458 - DNA, 703 bp, Macaca Fascicularis
  misc_feature (1)...(703): n = A,T,C or G
gaatgggagagtcaggggagtaataatagtaggagcaatgccctacatctagtagagtgcttcacactttcccagaggctattacttaatggctctcacttaaattgtgtatgtaccctattagagtatcctnnnnnnnnnnnnnnnnnnnnnnttgaccgtcttattggaaactgcacacagtgaggaaatgtagcttgttcaacaacaagtggcacagtcagggctgggactcaaaagcagtgagatctgattgttggtccagaagtttgttattctctcagcttgattaaactgcccttactcctgttcttccctattctatctccagaatttgacaannnnnnnnnnnnnnnaatctagctattccagccacacaagttctgtagttcaacccagtggagtctttggggttgagacgctgaggtccttgtcagagccccacagtcaccaggtggctaagtgcaaaatgaaaacagcagaaagactaatatcccaactgagccacttaccatctctttgtggttggggtagtatgtctgctcaatgagagggaacttttctcctcccagtgtctnnnnnnnnnnnnnnnnctgggcaaactgcaaaggaaagcaaatgttacgcttatcttagataacttctgaaacaggcaaaacatcaactcatcaaatatttattgagcctttgttctgtggaggac

SEQ ID NO: 11459 - DNA, 773 bp, Macaca Fascicularis
  misc_feature (1)...(773): n = A,T,C or G
agcatcttatccactataaactattattccaggtggaaatttgggattttccagccctcaatctgataccccccaccaaagtccagnnnnnnnnnnnnnnnnggttccctaactcctattctcccttcttcctgctaggccatgggtgccttcttctctggcatcttttggagcagctttgtcggtggtggtgtcttaacacnnnnnnnnnnnnnnnnnnnnnnnnnnnnnncgattcgcatgatgatgaaaatcaatannnnnnnnnnnnnnnnnnnnnnnnnnnnnnacaagtatgtgaacctggtcatgtacttcgtcttccgcctggcccctcaggtctacctcacccatttcttcttgcgttatgtgaggcagaggaccctgggcaccttcctgctgggtatcctgctcatgctggacgtgatgatcataatctacttttcccgcctcctccgctctgacttctgccccgagcgtgtccccaggaagcaacacaaagacaagttcttgactgagtgagaggcacagagcctgggacaacaaaaacagacaaggccagaaacagcttcacatggaaactgggacttagccccaagcctgggcgtcctctggggccagcctctccaccttccgagcctgcgcccacactattgaaaacactannnnnnnnnnnnnnnnnnnnnnnnnnncctttattgggcaaggggtgagagaagcagacagaccggttggacgtagtagatgggtgtgtgangacaaaatgctatcag

SEQ ID NO: 11460 - DNA, 686 bp, Macaca Fascicularis
gcgccagctggaaaatcgagctccatactaaaggaacaggctgtgggaagggatcatagaatcttttcttcttaaagtcattctctgcctgcatccagccccttgccctctcttcacagctagatcattttttttttttccgcagggtgctgcctatgggccctctgctccccaatgccttacagagaggaggggacgggacagccgctcaccggaaggctgtctgcagggacatccgaggcggtggtggacgggaaagactttggaaggggagcgagaaattgctttttctcttcctccccgggcagaatgtagcttttctgcttcactgtggcagcctcctccctggatccttagatcccagaggagggaagaaaatttgcagtgactgaaaacagtaaacaaaaattttttatgtatataaaagttccattacacagtacaaaatagatggataatgtttatcctttatttttctatgtagaagtttttgaatttgtgtgtgtgcttgtgcgtgtctacacctagtattgcagctgggactctccagctgtttttgttgttcttgttttgtttttaaatgagagggttgaattcttccatcaggtgaacgaaacaagccaccaacgtaacaaatcactgcatctggccacattcagtgatttattactttggtgcctttttcg

SEQ ID NO: 11461 - DNA, 1166 bp, Macaca Fascicularis
  misc_feature (1)...(1166): n = A,T,C or G
gtcaggagcagtnnncaggataaaagtaattactgaagaagtattgtagtgagaaaatgaatttttgactcagaagcccctaaaggcatggtgtactaagcaacaaaataagcagatgttacattaactgtaattttctcttcgagctgtttgcagacaaggttccaaagacnnnnnnnnnnnnnnntgctcnnnnnnnnnnnnnnnaaggatttggttataagggttcctgctttcacagaattattccagggtttatgtgtcagggtggtgacttcacacgccatnnnnnnnnnnnnnnnnngtccatctatggggagaaatttgaagatgagaacttcatcctaaagcatacaggtcctggcatcttgtccatggcaaatgctggacccaacacaaatggttcccagtttttcatctgcactgccaagactgagtggttggatggcaagcatgtggtctttggcaaagtgaaagaaggcatgaatattgtggaggccatgaagcgctttgggtccaggaatggcaagaccagcaagaagatcaccattgctgactgtggacaactcgaataagtttgacttgtgttttatcttaaccaccagaccattccttctgtagctcaggagagcacccctccaccccatttgctcgcagtatcctagaatctttgtgctctcgctgcagttccctttgggttccatgttttccttgttctctcccatgcctagctggattgcagagttaagtttatgactatgaaataaaaactaagtaacaattaaaaaaataataataatttttgtattaaaaaattcacattaaataagtcctaatgttttattgcatagtagggtgactagaattatcaataacattttgcatatattttgaagtagctagaagaaaggattttgaaagttctcaacacaaagaaatgacacatatttgaggtgatggatatgctaattaccctggtttgattattacacaatgtatacatgtgtcaaaacatcacactataccacataaatatgtacatttattatttgtcaattaaaagcaaaataaaacaaaaaaccttcatctaatactttggatcattgtgaaaaaataaattcctgaagtataaagcaaaaaaaaaaaaaaaaaaaaaaaaaaaaagg

SEQ ID NO: 11462 - DNA, 760 bp, Macaca Fascicularis
  misc_feature (1)...(760): n = A,T,C or G
ggaaattaattnnnnnnnnnnnnnnnnnnnnntatgannnnactgnnnnnnnnnnnnnnnnnnctcnnnnnnnnnnnnnnnnnnntatgaaatttattgtttcaattgatttgatggaattatccttaaacttggattctaagaagtatgaaagaatatcttggtccttcaaagaaaagaaaccattgaaatttgattttcttttggcttggcataatacaggttcggaagaatcaacaatgatgtcatatttttccaagtaccaaattcaggagcatcagccaaaagtagcgctgagtgcagtgagagatcnnnnnnnnnnnntgctgcagagcagtgagctcgagggagcgccggaggtgtcctgccaggctctggagnnnnnnnnnnnnnnnnnnnnnnnnnnnnnnnnnnnnnnnnnnnnnnnnnnnnnnnnnnnnnnnnnnnnnnnctattgctgtcctcagccaagcacggtgnnnnnnnnnnnnnnnttgtgtacaatnnnnnnnnnnntacttccagagaagatctgtctcctattggannnnnnnnnnnnnnnnnnnnnnnnnnnnnnnnnnnnntccatgggttacactgtccgttcaaggctttgcagacagccctgtttcttggggaaaaaatgaacatggtttttggaaaggaggagaacatttatataactttgtgatttttaataatcaggactatggcttcagatggctgttgnnnnnnnnnnnnnnnnnnnaccataaaaata

SEQ ID NO: 11463 - DNA, 1144 bp, Macaca Fascicularis
  misc_feature (1)...(1144): n = A,T,C or G
acacatgtaaagaagggttgtnnnnagnnnannnnnnnnnnnnnnnnnnnnnnnnnnnnnnnnnnnnnnnccaagattggaannnnnnnnnnnnnnnnnnnnnnnnnnnnnnnaactcacaatttggtgtttctatggaggtgatgtttgagatgagatgtgctagacacagtgggggctggggagacactggcaggtaaacagcaccacaagagagcatggtgtattccaggaccagcgtgactggagcaaggaggagttgcagggagcagaagtctaaagagctcagcagagtgactctgaaaacctccttcaagtttgcactttagcctgtgggcgagtgaggccagggtgtttaaggaggagtgacagggtcagatttttggttttggtgcccgattgccagtttgggagccagataaaggagggcagactgggctgagacaagattgggagtcatcaagaagcagggagttggtttcttcagggaggggaggggctggtgggcaccatgggaacacacaggtttggttatctgtcatccctcaccacgaactgatctttcttctttccttagttttaatcagctggnnnnnnnnnnnnnnnnnnnntttgagaagctccgccacatgctactattggctatccaggagtgctctgaaggctttgggctggcctaataaggccctgcccacctctgtgggttttttttaccattgttggacctggggaggggggagttaaaaaaagaaccagaaagaaatgtcaaaaaccaataaatgaaatccaccaactcaccgtgtgtgtcccagctgccccatcttccccagcgcatacctattcctcttctcattctctccccgccacctgtttcctcaccttctctcccctttccatgccgtccatgatccccgccccatgtgtttaaaaggcagtagcctttgcagggacctgtctgtcccgactgtttgaannnnnnnnnnnnnnnnttctgtgttcagaaggatttgctgcattgagacttgaaacctttggataggggaaaaaattatatatatatatatttttttgttctgtttgcatttcttaatttgtgcttnnnnnnnnnnnnnnnnnnnnnntaatgattcaatgcgagacaaga

SEQ ID NO: 11464 - DNA, 704 bp, Macaca Fascicularis
  misc_feature (1)...(704): n = A,T,C or G
agacagatcagcagctgaccgagtcagcctgaaacggccagtgcagttgtggatgcctatccctccccacagctcctggtacaggcttatcggcagtgtttttcggagcaagaacgccagaatttgctcgcagacatacaggtgcgccgtggggaaggtgtgacatccacttctcgccgcgttggaccagagctatcgaggcgtatctaccttcagatgaccactttacagccacatctctctttagatagtgctgactgattctagccctcagggatgggatgaaaagctggaaacttccaccttcccaacctcagagcctgactgcaatgaagagannnnnnnnnnnnnnnnnnnnnnaagcctaggtgaggcccagtctttcctgggtcttgttatttgtgaaggtctgcctgtcagctggggcagagactgaaatactgccacctacctttggcatttaatgttcctctcctggcaaaaattcactgtcacaaaccacccccactcctacccagccaaccctcaaaacacaaaggaacaaagacagtccactcagacacgtatttaataactgtagaaatccaaaagaattagcatcaaatcttggaagtcgtgaatgaagctgtgggttggcttgactgggctcagccactgagctgcctcaaccggccaaggannnnnnnnnnnnnnnnnnnncagac

SEQ ID NO: 11465 - DNA, 837 bp, Macaca Fascicularis
  misc_feature (1)...(837): n = A,T,C or G
agcaggacccgnnnnnnnnnnnnnnnnnnnnnnnnnnngaggacctaannnnnnnnnnnnnnnnnnaaccagcagcaactcatcattatcttgnnnnnnnnnnnnnnnnnnnnngaaactgcagannnnnaaggaaagatcaagtagaactggtgaagaacatggtaactgtggannaaccattcttgaaagaaataatttcactgacttcacgaatgtgaggatgggttttcatatgccaccatngtgttccatttcccactnnnnnnnnnnnnnnnnnnnnnnnnnnnnnnnnnttggcttcttatnnnnnnnnnnnnnnnnnnnnnattcctattggtttatcacaggtgannnnnnnnnnnnnnnnnnaaggacatgaaaatgtcaagagtggaagatttttctaatcttggttcagcacgaagtgatgtttaggtcccttttaagtctaattgcaattttaagatttgttgggttttatgagaggctgttacttagtaaccttaaatcttttnnnnnnnnnnnnnnnnnnnnnnnnttgatacagttatatcaatattttgttactgatttgtttcaatggttacttgtataaggattttatatatatgatattatagataaaatcctatttaagacaaattctgttaatcaagaagggctctgtatttttttaaattaaaatattttcacttctcagtaagtagtcaattactgtagtgatttatttatgtgaagaataaactactatagaaagtactttattggaacctttattactgtgaaggagaaaaagaacttagctatttcttgacannnntatagtttacacaa

SEQ ID NO: 11466 - DNA, 399 bp, Macaca Fascicularis
gtgcaagactggcgagtgaggacgtgggagaacagctctcaaatccacctccccaagataagcgttagggatatttatggctgagggaagtgggatagtttaaggcatggggaagggtgattgggagtgaggaaaatttcagtaataggttcgttctgcccaagtgtagttggggttcaaggcatttcataaggatatacgtgtagacaattgttgtgctggctgggcacggtggctcacgcctgtcaatcccagcatctttgggaggtggaggtaggcagatcacaaggtcaggagattgagaccatcctggctaacacgggtggtccccgcgttagtagaaaccccatatctaataaaaaataaatacataaaaattatccgggcatgtgtggcagg

SEQ ID NO: 11467 - DNA, 739 bp, Macaca Fascicularis
  misc_feature (1)...(739): n = A,T,C or G
gtgttggcctccttcgagcccccacctgtgaccatccaacnnnnnnnnnnnnnnnnnnnnacagaggtctcctacaccttctcagactacccccggggtgtccgctacatcctctttcagcacgggggcagtgacacccagtactgggcaggctggtatgggccccgagtcaccaacagnnnnnnnnnnnnnnnnnncaagaggaccannnnnnnnnnnnnnnnnnnnnnnnnnnnnnnnnnnnnncatggacaggaggaggctgcccaatcgccctaccaagctgttctccagattttctgacagctgtccatactgtatccggnnnnnnnnnnggttcctccatgcaggagctgagcatggggtgggcagtgaagtccctgtaccagcgactcctgccccggttcaaccctaccagcttgtggaaacttactgtcacatagctctgacgttttgttttaataaatgttttcaggctgggcacgnnnnnnnnnnnnnnnnnnnnnnnnnnnnnnnnnnnnnnnnnnnnnnnnnnnnnnnnnnnnnnnnnnnnnnnnnnnnnnnnnnnnnnnnnnnnnnnnnnnnnnnnnnnnnnnnnnnnnnnnnnnnnnnnnnnnnnnnnnnnnnnnnnnnnnnnnnnnnnnnnnnnnnnnnnnnnnnntgagcttgcagtgagccaagatcatgccatgcactccagcctgggagacnnnnnnnnnnnnnnnnnncaaataataat

SEQ ID NO: 11468 - DNA, 758 bp, Macaca Fascicularis
  misc_feature (1)...(758): n = A,T,C or G
aaagggcaacaacngncacgnacacagaagacagccgcacaacggcttccggcccaaaaacaaaggcggtgccaaaaatcaagaggcctccttgnnnnnnnnnnnnnccgaggccccggcccattctgaaaagccccggcgaaggcagcacgctgcagacaccgcggaggccaggcccttccggggtagtgtcggtagggtttcacagtgcaatctctgccccacaagaatagaagnnnnnnnnnnnnnnnnnnnnnnnnnnnnnnnnnnnnnnnnnttggtggcctgagctaggaggaaaaagagcagtttccattcagttttgattccctgcccgaggtgctgacccaattcgctgccaaaagagagtcaatcagaatatacaaatcctgtatggttgtgtcatcctctcttaatcatttttactaattctaataatcagctctagcttgcttcataactttcatggctttgcttgatctgttgatgctttctctcnnnnnnnnnnnnnnnnnnnnnnnnnnnnnnnnnnnnnnnnnnnnnnnnnnnnnnnnnnnnnnnnnnnnnnnnnnnnnnntcagttagcaacctatgttgtagcagtgatgtcagtccattgattgtctttagagagttaatgttacaaaaaaagaattcttaataatcnnnnnnnnnnnnnnnnnnnnnnnnnnnnnnnnnnttgtagaatttaacatctggtnnntttctgnnnnaatatannnnnnnnnnnnnnntta

SEQ ID NO: 11469 - DNA, 752 bp, Macaca Fascicularis
  misc_feature (1)...(752): n = A,T,C or G
cgtatattaatannannacnnnagatgtaggtgcagagttcaatgacatattcactaactaaacacacttnnnnnnnnnnnnnnnnnnnnnnnnnnnnnnnnnnnnnnagcacctcggaaactgctttctttcttctgcttcctccccctgggtgtgcgctgtgctgccctctcactcaactgtggttcagcgcagcagcccctataggtgttgacacatggccgatagggtcacagtcctgctgggccctcgggcnnnnnnnnnnnnnnnnnnnnnnnngggggtcctccaacagctcagtgcagcatgctggggggtcagggccagcacctgtccctggggcctcaggcctcccttccttctcacagcggcnnnnnnnnnnnnnnnnnnnnnnnnnnnnnnnncacacnngaagaccatgcgcagaggggnnnnnnnnnnnnnnnnnnnnnannnnnnnnngaccctgcccctgtggatcgggaagcccggtgacaagtgagggcagcagctgcgagggaggggctggtgcccaggggctgggactgaccctttgttctgctcacaggcccccacccctctgtggggccatccccgcctcannggactatgtggccagaccatggagacaaggtggctgcccgggtgaaggccgtggatggggacnnncagtggatcctggccgaggtggtcagttacagccatgccaccaacaagtgagtgannnnnnnnnnnnnnnnnnnnnnnngtc

SEQ ID NO: 11470 - DNA, 717 bp, Macaca Fascicularis
  misc_feature (1)...(717): n = A,T,C or G
acataggaggagatgcagggggagggacggcannnaagccgggccccaggacctcacggacgggccccannnctggggccaccagccgccccccagctgcccagcgcatgcggacgctcttgcctcagcgctgcggttatacaatcttgcacctccttgggcagctgcggccaccagatacccgttccagctcccattttggccgagaggttgtcatgagggtcactacagtctgaactggactccaggagcagggatcttgagtcaatgcatcagtcagagaagagctctcatgactgctggannnnnnnnnnnnnnnnnnnnnnnnnggcatgctgcccccatcacctaggatctctgtgggcagnnnnnnnnnnnnnnnnttgtctggcctcactgcccactgggtagagacacctggatgacnnnnnnnnnnnnnnnnncagcttctcacactcatccagagatggccggtgggcaggcgggaannnnnnnnnnnnnnncctggagagaaccgtctttacctcagctcctagggcctccagccccccagctccaccatggcgacttggtgaagggggaccaatgccagaagaaaggggctgtagacccctatnnnnnnnnnnnnnnnnnnnnnnnnnnnnnnnnnaagactagtatacattgacctcccgttccctgcatgagggcgggggacttccccctgctccatccccc

SEQ ID NO: 11471 - DNA, 754 bp, Macaca Fascicularis
  misc_feature (1)...(754): n = A,T,C or G
agagtgcagccctgnnnncannnnnnnnnnnnnnnnnnnncgacgcagggtacaccacaagcacggagacctgccagtatcttaaggattannnnnnnnnnnnnnnnnnnnnnnnnnnnnnnnnnntgtcctgggccacccaatattgcagccgggcccagtgccatggacatggacgctgtgtgcgccgcaaccccagtgccagtaccttcctgcatctcagcaccaacagcttccgcctagtgcctagccacacacccggtgaaccccagctgcgacctgtcggggagctcagctgggccgaccttgaccacctgcagacacacttccgctgccagtgctactnnnnnnnnnnnnnnnnnnnnnnnnnnnnnnaccataggcaggcagctgggggtgccagtgaggcctgggctgcgttccacctcnnnnnnnnnnnnnnnnnngcagccctggcctttacctggaccttgtaggnnnnnnnnnnnnnnnnnnnnnnnnnnntggcctctaccacaagggttctcttaggcatgtaggatcctgcagggggtggnnnnnnnnnnnnnnngagtgggcagagcccccacgaagcccaggagggcatccataccagctcgcagccccctgttctaagggggaggggaagtcnnnnnnnnnnncccttctctccctgccagaggggaaggagggnnnnnnnnnnnnnnnnnnnnnnnnnccctactctcttgccctggatagtttattattatta

SEQ ID NO: 11472 - DNA, 915 bp, Macaca Fascicularis
  misc_feature (1)...(915): n = A,T,C or G
ggttgtgatgttgactttgnttnngnnnnannngcaatccatggttcagctgtctttggttatgagggctggcttgctgggtaccagatgaccttcgnnnnnnnnnnnncaaagctgacnnnnnnnnnnnnnnnagtgggctacaggactggggacttccagctacannnnnnnnnntgtgatgatggacnnnnnngnannntcaatnnncagaaagtatgtgaagatcttgacacttcagtaaaccttgcttggacatcaggtaccaactgcactcgttttggcattgcagctaaatnnnnnnnnnnnnnnnntgcttccannnnngcaaaagtcaacaactctagcttaattggagtaggctacactcagactctgaggcctggtgtgaagcttacacnctttgctctggtagacggaaagagcattaatgctggaggccacaagcttgggctcgccctggagttggannnnnnnnnnnnnnnaaagatacctttgggaatggatatcannnnnnnnnnnnnnnatatatttcnnnnnnnnnnnnnnnnnnnnnnnnnttcccccaagaagatgatcaaaacaaagaatgatctcaacaagagctgtattttaagtatttagacagttccttgttagctggtttctagttgaattggttatctagttaccaatgctgcagtcctgcagtcacctatacattatttaaatgtatttaactgttaaatgcgctacccaccaataatgaaatagacctttatgannnnnnnnnnnnnnnnnnnatgtttgtttttatgttcctttagaaaacattgactattaccattgaatgagatggatcagtggatattgagatgaggttaaaaattttgttaagttcagccattattacttatagtacanngatccatctca

SEQ ID NO: 11473 - DNA, 958 bp, Macaca Fascicularis
  misc_feature (1)...(958): n = A,T,C or G
gcctggccaccagctacatcgcctacctcatggacctgctggccaaggacgaccagaatggcgaggcggaggccttcaaggcagagatcaagaagaccgacgtgaaagaggagaagaggaagaaggagatgaacgaaatcttgaaaagcacagtgagcagcaacgacaagaaaaccaaaggccggacgggctggccgcagcacgtctgggccctggagctcaagcagtgaggaggaggaggtgaaggaggaggaggaagagagcgcgagtgagccggggccaaggcgccagatgcagacccaggactccggaaaagccgtccgcgctcggctctgaggactccttgcatttggaatcatccggtttatttatgtgcaatttccttcccctctctttgaccccctttgaggcatccgctccccgtctccccctccaaaaaaaaaaatggatatttgaagaaaagcattccatattttaatatgaagaggacactcccgtgtggtaagggatcccgtcgtctcgtagattctgtgtgcgtgaatgttccctcttggctgtgtagacacnnnnnnnnnnccccgccaacctatccaaccccttccagataaagacagtgggcactagtgcgtttgtgaagtgtatctttaatacttggcctttggatataaatattcctggggattataaagttttatttcaaagcggaaaacagggccgctaacatttccgttggggtcggtatctagtgctgtccgttcatctgtggtcgttccctctttgaagatgtttccaacagccacttgttttgtgcacttccgtcctctaaaactaaatggaatttaattaatattgaaggtgtaaacgttgtaagtattcaataaaccactgtgttgtttttttttttttttacannnnnnnnaatcttttaatggttgatacctcataaagagttttgaaa

SEQ ID NO: 11474 - DNA, 656 bp, Macaca Fascicularis
  misc_feature (1)...(656): n = A,T,C or G
acagcgatgatgatagtggctccggaagcctggttggcattgacaacaaaatcgagcaagccatggatttggtgaagtcccacctcatgtttgcggtccgggaggaggtggaggtactgaaggagcagatccgggaactggcagagcggaacgctgcgctggagcaggagaacgggctgctgcgcgccctggccagcccagagcagctggctcagctgccctcctcgggggtcccacggcttgggccctccgcgcccaatgggccctccgtctgagcctcccttcccttacaatgtgcctttggggctgcccggccnnnnnnnnnnnnnnnnccccctcttcctatgcagctttaatgtccccatgtccccagggtgggagttcaaggctcagtaacggcctggtcccccggcccctgccccatctcctcatcatccccagccttgatggaggagggaggacttcaggacggggcatcagagggagccccctctgggagggaaccaacctccaccctccctcatgggacccccagcagtcgacggcctgggggagttggaggctccctggcagacaccccacccccaccttgttcccttgaggtgcatcctctcctctgcctaggggagggagtgtggacagtatctggaagttct

SEQ ID NO: 11475 - DNA, 704 bp, Macaca Fascicularis
  misc_feature (1)...(704): n = A,T,C or G
atgcaggtccatnnnncaaagaccnnnnnnctgaacatcctgggggggcnnnnnnnnnnnnnnnnnnnngggggcatccgctcnnnnnnnnnnnnnnnnnnnnnnnnnnnnnnnnnnnnnncccctgagtcagctatcaagttcatggcctatgagcagatcaagagggccatcctggggcagcaggagacactgcatgtgcaggagcgcttcgtggctggctccctggctggtgccacagcccaaaccatcatttaccccatggaggtgctgaagacacggctgaccttgcgccggacggnnnnnnnnnnnnnnnnnnnnnnctgcgccaggcggatcctggagagggaggggccccgtgccttctaccgcggctacctgcccaacgtgctgggcatcatcccctatgcgggcatcgacctggccgtctatgaggtctgtgggcagcccgcccctccctccctgctcccctctgggatttgcccacaggacaccccttccccttcccctggggctggctcggttgaccttctatagcnnnnnnnnnnnnnnnnnnnagtgaggagcactttggacctgggnnnnnnnnnnnnnnnnnnnnnntattggactctcccacttctccacttaattttgattagcagttcagccttcccgggtcacctgaaagtcagggaccactctagctgacagaaccataagag

SEQ ID NO: 11476 - DNA, 1063 bp, Macaca Fascicularis
  misc_feature (1)...(1063): n = A,T,C or G
tcacaggaactggcccaacatgcagcagaaataggagctgatggcatcgctgtcattgnnnnnnnnnnnnnnnnnnnnnnnnnnnnnnnnnnnnnnnnnnnnntcctaannnnagtggctgctgccgcccctgccctgccattttattactatcacattcctgccttgacaggggtaaagattcgtgctgaggagttgttggatgggattcaggataagatccccaccttnnnnnnnnnnnnnnnnnnnnnnnnnnatctcttagacttcgggcagtgtgttnnnnnnnnnnnnnnnnnnnnnnnnnnnnnnntttttggggtannnnnnnnnnnnnnnnnnnnnnnnnnnnnnnnnnnnnnnnnnnnnnnnnnnnnnnnntataactacctgggaaaaaagacaaaccagatgttggaggcttttgaacgaaaggacctctctttagccctgaactatcagttttgtatccagagatnnnnnnnnnnnnnnnncaaactaggttttggagtgtcacagaccaaagccatcatgactctggtctctgggattccaatgggcccaccccggcttccactgcagaaagcctccagggagttnnnnnnnnnnnnnnnagctaaactgaagagcctggatttcctttctttcactgatttaaaggatggaannnnnnnnnnnngtagctagtgcctctctatcaaatcaggttttgtaccttgagacataatctaccttaaatagtgcattcttttctcagggaattttagatgaacttgaataaactctcctagcaaatgaactctcacatcaatcgacaagcattgaggtacctattgtgagccttaaaatgtcttactttgtgaaggggcaaaaactctaggagtcacaactctaagtcattcatttcacagatttttttgtggagaaatttctgtttatatggatgaagtggaatcaagaggaaaattgtaattgattaattccatctgtctttaggaactctcatctcaatttctggttcctaatcctattttaaagttgtctaattttaaaccactataat

SEQ ID NO: 11477 - DNA, 766 bp, Macaca Fascicularis
  misc_feature (1)...(766): n = A,T,C or G
aaaacagatcagtttccgcttttnnngattattatgggaaagcgatcatctaatgaagtgttgaatgtgatacaagggaacacaacagtagatgagttaatgatgagactcatggctgcaatggagatcttcacagcccaacaacaggaagatataaaggacgaggatgaacgtgaagccagagaaaatgtgaagagagagcaagatgaggcctatcgcctttcacttgaggctgacagagcaaagagggaagctcatgagagagagatggcagaacagtttcgtttggagcagattcgcaaagaacaagaagaggaacgtgaggccatccggctgtccttagagcaagccctgcctcctgagccaaaggaagaaaatgctgagcctgtgannnnnnnnnnnnnnnggacccccagtggcgagttcttggagcggcgtttcctggccagcagcaagctccagattgtctttgattttgtagcttccaaaggatttccatgggatgagtacaagttactgagcacctttcctaggagagatgtaactcaactggacccaaataagtnnnnnnnnnnnnnnnnnnnnnnnnnnnnagaaacccttttccttgaagcaaaagagtaaacacggcccagcggtggaatcagccattccttgacaagcnnnnnnnnnnnnnnnnnngaagggctcctcgccaacccacccacacgctcgtctcactcaattcaatgtcacacttctgcctcnnnnnnnnnnnntgaaaaag

SEQ ID NO: 11478 - DNA, 714 bp, Macaca Fascicularis
  misc_feature (1)...(714): n = A,T,C or G
gacacagatgnaagaagaaaacaagcctgtatttttccagcaagtataacaaagaagctcctagcccnnnacgacgtaaagcctttaagaagtggacacctcctcggtcaccttttaatctcgttcaagaaacactttttcacgatccatggaagcttctcatcgctactatatttctcaatcggacctcaggtaaaatggcaatacctgtgctctggaagtttctggagaagtatccttcagctgaggtagcaagaaccgcagactggagagatgtgtcagaacttcttaaacctcttggtctctacgatcnnnnnnnnnnnnnnnnnnnnnagttctcagatgaatacctgacaaagcagtggaagtatccgattgagcttcatgggattggtaaatatggcaacgactcttaccgaattttttgtgtcaatgagtggaagcaggtgcaccctgaagaccacaaattaaataaataccatgactggctttgggaaaatcatgnnnnnnnnnnnnnnnnttaaactctgcagttttcaagctcatctgttatgcatagctttgcacttcaaaaaagcttcattaagtacaaccaaccacctttccagccatatagattttaattagcccaactaggagcccagtgtgtgtgctttcttaatgtgtgtgccaatggtggatctttgctactgaatgtgtttgaatatattttga

SEQ ID NO: 11479 - DNA, 860 bp, Macaca Fascicularis
  misc_feature (1)...(860): n = A,T,C or G
acagaggactnnngctgtggagaaggttctnnnnnnnnnnnnntcacacagaccctgtaccctcnnnnnnnnnnnnnnnngtcnnnnnnnnnnncagttcagatacttcataataccttattttgtgtcgtgtggggtcatacgtcatcgtgtttgtaagagaagatggtcattttattctctgtataaaacttagctctaaagcagaaactaaagcagcnnnnnnnnnnnnnnnnnnnnnnnnnnnnnnnaggctcagcagctctcattctccagtggtgagcacaccatttgtcctgctgctgttgtgaaatatnnnnnnnnnnnnnnnnaaaatgtcccctgcccagccccctcgccgcccttgacctcctgcaagccatgtgtgtatnnnnnnnnnnnnnnnnnnnnnnnnnnnngctgtacacgagctcggcgccgcctccacctccctttcagagcctgccccccgccctctccgctcgctgcattgtggtgttctcttctcaaggctttgaaatctccccttgcactgagattagtcgtcagatctctccccgtctccctcccaacttatacgacctgatttccttaggacagaaccgcaggcacctgctccgggtgtcgtactcccgctgcttgttctgtcccctccnnnnnnnnnnnnnnnnntcatgcttcaggaccttgtttgtcaaagatgttggtttccctttctctgttatttatatgaaaataatttatcaaaaggatattttaaaaaagctagtctgtcttgaaacttgtttaccctaaaattatcagaatctcagtgtttgaaagtattgaagcacaaacatatatcatctctgtaccattct

SEQ ID NO: 11480 - DNA, 765 bp, Macaca Fascicularis
  misc_feature (1)...(765): n = A,T,C or G
cagtccattggaatagtattaggttttgttttttgnnnnnnnttccccctttccactgggcccttccaacacaatgaatgaaggaaatatcatttatttaagcagccaatcagtgattgccattagactgtttaatactgttacttttatgtagaacccaaggaatgccttcctgtcatattttagccaaaacaactggttatatgcctcccttgcagcaagcactacaatgtatgtgatnnnnnnnnnnnnnnnnnnnnnnnnnnnnaaaggataagctaattgaatgccttgaaagtattatccactggtnnnnnnnnnnnnnnntttcagtattatttatagttgcacttgattgcagttctgtgaggcttgagcattcatacacctcacctgccttggcaagcctatttttgtgacatggcagcacggatataacactatgcattannnnnnnnnnnnnnnncaagtttaatatcctaaaaggaatgccannnnnnnnnnnnnnnnnnnnnnnnnnnnttatcctagtacctcagtgttcattcctgttacctgcataccttcttaaannnnnnnnnnnnnnnnnnnnnntttttgttttccattgagtgtacactactgaataagtgtaggacttttatgtttaccatgtgagtcctgcaacactaaagatattttgaatatcagtcatgatggcaatttctgtataaaagagccttaaatggaacattgttttgagatcaaactccccaccctacaaac

SEQ ID NO: 11481 - DNA, 741 bp, Macaca Fascicularis
  misc_feature (1)...(741): n = A,T,C or G
gcacacagagcagcnncgctcgnnnnnncatgcggccaccaagtgctgaaaccacatggtgncnntgcgaatgggcaatcaagtccagagccggggcacttttcagagtttgaaggtaactgagagcagatggtcctccatttcaactccagaactggggctctgggatgggctcatattctagccctccccggcatgtcagagccaggctctgcctggaggatccctccatccggctcctgtcatcctctacgctttggccaagccagaggtgnnnnnnnnnnnnnnnnnnnnnnnnnntctggaggacacacagtctcgnnnnnnnnnnnnnnnngcctttctgnnnnnnnnnnnnnnnnntcctactcctcctttctttatctgagatctcccnnnnnnnnnnnnnnnnnnnnnggacagagctggctgtctacccccacccctaacctggcttannnnnnnnnnnnnnnnnnnnnnnnnnnnnnctaggttctagatcctggcttctagatctggaaccttaccacgttgctgcatactagtccctttcccatgatccggaactgaggtcactgggttctagaacccccacatttacctcgaggctcttccatcccnnnnnnnnnnnctgcctnnnnnnnnnnnnnnnnggagggaccctcatgtgtgctgtgctgtgtctgcaccgcttggtttgcagttgggaggggagggcaggaggggtgtgattggagtgtg

SEQ ID NO: 11482 - DNA, 445 bp, Macaca Fascicularis
  misc_feature (1)...(445): n = A,T,C or G
caggttgcaagcagtgannnnnnccaggggnntgatgtatctctcacggcttgtaaagtgtgacctcccacctccctcccacagttctgggcactccctcccacctccccaccctttgatcgggtagggagtcagggacccctgcacttgtcccaccaagccaagcagccaagctccttgggaggccccactggggaaataacagctgtagctgaggggagagtgtcttcacgggggaacaacaaggaagacctgggacgggccttttttctctgactatctcctagcaagctgggtaatctaattgacagaggagtctgaagcagaggcaaagaggcaagaggctggattttgaattttctttttaataaaaaggcacctataaaacaggtcaatacagtacaggcagcacagagacccccggaacaagcctaaaaatgttcaa

SEQ ID NO: 11483 - DNA, 757 bp, Macaca Fascicularis
  misc_feature (1)...(757): n = A,T,C or G
gacgaaagctttcactgatttcattagaagccannngaatgaaatcaaggcttacatcaccttccattcctactcccagatgctattgtttccctatggatatacatcaaaactgccacctaaccacgaggacttggccaaagttgcaaagattggcactgatgttctatcaactcgatatgaaacccgctacatctatggcccaatagaatcaacaatttacccgacatcaggttcttctttagactgggcttatgacctgggcatcaaacacacatttgcctttgagctccgagacaaaggcaaatttggttttctccttcccgaatcccggataaagccaacctgcagagagaccatgctagctgtcaaatttatttccaagtatatcctcaagcatactccctaaagaattgccctctgtttggaataagccaattaatccttttttgtgcctttcatcagaaagtcaatcttcaattatccccaaattcagcttctatatcacctgaatccttctctcgctcatttaagtcccacgttatcactgtttgcttttacttactttcagtagcaccataacgaagtagctttaagtgaaaccttttaactacctttctttgctccaagtgaagtttggacccagcagaaagcattactttgagtattttgaaaggtgatatacagtggggcacagaaaataaacgaaaaccttcagtttctcgcannnnnnnnnnnngtggcttcatcaatttat

SEQ ID NO: 11484 - DNA, 537 bp, Macaca Fascicularis
  misc_feature (1)...(537): n = A,T,C or G
ccaggagggncgggtggatgctttnnnaacaggcctgcagggagtagatgcgttgtatccccagctgtcactcacctcccagctcnnnnnnnnnnnnnnncctcagggtgtgggggcttagatgtccttacaacttcatatcttnnnnnnnnnnnnnnnntatctggggcgcctggctcacgaggttgnnnnnnnnnnnnnnnnnnnnacagccaccttggaggagaagaggaaggagaaagccaagatccactacaggaagaagaagcagctcatggtgaggacaggctggtgctgagggggcatctcactcttggatgggcctgacaggtgctgtcttgcccacagaggactcttaactggcaaaggaccagccggggttggggtgggatggagcccgtgtgatgcgggcagtcgaacccctcctgaccaccaccacctgcacttactcttggcagaggttacggaaacaggccgagaagaacgtggagaagaaaattgacaaatacacacaggtcctcaagacccacggactcc

SEQ ID NO: 11485 - DNA, 647 bp, Macaca Fascicularis
  misc_feature (1)...(647): n = A,T,C or G
acgtgagccagttnnatacccgcttcacacggcagacaccagtggacagtcccgatgacacggccctcagtgagagtgccaaccaggccttcctgggcttcacgtacgtggcgccgtctgtcctggatagcatcaaggagggcttctccttccagcccaagctgcgctcacctaggcgcctcaacagtagcccccgggcccccatcagccccctcaagttctccccctttgaggggtttcggcccagccccagcctgccggagcccatggagccacctctacctccactcctgccaccgccgccgccactgccaccctcaatcaccgcccctctccccatccatcccccctcagggaccaagaagtccaagaggggccgtgggcgtccaggacgctaggaagctgagtggggttgagggcagcccttgagccctatccctgcagctgtgagggcagcaggtccctgggccagtgtcagagacctgggggtgtgtctgggagtggggtgtgagtgcgtgcgaaagtgtgtgcctgctggggcagctgtgcccctgaatcatgggcatggagggctccaggctacgactgctggggccagagcgctgctgcccaccatgccctgcgctcagctagctgctcccgtggaa

SEQ ID NO: 11486 - DNA, 766 bp, Macaca Fascicularis
  misc_feature (1)...(766): n = A,T,C or G
atgaaatgtgtgaagttcttgcnntacgtcctcctgctggccnnnnnnnnnnnnnnnnnnnnnctgattgctgtgggtgtcggggcacagcttgtnnnnnnnnnnnnnnnnntccagggggctacccctggctctctgnnnnnnnnnnnnnnnnnnnnagtgggtgtcttcctcttcctcgtggcctttgtgggcnnnnnnnnnnnnnnnnnnnnnnnnnattgtcttatgnnnnnnnnnnnnnnntttctgtctctcatcatgttggtnnnnnnnnnnnnnnnnnnnnnnnnntatgtgtttagagataaggtgatgtcagagtttaataacaacttccggcagcagatggagaattacccgaaaaacaaccacactgcttcgatcctggacaggatgcaggcagattttaagtgctgtggggctgctaactacacnnnnnnnnnnnnnnnnnnttccatgtcgaagaaccgagtccctgactcctgctgcattaatgtcactgtgggctgtgggattaatttcaacgagaaggcgatccataaggagggctgtgtggagaagattgggggctggctgannnnnnnnnnnnnnnnggtggctgcagcagctcttggaattgcttttgttgaggttttgggaattgtctttgcctnnnnnnnnnnnnnnnnnnnnnnnnnnnnnnnnnnggtgatgtaggggtctggtctcctcagcctcctcatctgggggagtggatagtatcctccanggtttttcaataaaa

SEQ ID NO: 11487 - DNA, 743 bp, Macaca Fascicularis
  misc_feature (1)...(743): n = A,T,C or G
agtttcagcannaaagctgcnnnnngcgaggtctgttcannnnacctggtctccatgacaatgaccgtcgcctggcagaccacttcggtggcaagttacacttggggttcattcagatccgagagaagcttgatcagttgaggaaaactgtcgctgaaaagcaggagaagagaaatcaggatcgcttgaggaggagagaggagagggagcgggaggagcgtctgagcaggaggtcgggatcaagaaccagagatcgcaggaggtcacgctcccgggatcggcgtcggaggcggtcaagatctacctcccgagagcgacgaaagttgtcccggtcccggtcccgagatagacatcggcgccaccgcagccgttcccggagccacagccggggacatcgtcgggcttcccgggaccggagtgcgaaatacaagttctccagagagcgggcatccagagaggagtcctgggagagcgggcggagcgagcgagggcccccggactggaggcttgagagctccaacgggaagatggtttcacggaggtcagaagagaaggaggccggcgagatctgaacccgtctcctgggtgctgtaaatagtctgataaacgttcacacagtctaaaattaccctttatatttgctgaatacaactcatcttttgtagtttaaaatttctattgttttggagctagctgtgagtttctagaattgtacagagttgctcctgtgtcggggtcggtga

SEQ ID NO: 11488 - DNA, 568 bp, Macaca Fascicularis
  misc_feature (1)...(568): n = A,T,C or G
ggtttnnngcattnngctacntgtaaatggtggttcgttgcagtttnnnnnnnnnnnnnnnnnnnnnnnnnnnnnnnnnnnnnnnnnnnnnnnnnnnnnnnnnnnnnnnnnttttttccccgttttctttttccttctttctttttgtctttttttcccccaagaggaagaattgcttttctcttgtcagtatgatttgtaactctggaacactattcttacagaatgcctttctaacctgaaggatacccagatttctttctttatgaacaagatggaaaatcccctaccccnnnnnnnnnnnnnnnnnntatgggccagaatattctgtataccagacatcggtaagcttgcacagtttgcaggaaggcgctggttccccctcacaggatgtgcatgctcagtgggctgtgtnnnnnnnnnnnnnnnnnnnnnnnnnctnnnnnnnnnnnnnntgcctgtatagtttttnnnnnnnnnnnnnnnnnnnnnnnnnnnnnnaaaaaatgtgtcagttgattttggtgtgatttgtgtaaatggttcatggcaatggcattggagtgct

SEQ ID NO: 11489 - DNA, 717 bp, Macaca Fascicularis
accccgccttcctgcccagccacggactgtacacctgccacatcggcaagttctccaactggaccaacagcgcattcctcgcacagggttcgctgctcaacatgcgctccttcctgggcgttggcgcgccccacgccgcgccccatggccctcaccttcctgcacctccaccacctcagccgccggtcgccattgccccggggacgctcaacggagacaaggcctcggcccgcagcagccccacgctcccagagagagacctcgtccccaggccagattccccggcgcagcagttaaagtcgcctttccagccggtacgcgacaactctctggccccgcaggagggaacgccgcggatcctagcagccctcccgtccgcatgattaagggtcttcttttacttttgcggggaggggcgaggggggaggagttggggagggagggaatgtgggaggaattaagacaaatatttcagactggtgtaaaggacaaatatgacaacgacgtcaaggactcccatccatcgctttctgcagacaggggcttgttcggtcccgagctcgcgtccaggcggccaggcctctgcaggcggctccggtggctgcgattatcgggttcggtaaatgcccccacatgcttgtgtctctttcccccctcttccgtacatagagtgatttcagattgtaaatagcgcgtcagcgaacttgtctaaatcat

SEQ ID NO: 11490 - DNA, 424 bp, Macaca Fascicularis
ggtggacatggtcattaaatacagttccaaagcccgcctgagacagctgccttcattggtgaatgcctgggagcgagccctgaagcccatccggctgcgggaggcgttgctggcgagactagagtggtttgagggacaagcttccaaccccaaccgcttcttcaaaaagaccaacttgagctccagtcacttcctggaggaggatcagatccgaagccatctccacaggaagctcaacttaatggagtcttctttggcttctctcctggaggagattgagttaatctttggcgagccagtgatcttcaaggggcggcgctacctggacaagatgaagagtgacaaagtggagatgctctattggctgcaacagcagcggcgggttcgccacctggtctcggccctgaaggatccccatcagtca

SEQ ID NO: 11491 - DNA, 672 bp, Macaca Fascicularis
  misc_feature (1)...(672): n = A,T,C or G
catcttgtattacttttgatgtaaagcaactaatatttacactatgccatattttttttaatcatagttgtaaattatgaaagatccttgaatnttctacagatctacaactactaatgtaacagacaagggcaatcttggtatttaaatctgagcatggcagttctaccataaaaagtactctatttttctaatttctaggatttttaaaataacatttctgtaagtctgacatactaatagtcactcaagcagtaccatttattttagtttgcatatattttcagtttttaatttaatgtaatgtattgagtctaatagactgttttgcaataattagaataaagatttatttcttctaatcgaagatgcataacagctattatctaggggaccaccaaatgtgatttcaagattttgttaactattacaaatgtaatccttacatagaaattttaattttgtaaagtagtgtataatattgtaatattaaattcttgttctcaaattcaaatatgtattgatcttcaatgtgctgtgttaaatcttgcttctctgaaatgttggagacaagatttgtcttcctttttacagtttgtaattttcactgttttattcctgtaaaaaaaaagtcacttgtaacccatgcaaacaatcgtcgatctgtgctaa

SEQ ID NO: 11492 - DNA, 722 bp, Macaca Fascicularis
tggccccgtgcctgctcggaggagctcactgccagccgcggcctgcgcgccatgggtcatgtgtgtttgcatgaggaactctttagtggcagacacctcagagacggctgtggtcaccccccgcctccgcagcccaggagccgtcctgggtgcataggaccagtttctgtgactcttctccagttgggcgtgttgacagacatgcgtttcccctcctcccaccctcattttctggtccttgcgacagaaccaggggcgacatcatgaccttctgtcccggccgccttagccctgggcacagggaaggcagctgggccgtttctgtctgtcctgtcctgctgtccttctgtcctgggtgtttcacggacccagggccccccccaggaagcttatcccccctattctgggtggaggccacggggtacctcaggtgccacccaccttggccctaaaacagccaccaggaaagcagccagatagccggacagcagggggcctgtctcggttcctgaggcctgggggtggcaggcgagcccatgcgccgtggtcccggctgcagggttgtcagtcggagcgtcctggggctccctggctcttggccatctgtgaggtaggcgcagtaccgtgtgtcgtaggtaacagtaggaacgggggccgccgcggccctgcagcccctcacggcggtgaggcgtgtgccgagcccacccggggtgcagggcgtg

SEQ ID NO: 11493 - DNA, 737 bp, Macaca Fascicularis
  misc_feature (1)...(737): n = A,T,C or G
gactgatctgaggacatggcacagcgcaggaaagaagcagctgatatgctaaaggcattacaaggagccagtcaaatnnnnnnnnnnnnnnnnnnnnnnnnnnnnnnntgaagagaactatgtaacactgagactttgttgactcaaaacttgctagttactgcctacctgagtagaatcttatttatgaactcctgtgtattgcagtggtatgaatctgctcatgtgaagactggctataaactgaaaagtgtattccatattacagaacgaatcacacatttaatccaaataataaatggctgtttctaaagtttcccagtatatnnnnnnnnnnnnnnnnnnnnnttgtgacagtttcatctgaacttaaaaagaactgttaatgttctagctgtgcaaagcagtttgcctgtggataagatgacctgtgtaataatctttgttagtagtctcaaagctgctgccatagtcctccaagaagaaagcaccaagacaacatttcatatgactataatgcatgtactatataagctgatctggctttgaaagatgtgagttggcaagttcctcacatagagtcattgtattccacctgtcctgcaatttagtttttctgagcttctctgcagcctttgatgtgtttttaagaaagctgaatgcacaagaggatctgtgacactgacatggatgtggtgtgcatactgtgnnnnnnnnnnnnncttccaattctgggt

SEQ ID NO: 11494 - DNA, 679 bp, Macaca Fascicularis
cagtgccctcaaggctcggaagaatgtggagagtttcctagaagcctgtcgaaaaatgggagtgcctgaggctgacctgtgctcgccctcggatctcctccagggcactgcccaggggctgcggaccgtgctggaggccgtgaagcgggtggggggcaaggccctaccgcccctctggcccccctctggtctgggcggcttcgtcatcttctacgtggtcctcatgctgctgctctatgtctcctacactcggctcctgggttcctaggacccgaaatcagccctcccttacccctttccctccccccttctatttataaggcccctgctccacccgaccccacctgcggtgccttcagccccgaccaaagacactagtgcacccccttcacagacactgacctcagaggccccactctggtgcccccagaccctgggcccccagcctctggcctccctccggtagccccatgagtccccacctctcagtgctgacggtgccttcatgtccccgccggccctgcccctgccctctgtgccccgtgaggggtggcaggagctagagtctcccccttcctcctgtgccctccccttcccccgcaacggctgctatgcgggggctaaattatctctatttgtagagaggatctatatttgtaggggtgtggggcccaggccg

SEQ ID NO: 11495 - DNA, 684 bp, Macaca Fascicularis
  misc_feature (1)...(684): n = A,T,C or G
aggcaggagggannnaagcccaccggcgacnnnnnnnnnnnnnnnnnnnnnnnnnnctacatccggccggggcccagggaggggagcaaggagagggcgggtgcacgcagcaagcgggccctggaagaggactactgtggcacggaagtcctgtccaagaacaagcagaagaagcagctgaggaacccccacaagaccttcgacccctctctgaagccaaaatatgcaaagtgtgnnnnnnnnnnnnnnnnnnnnnnnnnnnnnnnnnnnnnnnnnnnnnnnngcggctgctgcaagaagcgagcctccaaagagactgcggactgcnnnnnnnnnnnnnnnnnnnnnnnnnnnnnnnnnnnnaagnnnnnnnnnnnnnnngaggcccagcctgagctgcaggagcctcagccggcagcacccggaacaccaggtgnnnnnnnnnnnnnnnnnnnnngtgccctggcctgaaggcccagaacccccacccccaggactgctgctggagcctggacacgtcctacttaaggaaacgccttttactcagggaatctcctgctacttaatgtggaaagacacgcccatgccccccttcggcccactctggggcctggagatgctgcagtggggagcaggccccaggctggacctgccctgtcctcagcacgcgtgtgcaaaagcgaa

SEQ ID NO: 11496 - DNA, 752 bp, Macaca Fascicularis
  misc_feature (1)...(752): n = A,T,C or G
taaaacaggtctcgccatggaggccacgagcaacagaggttgtgggccggccggccggccctgcgggcctgagaaggcctccgtccaagcagccatctgatcacagctatgcccttttggacttagattccctgaagaaaaaactcttcctcactctgaaggaaaatgaaaagctccggaagcgcttgcaggcccagaggctggtgatgcaaaggatgtccagccgcctccgtgcctgcaaagggcacaggggactgcaggccagacttgggccggagcagcagagctgagccccacaggctccagacgcagaggcggcagtggcaccagggccggcagggctttggagctctggctgtgnnnnnnnnnnnnnnntgtagacactgagaaagttggccgtgaggcctgccaggcaggggattgagacagtagccaagctcccgggcgagagccccgacgccgtctgggggacgtttagaggcatggcactaggagtgcacgtctgtgagcacgatgagcttatcctcccacggtttaacggaagtnnnnnnnnnnnnnnnttctgnnnnnnnnnnnnnnnnnnnnnnnagagcgagggttgttggaagcccctgtgtgggagatgttcctcagggaggaagccatgtgatgggcccggctctgtggccgatgtgtggtcccctcctccatcagcctggannnnnnnnnnnnnnnntaaggcgtgactcctgtcccggcctggtgtgcgggca

SEQ ID NO: 11497 - DNA, 697 bp, Macaca Fascicularis
  misc_feature (1)...(697): n = A,T,C or G
gatgccatctccacagtttatcaaatcttacttcagttctttcacggatgatatcnnnnnnnnnnnnnnnnnnnnaggagagaagtctgatgaagataaagacaaggaaggggaggctttagaagtgaaagaaaattctggatatttaaaggccaaacagtatatggaagaagaaaactacgataaaatcataagtgaatgctcaaaagaaatagnnnnnnnnnnnnnnnnnnnnnnnnnnnnnnnnnnnntnnnnnnnnnnnnnnnnnnnnntattggcagtgccaatgcggccaaaccagatttagataaagtcatcagtttgaaagaagctaatgtgaaggtacattaaaaaatgtgtgtgaagaaattattaaatagaaggtgatgcctttcattatgttttgccagattttttaannnnnnnnnnnnnnnnttcttagaagggctgtttttnnnnnnnnnnnnnnnnntcttaataataacgtaattggtgcagtgaatctgaaaatataaatatcaatgatatttaatctttatttaggaaaggacttttttttccctgtagcatcttgtagtttcatcttctccctgtagccactgcctactgtattggactgtatttgggcagtggtaaaagtgatatagcaattctgtagataatgctgtaagtaacgtataatttgtagcaccaggt

SEQ ID NO: 11498 - DNA, 732 bp, Macaca Fascicularis
  misc_feature (1)...(732): n = A,T,C or G
cgtatttttaaaagttgtgagacttgtgctttctagtgtgtttgcttntnctggcagagagtacaagttgtataagttgtacaagttctgtaaacacaaagcacatctatttttattttgtctactaagatggtannnnnnnnnnnnnnagcaattannnnnnnnnnnnnnnnnnnnnnnnnnnnnnnnnnnagtgattattgtcatattatcattctttcattgagcaaaatgttaattataagttaattttattacagaatnnnnnnnttattataaattatattcattgaataaaagcataatctgatatttttttcccttggcagcaacttgaattggtagaaccaagtggctggattcatgttcccttaactgacaatcataagaagccaactcgtacattcatgatacagattgctgttctagccaatcaccaaaatggaagagacacccatatgagacaaattaaaatatacacaccggtggaagagagctccattggtaaatttcctagatgtacaactatagatttcatgatgtatcgttcaataagatgactttaaaatgagatgaaaatcattaaacatatcattgttttatcctgtatttaaatagtatatcgggtacctttattgagaaaagcaccggttatttgtaattttgtatatgtttaaaaatattttattgtaactttgaaaaataaatttggggtcatattatctttatttc

SEQ ID NO: 11499 - DNA, 773 bp, Macaca Fascicularis
  misc_feature (1)...(773): n = A,T,C or G
gaatattgtaaaatagatattgtggtttggggaagttgaatttttttataggttaaatgtcattttagagttggggagaggnnnnnnactgcaggcagtttcagccatgttgtgaaactgataaaagcaacttagcaaggcttcctttcattattttttatgtttcacttataaagtcttaggtaactagtaggatagaaacactgtgtcccaagagtaaggagagaagctactatcgattagagcctaacccaggttaactgcaagaagaggagggatactttcagctttccatgtaactatatgcataaaaccgatgtagtccagtttctaagatcatgttccaagttaactgaatcccatttcaaaacacacttaggagctcctgatggaacaacaacaggcccaaacctctggtatgatgtgcacacttgttagactcagaaaaaatactactctcatagatgggtgggagtattttggtgacaacttgctttgctcagctgagttaaggaatgatattcatttattcatttattccatggacatttagttagtgctttttatataccaggcatgatgctgagtgacactcttgtgtatatttccaaatttttgtacagtcggtacacatatttgaaatcatatattatgactttccaaaggatgaggtccctggtttttcatggcaacttgatcagtaaggatttcacctctgtttgtaactaaaactatctactatctgttagacatgacattctttttctctcctc

SEQ ID NO: 11500 - DNA, 753 bp, Macaca Fascicularis
  misc_feature (1)...(753): n = A,T,C or G
atcagtagatgctatnnntnatannnactgtgattccagcaactnggggtaattggtgcctttttacaatttcgaataaaagcgtttacaatttctaaattatcagttttnnnnnnnnnnnnnnnnnncctcatcacatgctgatttaatattgttttatattaaaatagtccttttctctgttgtgccaccattcattcaagtgctatttgttcttaaaatgcatttaaagaaaaattacacatattgactttcacacctcatataatcagatctattactaatacatatcagagtgacagtgtccaggatagatgtaatatttcttannnnnnnnnnnnnnnaggaaatagtataccagctaatctagtcacctaaccttgtggttagaattgacattttaagaccagaaaaatttgaagtctgatcagggatttacaactgttnnnnnnnnnnnnnnnnnnnnnnatctttccaaagtaaattcagggccccattgctacttatgctgtattttgatatgcctctttttttttttttccaattttataaacttcctggaaagccgtcttcactaagtatcccctagtctctatatgtgtggttggtagtcatggaaatgacacataaagtatgccagaagtttggtggaacgtgttagaaactgttttgtgcttttatggatgtcatacttgacaatacatgtataagttactaatatatgaattgatgctaaatatatcttacattcga

SEQ ID NO: 11501 - DNA, 736 bp, Macaca Fascicularis
  misc_feature (1)...(736): n = A,T,C or G
actcatgccttttttaacgggaaaaacaagttcattatattcatattnnntatttgtattttcaagactttaaacatttatgtttaaaagtaagaagaaaaataatattcagaactgattcctgaaataatgcaagcttataatgtatcccgataactttctgatgtttcgggaagaattttttctatagtgaactctgtgggcnnnnnnnnnnnttacccctggacgataggaattgactccggcgtgcacacacacgtacacacacccacacacatctatctatacataatggctgaagccaaacttgtcttgcagatgtagaaattgttgctttgtttctctgataaaactggttttagacaaaaaatagggatgatcactcttagaccatgctaatgttactagagaagaagccttcttttctttcttctatgtgaaacttgaaatgaggaaaagcaattctagtgtaaatcatgcaagcgctctaattactataaatacgaaactcgagaagattcaatcactgtatagaatggtaaaataccaactcatttcttatatcatattgttaaatnnnnnnnnnnnnnnnnacaaaaagggtggtccttcttgaattcatgtacatggtattaacacttcgtgttcggggttttttgttatgaaaatgctgttttcaacattgtatttggactatgcatgtgtctttctccccataacaaaaaaacaaccgcta

SEQ ID NO: 11502 - DNA, 703 bp, Macaca Fascicularis
  misc_feature (1)...(703): n = A,T,C or G
tggcacgcccatcacagttcccnnnnnnnnnnnnnnnnnnnnnnnnnnnnnnnnnnnnnnnnnnnnnnnnnnnnntgctgagggtacggaagggcaacaggttgcaattgtagctcaagacttggcagccttccatactgcctcatcagaaatggggcaccagcagcatagccatcacttagtaaccacagaaaccagacctctgaccttagtagcaacatccaatggcacccagattgcagttcagcttggagaacagccatctctgnnnnnnnnnnnnnnnnnagcatctagaatccaacaaggagaaacaccagggttggatgattaatcctcagaacaatggagcaataaagcaaggagtctttnnnnnnnnnnnnnnngaannnnnnnnnnnnnnnnnnnnnnnnnnnnngaagttttccattcctgatacnnnnnnnnnnnnnnnnnnnnnnnnnggagaacattttattcttgacacttttgtgtgtataacccttggaatagattctcagagtgattcattgtgtacaaggaagtatgaaattagggcaatacagtaaattttcatgttactcttttatcagatcacaaactcctagagtctacatgcaagactagtagagtcttatggagtcttatgatggatttttaacttcccatggaaaaaaaaataaaggctgtatctaaaatatcaaag

SEQ ID NO: 11503 - DNA, 691 bp, Macaca Fascicularis
  misc_feature (1)...(691): n = A,T,C or G
agaacaaggccagctttnnnnnnnnnnnnnnnnnnnaaccggctnnnnntgnnnnnnacagagggtcaggaccgcgggctcctcaggatctggannnngcggaaggaggaccagtctgtgtatttctgccgagtcgagctggacacacggagatcagggaggcagcggtggcagtccatcgaggggaccaaactcaccatcacccaggctgtcacgaccaccacccagaggcccagcagcatgaccaccacccggaggcccagtagcgcaaccaccacagccggcctcagggtcacacagggcaaacgacactcagactcttggcacctaagtctgaaaactgccgtgggggtgacagtggctgtcgctgtgctcggaatcatgattttgggactgatctgccttctcaggtggagaagaaggaaaggtcagcagcggactaaagccacaaccccagccaaggaacccttccaaaacacagaggagccatatgagaatatcaggaatgaaggacaaaatacagatcccaagccaaatcccaaggtctaaccaatggacagccctatcaagaccgaacggtgaggccaggcacagtggcgcaggcctgtaatcccagctactttactctgaagcctgaggcagaacagagtaagcccaggagttcagcgccagctttgataatggagcaaga

SEQ ID NO: 11504 - DNA, 738 bp, Macaca Fascicularis
  misc_feature (1)...(738): n = A,T,C or G
gccagatgccagcagcccaagaaggggccgtggcannngctgcttgggatgatgatgagccatggggcccatggaccggaaatgggacnnnnnnnnnnnnnnnnnntcaacccttccaggagggcacctatctggccaccatacacctgccatacctgcaaggacaggtcaccctggagcttgctgtatacaaaccccccaaagtgtcccnnnnnnnnnnnnnnnnnncatgggccgccccaggggaggcacccccggagttgctctgccttgtgtcccacttctaccctcctgggggcctggaggtggagtgggaactccggggtggcccagggggccgctctcagaaggccgaggggcagaggtggctctcggccctgcgccaccattccgatggctctgtcagcctctctgggcacttgcagccgcctccagtcaccactgagcagcatggggcacgctatgcctgtcgaattcaccatcccagcctgcctgcctcggggcgcagcgctgaggtcaccctggaggtagcaggtctctcaggaccctccctcgaggacagcataagccttttcctgtctgcctttcttctgctcgggctcttcaaggcactgggctgggctgctgtctacctgtccacccgcaaggattcaaagaagaaagcagagtgagggcactcacctccatnnngtggaagccaccatcatctctggcccaagcgtcgagagctccccaaaa

SEQ ID NO: 11505 - DNA, 1003 bp, Macaca Fascicularis
  misc_feature (1)...(1003): n = A,T,C or G
caaccntnnnnnncagccagcctgcatagggcccaggcctggtcttgtgtcttaagatggctgctgtgaccaaagggagaatggagagaacaggggtggcagggttactgagcccatgacaatgcatttctgtgactcaaaccacgaatttccaaagatttcaagccagggagaagggttcttggtgatgcagggcatggaacctggacaccctcagctctcctgctttgtgccttatctannnnnnnnnnnnnnnnnnnnnnnnnnnganctcttctgtctttgagggacagggaccaagctagatcttttttctnnnnnnnnnnnnnnnnnnnnnnnnnnnnntcatctcttctatggatcatgttgacaaactttatttttcccattgannnnnnnnnnnnnnattttgcacattcatacaaaaaannnnnnnnnnnnnnnnnnnnnnnnnnnnnnnnnnnnnnnnnnnnnnnnnnnnnnnnnnnnnnnnnnnnnnnnnnnnnnnnnnnnnnnnnnnnnnnnnnnnnnnnnnnnnnnnnnnnnnnnnnnnnnnnnnnnnnnnnnnnnnnnnnnnactgagctccttcnnnnnnnnnnnnnnnnctgcaggaagaagatcatctgatggccgtgcgtgtctgggaagctcttcatggccttaatgcccttctttatcctcatctttcctctctgcaaaacaaaaaactgcatctaataatgttcaatacttaatgttctctatttattacttactgcttactcgtaatgatctggtggggaaacatgattcattcacttaaaatattgattaagccatggcaggtactgactgaagatgcaatccaaccaaagccattacattttttaagttagatgggactctctggatagttgaacctcttcactttataaaaaaggaaagnnnnnnnnnnnnnnnntatactaaatacctcacagactagatgaaaagatggttgtaagctttggaaataaaaacaaa

SEQ ID NO: 11506 - DNA, 731 bp, Macaca Fascicularis
  misc_feature (1)...(731): n = A,T,C or G
agtgcgggccctgnnnnnnnnnnnnnnnnnnnnnnnnnnnnnnnnnnnncggggccccacgagttnntactacatgctgcccatgaaggtgcgggccctgnnnnnnncggagctnnnnnnnnnnnnnnnnnnnnnggactccgtgctcctcgtggactccccagagctgcccaccagagacccacagtacctgacggagctgtactctgagggttcaaccccggactccgtgctcctcgtggacttgacatacgaggagatgccacagagcatcgtggaggccacctctaggctcaagaccttcaacatgatcccggctgttggcctaaatgtgcacagcatgctcaagcgccagacgctggtcnnnacgatgcccaccatcgccttcctggaggacaagctgctctggcaggactcgcgttacaaacccctctaccccttcaacctgccctacagcaacttcccctgacccccgccccatgctacccagggcccggtggccaccccgtaccactcatgatgtgaagcacctcttctgagccaggcagagcccgtggctgacttgggagcctcaggcccacgcccacctttcgaggacggtgccacctggaccccctcattccagggaggaaactgaggccacagggagtggccatcgccattgggaaggggcgactccacagagagcccaggcgggctcctgcatccattctctctttgtttttaaaata

SEQ ID NO: 11507 - DNA, 725 bp, Macaca Fascicularis
  misc_feature (1)...(725): n = A,T,C or G
ggccgtggctgcctcgtgagcctcccagagcccaggcctccgtggcctcctcctgtgtgagtcccaccaggagccacgtgcccagccttgccctcaaggttttcttttccttttctcccgtgcatctggcgaggctgaaggcaaggggtggaggaggccccagcacagcctcatctccgtgtgtacacgtgtgtgtgtgtgtgtacacatgcatggccacctgtggtgtgcacgtgtgctctcctccagtgccgggagctggctggcgtggcaagggtgtgctctggggcagcgtgtcccnnnnnnnnnnnnnnnnncctcccctttctgcctggtcagccccgtggcctctggcccaccaagctccgtgtcactcagccacggcatggccccggcagggacatcacagtacnnnnnnnnnnnnnnnnnnnnnnnnnnnnnnnnnnnnnnnnnnnnnnnnnnnnnnnnnnnnnnnnnnnnnnnnnnnnnnnnnnnnnnnnnnnnnnnnnnnnnnnnnnnnnnnnnnnnnnnnnnnnnnnnnnnnnnnnnnnnnnnnnnnnnnnntcagagccttcctttcacacagaccaccctggaggacacgcgnnnnnnnnnnnnnnnnnctgagctggcccctccggggggcctggaacccggatgctggggccatgacgcctctggctccgagttgagggtcatcttcacgagcaaagagaaccaataaa

SEQ ID NO: 11508 - DNA, 556 bp, Macaca Fascicularis
cagaaagacgagaaggcacttatcacagggggcagcttgagtctccggctagggtcgttgacgcaacaaaggaaaaaagaatttacagggccagggtggatgtaagacaggggggtggggaattctactccatggtatcttcagagctaagataacgctccttatgcaatcccactgcatatgaccatggcagcagaacaagttcaattactacactggatgcgtaagtgtgctttcctagcagaaagcaccaggggctggagtcaacagttcacatgctaatacttggaagtatttctgggggtgttcaatagagggcagacatgatgcaaagttcttcatactagaaaggtgtcctgtgtgtgcacacacagctggatgggggcacatatgagcaagcgtagaatttggttttctccagtcaagtctaccctgatgttatctgtgcactgccacaatattatcttgctgcctttctagatgatgctgtagcagagtaagaaatcgaaagttaatgttttggtcagctgactgggataggaactttttgtttgaa

SEQ ID NO: 11509 - DNA, 701 bp, Macaca Fascicularis
  misc_feature (1)...(701): n = A,T,C or G
aacctccatttcngttcactttgtggagagggcattacttattgttatagacatggacattaagagatattcaaaactcagaagcatcagcagtgtttctcttttcttagttcattctgcagaatggaaacccatgcctattagaaatggcagtacttattaattgagtccctaaggaaaattcagcccactacatagatagctaattttttttttttttttaataaggacacctctttccaaacagtgccatcaaatatgttcttatctcagacttacattgttttaaaagtttggtaagatatacatctttcatacccctcttaggcaggatggctttcatatcacctcagccaactgtggctcttaatttattgcataatgatattcacatcccctcagttgcagtgaattgtgagcaaaaggtcttgaaagcaaaaagcactaattagtttaaaatgtcacttttttggtttttattatacaaaaaccatgaagtactttttttatttgctaaatcagattgttcctttttagtgattcatgtttatgaagagagttgagtttaacaatcctagcttttaaaagaaactatttaatgtaaaatattctacatgtcattcagatattatgtatatcttctagcctttattctgtacttttaatgtacatatttctgtcttgcgtgatttgtatatttc

SEQ ID NO: 11510 - DNA, 689 bp, Macaca Fascicularis
  misc_feature (1)...(689): n = A,T,C or G
gctgtgtgcccannngctctggggannnntnnnnatgctgccagcagtctagctgccagccggcttgctgcacctcctccccctgccagcaggcttgctgtgtgcctgtctgctgcaagcccgtcttctgcaaacctgtcttctctggggcttcccctccgtnnnnnnnnnnnnnnnnnnnnnnnnnnnnnnnnnnnnnnnnnnnnnnctgcagaccctcctcctccgtgtctctactctgccgccccgtgtgcagctccacctgctgcgtgcccatcccctcctgctgtgcccccacctcctcctgccagcccagctgctgccgcccggcctcctgcgtgtccctcctctgccgccctgtgtgctcccgcccggcctgctgcagtctctcctcaggccagaagtccagctgctgatggccatgtcccccagggccagccaggggaactccctgccagtccttggacctcccagcccacccagccccaacacagcccaaccacagagaagcagcagccccacccacagccgtccagcccaggggtggggtctgagatggtcactggctcctcccagacctcccccagggtgggcgagccctggctgctccttgtggcgcctcctggctgtagaccacgaccctctgctggttgggtacgggccttcctgacccgggtctcacacccagg

SEQ ID NO: 11511 - DNA, 761 bp, Macaca Fascicularis
  misc_feature (1)...(761): n = A,T,C or G
cagaaagaaggacccatcatcatccnnnntgatgaagcagattcagaagtcttatatcccaactannnnnnnnnnnggagcctgaggcagagaaccagaggccggaggaagactgcctctttacagccaggaatctcagaggatttgaaaaaggtgaaggaagggatgggcattgacagtagtgatgcagtggacttcttcatcctcctggacaacgtggctgctgagcaggcacacagcctcccaagctgccccatgctgaagagatttgcacggatgattgaagagagagctgtggacacatccttgtacatactgcccaaggaagacagggaaagnnnnnnnnnnnnnnnnngcccattcctccnnnnnnnnnnnnnnnncctgcnnnnnnnnnnnnnnnnnnnnnnnnnncccaacannnnnnnnnnnnnnnatctcnnnnnnnnnnnnnnnnngaccttcataccactcttaatnnnnnnnnnnnnnnnnnnnnacnnnnnnnnnnnnnnnnnnnnnnnnnnnnnnnnnnnnnnnnnnnnnnnnnnnnnnnctaaggagtggtttgtgcagctctattaccatgggaaggagcaagtgccgagaggttgccccaatgggctctgcccactggacgtgttcttgaacgccatgtcagtttataccttaagcccaggagaatnnnnnnnnnnnnnnnntcaaactcaggtgatggaagnnngaaatggagagtaactgatttatannnnnnngatgtg

SEQ ID NO: 11512 - DNA, 760 bp, Macaca Fascicularis
  misc_feature (1)...(760): n = A,T,C or G
ctcacnnngcagnnnngacctnnnnnnnnnaacggacttaagcgattgtgcaggaggagacaaaatgtacactcactgtaaaaagaaaactagaggatttttggaataaataatctattttagagtttatttgccgatttgctttttacacactttcatgtgaaagagtgatagggagagggagcgaggccggtgccgcttattnnnnnnnnnnnnnnnnccctcgccgtggcnnnnnnnnnnnnnnnnnnnnnnnccctggactgagcctgtggcactgcgtgcgggacagttatgtttccttgccccgtcgcattaatgaggcccttccacatcatttttaaactaatgttttctatattaacattattatggttatttggctttcnnnnnnnnnnnnnnnnnnnnnnnnnnnnnnnnncctatgctccaatcaaagagatttttagtagtgcctctaagtaagcactgatgagtcagtcccacatcttttcttttttgtcagtattatttgggaaggagacatgccgggatgtgnnnnnnnnnnnaatatatttcctgttggcacagtttcacagaagtaaacataagcatgttttaacaggtttttcttttcttttttctttttaaaaatgttttnnnnnnnnnnnnntccactgtgtgtttttaagtattttctttttttannnnnnnnnnnnnnnnnnnncaatctaactggctatgttattattattaaatttatgttttgcaacttagaaac

SEQ ID NO: 11513 - DNA, 741 bp, Macaca Fascicularis
  misc_feature (1)...(741): n = A,T,C or G
agacacagaggnnnnctgcgagggggacagtggtggtgggactgannngctgacagtcaccctccctctgctgggatgaggtccgggagccaactaaaannnnnnnnnnnnnnnnnnnnnnnnnnttcccaccaccctaggtgaaaatccacagcacagacctctaccccatttctcttccatccccaaaccccttctttaaaatgtttggnnnnnnnnnnnnnnnnnngggctggtggagcctggggnnnnnnnnnnnnnnnnnnnnnnccccaccataccaccccttcacatcacaggcacagctgagcttgttatccctctccccaactttctctttgtttgtacttcttgttatccccactcccagcccctattcctctatgtgacagctccctaggacccctccatcttnnnnnnnnnnnnnnnnnnnntcctagggaaggggacagctcctggagggcagccctacctctcccatccctttgccctcctccctcgcctccagtggaggctgagctgaccctgggctgctggaggccaggactgggctgtagttagcttttcatccctaaagaaggctcctttccctaaggaaccatagaagaagaaaacagagggcatgtgtgagggaacctgcttgggtgggtgttagggttatgaaatcttggatttggggctgagggctgggagggagggcagagctctgcacactnnnnnnnnnnnnnnnnngtcagtcct

SEQ ID NO: 11514 - DNA, 670 bp, Macaca Fascicularis
  misc_feature (1)...(670): n = A,T,C or G
atggcgctggccttgagcatccactgactgtccaagggccactcccaagaagcccccttcaggannnacccttccaggctaaggagctccttatccactctcaccccacgagacagccccttcaggagttcactggaccttgcccaaatagcaccttaggccactgcccctaagctggggtggaactggaatttgggtaaatacatccttttgtctcccaagggaaggcagcctgtccatctgtgcatgaggagaggaaagtgccagggtgtgtgtgtttcaggggctccacatggaggagctgcagatagatgtgtttctgtgtgtgtgtgtgtgtctgccttcttttctaagtgggggcttttacaggcttttgggaggtaggatggatgtgggaagggctgggaggaggcagccacagctcaggtttggagcacttatgtacatacataagtaggagcaatgggacgtgtttctgtcataacgcaggcatgaagggtggggtgaagtccaggtcataagtttcatgtttgcttttgttttgttttgttttgaatgtatgtagcagatgttacagttttagggatcggggttgggagaccccactctagaaagggtcgtcgctcctctaccctttctagagtgnntctcccaaccccgatccctaaga

SEQ ID NO: 11515 - DNA, 635 bp, Macaca Fascicularis
  misc_feature (1)...(635): n = A,T,C or G
tccatcagcatagccttcaannnnnntgagcggcctgagtggatacacatggatagccggccctttgcctccctnnnnngnnnnnnnnnnnnnnnnnnnngcctgggcattgccttgcactctccctgctatgcccaggtgcgtcgggcacagctgggaaatggccagaagatagcctgccttgtgctggccatggggctgctgggcccccttgactggctgggccacccccctcagatcagcctcttctacatcttcaatttcctcaagtataccctctggccatgcctagtcctggccctcgtgccctgggcagtgcacatgttcagtgcccaggaagcaccgcccatccactcttcctgacttcttgtgtgcctcctttcctttccctcccacaaagccaatgctctgtgaccaccacactccaggaggcagccccatcaccttccagcccctaagtaggccctcccctccctaaatctgcttccccaccactggtcttagtcccaaagatgggccttctctctcccagagaagctggtcctccctctgcctttcctctcaagcccccaaagagcaaaggcaacagcaagaccagcgggttcctgcaacactgtgagggccagccagggcgg

SEQ ID NO: 11516 - DNA, 693 bp, Macaca Fascicularis
  misc_feature (1)...(693): n = A,T,C or G
aggggacctgggctcatnnttcttggctcaccaaccctgcaggcctcatctngtcccaaaacccactttgtcatggtgggagtgggtccacgctgctctgcagcatgggggctggggagtggacagcatcaggtgggaatatggagtccactctcatgtttctgtaggattctcactgtggggctggaagaaaagagcatcgacttgatttctccaaccactcatccctctttttttctttctcccaccactccccaccccagctatagttaatttcagtgccttacaaatcctaagctcagagaaaagttccatttccgttccagagggaagggaacctccctaggtccttccctggcttgttataacacaaagcttggttgtttatgcaactctatcttaagaactgcccagcctcagctcaaaacccgaatctgagaaggaattgcgtcacgtaagggaaactggaattaagggagctgagccagtcatggttgtggcttgtgagtcaggagacctaggtttcagccccctctactgtcagcgagctgtacaaggtgggcaagtcattgtcctctgagctgcagtttcctcatctgtcacatcgctacagacaagacctccctggaacccttctgattgtcttagacactgtggttgcaaaacccacagaaagcctcattgtgggaaagt

SEQ ID NO: 11517 - DNA, 685 bp, Macaca Fascicularis
  misc_feature (1)...(685): n = A,T,C or G
atgaagcagcagtatgnnnnnnnnnnnnnnnnnnnncgtnnnnnnnnnnnnnnnnngcagaagcaggtgactgacctggaggccgagcgggagcagaagcagcgtgactttgaccgcaagcttctcctggccaagtccaagattgaaatggaggaggcaagtgtgactgttggtccctgcagagtcagctcccctccacattagcagagagttcacgggagcaaacaagccaggagcaggagtcaggagacctgggggtctagtgccaaagagctctgtgaccaaaaacacaggcacgttccttccctgcactgcagtttcccatctgaaannnnnnnnnnnnnnnnnnnnnnnnnnnnnnnncattttcttgtttttattcagaactttttgttccattaaaatcgtagggactggggaactgtacagggaagcacactgtataaaagatccaagcaggcggccaggcacgatgactcacacctgtaatcccagcacttggggaggcctaggcagatggattnnnnnnnnnnnnnnnnnnnnnnnnnnnnnnnnnnnnnnnnnnnnaccccgtctctactaaaaaaaacaaaacttagctgggtgtggcggcaggcacctgcaatcccagctactcagnnnnnnnnggcaggagaatcgcttgaacctgggaggcggaggttgc

SEQ ID NO: 11518 - DNA, 723 bp, Macaca Fascicularis
  misc_feature (1)...(723): n = A,T,C or G
gaaacctaaaaatatttggtgcactgctcagttaacaaacctacatggagaccttgattttgacttaacaaatagtttatgtaccgatcttaggtggttttcataaagtgacattgtagtgattaaattcatccccctttaaaaaaaaataagttgttttcactatttataaaaaagtaattttgttaaatttaaatttttaagttacagctttaaaggttttaataggaccttcttgaatgtcttttctgtaatctgtgtatctcccacttaatggaaaggcaaagggataccccaaatccagaggtgcctacatttcaggcagccttggagtattttaaaatgaaaacattctttacttttatatgacattcttatactggcgtcttaaatccaaaaccatttcagagctcttgtctcagagatgtgtgttcttttnnnnnnnnnnnnnnntgataagaatcttaaatgcttgttttgcactatcacttagtacctgtttgaccaaggtgttaaggggatagtacctcccaattcaagcagagaaactgacctgactaaaattaatcgcagatgaactagaagtcacagcttaattaaatgtaagtagattgtagatactgttttatatcaatgtttataatgtgtatatagaattgttcactgtaaaaaaaaaaaaaatggcccaaatgtttttttttaaataagtaacttgactgtaaa

SEQ ID NO: 11519 - DNA, 846 bp, Macaca Fascicularis
  misc_feature (1)...(846): n = A,T,C or G
gatcggggctcccattcacatnnnngaagcagannnaaggatgagtatgagnnnnnnnnnnnnnnnnnnnnnnnnnnnnnncccaaagaaaatggaaagggtgatataaagtcaaaatccagatcaaggagccagtcccattccaattcgccgctacctgttccaccctcaaagccccgttctgtgtcccctccaccaaaaagagctnnnnnnnnnnnnnnnnnnnnnnnnnnnnnnnnaagatcaaggtccaggtcgagttccagagattaactcagaactctcttgttctttgcacactattatggaacactttcctatttaggcagttactctttcatgtttatacttggccttttttgcaagagcaatctcctgaaaacaggggcacacagaaatttgatttgtggccaaatttgatgaaaaagatgaggctctaaagaaatggtggcatgaagtcagacaccctgtcctttctttgtagaattaagataactttgattttatagcttttgagctaaaataacttttgtaaagagtaagctcatttaggttttttttttttgtttttttttttatnnnnnnnnnnnnnnnnnnnnnnnnnngggtttttttgttttatttgtttgcttatttttaaattaactgtttcaagctttgaatacttaagactttagagggagaacccaattttcaattatgttggctttttataaacgcttgagttatgtaagatttaaataaaactttgctaccaagatgattgccttattgaataggtcactattaaattcctttaaatgttggtatctgccatttgtggaaacatgtaaattctactgaagt

SEQ ID NO: 11520 - DNA, 1083 bp, Macaca Fascicularis
  misc_feature (1)...(1083): n = A,T,C or G
cagtactgctgtagaaaagtattaatagcttcatttcatataaacataagtaactcccaaacacttatgtagaggactaaaaatgtatctggtatttaagtaatctgaaccagttctgcaagtgactgtgttttgtannnnnnnnnnnnnaagaaaatgtagttaattacaatttaaacagtgttccacataacttcttaatttctacattccctcccttactcttcagnnnnnnnnnnnnnnnnnnnnnnntttccatgctcttaatgtattcctttttagtaggaatccggaagtattagattgaatggaaaagcacttgccatctctgcctggggtcacaaatgnnaatggctcctatatcacataaggaggtcttgtatatctgtggcaacagggagtttccttattcactctttatttgctgctgtttaagttgccaacctcccttcccaataaaaattcacttacacctcctgcctttgtagttctggtattcactttactatgtgatagaagtagcannnnnnnnnnnnnnnnnaagcattgcttttggcaaattaaagcgcatgtcatttcttaatacactagaaaggggaaataaagtacacaagtccaagtctaaacctttnnnnnnnnnnnnnnnnnnnttgtgcacatgtgagagggtgtccagtttgtctagtgattgttatttagagagttggaccactattgtgtgttgctaatcattgactgtagtcccaaaaaagccttgtgaaaatgttatgccctatgtaacagcagagtaacagaaaataaaattacattttataaaccatttactatggctttgtaacaattgcatacccatattttaagggacaggtgaatttactactttctaaagtttattgatacttcccttttatgtaaaatgtagtagtgatacctatatttctgcattgtgcattgtgacacacttgtctagggatgcctggaaatgtataaaattggactgcatttcttagagtgttttactatagatcagtctcatgggccatctcttcctcagatgtaaatgatatctggttaagtgttata

SEQ ID NO: 11521 - DNA, 1016 bp, Macaca Fascicularis
  misc_feature (1)...(1016): n = A,T,C or G
gttgcccaggctggtcttcactcctgggctcaagcagtccgcccaccatggcctcccaaaatgatggaattacaggcatgagccactgcgcccggccggaacattttctttacgtacactggcgtttctccccttcaaatcatcagaaaaggggataatttttagaaatcaggtttaagcactaatttcagataagcatttcatagttacaacagttacctcaaaaatgtacgaagagcaagtgaaaaatctggtttcattgttacactaggcagctccctatagaaactttgctggggttaatagtcctgaggaagatttcagttacagtgtagtccagtcccatagatctgatctgagcaaagctgacaaatgaagctgctcaaaaataaagggaaattactcaggatggactgagtcttaaacaaacttgtgtctaacggcccatggtaggcatggcaacagcaggtgaggaaagagtagcatcctcttctttccactgagaagtaatggtctttaactgagtgtagaattggatgccctgtttgccatagaaattggtgtctcccctgaaggaggatcgagagccggtgaatgagaacattggcaaaggcactggaatggggacattcactcccacctgtccgacatccaccaagtgggcatatttccgagcagtagctccattggtggtgaagatggcagttccatttccatatgggttgttatttacaatctggatggcttcatccaatgtttctgtctccagaaccacaagaactggaccaaaaatctcctctttgtaacaggtcatatttggcttgacattcgagatgatggttggtccaacaaagttaccattttcatagcctttcactttaatttttcgtccatcaagaaggatggaagctccctcctttgttccactatcaatcagattacagactcgctctttggcctnnngagtgatcagagggccaagatcagcnnnnnnnnnnnnnnnnncattgactctc

SEQ ID NO: 11522 - DNA, 746 bp, Macaca Fascicularis
  misc_feature (1)...(746): n = A,T,C or G
gccatggcagcgannnacggaannnnnnggcaccnatcatgtcaacgtgacccccaacttctcgatctactataacgtctccagggatcctgnnnnnnnnnnnnnnnnnnnnnnnnnnnnnnnnnnngggnnnnnnnnnnnnnnnnggaactgtggggagatctggggactgcagatgatctacaagtcagnnnnnnnnnnnnnnntgaaagtccgcagcatgctgctggagacccctcaagggcggatccaggccaaaaagtggtcccgcgtgcccttctccgtgcctgactttgacttcctgcagcattgtgcccagaacctttcggacctctccctggactgagcacctcgttgctgcagtacccggttcggactgtagggggcgggagagtccgcagcagccgtcatctttcccgggacacagcctggtccaggcccctccttcctgaatcgccagctgtgggcatcaggcccaccagccacagaggagtcctgggcaccctggcttaggctcccgcaacagggaaacaactggagggccagagctcagcccagacctaccctgcacacacatagacactttcatatgcactggatggagttagggaaactgaggcaaaataatttgccatactgtactcagaatcacgacattccttccctaccaaggccacttctatttttnnnnnnnnnnnnnaaaagtaaatgaaaaaatgggatagaaaatgcatggtatcnnnatt

SEQ ID NO: 11523 - DNA, 486 bp, Macaca Fascicularis
  misc_feature (1)...(486): n = A,T,C or G
ggtctcgatctcctgacctcatgatccccccgccnnnnnnnnnnnnngtgctgggattacgggcgtgagccaccacgcctggcctcaaccatttttttaactaatttttttcccaaatattcttctttacctttaacaaggtgcaggctgttgcagggcagtggttattaaagcatgggttgaacttccaacatataaaaatagagccaccatatcaacacttagccctacccattagtatcacacccagttcttacagtaatccctgagatatctccaagcatcaannnnnnnnnnnnnnnnnnnnnnnnnnnnnnnnnnnnnnnnnnnnnnnnnagggtggaaacactctgatctgaaacccaactgactctactaataatttgttgtaaagctttggacatacacttannagctgtgagccactcataacattgggctaattatntgctgtgcttctctgacaggtaatcatgaaaatcaaat

SEQ ID NO: 11524 - DNA, 733 bp, Macaca Fascicularis
  misc_feature (1)...(733): n = A,T,C or G
caccgctccnnntncgannnntcccctctgtgcagtgggaccgaggctcaggccggctccaggtttatctgaagttgcgatgcgacctgccctcgaagagccaagccctcaatgtcaggctgcaccttcccctgcctcgaggggtggtcagcctgtctcaggagctgagcagcccagagcagaaggccgagctggcggagggagcccttcgctgggacctgcctcgggtgcaaggaggctctcaactctcgggccttttccagatggacgtcccagggcccccaggacctcccagccatgggctctccacctcggcccctcctctgggtctgggcccagccagtctctcctttgagcttccccggcacacgtgctccggcctccaggttcgattccnnnnnnnnnnnnnnnnnnnnnnnnnnnnngccaacccccacaagtgggtgcgacacctaagccacagcgatgcctacgtcattcggatctgaggctccccaaacgaggacacggcagccaaggcggcagtttgtcccacggaaggacagtctttttcttttccagcctcctggtcttgggactctcaatctgggcaggaagagtcctcaatcccgagagaccaggagggggcaatgggcccagcctctctgtnnnnnnnnnnnnnnnnnggactgcagtggatcggaacttacaaaccaaacttttattctgaggaacnnnnnnnnnnnnnnntaaa

SEQ ID NO: 11525 - DNA, 730 bp, Macaca Fascicularis
  misc_feature (1)...(730): n = A,T,C or G
cactgacnnnnnnnnnttttatagcattgagaaggatggttacaacaacaagcacttcttaactctcctccttgatcttttcttgactgctgccctcttcacgctgtacaacaagaacattgaaactcacctcaaggaatttctggtggtggcctctgtcagcctcttgcagctgggccaggagactgacaagcttaaaaccagaaatcgcgaatccatttctctgctcatgcgcttggtggtggaggagtcatccttcctgaccctggacatgctggagtcctgtttcccttatgtcctgcttcgaaatgcctatcgggaggtgtcccgggccttccacctaaaccgagtgcctgccaatacccactgaagagcccttcggaccttcctaaacccttgccatnnnnnnnnnnnnnnnnactttctcaaggggtgggaatggggtggggtcactaagaagagggtcagaagccagagttgatgaacagatctgtggaagaacaatccagggctgagaaatcgtagagcagtgaggcaggctgggggcatggaggacagtttatggaaaaagttagggtgtggggccacttgtgtgaattttacaatgaaaaaaggagtaatgtacaagtatattttctatcttctggtgacttgagcttgagctctgacaggcatgggcctctccgaccttcatcactattcttaggataatgctggcaggcagagatga

SEQ ID NO: 11526 - DNA, 740 bp, Macaca Fascicularis
  misc_feature (1)...(740): n = A,T,C or G
gcggcctacaagnntggcctgggccttacnagcctcatcatgcacatctgtcaagcatgctcagcctgcactcctatacctggtccctgcctgcatcggttttcctgtccnnnnnnnnnnnnnnnnnnnngaagtgacagagatgttcagctacgagtcctcggcggaaatcctgcctcataccccgaggctcacccacttccccacagtctcgggctccccagccagcctggccgactccatgcaacagaagctagctggccctcgccgccggcgcccgccgggtgcccacctgcccgcttccccctactgccccggggcccaagttatgaggagtcnnnnnnnnnnnnnnnnnnnnnnnnnnnnnnnnnnnnnnnnnnnnnnnnnnnnnnnnnnnnnnnnnnnnnnaagaaagagaaatgatgcagcnnnnnnnnnnnnnnnnnnggaccagaccagacagatgggggctgggcccacacaggcatgcacgggcagagggcacaggaggctgagggcagctccaggacagggcagggggcagcaggatacctccagccaggcctctgtggcctctgtttccctctccctctcctggccctcctctgctcctccccacaccctgcaggcaaaagaaacccccagcttccccctcccccggagccaagtgggaaaagtgggtgtgatttttagattttgtattgggacgatttgcccacanacattaaaaactcatccca

SEQ ID NO: 11527 - DNA, 751 bp, Macaca Fascicularis
tcccaccctcacaggttctggcctgccattgacgatgggctgcgacgggccgcctatgagcgtggcgtcaaggtgcgcctgctcgtcagctgctggggacactcggagccatccatgcgggccttcctgctctccctggctgccctgcgtgacaaccatacccactctgacatccaggtgaaactctttgtggtccccgcggatgaggcccaggctcgaatcccgtatgcccgtgtcaaccacaacaagtacatggtgactgaacgcgccacctacatcggaacctccaactggtcgggcaactacttcacggagacggcgggcacctcgctgctggtgatgcagaacgggaggggcagtctacggagccagctggaggccattttcctgagggactgggactccccttacagccatgaccttgatgcctcagccgacagcgtgggcaatcccgtccgctagctctgaggcccggtccagcggacaggccgaggcctgctaggcccccacagacccagatgctatgggtcacggtccctgtccccgtgcccccgcttctgtctgccccattgtggctcctcaggctctctcccctgctctcccacctctacctctgcccccaccggtttgatgctgtggccccaggacccagcagagctgggggagggatcagcccccaaagaagtgggggtgcatgctgggcccggccccctggtccacccccactttccagggcaaaaagggcccaggg

SEQ ID NO: 11528 - DNA, 761 bp, Macaca Fascicularis
  misc_feature (1)...(761): n = A,T,C or G
gacgggcctatatccctnntacaaagttcgagagaagatagaaacggtcaagtaccccacatatcctgaggctgagaaataaagctcagatggaagagataaacaaccaaactcagttcaaaccatttgagccaaactgtagatgaagagggctctgatctaacaaaataaggttatatgagtagataccctcagcaccaagagcagctgggaactgacagaggcttcaattggtggaatnnnnnnnnnnnnnnnnnnnnnnnnccctcaaacccatgcacagtacaataatgtactcacatataacatnnnnnnnnnnnnnnnactttgtccctttctttcaatgtgtccccataagacaaacactgccatattgtgtaatttaagtgacacagacattttgtgtgagacttaaaacatggtgcctatatctgagagacctatgtgaactattgagaagacctgaacagcnnnnnnnnnnnnnnnagttgattcttatttggtggtggtattgtgaccactgcattcactccggtcaacagattcagaatgagaatggacgtttggtttttgtttttgtttttgtttttttcctttataaggttatctgggtttttttttttttttaaataattgcatcagttcattgacctcatcattaataagtgaagaatacatcggaaaataaaatattcactctccattagaaaattttgtaaaacaatgccannnnnnnattctttagtactcaatgtttctgg

SEQ ID NO: 11529 - DNA, 727 bp, Macaca Fascicularis
  misc_feature (1)...(727): n = A,T,C or G
ggagggtgcaccggtgccacttcaannnnnnnnnnnnnnnnnnnnnnnnnnnnnnccacttgaaagcacatcagcggacgcacacaggagaaaagccttacagatgctcgtgggaagggtgtgagtggcgttttgcaagaagtgatgagttaaccaggcacttccgaaagcacaccggggccaagccttttaaatgctcccactgtgannnnnnnnnnnnnnnntctgaccacctggccctgcacatgaagaggcnnnnnnnnnnnnnnnnnnnnnnnnnnnnnnnnnnnnnnnnggcttccaggctgagagccggccgtggaaggagggatgcnnnnnnnnnnnnnnnnnnnnnnnnnnnnnnnntacccagttgcctccagggcctctccttggaaggtcttttgagggctaaaacagtcctgtaagaagcggcatagcacccgtnnnnnnnnnnnnnnnnnnnnnnnnnnnnnnnnnnnnnnnnnnnnnnnnnnnnnnnnnnnnnnnnnnnnnnnnnnnnnnnnnnnnnactgagaatgttaatggttgggttgattgtatgttgaggatctattactgactgtatgatgaggccaactttttttcctnnnnnnnnnnnnnnnnnnnngagatggaaaaaaagtagtttgaatgttttgtgtgtaaggagtatnnnnnnnnnnnnnnnnnnnnnntaatcaattccgggggtggggggaggggg

SEQ ID NO: 11530 - DNA, 772 bp, Macaca Fascicularis
  misc_feature (1)...(772): n = A,T,C or G
ggntaannnnnnnnnnnnnnnnnnnnnnnnnnncaagatcctgtgaaaaactcaagaaatggacggacnnnntcagagagtgtgaccaggaccattcaggcaccttgaactcctatgagnnnnnnnnnnnnnattgagaaagcaggcatcaannnnacaacaaggtaacgcaggtcctggtggccaggtatgcagatgatgacttgatcgtagactttgannnngccnnncaacctttcctgaggctaaagacgatgttcacattctttctaaccatggaccccaagacttcccaccatatttgcttgaactcnnnnnnnnnnnnncagatgaccatgtggggatagaggtctgcaggagcctggccatctctaccagcagcagcgagattctagcccaggagagtgcggtgcttcttgtagccctcagctatccggtctnnnnnnnnnnnnnnnnntccaggtggcagtgcccaggtcccaggtgccatgtttactgcagcagtgggacctccgtgcctactccccgagctcagagcctttctcttttttcccaaaccaggcttctgatggctggctttcccccaccatcgcttgctctcagagtatattttactgaagagtaggtgatgcttccccaggatccccctggctggagagatcaagaatagggaagggacttgtaactcatttcttatgctccatgcttgctgtcctgctcacacctccctgctgaccacccatcctggcacagcctctctcttttcctcccc

SEQ ID NO: 11531 - DNA, 757 bp, Macaca Fascicularis
  misc_feature (1)...(757): n = A,T,C or G
gaaatgaattacttgaagcatgaaaagcacaccagggtggctatttagcaattatgactgtagatttaaaaacaagcaaagaaggaacacctcagcagctgcccgtttccttagtctccacttcagagggggatgcgaagaggtggacccagctcccgtnnnnnnnnnnnnnnnnnaggaattagtgtgaatggctgtgtcagatgtnnnnnnnnnnnnnnnnnnnnnnnnnnnnnnnnnnnnnnnnnnnnnnnnnnnnnnnnnnnnnnnnnnnnnnnnnnnnntcgtgacttgcattgtcctctgaaaaacaaagttatttggaacatgttcatacaaaagtgactctgaccaagtctaaatcgagcttttctactgacatgaaactgttggaaactgatctgactttataagagataattttcccctcaaggaggcnnnnnnnnnnncagaacagcccagacctcagctgtacctcatgttcagtagtttttatttgggtttgttttgtgagttaagtatgggggatttgacctcttttgccaaagaggaaaatgtgtgtgtgtgttttttaatagaaaatatggaccaaaaaattttttccctaaagaatgtattataactctatnnnnnnnnnnnnnnnnnnnnntgaaatgtatatatgttaaaataatgggggtgctggaaggtcgtggcagactaactgctggttagtgtggagggtaaatagtttactttgtggagtttacatggtttt

SEQ ID NO: 11532 - DNA, 1321 bp, Macaca Fascicularis
  misc_feature (1)...(1321): n = A,T,C or G
ggaacaggatcgaannngcaagcacttatagacagtactcgggaaccaaatagctctgcacaaattgatnnnnnnnnnnccaacaaagccgcagtagctgggttagataaagcggaaagagctggtattcccactagagtaattaatcataaactgtataaaaatcgtgtagaatttgacaatgcaattgacctagtccttgaagagttctccatagacatagtctgtcttgcaggattcatgagaattctttctggcccctttgtccgaaagtggaatggaaaaatgctcaatatccacccatccttgctcccttcttttaagggttcgaatgcccatgagcaagccctggaaaccggagtcagagttactgggtgtactgtacactttgtagctgaagaggtagatgctggacaaattattttgcaagaagctgttcccgtgaagaggggtgatactgttgcaactctttctgaaagagtaaaattagcagaacataaaacatttcctgcagccctccagttggtggccagtggaacnnnnnnnnnnnnnnnaaatggcaagatctgttgggttaaagaggaatgaagccttctaattcagaaatggggccagttttgaaagaattatttgctgtttgcatggtggttttttatcataaacttggcccaaaagaaaaactgctaaaagacaaaaaagacctcacccttacttcatctgctattttttaataaatagagacattaaaaacaagactggttagtgtagcatatctgagacatacaggtatcttggtcttttttatgctctttttctgaccgtcaccacctcttttttgttgttgttgttgctggtattgtctgacaacatgaggaatcacctccatttttgtaagttatgtgttttcggccgggcacgnnnnnnnnnnnnnnnnnnnnnnnnnnnnnnnnnnnnnnnnnnnnnnnnnccacaaggtcaggtgatcgnnnnnnnnnnnnnnnnnnnnnnnnnnnnnnnnnnnnnnnnnnnnnnnnnnnnnnnnnnnnnnnnnnnnnnnnnnnnnnnnnnnnnnnnnnnnnnnnnnnnnnnnnnnnnnnnnnnnnnnnnnnnnnnnnnnnnnnnnnnnnnnnnnnnnnnnnnnnnnnnnnnnnnnnnnnnnnnnnnnnnnnnnnnnnnnnnnnnnnnnnnnncaaaaaaatagtaagttatatgttttctaatatttgatcatatgcttnnnnnnnnnnnnnnnctggatgtatctgagttaaaatggggaaaagaaacatgaggacaagcctaagtgtatcacctgggttcc

SEQ ID NO: 11533 - DNA, 753 bp, Macaca Fascicularis
  misc_feature (1)...(753): n = A,T,C or G
catcgcccagtggatgccgatggccnnataactcacactagtannncacctcagcagataccagagcaaccaaattnnnnnnnnnncagccaatttgaagtannngctgcatcaaatgtaaatgaagaacaagatgatgaagccgagaaacatccagaagnnnnnnnnnnnnnnnnnnnnnnnnnnnnnnnaaattctcttcgagttgccaaagcagatagtaaaactgaagaaaagacagctgctagtgctcccaccaatgtgagcaaaggcacaacacctcttgctccaccacctaaacctgttcgaagaagattaaaatcagaagatgaattaaggccnnnnnnnnnnnnnnnnacacaaaagacgggtgtcttagctgnnnnnnnnnnnnnnnnnncttctattcccagatctgttgggaaagataagaaagctattcaggcatcgattagacgcaataaggaaaccaacacagttttggccagattgaatannnnnnnnnnnnnnnnnnnnnnnnnnntnnnnnnnnnnnnnnnnnnnnnnnnnnnnnnnnnnnnnnnnnntcgaccattctctcacctataagccaattgccgttaactgtgaacatacttgtttttaagtggttttgggttcaaagccaatttggagacccaaacattcagctcactgcttaactcaacattaaattttatgattctgttttgccctnnnatgttcannnnttnnnatttaagtatcttttatttt

SEQ ID NO: 11534 - DNA, 757 bp, Macaca Fascicularis
  misc_feature (1)...(757): n = A,T,C or G
aacatgcganctgagtacgaagcccttgccgagcagaaccgcagggacgcggaggcctggttcaacgagaagagcgcctcgatgcagcagcagannnctgacgacgctggcgccaccacctcagcccggaatgagcttaccgaaatgaaacgcactcttcaaacccttgagattgaacttcagtccctcttagcaacgaaacactccctggagggctccttgacagagaccgagagcaactnnnnnnnnnnnnnnnnnnnnnnnnnnnnnnnnnnnnnnnnnnnnnnnnnnnnnnnnnnnnnnnnnnnnaccgagannnnnnnnnnnnnnnnnnnnnnnnnnnnnnnnntcgacgtcaaggtccacctggaaaaagaaattgagacctactgcctcctgatagatggagaagatggctcctgttctaaatcaaaaggctatggaggcccaggaaatcagacaaaagattcatctaaaaccaccattgtcaaaacagttgttgaagaaatagatcctcgtggcaaagttctctcatccagagttcacaccgtggaagagaaagccaccaaagtcaacaacaagaatgaacagagggtgcctnnnnnnnnnnnnnnnnnnnnnnnnnnnnnnnnnnnnnattaaaataccaaaatgaaactcgtttcctaaataagggtccccttatttttctgcttttcttccaatgaattaagacaagttatttttagaatagtaccatttctttggctttttctct

SEQ ID NO: 11535 - DNA, 1183 bp, Macaca Fascicularis
  misc_feature (1)...(1183): n = A,T,C or G
caccgaggtcaagtcacagacaagaagctgtgcagtcaccagtgtttnntcncgcccagaaacaactccaccaaaaacccatannnctgccaagatttacagaagggggaaacccaactgtggatgggcccgtacccagtttttcatctaactccactatttcagaacaggaagctggcgttctctgtaagccatggtatgctggtgactgtgaccgaaagtctgctgaagaggcattgcacagatcaaacaaggatggatcatnnnnnnnnnnnnnnnnnnnnnnnnnnnnnnnnaaacaaccatatacactagttgtattctttaacaagcgagtatataatattcctgtgcggtttattgaagcaacgaaacaatatgccttgggcagaaagaaaaatggtgaagagtactttggaagtgttgctgaaatcatcaagaatcatcaacatagtcctttggttcttattgacagtcagaataacacaaaagattccaccagactgaagtatgcagttaaagtttcataaaggaaaaaaaaaaagatcaacaacattgcttcagacattttccccaagtttctccttttgagaaaaagtcccaaaacttcatattttggattagtaaaatggaagatggagtcagctattgagtggtcatccatttctttttaagaagcnnnnnnnnnnnnnnnnnnnnnnnnncctgacctgatgaactgttagtatctggtgaggttgagttatcatgctaccaatattttccaaataaatatctttatttttaaaaataaatgtaaagtatattatcaaaataagaaaataatgctcttgcacagaacaaagtggctggaaatttaaacctccacaatgattattggtacactaatgtagctgggctcaccactgccaatgcttgataattaaatcttggttaaaattttaatttgtagaaaataaggtattacaggtaatgtatgatatctgtaagtataggtaagaaggatgtaatggttcctttttgtgagcactctcaaccatgggagatacatatggatatgaactttctataagttcttgtctaggattatgctgttagttttgcttactaaagataattacaccctcttnnnnnnnnatatctatcagatagaacctaaacttgatatgaggtttatattagt

SEQ ID NO: 11536 - DNA, 711 bp, Macaca Fascicularis
  misc_feature (1)...(711): n = A,T,C or G
gacgccagcagcannntgttnnnnnncgacctgcacatccacttcccacccaacatcctggacggcatccgcaagcactgcgtggagggcaggctggccttcgcgccggtggtcatgcgtctgagctgcgggagctcgccccgggacccccacggttactgggaggtgaacggctttggcctttttgggatctacaagtcggactttgaccgggtcggaggcatgaatacagaagagttccgagaccagtgggggggtgaagactgggagctcctggacagggtcctgcaggcagnnnnnnnnnnnnnnnnnnnnnggctgcggaacttctaccaccactaccactccaagaggggcatgtggagcgtccgcagcaggaagggctctcacacgggggcgtcctgaggacgggcagcccctcctagccccggtgggagtccggaggcagctgctgggggctgggctttgagcttggtcccgagggacccggcagggctggtcagaggggcacagccaccacctgtgcctgttcctctctggcccactgggccctggcgtcgtgcccctccccggagaggcagccttcacagcgggtcagggcctggccttggtccccactctgcgatgatttctgtgaaannnnnnnnnnnnnnnnnnnnnnnnnnnnnnnnnnnnnagagttccgtctgttctgtttttattcagaagaaa

SEQ ID NO: 11537 - DNA, 720 bp, Macaca Fascicularis
  misc_feature (1)...(720): n = A,T,C or G
tgtgcatgcagtngcngattnnnnngggccgccagcttctatgcccgcttcttcttatcctacctccccttctacggtgtccctggggtgctgctcttctttgttnnnnnnngggtcctggagagccactggttcgtgtggatcacacagatgaaccacatccccaaggannnnnnnnnnnnnnngcaccgggactgggccagctctcagctggcagccacctgcaacgtggagccctcacttttcaccaactnnnnnnnnnggcacctcaacttccagatcgagcaccacctcttccccaggatgccgagacacaactacagccgggtggccccactggtcaagtcactgtgtgccaagcacggcctcagctacgaagtgaagcccttcctcactgcgctggtggacatcgtcagatccctgaagaagtctggtgacnnnnnnnnnnnnnnnnnnnnccatcagtgaaggcaacacccaggcgggcagagaagggctcagggcaccagcaaccgagccagcccctggtgggaccgacacccccacccctccactggccagcctggcagtgccctgcctgccctcctggtactgtgatcttcccctcagccccctcacatgtgtattcagcagccctacggccttggctctgagcctgatgggacaggggtagagggaaggtgagcgtagcacattttcctagagcaagaattgggggaa

SEQ ID NO: 11538 - DNA, 724 bp, Macaca Fascicularis
  misc_feature (1)...(724): n = A,T,C or G
gannnnnnnngccagtccatgcctaccatcccagccctgacacnnncagtggcaggcatccctgggttggacgaggccaacacatccccccgnnncagccagaccttcctccaactctcagatggtgacaagaagacactcacannnnnnnnnnnnnnnnngttcttcaagacgatgctggccagcaaatcggctgaagaaggcaaacagattccagacccgctgtccacggacctgtgagctgctgctgactagggctgcatgggagagccagggaggggagtttctggaagaggagagccatgggtggaacaccaaagcctcacagagtgggagactctccccatcagttgtcctcacttagaggagacagaggagccagtcaggtcccagagcttgagtgctaacaagcccagcatcccctggggctgtgatcatggtggatgaggaagcctcaatgtagattcctgaacgcaaggaaccagcaagaatgccttctcccagtgtgctctccccaacatcctaggcacagctttcataacccagtttcttaggggtaagaaactgtttttgtttcatttatgaagtcccagaacttaacagaaaagaaagccttttaaatattctttttaattttattttagattaacagttttgtattttacattttttaatacaaccaaccagtttcttttctagccaatcatctctgaagagttgctgt

SEQ ID NO: 11539 - DNA, 764 bp, Macaca Fascicularis
  misc_feature (1)...(764): n = A,T,C or G
aaattcctnnnttcancaaagcagtatacagaatcnnnnnnnnnnnnnnnnnnnnnctatatntnnnnnnntttcaatgaagcccagtgtaacacagcttaccagtgtcttctannnnnnnnnnnnnnntgtcgaacccggaagtacttcctgtgccttgccagtgggattccttgtgtgtctcatgtctgggtccatgatagttnnnnnnnnnnnnnnnnnnnnnnnnnnnnnnnnnnnnnnnnnnnnnnnnnnnnnnnnnnnnnnnnnnnnnnnnntctggactggcaaccccgtgaaaatcctttccagaatctgaaggtactcttggtatcagaccaacagcagaacnnnnnnnnnctctnnnnnnnnnnnnnnnnnnnnggaggggcagcctctgtgaagcagcaccattcaagtgcccataacaaagatattgctttaggggtatttgatgtggtggtgacagacccctcttgcccagcctcggtgctgaagtgtgctgaagcattgcagctgcctgtcgtgtcacaagagtgggtgatccagtgcctcattgttggggagagaattggattcaagcagcatccaaaatataaacannnnnnnnnnnnnnnnnaaagatacttggtcttactggttttattccctgctatcgtggagattgtgttttaaccaggttttaaatgtgtcttgtgtgtaactggattccttgcatggatcttgtatatagttttatttgctgaacttttngataaaataaa

SEQ ID NO: 11540 - DNA, 776 bp, Macaca Fascicularis
  misc_feature (1)...(776): n = A,T,C or G
cttatacttacacaaaataaatacttggataactcacatctaacaaactatacatgtatttttgccataggaaagcacaaggataagagagaaatatcaagagtctcaagaacttttgannnnnnnnnnnnnnnncccacaaaaattcaactatagacaattcccaaactcattttatgnnnnnnnnnnnnnnnnnnnnnnnnnnnnnnnnnnnnnnnnnnnnnnnnnnnnnnnnnngtataaatacacttctacannnnnnnnnnggatcacagaaagttcaactggacnnnnnnnnnnnannnnnnnnnnnnnnnnnnnnnnnnagacaaacacagatatttattattatggcatcatcatacctgtccttttgatgttagtattgcttgctttatatnnnnnnnnnnnnnnnnnnnnnnccttttgataattttttaagtttccagctcttcatcaaaatgttatattcttatttcagtgtttcctcccagacatttttaaggtaattggcttactacaatatggacattcaccaaatatgatgttaaaactnnnnnnnntagttagtagtcctctcagccactcatataagcatatttgatggaaaggttgtccacactgggaattatcacnnnnnnnnnnnnnnnnnnnnncgtcaagttgataagcataacaaattccacaatccatagtaaaatcagatttttccaggatagcacgagctgnnnnnntaatttctaaaacatcttnnnagttttgtagcacactatttt

SEQ ID NO: 11541 - DNA, 687 bp, Macaca Fascicularis
tggcccatatgtacactccgtaatctcaaggttattattctgacaccagcttgctgctatgatttcagagcacataagtaaaggtgctttttaatgtgcagtctattgccagagcttacttagttgctgatttccagatttggatgtttatgaagtctaggtgaatttatatatatatttttttttgcttttcattttcttcagttagttattatttccaacgaagcttgttttcttttttttttttttttcttcccatttgggctactgcagtgcttttgtttcacacttgatttgtaaaaattttatatatatatatatatatatatatatttaaaatgtgccattttattgctaagtgaagtatgtcctgttttatgatataattctttctcggtcagattgcaatgtcagcagttaatgccacactcctgtcagcttaaacacaaatgttagcgcttaccttttcttaaaaaaaaaaaaaaacaaagtgtaggtattttgaagtactgggcttatatttcattggaatacatgtgtacagcaataagcaggttttcaaatccagtacttagtttgtgtacaaatgtaattatgttcattgtgtatatattatacaatgagcacatgtaatgtattaaaggctacttactattgtttaaatgcaaatgttcatatctcatttct

SEQ ID NO: 11542 - DNA, 734 bp, Macaca Fascicularis
  misc_feature (1)...(734): n = A,T,C or G
aactgaagtttactgggagagccatcaagttgaacaatctgttgtaattnnnnnnnnnnnnnnnnnttttcagattttacatcattcttgctgaacttcaacttgaaattgtttttttgtttgtttgtttttgaatnnnnnnnnnnnnnnnnnnnnntttnnnnnnnnnnnnnnnnnntgcggtattttannnnnnnnnnnnnnnnagaagcttaatataaaacaaagtttgcattctactcaggaaaaagcatcttcttgtatatgtcttaaatgtatttttgtcctcatatacagaaagttcttaattgattttacagtctgtaatgcttgatgttttaaaataataacatttttatattttttaaaagacaaactacatattattctgtgttctttcctgactggtaatattctgtgggatttcacaggtaaaagtcagtaggatggaacatttttgtgtatttttactccttaaagagctagaatacatagttttcaccttaaaagaagggggaaaaccataaatacaatgaatcaattgaccattatgtagtagacaatttctgtaatgtccccttctttataggctctgttgctatgtgaatccattagatttacagtatcataatatacaagtgttctttaaaggcctctcctttagaatataaaannnnnnnnnnnnnnnnnnnnnntatgtgtaacttgtgatgccttagaaaaatgtcctaagc

SEQ ID NO: 11543 - DNA, 1236 bp, Macaca Fascicularis
  misc_feature (1)...(1236): n = A,T,C or G
ctgacagagaagtaataaatcttttgattnnnctgcttataagtgaaagattgaaactatccaatgacatattatagtaaatgagtatctgtaacctcccacnnnnnnnnnnnnnnnnnnnntgaagtcttgtgaatttgtaatacatcagtaccatttattggtttggggaccatcttaattaaaaataaatgcccaaaatgtagaactttaaccaaagacttgtccattttaaagcaaaatggggattgaagggacttagaatttctgttgtttctaattaaagtccctgaagatcatataccaaagtgttnnnnnnnnnnnnnnnnnnntactttaaagcattatgtgcaattaagttgttatgacataattatatcgcataattgttgggtctgttttcttgagcttataatgtacctggaaaataaacctcttgagaaacaaaaagttcatactgattattggaaaaggactatatatgtgagcaagattgtgttttagagaggaaacttgaaactccaagaaagcacttgatgtttttatatgcttgtannnnnnnnnnnnnnnaactgtagttttatagaaagtattaatgcttttatgtatttcaaaactttcatatgttaaatggaaattgttttaaatgtgtttgagtttatgtaagcatgtatacactgtgctaaaagtcacttatgtttcagtttgtgtataataatatgcaatttttggtttaaatttttttcttaaaatattagtggcttacattttcaaaaacaaaaatcaccagcatgaacttgcacctaagtctatattcactgtgtccttttctgaatcccattgtagcctgtcaactaaatttgagtgtgttatggtctttttaaagtgcatttaaatacaaaccaggaatttctttagaagttgagatacatctttatagttgaaataattaacccaagaaaaggttgctttgatttgtacccattcttactcattctcttcattctcttccacacacacacacacacacacacacacacacacacacccctctcccttcgcctatatgtgtgtatatgtatgcacatatatacatctatgttgttaatattactttagatnnnnnnnnnnnnnnnnnnnnnnnnnnnnnnnnnnnnnnncctatagatactacctgaagagtattcttgtactattcaaattttattatctgcactaaaagtttcgtcttgctac

SEQ ID NO: 11544 - DNA, 1106 bp, Macaca Fascicularis
  misc_feature (1)...(1106): n = A,T,C or G
gatgagcaatatgctgccatcttgtgtgccagaatcagctgccattcgctgaactgagacaagaacaacttatgtccctgatgccaaaaatgcacctactctttcnnnnnnnnnnnnnnnnnnnnnnnnnnnnnnnnatgatggannnngcacagagcttcataacctcttcatggacttttnnnnntcaagctgatgatggaaaaatagtcatattccagtctaagccagaaatccagtatgcaccacatttggaacaggagtctacaaatttgagagaatcatctctaagcaaaatgtcctatctgcaaatgagaaattcacaagcacacaggaattttcttgaagatggagaaagtgatggctttttaagatgcctctctcttaactctgggtggattttaactacaactcttgtcctctcggtgatggtattgctttggatttgttgtgccactgttgctacagctgtggagcagtatgttccctctgagaagctgagtatctatggtgacttggagtttatgaatgaacaaaagctgaacaaatatccagcttcttctcttgtggttgttagatctaaaactgaagatcatgaagaagcagggcctctacctacgaaagtgaatcttgctcattctgaaatttaagcatttttcttttaaaagaaaagtgtaatagacatctaaaattccactcctcatagagcttttaaaatggtttcattggatataggccttaagaaatcactataaaatgcaaataaagttactcaaatctgtgaagactgtatttgctataactttattggtattgtttttctagtaatttaagaggtggatgtttgggattgtattagtattttactaatatctgtagctattttgttttttgctttggttattgtttttttcccttttcttagctatgagctgatcaattatactcctnacctcctgccatgatactgtcagttacattacctactaagctgaatatttagtagaatatgatgcttctgctcaggaatggcccacaaatctgtaatttgaaatttagcaggaaatgacctttaatgacactacatttcaggaacagaaatcata

SEQ ID NO: 11545 - DNA, 753 bp, Macaca Fascicularis
ctacgctttgacctcagcactttcctccagcaacacccagccgccttctgactttgactccccgcactccccaaaaagaatccgaaaaaccacaaagaaacaccaggcgtacctggtgcgcgagagcgtatcccaaactgggacttccgaggcaacttgaactcagaacactacagcggagacgacacccagtgcttgaggcgggactgaggcgcacatagaccgaggcacagccaagctggggctaagcccggtgggaattagagcgtcgttaatttatttcttattgctcctaattaatatttatatgtatttatgtacgtcctcctaggtgatgaagggggtgtacgtaatatttattttaacttatgcaagggtgtgagatgttccccctgctgtaaatgcaggtctcttggtatttattgagctttgtgggactggtggaggcaggacacctggaactgcggcagagtaggagaagaagtggggaggactcgggtgggggaggacgttccggctgggatgaagcctggtggtgggtcgtaagtttaggaggtgacactgcatcctccagcatctcagctccgtctgtctactgtgtgagacttcggcggaccattgggaatgagatccgtgagatcctttgatcttcttgaagtcgcctttagggagaggctgcggggtagagggttgggggttggtgggctgtcacggggcgactgtcgagattgcccagtatgttctgtgaacaca

SEQ ID NO: 11546 - DNA, 660 bp, Macaca Fascicularis
  misc_feature (1)...(660): n = A,T,C or G
caagagtgagatgnnnnnnnnnnnnnnnactgacggggnnngctgagcctcctggganngcaggctnnnnnnnnnngacaggtggcaggtgcagggaggnnnnnnnnnnnnnnnnnnnnnggatgtttggcctctgcttcctcnnnnnnnnnnnnnnnnnnnnnnnnnnctcctcctcttccccaacccccagaccacaaccagccttagaaaatccatgtactctgttgttagagggcccagagttccttctccatccccgttctctgtctgttggcatgagatctccgcgcgggaaccaatatggggctgaagcctctggaggcggttggggcaggcaggaggctgtccctccaccctcctaccctcagcctggcaacttctgagttccatgggttttagttccgttctttgttttcttcctcccttattgagttatcctttctccctaagcccccttctgcttccacgcccttttcctctttgaagagtcaagtacaattcagacaaactgctttctcctgtccaaaagcaaaaaggtaaaggaaagaaagaaagcttcagaccgctagtaaggctcaaagaagaagaaaaacaccaaaaccacaagggaaaagaaaaacccagtttcttaggaaacgctaatgatttattatccag

SEQ ID NO: 11547 - DNA, 676 bp, Macaca Fascicularis
  misc_feature (1)...(676): n = A,T,C or G
tccggaacgggcgggggcagcnnnnnnnnnnnnnnnnnngccacgcccccgtccagtagacgtgtctggtccccacccagcgtccacaaggtggagatgggcttcagtggaggtggaggagcaaactgaaggggcaggctactggggtggggtagctttcgggaaaaggaataagcacgatacaagggcgctgtgacccccgagtgatctcccaccactctttctgtcttcctttatctctgtggacttgtatatattctggaaggggagccacagttgcaccatcgcccgcccattctactactcagcccctccctcccaaggtatttccggaactaagcccttcctttccctctgatgggtacactgaagcccctgctccacagagtagggtgcacgaggagggtaggagagggggcgtgttgagcatcttgcagtcacagggtcaggggtcaggtggttgtagtctgtgcctgaagtctgtgtttgtgttgtcgtggagaccaggcctttgagccccacccttgtcctagaacctaccccctctcaaggatgcgctctttatttctaccctctgtcctcgccaccccccacttcccgtggaaattcccagctccgttctcatggaggagtgggtggagacaaggagggagtaagtcttaggagtacaaggttt

SEQ ID NO: 11548 - DNA, 1126 bp, Macaca Fascicularis
  misc_feature (1)...(1126): n = A,T,C or G
ctactgttttatgtatggagnnnnnnnnnnnnnnnnnnnnnnnnnnnnatacttacaaaatgggctgtgtgtggtgctgaaaataagaccaatgtcctgactcccagtttgttctctgtgtattagaccagactgcttacttaaagttttattgcactaaaaatctgtttataagtttgagctctatttttttctgtccattattacaacatagagaagcacattcatatccccagagaaatttannnnnnnnnnnnnnnnnngtttcactcttgacattnnnnnnnnnnnnnnntaacattttttatcttatggttgaatgtttcaggttttcctcctccaccaggagctccacctccatctcttataccaacaatagaaagtggacattcctctggttatgatagtnnnnnnnnnnnnnnnnnnnnnnnnnnnnatgttgcctttccccatcttcctggttctgcgccttcatggcctagtcttgtggacaccagcaagcagtgggactattatgccagaagagagaaagaccgagatagagagagagacagagacagagagcgagaccgtgatcgggacagagaaagagaacgcaccagagagagagagagggagcgtgatcacagtcctacaccaagtgttnnnnnnnnnnnnnnngaacgatacagatacagggaatatgcagaaagaggttatgagcgtcacagagcaagtcgagagaaagaagaacgacatagagaaagacgacacagggaaaaagaggaaaccagacataagtcttctcgaagtaatagtagacgtcgccatgaaagtgaagaaggagatagtcacaggagacacaaacacaaaaaatctaaaagaagcaaagaaggaaaagaagcaggcagtgagcctgcccctgaacaggagagcaccgaagctacacctgcagaataggcatggttttggccttttgtgtatattagtaccagaagtagatactataaatcttgttatttttctggataatgtttaagaaatttaccttaaatcttgttctgtttgttagtatgaaaagttaactttttttcgaaaataaaagagtgaatttttcatgttaagttaaaaatctttgtcttgtaat

SEQ ID NO: 11549 - DNA, 722 bp, Macaca Fascicularis
  misc_feature (1)...(722): n = A,T,C or G
acccccccgtcancatgactgctgccacccagagtccccccatgnctnnggtgtctgggcttccagagtacctcccatcaggactatcggcttgctcagttagcagcagagggcatttcctcagctgatggtttctgcgctaagtctggcatggaggggtaggggatggggtactgtgtaggaatggcctcagctcttggtttgctgtggttttaggggccaaagtaaatgggtggattctggaacctcaggcctaaactaggttgcctttgtggggccaggaagcagagccccctggtcaagtctcttcgctcctttaatggaggattgagagctgggcaaacacttcccactgggaactgtggctcttggagataaaggacgggtcattgatggaaaataagggccaagagaagaggcctttctgttgtgtcccctcccggnnnnnnnnnnnnnnnntgcaggctccaggctcccctgacacctgtcgtatttatggaccagacactnnnnnnnnnnnnnnnnnnnnnnnnnnnnnnnnnnnnnnnnnnctatttattcaccaaaagccctggnnnnnnnnnnnnnnnnnnctcaggtcaccctgaacagcccccaagggcttgcaatcctggaaaatattttgactagctgcttggctggatgtacaaagaaataggcattattttattgctgtaatattgtatgatactttaactgta

SEQ ID NO: 11550 - DNA, 1059 bp, Macaca Fascicularis
  misc_feature (1)...(1059): n = A,T,C or G
gatacatgggagcagatcttccatnaannnnnntgcttttaatgattttcagaggccagccatttattacatgatgtcattcagtgattggtatgaaatgcnnnnnnnnnnnnnnnnnnnnnnnnnnnnnnnnnnnnnnttcttctttgtgccttcttgcattcagctgagccaagaagacagcttttccgctgnnnnnnnnnnnnnnnnnnnngcttctttannnnnnnagttgcaggttaagcttgtctggtcaacattccagtgtggaaaaataatttaaacaatcttattctcttaattcttttggcaacaaaaactattagtaatagctatttgggaccagacaaaaacagctttcatctataattcattggggataatgggagatttagataatgtgtccagatttaaacctaccagtttgtcctaccccttaagcgtttaaaataaaatatgcaacaaaatggatgacttagnngagagggaagcccattaattgggttccccattaaatcgtttacatacaagaacacagtttttatactaaggatttgtgtttaaagtcttgtaaagttcatgtctttcacccagatatatcaaatgttagcggaagaccagtgtgacttcattagataacgtttagtgtatttagaatgtgtaaatttgtgctttgaactgtagtttaataaatgtaaaattgcatcatagtatttgttgacctaatgtaacccttgtatgattgcaataaaattttgtgtagattttactgttctttcaggctaaaactttgggaaaggggctagctagcaaaggtagttttgaaatagatgtgtatatggactgttttgaagggtttttttctttatagcccagttaagttttgtttggctcagtgcatttttcagttatttaattagtaatttaagtaaagtgtttggtaaatcattgtgaagttcagattcattatggagagttgatgtgcagtaagcatgatgtttaacaattttaacaccaaaaatgttaatcctgcataaatcaatcgtaataataaatagg

SEQ ID NO: 11551 - DNA, 762 bp, Macaca Fascicularis
  misc_feature (1)...(762): n = A,T,C or G
gataataaaaccnnnnnnnnnnnnnnnnnnnnnnnntcacaagactgcatnnnnnnnnnnnnnnnnnnnnnnnnnnnnnnnnnnnnnnnnnnnnnnnnnnnnnccccacactcacctagccaccatggacatcgccatccaccaccnctggatccgccgccccttctttcctttccactcccccagccgcctctttgaccagttctttggagnnnnnnnnnnnnnnnnnnnnnttttcccgacgtctacttccctgagccccttctaccttcggccaccctccttnnnnnnnnnnnnnnnnnnnnnnnnnnntggactctcagagatgcgnnnnnnnnnnnnnnnnnnnnnnnnnnnnnnnnnnnnnnnngcacttctccccagaggaactcaaagttaaggtgttgggagatgtgattgaggtgcatggcaaacatgaagannnnnnnnnnnnnnnnngtttcatctccagggagttccacaggaaataccgggtcccagctgatgtggaccctctcaccattacttcatccctgtcatctgatggggtcctcactgtgaatggaccaaggaaacaggtctctggccctgagcgcaccattcccatcacccgtgaagagaagcctgctgtctccgcagcccccaagaaatagatgccctttcttgaattgcattttttaaaacaagaaagtttccccgccactgaatgaaagtcttgtgannnnnnnnnnnnnnnnnnnnnnnnnnnnnnnngcccaaata

SEQ ID NO: 11552 - DNA, 799 bp, Macaca Fascicularis
  misc_feature (1)...(799): n = A,T,C or G
aatannaaagctaacgtcaaagtagcatcaacagaaaatggaataaattttggtaatatagtttatgatgtctctggagcagcaagtgacagaaattgtgtggttctcagtgatattcacattgacatcatggactatatccagcctgcaacttgcactgatgcagaattccgtcagatgtgggccgaatttgaatgggagaacaaagtgacagttaacaccaatatgattgatttaaatgactacttacagcacatattaaagtcaaccaatatgaaatgcctgactccagaaaaggccctttctggttattgtggnnnnnnnnnnnnnnnnnnnnnnnnnngttccatatttggtgaagatgcacttgcaaatgtcagcattgagaagccaattcaccagnnnnnnnnnnnnnnnnttaccggccatataagaattcgtgcaaagagtcagggaatggccttaagtcttggagataaaatcaacttgtcacagaagaaaactagtatataaaaataaaaagtccttgaagctttacagttaatttagttatgggcttactggactccaacatcttttgtactctttcatgcttatatgttatatagaatctgagttcatgctgaatgcatttcagccaataatttatagcctttcccttaaatcaagattgagtttaaaattatagtttgtcttttgtcttaacagttctgaatgctgtcctcaaagtatatgtttctctcatgtaccaagaccttttcacagtacaataaacagatctattcatacatttttgtta

SEQ ID NO: 11553 - DNA, 736 bp, Macaca Fascicularis
  misc_feature (1)...(736): n = A,T,C or G
gcatcaggctttcagggacccagcccagannnngaacagtgcccaagcccccctgcacttgctctccctgcccccgccccgggtgcagcacagcctcggggccaagggtaggcttagaggatgggccccaggggcaggctttgctgggtgccaccccagcctgaccctattcccctgtgctgtgtctcctgcagagggggaggtgagtgctgacgaggagggctttgagaacctgtgggccactgcctccaccttcatcgtcctcttcctcttgagcctcttctacagtaccactgnnnnnnnnnntcaaggtagcacggctgtggcacagggatgagggcacagggggagtgtgggacccggggagcatggagcccggggagcagcctgggctggacgtctaccccggaggcccccataccaccctgctgggtcacctctgccccagctcccttcccaaccatggggaaagcacttcaccctgtctctgttgcccgcaggtgaaatgatcccaacagaagaacatcggaaaccagagacaggaactcaaaggggcgctgcctccgggtctggggtcccggcctgcgtggcctgttggcgcgtgtttctcttccctgcccggcctccagctatgtgctctaacacaggattccttctagagaggcaggggcgggctggcgtgcggaccacgacgggggctccacccnnnnnnnnnnnnnnntgtatacgcttgtgc

SEQ ID NO: 11554 - DNA, 633 bp, Macaca Fascicularis
gcagctccacagaagccctgtgcaggaggcccagtgctctggcctgagttgggttgtggccttaccccaggtgaagcaagagaaggcggatacccaggacgagtggacaccaggcacagctgtcctgacttctcccgtattggtgcctggctgccctagcaaggcagtagacccaggcctgccatctgtgaagcaagagccacctgaccctgaggaggacaaggaggagaacaaggatgactctgcctccaaattggccccagaagaagaggcaggaggggctggcacacccgtgatcacggagattttcagcctgggtggaacccgcttccgagatacagcggtctggttgccaaggtgtgccccacacagtgaggggtggggaagaagggggtgttggccagatgtgggccctgagttttgaaagtatagccagcagtttggcatggtgtggtgggaggtaaaggcccatacccactatgctgatcacaattaatgaggggcatgtgtgtaggaccatagagatttctccggagatccagcccaatagcattccaggttaggactctcctttgggggtagggggaagacttgacactctatcatgaaattgaaagaaaaagaaagggagtc

SEQ ID NO: 11555 - DNA, 737 bp, Macaca Fascicularis
  misc_feature (1)...(737): n = A,T,C or G
cccaacccaaccatcanccaggaaagactgtgaactcctgagttcagcctgattgctgactacatcccagcaagctctggcatctgtggattaaaagccctggatctctctcagttgcgtatttgttcatcttcatannnnnnnnnnnnnnnnnnnnnnnnnnnnnnnnnagaagccagtaacatgacaggagctgggactggtttgaacacagggtgtgcagatggggagggggtnnnnnnnnnnggcctcaggggttgcttccccctatgatgcagacatgctgaatttaattcaaggaggaggagattgctttaggcaggtggttatatgtgggaagataatttannnnnnnnnnnnnnnnnnnnnnnnnnnnnnnnnnnnnnnnnnnnnnnnnnnnnnnnnnnnnnnnnnnnnnnnnnnnnnnnnnnnnnnnnnntgaattcatctgactgttttaggttgtatagcctagtgttaacattcttagtgtctttttgtgccttaaaacatttcttgatcactggtttcagatgttcatttataatattcttttcaaagattcagagattggcttttgtcatccactattgtatgttttgtttcattgacctctagtgataccttgatcgtttcctactttctgttttcagatggagaagatgtaccttttttgtaaactcttattttgtaaactcttatttttatcaagatgatcaactcatgtacttgaatat

SEQ ID NO: 11556 - DNA, 761 bp, Macaca Fascicularis
  misc_feature (1)...(761): n = A,T,C or G
gataggacctgcccagatttctgaatgtgcacttttgtttactgaaagagagaaagggagggtcacagcaacatgccctggcctttctgcccccttccccaagcccgctgaggcttgctgcacaggtcaatgccttcgttattgtactgtcactttgtttttgaggtagtaatcaaggatcaggaggggcagatgtcctctatggctgcatggggcaggagcagaggtgagcagcagtgcgctggcttgggagcccccatcggcctccttgcacaaactgggcccccatgccatagtctgcctttccctccatctgctccaggacaagagcaagaaggacatgaggtgcccaatcatgtgatcccctgccatcttcccttcccccaccagcaaccatggctggctggggctttaaccaagccaactnnnnnnnnnnnnnnnnncctcagttccctcctctgtcaagtagctaactgcagcagctggactgaaggcagagtctgtgggtgcagagaccctgcatgtaggtcacaagtttaggcccagccactctccctgaggccacctcaagtgaccaaatgctattaatttccatcccttagcagcctgggccctaggcaggaagctgtcttccgggagaggagtgagaacatgcaaggcctgcctagcttgcctccttgaggaaggtggcattccgtgcttgcctccttgaagagggtggcattctgtgtcttctgcttagaagcgccttctaaagttgg

SEQ ID NO: 11557 - DNA, 757 bp, Macaca Fascicularis
  misc_feature (1)...(757): n = A,T,C or G
tcatgtaattcaatgattcgtggtagtggtattaatactggtgtgttttgaaattgaatgtgagataaaattagccttaagattggtaagctagcaatgaatgctagggtgggaagctggtaagccagtggccgttagataaatacctttcaagtgtgagaagtcaatcctaaaataaccgtaatgctaattgtgatcattatgaatcctttcagtcacattagaggggaaagtagttggctataagtacctcattcttagtccagtcagtcttaaaaacatcttgggttacccattctgtgcactcccacaggctacagaaaaggtcataagcgcatggtttgcaaccgtatgtgttttgtgcagttacttctcttgttcttggccaaactaccctaaaaatccttaccattccacaaagttgggccatcacttgtgctcccactttgagtacaccaccacattgcnnntctgtttctatcatgtattccaggagacaagactgtttcccagggtggatttgagtataaagaaaaggtagacaaggaattgcccaattctaaattctgactttactgactttaaatgctcgtttctctgaaccaattttctctgatcttctctaggggtttcaaaaggctcagttaattgaattccaggaagtactcagcaagttcatagaagttcttgagacctaaatttcttcacacacacaaaaaaagatcttaagtcatacatttttattgtgtagaagtgt

SEQ ID NO: 11558 - DNA, 725 bp, Macaca Fascicularis
  misc_feature (1)...(725): n = A,T,C or G
ttgtttttgttctgcattaaggccttttttgctttgacttgaagtaagttctttgacagagcatattgcttggttaagtaagtaacctaaagtatgcattaggattgtgaaatgtcttcgtgagtatgccagtcctgagggtggannnnnnnnnnnnnnnatgtaaagggcagtggattctggaggctctacttcaggtgctgctaatgcctcttctaatcaggtctaaattgtgtagtaaactgcagtgggaagaaaatgctttctactcaggctaaggggttcactgatctgtccttacaaattcagagcaacatgagcaaaacctcagctaannnnnnnnnnnnnnnnnnnnnnnnnnnntgatctttgataagaattcctcatgtacttgtgcccagtttttcaaggtattggctgttgtatagatgcagtgattgtcccagctagctctgttttcaaccttttggtgtgtctttatgttcatttggagagtcagggcgaaagacaggtgatgtagcacttctgtttttaataattacagcttcaaatacctattaatagtttgaggtcctttagacggacttgaggaagccacccaggattgcggaagagtgtccacctaacaagatggtctggcagtttcctagttttgtatctttggttcaatagaaatatctnnnngtggtaatgtgaccacttgatgcnnnnnccgggtttctcta

SEQ ID NO: 11559 - DNA, 689 bp, Macaca Fascicularis
  misc_feature (1)...(689): n = A,T,C or G
cctgggtgtgagacccgggtcaggaaggcccgtacccaaccagcagagggtcgtggtctacagccaggaggcgccacaaggagcagccagggctcgcccaccctgggggaggtctgggaggagccagtgaccatctcagaccccacccctgggctggacggctgtgggtggggctgctgcttctctgtggttgggctgtgttggggctgggtgggctgggaggtccaaggactggcagggagttcccctggctggccctgggggacatggccatcagcagctggacttctggcctgaggagagactgcagcaggccgggcgggagcacacagggcggcagaggagggacacgcaggaggccgggcggcagcagctgggctggcaggaggaggtgggggcacagcaggaggggatgggcacgcagcaggtggagctgcacacggggcggcagagtagagacacggaggaggagggtctgcagnnnnnnnnnnnnnnnnnnnnnnnnnnnnnnnnnnnnnnnnnnnnnnacggaggggaagccccagagaagacaggtttgcagaagacgggcttgcagcagacaggcacacagcaagcctgctggcagggggaggaggtgcagcaagccggctggcagctagactgctggcagcatnnnnannnntccccagagcnnntgggcacacagc

SEQ ID NO: 11560 - DNA, 757 bp, Macaca Fascicularis
  misc_feature (1)...(757): n = A,T,C or G
attttactaaaataaaaagcttttacaatagctggcctatggcttcctccagcccaccccagtatggagtgatggggagagaagggcgaggggagccacccactcaaggaagtgccctctccttcgaggggtgtccaggccgggcttctgctcctgaggagggtggaggcagggcaggaacggcgcagtctcccagcaacgccgacgccacccaagaattaacccaagccagaggacgggcatcgccacnnnnnnnnnnnnnnnccacccaagaattaacnnnnnnnnnnnnnnnnnnnnnnnnnnnnnnnnnnnnnnnnnnnctctcaaaaaataaaagcttctgcccagaagcannnnnnnnnnnnnnnnnnnnnnnnnnnnnnnnnnnnnnnnnnnnnnnnnnnnnnnnnnnnnnnnnnnnacttgaccatggggcaaaacagaagaagcagaaacctgcccaaaggttgttcaaaggcttcctctaggccagacgctggtaagagccaggcgctgtgctcccaggtgagtgtgggcgggacctgtgtactgccnnnnnnnnnnnnnnnnnnnnnnnnnnnnnnnnnnnnnnnctcgtaagtannnnnnnnnnnnnnngcctaaagggggcctcaagcctcccatttgcaggtccccaaaccaagccagaaaacaagactcccttgtcatgggctgggggtgctgccctgtccacagatcacacnnnnnnnnnnnnnnngtgcngnnncgtggt

SEQ ID NO: 11561 - DNA, 668 bp, Macaca Fascicularis
  misc_feature (1)...(668): n = A,T,C or G
ctcagagatgtagaagatgnnncannngaggtgggtggcaggagcccacacctgaggctgttggcatcagccaggccgtaggactacaggnnnnnnnnnnnnnnnnnnnnnnnnnnnnnnnnnnnnnnctcctatctctccccaggccctacatggacgcggtcgtctccctggtcactctcatgttggacacgggcctgccctgttttcgnnnnnnnnnnnnnnnnnnnnnnnnncacaggtttagccccaacatgaccgannnnnnnnnnnnnnnnnnnntcatgaaggtcatccagagctgcttcctcagcaacaggagccggacctatgacatgatccagtactatcagaatgacannnnnnnnnnnnnnnnnnnnnnnnaaggccctccgccccatgtgcccttgaagctgccccacnnnnnnnnnnnnnnnngacctccccgccctgccaccacannnnnnnnnnnnnnnnnnnnncggaagagcctggtagcgcctcctggggcagcacnntgggtggcgcagccttggtaacgccatggactgcagtgacaatcattggatggtgctgtctatgcacaggtgtgagtcctctgtttgcactggacatattccctacctgtcttatttcataggtacatgaagtattnnnnngtgtataaa

SEQ ID NO: 11562 - DNA, 715 bp, Macaca Fascicularis
  misc_feature (1)...(715): n = A,T,C or G
ggtaatctgtacatnncnacnanntatgaacagactttttttaaaaaaaaaaaaaaaaacagctttattgaggtataattcacataccctacaattcacctaccagacgtttttaacatcaaataattgaagagacaatagcattagaaataagtgattaaaggcctctgcctcacaacgtggcaagtacagtactttgaattttagcacatcgcatagtagttttaagtatgtctaatttaaacgtataatatgtacatcactgagacaatcatgtacagaaagaatttttggtgtaaatttgtaataatggatgattcttttacatattgtttagggaaatgatattgaaaggtagcaatgccttgatagtgaagcatgaggcagcatgtnnnnnnnnnnnnnnnccatgccttatctaagtattgggtataaatatgtagataatggattttttttagatactgttgtcaagaccaaaagcatggatgtcaagtgtcagtaaggattttgttttctaaaattttttcctgcatcagttcttctgagggccttgatgaaataacacagcagtttcttaaacaatttgaaaaaaaatnnnnnnnnnnnncacctcactttttcatttccacactaatgtattatatgtaactacttggaaaaaataattattcaaatgcttcttcccacaaagaatatagatgatagtagatat

SEQ ID NO: 11563 - DNA, 743 bp, Macaca Fascicularis
  misc_feature (1)...(743): n = A,T,C or G
atccaggtctgtnnnnnnnnnnnncatctttggggtgggggtggcccaggccccccaggtgctgtcccccacttttggagcacaggaccctgttcggaccctgccccgattccagactcgggtagatcgccggcacaccctctatcgtggacaccaggcagccctggggctgatggagagtgatcaggtatcccccagggagaaggggctaccctgaggtgatgacagacctcccactcccagtggaactccggaaatatgagggaaannnnnnnnnnnnnnnnnnnnnnagctggggagaggagttcctcccttcaaagccagcaactgcctttggggaatgttggggggtctctcctttctcctgcttgtgtgaggtggtacacactccccccttcacctggcgggnnnnnngtggacaccagacacatctcagctttcccttggggcaggatcgagggcagcagctccagcagaaacagcaggatctggagcaggaaggcctcaaggccacacaggggctgctggccagtgagtgggccccatccctccaggagctgggcagcctcttccaggcctttgtgaagagggagagccaggcttatgcatcagcttcatagcttctgctggcctggggtgggcccagaacccctcggaccaactgccctgagtggtggtgaagttggagcaatcccttcatgctcctaggccatttnnagcggccagcnnnnnnngcctaataa

SEQ ID NO: 11564 - DNA, 712 bp, Macaca Fascicularis
  misc_feature (1)...(712): n = A,T,C or G
atgacctcacaggcacnnntccaaaaagacagcataactggaatgagaggcctgggtctgtctcctgccttagcaggcctatcaatttcttgtcagtctctttttctccttgctcatattaaaaggaagcatggagttctaatgctcccatagactatgtattttggcaagacacttcactactccaggtctcactttccccatctgtaaaacagggtttggactaggtgttccctggtattctgtgatttgcctcttgctgccattctttctctcctctgcttctctgtatttttcttctgttatccctgggggtgctcaggttcactcgattgtctgtatttctctgtggttgtagcaaggactcagcctcatgtagcatgaataggggtgtggttcatgacgtgttgacccagcagagagctccctctcactgacttgttctgcatgtgtagagtctccccattttttttaacccaaccctttcccctttttcctaccctacagctctgttccatgtaagctgccaacagtttcactgaacagtggggtatgtgatggttttggcatgacatcttcagtatgagggggacagtctgacttcactttgagggtgtgatgtctgtagctatgtggaaggtaaaaatagtggtgtgattatgaaccaaaggaatttatgttttgtaacttgggtactttattttgcattttg

SEQ ID NO: 11565 - DNA, 505 bp, Macaca Fascicularis
ccttcccctcccctcccctcccgctcaaacccccacttcctgccccaggctggcgcggggcactttgtacaaatccttgtaaataccccacaccctcccctctgcaaaggtctcttgaggagctgccgctgtcacctacggtttttaagttattacaccccgaccctcctcctgtcagccccctcacctgcagcctgttgcccaataaatttaggagagtcccccccccaccccagtgctgaccctagaattttccttccctgccctcacctgcaaatgagttgaagaagaggcctgggaatccaggcagtggcttttcctttcagagcctcggttttctcatctgcagaatgggagcagtgggggtgggaaggtaaggatggtcatggaagaaggcaggatggaactcggcctcatccccgaggccccagttcctacatcgggccccccattcatccactcacactcccagccaccatgttacactggactctaagccacttct

SEQ ID NO: 11566 - DNA, 714 bp, Macaca Fascicularis
  misc_feature (1)...(714): n = A,T,C or G
agcagtgggatgacttcagtgcacgttgcaacaagcacctagctggaggcagagatgaaggcagccacagagcatagacacttccattgccctaactatcctccttcagaccaacaacgagcttgaagcccagagagttgcaacggaatttgccttcaggaagcggctgcgggagatggagaaagtgtacagtgagctcaagtggcaagagaagaataccttggaggagatcgctgagctgcagnnnnnnnnnnnnnnnnnnnnnnnngatctgcgcacaaagttcctgagcctgaagctgtcccatacccggctagaggccagaacctaccggcccaatgtggaactctgccgggaccaggcacagtatggcctcactgacgaggttcaccagctagaggcaaccatcgctgccctgaagcagaagctggcacaagcacaagacgcactggacgccctgtacaagcacctggcnnnnnnnnnnnnnnnnnnnnnnnnnnnggccaactnnnnnnnnnnnnnnnnnnagtgcatggacannnnnnnnnnnnnnnnnnnnnnnnnnnnnnnnntcgtgcctgaggtggacaccttcacacgtaccacaaatagcaccctgagtccactcaaaagctgccagctggagctggcctagccttggaggactacgggaggagggcagggttgggtgggcaatggaaggggggaggagag

SEQ ID NO: 11567 - DNA, 750 bp, Macaca Fascicularis
  misc_feature (1)...(750): n = A,T,C or G
aggttttgtggatttctgtagcctatctgggctgcttatcaaaaagccatcnnngaattagtaggaggaagaggatagggagtccagtgatgtggcctttgcaaccagccagcattccagttaggtggaaattatcttcctggctcataagtatttggtatcacacaggctagttgccccccttagggcatgatgagagttagtagagtcaatgtagaatcacataacctgtttatcaaaaataatgttaaaaacagttctttcaaattatatttttaaagctgttataagactgggcatggtgacttatgcctgttaccccaacaccttgggagtccaaggtgggagtattgcttgaggtaaggagtttgagactatcctgggtcccataataagaccctgtctcttaaaaaataaataactctcttcctctctggcctctccatcctccagacaatcactgaattacaatatttgcttaacagtagattagtgtcaattttctgaaatgttatatgactgatataacatgtttcctcttttcatacctgagtgctctcctgagtcctgtttattttgatgttcttattttttctttattattatttttatttcacatagcagggatgcatattttgacattcatcaatcatgatatatgagtagttcattctttttatcttagaatttgacatgctatggaaatcactataagaattcatctgcttatggatatgttactgcttctcg

SEQ ID NO: 11568 - DNA, 720 bp, Macaca Fascicularis
  misc_feature (1)...(720): n = A,T,C or G
ccacacgcgcacctcctgcgggacgtgctggctgtgccggggaccctgtggacgnnnnnnnnnnnnnnnnnnnnnnnnntaggtgagcagggcgnnnnnnnnnnnnnnnnnnnnctcctgctggaccatggtgtttctgcccctgagctgggactgtggaatggtgtgggtgctgtggtctgctccatcgctggctcctccctgggtgggaccttgctggccaagcactgggaactgctgcctctgttgaggtcagtgctgcggctccgcttcgggggcctagcctgccagactgccttggtcttccacctggacaccctgggggccagcatgggccctggcacaatcttgagagggtcagccttgctgagcctatgtctgcagcacttcttgggaggcctggtcaccacagtcaccttcactgggnnnnnnnnnnnnnnnnnnnnnncccccagggccctgcaggccacacactacagccttctggccactctggaactactggggaagctgatgctgggcgctctggctggaggcctggccgatgggctggggccacatccctgcttcttcctcctgctcatcctctctgccttgcccgttctgtacctgggcctggcacccagcacctttctctgagctgggtgnnnnnnnnnnnnnnnnnnnnnnnnnggcctagaatatgtgatgcgctcgtccccaggttgtgggggctgcctc

SEQ ID NO: 11569 - DNA, 742 bp, Macaca Fascicularis
  misc_feature (1)...(742): n = A,T,C or G
gagacgtcgggcccaaggggaacaggcacgagctgaactcttgagcctaacccagatggagagggagaagattgtttgggagtttgagcagctgtatcactccttaaaggagcatgagtatcgcctcctggcccgtcttgaggagctagacttggccannnnnnnnnnnnnnnnnnnnnnnnnnnnnnnnnnnnnnnnnnnnnnnnnnnnnnnnnnnnnnnnnnnnnnnnnnnnnnnnnnnnnnnnnnnnnnnnnnnnnnnnnnnntcctnnnnnnnnnnnnnnnnnnnnnnnnnnnnnnnnnnnttctgtttccctagtattaaatcaaatatgagaagactgtctccttcacatttgtaaatcctgcaaggagccctgannnnnnnnnnnnnnnncttatcaaattgacacatatccctgaagagagtcactagtataccaagaattagatgaaccacagctctactcagtaaaattcagggagtagggggttcacgtgggaggctgctggtggattaggggtatgagaggagaaggtgtggccttacagagacctgggctgagcataagggtagtttatgtctgttgcttcctatacatttcagaatcctttccttatctcataatccttcattatctcatttttttttttctataatgggggaaataaagcctaagaaaggtgtggctgacctggatttacataattactgatgagccacctggattctggctctatc

SEQ ID NO: 11570 - DNA, 720 bp, Macaca Fascicularis
  misc_feature (1)...(720): n = A,T,C or G
ggccctgtgtaggaggctggtacaaggttttggatcggttcatccctggcaccaccaaggtggatgcactgaagaagatgatgttggatcaggggggctttgccccgtgttttctaggctgctttctcnnnnnnnnnnnggcactcaatggactgtcagccaaggacaacnnnnnnnnnnnnnnnnnnnnnnnnnnnnnnnnnnnnnnnnnnaactactatctatggcctgctnnnnnnnnnnnnnnnnnnnnnctggtcccccttcattacaggttggccgttgtccaatgtgttgctgttatctggaactcctacctgtcctggaaggcacatcggctctaagccggcctcacttcatcgtttccaccttgcagtgatgcagcttggccctggaannnnnnnnnnnnnnnnnaaagtgggcacactagtttccacagggttgggttgccagtcagannnnnnnnnnactagcaccctgcaatgctccnnnnnnnnnnnnnnnnnnactgactgctttagagcccttgataatagtcttattcccaccacatactaggcactccataaatatctgttgaactttcatgaccttatcaactttacacacatatcccagcaaatgccactcatccccactcttcatagacnnnnnnnnnnnnnnnnnnnnnnnnnnnnnnnnnnnnnnnnnnnnnnnnnnnnncccggaaccctttatatg

SEQ ID NO: 11571 - DNA, 724 bp, Macaca Fascicularis
  misc_feature (1)...(724): n = A,T,C or G
tcccgggatttggnnnnttcnnnnnnnncacctaagaaagcaaagaagagagcccagggcgccaactccaacgtgttctccatgttcgaacagacccaaatccagnnnnnnnnnnnnnnnttcactatcatggaccnnnnnnnnnnnnnnnnnnnnnnnnngaacgatctgagagacacctttgctgcccttgnnnnnnnnnnnnnnnnnaatgaagaaattgatgaaatgatcaaggaggctccgggtccaattaactttactgtgttcctcacaatgtttggggagaaacttaagggagcagacnnnnnnnnnnnnnnnnnnnnnnnnnnnnnnnnnnnnnnncctgaaggcaaaggnnnnnnnnnnnnnnnnnnnnnnnnnnnnnnnnnnnnnnnnnnnnnnnnnaggttttccaaggaggagattgaccannnnnnnnnngccttcccccctgacgtgactggcaacttgaactacaagaacctggtgcacatcatcacccacggagaagagaaggactaggagggagctggctgctgcgccctgggctcgtctttgcagagtggtccgtgccctcatctctctccccccagtactgcctctgtccccaccttgtctgttagctgtgnnnnnnnnnnnnnnntccacctccatcnnnnnnnnnnnnnnnnnnnnnnnnnnnnncctcgtggccgcacatcctagagatggaaatctatcc

SEQ ID NO: 11572 - DNA, 298 bp, Macaca Fascicularis
caccggggcactggctggtctgtcttggtccggataaccctccacctccacccacctcctcccttggcctctttccccaccccaaccattctttctttttcctttaacccaatggagactttctgatgcatcattttttttgctgtgccaaagttggtcagaagagggagtggaggggttggggatgaggggcaggccatggtcaaggggccagttgccccctcattcatcactctgaccttcacagggacagatgtgatttatttattttggttaaaaaaaaaaaaaaaaaaaggaa

SEQ ID NO: 11573 - DNA, 716 bp, Macaca Fascicularis
  misc_feature (1)...(716): n = A,T,C or G
ggacagagcgaaggggagaggatggtagtgtctgacttnnnnnnnnnnnnnnnnnnnnnnnnnnnnnnnnnnnnnnnnnnnnnnaaagactaccctnnnnnnnnnnnnnnnnnnnnnnnnnnnnnnnnnnnnnnnnnnnnnnnnnnnnnnnnnnnnnnnnnnnnnnnnnnnnnnnnnnccggcatggtactcatttcacctctggttcttnnnnnnnnnnnnnnnnnnnnnnntttcaaggtccttgctgcaaaagtgctcaaccnnnnnnnnnnnnacttgtccctcgggcccatcgactccagnnnnnnnnnnnnnnntaagacagaggtcgacatttataactcagaccccttgatctgccgggcagggctgaaggtnnnnnnnnnnnnnnnnnnnnnnnnnnnnnnnnnnnnnnnggagcgcgccctccccaagctgacggtgcccttcctgctgctccagggctctgccgatcgcctgtgtgacagcaaaggggcctacnnnnnnnnnnnnnnnnccaagagccaggacaagactctcaagatttatgaaggtgcctaccacgttctccacaaagagcttcctgaagtcaccaactccgtcttccatgaaataaacatgtgggtctctcaaaggacagccacggcaggaactgcgtccccaccctgaatgcactggccggtgcccggctcatggtctgggggacgcaggca

SEQ ID NO: 11574 - DNA, 743 bp, Macaca Fascicularis
  misc_feature (1)...(743): n = A,T,C or G
aatatgcgataatatgaagctttatatgtgtannnnnnncttaaatatttcatatcagtttattgtcaattcatagtatgctgaatatattagatttcatattctgaaactagtacttatgaaatgagcgtttatctagtagtaagacctaggatttttacattttcccattaagtgcatagtatttataagcagagtgattatggatttagatgtttttaacttgacggaaggagctcgttttcccgagcctgtgcgcacaaggcactagggttgatattccagcctcgtgacgtgggagcaggagagctccgtcctgcatttctgggatccgtggccacttttcctatgtgcctgtgccttgctaaacaagtgaaggaacatcattggttttgttttctccctnnnnnnnnnnnnnnnnnnnnnnnnnnnnnngaaaaatgcagcagaagggatcagacatcagaggttttagaattacctttttaaggagctgtcttctggccnnnnnnnnnnnnnnnnnnnnnnnnnnnnnnnnnnnnnnnnnnnnnnnnnnnnnnnnnnnnnnnnnnnnnnnnnnnnnnnnnnnnnnnnnnnnnnnnnnnnnnnnnnnnnnnnnnnnnnnnnnnnnnnnnnnnnnnnnnnnnnnnnnnnnnnnnnnnnnnnnnnnnnnnnnnnnnnnnnnnnnnnnnnnnnnnnnnnnnnnnnnnnnnnnnnnnnnnnnnnnnnnnnaggatcatgcc

SEQ ID NO: 11575 - DNA, 678 bp, Macaca Fascicularis
gtacaagagataatgtaaacaggattatacagacggcattgcaacaagaaaagccagatttctgctttttggaagaagatcctggaatatgtcgaggttatattaccaggtatttttataacaatcagtcaaaacagtgtgaacgtttcaagtatggtggatgcctgggcaatatgaacaattttgagacactggaagaatgcaagaacacctgtgaagatggtttgaatggtttccaggtggataattatggaacccagctcaatgctgtgaataactcccagactccacaatcaaccaaggttcccagcttttttgaatttcacggtccctcatggtgtctcgctccagcagacagaggattgtgtcgtgccaatgagaacagattctactacaattcagtcattgggaaatgccgcccatttaagtacagtggatgtgggggaaatgaaaacaattttacttctaaaagagaatgtctgagggcatgtaaaaaaggtttcatccaaagaatatcaaaaggaggcctaattaaaaccaaaagaaaaagaaagaagcagagagtgaaaatagcatatgaagaagtttttgttaaaaatatgtgaattcgttatagcaatataacattaattctactaaatattttatacgaaatgttttgctatgattttctatttt

SEQ ID NO: 11576 - DNA, 714 bp, Macaca Fascicularis
  misc_feature (1)...(714): n = A,T,C or G
atcgatgtgggagccaggacgagacggacctcagcannnacggggacagcctgtctggctggtggctgctgtggaagcggctgaatccctgggcggacaaggtgaaggnnnnnnnnnnnnnnnnnnnnnnnnnnnnnnnnngatgtgggctaccagtacgggaaggcagtgtttggaagtccagctcctactgcgagtacctgcgcccgcccatcgactgcttcaagaccatggacttcgggaagttcgaccagatctatgtgcttgccttcccaagctctggcttcaccgacttgnnnnnnnnnnnntcccggattgagccccccacaagctatgtctccgatggctgtgctgacggagaggagtcagattgtctgacagagtatgaggaggacgccggacccgactgctcgagggatgaaggggggtccccggagggcgcaagccccagcactgcctctgagatggaggaggagaagtcgattctccggcaccgacactgtctgccccaggannnnnnnnnnnnnnnnnnnnntgcctgaggacctcgccaggggtcacccccttccccccgcccctggactgggctggggatggccctgtgggggtagctcactccccctcctgctgctatgccttgacccccggggctcatacactggaccgacctgccctgagcggggatgccgtgttgcactgatgacttgaccatcc

SEQ ID NO: 11577 - DNA, 422 bp, Macaca Fascicularis
  misc_feature (1)...(422): n = A,T,C or G
tgagtgnnnnnnnnnnnnnnnggcaagttcatgaaacctgggaaggtggtgcttgtcctggctggacgctactctggacgcaaagccgtcatcgtgaagaacattgatgatggcacctcagatcgccccnnnnnnnnnnctctggtggctggaattgaccgctacccccgcaaagtgacagctgccatgggcaagaagaagatcgccaagaggtcaaagatcaagtcttttgtgaaagtttataactacaatcacctaatgcccacaaggtactctgtggatatccccttggacaaaactgttgtcaataaagatgtcttcagagatcctgctcttaaacgcaaggcccgacgagaggccaaggtcaagtttgaagagagatacaagacaggcaagaacaagtggtcttccagaagctgcgg

SEQ ID NO: 11578 - DNA, 707 bp, Macaca Fascicularis
  misc_feature (1)...(707): n = A,T,C or G
cagggccaggaggatgaggttgtcctgaggggctccaaagaagacaatagttcccannnnnnntnnnncgttacaaacaggcagctggggcatggttggccaccgatgatttcattcaaggccaaagtcctgagccccctccgctggtcccagtccagctcttatcaactccccaaaggaaaactcactggttcttagctctgtgggtaggaaggggccctagaaagggcctagttcctatcctgtcagttctaacagtagtggaacaggataatctgggccctaggagccctgtaactcccaggagagaccactgaaaattctggagcaacaatgcccctgcttccattcctccccgcctcactctcactgagtcaccagagggtgattctgcaggacctctttnnnnnnnnnnnnnnnnnnnnnnnnnnnnnnnnnnnnnnnnnnnnnnnnnnnnnnnnnnnnnnnnaaagacattcataggtcccaaatctgcccattcagatgtcacataacatggtggggtatcaatttacttcttccacacatgtggatgtgcacatgtgagcttgtgtgcttttggagagaatgttgattggcaaaagcagcatagtattaatatttagagtaggatgcagcctcttatgcaccacagttaaatctagaaggaataaaatttcagagctcaagacatgggacatttaaat

SEQ ID NO: 11579 - DNA, 711 bp, Macaca Fascicularis
  misc_feature (1)...(711): n = A,T,C or G
aaatcaaaatcaatttagggatatagcaggggctgttgggctgtgctccagagaaaaggagcagctactccctttaaatccacaatttgtggattgaaaacctctccnnnnnnnnnnnnnnnnnnnnnnnnnnnnnnnggctggaaacaacatagnnnnnnnnnngtgtcccctnnnnnnnnnnggggaggggagataataaggagggctcggatgagggcctggagatgcggaaccctggcatagaaggttctctagctacagnnnnnnnnnnnnnnnnngggggacgagaaaatcccttttccnnnnnnnnnnnnnnnnnnnnnnnnnnnnngtgttctacaaatgctgttattgtgggaggaaatgctaggtttttgtgtgtggactgcccagacctcagccaggtcttctnnnnnnnnnncttgaggactgctggccaaagagcatgagggactgaagccctggctgcctcagcgctctgtctcccaacaccagctggtgttgcagagggaggtcaacgtgagtttggatctcttgtacgcagatgtaatcattcacatgtaaccccacctctccaccccaaaaagggcaagagctgtggaaaatgattgccaaatgagatggctggttagagcatgattttttctaaagcatacttcatgtattttcttaagattacatcaaactaattgtgcaaggtcaattcac

SEQ ID NO: 11580 - DNA, 1170 bp, Macaca Fascicularis
  misc_feature (1)...(1170): n = A,T,C or G
aagacatggnnngaagtnnctggcnnnncagccaaagatgtagctaaacannnnnnnnnnnnnnnnnnnnnaatgaggggccaccgggatacctctatggttnnnnnnnnnnnnaggtacatccccaccgcggctgcatttggcggtttgtgcatcggtgccctgtcggtgctggccgacttcctgggggccattgggtccggcactggaatcctgctggcagtcactattatttatcagtattttgaannnnnnnnnnnnnnnnnnnnnnnnnnnnnnngcatgggtgctttgtttttctgaatgttcagagacttcattctgtgcgtgtgaaagggagaacatctggacggatcgcttttgtcagatgacactggtgattccccttttctcccctcagtttcttgtttcaagtgctggctgacccgtctctgacatgggcaccgagctaagtgtgtgtgcagcattagtacccgctgccttaaaactcaagtttacattattcatttaaaaaaagtacatctagtgttgcctgtaatgctggaaaccaatgtatctaccttgctgtgttaaatcatgacagtgagatggtgacatggattcgttttgcacattcaaaacacttaatattgcccccacttgtttaaaaataaatgtagttcaaattgccactttccagtatttttgagcttatttaatgagttctggaacatttatatctaatctatattttagataattactttttatacttttttaactcatggtatccctactccccaccccacctcatttttatttgtcccttctcaaagcagccacttagcccacatgggcaaaatcaagtgtccagttatttctgtcannnnnnnnnnnnnnnnntaaggctcctccaccacctcctcccttcctagtgacagcatcatcgtgctgtttgcctgtattggctatgccttctaactccaaccagtcacttgagaatactctttcaagattctaggccctgattcttttctgtttaaatccctaaagcaaagatctcattctcaagcaatgtctgtagttagtgggggtgaacaatgagtaattcatgctaggaatttgtgtctgttgttgtactcacagcagcaacatgagtgtaaacagtagacaataaattttatttaagaa

SEQ ID NO: 11581 - DNA, 1499 bp, Macaca Fascicularis
  misc_feature (1)...(1499): n = A,T,C or G
gtggcaggcggcggcaannncngaggcggcgggcctgggaccgccgcagggctggacgcaggcgggctgngtcccgcagccagcgcagcaagcaccgccgcgcccttcccgttccacctctcccagcacatgctggcatctcagggaatcccaatgcccactttcggaggcctcttcccctacccttacacctacatggcagcagcagccgcagccgcctctgctttgcccgccactagtgctgcagctgccgccgccgcagctgccggctccctatctcggagccccttcctgggcagtgcccggccccgactgcgtttcagcccgtatcagatcccggtcaccatcccgcctagcactagcctcctcaccaccgggctggcctccgagggctccaaggctgctggcggaaacagccgggagcccagccccctgcccgagctggctctccgaaaagtaggggccccgtcccgcggtgccctgtcgcccagtggctcggccaaggaggcggccaatgaactgcagagcatccagagactggtgagtgggctggagagccagcgagccctctccccaggccgggagtcgcccaagtgaggggctgcccagctgctcccctgccacgcaggccacccgggctgcctgcccctgctgcttgggatgtgtacagcacagaatgggtatttatttaaataaaggagaaaagtgggcnnnnnnnnnnnnnnnagagcctcgtctggcaagtcggggcctgggacacttccctgggcctcaacaaggaatcaggctgccggaaacacagtcacttgggagctgctgggctaggtccagatcgctccagcgtcaaggtggcatccgagggtgactctggtcttccagtgcggtgggagaggcctcatccagggcccagcggtcccggcagaagccagaaggtgcaggggccaggggtgggagcatcggagggagtcccagagccctgggccttgggcctggaccgcgtgagaaaactgggttgagggatgctggagccagttacacgactgaagtcagtgtagacctgagctgggagggaacctgttagtccccccacttcttccccaagagacaggcacctcatcccagccctgggtcagcggagggagtagcacttctgccttgagtccccagggggaaaaaaaaagatatttatgaaataaatggtaatttgtgtaaataagctttaaggttcccagnnnnnnnnnnnnngtattaatttattcaaagnnnnnnnnnnnnnnnnacatatatttagagattaactcatacatttaaagtttttttcattttacatgagcatctatattgtacagggcttggggggcctcggctgcgggagaaggccctgagccccagaggagccaccaccccgccggcccctcggccccaccgcccgggtttgactcgccctgcccgcgggctccacctcaggttttcacttttcgctccggagcgagaacgaa

SEQ ID NO: 11582 - DNA, 695 bp, Macaca Fascicularis
  misc_feature (1)...(695): n = A,T,C or G
aggccacacagtnnnnnnnngcactgtccaactttctagataagggctccgagcacagcctggatggggaacactttgccatggaggtgcacatagtacatgagaaagagaaggggacatcgaggaacgtgaaagaggcccaggaccctgaagacgagattgcggtgctggcctttctggtggaggctggaccccaggagaacaagggcttccggccgctggtggaggcactgtctaatatccccaaacctgagatgaacaccacgatggcagagagcagcctgctggacttgctccccaaggaggagaaactgaggaactacttccgctacctgggctcactcaccacaccgacnnnnnnnnnnnnnnnnnnnnnnnnnnnnnnccaggagcctattcagcttcacagagaacagatcctggcattctctcagaacctgtactacgacaaggaccagaaactgaacatgacgaacaannnnnnncccctgcagcggccagggcagcgcgtggtgctcatgtccggggccccgggtcagctgctgccttgggtcctgcctgccctgctgggccccacactggcccgccnnnnnnnnnncttcctgcgatgatggctcacttctgcacacagcctcttccgtgcctcagctctccaagtcctgggcttccagtccttaggcttcccaggtgggact

SEQ ID NO: 11583 - DNA, 593 bp, Macaca Fascicularis
  misc_feature (1)...(593): n = A,T,C or G
tggcaaggtaagtctgggttttctctctctagtccggggaagtatgtcagtgcagatgggtgctgngattgcagcatccaggcttctggctggctctgctgaacctagtgcaaagcctcttctggataggactcacgcagagctgggctgagtcataatgattagccttaggtactactaaactttgactcccttgaataaatggtgggtacctgctatgcacaataaacttataagatgttaattatgaagggcatacagtgagtttcataggacagccccagaaacccaagcagtgggtacttttggtaaccagcatccgtgtcttaaaactgcctagctgatgccaagtgctctctcaaacagacttcagttgtgttaaacgaggtgacaagtgtagcatgtgccaagccactatgagttggtgtgtggtgggttttcattctccttgttttctcttccagggcaacaaaccatggatttctcttccccgaggaaagggtatccgcctcaccattgctgaagagagagacaaaagactggcggccaaacagagcagtgggtgaaatgggtccctgggtgccatgtcagac

SEQ ID NO: 11584 - DNA, 717 bp, Macaca Fascicularis
  misc_feature (1)...(717): n = A,T,C or G
acaagagtagcgatacaagtttttggaaattgaatttgnnncagatatatctgtcctaatgcttatatttgcacaaatatgtaaaatatcatgttgaggatcattctttgttggnnnnnnnnnnnnnnnnnnnnnnnnnnnnnnnnnnnnnnnnnnnnnnnnnnnnnnttatgtaaatacttgcatcacagtggccgacaggcattggatgcagaacctagagccagttttcaggaacaactgtaaacctgacatggtactgtgcatctattcataaaacactcaaaactgtgaaaatatggtttacatttcattgtacataaaggtaaatggagaactcaattcagtaccagttagtttgtacattttagggggcttttcacattaactgcccatttatgtaatttatagtttgacatgatgtgttttaaaaaaaaatgcatagtataaacccattaaggatctgggagaagagaagaagtttaatatagaactaagcttttaaagtttgtttttgtttttaattctggtctcggtgcaaatgttagttatgccttattcatatcacagttagatgaccatgctgcgacatggtttatattcatgctgccctagaaacttttgtaattatctgttgcaaatttgtgactgtccttattaactttcttttatgtaagtaatttgtaaaaatttcttaaaatttttgcttttgcttat

SEQ ID NO: 11585 - DNA, 807 bp, Macaca Fascicularis
  misc_feature (1)...(807): n = A,T,C or G
agatgattttcaagccagannnnngatagagacagataaaaatgattttgcagtatgatgtgctgaagctcttaacatgaaaaaaatgatnnnnnnnnnnnnnnnntggatggaaagtgcaagacgctctgtggtatcaacagaccgggaaagtgctgaggaaattcccattttaatcatcgaaggttttcttctttttaattataagccccttgacactatatggaatagaagctatttcctgactattccatatgaagaatgtaaaaggaggaggagtacaagggtctatgagcctccagactctccgggatactttgatggccatgtgtggcccatgtatctaaagcacagacaagaaatgcaagacatcacatgggaagttgtgtacctagatggaacaaaatctgaagnnnnnnnnnnnnnnnnngtatatgaagatctaatacaagaactagcaaagcaaaagtgtttgcaagtgacagcataaagacggaatgcagcaaatccttcctgaagtgaattaggaaactcaaaggagtaatttaagaaccttaaccaagatacaaggtgtactgtggtacaatgacagccattgtttcatatgtttgatttttattgcacatggttttcccaacatgtggaacagtaaatatccatgccaatggacaggactctagcttagcaagttgctccctctccaggaagcacatagatatagcagagctcacagtgagtcagagagtctccactttttgaacatagctctaaaatgatgattgtcaaacttttctaactggagctcag

SEQ ID NO: 11586 - DNA, 805 bp, Macaca Fascicularis
  misc_feature (1)...(805): n = A,T,C or G
agacttgtcttgcannnntacctttaagtgaatcacataattgtctttggaacttggtctcccaannnnnnnnnnnnnnnnaaagtgtttaccagatatttgatgaggtgctatgtttgtgaaaaacatcatgttattcaaaaacactattgatattgaataccggataccactatgtagtaagtcttttaggatgattttaatttagtcgtgcgtcattttctgattctcatcattgggagttcttaaatcttagcaagcattagcaatattcaatgccaaaattccattgaaactttcaagttggagcaattgtctgtgtttgaaaagatgaaataaaaataataatcaagggcaaagtttgagtgcccagaagggaaagccataccagttcctaacctgtcttgttttaggaaccaccatatttttttttcagtgttaacaatcatgataatcaaattaaaacactattttattcacttgtggaactgcagttctgaattttgggttaaaggttttggctgctgtaagaatgtgaatttgaatgtattttgaattgtaagagcaaaagaacttttttgtacaattttttttcatttaattggaatgatcttcaggtttctacaaatagggtaattgtaaatttaaagcattagcatttattggtgaataatgtatatatccccattccaagaaatgtaagtgagtgaagctgaaataaaatccttaaagtttaatatattgccagcggtttnncaacagttctcttgtatttatttatcaattaaataaaaatgattagacc

SEQ ID NO: 11587 - DNA, 738 bp, Macaca Fascicularis
  misc_feature (1)...(738): n = A,T,C or G
agtagtattaagccacaacaataatgccacattgaaatagcatttaataaaatgcataaagctaattcatgcactgcaatactctatatacaaacacaacaatggcaaattcttcttcaagactgaagacattgattagatataaaattcagtttnnnnnnnnnnnnnnnnnttttaaatgccatcacataaacaaagtgatttcacagggagaagaaagctgtataaagctacagctttcaacaggttttaaacnnnnnnnnnnaatgtaatggcaaaaccaatattttctatgttgtgaagggcaaaggttacagaaacggtcccaagaaaatctaacacccaaattttcctttgatagataagatgcctttaaaagggctggtaatacagttgcattctaacagagaagtccaaactacaggtaaaaaactacggcttgtactgtgaaaaatgtgcagcttttcagttataaaactagttgaacactggtttataagacaatccgtagaacagagagactgtagaaaaatattccagcacttgagttgtgtgtggcagcagcatttgagtccatgaatgctatggtcgttaaaataactgattatactttcctaaagaaaagccattttttaatgcaaagtctactacttccaaatgttattccaaacattaaattttaacagtctatcaatcaataaatgttgaacatttttttctattttgcatgtataaata

SEQ ID NO: 11588 - DNA, 763 bp, Macaca Fascicularis
  misc_feature (1)...(763): n = A,T,C or G
cagtccacagagannnngcagganctgcagagcaagctacagatnnnnnnnncagctgcatccagtgtccccagacgagaatacaagccaaggcctgtgaaaaggagtgctagtgagctcaatggggtttccaccacctctgtagtgaagacgacaggttctaacattcccatggaccagccctgctgtcgtggtctctatgactttgagccagaaaaccaaggagaattaggatttaaagaaggggacatcattacattaaccaatcaaatagatgaaaactggtatgaaggaatgatacacggggaatccggattcttccccattaattatgttgaagtgatcgtgcctttacctcagtaaatgtgtaacacactctggacatactttcataactgaaatgaattcacaccaatgtgctctcagtgtggtgttctgtgacatcctttgctatttgaccaacttaatgacttttgtatgtgtgttctctttataatgtattttgtatcactttagtttgtataaatgattttcttgtctttgctacatgaaaatattgttttcttttttgcttcttgtgctaaaagtcattggttaaacgtatatgcttcctgttactaaaaataagtctcacccattgcagttatgtcaatgaatggcctgtattcctcagctgcaatgaaatggtaacatttgaaactaagaaatgctaaatattttgtttctcgacattcctgatgacatctggtcttttttcttcatt

SEQ ID NO: 11589 - DNA, 661 bp, Macaca Fascicularis
  misc_feature (1)...(661): n = A,T,C or G
atagcgcccctccccagnnncagccccgagcatcgtgccaaatnnncagcctcactaggtgggacccccttnnnagtgttctgccgctcctgtggccatgtcgcccactccttccactatgggggcggaggggaacggccctctcgggacccccagctaacgtgggtgcccttttccttatgcggagtgcccctgaggctggggtagccccctccaatgcaccccaaagtgaaaggggtaagagtgcagccccagaataggtggggcttggaggtggtcccaatgtcccctaggtccacagtgggtccccttttcacccttagcggtaggttgcacactccctttccccgcagctttaataactcctggcctggcaccctcaccccaccctgactttcctatcccccagcgcttgtcctgctccaccctgccccgcctaagactgtaaaggcctaaaaacctcagcctgtcctcccacctttctgcctgccatatgcctgtccccttttcctccaaaccccnnnnnnnnnnnnnnnnnnnnnnncctgggctgaggcgctggccccggcccctgcccgcccctttccagtccttgcagtccagctccacctgccctctcctgctgcttcctctctgtgatatttttttctacgccaaaaca

SEQ ID NO: 11590 - DNA, 666 bp, Macaca Fascicularis
  misc_feature (1)...(666): n = A,T,C or G
gttgttaaaacaggggtctggtcttgctaaacactacaggtaggttggtctttgaagtccactagtggagaatgtcgagacaagatacttattaccatgacatctgatggatgtgcagcagtggggagttctagattgatctctgaatgtgatggacgcccagcaaggnnnnnnnnnnnnnnnnnnnnnntctgccctttagaagcnnnnnnnnnnnnnnnnnnnnnnnnnnnnnnnnnnnnnnnactgcaggttctctaggaggcattccagaatagagtagcacactgtnnnnnnagttctcgatgaccgaaagttatcaaaaatatttaaaatatttaaattgtgaacctattgataaagaatatttataaaaactgatctgtaggcctgtactaatctctacgcattagcaatattgactgtaaacccacattaaggaaaccactacggggccggcagtgagtgtcccgtggggtgtgcattttaaagctcgattcatagannnnnnnnnnnnatgctgcatttccgtcatggtgaagcagatgaattgagcctggtnnnnntgtggttgtgtgctacaggtttgacaaaagatatcatgtttcgatttttttgtgtgtggannnnnnnnnnnnnnctaaaattgacatatttttatgtaaa

SEQ ID NO: 11591 - DNA, 760 bp, Macaca Fascicularis
  misc_feature (1)...(760): n = A,T,C or G
gagcacgaaaggcagccgtgtggagcgtgcagaagaggcactcgcccacatgggcagctccgtattcagtggnnnnnnnnttacaaaatttggagggattgtggtgttggcttttgccaaatctcaaattttccagatattctacttcaggatgtatttggctatggtcttactgggcgccactcacggattaatatttctccctgtcttactcagttacatagggccatcagtaaataaagccaaaagttgtgccactgaagagcgatacaaagggacagagcgcgaacggcttctaaatttctagccctctcgcagggcatcctgactgaactgtgtctaagggtcggtcggtttaccactggacgggtgctgcatcggccaggccaagttgaacaccggatggtgccaaccatcaggctgattggcagcagctttgaacatagtgcccgtgaacnnnnnnnnnnnnnnntgacttgggaagcagtattactaaatctggaggcaaccacaggacactaaacctctcccagcttcttcaggaaagaaacttcattctttagcaagcaggaggtgacactagatggctgtgaatgtgatccactccctgacactctggaaaggccaatcaatgcactgtctctccttttaggagtaagccatcccacaagttctgtaccacagttttactgatatttgaggttgtagatacactttataacattttatagtttaaagagctttattaatgcaataaata

SEQ ID NO: 11592 - DNA, 936 bp, Macaca Fascicularis
  misc_feature (1)...(936): n = A,T,C or G
gaaggaaagcgaggcaaattattatnncagcccgnnnnnnnnnnnnnnnnnnnnnnnnnnnntttgcaagctnnnnnnnnnnnnnnnnnnttacatgaaattaatagccaagaattagaaaagnnnnnnnnnnnnnnnnnnngttnnnnnnnnnnnnnnnnnnnttactttgcaaagaagaaaacccttcttggcttgagtaaatnnnnngnnnnnnnnnnnnnnnnnnnnnnggatatactgcaagaaaaaattnnnnnnnnnnnnnnnnnnnnnnnnnnnnnnnnncatcaggagaccctacctgaacagctgctagcggagaaacagctacatcnnnnnnnnnnnnnnnnnnnnnnnnnnccacaactcattggtctatatatctgtgaagaaaatagaagagctaatgaatatgatttcaagaaagctnnnnnnnnnnnnnnnnatattgatgaggaagaagatgtaaatataaatgatctcaaacnnnnnnnnnnnnnnnnnnntcttcagagagatnnnnnnnnnnnnnnnnnnnnnnnnnnnnnnnnnnnnnnnnnnnnnnnnnnnnnnnnnnnnnnnnnnnncttacagaaacttttaaaagatggnnnnnnnnnnnnnnnnnncttaccggnnnnnnnnnnnnnnntgcaagcagatcagcttggaagcttaaagtccaatccttacttcgagtttgttttgaaagcaaattatgaatattatgttcagggacaaatataactttttctaaaaatggnnnnnnnnnnnnnnntttgtataagtgtgtccttataaaaattttaggccataaacaagtataagtttgtacaatttcagaacatgtatagctgagtttttacactttatatgtaggaagcataatataaaatagttatgtaacnntgattttggttttcagttacgtga

SEQ ID NO: 11593 - DNA, 670 bp, Macaca Fascicularis
  misc_feature (1)...(670): n = A,T,C or G
cgcatgtcaccatacctggataattttttgtatttttggtagagatggtgtttcactatgttgcccaaccttgtctagaaccatacagctcaagtggtctgcccgcctcagcctccctaaatgctgggattacaggcatgagccactgtgccggtttatctgtttttggttcatctttctagtgtttccttttctaaaaaatactatgatgttttaaattatacttcaagttctggggtgcatgtgcagaatgtgtacttttgttacataggtatacatgtgacatggtggtttgctgcagccatcaacccgtcatctacattaaatatttctcctaatgctatccctcccctagccccccacccctgagnnnnnnnnnnnnnnnnnnntcccctctctgtgtccatgtgttctcattgttcaactctcacttgttagtgagaaaatgcggtgtttggttttctgttcttgtgttagttttctttttgcaaatatattctaatatatgatattcctacctccttctcacacaaaggtggtatacaannnnnnnnnnnnnnnnnntaatttgtctcaccggatactaacaaaccatccaggagatcacaccatttcattagntggtgacttgtaactttccgtcattctttatatatgtcctgctgattta

SEQ ID NO: 11594 - DNA, 773 bp, Macaca Fascicularis
  misc_feature (1)...(773): n = A,T,C or G
acagcaaagacggagtcggtgcagtatgaccaccccaacccacacagtcaccgtgaccaccatcagtgacctggaccnnncaggggcccggctgctcgggctgaccccanntgagggagggtctggagacgggtctgaggaggcggcgtcatccatggagaagccaaccaaagccttgcccaggaagtccagagaccccctgctctctcagcggatctcctctctcacagcctcactgcatgcacacagccgcaaaaaggtcaagaggaaacatccccaacggacccaggactccaagaagcccccaagggccactcgtaccagcaaggcccagcgccgccgtcttacaggcaaagcacggcacagcggggagtgagaccaagaaccaagcagtgccccagcctaggcttcgaggacctgtcctttctcagcttggctgtccctgtagcccagcctgcacctaggtaatgactgcacagctcaaggttgggaagccaggacctatctggcctggggccagctgcctttgcctggggtttgaattccagaaggagcaggcagcggagagcaggcctcccccaggaagagccttcagagccacgctggggcatcttcccaaatgtgcaccccacctggcactcatcagatttctggaactcatcagagagttgtgtgcttgtgatttgtttgtccgtgataccacgcacacggcaggtnnnnnnnntggtggaaatggccggggcccatgggtctgtctccagcagttgcccnct

SEQ ID NO: 11595 - DNA, 744 bp, Macaca Fascicularis
  misc_feature (1)...(744): n = A,T,C or G
acannnctacnnnctggaaggaaacagagnnncacagaccctctcattccaagaaattgcccttcttaaagctgtactggtggctggactgtatgacaatgtggggaagataatctatacaaagtcagtggatgttacagaaaaattggcttgcattgtggagacggcccaaggcaaagcacaagtacacccatcctcagtaaacagagatttgcaaactcatggatggctcttataccaggagaagataaggtatgccagagtgtatttgagagaaactaccctaataaccccttttccagttttactttttggtggtgatatagaagttcaacaccgagaacgtcttctttctattgatggctggatctattttcaggcccctgtaaagatagctgtcattttcaagcagctgagagttctcattgattctgttttaagaaaaaagcttgaaaatccaaagatgtcccttgaaaatgacaagattctacagatcattacagaattgataaaaacagagaataattgacgctgaaattcatggtcaactgctttaaaaattaagatgaagatacagtcatgaaattatctgaaaatggatcatcacattaagtatttcattacttaaaatgttggtactagccattaacttaaaggtggtggggaaaaaagcacatactttaaatatgtgtaattttctagttcctttttaatgatgattattctgaatgtattgccactaca

SEQ ID NO: 11596 - DNA, 769 bp, Macaca Fascicularis
  misc_feature (1)...(769): n = A,T,C or G
acaagtgacagactgaaaannnnnnnntgtcaacaataaaatcagtaaaatgagaacttaagcaacttacatcaactacagatgctagagctgggatcnnnnnnnnnnnnnnnnnnnnnnnnnattgacaccttaaccaacctggagagtttgtttttggggaaaaacaaaattactaaacttcagaacctggatgcgctcaccaacctgacagtcctcagtatgcagagcaaccgactgaccaagannnnnnnnnnnnnnnnnnnnnnnnacctgcgggagctgtaccttagccacaatggcatcgaggtcatcgagggcctggagaacaatnnnnnnnnnnnnnnnntggacattgcatcaaatagaatcaaaaagatnnnnnnnnnnnnnnnnctaacagagctgcaagaattctggatgaacgacaatctccttgagagctggagtgacctcgacgagctgaagggagccaggagcctggagacggtgtacttggagcggaaccccctgcagaaggacccccagtacaggcgaaaggtcatgctcgccctcccctccgtgcggcagattgacgccacgttcgtcaggttctgagtcctccttgctcctcctatggtccctctcctcggaagaactgcccagccatggttttttaacccacctgttgctcctgaggtcgtcactatatcaacagtcaaaaacccaatggcaataaaggcactgaggatagctgacgcgcgatgccacgcgccatttcagatgccat

SEQ ID NO: 11597 - DNA, 750 bp, Macaca Fascicularis
  misc_feature (1)...(750): n = A,T,C or G
agtcttgttctttatcaatacctgtaaattctcttaaagcagtagcaaaggcgactgtagcaagagctcaaaaggcnnnnnnnnnnnngagtgtatttaannnnnnnntaaaaatataaatgtagaagatctgtttatatatttttctttcagaaataaaccccccctcnnnnnnnnnnnnnnnnnnnnnattgtactttctgctctcatggctaaggggacaggggttccagaagaacctttcaagatgatgaggaacaccaggacgagggccatctcacctcacttggaccacatggagaccaccaggtatcctgcttgacctcccttcagaatgggagcnnnnnnnnnnnnnnnnntgtcccgccccaccaagccccgtctgaagcagagcttccccgcctgtgttccctccacagtcccagtcagcccactggcaaaggccacttcgtcccagctctgccacccttctgctcacagtggccagggtccctcaggggcaagaatggcagggattggaacgagggctctggaaggactgttcagccctacgcctaagacccctacgctggggacactacaggcacatggaggaatagcagggccaccctcagagtttacacatccatgaacaaacgaaggctgaggagatttctaaacctaaagtccgcgagtgtgcacttcaatccaggaagccaggacttccttcagttccaaaaataaattctcccttccggtnnnnnnctgtgc

SEQ ID NO: 11598 - DNA, 757 bp, Macaca Fascicularis
  misc_feature (1)...(757): n = A,T,C or G
atgcagctatttaatttatggaagagnnnnnnnnnnnnnnnnnnnnnnnnnnnnnnnnnncaattgaaaacatggtgggtccagactggaaaaagaggtggttatactggaagaatcggacccaagaacagtgtgttcacaatgaaaccaagaatgaattggagaagatgttgaaatgtaatgaggagcacccagcttatcttgcaagtgatgaaataaccacagtccggaagaaccttgaatcccgaggagtagaagtagatccaagcttgattaaggatacttggcatcaagtttatagaagacattttttaaaaacagctctaaaccattgtaacctttgtcgaagaggtttttattactaccagaggcattttnnnnnnnnnnagttggaatgcaatgatnnnnnnnnnnnnnnnnnnnnnnnnnnnnnnnnnnnnnnnnnnnnnnnnnnnttaaggcaacaacttacaaacactgaagttaggcgattagagaaaaatgttaaagaggtattggaagattttgcggaagacagtgagaagaagattaaattgcttnnnnnnnnnnnnnnnnnnnnnnnnnnnnncctcaagaaagttagagaaattcaagaaaaacttgatgctttcattgaagctcnnnnnnnnnnnnnnnaaattatattaaattcatactcatcatnnnnnnnnnnnatatctgaagaacaaaaacatcaacatcttttgtccagcctctttttcttctgctgttccac

SEQ ID NO: 11599 - DNA, 760 bp, Macaca Fascicularis
  misc_feature (1)...(760): n = A,T,C or G
cagacccaaagagagcactgtccaaggatgttggagcatnnngctgcttaggggaatgttnnnnnnnnnnnnnnnnnnnnnnatccagctcatctgccaaaatgtagggctaccgtcttggatgcatgagctattgctagagcatcatccttagaaatcagtgccccagatgtacatgtgttgagcgtattcttgaaagtattgtgtttatgcannnnnnnnnnnnnnnnnnnngcttcccctccccaccctacgcgtgcataaaaactggttctacaaatttttacttgaagtaccaggcagtttgctttttcaggttgttttgttttatagtattaagtgaaattttaaatgcacagttctatttgctatctgaactaattcatttattaagtatatttgtaaaagctaaggctcgagttaaaacaattaagtgttttacaatgatttgtaaaggactatttataactaatatggttttgttnnnnnnnnnnnnnnaaagattaaatatatctttgtaaattattttacgtcatagtttaattggtctaccaagtaagacatctcaaatacagtagtataatgtatgaattttgtaagtataagaaattttattagacattnnnnnnnnnnnnnnnnnnnnnntaaatatttcataaattaacaaagtttcactccataaaaagaaagctaatacnnnnnnnnnnnnnnnnnntgtgaaatttcatgaaaactttttaatggcaataatgactaaaga

SEQ ID NO: 11600 - DNA, 774 bp, Macaca Fascicularis
  misc_feature (1)...(774): n = A,T,C or G
atctgctgaaaacatatgaaagannnnnnaagnnaaccatggtttgatttcagaaagtggtaccaaattatgaagaaagcttttgatgagaaaaaacaaaagtgggaagaagcaagggccaagnnnnnnnnnnnnnnngaaaagccactctactactcgtttgtcgacaaaccagtagcatataaaaaaagagaaatnnnnnnnnnnnnnnnnnnnnnnnnnnnnnnnnnnnnnnnnnnnnnnnnnnnnnnnnnnnnaaaaagccnnnnnnnnnnnnnnnnnnnntggactgaagaagacactgatagaacatgtttccatggacnnnnnnnnnnnnnnnnnntgaaagagaaaggccaatcactgctaactaagaattcattatattggcttagtacacagaaattctgcagatgctattgtacacacgtgacaacctatgaagaatcaaattattctctgagttatcagtttatactaaatctcttctccttcctgctcagaataaagacttcccttctccatgaagaagtgagcttagttgagaagaaacttttcgagaaaaaatatagtgtaacaaaaaagaaatcaagatccaagaaagcgagacgacattgagaaaatgaaatagaaactttctggaaaaatattttagtattgatataacatcagattttaatataacattccagagaattgtggaaaatactgcatatatatgtatatgctctgacacatatttacatatatgtcaagtgtgcttagaaaattgta

SEQ ID NO: 11601 - DNA, 716 bp, Macaca Fascicularis
  misc_feature (1)...(716): n = A,T,C or G
gaccgcgtnnngagcnnnccnnnggtgtgcggctgcagcggccnntggcagaggccccgcggagcaagctctgaggctgtgttacnnnnnctggaaagaagagtgacctnnnnntgctgtaggaagtgatgttgaggtgatggtggcctcaggattcagggcccagctcctgaaggggcctgggctgcttctcatcttcacccactgcagtctgggctttgggctctggggccaacttctcttcagccccatgggaagagcccgttttggggtgctttcttgaaaccccagttctctgtcccctagcactagactcagctgtattgtttttccttctggggagcccacttcaactgcacagaggttctgggcctgacaggtagatgccagctggaaggcaggcctgtgcctggttttgcgtctgttcccctgagggccaccatcatcctggagcttcactggggccttggctcctgtctgcctgtcagtcaggtcagggctgacagaggactcggcttccttagcatatctcagcagaaaccttgctctcaagaacagagacagaagggacagaaacaggagtgcctcctgttgtgccaggcccgtgggnnnnnnnnnnnnnnnnnnnnnnnnnnnnnnnnnnnnnnnnnnnnnngccaacaggggcactctgacactgtgccttcattttccagcccacagcctgggtctcgggg

SEQ ID NO: 11602 - DNA, 689 bp, Macaca Fascicularis
  misc_feature (1)...(689): n = A,T,C or G
ttggactttttcatgtttnttcacaaaatcaaaatttgttaagtctcactgtagtaattctgggacaggttattaattaaaggatttaaatttgaacctggcttnnnnnnnnnnnnnnnnnnnnnnnnnnnnnnnnnntactatgtagccacttggccataatcatttagaccgtggtgtagggcaaagctattaggaagattctagcgttttactctccctggctttcctccaccttgctgcaacagagaggaaatgcccatnnnnnnnnnnnnnnnacactgcccctctcactatcttgttatccagtggcatgccaaaggagaactgaattcgcctctgaaccttctgctgtaaaccagaagtgtatgtcagccaagtgtacacaagatgcacccagtatggtgggagggttttgctgtcagtaactcaaagtgtggtgtagcaatggtctcctccctccatcctgggaagtcacagtcccattctggtgtgagaannnnnnnnnnnnnnnnnnnnnnnnnnnnataaccaactccttctggtaatcaggaagccaaatgtcaccttcccaaagaaactttattttcacgtagctgaagtgcaaaacatagatgannnnnnnnnnnnnnnnnnnnnnnnnnnnnnnnnnnnnnnnntctacaagaattatagctttaaaaaataca

SEQ ID NO: 11603 - DNA, 633 bp, Macaca Fascicularis
gaatacccactgccacgcggaccacattacaggctcggggctgctccgttcccttctccctggctgccagtctgtcatctcccgccttagtggggcccaggctgacttgcacattgaggatggagactccatccgcttcgggcgcttcgccttggagaccagggccagccctggccacaccccagggtgtgtcaccttcatcctgaatgaccacagcatggccttcactggagatgccctgttgatccgtgggtgtgggcggacagacttccagcaaggctgtgccaagaccttgtaccactcggtccatgaaaagatcttcacacttccaggcgactgtctgatctaccctgctcatgattaccatgggttcacagtgtccaccgtggaagaggagaggactctgaaccctcggctcacccgcagctgtgaggagtttgtcaaatatcatggacaacctgaacttgcctaaacctcagcagatagactttgctgttccagccaacatgcgctgtggggtgcagacactgacccctgcctgatctcacttctgtcagatgctcccatccagtattaatgcactaggcgggaagagagggcggcatccacactgcacctctcctttcccacccc

SEQ ID NO: 11604 - DNA, 674 bp, Macaca Fascicularis
  misc_feature (1)...(674): n = A,T,C or G
tcaagaaagtcaaagaccaccgaggcatcatccccaaccgnggcttcctgaggcagctcctggccctggaccgcaggctgcggcagggtctagaagcatgaggggagggggagagaggtcaggccaggcctgtgggtgggtccctggctcccagctggagataggaggcccaggtggcaggtagcaggaggcccagatcacccatcctcccctggggtcaggagaggccgagtcccaggccactgtcactctttgtgggaggggacggggagtgaggttgggcagtgtggtggatgggcacccaggaagggttgaccagggaaggaggcagctaggctgtagatgaaacatggtcctgggattcaaacaccgctgggatctggccagggtgctccccgggattcacagtcccttcccctctttgtgcccaagtgttcccctctctccctcaccaaaacaaaagggccatctctgccctgcacttgtgcagaaagtcagggatgcagcaggcatgaatgcaatggtgtagagttgtgtgaaacccctagcatagagacagacagcgaagagatggtgtgaaaagcttgcagaaccagagagagaaccccacagactttccactccaagcgcaggaggaggtagctagcgtgtgagggttggcactaggcccacgg

SEQ ID NO: 11605 - DNA, 791 bp, Macaca Fascicularis
  misc_feature (1)...(791): n = A,T,C or G
gcaggaacagnnnatggctccacaagcatgtctggcattcccacccaccatggaagactggatacacacctgagaagacagggactatggaagctgttcaagacacatttgatcttcagaaaagcagaatttggttcaactgttgacagaggacacaaatnnnnnnnnnnnnagcccagccttctctaaaagatatttttctatttattttctagagctggccagtggctctagtgctagannnnnnnnnnnnnnnnnnnnnnnngccttggaccacggactcatactcaactgagtaagaaggggctggtgcccaatggggatggctgagctggtccttaatatgttaaatgttttagcctcttaatgtttcttggtcttgcttttttcatgcccttccccaccactcctgccacctttagataagtttctccagctaattttgtggccaacgtaaaattcatcgtcaacctaacacaaccttctcagcaacatttctcccctgtgatggaaatcaagtgtttagggcagtgggagaagaaaattctccaggtgaatggggaaaggtctggtccagcctctccctactcccattccatttccaccaactgggagctgtgaccatctcccccgacctctaccagggatgccttcatgccagggctattctcaccagctgcctcagatgacaaatgaggctaatggacaaaatctgcagtgtcctttttcacttgcaccttttttataagaatatattgtaatactaaaaaatattaaattcataccatccc

SEQ ID NO: 11606 - DNA, 738 bp, Macaca Fascicularis
  misc_feature (1)...(738): n = A,T,C or G
gaggtagnnnnntgnaaggggactgcatnntagttaannngaatttcccagaccaggagggactgctgtgcccttccttctnnnnnnnnnnnnnnttggctagattcattcagcagtagaagctctttgatctgttgaccccagcatactgnnnnnnnnnnnnnnnnnnnnnnnnnnnnnnnnnnnnnnnntttggaggatgatgtgatagagcactcagagagagagagggagaagagaggtagtgggtatgcttctctagctccccatcttccaggtccacctcttgacttcctgttcccctannnnnnnnnnnnnnnnnnnnnnnnnnnnnnnnnnnnnnnnnnnnnnnnctcactcctcagcaataatctagggtatgtgggaaggtcagggctgtgggaaggaatagaatcaaagaggggagtgatatggnnnnnnnnnnnnnnnnnnnnnnctaaacttggacattaattttatatcatgacccccttttaagccagtgagctgggcttcagtttttcccaggccatgcacatttaatttatttcagagaaactctaattgtattttcactgcagtatcttgtattttttatttgtgatttaagaaatgtgaagagaaaatacacagacacaataatggctaacagtgtttctttcattccttgttctagagctaaccactctaaaattgtttggtaatgtcacttagtgtaattaattgtaacatattctt

SEQ ID NO: 11607 - DNA, 783 bp, Macaca Fascicularis
  misc_feature (1)...(783): n = A,T,C or G
ttgtccccccnatcttatagaagttgaggccaannnaggatggtaggcacagacgnnnaannnnnaaactgctctgtgcttcaaaccaaagtgttcccccctaccccaaatttgtctaagcactggccagtctgttgtgggcattgttttctacaaccaaattctgggtttttttcttctttctttaaacatagaggttccaccacaagggatgccctactctctcgcagnnnnnnnnnnnnnnnnnnnnnnnnnnnnnnnnnnnnnnnnnnnnnnnnnnttggattgcttgcttccctcttaaacnnnnnngacattgtaatcacaaaataacagtaaaaccttaaaagctattnnnnnnnnnnnnnnnnnnnnnnnnnnnnnnnnnnnnnnnttctgcctccatgtctgtcactcataatnnnnnnnnnnnnnnnnnnnnnnnnnnntgagcagaagaatcattnnnnnnnnnnnnnnnnnnnnnnnnnnnnnnnnnnnnnnnnggaaagggtttcaatgtattaagcaatgggctgcttctcccccaatcctccctaacaattcgttgtgtggacttctcatctaaannnnnnnnnnnnnnnncttgggnnnnnnnnnntctattcatgttcnnnnnnnnnnnnnnnnnnnnnnnnnnnnnnnngacttgaaagatttgtagatnnnnnnnnnnnnnnnnnnnnnnnnnnnnnnnnnatgttactatcttagtttgtaaattgtccttttgataccatcttgttttcttaggcatccctg

SEQ ID NO: 11608 - DNA, 751 bp, Macaca Fascicularis
  misc_feature (1)...(751): n = A,T,C or G
catgcaaccagtcnacaccatgaataagnnnnntaaacgaggacctaggtataatctacatcagatccagggtcactcaactcgacatttccacacccagacccaaaatttgcaacaatcagtcagaaaattttcacagaatccacatgtttaccagagaggccatctccctcctcctnnnnnnnnnnnnnnnnnnnnnnnacgcaggaggtactcttggaannnnnnnnnnnnnnnnnnnnnnnnnnnnnnnnnnnnnnnaaggtggtatcctgacaattactctggactctcctannnnnnnnnnnnnnnnnnnnnnnnnnnntacaaacctgtcctggaattctacctagagaccagannnnnnnnnnnnnnnnnnnntgtgactttaattggttcaggtctaatcaggtttctttagtgttcccttatgtgttcaagcttaaggaaaacttgcattgctgtttacctctttgctgataaattnnnnnnnnnnnnnnnnnnnnaggaaaaaaaaaatctgttattccagtcttaaatttttctaaaggaagacaatatnnnnnnnnnnnnnnnttaagaacttcccttgcaaattattttttaaaattctgtcttgtttttctgtgtatttctttctgactagacttgtgacatgcgtnnnnnnnnnnnnnnnnntttttagtgtttttggtatgttctgttattgacccaaaggccatctttattttctataactgttcaaaattta

SEQ ID NO: 11609 - DNA, 768 bp, Macaca Fascicularis
  misc_feature (1)...(768): n = A,T,C or G
tgtannnnnncacagatgaattttctacagcagttttcaagaatacaatcctatttacaatatggaaggagagctcaagatccactgcttgtataaagggctatagataccgtcgctatcacaaagttttatacaagtcaaagtgcattaaatcacttagaatatttactccactcttcctcttaaagctgaaggaaattcaacatgcaggaggaaagcctagtcagtgaagcctccctaaagtgagtacagacctaggaacgggccccacagctacacctaaaacggctgaggagtgggacctggggtgcgtgtggggccagttcaagggctggagaagccacggaggcagcagacgggcttccgtggaaaagtagctgcctttggctggccttgagctacccagtcgtagagacgctctcctgaacagccgagaaaggaaatctgactttgaaaaaaggctgcctcttacccatcaaacttggagaagagactcctgtttcgtgttcccaccaggtaaatggaaattcgtgttcgaaacaagggacaactgtgtctgcaaggaggagccagatgaggtggtcagtcactggagaagggtgcctctggaaggcagagagcctgagctgggactaaggagatgctgccctggcttggttcttcatggaaatttcgttaggttagcgttgcaaataggtgtttttctgtgacatacattttatatacctatgttggcccctagcatgattgnnnantacaactttccat

SEQ ID NO: 11610 - DNA, 719 bp, Macaca Fascicularis
  misc_feature (1)...(719): n = A,T,C or G
cccccgcagncagnnnnnnatggctcaggagactaaccagaccccggggcccatgctgtgtagcacaggatgtggcttttatggaaatcctaggacaaatggaatgtgttcagtttgctacaaagaacatcttcagaggcagcagaatagtggcagaatgagcccaatggggacagctagtggttccaacagtcctacctcagatnnnnnnnnnnnnnnnnnnnnnnncactagcttaaacaactgtgaaggtgctgctggcagcacatctgaaaaatcaagaaatgtgcctgtggctgccttgcctgtaactcagcaaatgacagaaatgagcatttcaagagaggacaaaataactaccccgaaaacagaggtgtcagagccagttgtcactcaacccannnnnnnnnnnnnnnngcccagtacttctcagagtgaagaaaaagctcctgaattgcccaaaccaaagaaaaannnnnnnnnnnnnngcagaaagaaagttggtcttacagggtttgactgccggtgtggaaatttgttttgtggacttcaccgttactctgacaagcacaactgtccatatgactacaaagcagaagctgcagcaaaaatcagaaaagagaatccagttgttgtggctgaaaaaattcagagaatataaattacttcttgtgaagagactgaaactttgtttttattttaatatatcgtaggaaaac

SEQ ID NO: 11611 - DNA, 758 bp, Macaca Fascicularis
  misc_feature (1)...(758): n = A,T,C or G
atagcccgccaggcctccatagagctgcccagcatggccgtggccagtaccaagagtcggtgggagnnnnntgaggtacaggctcagtctgccaccaagactccgtcctgcaaggatattgtggctggagacatgagcaagaaaagcctctgggagcagaagggaggctccaagacctcatcaacaattaannncaccccatatgggaagaggtataagtttgtggccaccgggcatgggaagtatgagaaggtgcttgtggaggggggcccggcgccctaggcctcctgtctcgcttcctgggtctgcaggtccagacgggcgacaccctccatgtacccaggggagatcccagccagacacctgcacccccgccctggctaagaagttgcttcctgttgccagcatgacctaccctcgcctctttgacgccccccgctgccacctccttttgctcctggaccctttagcctctctgcccttcctctctctgaccccaaccaccccccgccagctctgcttctcactacctgggggaggaaagaaactcctgatcgttggccagaggaacttacccctggagaggccaagtaccttctaggaagttaggaggttgaggcacagccctgtgcagagagggcgggtcaccccccagatccaaggggaaactgcaggtcaagggctggtaacggccacgcaggaagcttgatgctgcatcccccccgcactctgcttgccaccccccaccccgccatttt

SEQ ID NO: 11612 - DNA, 750 bp, Macaca Fascicularis
  misc_feature (1)...(750): n = A,T,C or G
actggagctgaggannnnnnnnnnnnnggggtggatgtactcctggaggtgttccctacctgttcagtggagcaggcccagtgggtgctggccaaagctcggggggacttggaagaagctgtgcagatgctggtagaggggaaggaagaggggcctgcagcctgggagggccccaaccaggtatcttctcccagcaccctctaccatgtagcctcagctacattccaccttggnnnnnnnnnnnnnnnnnngcctatccccatctgtttcccctgctggtgcccttgggcctagaccaggcctcccctctctgcaggacctgcccagacgcctcagaggcccccaaaaggatgagctgaagtccttcatcctgcagaagtgagtatgagctggcctgggctagactgggccctagagggtcttcccagggtgacaggagcttcccaaggaggcccccatatgaagctggatagcgcagatgacatnnnnnnnnnnnnnnnnnnngctcacaaggggagcgannnnnnnnnnnnnnnaaccctgaggccgaggagatgaaagccacatacannnnnnnnnnnnnnnnnnnnnnnnnnnnnnnnnnnnnnnnnnctcgctggactctgcccgagccttttaggctcagatcccagagggatgcaggagccctatacccctacacaggggccccttaactcctgtcccccttctctattcctttgctccgatagtgttaacctactctcggag

SEQ ID NO: 11613 - DNA, 831 bp, Macaca Fascicularis
  misc_feature (1)...(831): n = A,T,C or G
ctccagagccattggggaccacttctataannnnnnnnnnnnnnnnnnnnnnnnnnnnnnnnngatttcagcccttcctgacnnnnnnnnnnnnnnnnncannnnnnnnnnnnaattcatggtcattgcctnnnnnnnnnnnnngaatgtgatgagcagccaggaagttgtagacttcattaannnnnnnnnnnnnnnnnnngatgaaaatggggagcttcggttattgtcatccattgtggnnnnnnnnnnnnnnnnntccctggcaccagacacttctggggatggtacagggtgtgacaacatgacctgcatcatcatctgcttcaagccccgaaacacagcagagctccagccagagagtggcaagcggaaactagaggaagtgctctctactgagggggctgaagaaaatggcaacagcgacaagaagaagaaggccaagcgggactagcagtcatccagacccctgcccacctagactgttttctgagccctccggannnnnnnnnnnnnnnnnnnnnnttcctttagccttagcagtgggtatgaggtgtgcagggggagctgggtggcttcactccgcccattccaaagagggctctccctccacacagcagccgggagcctctgctgtcctccccagccgcctctttgctcctcgggctcatcaccggttctgtgcctgtgctctgttgtgttggagggaaggactggcggttctggtttttactctgtgaacactttatttaaggacattcttttttatcggcggctccatggcccctcggccgcttgcacccgctctctgttgtacactttcagtcaaca

SEQ ID NO: 11614 - DNA, 1069 bp, Macaca Fascicularis
  misc_feature (1)...(1069): n = A,T,C or G
gnnncgacgctgnnnccncgtgnnnnnnacgtccagtaccgcnnnnnnnnnnnnnnnnnnnnnnnnnnnnnnnnnnnnnnnnnnnnnnnnnnnnnggacacaggcacacccaagtggagcgacagggtccccaaatgcgccttgaagtacgagccgtgcctgaacccaggggttcccgagaatnnnnnnnnnnnnnnntacaagcaccactaccaggcgggcgagtctctgcgcttcttctgctatnnnnnnnnnnnnnnnnnnnnnnnnnnnnnnnnnnnnnntgtgcccggccacccctcccagtggaccagccagcccccactctgcaaagtgacccagaccacagatccatcacggcagctggaaggggggaacctggccctggccatcttgctgcctctaggcttggtcattgttctcggcagtggcgtttacatatactacaccaagcttcagggaaagtccctttttggcttctccggctcccactcctacagccctatcaccgtggagtcggacttcagcaacccgctgtatgaagctggggatacgcgggagtatgaagtttccatctgaaccccaagactacagctgcaggagccaggacgccccttccctcctcattcgggccgggggaagtacgggacccggtctctgcctcctggctgccctccnnnnnnnnnnnnnnnnnnnnntccccgtcccatgagggggctttgatggccctggagatcctacagtaaataaaccagcatcctgccgcccaaagccgcctcttctcagttgccaaacgagggacctgccccccaccctactggcttttggattctgggaggggaactctgccccctgcaaatcttgcggcccctcctgcacagggcacccctcaaggactgcccccgatagctctactgttcccttgaaggcgcccccctcccnnnnnnnnnngccctaggtctgactccagccaggagggtcagaagaaggatgaaggggagagctgagacaaggccttgcccccttcctgccatctccccaacccacggtctctccacctttgcttctg

SEQ ID NO: 11615 - DNA, 758 bp, Macaca Fascicularis
  misc_feature (1)...(758): n = A,T,C or G
aagcagcannccaacnnnnnggagacagaggagaagcgccagcgagagaggcagcaggagagcaaaataatgtttcagaggctgctgaagcagtggttagaggaaaactgagacgtgcacccacatgggatggagacccaaagggactnnnnnnnnnnnnnnnnntgggtgtgggcccattttggggaccaaacaccaagcnnnnnnnnnnnnnnnnnnnnnnnnnnnnnnnnnggacacgtgggaatcctcccagcatgatgcttgaccgaccccaggaaggtcctcatctttcgtgcctgtcattctcggatggctgtgaggcattccttggcaagggacgctgcataccagcggtcctcgccgcatctcacgtggctcccgtgatgcatgttgttgctttcccacccgggatctccatctctcttcccttcctgctgtcagtaagagatcacatgtctgtgtagtgtgaatgccnnnnnnnnnnnnnnnnnnnnnnnnnnnnnnnnnnnnctgcctctgagaagcagcactaggcctgttgaattgcagtgtgctgccctgagatcccgtttcaagaatgggcagctaaacgcagtgtgggaaagggatgtggaatgagaacnnnnnnnnnnnnnnnnnnnctgtttgtgtaatcatttatgtatgtggtaagctacatgtatgtaaatattgcaatacccctaacagccgagtagtagtctcccttgcaggnntttctgacggggttcttcatc

SEQ ID NO: 11616 - DNA, 740 bp, Macaca Fascicularis
  misc_feature (1)...(740): n = A,T,C or G
cagaagtacaaatcatatgtacaagtatttatatcagtgaaaatttccattggtgattttttggcagaatattggtcttgactctggaataaatgacgacgtaaacgtagcnnnnnnngggtgttcctgtaaaatgcttgaatcaattgtgtgtcaaagcatcacacaaatggctaattaaattgggtgatgagtgaaaggttataaatccttcattnnnnnnnnncgagcagatccccttctccaactgtgtctccagcttgacagtgcacagannnnnnnnnnnnnnnnnnnnnnnnnnnnnnnnnnnnnnnnnnnnnnnnnnnnnnnnntcacacaaatttcnnnnnnnnnnnctaccgtgtctccaggcttgacagagacggccaccaccacnnnnnnnnnnnnnnnnnnnnnnncactgcttgtgtcnnnnnnnnnnnnnnnnnnnnnnnnnnnnnnnnnnnnnnnnnnnnntttggttaagatattcaccttgtacactgtaccgagaaactgaatgctcatgtttccacctgcttctcgagacagacactggacagtcctctgagnnnnnnnnnnnnnnncggacaataagggcaaagccaggnnnnnnnnnnnnnnnnnnnnnnnnnnnnnnnnnnnnacttccaccaagaacgttgacccactgtttgatgctactacagtatgaactttatcatgcaattttattgnnngctcnnnnnnnnnnatgtctg

SEQ ID NO: 11617 - DNA, 748 bp, Macaca Fascicularis
  misc_feature (1)...(748): n = A,T,C or G
gcannnncgctgtgagttgctnnnnnnnnnntggtcacannnncagactgcgagcagtggcaccgacttgggccttcctttgtgtgtggcgtatttatttatttaaacaccccagggagttacatggtaaggaggttgtccataaagagcttgcttctatactggaggccccagatggccaggcctcgggctgcgtccggcttgcacggtctcccgagggaatcagccccatcaacgaagttcaaatcagggcagaggctgcacttgtgcctccagacagtggtttccgnnnnnnnnnnnnnnnnnnnnnnnnnnnnngaggcctagagcatgtcccggacatcacagcggggctcagcagttcccccagcctctgcctgccttggctaagtgtgagttaagcagcaaaactctcctctgtgtatgaatggggcnnnnnnnnnnnnnnnnnnnnnnnnnnnnnnnagagcaggctagaggcacagtggccgctgggtgctggctctgaatgtcggttggtggctggagaacagccctgtgtgctggatgcctctgagggccgctcagtcccgcacaccaaacggctcgtgagggctcagctctgcctccaccctgggctgcagcctctgcaagcaagcgacaggcatcctttctgttatcaactccatgtaaccagtaactacagccatttataattgactcagtttccttttgtaggttccctgtctttgttctttgtatgattttg

SEQ ID NO: 11618 - DNA, 758 bp, Macaca Fascicularis
  misc_feature (1)...(758): n = A,T,C or G
gactcgcgcacagctctgcatgttgctgcagcnnnnnnnnnnnnnnnnnnnnnnnnnnnnnnnnnnnnggcttgcaaagtgaatccttttgccaaggacagatggggcaacattcccctggatgatgcnnnnnnnnnnnnnnnnntggaggtggtcannnnnnnnnnnnnnnnnnnggattcctacacactctctgacactcaggctgaggcagcagctgaggccctgtctaaagagaacttagaaagcatggtatgagcacaggtcatggagagccnnnnnnnnnnnnnnnncatgagctggccacacatgtaatccataaccaccaaaaatgctatggagagctacactgcttcagtggggaccaagcagtcatgtggtgacttaggctagtgctttctatgagagtcaaaataccccattccctcagcagacagagtacagagaagggcctcagtggannnnnnnnnnnnnnnnnnnnnnnnnnnntgggcttcaaggtacagcctaatggcttgccccactcaaaaccatcccagctcttcacccaggtctcctcttcctctccctgaagaaaccatcatgagagaaagacactcnnnnnnnnnnnnnnnnnnnnnnnnnnnnnnnnnnnnnnccacagaatatgggaagtgggaatggctacgtacatggctttagtagtctggagagatctactccccttggccaggacatgctgctgctactgctaacagccaattttatagacagagaaa

SEQ ID NO: 11619 - DNA, 787 bp, Macaca Fascicularis
  misc_feature (1)...(787): n = A,T,C or G
ttgccacagccanntcagaaatgacccacctttgtggaggtttttgtanntgcgtgattttcgagacaatactgtcagagttcaagacacagattggaaagaactgtacaggaagaggcacatacaaagaaaagaatcccccaaagggcggtttgtgatgctcctgccatcgtcaactcacggcattccattctatcccaaccccttgcaccctaggccatttcctagctcccgccttcctccaggaattatcgggggtgaatatgaccaaagaccaacacttccctatgttggagacccaatcaattcactcattcctggtcctggggagacgcccagccagttccctccactcagaccacgctttgatccaattggcccactcccaggacctaaccccatcttgccagggcgaggcggccccaatgacagatttccctttagacccagtaggggtcggccaactgacggccgcctgtcattcatgtgattgatttgtaatttcatttctggagctccatttgtttttgtttctaaactacagatgtcaactccttggggtgctgatctcgagtgttatttctgattgtagtggtgagaattgcactcccagaagccttttaagagatatatttacagcccttaggggtggtgtgacccaaaggttcctttgtggcaaggttggccttgggaatagttggctgctgatctccctgctcttggttctcctctagatcgaaggttgttttctgatgcgtcttaccagattaaaaaaaagtgtaaatga

SEQ ID NO: 11620 - DNA, 762 bp, Macaca Fascicularis
  misc_feature (1)...(762): n = A,T,C or G
agatgatgaaaataaacccatctggatgcatgcngnngaaagagaagaatgcaaaggaaagcaaaaggatgggacgtcttttggagagtatggcggctggtacaaagcctgcaaagttgatagtccaactgttacaaccactctaaaaaaccttggggcactttacagacgtcaaggcaaatttgaagctgcagaaacattagaagaagctgccatgaggtctcgtaaacagagtctggcggaagtgctcaatgaccctgagaacatggagaagcgcaggagccgtgagagcctnnnnnnnnnnnnnnncaagtacgagagtggccctgacggaggggaggaagtgagtatgagcgtagagtggaacgggggcgtctctggccgagcctctttttgtggaaaacgacagcagcagcagtggcttggaagacgccaccgctaactgaccccgacctggccccgctccaggatgggactgccgagtgtggcccggagctggcccgggacagccagggcagcagggagggcccctggctgggagccacagcgctcactcatttctcctgcgtctgtgtgcgtggggcacgatactaatgaccacatggctggcgtgaccttgggactggggctgaggctgggcctaagctggtgccctggtgcagcgtggcctctcccaggaggcctggggcatgagctgggcccacggctcccttcccatgtgtaacttcctcatgttgtgtgcgataatgtattttattgtac

SEQ ID NO: 11621 - DNA, 771 bp, Macaca Fascicularis
  misc_feature (1)...(771): n = A,T,C or G
ggctggnnnnnnnnnntnnnnnccaagcnnnccagcctaactagcactttacctgacacnnnnnnnnnnnnnnnnnnnnnnnnnnnnnnnnnnnnnnnnnnnnnnnnnnnnnnnnnnnnnnnnnnncagcagattgggaannnnnnnnnnnnnnnnnnnntgcagctcttctggaacatgtacaacagccgcagagannnnnnnnnnnnnnnnnnnnnnnnngtgctcaatgccaagacgctccgctgccccgtgatgctggtggtcggggataatgcacctgctgaggacggggtggtggagtgcaactccnnnnnnnnnnnnnnnnnnnnnnnnnnnnnnnnnnnnnnnnactccggagggctgccccaggtcacacagccaggnnnnnnnnnnnnnnnnnnnnnntacttcctnnnnnnnnnnnnnnnnnnngcgtacttgaaggaccgaaggctgagtggaggagcagtgccctcagccagcatgacccgcctggcacgctcccgcactgcatccctcaccagtgccagctcggtggatggcagccgcccacaggcctgcacccactcggagagcagcgaggggctgggccaggtcaaccacaccatggaggtgtcctgttgaagccctcgatcccgctgacgacgcccacctgtccgcccacgtcgaggccccaccgccatccttgcgccggctcatgttccctttagtttatttttgtgagggcaaaggggaggaaatggggttctgttgaaaaaaatgagggga

SEQ ID NO: 11622 - DNA, 731 bp, Macaca Fascicularis
  misc_feature (1)...(731): n = A,T,C or G
caccaagcagtggctccannnnnnnnnnnnnnnnnnnnnnnnnnaagggcannnnnncagcatccacagcccggaggagcaggacttcctgaccaagcatgccagccacaccatctcctggattggccttcggaacttgaacctgaagggggagtttatctgggtggacgggagccccgtnnnnnnnnnnnnnnnnnnnncaggggagcccgccagccagagtcacggcaaggannnnnnnnnnnnnnnnnnctccnnnnnnnnnnnnnnnnnnnnctgcgaccgtaagctgggctcctgggtgtgcgaccggctggccacgtgtgcgccgccagcnnnnnnnnnnnnnncagagtccctgggacctgaatcaagaccgggccctgacggccgcctgtccgccccctctgcccctctccactcttgnnnnnnnnnnnnnnnnnnnnnagagcgagaccctgaagacccccaaccccggcctaaatgcctctttgtggctgaaagatcccnnnnnnnnnnntctgccacccaaacggaggcagctgatacatctccggctcctctgcggcccctgccttcccaggaatgtcccccaacagcatcctctccacatgggagtgcccccaaacaccaccctctccagatgcagccccatgtcctcagcaccccaggacctcagtaccccagctcaggtggggagtcctcctgtccagnnnnnnnnnnnaaaatgg

SEQ ID NO: 11623 - DNA, 729 bp, Macaca Fascicularis
  misc_feature (1)...(729): n = A,T,C or G
gcgccaggagtnnnaagccaagcaggagaagatcaagagcgaggagatcgagatcaccttcagctnnnnnnnnnnnnnnnnnnnnnnnnnnncagtcaagatgagaaaggnnnnnnnnnnnnnnnnnnnnnnnnnnnnnnnnnnnnnnnnnnnnnnnnnngacttcagnnnnnnnnnnnnnnnnnnggtggagcannnnnnnnnnnnnnnngaggacttgatcatcccgcatcatcacagcttctacgacttcatcgtcaccaaggcacgggggaagagtgggccactctnnnnnnnnnnnnnnnntgacgnnnnnnnnnnnnnnngtgacgccactgtggagaaggatgagtcacatgcaggcaaggtggtgctgaggagctggtacgagaagaacaagcacatcttccctgccagccgctgggaaccctacgaccctgaaaagaagtgggacaagtacacgatccgctgagcgtctgggaagctgcacagccttggctcctcagctccctcagcatgccccgtggtgtccccgggactccaggcacctgctcccctgcgaccatgccaggcacgctgggaggaggatggcagctgctcgtgtcctgcccccggcacgtcagtgactgctttattcttttccaataaagaagtgcacatgtcacagctgnnnnnnnnnnnnnnnnnnnnnnnnnnngtgttcggaccaaattcatttgtcgtttgacc

SEQ ID NO: 11624 - DNA, 669 bp, Macaca Fascicularis
  misc_feature (1)...(669): n = A,T,C or G
gttgtggggaatattttaatactcttggactttagggaggctattttatgtgtcacttgctcctagctgtttcattgtgttagtaattagcaaactgtcctggatccaagggtttggtacttttgcttgattagcattccattatttatttgaaatgctnnnnnnnnnnnnnnnnntggtgaaaatatcttttgaagacatattnnnnnnnnnnnnnnnntggctgctatcgacagtactgtaagatgcactgccagtagatttgatacttttcatttcagtgtaggcagtaatgttttctaagaaagatttagaaatcagcatagtataacaactgtgtttcatttatggaatgaaaaaactgaagtgtcccattcagaacactttggaaaggttgtctttgcattaggggatgtttctggaagcatcccttagagaagctgcctgaggaatctccttgccaggttgtaccagattttttttttttttttccttaaatgtattgtatatattttccttaaaatgtcttcattggctgaatgattcgtatctgtagtaatattttaggtacttgttggatnnnnnnnnnnnnnnnnnnnnnnnnnnnnnttgctgctataattgaaaacctaataactggtcctgttgattgtgcctttcatcactgtt

SEQ ID NO: 11625 - DNA, 748 bp, Macaca Fascicularis
  misc_feature (1)...(748): n = A,T,C or G
ttcannnnnnnnnnnnnnnnnnnagcataagnnnnnnnnnnnnnnnctgcagtggttgggtaggtcctgcttaggagaattaaaaaattcctctttccatttggttaaatgttgcaatcaggaaccccaactcacttggaatgtttttatatgtaatcatttcccttgaagcttatgctttgtaagggaagaaagaattcaggtgataatnnnnnnnnnnnnnnnnnnnnnntcatcttctgcctcaactgtaaaccacatgtnnnnnnnnnnnnnnnnnnnnnnncattcttgtgatatttaacattcagaannnnnnnnnnnnnnnnnnnntacctcaggctgtttttattttgcaggtaagtgttttgacttaagtactaatattccagaaatttttgaaagcagtaaccttaatttcctatgtatttcattccacttttgcatataggtcaaatggcaatgtgtatgcacattctctttagttaatgcaccaattgttttnnnnnnnnnnnnnnnnnnnnnnnttaaaaagatgttctgtaaatttcctaattaaattatggggattttggagtatgtacatgataaattataatatgtatatggttgaagttattttattttttactaactggaattattttaatattccttattgaataaatgctgtaacttgtttgctatggaacttattcttaaagttctagttaaaaataatttttccnnnnnnnnnnaaatgtatgta

SEQ ID NO: 11626 - DNA, 781 bp, Macaca Fascicularis
  misc_feature (1)...(781): n = A,T,C or G
aaaactagtattactggtcatattaatacaaatgtttttnnnaatctgnnttnntctcctgtgacattatctagcatgctttgcagtgggtccagagttgtctggggatcaggtttaagtagccctagaccaactggactaaatttgatcagcagtcaaattgttgctaagagctatgcacatggtgctctatttggggtagcttttatgagaaaataggaattaagatgacaactaattgcctttttttggtgtgctcagaacannnnnnnnnnngtatttgttggaaatttcttgagaattaatacgatcgccatgcggcttttggcatatgctttgnnnnnnnnnnnnnnnnnnnnnnnnnnnnnnnntttttcggaacacgagggttattttggagctgttggagcactccttgagctgttgaagatcccctgatcgttacctggggaggggttcctgannnnnnnnnnnnnnnnnnnnnnnnnnnnnnnnnnnnnnnnnnnnnnnnnnnnnnntcatgactgtgcactacctgaaacaaagtgagaaaggatgcgtgtatttttctaagtcatcaagataaatccttaagaattcagtctaaactagcaaccaggaaggaaagataatattaaaaacaacaaaaaagtggcccatgtccaagcagtgtgaggatttgctgtatataagttgcctgctttgtatttttgaaatctctgcatcactcactggagatgctttagaagagagctgctctgtgttcagttgactgtggttt

SEQ ID NO: 11627 - DNA, 705 bp, Macaca Fascicularis
actaatagaactaaggctttatccaaagtgttaccattcttcgagcgcccagattttcaactctttactggaaataaaattcaggatgaggaaaacaaaatgttacttctggaaatacttcatgaaatcaagtcatttcctttgcattttgatgagaattcattttttgctggggataaaaaagaagcacacaaactaaaggaggactttcgactgcattttagaaatatttcaagaatcatggattgtgttggttgttttaaatgtcgtctgtggggaaagcttcagactcagggtttgggcactgctctgaagatcttgttttctgagaaattgatagcaaatatgccagaaagtggacctagttatgaattccatctaaccagacaagaaatagtatcattattcaacgcatttggaagaatttctacaagtgtgaaagaattagaaaacttcaggaacttgttacaaagtattcattaaagaaaacaagctgatatgtgcctgtttctggacagtggaggccaaagagtggaatttcattcaaaggcataatagcaatgacagtcttaagccaaacattttatataaagttgcttttgtaaaggagaattatattgttttaagtaaacacattttaaaaaattgtgttaagtctatgtataatactactgtgaggaaaagtaatactttaataatgtggta

SEQ ID NO: 11628 - DNA, 773 bp, Macaca Fascicularis
  misc_feature (1)...(773): n = A,T,C or G
cagtacagtagaannnnngcaannnnntaaaannnnnnnnnnnnnnnnnnnnnnnnnntgtgagatcacaaacctggaagattatagagaaagtatttttgaactgctgcagcaaatcacatacttagatggatttgatcaggaggataatnnnnnnnnnnnnnctgaagaggaggatgatgaggatggagatgaagatgatgaagaggaagaggaaaatgaagctggtccaccagaaggatatgaggaagaggaggaggaagaggaagatgaggatgaggatgaagatgaagatgaagatgaagcaggttcagagttgggagagggagaagaggaagtgggcctctcatacttaatgaaagaagannnnnnnnnnnnnnaagatgatgatgnnnnnnnnnnnnnnnnggaagaagaggannnnnnnnnnnnnnnnnnnnnnnnnggggagaagaggaaacgagatgctgaagatgatggagaggaagatgactagatcattctaagaccagactctctaatgtttctgggtgtgcaacagagtgattacatctttgtttcttcatgtacgatagctatccctacagaagataatgtgtaactttttataggaaaagtgtggttttactatttttgccttatcattccaaataagaactagtctgttaatgatcatattgtatgtagagaaaaattttcattgactcccattgtggaattccctagcaatttatttagacttaattttttaaattcaagcttactgtattagt

SEQ ID NO: 11629 - DNA, 707 bp, Macaca Fascicularis
  misc_feature (1)...(707): n = A,T,C or G
aactgagaatgacatgaacgnngatcaagagcacaggaatatcannnnnnnnnnnnnnnnnnnnnnnnnnnnnnnnnnnnnnnnnnnnnnnnnnaagaaagcaagacaaaaacttctagcagctatagatgatatagacagacctaaaagataatgaacactgctctttttcctcaannnnnnnnnnnnnnnnnnaacatatatgacctgaaagccagttttttannnnnnnnnnnnnnnnnnnnnnnnnnnnnntcnnnnnnnnntgtttttnnnnnnnnnnnnnnnnnnnnnnnnnnnnnnnnntggtgttctcatgacttttatatgctgtggtctcttcaacttttggtctcatttgttgtnnnnnnnnnnnnnnnnnnnnnnnnnnnnnnnnnnnnnnnnnnnnnnnnnagttatacattttacagaagaatgtaccataagtatataattagaagaacagtggcttaatatatgtatgggaagtttatggagaatgaagttggcatttttctaccctctgagcttggttcttactaagcataatgtgagggtgaatgtgtagtatctcgtaattatnnnnnnnnnnngagaattaaaaaacacatgtaagtaacatagatgnnnnnnnnnnnnnnnnnnnnnntttaaaatgtcaaagtttatgtcagggttaatttagttataacaaagtgatcataaat

SEQ ID NO: 11630 - DNA, 726 bp, Macaca Fascicularis
  misc_feature (1)...(726): n = A,T,C or G
gaccttgataccgtnttnnaactgcannngaaattnngttaagagtccttaacccatttgcattannngcggaagagaaactcctgtcatgtataattcttacctatatggttgttttaattacatttgaataattatatttttccaaccactgattacttttcaggaatttaattatttccagatgaatttctttattttatattgtacaaggaaagttttaaagatatgtttaagaccaagactattaaaatgatttttaaagttgttggagacgccaatagcaatatctaggaaatttgcattgagaccattgtattttccactagcagtgaaaatgatttttcacaactaacttgtaaatatattttaatcattacttgtttttttttttctagtccatttttatttggacatcaaccacagacaatttaaattttatagatgcactaagaattcactgcagcagcaggttacatagcaaaaatgcaaaggtgaacaggaagtaaatttctggcttttctgctgtaaatagtgaaggaaaattactaaattcaagtaaaactaatgcatataatttgattgacaataaaatatttaccatcacatgctgcagctgtttttaaggaacatgatgtcattcattcatacagtaatcatggtgcagaaatttgcagtctgcaccttatggatcacaattaccttgagttggttttttttttgtaa

SEQ ID NO: 11631 - DNA, 715 bp, Macaca Fascicularis
  misc_feature (1)...(715): n = A,T,C or G
gaaatgaattgattttnnnnnnnnnnnnnnnnnnnnnnaaagtgaccaccaaggccagtaagtacaggaaaannnnnnnnnnnnnnnnnnngagattcgtgatacgcgtttctccactgacagacatttaaaaacaaccttcagctccgtttcaatcaatcacctcgacttgtttctagcatggacactgccagcaggacagacagggacggagtaaaccgaagtcaatttcagggctctcggcgtgttggatacagaagaaattctagtgcagcctttggtagctaacnnnnnnnnnnnnnnnnnnnnnnnnnnnnnnnnnnnnnnntgtttcaaggagaagagcctgcaaatggccaatgaaggaggtaaataaactaagatattccgagggaagggacccaggccgtctcccttccgcaggnnnnnnnnnnnngggtttttttttgaatgaaannnnnnnnnnnnntttcagaaaaaaatctctgataaacagactttgaatggatgtttgttcctcctgattctctcttctctttgtggtgacttagagtnnnnnnnnnnnnnnnnnnnnnnnnnnnnntagcattgagttaaatccctcgtgtgtgcgacgggacgcagtgggccccctggtggcctgggagccagacccacgggcaggtggggcatgggctgaggtgtgagggcagagggagggtcaccacgaaggaac

SEQ ID NO: 11632 - DNA, 743 bp, Macaca Fascicularis
  misc_feature (1)...(743): n = A,T,C or G
agttcgccaaccgctncccagacagtgccctcgctggcctagcctattcaaacctggtgtatgactgggtgaaggcggccgtcctctttggcgttgtcaacactgtggcgtgcctcgaccacctggacccacctcagcctcccaagtgcatcactgcgctctacgtcttcgcagaaacgcactttgaccgtggcatcaatgannnnnnnnnnnnntatgtgtatgatcacattggtggggagcattccgctgtgatcccagagctggcggccacagtgnnnnnnnnnnnnnnnnccactctgtggcttgggccttgtgacattgtctacctgtggtcattccttaactgctttggcctcaactttgagctttgggtgcaaaaactggcagagtgggggcccctagcacgaattgaggcctctctgtcagtgcagatgtcccgcagggtccgggccctgnnnnnnnnnnnnnnnnnnnnnnnnnnnnnnnnnnnnnnnnnnnnnnnnnnnnnnnnnnncgagttcacacagctggttgcccgacgcctgctactcacagggttcccccagaccacgctggtcatcctgtttgtcacctactgtggtgtccagctagtaaaggagcgtgagcgaaacttggcactggaggaggagcagaagcaggacaaagagaagccggagtaggagggagcgggtagagggacaggctctgctcagctattcttgggccagatgggcctgacc

SEQ ID NO: 11633 - DNA, 716 bp, Macaca Fascicularis
  misc_feature (1)...(716): n = A,T,C or G
atggaagnnnnnnnnnnnnnnnnnnnnnnnnnnnnnnnnnntgtttccagtggtcatccaggctgtggtagacgaaggagatgtggtggaagtgaccggccatgcnnnnnnnnnnnnnnnnnnnnnnnnnnnnnncatggatggcagcttctctgtgaagcctttaaagcagaagcaaatcgtggaccgggtcagctnnnnnnnnnnnnnnnnnnnnnnnatcgagaacaagaacaaccaggagaccnnnnnnnnnnacgacgagaacagtgacaacagcaatgagtgtgtggtgtgcctgtccgacctacggnnnnnnnnnnnnnnnncctgccgccacctgtgcctctgtacctcctgcgctgacacgctgcgctaccaggccaacaactgtcccatctgccggctgctgtgatgttcccgcctgccatcctgtccagcagccaagagctcctctgggctcagccaggactgctgatttgcagtcacatcctgtatcgggtgcagcctggagcttcaggggtgtgacgccttgggggtcttggcaccagcctcttggaaacaccctctggagccccgccttgggcagcactgcgtggcctcgccgtgtctcctgtccggggccatttcattaatactgtgtttgcggagattctgtctctcgtctttggagcccccctccctgtacaggcgagcttctttctttcttccccctt

SEQ ID NO: 11634 - DNA, 724 bp, Macaca Fascicularis
  misc_feature (1)...(724): n = A,T,C or G
agcccgtgangtccccgggggttccctgtggcacgnnnnnnnnnnnnnnnnnnnnngctggaggctgaggctgtgactccaggggcatgtttggtggtgcttggggctgttcctgtgaacagagcggagtgggaggcaagcgtcaaagttgcagaacagtccgtactgtggggcttggggctttcctgccacacctgccatctgcccagaccccatagggaaggccacacaggcaaattcctgagaagggtcagccagctcaccaaggtggccattgtagagagatctcaaaagagaggaggtgctttgtcaggaactaggcctcaggtcttttcctggaggccacttcttcctacattgatttaggatggaggggatgggggcgttggaggagcaggttgacctcccatccannnnnnnnnnnnnnnnnnnnncattttatatccgtagcccaagccagcttgtatcttggtgatatggtttggctgtgtcaccacacaactctcaccttgcactgtaataatccctacgggtcgtgggaaggacccagtgggaggtaattgaatcacgggggcgggtcttcccatgctgttctcgtgatagtgaataagtctcacgagatctgatggttttgtaaaggggagtttccctgcacatgcccttttgcctgtgccatgtaagatgtggctttgctcttcctttgccttctgccatgattgtgagg

SEQ ID NO: 11635 - DNA, 1085 bp, Macaca Fascicularis
  misc_feature (1)...(1085): n = A,T,C or G
gtagatgactttgaggacntcannnnnagccacttctttggagacaaagcactgaagaagaggtcannnaagaaggacaagcactcacagagcccaagagctgcggggcccacggagggacacagccatagccgccaccaccaccaccaccaccaccaccacnnnnnnnnnnnnnnnnccccacggtgaatggccttggcctggcccagcccaagatcccagcgttatcnnnnnnnnngagggtagactctgtcctggcttgtttggtgtcctctgatatctttcacacagtagagcaaaatcaccagccctgcactgatgtcactttatctagaagaaggccttagctagaccggtttccgtctatgcaaatgtatgcaaatactccaggccctgggatgtgggcttgtgttttgtcactgtgaagggggagatgggagaggagcctgttttggggtggggtgtggggaagacaatctgattgtgaagataaagagctttcatcctcttgcgtgtatgtccccagagtgggcccctttgacccacatgctgaccggcgccttgggatttgactacagttgctggctcgaggcctagcacgaggactttccctggggttttgctgggtttggaagcagctgtccccagggggtgaagtcccccctttttttaacccctgcttctctcatggccttacctccctatgtgaactgtagactcagatcccaataaagtgctgttacagctgtgatgctgggtggtttctaagcacgggggacaccccacaccctctgcctgaatggatgggtccatcccaggcactgatacttctccccttgtcctgtatccccctttgccctgtatccccctttgcccttgccttgcccttccaacaaaccctaggccctcgagaagctgacacttctccttttgctcacagctgccttggccgcacccctgggagatgtagcaaattgagtgtgggttttggagtctgagtctcgggctcaaatccaggctaagtgnnnnnnnnnnnnnnnatctctgggaactttgggtttcttatcctcaaaaaaggcaatgga

SEQ ID NO: 11636 - DNA, 503 bp, Macaca Fascicularis
ccacatccccaccctcccctctcctgagcctgtctctccctaccctcttttcagctccactctgaagtcccctcctgtcctgctcacgtctgtgagtctgtcctttcccacccactagccctctttctttctgtgtggcaaacatttaaaaaaaaaaaaaaaaaaaaaaaaaaaaaagcaggaaagatcccaagtcaaacagtgtggcttaaacattttttgtttcttggtgttgttatggcgagtttttggtaatgatgattcaatcattttgggaaattcttgcactgtatccaagttatttgatctggtgcgtgtggccctgtgggagtccactttcctctctatctctctctctgttccaagtgtgtgtgcaatgttccgttcatacgaggagtccaaaatatcgagtgaactcaaaaccatttttgttttcctccttttcaatgtgaaggaacgatacaaataaggaaacaaagtcaaagagtccgtcctttcccacc

SEQ ID NO: 11637 - DNA, 817 bp, Macaca Fascicularis
  misc_feature (1)...(817): n = A,T,C or G
agaaggtagctnnnnnnnnnnnnnnnnnnnnnnnnnnnnnnnnnnnnnnnnncaggaaacactnntcaaaaggatatgtgatcaggtattttccagattcccagattttgtgcagaaaagcaaagatgcagcctttgaaacactttctgaccctaaannnnnnnnnnnnnnnnnnnnnnnnnnnnnnnnnnnnnnnnnnnnnnngaaaaacagagataaagttcttctcttttctttttccaccnnnnnnnnnnnnnnnnnnnngcagtactgtatggcgtctgggcttgattaccgacgacttgatggaagtacaaaatcagaggaaagactcaagattgtaaaagagttcaacagtacacaagatgttaacatttgccttgtctctacaatggctggtggactaggcctnnnnnnnnnnnnnnncaatgttgttgtattatttgatcctacnnnnnnnnnnnnnnntgatcttcaagccattgacagagcatacaggattggacagtgtagagatgtcaaagtgcttaggctgnnnnnnnnnnnnnnnnnngaggaaatcatgtatttacgacaggtatacaagcagcaacttcactgcgtggtggttggaagtgaaaatgccaaacgatattttgaagcagttcaaggatctaaagagcatcaaggagagctttttgggatccataacctcttcaaactgaggtcccaagggtcttgtcttacaagggacattctggaggtgtgatcatcttctctaaccttttcaataatatcttaaatacagtttttcttcctcaggaaattgaaatacaat

SEQ ID NO: 11638 - DNA, 697 bp, Macaca Fascicularis
  misc_feature (1)...(697): n = A,T,C or G
agggcagctacttcctcatcacagacatctcagacttcaagaggaagatgcctgacttgcctggagctgtggatgagccctatgacagacgcttcgtcaagtggatgatcaagaacaagggcttggtggccatccctgtctccatcttctgcagtgtgccacatcagaagcactttgaccactatatccgcttctgttttgtgaaggatgaagccacgctccaggccatggacgagaagctgcggaagtggaaggcggagctctagccctgaagtcataccttggccctgacatccccacctgcccgcagagatactcttgtgtgtctgtctttgtccaggtttcagnnnnnnnnnnnnnnnggaagatgctgttgggaaacctcttctctgtgacacagaatgttctgggtgggagccgcccttcttcatcttagagaaccaagtgcctcctgtctgaaaggtgagggcggcctgacctgggcctctctcggctcctctgtaggtggatttgtagggtcttgggttgcttctggtctctccaggcttggccgagaccaacagtagagtcccaccgtgtatcgatcacatcccagccctgcatgggccctgctaaggctcaggcataacctcacctttcctggctcatcttggccttggggatttgcctttagacttgagtgctcaagccactcctt

SEQ ID NO: 11639 - DNA, 762 bp, Macaca Fascicularis
  misc_feature (1)...(762): n = A,T,C or G
ctttggttggctgaaacttagtgattggcacgagagtaaggtacagtctgtttacacatccnnnnnnnnnnnnnnnntatgtactgagaaacctttaagctgaacttgagatatgtaaagagactttaggctaaacttaacaatacatatagaatatatacccttttacttgacatgcactaaatatgcattttactgctgacttcattctgtggcacctacccacaggggaaataagaagttcgttttggtattttggaaactaaagtccttatgggatggggtctagaattgattctcctttcctgagttttactctacggagtcttaggtacctggtaaaaagttgtcttctaaattaagggttattgctttgttgtctagctgctaatgtgtcacttttttttcttttgctttttaatcagttcttagtaggatatagttttatgttttccaagttgaaacttggagttaatggtcactagattagcagttatgagccgtgttaaaatctcctgttaatgtgtagtgtacctgtcggtgcctcctttgttaaggggttctttgagagcaaaagagaaaagacctactttatttgacagcaaaactgttctaattgttaataaggatttttaaaaattgtttttgatttgttaagctcagaaaaaatgtctctcggtgcatcagttctttgtaaagcttactaccaagtatttatatgctaagggaaacaactggggatgtgngtggcttaaatccgta

SEQ ID NO: 11640 - DNA, 763 bp, Macaca Fascicularis
  misc_feature (1)...(763): n = A,T,C or G
tggcagcagatggctgattaaggaggaactagaagaaatgttagtggaaaacctgtcagatcaagattatgtgaaactcattcagctgctagaaaagttattgacatcgcggtgcggcgctgctgaggaagaatttgtgcagaggtttcgaagaaagatagcnnnnnnntcaaaatcacagctgattgannnnnnacaggtatgacgagcaaggaanngctttagcaaaagcgaaggtaaaagaaagactgcaaaagcagaagcaattgtttatgaacatggaagtgggagaataaaagtaaatggaattgattaccagcattacttccccgtcacacaggacagagaacagctgatgttcccnnnnnnnnnnnnnnnnnnnnnnngaaagcacgatgtgacctgcacagtctcagggggcgggaggtcggcgcaggctggagcgatacgattgnnnnnnnnnnnnnnnntgtgcagctttgtcaccgaggacgaggtcgagtggatgagacaagctggactcctcactactgatccacgtgtgagagaacggaagaagccaggccaagagggatcccgcagaaagtttacctggaagaagcgctaagggtttgtttgctcccaggaaagaagaggaagagctgtgtatgtgcgctggcacgtggcacacacagaggaaacagtgactgcccagcatgagggcagtactgtcagaaatttctttgagttgtgagatagatttatttttaaatgctactttgta

SEQ ID NO: 11641 - DNA, 696 bp, Macaca Fascicularis
  misc_feature (1)...(696): n = A,T,C or G
accagagtgtgctctggacagttttctatagaaggtcccaaattcaatggaacagctggaaaagcttcaggggacatgttctccacggaagaggagccctctaagcttctggtacagaactaccgagcccctcagcctctcaatcagcgcatggtctttgcttctntcagccaagcgggatccttgtacaccacaggtgaaatgctgagtctaggtgtaggaatcttggttggctgtctctgccttctcctggctgtttatttcattgctagaaagattcggaagaagaggctggaaaaccgaaagactgtggtcttcacctcagcacgagccacgactgaggcataaattccctctcagataccgtggatgtggatgacttcccctaatgcctatcgggaagcctctaaaatggggtgtacggtctggccagaaacactgtagaagtagtaggcagatgtcctccttcccctggacatctcctacagagaggaatggacccaggctgtcattcgaggaagaactgcagagccttcagcctctccaaacatgtaggaaatgaggaaatccctgtgttgttaatgcagagaacaaactctgtttagttgcagggatatatcccaaagtcctctacccccttacttttatggccctttccctagatatactgcaggatctctccttaggataaagagt

SEQ ID NO: 11642 - DNA, 773 bp, Macaca Fascicularis
  misc_feature (1)...(773): n = A,T,C or G
gaccagcatgagcngggtttgtngtnnnntgnnnnncagaagcaccctgtccctcctccccaggctgtgactccggccctggaagcccctttgttcttctgttgaaaggccttgtcttcnnnnnnnnnnnnnnnnnnnnnnnctgcctgctggggtcctgcctcagcccagcccagaacggggagaggaggacatttgggctcacctgtcaaggtggccttgggaccagagctggattgggagcctgtcctgcattagctctggtcccagcatggggtggggtacacttagtagtctctataagccaagctgccctaggaccttcaccagtgacctctagaatggtccggaggggctggctggtcccttnnnnnnnnnnnnnnnnnnnnnnnnnnnnggggacgtgtgtgcccacctggcatcctccagcccatgcagtcctctcttcactgtcccacggcctcccagtgcctcccagcattggacccatctacccctgcagtttggggcgagagaggtgagtggacctgacaagtgccagagtgactgtgtagacagagcannnnnnnnnnnnnnnngccccagccccaggtgtggannnnnnnnnnnnnnnnnnncccctgggtgnnnnnnnnnnnnnnnnnnnnnnnnnnnnnaactgaaggggctgtccaccgcctaactccagctccccctttcttcacatcaccaaggccctgtgccgcccgcctcacccctctgctctgtggattccttgggaagggtccgggcag

SEQ ID NO: 11643 - DNA, 182 bp, Macaca Fascicularis
tgtatttttatattgacatagaaaattataaattacattgaattagtatccataatcactatatatatacacaaaccatctctaaaaaaatacagtggttaaaatttatgattgaaaacctcacaaggtacagtaaacaattagcatgtttcggtgccagatcttcatttttacttttaaaa

SEQ ID NO: 11644 - DNA, 963 bp, Macaca Fascicularis
  misc_feature (1)...(963): n = A,T,C or G
tacgacttccnnnnnnnnnnnnnnnnnnnnnnnnnnnnnnnnnnncccctctacaagaggcaagaggagagtggtgcagcggccagcctcaacgtggatgcnnnnnnnnnnnnnnnnctgcagaaggggacccctgccagcaagctgatccttggcatgcctacctacggacgctccttcaccctggcctccccctcagacaccagagtgggggccccagccacagggtctggcactcctggccccttcaccaaggaaggagggatgttggcctactatgaggtctgctcctggaagggggccaccaaacagagaatccaggaccaggaggtgccctacatcttccgggacaaccagtgggtgggctttgatgatgtggagagcttcaaaaccaaggtcagctatctgaagcagaagggactgggcggggcgatggtctgggcactggatttagatgactttgccggcttctcctgcgaccagggccgataccctctcatccagacgttgcggcgggaaatgagtattccatacgtgcctctaaccaatccagagcttgaagttccaacacgaggtcagccctctgaacctgagcatggccccagccccggacaagacacgttctgccagggcaaagctgatgggctctatcccaaccctcgggaacggtccagcttctacagctgtgcaggggggcggctnnnnnnnnnnngctgcccggcaggcctggtgttcnnnnnnnnnnnnnnnnnnnnnnnnnngaattgagtccctaaggcccctccagtcccagcttcgaggctgggcccaggatcactctacagcctgcctcctgcggtttccctgtgggctgtgatctggctcctgcaggcctctctgtggtcttcctttacccaggctttctgctctcagccctgcctcccttttttctgggtctcctgggctgcccctttcactgcaaaa

SEQ ID NO: 11645 - DNA, 611 bp, Macaca Fascicularis
ttcctttagcattccaaaaggtttttgcagtgttagcagaagctgttgatgtgagttatgatttcttcatgtgcaactcttagcacagagtttttatagttgcacatcattcctctttgtgccttgttttatccattttataaatagagtagatatttgatataccactctgataactcatataaaaatatcatcataaaaagcttaatttcttcccttttatgttggttttaaaaggtaaatgcttaccatattttataactgagaactcttacatagtagaatccattctataatacatgtgttgacaaaactttagagaaagtttcctattctcttctatttcccctgcccaaagtgctgacataggcagtgatgaagaatctttaccaagattgtcagggtgtacctatgaaattgcattaaatgcactgctagggtaaataatgagcaagcaaaagcatttctgtgacttaaggtaccagcttaaagagcactagggatggggaacgaatgccaaatcagactccacctagagcaccaggaaacagcttgtaccctggtagggaaatggtgtcgctgaaaggggaggctgagccggtgcgagactg

SEQ ID NO: 11646 - DNA, 794 bp, Macaca Fascicularis
  misc_feature (1)...(794): n = A,T,C or G
cagaaaaaaaggttctgggatctacatggcagggagggccgcactgacattgatgccttggggaccttttgcctcgaggctaagctggaaaatcttgaaaatatttttttttttccctgtggcacattcaggttgaatacaagaactatttttgtgactagtttttgatgacctaagggaactgaccattgtaatttttgtatnnnnnnnnnnnnnnnnntagtgcttttatactcatttccttgcatttaaaaaaatatgaaagcttaaggaattatgtgagcttaaaactagtcaagcagtttagaaccaaaggcctatattaataaacacaactatgctgaaaagtacaaagtagtacagtatattgttatgtacatatcattgttaatacagtcctgccactctgtacatatatgtattacatttctacatttttaatacatgagcttctgcattaagtttaattgtgataaatctgtgctgttccagtatatgcaatacactttaatgttttattcttgtacataaaaatgtgcaatatggagatgtatacagtctttactatattaggtttataaatggttttaagaatttcatccttttgccaaaacggtggagtatgtaattggtaaatcataaatcctgtggtgaatggtggtgtaatttaaagctgtcaccatgttatattttctgttaagacattaatttagtaattttatatttgggaaaataaaggtttttaattttattnnnnnnnnnnnnnnnncctgctgtaattaaacattctgtac

SEQ ID NO: 11647 - DNA, 725 bp, Macaca Fascicularis
  misc_feature (1)...(725): n = A,T,C or G
acnnnnnnnnnnnnaggaggannnnnnnnnnnnnnnngatagtggcagagtgagacagcaggctgcgtgtcaggtagaaagtgggagagagcatcctcatgtctcaggtgactctagcnnnnnnnnnnnnnnngaacctttcccgaggatgcctctgtcctcccccaccccatgacacctcgtcctttctnnnnnnnnnnnnnannnnnnnnnnnnnnnnnnnnnnnnnnnnnnnnnnnnnnnnnnnnnnnnnnnnnnnnnntgtacacaaaataagaggtccatcacaggcagggaaccctcccactggtgacaannnnnnnnnnnnnnnnnnnnnnnnnnntgtggttctgggnnnnnnnnnnnnnnnnnnnnnnctggattatcatgactctgaacttggaaggatcattaagtgactgtagcctactctccatgcttccttcatattggaagaaaagttnnnnnnnnnnnnnnnnnnnnnnnnnnnnnnnnnnnnnnnnnnnnnnnnnnnnnnnnnnnnnnnnnnnnnnnnnnnnnnnnnnnnnnnnnnnnnnnnnnnnnnnnnnnnnnnnnnnnnnnnnnnnnnnnnnnnnnnnnnnnnnnnnnnnnnnnnnnnnnnnnnnnnnnnnnnnnnnnnnnnnnnnnnnnnnnnnnnnnnnnngaatcgctgcaannnnnnnnnnnnnnnnnnnnnnnnnnnnnnnnnnnnccactgcactcca

SEQ ID NO: 11648 - DNA, 727 bp, Macaca Fascicularis
  misc_feature (1)...(727): n = A,T,C or G
cagaacctgtcgcnaatacagctgcctgtgaccctgggacccgcaaccttccagctgcnnnnnnnnnnnnnnnnnnnnnnnnnnnnnnnnnnnnnnnnnnnnnnnnnnnnnnnnnnncattggtttgtgggttcatttcctttctttttaagaacaaggttgggaccttttctgctcctgcccttccgctattgaggcattgggagaggaagttaatttcagagccatacaaaaataagccacaaccagcttcagaattaattcccaatcccccattccagcagggctgggagcccattcccagtgcttcccaaggccctcggggacgtctgccgccaacccagnnnnnnnnnnnnnnnnttccaagccccagcatggggaagggccctggagaagcccccatccgcacgggaaccacactgcagtgggccgggcaggtcgtcagcactgcccccggctcctccgggtcctgctggctcctccggggcagggttccctggacctcccagttctgcacttggggccannnnnnnnncagagaggaagaccttctcaaccacatacagaacacaggttttcatggctgcctttggtttggttttctgagaagataggattggactggattttgcagagggcgagaacttctctgtgcctgctcagaggcgccctggggaagggccgtgtttgagttttgctttgtatgttgttttgcaagtatctgcct

SEQ ID NO: 11649 - DNA, 1021 bp, Macaca Fascicularis
  misc_feature (1)...(1021): n = A,T,C or G
tcatgcggcccacagacgtgcctgaccagnnnnngctgtgtgacctgctgtggnctgaccctgacaaggacgtgcagggctggggcgagaacgaccgtggcgtctcttttacctttggagccgaggtggtggccaagttcctccacaagcacgacttggacctcatctgccgagcacaccaggtggtagaagatggctatgagttctttgccaagcggcagctggtgacacttttctcagctcccaactactgtggcgagtttgacaaagctggcgccatgatgagcgtggacgagaccctcatgtgctccttccagatcctcaagcccgccgacaagaacaaggggaagtacgggcagttcagtggcctgaaccctgggggccggcccatcaccccaccccgcaattccgccaaagccaagaaatagcccctgcgccccgcgcctgtgccccagatgatggatggattgtacagaaatcatgctgccatgctggggggggtcaccccggcccctcaggcccacctgtcacggggaacatggagccttggtgtatttttcttttttttttttttaatgaatcaatagcagcgtccaatcccccagggctgcttcctgcctgcatcagcggtggctgtgagcaggatcctggggctgaggctgcagctcagggcaacggcagaccaggtcgtgggtctccagccgtgcttggcctcagggctggcagccggatcctggggcaacccagcagccgctcttgaataaaggtcaaagctggattctcgccatggcctccgtctcgcgtctnnnnnnnnnnnnnncagctcttctgcgcagagctacttgggaggctgggcaccaggccccagcaagggcaaccctagccacacacccaggtccgaggctcttagaattccannnnnnnnnnnnnnnnnnnnnnnnnnnnnnnnnnnnnnnnnnnctccacgggcgtcccagatgcatgcccaggacttcaggaaggaacagnnnaggtcatgatt

SEQ ID NO: 11650 - DNA, 742 bp, Macaca Fascicularis
  misc_feature (1)...(742): n = A,T,C or G
gccaggcccagcaagcccnnnnnnnnnnnntgcnnnnnnnnnnnnnnnnnnnnnnnnnnnncagnnnnnnnnnnnnnnnnnnnnnnnnnnnnnnnnnntgtatgtgtgtgaaactgtagacccagcccaggtttttgggcagccaccctgcccactctctcagcctgtgctcctttccctcatccagcagctggcatctgaccttggcactcgaactgacctccatcctcagctacctggaagaggccgtgatgcatctggaccacagtgaccccatcactcgggaccacatgggctccgttatggcccaggtgcgccaaaagctttttcagttcctgcaggctgagccacacaactcacttggcaaagcagcccggcgtctcagcctcatgctgcatggtcttgtgacccccagcctcccttagctgctaagcctgccttgcccaggggtgggatggcactgaaggccatcagacaggcctaggctgaggcagggtcacggctggcctttacctgctcaggcccccatctctggggtgtttgggggtcagggagcagggagcactggccgtggtctacagggtgtggtagtcagaaggtttaggctgggcccagggcaggtattgtgcctgcttgggttctgccatgcctggagcatgaccctgagatcgtgacaccacttgagtggaatttttccatgttcctttttacctctaatttggatctttttgttttgaaaaat

SEQ ID NO: 11651 - DNA, 723 bp, Macaca Fascicularis
  misc_feature (1)...(723): n = A,T,C or G
ataggactgaatttaagcccatctaaactcttcttccttagctatcactaatgatattcctctgtggattttgtggtgagaagnnnnnnnnnnnnnnnnnnnnttaaggagaaaaatataaacttgtaatcaatgccatgcaaaattcattgcaagtcaagggggatgnnnnnnnnnnnnnnnnnnnnnnnnnnnnnnncctttaaaaaagtacagtatttcctgaaattcaaacactatcatacttctaaagttcaatacatacttcaaaagttcaaaacccattctggaatttggcttttttaagcctttttctctcctgctcactggcagctgtgtgtcttaacagcattctttcaagtgctggtgtactctgctgacagcactttaaaacttttaagtttctaacagcacaatgataaattgtactacannnnnnnnnnnnnnnnctacagaaaaataattatgttgcttgcttaatgattcccaggaaacttcgttgtaggcatatattttataagagtattatacagtgttaactatgcaagtaagttctaaaattacacaattatctgtgtaatgttttagtccaattactgtgatttattcaactctgttctaaagttacctggaattgtcatgctgcctcaatttacagaaatctgtaatcgatttctatagaaatgtataaagacgtagtcattttgttaagtttctaaatag

SEQ ID NO: 11652 - DNA, 723 bp, Macaca Fascicularis
  misc_feature (1)...(723): n = A,T,C or G
aatgggttatatcaagtaatagatcacatatgtnaaactgccagttaacaggcantnnnngtttatgcatactccacatcagttcctcntnnncagcagtccaccagccaaagaatccaattttagannnnnnnnnaaactctttggaagcacctttgcatttcatggctcacnnnnnnnnnnnnnnnnnnnnnnnctgaggaatggtctggttgttgcttctaatacacgactgcagctccatggtgcaatgtatggaagtggaatctatcttagtccaatgtccagcatatcatttggttactcagggatgaacaagaaacccgaaggtgtcagccaaagacgagccaccttcaagcagtaaaagcagcaatgcatcacagtcacagaaaaaaggacagcaatcccaattcctgcaaagccgtaacttaaaatgcatagccttatgtgaagtgatcacctcacccgacctgcacaaacatggagagatatgggttgtccccaatactgaccatgtctgcacacgattctttttcgtctatgaagacggccaagtgggagatgcaaatattaatacacaagaaggaggcattcacaaagagatcctccgagtaattggtaatcaaactgctactggttaaaggaccaccatttaattaacatgatttgaaagccttcctcgggttcaaagctgcgattttgaactgaagaagaggataaaat

SEQ ID NO: 11653 - DNA, 762 bp, Macaca Fascicularis
  misc_feature (1)...(762): n = A,T,C or G
agggggctgcgtgagaaagaggatnggnnatcgccagcgcagggctgcgcggaagctgagggctgtctcaggagggaggggcaggagtgcggggtctacacccctaactgcgccctaggactgcagtgccatccgcccgaggacgacgaggcgcctttgcgggcgctgctgctcggccgaggacgctgccttccggcccgcgcgcccgcggttgcagaggagaatcctaaggagagtaaactccaagcaggcactggccgcccacaggatgcgaaccgcagaaaccaacagaagaatccaggcacctctaccacaccctcccagcccaattctgcaggtgtccaagacaccgagatgggcccatgccgtagacatctggactcagtgctgcagcaactccagactgaggtctaccgaggggctcaaacgctctacgtgcccaattgtgaccatcgaggcttctaccggaagcgacagtgccgctcctcccaggggcagcgccgaggtccctgttggtgtgtggatcgtatgggcaagcccctgccagggtctccagatggcaatggaagctcctcctgccccactgggagcagcggctaaagctggggaatagaggggctgcagggccactggaaggaacatggagctgtcatcactcaacaaaaaactcaaggcccacgatccactttcaggccctgccccatgggccccctcacccctgggcctttacacatgcggttggaaacagtgttggtgttggct

SEQ ID NO: 11654 - DNA, 807 bp, Macaca Fascicularis
  misc_feature (1)...(807): n = A,T,C or G
gagagggaaccgccgtcccaacatcacaaaaagtgaaagaagccggaagagattttacctatttaatagtggtgctttttggaatcagcattacaggtggcttgttttacacgattttcaaagaacttttttcttcatccagtcctagcaagatatatgggagagccttagaaaaatgcagatcacatcccgaggtaatcgctgtctttggtgagcctgttaaaggctatggggaggtgacaaggcggggtcgccggcagcacgtcagtnnnnnnnnnnnnnnaaaagatgagctgaaacacacacgtgtgaaattctacattgagggctctgagccagggaagcaaggaacggtgtatgcggaagtaaaagagaaccgagaaagtggtgaatatgattttcgatatatatttgtagaaattgaatcttatcctagaagaactattatcattgaagataatcgatcccaagatgattaaaataagcaagcaagcaggtttctgacggatgttgaatggcgtggactcactactctattcttcacagctgtcttccagaatgtgttcaaaagacaggaaggagtgtatggtttataaagtgaatctaatacagtatttgttgcatttaaacaaactagacattttcttatggaaaaattatgaaatacagcatattttatgttctcctattgactcaatcatgacagtatttctgctttaacaccatctttcatgattagatgtttgttattgaaaattttatgccatgtaaataaaggaaaaaaattttagtattgtattcatttta

SEQ ID NO: 11655 - DNA, 690 bp, Macaca Fascicularis
cagttgatgaccttgtggagaaactggtcaagagatggagtttcaccggggagctcaacaacacttacatcttctatacctcagacaatggctatcacacaggacagttttccttgccaatagacaagagacagctgtatgagtttgatatcaaagttccactgttggttcgagggcctgggatcaaaccaaatcagacaagcaagatgctggttgccaacattgacttgggtcctactattttggacattgctggctatgacctaaataagacacagatggatgggatgtcctttttgcccattttgagaggtgccagtaacttgacctggcgatcagatgtcctggtggaataccaaggagaaggccgtaacgtcactgacccaacatgcccttccctgagtcctggcgtatctcaatgtttcccagactgtgtatgtgaagatgcttataacaatacctatgcctgtgtgaggacaatgtcagcgttgtggaatttgcagtattgcgagtttgatgaccaggaggtgtttgtagaagtctataatctgactgcagacccagaccaaatcactaacattgctaaaagcatagacccagagcttttaggaaagatgaactatcggttaatgatgttacagtcctgttctgggccgacctgtcgcactccaaggggtttttgaccccaga

SEQ ID NO: 11656 - DNA, 761 bp, Macaca Fascicularis
  misc_feature (1)...(761): n = A,T,C or G
cnnnnntatgcaatcccagcaactggagaattacaagaaaaataagaggaaggaacttgaaaccttcaaagctgaactagatgcagagcacgcccagaaggtcctggaaatggagcacacccagcaaatgaagnnnnnnnnnnnnnnnnnnnnnnnnnaggaagccttccagcaggacatggagnnnnnnnnnnnnnnnnnnnnnnnnnnnnnnnnnnnnnnnnnnnnnnnnnnnnnnnnnnnnnnnnnnnnnnnnnnnnnnnnnnnnnnnnnnnnnnnnnnnnnnnnnnnnnnnnnnnnnnnnnnnnnnnccctggacgtcttcctgaactcgggagaagagaacactgtgctgtcccccgcctnnnnnnnnnnnnccagtacctgtcagaatgagattaccctccaggttccaaatccctcagaattacgagccaagccaccttcctcttcctccacctgcaccgacacggccnnnnnnnnnnnnnnnnagggtggggagtcccccgtggttcagtctgatgaggaggaagttcaggtggacactgccctggccacatcacacactgacagagaggccactccggatggtagtgacgacagcgactcttaaattgggacgggacnnnnnnnnnnnnnnnnnnnnnnnnnatccggttttggctgtatgcggaattccacctggaannnnnnnnnnttttatagagggtcttggtttttacataattgccaataatgtgtgagaaactgaaagaacagct

SEQ ID NO: 11657 - DNA, 767 bp, Macaca Fascicularis
  misc_feature (1)...(767): n = A,T,C or G
atgtttagcagtaaacacacccnnangatgctgcgcagcaggatgcaaaggccgaagagaacaagaaggagccnnnnnnnnnnnnnnnncaacacaggaaagtgttggataaannnnnnnnnnnnnnnnnnnnnncatctgttaagggtgcccaggaacgcctgccaacggtaccgctgtccggcatgtacaataagtctggaggaaaagtgagactcacctttaaactagaacaagacnnnnnnnnnnnnnnnnnnnnnnnttcctggagggaaccgaacannnnnnnnnnnnnnnnnnnnnnnnnnnnnnnnnnnnnnnnnnnnnnnnnnnnnnnnnnnngaaattgcccatgggctccataaaaaatgtggtcagtgaacctatcgaannnnnnnnnnnnnnncacatgannnnnnnnnnnnnnnnnnnnnnggaagcctcttactactgggtgtactgggttccaactcaatatgtgnnnnnnnnnnnnnnnnnnntgctggggaaatggcagtatttttgaaagcactttcacctctggcccaggagactgacccaaagtgaaggacattgccgggagaggcctgcagcatccctggatttcagagttctggaactttgttcacaaaaaatctatattcagtctgaggtgatgtggtgactgaagccagaggtgatgtactttcaccattagcttaattttaacttaaaatgaccagttccctttcttgtagtcagcttcataccattttaaactcaatacg

SEQ ID NO: 11658 - DNA, 895 bp, Macaca Fascicularis
  misc_feature (1)...(895): n = A,T,C or G
acatcatgtgtgggggggataaggagggtaaaatgaagagaaagaaattattgaggggaagttcttctgagtacaaaatgtgtttaattttttaaataagtattacatttacagggttnnnnnnnnnnnnnnnnaaaagataaatagaaagaatccacccctcaacttaccccaggtgatcacttttctttttcttgtgtatctgcccagtattcattcctgctaatatcagtcaataatgaatgatacgtgttacccgcttttttcatccttgcccagatatcagactgtatacactgttctgcacttgcccttttcataacaatctatcttggaaaactttccctgtgagaannnnnnnnnnnnnnnnnnnnnnnnnnnnnnnnnnnnnnnnnnnnnatgcattatattttatgtaacctgtctactgttggtaggcacttgagtttttttagtcttttgctatcaaacagttctgggatgattaaccctgatttactgcaaaattgaaattgctgtgctatcctgctggaatagtggtaagtgaacaggaaattccagtcactcttgggctagactcaaggttcttcttaaaaattacatggccatcaccaagttagttgttttgaacnnnnnnnnnnnnnnnnnnnnnnnngaggtaatatttaccttaatagactatgagaatgaagattatgtatgtgaattgtttggtgctctaaagaacaccacaaataaaattattttattttgaaattaaatttaattttaattgtactgtgtgtaatttcttaattttgaaataattttatttgtaatgcgcataatcttatttaatatataatgtatatactacattgtaatagaagatttcccaaattccagcctggcatga

SEQ ID NO: 11659 - DNA, 745 bp, Macaca Fascicularis
  misc_feature (1)...(745): n = A,T,C or G
agaaaaactgagcagaaggtacagagataccccagaggtccccaaacccccggccatggaccggtaccagttggtggcctgttagaaacagccacgtagtgggtgagccagcattaccaactgagcccggccttctgtcagatcagtggtggcattagattctcataggagcgcgaaccctattgttaactgtgnnnnnnnnnnncccaagttgcatgttccttttgagaatctaactaatgcttgttggtctgaggtggaacagtttcacagtttcatccccaaatcacacccacattccccccacgatctgtggaaaaattgtcttccataaaactggtccctggtgccaaaaaaaaggctagggactgctgccagacacactctgctcccacacatgcatagcctcccccattagcaacgtttcccacccgagtggtacatttgctataatttatgaacttacacaggcacatcattatcacccaaagtccacagtttatattaagtctcactcttggtgttgtacattctgtggatttgggcaaatgcataatgacatttttcaccattgtggtatcaaatagagtagtttcattgccctaaaaatcctctgtgctcacannnnnnnnnnnnnnnnnnnnnccgacttcctgtgctgattcccagtctgcattttaaatcattttctccttgaactttcttctcctcccnnnnnnnnnnnnnnnnnnnnnnnnnnnnnnat

SEQ ID NO: 11660 - DNA, 697 bp, Macaca Fascicularis
  misc_feature (1)...(697): n = A,T,C or G
tatgtacaagaggaaaaggaggtggtacatgtacaaaaaagtgggcccccacattcccttccaggggcagaggagaaacaggaaggtgagcaaatagtcagccaagaccaccatgctccttgtcccctgccaaaaaacaaacaaacaaaaaaacgtagctgaggaaagaaggtgaagagttggcccaccctttctccagccatctgcagagaggggttggtgcagagaaaacctctgcttttctgcccaccttgacaaggacagtgtgagcctagaatgaaatgggcagagaaataagggcagtgagtctgacatctttcctcttacccttatcactagggcacagctggcacggcccatgcttcagagggccttgctcctggtaagagatgaactgagactggcagggtcccagggctnnnnnnnnnnnnnnncgtctagaccagagctgaccatgggcctgcaaaaaggaagggaaaaaaaaagaaaggacagttgctctctcctctcatgcctcggggctctagtgggagagagatctacatgccctgtttaggctaaagctggaaatggtttttcccagccttgagctgacctttggtgacccttcaggaaacgaagtcaaagaccttgggggcaaagtgcagtactggaggcaccagggacctacagacctagtnnncatagtggcacaagt

SEQ ID NO: 11661 - DNA, 608 bp, Macaca Fascicularis
  misc_feature (1)...(608): n = A,T,C or G
attttaaatattttgggtaaatatccagaagtgggattgctggatcccaaatcagtttcatcatagtccctcaacctatctcagaaaaggcagccaggcacgnnnnnnnnnnnnnnnnnnnnnnnnnnnnnnnnnnnnnnnnnnnnnnnnnnnnnnnnnnnnnnnnnnnnnnnnnnnnnnnnnnnnnnnnnnnnnnnnnnnnnnnnnnnnnnnnnnnnnnnnnnnnnnnnnnnnnnnnnnnnncaggcgcctgtaatcccagctccttgggaggctgaggcaggagaatcgcttgaacctgggaggcgaaggttgcagtgaactgagaccacaccattgcacttcagcctgggcaacaagaacaaaactccatctaaaaaaaaaaaaagcaagaaaaaaagaaaagcctattcctttcctcacagccatccaagccagaatctgggcctgttcctaaatgttgcctccatcccagtcagccagtcacctccttgccagtcccagtgtcctgccccatgttgagccctcatcacactcatctcctccaacgtcctcaggcccccagctcctccagggaaggcacccctggcactcatctccagtctcct

SEQ ID NO: 11662 - DNA, 695 bp, Macaca Fascicularis
  misc_feature (1)...(695): n = A,T,C or G
gtacctcaccaacggcatcatgtgacatgctcctcagcccaggagtgctggcgggggnnnccagggcaccctccctagagggccctngnnngagaaaccccacctacccaaccatccacccaagggaaatggaaggcaagaaacacgaaggatcatgtggtaactgcgggagcttgccgggggggtgggagagccagctgtggggtccagacttgctggggcttccctgcccctcctgctctgtgtcagtattaccaccggacaggctccaggactcactgccctccagaaaacagaggcgatgaatgtgagggacgccggggcctttcttctccttgtaggggtttgagaggttctttccacagaccatcctcttattccgttctggggcccaggaagtggggaagagtaggttctcggtacttaggacttgatcctgtggttggccactggcnnnnnnnnnnnnnnnntctacccctcccagggaccgacccgtggcccgagctccccttgctggcgggcgctgcgtgggccctgcacttgctgaggttccccattatgggcaaggaagggaattcccacagccctccagtgttctgagggtactggcctagccatggggaattccctaccctgactccttccccaaacccagggaaaagagctctcaattttttatttttaatttttgttga

SEQ ID NO: 11663 - DNA, 708 bp, Macaca Fascicularis
  misc_feature (1)...(708): n = A,T,C or G
tattaacatgaaactagagagaaatagtttctgaagccagtttattgtgaagatctccaagggggaggttctatagagaaaaatagtaagctggtttagaaactaccttctctccagacacttgtnnnnnnnnnnnnnnnnnnnnnnnnnnnnnnnnnnnnnnnaggagtttgccaaagatctgccctgagataatgcctgtccagtgtcttcaccacatgaataaccaaagctccaaagtggttttcttctttttttaaaaaaaattccacaagcttttaaaggtgcatttaagaatccatgtgactttagagtggaactgccggccctggcaactgtcatgtgtgctagaaggttcgacgcctctggaatgcatgtggtactcatctccattttgnnnnnnnnnnnnnnnnnntgttcttttagcagatctgtccctgtgggtggtgtctaagaagtcggacaccttggtttttgtgttagattgagctgggcagctgcaatcagcttctttatatgcaaattaggcatgacccatctggggctcctggttggtggctaatgaagtgaggggagggaaggaaaggatgtcaccccaaaagtaggccctcccatcagctttggccaggccagacacttcacatcgtttacatggttctgtgtaattttaaagtttatgtgtataaagcgaagnnnngtttctgtgaa

SEQ ID NO: 11664 - DNA, 748 bp, Macaca Fascicularis
  misc_feature (1)...(748): n = A,T,C or G
ccaccagtcagcanncagnnnntcagtgtctnnnnnnnnnnnnnacggggcgccttcaggggccttggctccggtagaagctgcgctggacaagttacagaggaggatctgccgcctggtgttggaggcgctgcaggtggagctccagcccctgttcgcggacctgccctcgcgccnnnnnnnnnnnnnnnnnnnnnnnnnnnnnagtgtgtgcgaacggacggggcgcttctgccgggacttcgggcgcgtgcggaaccccacggttcagctgctactggctgaggccgagcgcgccgtggtgctccagtacctgcgcgcgctgatgcaaggccgcctggtgtgccgcggagcggacgagaggacccaggcggccgagcgcctgcggcacgatgnnnnnnnnnnnnnnnnnnnnntcctcggtttgggcctggaggagnnnnnnnnnnnnnnnnnnnnnnnnnnnnnnnnnnnnnnnnnnnnnaacctccgcgaccccgcgctgctgggcctggaggtggctggcctgcagcaacagtttcccgacgtgagcgaggaccacgtctccgccctcttgggcctgcgcggtnnnnnnnnnnnnnnnnnnnnnnnnnnnnnnnnnnnnnnnnnnnnnnnnnnnnngccgccctcgccccgcgctagccgccgcgccctcttcagcctcgtgcccgccccagcacccgcgccggcctcctgcctgccctcggggtcctgcgcccgagcccgg

SEQ ID NO: 11665 - DNA, 932 bp, Macaca Fascicularis
  misc_feature (1)...(932): n = A,T,C or G
tgnnagaaggaannncaaagaatcaagtccannnnnnncatgtgacagatggggaaactgaggccttgagaaggaaaaaggcnaatctgagttcctacggggcagnnnnnnnnnnnnnnnntagcctcctgcctcccagccgggcccattgcactttcttgtctcctctaataagccctgccctccccgcctgggctccccttgctgcccttgcccattccccattagcacaagagtagcagcagcaggacaggcaagagcctcacaagtgggactctgggcctggtgaccagctgtgtggcatgggctaagtcactctgcccttcggagcctctggaagcttagggcacattggttccagcctagccagtttctcaccctgggttggggtcccccagcatccagactggaagcctacccattttcccctgagcatcctctagatactgccccaaggagttgctgcagttctggagcctcatctggccgggagctccaaggggcctcctagattcagtccccactggccctgagtgcgacagcccttctcaccctcccaggaatgccgtgaaaggaggcaagatctcccccacccatgtctatgctcgacccccagggtagcatctcagcttccaaaccctgggctgtttccttagtcttcattttataaatgttgttgcctttttaatggactgtcactttcaacccgcctcccccacccctgctggccggggatggagacatgtcatttgtaaaagcaggaaaaggttacatttgttcacttttgtgatattgtcctgggcctgtgttgcggtgttgggggaagctgggcatcagtggccacgtgggcatcaggggnnnnnnnnnnnnnnannnnnnnnnnnnnnnnnnnnnnnnnnnnnnnnnctgcctagcccatcatcnnnnnnact

SEQ ID NO: 11666 - DNA, 690 bp, Macaca Fascicularis
  misc_feature (1)...(690): n = A,T,C or G
aggcgctggannnnnnnnnnnnnnnnnnnnnnnnnnngcggaacgcttccaggggccttcccgcccagcctttgccanntctgtcgtgcgtttcgggcaaagccggggtagacctgggctgtgctcagttaggggttgcgggctctccgagaggttgtgggcgggactgggacaccctttggcctctgtttgtcccctttccagtccaccccacccctggagcccagcctgggagcgcaaaacccaagaagcggccagaacgcacctccggcggacgcgcnnnnnnnnnnnnnnnnnnnggaccgccgcgcccactctgcacgggagcagggacagccctagattcgtgtacaaaacctgtgtacccctctatatatnnnnnnnnnnnnnnnnatatatgttgggaacatgctcgcnnnnnnnnnnnnnnnnnnnnnnnnnnnnnnnnnnnnnnnntgactgtaaaatggtaaacgtgtgtattatatctggcctcgttatatagtgtatatatatgtatacatatacatatatataatatatatgaagactgtaaatgttaagacgaatagtgttcttattagtatattgcttcacactgaagattgtgtgtatcgagctgtttctaaaagatgtttattttccttaagagtaaaaaacagtcatgcattcaaaaaaaaaaaaaaaaaa

SEQ ID NO: 11667 - DNA, 743 bp, Macaca Fascicularis
  misc_feature (1)...(743): n = A,T,C or G
ctacaatgagttgaaaccagggtccgccttagtaagcgccgggccaaggctggggttcagtcaggcaccaacgccctgcttgtggtcnnnnnnnnnnnnnnnnnnnagaaggaactggaagctcaggaggcacggaaggcccagctagaaaaccacgaaccagaggaggaagaggaagaggagatggagacagaagagaaagaagctgggggctcagatgaggagcaggagaaaggcagcagcagtgagaaggagggcagtgaagatgagcgttcgggcagcgagagtgaacgggaggaagttgacagggacgaggccagtgacaagactggcagtggtgaggacgagagcagcgaggatgaggcccgggctgcccgtgacaaagaggagatctttggcagtgatgctgattcagaggatgatgctgactctgatgatgaggacagaggaccagcccaaggtggcagtgacaatgattcggacagcggcagcaatgggggtggccagcggagccacagccgaagccgcagtgccagtcccttccccagtggcagcgagcactcggcccaggatgatggcagtgaagatgcagcttctgattccagtgaagctgatagtgacagtgactgagtcccagagcattcagggctggttcagacaccattattatgagcaggatggcacttttctagtggtttgtgagcctttcacttgtttgttccccactcccaaacctttgctgt

SEQ ID NO: 11668 - DNA, 693 bp, Macaca Fascicularis
  misc_feature (1)...(693): n = A,T,C or G
ccctccgtctgcgcccatctttgcagaataaactctctcccagggttcgtctctctttctctctctnnnnnnnnnnnnnnnnnnnnnnnnnnnnnnnnnnnnnnnnnnnnnnnnnnncctggacctcccatggctcagggtgagggaggccccaggcccttctggttggtagtgagtgtggacagcttcgcagctcttgggacgcagtcccaagagtgggtcggggacacagggccaaggcaggccttcggggtcccattcgcctgcttccgagcagggacaaggcctggtgtccttggtccacccgcccacgctgctgtcttgaggggaatcggcttcttaggagtgggttgagctgatannnnnnnnnnnnnnnnnnnnnnnnnnnnnnnnnnnnnnnnnnnnnnncctctccctcgccagctctgaaccgagccttccccgccttagctgtctcctgccccagggaggggtggagggataatttgcttgtattaaaaaacggctgaggcaggagtttgggaccagcctgagctacatagcaagaccccatcactacaaattttttacaggttagctgggtgtggtggtgcacgcctgtggtcctagctcctcgggaggctgtggtgggaggattgcttgagtccannnnnnnnnnnnnnnnnnnnnnnnnnnnnnnnnnnnnnnnctcca

SEQ ID NO: 11669 - DNA, 764 bp, Macaca Fascicularis
  misc_feature (1)...(764): n = A,T,C or G
actcccagctggccaccatgtttttgatgaggtgtcaaacagaatgttgctgcctttgagcgtcgggcagccaccaagtttggtccagaaacagccatcccccgtgaactgatgttcnnnnnnnnnnnnnnnnnnnnnnnnnnnnnnnnnnnncctgacctcccttctaccccacttcccttcgcaattctcttatttatttggtttggctcctgctccaatttgaaaggagtctgtgttcgtaatactgtttctcctctcaattccccagaaattgggttctatgctggctggaaatgttaggggaaagagaaggcaaaggatgtggaaatgagaggtgcttaggaaagggtcaggcccatcggaggagcaccatatgcctgcagcnnnnnnnnnnnnnnnnnnaataaggactatgtggttgtctctgggccttatcaagacaccttagtgtctgaccaggggaagatagtaacttttctaaggattgaataaattgagcttttcttctggcacagaggtactgagtggtaaggaacttttatcctgcctgagannnnnnnnnnnnnannnnnnnnnnnnnnnnnnnnnnnatacataaagcctcattttaagactataagtcnnnnnnnnnnnnctactagagagcaaggggctttcttaccatcagtgctgaggagaaaagnnnnnnnnnnnnnnnnnnntgtctttgtactcttgagttgtaccttattcttcccacttggccnngagtttttataaaa

SEQ ID NO: 11670 - DNA, 715 bp, Macaca Fascicularis
  misc_feature (1)...(715): n = A,T,C or G
cccggcacccatgcgccgggcccnnnnnnnnnnnnnnnnnnnnnnngagaccttggcaggtgggcagcggcggaaactcagctcaaggttcccggtgggccgaagctctgagtcattcagccctggggacacccctaggcaacgattccgacagcgccgtccagggcccctgggggcacccatctcccacnnnnnnnnnnnnnnngtgggatgggagaactccgttgagaccctccaggagcacgaaacagatgccaaccgagagggccccgaggtacaggaaccggagaaacgtcccctcaccccgtccctcagccagtgacaccatggggacagcaggatcgggagtgcagccctcttgccgctggagtgtcagcgggggccccaggcagcccaagagctcagggagccagggcccccaaggggagtccttggacaaggaggcctgggcctggagatcctccatggtcggtgccggggcccggaggtggagctgggacacgtgtgtggacaggggggacagctggtccacacgannnnnnnnnnnnnnnnnnnnnnnnnnnnnnnnnnnnnnnnnnnnnnggcagcggtctctgggggatcccccagctgaaggaggctggcaggagtaggcaagagagccccctgcccagtccaggcagggagctgagtcccagtgccgggggactgtggcctgggctgatcttgagcctca

SEQ ID NO: 11671 - DNA, 706 bp, Macaca Fascicularis
  misc_feature (1)...(706): n = A,T,C or G
aaaggtgttcaagatgtccttgagatactaaaggaagaattccggttggccatggctttgagtgggtgccagaatgtgaaagtcatcgacaagacattggtgaggaaaaatcctttggccgtttccaagatctgacagtgcacaatattttcccatctgtattatttttttttcagcatgtattacttgacaaagagacactgtgcagagggtgaccacagtctgtaattccccacttcaannnnnnnnnnnnnnnnnttttccaacaaaatagcaatcccttttagttcattgcttttgacttttcaatgggtgtcctaggaaccttttagaaagaaatggactttcatcctggaaatatattaactgttaaaaagaaaacattgaaaatgtgtttagacaacgtcatcctctggcaggctaaagtactgtatcctttagtaaaattggaggtagcaaacactaaggtgaaaagataatgatctcattgtttattaacctgtattctgtttagatgtcttnnnnnnnnnnnttcttaaattgtaagctcaggttcaaagcattggaaatgcctgannnnnnnnnnnnngaaggtagccctggatagaattnnnnnnnnnnnnnnnnnnnnnnnnnnnnnntttgannnnnnnnnnnnnnnnncatctttagtgtctgaatatatccaaatgttttaggatatatg

SEQ ID NO: 11672 - DNA, 753 bp, Macaca Fascicularis
  misc_feature (1)...(753): n = A,T,C or G
gtatgatagggagcaggagtgagagnnntnctagttagggccaacagctgataccaagnnnncgaaatctggcaaagaggtctgnctctcactggaccccctccagtgcacttccccagacannnnnnnnnnnnnnnnnnnnnnnnnnnnnnnnnnnnnnnngctattaccccggttctttccccaccccaggtctgtctcttgccctttcttggggcatgtaagctactgagtggnnnnnnnnnnnnnnnnnnnnggcataatgggcatggctgtttcccagacctgaagattggggtgcttcttgccagtattctaagacacttgagtaattgctgtttgcacttactgcatggtcagaccacgtcactacgtttctatgcaaggggagagcaaggcagtgttgtggtcatggctcttagctaacctattcaaagacctttttcccattgattaatctattttcatatttataaaggagtcttaatgttctgccccataagactttcaaccttgtggttgggagtggggctgattttgtaggccctagggcctgcttctatgtatttgtcaacatgtgatacattcagttgattaaatggtttatacatggactgattttcttcccttcctgccatggctggaactttgggaacagtctgtccttacagagctgcaataagaaataaccaaagatgaagctggtcaaatattttcataacttgcttctgttgattttttttgtaaaacttt

SEQ ID NO: 11673 - DNA, 727 bp, Macaca Fascicularis
  misc_feature (1)...(727): n = A,T,C or G
atgcatcagttttcgtagttacttgtttacatgctcttcttctagactttgggattccagaagacagaggtttgagagtaaaaaacaaaataacaagaccacaacaaaaacaactctgtattctcgtccccaccattaccatctcccctttgtgatgtcaaagagaccagaggaagtggacagactaggagaagcataggtaagtattagagacagaaaaagtatgaagtctcttctgtgaggactaacaatagtgatgccattttacaaccttgatggctgtgttctcaagaaacaaagcnnnnnnnnnnnnnnncctcagnnnnnnnnnnnnnnnnnnnnnnnaaccgcaacagagcccaatgaccctaaccannnnnnnnnnnnnnnnnnnnnnnnncaaacagttccaactggccagcacttccccaacccctccccaataggaactttattataannnnnnnnnnnnnnnnnnnnnnnnnnnannnnnnnnnnnnnnnnnnnnnnnnnnnnnnnnnnnnnnnnnnnnnnntaaacctgtttggccgtggaattgcctcctgttactcgctgtcttcctttatatcttcctaacnnnnnnnnnnnnnnnnnnnnnnngtctcgatgaccatctagctcctaaatgctgggggccgctccccatannnnnnnnnnnnnnnnnnnntccnnnnnnnnnnnnnnnnggctgggatttttggcccgg

SEQ ID NO: 11674 - DNA, 713 bp, Macaca Fascicularis
  misc_feature (1)...(713): n = A,T,C or G
ggctggcatactgccagtnnnntagcagggtcctgtgagggctgggggcatccaggcactcagaaggcaaaggaactaccctacccatttggcctctggagggggcagaagaaagaaacaaacctcatcctctattttacaaagcatgtgaattttggcattagctctcataggagacccatgtgcttcctcgctcagtgcaaaactgatgannnnnnnnnnnnnnnnnnnnnnnnnnnnnnnnnnnngnnnnnnnnnnnnnnnnnnnnnnnnnnnnnnnnnncctccaaccctaagcgcctgggactgtagccagagannnnnnnnnnnnnnnnnnnnnnnnnncatataaccaaaatccagacctcagtccacaacccaggccatctaagtgaaggtattttggaatcacaccctcaggttatgttgctccagtagaatctggaaagtattcagagtaagcctttcccctccagagccccgagtttcctggctgcatgaaggttttctgtagaatcagaattgtagccagtttcttnnnnnnnnnnnnnnnnttggatgttactgaaagggaggggtggagatgggtgtggcagtgtatggtgtgtgattttcattttcttctttggtcatgggggccaaagagaaaggcatgagtctcccctgtcaggctcttacagccacaggcactgnnnnnnnnnnnnnnnnnnnat

SEQ ID NO: 11675 - DNA, 611 bp, Macaca Fascicularis
  misc_feature (1)...(611): n = A,T,C or G
cagagaatcttaatcgcaaaaccaattatttttcgaggggnngtacgtnancntgnngaagagnnnaaaacaagagcnncaagagagcgagaaaccagaggtggnnnnnnnnnnngcagggatattaggcgcaatgatcgaggtcctggtggtccacgtggaattgtgggtggtggaannnnnnnnnnnnnnnnnnnnnnnnnacctcctccaaggggtggcatggcacagaaacttggctctggaagaggaaccgggcaaatggaaggccgcttcacaggacagcgtcgctgaagctccactgttggcaaagtcttggcagtggtacattattcatcgtgtttgcattcctgtaaattttagtttatcttaagaatgtgacacagcctttctgatcatttctatgatgtgaaaagcatcttttgcnnnnnnnnnnnnnnnnnnnnnnnnnnnnnnnnnnaatttcacaacaggattcacactgttaatttataaatctagacttggagaattaaggactgagaaatgaccatatcttaaactatctacgacaaagtgaacttaaaaggacatgcccagtgaattcaggtcctcgagtcaaaaaaaaatct

SEQ ID NO: 11676 - DNA, 731 bp, Macaca Fascicularis
  misc_feature (1)...(731): n = A,T,C or G
tcacctggacagtaatcccttgaagtggagcgtggcagacgttgtgcggttcatcagannnnnnnnnnnnnnnnnnnnnnnnnnnnnnntcctagaccaggaaattgatgggcaggccctattgctccttacccttcccnnnnnnnnnnnntgcatggacttaaaattgggccctgccatcaaactttgccatcacatagagaggatcaagtttgctttttatgagcagtttgccaannnnnnnnnnnnnnnnnagtgagctggatctttgaagcacaaatgcagcaaatccttcaccctgctttataagtggagctggaatagtcctggggctctggggcctgcaggtgtcagcttgctctctttgcactttcggggaaggacacagtgaggaagcaaaaactgtgcacagaagtggatcgcctgccggtggaaatgtgnnnnnnnnnnnnnnnnnngatggcagttttaaaaaaataaaggttgttgaggaaaagacttatataagaagaaaagcatttccagtggtgtggcctgaaaacaaagaataacctaggnnnnnnnnnnnnnnncttttggttgttttcattctgttccctcccattgtagattgaactttgttctctgctttctttttnnnnnnnnnnnnnnnnnnnnnnnnnagtcagcactgatttgggactgttcctaaaggcatatcagtgcttcattgtcattgtgtttttaagctt

SEQ ID NO: 11677 - DNA, 781 bp, Macaca Fascicularis
  misc_feature (1)...(781): n = A,T,C or G
gatgacnntcnnnntgacacatcgttcatgttnnnnnnnnnnnnnnngtnnctgtcagctggtgggagggatgaaggaaattatctggacgatgctctcgtgagacaggatgcccaggacctgtatgaggctggagagaagaaatgggggacagacgaggtaaaatttctaactgttctctgttcccggaaccnnnnnnnnnnnnnnnnnntgtttgatgaatacaaaaggatatcacagaaggatattgaacagagtattaaatctgaaacatccggtagctttgaagatgctctgctggctatagtaaagtgcatgaggaacaannnnnnnnnnnnnnnnnnaaagctctataaatcannnnnnnnnnnnnnnnnnnntgannnnnnnnnnnnnnnagtgannnnnnnnnnnnnnnnnnnnnnnnnnnnnnnnnnnnnngcacacttcaagagactctatggaaagtctctgtactcgttcatcaagggtgacacatccggagactacaggaaagtactgcttgttctctgtggaggagatgattaaaataaaaatcccagaaggacaggaggattctcnnnnnnnnnaatttttttaacttcatttttctacactgatattnnnnnnnnnnnnnnnngcttatttccaattaaannnnnnnnnnnnnnnnnnnnngatatagactctctgtattattattcgcctataattagnnnnnnnnnnnctttcaagctgtnnnnnnnnnnnnnnnnnnnnnnnnnnnnnatggagattaaaa

SEQ ID NO: 11678 - DNA, 147 bp, Macaca Fascicularis
agtcctgtagccccctcacctttctgttttcacttttgccaatgtacatccggtttggttttcttgtattatttaaacggttgtggtttcctttttccacggaggttcaatagaagccgctgcaggagagttttaccaaaaaaaaaa

SEQ ID NO: 11679 - DNA, 729 bp, Macaca Fascicularis
  misc_feature (1)...(729): n = A,T,C or G
ggtttttcatacctggaatcacatttcattatacatttgggtgggtctttcctgcaaattttcaacatttattcccaaagtcaaactcccatttatgtgaatacaggttagacagaggtaatatcacattttacattataacttcgcaatattaatcaacctagtactttaaaggaatgattgaaaannnnnnnnnnnnnnnnnnnnnnnnnnnnnnnnnnnnnnnnnattcctcatgaaacttaagatcagtcattttaccttcagtccacatttaatgaacaccaaccatgtttattnnnnnnnnnnnnnnnnnncgacagccacagtgcatctgacacttactttctccaaaacaactatgattcgaaccttgagtaaatcactttggttactatatttgctcaagatgacaaatgcaggtgctttcttttttaaagaaaaatgacactggatcattaacagatcaggacaggtaactggcctctgtaatcccgagtctagtggagtgcctggtccacagaaagctctcaataagtgtttgattacatttaatctcagagctcccttccaagggatactgccaagaggtaaagctctaaacctctactactgagagcagaatttcttagctaatcnnnnnnnnnnnnnnnnnnnnnngtataaattcttgccagcacagtggctcacacctgtaatcccgctgcttgggnnnctgaggttggggga

SEQ ID NO: 11680 - DNA, 696 bp, Macaca Fascicularis
  misc_feature (1)...(696): n = A,T,C or G
tccttcacacaattgtccaaggcctccctggccnnnnnnnnnnnnnnnnnnnnnnnnnnnnnnnnnnnnnnnnnnnnnnnnnnnnnnnnnnnnnnnnnnnnnnnnctaagttcccacagccacaccgaggaaagcagcccccactgaatgtcaccatgcaccaaagtgcacagtcctcctgacacaagaaggggagatgacagtggctggagtcgtcagagctgctttgagggagctccaggcctgacaggcttacaggaccaaggggaactattgtggaatgtctnnnnnnnnnnnnnnnnnnnnnnnattttggnnnnnnnnnnnnnnnnnactgactcttctgctcccccagtctgtctttctcctgctactccatccacatatccctgagtttgggccacagtccctccatttggtttgcatgtcccaccttctttnnnnnnnnnnnnnnnnnnnnnnnnnnnnnnnnnnnnnnnnnnnnnnnnnnnnnnnnnnnnnnnnnnnnnnatccttcaagaagagcctacttccctcaaggcccctgctgcttccagtctcaccttctgactcactcgggatccaccgaactgggaggtctgcgtctcctcccagcagtcagagtcatcactacctttggggccgcaggatcacccagcttggaactagatacagaaatgctgtttttgagagtgc

SEQ ID NO: 11681 - DNA, 734 bp, Macaca Fascicularis
  misc_feature (1)...(734): n = A,T,C or G
atgcctcggnnnnnnnnnnnnnnnnnnnnnactgcttcatgcaccgtcgnnnnnnnnnnnnnnnnnnnnnnnnnnnnnnnnnnnnnnnnccccggcctccacgagctcgccccnnnnnnnnnnnnnnngaggaccctcccactccatccattgcttcgctgtccaggcttagctacactaccatcagcacactgggccctggatgaggagtagaggggccgtgggggctgaggcagggcaaatgacaagtactgacccttccagacacacaaaacacaaaccacaactgacgcaggagaccggcacccaaagcatggactaaccccaaagcacaggaaaaggtaggttatgtgacacaaaaggaacaagaatggagcagtacacaggaaaggaggcatgcctctgatacaggactgagcctggcccatagaaacatgacactgacagacacagcgtccctagcagtgaactatttctacacagtgggaactccgacaagtgctgacctgcctctcacacacagattaatggcactgattgttttagagactatggagcctggcacaggactgactttgggatgctcctagtttgagatcacaatgccctttcccaatcagnnnnaaaataccatcaggcctaatctcatacctatgaccaacagaccattatgcacnnnnnnnnnnnnnnnttcctttccagttaaggaccgtggccctgccctctccttcctt

SEQ ID NO: 11682 - DNA, 1041 bp, Macaca Fascicularis
  misc_feature (1)...(1041): n = A,T,C or G
caagcagagnnnngaggacatgctggagnnnnnnnnnnnnnnnnnncgcgagggccgcctgtgcaagcgcgaggtgcagctgcgnnngtnctangtgtacgactggtccgcgccgccctcgcagtgctgccagagaagggagggcatcccctgagccgccgcggcccggccctccggnnnnnnnnnnnnnnnnnnnnncgccttggggcagatgccgagcgcgcgccatgcccgggccccagggcccccgtcccgcggccacgcccgtggtcgctgcctccccggcctgcgtttgggagacccctgggggttgccgggacagcgcgccgtgtccaggttgaggtgccggttcctggaccttagcgagcctaagcggggcccggccgcacgctgacccccgtgctgtccgcagccggctcacggggctgggccccgatcttccgtgtctcttatcagtggcgtttttcatgtacgtgtctcagatctaacgtgatnnnnnnnnnnnnnnnnnnnntgggattttggtctctgtccagtgacttcgtggtaaaaatataactcagtgtttgcttgtaacttatttataagtattgtaagtttgtgtcgatgtgagtgtaagttggcaatgtgaaggtctcgggttttttacatggtttcaggaaacacttctatgtcagaacttggtgcctgtaccgtcggccccgctgctgcgtgtgtttaaaggcaggagaactttaaaactggccatttatcttttcagtgtacacgtcattggactcattgtttctttctgaagagattttccttttaaggcttcccgtgggtgcgtggcgctgctttatttcagactcnnnnnnnnnnnnnnnnaaccgaaccccggagtgctgatgcggttccaattccgccttaagaaaagaggaccagcgggcacccggcttgcctctcacctaccttaacacatcnnnnnnntcccctcatttaacgagaagagtgaacactgcggtccttgccaaaataannnnnnnnnnnnncaggacaagg

SEQ ID NO: 11683 - DNA, 752 bp, Macaca Fascicularis
  misc_feature (1)...(752): n = A,T,C or G
gcaatactggactagaatacnnnnnnnnnnnnnnnnnnncaggagctcggatgcagaagctattgcacnnnnnnnnnnnnnnnnnnnnnnnnnnnnnnnnnnnnnnnnnnnnnnnnnnnnagggccaattgcccacaggtgggggctgttctccatcaaggtatggggacccctacttccttgttttgttaaaaagtgcaggtaggcgaagaagcnnnnnnnnnnnnnnnnnnnnnnnnnnnnnnnnnnnnnnnnnnnnnnnnnntccactggcagatgagaggtttgcacctataccagccctggtttccttggtagggctcaagttgtcagtgtccaggtacctgggccgggccagacctggggccaggggaacctggtcttgaggggtgaggnnnnnnnnnnnnnnnnnnnnnnnngtgtcatagcgttggtcatctcctctccagcttctcctcagccatcccctgtccgtcatggtggtgtcggctgcacttggaccttcctgcctctctgctcaggnnnnnnnnnntgannnnnnnnnnnnnnncaggctatcagcagcaacagcaaaacagtggctggagggccgggtgagagcacgggactcaggctgtgaaaaggacgatgactgagaagtctcacagcttgagcgggctcagccnnnnnnnnnnnnnnnagcttgagcagnnnnnnnnnnnnnnnnnnnnnnntctcctgcacgnnntcggtggcggccatgctgcgctggc

SEQ ID NO: 11684 - DNA, 989 bp, Macaca Fascicularis
  misc_feature (1)...(989): n = A,T,C or G
tgnnnnnnnnnnnnnnnnnnnnnnnnnnnnnnnnnnnnnnnnnnnnnnnnnnnnnnnnnnnnnnnnnnnnnnnnnnnnnnnnnngacagtttcccttggccagtccctgttcttccatttccccccgcttctcagagannnnnnnnnnnnnnnnnnnnnnnnggactccacactccccagatccnnnagtatnnnnnnnttgcctcaagtttctttcaccgcagtgggctaccataaacacatcaccttgatttttaatcccacgaggaagctgccngaacannnnnnngcacaaggatcctacattgccctgccnnnnnnnnnnnnnnntctgctggccggttacaaccatgacaagctcattcctttgctgctgcagttaacaagccggctgcagggagtccgcgcgctcggtcaggcagcctctgacaatagcggcccagaagatgcaaagagacaagccaagaaacagaagacaaggcggacgtgaggaggaaggggcagttgcagtctcacttgggacaggccacagccaggggtccggctgccacctgcccatgggataaagccaaaagcatgcgtcagctaacttcagcctgtgctgctggccccatgccccgtgtcccgcatcactgtggcatcctgcacccatcctcacccctccatatggcccctcgtgcaatgcaatgaatggaccnnnnnnnnnnnnnnnnnnnnnnnnnntattnnnngagtcaaatataatttattnnnnnnnnnnnnnnnnnnnnnnnnnnnnnnnnnngtgtgagaatgtcattcttgatcttcagccttcgtttgcaagaagagttccagttaacatggtgtttggatnnnnnnnnnnnnnnnnnnnnnnnnnnnnnnnnnnnnnnnnnnnnnnnnnnnnnngagatccctgctggaaaccacagcaccctgtatccactattaggaagctatgttaggaggtaaaaatcaataaaatggcc

SEQ ID NO: 11685 - DNA, 712 bp, Macaca Fascicularis
  misc_feature (1)...(712): n = A,T,C or G
tgcgctgnngnnnnngccctcaatatgtacnnnatgtgtattgatgagagcattcacctccagntnnnnnagnnntatgnnnacaagatgctgcgcatgcagaaaggtgacccacaagtatatgaagaacttctcagttactcctgccacaagttcctatcgcctgtagtgcccaaatatgataatgtgcaccccaactaccacaaagagccttnnnnnnnnnnnnnnnnnnnnntttgtgatgaagtgcagcagcaggcccagctttccaccatccgcagtttcctcaagctatacaccaccatgcctgtggccaagctggctggtttcctggacctcacagagcaggagttccggatccagtttcttgttttcaaacacaagatgaagaatgtggtgtggaccaggggcatctcagccctggatggtgaatttcagtcagcctcagaggttgatttatacattgataaggacattatccacatcgcggacaccaaggtcgccaggcggtacggggattttttcatctgtcatatccacaaatttgaggagcttaatcgaaccctgaagaagatgggacagagaccttgacgacattcacacacattattcaggaaccttttttgatatattataggcaggaagtgtttttgctcacatgaaacctttacctatatcagccatcagcctgtcaactcagttaacaagttaa

SEQ ID NO: 11686 - DNA, 746 bp, Macaca Fascicularis
  misc_feature (1)...(746): n = A,T,C or G
agctgagaaggcaaggaaagaggccttgactgacctacctgcagtgacagatgactgnntccnnncgcacatcctcaacagctccccatcagaccggcagattaaccgnnnnnnnnnnnnnnnnnnnnnnnnnnnnnnnnnnnnnnnnnnnnnnnnnnnnnnnnnnnnnnnnnnnnnctaccgctgtaaggccaaccacccccacaannnnnnnnnnnnnnnnnnggaggccttcgtccgttggcggcagcgcttcgggaagcaggccaccttccagagcctgcacaacgggctgcgggccgtggaggtggacccctcgctgctcctgcacatgttggagtgacggtgcctccaccaaccgctggggagtgagtccctgagtcatgtggctgaatcctgactttcactcagagcaggtggtgttttgtgtaggtttgttttttatttttaatgatcctcagatggaaggagaaaacagggtttccactagacgttatttgaaaggccagattactcagcagatctctcacgttggctcaacaattctttgtttttaattgcttgaagattgcattgttgtaattgttcagtttttaaatgtgtaatggcattttaatagactattaaatcacagtggttcaaaaatatatatatatatatcatgtcatcacattacaagcaggtatctcatatgtaaaacatttacctgaatgttgtctaaggactgaactgtggactttactatc

SEQ ID NO: 11687 - DNA, 695 bp, Macaca Fascicularis
  misc_feature (1)...(695): n = A,T,C or G
agcgcagnnnnncnnnnnnnnnnnnnnngactctgaatgtgannnnnnnnnnnnnnnnnnnnttggtggcactgctgcactgccgtggcctgcacaaggactacggcgcagccctgcggggcctgtgcgaagacgccctggaaggcctgctcttcctgctgctcttctccctgctgtccgcgggagcactggccaccgcgctctgcagcctgccccgcgcctgggccctcttcccacccagtgacgactacgatgacacagacgatgacgaccctttcaacccgcagaaatccaagcgctttgtgcaggtggcagtcgtctatctgagcccctcctccctgccggactggaccctggctcccctcttcgttccttccctggctgccggaggagaccccactaacccagcctgcctgggctctgaccactaacactcttggccacggacagcccgcacaggaccgcctccctgtccttggccttgggagtagctgagggggcagactagggagtacggctggcaggggagggggcagacagcctcacacccttcatccctggctgccggtcccatccttggagggactgagctgggggcgggggacatgagtccccctgttgcccccgccacatcccagtgggctctgaccccctgatctcaactcgtggcactaacnngaaaagggttgatgaaa

SEQ ID NO: 11688 - DNA, 752 bp, Macaca Fascicularis
  misc_feature (1)...(752): n = A,T,C or G
gacggctgcaggcgctgcaggagggcattttgtgcgggaccttggcggggtgctggcccctgaggctccttcccacnnnngggcagcctggtggagctgcctgtcacccatcctgccgggagtgaggcctcccatccctggaccgccttatgtagcctcccctgacctctggtcccaccgtgaaggctcagccctgtccccaccaggcctgaggcctgtgcagcccacctgggagggctcctcagaggccagcctggactgggctggggccagcttctccccagggactccgatgtgggcggccttggatgagcagatgctgcaggagggcatccaggcctcacttcttgacgggccagcccaggggccccagagcgcaccatggctgtccaagtcctctgtctcctctctgcggctgcagcagctggagcgcatgggcttccccacggagcaggcggtggtggcactggcagccacaggccgcgtggagggtgccgtgtcactgctggttggaggacaagtgggcactgagaccctggtgacccagggaaagggtgggcctgcccactccgagggtcctgggcctccctagcccaggcagagagtgaggcacaggcaggcccttgggtactaagggctgggctgcatgtgggtagcctgagctcctgctctgtctattgaggaccacagtggggagcaggggcacctctggaggcaggagaggccagcatgctgccctagtatgtgtttag

SEQ ID NO: 11689 - DNA, 735 bp, Macaca Fascicularis
  misc_feature (1)...(735): n = A,T,C or G
tgtgacagncnnnnnnnnnnnnnnnnnnaaggcttacttcaaatgcaatggctacaagggctatgacctggtctatagcccccagagcggcttcacctgcgtgtccccgtgcagtagaggctactgtgaccatggaggccagtgccagcacctgcccagtgggccccgctgcagctgtgtgtccttctccatctacacggcctggggagagcannnnnnnnnnnnnnncatgaaactcgacgtgttcttcgggatcttctttgggtccctgggcggcctcttgctgctgggggtcggggtgttcgtggtcctnnnnnnnnnnnnnnnnnnnnnnnnnnnnnnntcctatctcctgcactcagctgaggcctcgccttgaagggacagctgtggtctaggctacctcaagacccacccnnnnnnnnnnnnnnnnnnnnnnnnncattgcttttgggagactggaaaagggaaggtgactgaaggctgtcaggattctacaaggggagtgaatactgggactcaagacaagactatgccttatccataggctcaggtgcacagggggaggccataatgacaagcgtggaggggtcctcacgcagacacccccacagaaggacactggcctgtgcacgcgtgcgcgcacatacacacacacacacacacaccagagttcataatgcagtgatggccctaagttaagcaaaatatttctgcacacaaaactctctggtt

SEQ ID NO: 11690 - DNA, 703 bp, Macaca Fascicularis
  misc_feature (1)...(703): n = A,T,C or G
cagaccccaggaagccggggcccactccagtctgcctggnnncagcgaagcacggaagccgaggggctgtgccgtggagtcggcctcgcgccggggctctgggtgtgtgcacttggtgtgcagggtggacgcatgggcttccgtgtccccaggagtaagggccctaaaggaagccttctcccatggtnnnnnnnnnnnnnnnnnnntcacatctttgtactgtgcctgcctcaacttcccctaacagatatgcatattccttccagatgcctcagtgctacaccagagtgggcctggtcccaagacaggaatgcggttcaaacccagtggcttgaaacttcctgagaaattgtannnnnnnnnnnnccccaaaatgtacaacgtaacttgtttcagtccaacaaaaacaggttccttatgtttctgccttctccaccagggttactccatcacccaaacaaaagaacaaggtttgccaggatgtccgagtgccccctggccctcgtgtgcatggacgtgcctgaggggtctgggcacggccacatgcaggactcctgtgcccggggaggcactgcagggattccccatccggtcgccttggggccagcctgtcttatggactctgccttgctttgcttatgtttagctgtttctctgctacctttcgagcagacttctttactnnnnnnnnnnnnnnngctat

SEQ ID NO: 11691 - DNA, 704 bp, Macaca Fascicularis
  misc_feature (1)...(704): n = A,T,C or G
gtctgnnnnnnnnnnnnnnnnnnnntccttggccggttgaggcagctcagtggctgagcccagtcaagccaacccacagcttcattcacgacttccaagatttgatgctaattcttttggatttctacagttattaaatacgtgtctgagtggactgtctttgttcctttgtgttttgagggttggctgggtaggagtgggggtggtttgtgacagtgaatttttgccaggagaggaacattaaatgccaaaggtaggtggcagtatttcagtctctgccccagctgacaggcagaccttcacaaataacaagacccaggaaagactgggcctcacctaggcttnnnnnnnnnnnnnnnnnnnnnntctcttcattgcagtcaggctctgaggttgggaaggtggaagtttccagcttttcatcccatccctgagggctagaatcagtcagcactatctaaagagagatgtggctgtaaagtggtcatctgaaggtagatacgcctcgatagctctggtccaacgcggcgagaagtggatgtcacaccttccccacggcgcacctgtatgtctgcgagcaaattctggcgttcttgctccgaaaaacactgccgataagcctgtaccaggagctgtggggagggataggcatccacaactgcactggccgtttcaggctgactcggtcagctgctgatctgtct

SEQ ID NO: 11692 - DNA, 712 bp, Macaca Fascicularis
  misc_feature (1)...(712): n = A,T,C or G
cacccagctnnnnnnnnnnnnnnnnnnnnnnnnnnctgcaccgccctcctgcacctcttccatgcagctgtgcagaggaaannnnnnnnnnttccaaaccccctccagatcctgtatatccgcagcatctcccctttccctgagctggaacaatttctacaggatactatcaagaggtactaggggcctggaggtttgggctccaagagaagcttgacagagctcactcccgacccctacttctgtttcttcctaaggtataatctgcagatgttggaagctgagggcagcatgaagcaggccctgnnnnnnnnnnnnnnncggcacccccagctggaggctgnnnnnnnnnnnacccgccggactgacccctactcctgtagcctctgccctttcagccccactgacccaggctggcctgtgttnnnnnnnnnnaacccactgctggactggacctacagagacatctgggactttctgcgtcagttgtttgtcccatactgtatcctgtatgaccgaggatacacgtcactggggagtcgggagaataccgtgcggaacccggctttgaagtgcctgagcccaggaggacaccccacgtaccgtccagcctacctactggagaacgaagaagaggagcgaaactcccgcacatgacctcccaccctaggagggagggaaggacactgttctagggtataacctggcaata

SEQ ID NO: 11693 - DNA, 686 bp, Macaca Fascicularis
  misc_feature (1)...(686): n = A,T,C or G
tatggtgtagcnnnnngagctgtctctttttctctctctccctacatatnnncgtggcacagtccaccttccagcnnnnnnnnnnnnnnnncccacgatttgtctttcctcttcactgctttgtaaacttggtctataacccttgacccctgccttcctatggtgcgattacctactgttctgtgcttcctattactgtgaatttccaaaatggtacaatttggatcctctctccctttccaagtcgtactactctacgctgttccacaatctgatgctcctttcccccttactgagaatctacaactgcctccctgtggttcagcccagggatctcacaccccccggcttcgcaacatggtacagtccacaccccccatgaagaccttcaggtagttcagcctaatgctgaatctggacatcccgattcccccctcctgttggcttcttgtggttcagcccagtgcttctcgacctggtacattccggttccccgctcacagacttccgatggtagagccctgcgcggcccagcccacgccccctgcacgccccctgccccttccatcctaaactgacgcctgccgttgttttctgtcttacagtggatggtgccccccatggtcgctgagactccccttcgagtattgcacccgcccgtcctaagcctccccacaaggctaggg

SEQ ID NO: 11694 - DNA, 930 bp, Macaca Fascicularis
  misc_feature (1)...(930): n = A,T,C or G
gggtgggacagggaggaaaagtaacaatagtccacatgtccctggcatctgttcagagcagtgtgcagaatgtaatgctcttttgtaagaaacgttttatgatttttaaaataaatttagtgaacctatttttggtggtcatttttttttttaagacagtcattttaaaatggtggctgaatttcccaacccacccccaaactaaacactaagtttgattttcagctcctctgttggacatataagtgcatctcttgttggacataggcaaaataacttggcaaacttagttctggtgatttcttgatggtttggaagtctattgctgggaagaaattccatcatacatattcatgcttataataagctggggattttttgtttttgcaaatgcttgcccctacttttcaacattttctatgttagtagttgtgaagaactaaggtggggagcagtactacaagttgagtaatggtattagtatataccagaattttgattggcagcaagttttattaancggaataacacttggttatggaagtgactaatgctgaaaaaattgattatttttattagataatttctcacctatagacttatactgtcaacttgctctagtgtcttattagttaaactttgtaaaatatatatatacttgtttttccattgtatgcaaattgaaagaaaaagatgtaccatttctctgttgtatgttggattatgtaggaaatgtttgtgtacaattcaaaaaaaaaaaaaagatgaaaaaagttcctgtggatgttttgtgtagtatcttggcatttgtattgatagttaaaattcacttccaaataaataaaacacccatgatgctagatttgatgtgtgcccaatttgaacaagggttgattgacacctgtaaaatttgttgaaacgtcctctaaa

SEQ ID NO: 11695 - DNA, 262 bp, Macaca Fascicularis
aaaaaaaaaaaaaacatcctcacccaccaccccatgcatactcttgggaagcagtttcctgggagattagaaattctacttccctgactggagctaaatcccaccagccaggacccaaactcttacccagaaggaccccagctcttgaagggctgaatggcctgctgggggtgggagggtgagtttgctatgtcctaggtttcctcgatgcccctctctggggggttcccctcctccagcccagcggccctctgtcctgtcg

SEQ ID NO: 11696 - DNA, 387 bp, Macaca Fascicularis
  misc_feature (1)...(387): n = A,T,C or G
tttgatatatggtatccagttgncatagtatctacttctttgtaatccagttgctgttaagaatgatgtactttaaaggaaaagagaaaactgcatcacagtcccattctccagtgtccatgcaatgaattgctgagcatttaggaagcatcaccaggtgtattacaggcatgatgtgaaacttgatatttgacctgtgatcaaaattgaaccattgtgcagtttggcttctatttgcttcaaaatatgtagaattgtggttgatgattaatttgcaagactaactttgagagtgtaacagttttgaagaaaacattgaatgttttccaaatgaaggggcttcacagaatgttacaatgttattaatataatttggcttttgttatg

SEQ ID NO: 11697 - DNA, 706 bp, Macaca Fascicularis
  misc_feature (1)...(706): n = A,T,C or G
ttgccngnncttcccttcatnctatnnnctgcttgctctcacctcaggaattgcttggattgctacatggaccctctgagactatcattattacctcctagggccaggaagccaggtaggtagtctgagtcaggattggattaacagcctcctctcttggagactctcaagagcctgtgttcatctagaagtagtagtttgattctggtttccctcctacagtgtgtcctccatctctgtgcagctccatcattaccataggggacttggttttagactctgatgaggaagaatatggccagggggaaggaaaggtgagtaggaagaagcagaaagctggggaaggcggatgggtagaacaagactgagaaatctacatgcttcagaattcggagggctcagggaatggtttcagatggtaggatctccctgctcccttctgtacaggaatctctggaaaactatcagaagacaaagtttgacaccttgatccccactttctgtgaatacctaccctcttctggccacggtgccatgcctgttccttcctatgactgtagagacagctctagacccctgtgatagaactaaaatgccctttgtactcttgcctgtctcctgcctcttcagctctgcaagtagtttagtaggaatggagtggaagtctaggcttggattgcctgactacactgctaaaaatatttgt

SEQ ID NO: 11698 - DNA, 733 bp, Macaca Fascicularis
  misc_feature (1)...(733): n = A,T,C or G
gcattccaaagcagtatattggttccaattagagtttacttttttgtattaatacattgctatttctaaataccactttccttatctactagtaagattgctagcattgaactgtgttatgtggtttttgttgatttggtataaagtttttccaattcatttatattttacaaatgctagatattggtctgggaggcaacattaatggtaccagcctgtcacaactgagcagttctaataatgcagaataaacacatgttgccttaaagggttatctagtatccttcatcttatttagcattggagcaaatagtcaagggaaatcgaatcagtaactggtcatggtcatgcatctgaaagtgcatggaagatcatttagtactttttccttttttctcacatggtttgaaacttaaagtgcacatcactgaaataatgagattttcttttgaggtgtgctacccttcctagagtgttctaagaagcaggcagttgatgtatgtttatattttaagtcagctgtcgaggggagaccacagccttagtatgacatcctgcacaatttgtgaagcatttattctactgaaggcacagtcttgtttatactttctgcacattcagtgtattggtcatttaaattatttcagttttaacttgtgaaagcttataatatgatttctggtattttagaaatacattagagtctgtgagtctcattctnnagatacagatg

SEQ ID NO: 11699 - DNA, 661 bp, Macaca Fascicularis
  misc_feature (1)...(661): n = A,T,C or G
gattttacagaagaaaaaaacaactcaagcattctggtgacaacacagaaattgtaggctgcttctaagaaagttagtaacaatttggaaattcctaagtaggatgagagttaataactggatacaaagtgaagtttatatccaagttcagactcataggcatcattatgatttgcttcttcctatgtctcccatgtcctacttctcattcattacactcctgccttaactgctctgttgtagtatgcatttgtttttaattcatctttatttcaatctgtttgactttcgaatcgcatgggaatatgcacattaagttgctttctaaaataaggttttatgaagctgagtttcatgataagtgtcttgctgttttttgagatgttttatggacaaagaaaacnnnnnnnnnnnnnnnnnnnnnnnnnnnnnnnnnnnnnnnnnnnttaactagggcccacctttaacagagcactcctttgaaagttttataggtatgaaatatatgtagatatttgtaaagggttttaatttttttctgatggggtgctgtgtaaatcttgtatttataaatgtaatgaaggtattgacagaaaaaatatatacaacttttataaaggatnnnnnnnnnnnnnnnnacatttaaaagaaaatatatttt

SEQ ID NO: 11700 - DNA, 786 bp, Macaca Fascicularis
  misc_feature (1)...(786): n = A,T,C or G
taaaaaataaattaagaaatcccttcacggatatntcngtgatttacattgttaaaaggtacaccgttnnttaacatgtaattctggttcagaattacctttnnnnnnnnnnnnnnnnnnnnnnnnnnnnnnnnnnnnnnnnnnngaaatgcaagttcttattaatcaataatttgtcagctaggatacattcaggcatcagctgcaaatacagaataggtgcacagcctcagcgctttggaaagacataatctagaacactnnnnnnngacaaaaaattacctgcgactggatagcgtaagtgcagtacagcgagacaaaacatatattcatatgttggctcgtttaagcctcaaaccctcgactctgttgagatcccataattttattcctatgactttaataactcaagttccaggaggcctataagtctaatttgtactccaaaccaaatagcagtgcagtttgctactattgaggnnnnnnnnnnnnnnncttcaagaccaagtccagaatatctaaaatataactacttgaatacacagatggtccttcagagattttacctataacctgtttcttgatgaaggttatttaatgcactggagataactgtgacttactgatcaaatacttgaatacttatacttacctgggatttcatttctgctgaaagaaataggaagaacaggactcactttaagaaaaaaaaaaaaaaaactttagaaaggaaggtaaaaatcttacacacactctcacttttggaagcagcatagaaggggcagt

SEQ ID NO: 11701 - DNA, 900 bp, Macaca Fascicularis
  misc_feature (1)...(900): n = A,T,C or G
atacatttccgggatgctggaatnnnntgcaaaacctccatgttcccgtccttgcagtaccttgtagtaaatgacaatcagatatcacaatggtcatttttcaatgagctagacaagttaccaagtctacgggctttgtcctgcctaagaaaccccctgaccaaggaggacaaagaagcaannnnnnnnnnnnannnnnnnnnnnnnnnnnnnnnnnnnnnnnnnnnnnnnnnnnnnngtgagattctccccaaggagaggcggacagctgannnnnnnnnnnnnnnnnnttttggaaatgagtggaaacaggctggtggacatcaggatccggacaaaaacagactcagcgaagaattcctcagagcccatcctagataccagtnnnnnnnnnnnnnnnnnnnngcacnnnnnnnnnnnnnnnnnnnnacacaacaaccatttatgctcaaaaaccagctactaacactgaagataaaataccctgatcaacttgatcaaaaagtcctagagaaacaactgccgggctccatgacaattcaaaaggtgaagggatggctgtcacgtcttctcaaagttcctgtgtcagaccttctgttgtcctatgaaagtccaaaagagnnnnnnnnnnnnnnnnnnnnnnnnnnnnnnnnacagtcattacgtttttattctgtggaaaatgaagattgtctattagtgnnnnnnnnnnaaccaactaataaaatttagagactacactgnnnnnnnnnnnnnnnnnncatcggaaannnnnnnnnnnnnnnnnnnnnnntgtcaaaaacaaagnnnnnnnnnnnttgccctaaggataacaagggatttattttnnnnnnnnnnnnnnntttttgttgggaagcgaccatttctnnnnttatacat

SEQ ID NO: 11702 - DNA, 715 bp, Macaca Fascicularis
  misc_feature (1)...(715): n = A,T,C or G
gaggaaagagtagctgtagctacangnnnannnngnctggaagagccgagcacctgtgcccacggcttctggtcatgaaacgagttaatgaaggcagaggagtttcctcctcgcttcccagcgccacattacccaccctctgagataagtaggctggtttaaccattggaatggacctttcaggggagatcctgagagtctgagaacccccagaccaacccctccctnnnnnnnnnnnnnnnnnnnnnnnnnnnnnnnnnnnnnnnnnnnnnnnnnnnnnnnnnnnnnnnnnnnnnnnnnnnnnnnnnnnnnnnnnnnnnnnnnnnnnnnnnnnnnnnnnnnnnnnnnnnnnnnnnnnnnnntatggaccacaaatatattacggaggaacagattttgctaagacataatctagttttataactcaatcatggatgaaccatgtgcggcaaacttgcagtttaaaggggtcccatcagtgnnnnnnnnnnnnnnnnnnnnnnnnnnnnnnnnnnnnnnnnnnnnnnnaaagtcagctcttgtcaaaaggtctcaactttcccgcctcaatcctaaaagcatgtcaacaatccacatcagatgccataaaaatgaactgcaagataaaatnnnnnnnnnnnnnnnnnnnngaattggaatcaaaagggtttgctgtccttcttagaatgttctaaaacgtcaaggcagttgcttg

SEQ ID NO: 11703 - DNA, 765 bp, Macaca Fascicularis
  misc_feature (1)...(765): n = A,T,C or G
ttccttgccccacagttgtgttcatgctgaatccacctcggagcatggtgttttcattnnnnnntcctagtgaaccacaggttttagcattgtcttgttctgtcccttccacttctaactccactggctccatgattctctgagtggtggttcctttgcaccctgtagatgttctaggatagttgatgcatgttactaaattacgtatgcaagtctgtgagtgcgtctgaggggacatcgccaaggactgactgagacacgatgccgagacctcaagccctgagagacagtcccaaacctcttgcagtgaagatgtttactcattgcccccacctctggtccacactagaaagaagctcgccccacccccacccgtgagatccgtgaattctcggaatggcaggggaagccttgcactaggttgcaaagaagcatcctccacatcctgtgtcagaaaccctggtctccgtggcacttgtaactcaccgtgctgtcttctggtctgtgtgtgttcttcaagccagctctaggcttcaggccgagccaggttcacactcagaaagaggtctccccatccccattcggggctgacaatggggggggtgatggctgcccctgggtggcctgagtcctggtccctccgaggcagttgatggggcagtcagatttttaaagttttgtacaaagttttcctttgtaatcactcccatttttacttaacaaccaacttgttgtggctcttatttctgaatcaaagctggaaaa

SEQ ID NO: 11704 - DNA, 720 bp, Macaca Fascicularis
  misc_feature (1)...(720): n = A,T,C or G
taggaccagggattgtcttgcaccaagtatgcctaccctggccagtctgaggtctcctagccatagaactgactcctggacgcctggagagaaggtggtgacacccgtgggttctcaactttaaggaaaaaagacaccagacttttgttccctattgggggaaagcccttagtcttctcnnnnnnnnnnnnnctcccaagtccttttggnnnnnnnnnnnnnnnnnnnnnnnnnnnnnnnnnnnnnnnnnnnnnnnnnnnnnnnnnntgggggtgtgggaagcaaaaggggcaggtgtacacacctccacagtgacctctgtgcacacggttaccgccaactggctgaccctcctcttccctggtccattgatcatcccttctcacagagggtcatcattatttccaaatactgttggtctgatgacttcctcttcccagtgcaatttttcacttcctatttcaacctctggttcctgggatgagccataccctggaactgtcccgcccgctgtgtcttccgtgtaagggagacctttgcaaatggcatccaaatgggtaggcaggtcacagccgccgtatttattttgcataatattttaatttgtatatttttgtgatttactttggcgttatgagtttgactctcggggagttttgttgttatgactcttgtgtcttttgtcacaaaacaatgataatatttgctaaaggatatatg

SEQ ID NO: 11705 - DNA, 734 bp, Macaca Fascicularis
  misc_feature (1)...(734): n = A,T,C or G
gcggtactactagtgannnnnnnnggctccacgggctttggccaggacagcatcctctccctcccaggcaatgtgggccaccaggatgtgaaggatgtccagtttgcagtggnnnnnnnnnnnnnnnaggaacactttgatgcaagccatgtggcccttatgggtggttcccatggtggcttcatctcctgccacttgatnnnnnnnnnnnnnnnaacctacagggcctgcgtggcccggaaccctgtgatcaacatcgcctccatgttgggctccactgacatccctgactggtgcgtggtggannnnnnnnnnnnnnnnnnnnnnnnnnnnnnnnnnnnnnnnnnnnnnnnnnnnnnnnnnnnnnnnnnnnnnnccatcaaatacatccctcaggtgaagacaccactgttactgatgttgggccaggaggaccnnnnnnnnnnnnnnnnnnagggcatggagtattaccgtgccnnnnnnnnnnnnnnnnnnnnnnnnnnnntcctgctctatcccaaaagcacccacgcactatcagaggtggaggtggagtcagannnnnnnnnnnnnnnnntgctctggctacgcacacacttgggcagctgaagccctgccattctgcatgagctgatcagcctatgccacacttcgctcttggagagctccaaggtctggcagggcaacaggaggctttctgggctctggactccacggatgcgtgggcagaggaa

SEQ ID NO: 11706 - DNA, 684 bp, Macaca Fascicularis
  misc_feature (1)...(684): n = A,T,C or G
gcagtggcagtagcagtaaacaagancnntttatctgaacaggaaagtagtcttnnnnnnggaagtaactacacttccttgtaatcacctgtttgtgtaattgtaataactttacaagttattcataaaaatacaagaatgactagtttgtcgttgtcataacttgtgtatgatacatgaagtagaagtcacacagtacaagtacttttgaaatttggaaaagtttaattttgtaggactttattatttttggatgtttaagtatgtatgacagtgcatagtgtgtttcaattttggaagtgattctttgctattgaaattctcattctcctcatttcattcttnnnnnnnnnnnnnnnnnnnnnnnnnnnnnnnnnatccgagcagccccagaccgctgccgcccgaagctgagcctgcctctggccttcccctccgcctcgatgcagaaccagtagtgggagcactgtgtttagagttaagagtgaacactgtttgactttacttggaatttcctctgttatgtagcttttccccatgctaattttcaaacaacaacaacgacaaaacatgtttgcctgttaagttgtataaaagtaggtgattctatatttaaagaagatattactgttacatatactgcttgcaatttctgtatttattgttctntggaaataaatatag

SEQ ID NO: 11707 - DNA, 779 bp, Macaca Fascicularis
  misc_feature (1)...(779): n = A,T,C or G
aaagcatgaggtcaacntnnncagttatgtnntcctgactgtagctgccttgcccatgctgaagcagagcaatggaagcattgttgtcgtctcttctttggctgggaaagtggcttatccaatggttgctgcctattctgcaagcaagtttgctttggatgggttcttctcctccatcagaaaggaatattcagtggccaaggtcaatgtatcaatcactctctgtgttcttggcctcatagacacagacacagccatgaaggcagtttctgggataatcaatatgcaagcagctccaaaggaggaatgtgcccttgagatcatcaaagggggagctctgcgtcaagaagaagtatattatgacagctcactctggaccactcttctgatgagaaatccatgcaggaagatcctggaatttctctacttaccgagctataatatggacagattcacaaaaaactaggaactccctgagggctgggcatgctgagggattttgggactgttctgtctcatatttatctgagctcttgtccatgaagacatcttcccagagtatctccggagacatgaaagtcatgggtcacacctgacaaatggaaggagttcctctaacatttgcacaatggaaatgtaataataatgaatgtcatgcaccactgcagccagcagttataaaactgttagtaaacataggtataattaccagatagttatattaaatttatctcttatatataatatgtgatgattaatacaatattaattataataaa

SEQ ID NO: 11708 - DNA, 735 bp, Macaca Fascicularis
  misc_feature (1)...(735): n = A,T,C or G
accccaacagtattttgtgtgttaataatttgcaaanntaagaatcattgtgtgacactcatctaatttatcttgttgtgatcttatggtcataataaggagaaagagggtttaatttttcttgtatttggtttgctgggtggtaccatagtctaattttagtatttgaaaatgagtatgattccttaatggccagctgaagattgaattgcccctaacaaccgtattgtgttagtgaattttcaatgtggaccaggaaagcatatgtaacttttgaacttgagtgaaaagattgaagttgcagacttttgcatagatggtttgtcaatttaaaactccagaatttattattgccatatttccacatgctgcttatacaagattattctgagtagtaattgcttccctgtctatgtagaagtgcctgtttttatttattgttcagatcaaagaccaaaacattttcttaaatatattttatgtaatattttatttgtatacagtgttgttgatgaaatatttaactagagcatgatattttaaatgttaagatataacatgttaaataaaactgttatttttgaattttaaaacttgtttttttgggggtatgaactactagagtttaaaattctgccaaactattatatgtactattgtgtattatactttcttgaaatatttttgtttatagaattgaaggttctttatcatgatgggatactggggactata

SEQ ID NO: 11709 - DNA, 747 bp, Macaca Fascicularis
  misc_feature (1)...(747): n = A,T,C or G
aactggattctttattggtcaattgtatncnnnatcagtatctacacgactgaaacannnnnttgatggaggccagcagactatttattcatgctcctcttnnnnnnnntttgcatcgtgattactggcttgacaatggatatgcagttgctgatgatnnnnnnnnnnnnnnnnnnnnnnnnnnnnnnnnnnnnnnnnnnnnnngacatgattgtatcattttggtttggaacacgatttnnnnnnnnnnnnnnnnnnnnnnnnnnnnnnnnnnncaactatatcatcggaggctcggtaannnnnnnnnnnnnnngaaatctggttggacannnnnnnnnnnnnnnnnnnnnnnnnnnnnnnnnnnnnnnnnnnnnnnnnnnnnnnctatccacacctcagtttttgtaccgctggctgcccagtaggannnnnnnnnnnnnnnnnnntggtgtgccccctgctagcatgaggcgagctgctgatcagaatggcggaggcgggagacacaactggggccagggctttcgacttggagaccagtgaaggggcggcctcaggcagccgctcctctcaagccacattttctcccagtgctgggtgcnnnnnnnaactgcgttctagctaacactgttggacctgacccacactgaatgtagtctttcagtacgagacaaagttttttaaatcctgaagacaaatacaagtgttccacaagtttcccgattctcattcaagtccttactg

SEQ ID NO: 11710 - DNA, 747 bp, Macaca Fascicularis
  misc_feature (1)...(747): n = A,T,C or G
atcatcactgtctgnnaaatcatcatctgctccatctactnnnnnnnnnnnnnnnnnntcnnnnnnnnnnnnnnnnnnnnncatctcagaaaaacgatcaaaattagacatgtcttcatctgaatcatcttcccagtctttccaattattgaagtcgacactaagccaattaagctttgccctttcttttgttaaccttggccatgactggccagattctccttttcgtaaacagcataaaattgatctgtccgttcttttatgcttggaatcatttggatcaatacagtgaaaaagatcaatttcatttaaatgcttaaaattatcacttcctccgagacaactgaatgtaagtttggatttttcaaaatttacattaacatccttactgtcttcaacacaaaattcaatgaagacatagtcccttcgatcgtaccactttgcagaagcaggctgcattgtgaacggggcagggggacgggcgaacgggtgggcgggcctctctggcggcggctgctgctagggagtcgacttctctccagtggcgactccgcgttttctccccggtcgcggcctcttctcgcttccctcaggcgacggcggcagcggcgggctcgacctcggtccccagaatgcaccgcgcggaaagagcggctcctccggtcggggagaagaggaaagtgtaggaaaacgggcgcgaggacggagaatgaacgtgcgtgcgtgcaaacgaggggtgggaggccg

SEQ ID NO: 11711 - DNA, 750 bp, Macaca Fascicularis
  misc_feature (1)...(750): n = A,T,C or G
gtagccccatagtgtaagtaaagatgtagttctccattgttnnngctatttaaatataatgtatcaaaaannttattccaaataatttccccaaatggtttattttattcatatcctatgtaatcctagaagcaccttctcactatgtgctgtagtttgaaacctaactaatcctcctactggagacactgtagagaagtaaaaattgttgcttctcttttgttttaagaggaaatgagaaggccagcagaagtagattaaaacnnnnnnnnnngtttattaaaataagcagataattacccnnnnnnnnnnnnnnnnnttacctgttttgaaaatctttgtacttatttttgtttttattgttgcaaaaaatgttaatgggctgttgaaatgacctccatttacttaaggtaatccaataagatcttttttaaatatacaaattttactcaagtttaaattgtgtaaaactgcttagaaacctgaaattttatagtgtgtaatatcttatgtgtatatagcatcctgagctgtgtgatacagtagatttcnnnnnnnnnnnnnnnnnnnnnnnggtggatttaataaaccacaaaaatcagcttatgtttctnnnnnnnnnnnnnnntttactttttagtaattttcttccttgtgaacatgaaccatataaagtgtctgtgacttaatgatttcatgtaagtctttcgcatacatccttcttttgtaacttacaccactgtggatgct

SEQ ID NO: 11712 - DNA, 746 bp, Macaca Fascicularis
  misc_feature (1)...(746): n = A,T,C or G
ggcagctgttcgagaactnnncntgannanntgcaaatcaaatgatggaaaaattgagggcttaacagctgaatttgtgaacttagagttcctcagtnnnnnnnnnnnnnnnnnnnnnnnnnnnnnaaatctccccaagctgcctaaattgaaaaagcttgaactcagtgaaaatagaatctttggaggtctggacatgttagctgaaaaacttccaaatctcacacatctaaacttaagtggaaataaactgaaagatatcagcaccttggaacctttgaaaaannnnnnnnnnnnnnnnnnnnnnnnnnnnnnnnnnnntgnnnnnnnnnnnnnnnnnnnnnnnnnnnnnnnnnnnnnnnnnnnnnnnnnnnnnnnnnnnnnnnnnnntggctatgaccgagaggaccaggaagcacctgactcagatgccgaggtggatggtgtggatgaagaggaggaagatgaagaaggagaagatgaggaagatgaggaggatgaggatggtgaagaagaggagtttgatgaagaagatgatgaagatgaagatgtagaaggggatgaggatgacgatgaagtcagtgaggaggaagaagaatttggacttgatgaagaagatgaagatgaggatgaagatgaagaggaggaagaaggcgggaaaggtgaaaagaggaagagagaaacagatgatgaaggagatgatgattaagaccccagatgacctgcagaaacagaactgttcagta

SEQ ID NO: 11713 - DNA, 735 bp, Macaca Fascicularis
  misc_feature (1)...(735): n = A,T,C or G
tnnngatgtannngtggttcaccgcctctgtgctctatcaggggctgatcctgcacatgggcgccaccagcgggaacctctacctggatttcctttactccgcactggtcgaattcccgggggccttcatcaccctcatcnncattgaccgnnngnnccgcatctaccccacagccgtgtcaaatctgttggcgggagcagcctgccttgtcatgatttttatttcacnngacctgcactggttaaanatcatactcatgtgtgttggccgaatnnnnnnnnnnnnnnnnnnncaaatgatctgcctggtgaatgctgagctgtaccctacatttgtcaggaacctcggagtgatggtgtgttcctccctgtgnnnnnnnnnnnnnnnnnnnnnnnnnnnnnnagtcttcaggctgatnnnnnnnnnnnnnnnnnnnnntttcattttatttggggtgttgggcctgcttgccgcgggagtgacgctacttcttccggagaccaagggggtcgctttgccagagaccatgaaggacgccgagaaccttggcagaaaagcaaagcccaaagaaaacacgatttaccttgaggtccaaacatcagaacccttgggcacctgagagagttgctttgcaggcatggagtgttggagggatgaagatggagttatcttctgcagaaattcctagacgccttcacttctctgtattcttcctcanactgctacccccaaat

SEQ ID NO: 11714 - DNA, 586 bp, Macaca Fascicularis
  misc_feature (1)...(586): n = A,T,C or G
ggcggcccngcaggagacggactccaatcccgctggtggacgacatccgcttccacgtggccagcacggtgcagacatacagagccatagaggaggcgcagcagcggctgcgggcactcgaggacctgctcgtgtccattggcctggactgttgagtccctggctgggcagccccaggggccaggagctcccttggagacaagcacgtgtatgtgtgtgtgtgcagctcttcttcctgctccctgcacattgaggggttcatggtgggtgcagggggctcagtgggggttttcttccctccatgagcctggagaccccaggggaagatgcatttgggatgagccccctctccccaatgcacaagccggcccccaagatcctgggggtgggcaccactcagggaaacctggggtgggggtgggctttggtcttagcactttccttccccagatccccctccccacaccaccccagtcccaaatccagtcttgtagccctcacccagccctggattgcttctctaagccggtgttcccatgcacagggccattcaggaagggctgggggagtgtgtgggcaataaagc

SEQ ID NO: 11715 - DNA, 643 bp, Macaca Fascicularis
  misc_feature (1)...(643): n = A,T,C or G
cctggcctcagtgatcctcctgcctcggcctctnnnngtgctgagattacagaccagagctactgcgcccagcctaatcgatgcttctgtaggaacagatggtggggtggacacagggaagcttgaaaacatgcatgtgattacgttccctcccacactgcccactgccctcagtgtgcccactgcacactctttggccccttaccctctctgtcttcctgctgtatctatgccctccccttatttgagtccccttggacttgaacttgttcattgttctgaggatgttnnnnnnnnnnnnncctaggcgaaaggacgctcttgtgttaagcagagaagtggcaccgttgcatccgtgttgggaaggtcccctcagcagccgtggacggcacgctggaagggggccggatggaggnnnnnnnnnnnnnnnnnaatggccaggacagaaatgaggaggcctgaactggagatgaacagcgggagagcctcaccttctcggatcctccatttgatcatttgaaaaatggggtggtgaaaaatacatcacgggctgtttgttagttcacttcannnnnnnnnnnnnngcgcttccacgtgcnnnnnnnnnnnnnnnntgcttggtggatgtnnctcttttcattgt

SEQ ID NO: 11716 - DNA, 730 bp, Macaca Fascicularis
  misc_feature (1)...(730): n = A,T,C or G
taccattgctangtatnntatgtctatgtatgtgctgnannngcagaagaatttaaaggtgaaattgcagtcaatgcattatgncnnnnnnnnnnnnnnnnnnnnnnnnnnnnnnnnnngctgggaggacctggtatcgaaagccagtgtagaaaagtggatatcannnnnnnnnnnnnnnnnnncattttccaaaagccaaaaannnnnnnnnnnnnnnnnnnnnnnnnnnnaaatatcttaaaagcagaaggaatacaaaattttgacatctatgcaattaaaccaggtcatcctttgcaaccagatttcttcttagatgaatacccagaagcagttagtaagaaaatggaatcannnggtgctgttccagaattcaaagaagagaaaccgcagccgcaaccaaaaccacgttctggagctgtggaaaaaacatttagaattgttaaggattctctcagtgatgatattgttaaagccactcaagcaatctatctgtttgaactctccggtgaagatggtggcacgtggtttcttgatctgaaaagcaagggtgggaatgtcggatatggagagccttctgatcaggcagatgtggtgatgagtatgtctaatgatgactttgtaaaaatgttttcagggaaactaaannnnnnnnnnnnnnnnnnntcaggaaaattgaagattaaaggtaacatggccctagcaatcaaatggagaagctaatgaa

SEQ ID NO: 11717 - DNA, 438 bp, Macaca Fascicularis
aagctctcagtctgtgtcacgtaaggacacgcttatgaaatgtcagagaggctcgccactaagtattctaaatacttttcaatggcttttctaacaccctcagtagtaatttactgagcatcatccagaccactaatggaatcagcaaagcactggaatttcacacaatgggcaaatattttcaacacttccaatttttaaagcttcagaatagaagccaaacaaattaataaataatgttttaattactattttaaaagtcaggtttagatcacttaaagttacttgcttttgatgctcagctgtcatgtttataattcaaatgtgtagtgaacatatgtgcgtaaggttgatttttttggagatgttgcagctcaaatgttcagtccccacgtgaatcatcagtgtctttcccgtcaagtaatttgggcatatttg

SEQ ID NO: 11718 - DNA, 631 bp, Macaca Fascicularis
  misc_feature (1)...(631): n = A,T,C or G
ccgaggagagcannntgatctccgcgctgtcggacgccagcagcgcggtctattacagcgcgtgcatctccgnnnaggccgccggcgccgcccgggtccctgcagcgcttcctcccgcagcccccgcgaccgatccgaccgcgtcgctgcccgctctaccctctcgcacgcgtgtatgtttggctccatgtcacagccccctaggagccagtgatgctcggccttgtgcccgttccgcctcccaggccaccctccctgggcttctgggccacctgccctcgggagggcccctgcgagggtgcctggagttcccacgtgtcctggggcctttccaggaagccggagcctaggacctgttggcagagttgccagggttacatttttgaggcacctgttccttttcttgcagtgtattttctacaaccagattgtattaatattttttactttgccgttttaaaaaattatacctaatacaatatatttaatttttacttaaactcttaaacttttcttcgaacaagtgtcagtgatcagagccgtcactgcggcaaaggcttttgaaatgtgaggactgcagatgtttgcttgctgtaaaggaggagcctggggctgggtccccgggtggaga

SEQ ID NO: 11719 - DNA, 746 bp, Macaca Fascicularis
  misc_feature (1)...(746): n = A,T,C or G
tttagatttacacagaacatnnnnntgcatgattagnnnnnnaagatctaaaaaggtaatacgggtatttcaaataaaatcnnnnntggtatgaaaggctccattgattttattaagctttcgtttaccttgtagtacaaggtgctttaatgggatagaactaagcatatcaatatctataactgcattttgttatagacaatcaactgttcttttctctaaaatgtatgtgtcaatttaaaaggccaggaatagaaaacactccataattgctttccttgattttgctgaggatttggtatgattttagtaagcaaactgttttttggtttttccttaatgtttttacatttttttcctcttgcaacaatgacagtgcatgttcttataaatataggaannnnnnnnnnnnnnnagtaacctgaagttcttgctgtacttaaaaaaaaatcatgtggccctttcaatatttgaannnnnnnnnnnnnnnnnnnnnnnntttatctccttttttatgtcatagaaattaatatgatactttaaatatgtaaatataatatatnnnnnnnnnnnnnnnnntatatctgtcttaagttgtagctgtgtcttggaaatatttttaaggtaatctatattcacattgcctgtgttaatgctttttaaagtttgtatacatcagaatgtatatttttggtttggcataagctacaattgtaatttttcttggctttttgttcataaagaat

SEQ ID NO: 11720 - DNA, 682 bp, Macaca Fascicularis
atttgaaggtagaggaggtgatgaccttggcaccgagatcgctaacaccctctatcggatatttaacaataaaagcagtgtcgacttgaagaccctctgcattagtcctcgggagcactgctgggttctctatgtggatgtgctactgctggaatgtggtggaaatttgtttgatgccatttccattgctgtaaaggctgctctcttcaatacaagcataccaagagttcgagttctggaggatgaagaggggtcgaaggacattgaattgtctgatgacccttatgactgcatacgactaagtgtggagaatgtcccctgtattgtcactctgtgcaagattggctatcggcatgtggtggatgctactcttcaggaggaggcctgctcgctggccagcttgctggtatcggtaaccagcaagggagttgtgacgtgcatgaggaaagtggggaagggcagcctggacccagagagcatcttcgagatgatggagactggcaagcgtgtaggcaaagtgctgcatgcctccttgcagagtgttttgcacaaggaagaaagcctgggacccaagagacagaaagttggattcctgggatgatttgcatatcaactgcttaactgtggattgttttttacttttccttttaaactggtttgtatatagttttcttcgctgtta

SEQ ID NO: 11721 - DNA, 732 bp, Macaca Fascicularis
  misc_feature (1)...(732): n = A,T,C or G
cactgagcagtgagaggaaggcagtacagagctggccagccctggaggtgggttgggnnnnnnnnnnnnnnnnnnnnnnnnnnnaaggtacctagggctcttgggagctctacggttgctgggggccctgacctgggnnnnnnnnnnnnnnnnnnnnnnnnnnnnnnnnnnnnnnnnnctcaatagtccgtagatagcnnnnnnnnnnnnnnnnngcattgatggggtggtgatgaggnnnnnnnnnnnnnnnnnnnnnnntggtccacgtggattgtctcagggaagccttgaaaaccacggaggtggatcccaggaaagggcccatgtggcagannnnnnnnnnnnnnnnaagaattgggggtggggtagatggcttccccactatgggatgacgaggtgagagggaagcccttgctgcctgccattcccagaccccagccctttgcgttcatcctgggtccactggtctcaaaagtcacctgcctacaaatgtacaaaaggcgaaggttctgatggctgccttgctccttgctcccccaccccctgtgaggtcttctctaggaagtcctttctgactacctgtgcccagagtgcccctacgtgagactgtatnnnnnnnnnnnnnnnnnnnnnnnnnnnnnnnnnnnnntgtgtccatcccgccggccccccagactnnnnnnnnnnnnnnnnnnnnnnnnggttctcctcttatacacccctcaactc

SEQ ID NO: 11722 - DNA, 722 bp, Macaca Fascicularis
  misc_feature (1)...(722): n = A,T,C or G
agtgtgnactagggagtcggtttctctcttaaagacactcactgtacaactgagagcagctgtcatatttctggcaaaatgtgtttacgtatctgacaagctgtacatttgtgtatgaactgacataaaatgtgaaagcctgtaagtgtacatgtagtggtgtggtgttctgtctagaggatacaactgaatgtttttaatttgctgacttacagacacaggctgtttacaaaatgctagctggaaagtctgtaatgttcatgtcataacttttagttaattgccattgagcacctgttctgaggaggtgagatgtggacttgtgcttatgaactggagagtttactcacaatccctcctggctttgtgtgaatagcttgctcactttgctggcctttgaaatgtgttctctatgataagctgtccgtgtgtttgtgataagagtgcttgtcaacgatgaccatctttgagccttcctagtctttcacctggcacagtatttgaaatggcaaaggatgtgcttcatcctctaacagtgtacactcccagagctgatattctggattgtgactgtgcacatttcctctagttcatttctgtagtccctatagaacgatctgtaataaaatagtatactggactgtgcatcaaagggatgtaaaattacagtattccaaaggtgaagttctgctgttttgttataatgcctgatacacatctga

SEQ ID NO: 11723 - DNA, 1485 bp, Macaca Fascicularis
  misc_feature (1)...(1485): n = A,T,C or G
annngtgnnggagacagaagaggagaagattctgtgtgacatttggagaaccagcttatggacagccgcatggagatggtcagactctgctttgacccaaattttgagaaactgaagccaaaatacttggaggaactccctgaaaagctaaagctctactcacagtttctggggaagcggccatggtttacaggagacaagatcacctttgtggatttcctcgcctatgatgtccttgacatgaggcgtatagttgagcccggctgcctggatgccttcccaaacctgaaggacttcatctcccgctttgagggtttgaagaagatctctgcctacatgaagtccagccgattccaccgaggtcttttgtttggaacgacagccacgtggaacagcacatagggccccgtgatgccagaagatggaagggaagagccgacccttctgcctgtgacccgggagaacagcctgactcccaggacccgccttctttctttctccttctttctgctctcttctcttccccaaggcctcattggcttcctttcttctaacatcatccctccctgcatcaaggctctttaaagcttcagctccccaccgtcttccatcacagtccccctcctaacgtctttcttttcctgcactaacgccaacctgactgcttttcctgtcagtgcttgtctgttctttgagaagccagactgatctctgagctccctagcactgtcctcaaagaccatctgcatgccctgctccctttgctaggtccctaccccagccctgtgtgatgcccagtaaagcccaaaccgtgcctgccttgtgttgtcttattccctgaggctcccttgactcaggactgtgctcgaattgtgagtggttttttgtcttctgttgtccacagccagagcttagtggatgggtgtgtgtgtgtgtttggggatggtggtcaggcaggttcataagtttccttggtaatttctgcgctctagccacatccctttgttcctcactgtggggattactacagaaaggtgctctgtgccaagttcctccctcattcagctttccggtaggccgtctagaactggcatggttcgaagaggggctgggctgacggggaagagggctgagcagctcccaggcagactgccttctttcaccctgtcctgatagccttccctgatctagatctccttcgtcatgacaattctcaataaaacataatcccggccgtatgtaattgtggtannnnnnnnnnnnnnnnnnnnnnnnnnnnnnnnnnnnnnnnnnnnnnnnnnnnnnnnnnnnnnnnnnnnnnnnnnnnnnnnnnnnnnnnnnnnnnnnnnnnnnnnnnnnnnnnnnnnnnnnnnnnnnnnnnnnnnnnnnnnnnnnnnnnnnnnnnnnnnnnnnnnnnnnnnnnnnnnnnnnnnnnnnnnnnnnnnnnnccccnnnnnctnnnatccggccnctgcactccagcct

SEQ ID NO: 11724 - DNA, 1028 bp, Macaca Fascicularis
  misc_feature (1)...(1028): n = A,T,C or G
agaggggaaaaaaagataaaaagcnnnnnnnnnnnnnnnnnnnnnnnnnnnnnnnaacccagactgcctacccctggcacnnccagagaactgggacctgaaatacctgctcctttctcccctttgaccatgtagtaaatgaaccagaagcagagattaacctatcaatnnnnnnnnnnnnnnnnnnncctgcagtgctgtctgctgggaggtcagctggtcaaagcagaggaggagaggaggaaaggataggggctgaagagcagaagggaggggagacagaggggattaaagaggggaggagannnnnnnnnnnnnnnnnnnnnnnnnnnnnnnnnnnnnnnnnnnnnnncctctaccctagggaggccagaaagaaacaaacagccctctgggcctttaggctagactctggcttggcaggctccaggcagggtcctctgggaagttactctagaaaatgaagggaggaggagcacaaggtcctcagcaacgaacacctgcacttggaaaaagtggnnnnnnnnnnnnnnnnnnnncccacccatggtactgtatgctactaactcctggaaacgccctgtatgtgcgagttctatttttgtatttgtatgttgagatgggctttgtggtttctctgttctcagagcatatttcttgtaattactattgttatttttattgtcatgactgcccctgagctctggtgagaaaagccaaatttataaggaaagggatgaagttaatatttgcatcatgtaattatatcattactgtgtatctgtgtattgtactaaatggactgatgccagcacatgagctgaaaatgaagagccctcccatccattgcatgagaaagaaggtcaccctgagtgacctctgtttcatgatttcccaaacaggttttagagctggaaaaggacttaaagaaagagactgggtggtgctttctagaaaggaggaagatgggtatcaggggaaggaaggagttagagggctttgtctagaagccgagatgctcataaatg

SEQ ID NO: 11725 - DNA, 745 bp, Macaca Fascicularis
  misc_feature (1)...(745): n = A,T,C or G
acgcccgggccaagctggatgagctggagggcgnnnnngcaccaggccaaggaggagnnnnnnnnnnnnnnncgtgagtaccaggagctcatgnnnnnnnnnnnnnnnctggatgtggagatcgccacctaccgcaagctgctggagggcgaggagtgcaggatgtctggcgaatatccaaattctgtgnnnnnnnnnnnnnnnnnnnnnnnnnnngctggggcaggaggagctggcttcagcatgggcttnnnnnnnnnnnnnnnnnnnnnctacaaaactgcagctgcagacgtcaagaccaannnnnnnnnnnnnnnnnnnnnnnnnnnnnnnnnnnnnnnnacctcggggagcagttgtgccaccaaaaagtcctccagatgatggacaagtggttggctctgtgagcagaaggcttcccaacccgtccatttcctccctctccttccctgggctccctttccaagtcaagaaatgctttgtctgtcactacagtcccaactccatttcctctccctgttgtcctcaaggtgnnnnnnnnnnnnnnnnngagtccagtcatgagctctctcagtggcctccttcttagtcccgtttcgttgggtcattgcctgaaatgcaaaaacaacacacatacnnnnnnnnnnnnnnnnnnnnnnnnnacaagcccctctgcctccatgcctttctaaggcctttgctgccaagggactctcttcatcttctgattgggattgtgtcc

SEQ ID NO: 11726 - DNA, 676 bp, Macaca Fascicularis
  misc_feature (1)...(676): n = A,T,C or G
gagctttttttttannntctgtatacttcgtgacttctatatgactcagattggtggatgtgttcctttttttttttttttaannnnnnnnnnnnnnnncacacatctccacacccagccccagtgtgatatgtactcttaaatctctacatttttataaggcgtacatttcttttaattctttagtgatgagggctgcctttttacatgcccctcaccccaaatacacatacacagattcaaatttaaggaaacaaatctaccacataaattcagaacatgattggggaaatgaaaatagcccctctttctgacaaggtagggagaatggggtaagaggatgggtacaggagggtaaggcatttgcacgttatacaaaatgctgtttagagcctctgagatagcaggagttcacgtacaaaggagcaagagtagtaccaagaagtgaagttgagtcattgctccttccagtcccacatccactgccttgaaagtcagtgagcagagcatttgatggtatttggtaatagaaagaaaaggactttggttttcaatttatatgtaaattccagtcagttacatttcaggcagcatnnnnnttctattttcccatctggctatgatgaatgaagggaagatattttgttgctctgtagaaactaacaatataaatgcc

SEQ ID NO: 11727 - DNA, 731 bp, Macaca Fascicularis
  misc_feature (1)...(731): n = A,T,C or G
ctggccacagtnnngcaaggtgtcgcgtcctctctatgggtgagggagccaaggagactcggaggagctagcccgagacctcccagtctgcacatggcagaagccaggcatgtacacaagtctgccagattcccccagttctgcccatcttctgtactggctggaccctcgccagccacagagctggcaccacaggttccagagtgctcaacgacccaggcttcagccatttggctgctttgggcctcgtggggttcacatcccaggggagtggggaaggcctgccccccaccaacaccaacacttctgtgctgtctttcccctgcagcagcaaccaagtccagaggaagaccaggcagtggaggagggagaggaagcagcgggggaaggaaagagtgaagaagtggaagaagatttagcctagaagtcagccttcgactgcggcgctgtccctgtgtgccttcctttcccacctaccctcaaccagacttgcatggccatggcagggcctcaggaagaccttcgggagcggggaagggtttctcctccatgatcgaccctcctcgtccacctacaaatcagggaagtctgtccannnnnnnnnnnnnnnnccaggcagttccctgaccannnnnnnnnnnnnnnnnnnnnnnnnnnnnnnnnnnnnnnnnnaggggacgggcgggacgagcttggctgttctgctgcaacgaatgctttctgtatccgaa

SEQ ID NO: 11728 - DNA, 760 bp, Macaca Fascicularis
  misc_feature (1)...(760): n = A,T,C or G
gccacacagctccccacccgctgctaggaggtcccagtctcacgccttcctcatgtgttgttctacctgctgggatgggggtcagcctctctttggtgacgtcatgttctctgggatcccaagaacccannnnnnnnnncagggaggttacgcgggaggccccannnnnnnnnnnngtgctcctggnnnnnnnnnnnnnnnnnntgtcatgccctgctggctcagccnnggggtccgagatgctagggacagttgagtgagggagatggtgtgagggccgcgtttccnnnnnnnnnnnnnnnnnagacctccgcccccagctagagcaagtctggggcaccgtgcctgggagggaagaagccgtccacagccttccccgtcgccggcttctctgtcctgcctaccctggtcctggcgggacttcactatttgacttgctttcctttcagatattcttggctcagggcctgggttgagggagcttagggaaggacgtccgtctgggtgcttttcctccagtttgctggctggcttctccgtctatccacagtgacctcacagagaggccctcctgcctcccacgctcatgcagtgtcccccacttttttgatctcactgaccgtctacatgtatttatattcttggtattttctaccctcactggaatataaactccatgaaggcacaaacttttcttgttcccttctgtatccctagaataagaccaacctgaacctggcatatagtagctgcttaataa

SEQ ID NO: 11729 - DNA, 913 bp, Macaca Fascicularis
  misc_feature (1)...(913): n = A,T,C or G
tggtactacccatnnnatcctcnnnnntaccctggcacatggaatagagcttactcaccccttcgtggaggcttgnnnnnnnnnnnnnnnnnnnnnnnntcagacacaaaaaccagnnnnnnnnnnnnnnnnnntggtaccaggagacgataaagtagaaagttggagtcaaacattggatgcagaaattttggatttttcgtcactttctctttagaaaaagtgctacctgttaacaattgggaaagggggatattcaaaagttctctggtgttttgtcctgtatagctttttgtattctattatttgaggctaaaagttgtgtgacaaaatacttatgtgnnnnnnnnnnnnnnnnnnnnnnnatgtatattgcagnnnnnnnnnnnnnnnnnnnnngtggaatgctaaaaatacattaatttctaaaacctgnnnnnnnnnnnnnnnnnnnnnnnnnnnnnnnnttgtactaatagaaactaagtacagaaaatttcagtcttaggtggttgtagctgatgagtaattacctcatagagactttaatattctatttgatattatattatttgatgtttgctgttcttcaaacatttaaatcaggctttggactaattatgctaatttgtgagttctgatcacttttgagctctgaaactttgaatcattcagtggtggtgatggccttctggtaagtgagtattaccttctgtaggaaaaggtagaaaataagctctagaaggttgttgtgaatgacnnnnnnnnnnnnnnnnnnnttgaaacctctatattcagttcataagaggtaaaggtcaaatttttcaaaaaaagtcttttaataacaaaagcatgcagttctctgtggaatctcaaatattgttgtaatagtctgttcaatctaaaaataatc

SEQ ID NO: 11730 - DNA, 754 bp, Macaca Fascicularis
  misc_feature (1)...(754): n = A,T,C or G
ctcaccagatggcatgtggtgtggcacctgtggctggacacaggaggcctcaggatcacaaatgttacactagacgtannnnnnnnnnnnnnnnnnnnnnnnntcgactgttccccagctcctgaggggcactgtcagcgaaatgctgggtctggaggtgatgagatcaggggccacacttgagccgagtcaccagaccctattgcttnnnnnnnnnnnnnnnnnnnnnnnnttgtcctggccactctggctnnnnnnnnnnnnnnnnggacagggattccaagcctccctcacaaaaaaaaaagaaaaaaacaatcaccagctgccatagacacggggaagcttgcagagctcagatgaacaagctcagcaatcggacatctctgggggaaaggaaggtggcacagaccacattccctggttcnnnnnnnnnnnnnnnnnnnnnnnnnnnnnncttcctatggatcaagaggtcatactccttccctgcccctcgctgtctttagcaagcaggtttcactgcttcattagaacaggacaggtcaaaagtgaatcatttttcactaaagaataaacccaagagctttccagagactggctgctgcagccctgggaatgtctggaattactctgtggaaatggaactttctattacgctctagacattacagttatttgagtgttactcgttactattgaggtcaatgcttcgtggcaaatnnnnnnnnnnnnnnnnnnannnnnnctgcccttg

SEQ ID NO: 11731 - DNA, 752 bp, Macaca Fascicularis
  misc_feature (1)...(752): n = A,T,C or G
cagggacgannnnnnnncnnnnntcactgcccgacgtgagctctcaccacccgggggcaaccacgccgagtaccaggtggcagacggggagggggaggctggacacaagctcaaggtacggctgccccggtttggcctggcgtgggccaaagagggggccgaggagggtgagaaggccaagagccccaaactcaggctgccccgagtgggcttcagccaaagtgagatggtcactggggaaggctccccaagccccgaggaggaggaggaggaagagggcagtggggaaggggccttggggcgcaggggccgggtccgggtccgcttgccacgtgtaggcctggcggccccttctaaagcctctcgggggcaggagggcgacgcagctcccaagtgccccgtcagagagaagtcacccaagttccgcttccccagggtgtccctaagccccaaggcccggagtgggagtggggaccaggaagaaggtggattccgggtgcggctgcccagtgtggggttttcagagacaggggctccaggcccggccaggatggagggggctcaggctgcggccgtctgaagcccctgggcagatggggatcccttcttgccttcctttctctaccccctcgctgttgtgtgtgtgataactagcactaaccctaagagggctgggaggtgggtgactgaccatggccggcggggaggcctgctcctgtctctctggcaggagtgcctgtacccaccaagcc

SEQ ID NO: 11732 - DNA, 682 bp, Macaca Fascicularis
ttgcattacacattcatcagaagttcaaacttctggccacactgcttgtcttgccaagaccttacaaccgcagctgcaagaaaacatacctgtcccccaaaagttgtttttatgcactgtgtctcgtctaggcaagcgcttccaagaagccaggattcacttgagaatgtgtctctctctggcaggtctcgacatgacgactactgtgtaggtgagggaggaactttcaaagcactttcttttcccactgactatgtgtgagaagttgctcctgctctagatctcatgtgccagtactcaccaatttgtaaaaggcttagtaccttttaaagctgctctctccatttcaaacttgaacaaaaatttcattgaacattgaagtttggaaatatttcttcgacatttcagcaaactcactgaaactcaaagacccacagatcacagtgaacagtttgaaacaaggctgtaccatggcagtcatgcaaagcatgggacagaagaaataccacggcagtgaactgtgaggataacttccattttttccctcggagagaacagtttacggggcagaggtgatatgttctgccttttgaagattactggcacacgttcagctttttcacctctctaatcgactggaagcagccagccgatcactagtcctccatccccctagagtcct

SEQ ID NO: 11733 - DNA, 381 bp, Macaca Fascicularis
cttagtggctgcttttgcttgggggccgtcccgcacctgaggcaggaagatggtggccgcaaagaagacgaaaaagtcgctggagtcgatcaactctaggctccaactcgttatgaaaagtgggaagtacgtcctggggtacaagcagactctgaagatgatcagacaaggcaaagcgaaattggtcattctcgctaacaactgcccagctttgaggaaatctgaaatagagtactatgcaatgttggctaaaactggtgtccatcactacagtggaaataatattgaactgggcacagcatgcggaaaatactacagagtgtgcacactggctatcattgatccaggtgactctgacatcattagaagcatgccagaaca

SEQ ID NO: 11734 - DNA, 749 bp, Macaca Fascicularis
  misc_feature (1)...(749): n = A,T,C or G
gcagaagagcccaagccggtggagcccccggcagctaattccgatcaaaccgtagccgtgaaagagtgacaaggacagcctataggaaaaataataccacttaaaacaatctcctctctctctctcactatctctctctctatctcctctctctctctcgcctctcctctctctctctcctatactaacttgtttcaaattggaagtaatgatatgtattgcccaaggaaaaataaaggatgttgtcccatcaagggagggagggggtgggagaatccaaatagtatttttgtggggaaatatctaatataccttcagtcaactttaccaagaagtcctggatttccaagatcgcgtctgaaagagcagtnnnnnnnnnnnnnnnnnnnnnnnnnnnnnatgcactcctccaccgctgagagttgaatagcttttcttctgcaatgggagttgggagtgatgcgtttgattctgcccacnnnnnnnnnnnnnnnnnnnnnnnnnntttatgagagcagtattttctgtgttttctttttaatttacagcctttcttattttgatatttttttaatgttgtggatgaatgccagctttcagacagagcccacttagcttgtccacatggatctcaatgccaatcctccattcttcctctccagatatttttgggagtgacaaacattctctcatcctacttagcctacctagatttctcatgacgagttacatgcatgtccgctggttgg

SEQ ID NO: 11735 - DNA, 737 bp, Macaca Fascicularis
  misc_feature (1)...(737): n = A,T,C or G
taagcacatacgatggaattactcaaatggagaactgancaggctactaacaatagagtccagattggaaaagaagcactgtggaataacttgtgagaggattctatactaaattagaactttttcaaaggtggcctgaaaagaggggacttcagtttaattnnnnnnnnnnnnnnnnnnnnnnnnnaagaagcagaatagacacttcattgttccagcttctcgcttcaagctcctgaagggagctgannnnnnnnnnnnnnnnnnnnnnnnnnnnnacaaagcccagcacaccttctgtaagagatgtggcgttcagagcttctatactccacgctcaaaccctggaggcttcggaatcgccccccactgcctggatgagggcactgtgcggagtatggtcactgaggaattcaatggcagtgattgggagaaggccatgaaagagcacaagaccctcaagaacatgtctaaagagtgagcttctgcctctcctgccctgaaaaggaggagtgattggggccagcaactttgctttccttgccgtgcctcggtggtgctcctgaatgtggctgacctgggctgctggttccgttgactagggccatcttgatctctgcagtttgctccagctaccagtttctttaggcagctctttgtcctccctctgcccagattttgatgtagtctagttgacatccttctcttcnnnnacttttgtgtgatcttttaggaaa

SEQ ID NO: 11736 - DNA, 734 bp, Macaca Fascicularis
  misc_feature (1)...(734): n = A,T,C or G
atgcaatctgnnanncttgataaatgaacagtgagagatttttaaataaagcctctaaatatgttttgtcatttaataacatnnnnnnnnnnnnnttttcaagtactttctgactcacatacactagatcactttttactctgtgttnnnnnnnnnnnnnnnnnnnnnnnnnnnngggtggatatagggcataggatcacttgtctcaggatctgtcatagaatttcttgctgccaattaaaaaacctgtgttctttacacactacacttataaatgttgtaactgttcatcttnnnnnnnnnnnnactgtaannnnnnnnnnnnnnngtatcctaaagcatctgtatatggtaattgtgcatttttggaaaaacccattccttccaagctagtgtttttcattggctnnnnnnnnnnnnnnnnnnnnnnnnnnnntcccctggcagtctgtcttttgaagtttaaagattacctgtctcctgactgcagtaccttttctttaatttttaccannnnnnnnnnnnnnnnnnnngagttcttattcaatataaggaaannnnnnnnnnnnnnnnnnnnnnnnnnnnnnnnttttaccaatcaaacatatttgtgcattacatttcgtttcttnnnnnnnnnnnnnnnnnnnnnnnnnnntgttgagccatttgagtatgctaaaagacttannnnnnnnnnnnnnnncatggttttagatcccataataaaaatg

SEQ ID NO: 11737 - DNA, 731 bp, Macaca Fascicularis
  misc_feature (1)...(731): n = A,T,C or G
tnnnnnnnnnnnnnnnnnnnnnnnnnnnnnnnnnnnnnnnnnnnnnnnnnnnnnnnnnnnnnnnnnnnnnnctaaccaccgtcattctttgtctnnnnnnnnnnnnnnnnnctttnnnnnnnnnnnnnagagagaaataataaaagtcctaaatgacgaagaatgatcagcgggagccttgggcatgatnnnnnnnnnnnnnnnnntttattaaagagcagggagtcgtggctgtctctacataatactaacatttcagtgaaaaaataaaagtaaaattggttatttggtacgtgtagatttaacacccagacgactgacttgtaaccctccccactggnnnnnnnnncatttaaacccagccgtcattctctccccactccacaatccccgttcctctgnnnnnnnnnnnnnnnnnnnnnnnnnnnnnnnnnnncctgtgattgtgccatggttgccaaggtaacggtggagctggagctaacttccttctttcatcctttccaatttttctattccagaagacagtcagaataatgcattnnnnnnnnnnnnnnnnnnnnnnnnnnnnnnnnnnnnnnnnnnnnnnnnnnnnnnnnnttctctgattcattcacannnnnnnnnnnnnnnnnnnnnnnnnnnnnnnnnnnnnnnnnnnnnnnnnnnnnnnnnnnnnnnnnnnnnnnnnnnnnnnnnnnnnnnnnnnnnnnnataagaatgtattagtg

SEQ ID NO: 11738 - DNA, 729 bp, Macaca Fascicularis
  misc_feature (1)...(729): n = A,T,C or G
gctgtctgtgtgctgaggctcgtnnngtgtgagttgctgtctgcctcttgtccggctgtgaggtgctcgnnnnnnnnnnnnnnnnnnnnnnnnnntccatgtttgggtgctgtgttgcgttttgctctgtctaaaaacatctgcatagttttnnnnnnnnnnnnnnnnnnnnnnnnnnnnnnnnnnnnnnnnnnnnnnnnnnnnnnnnnnncacagaacaagcgagggacaaaggagatagaatgnnnnnnnnnnnnnnnnnnnnnntagcccctgtgactgggccctgcacacagcccttccacagttggcactgtgggtgcaggccaaacctttaaagaacaaacaaagtcggctctgtcactttttgcaaattggcaaaaacggacatccagggagtttcatgtttatcatcctatgatgttttcccatgtttttgagcttccggggtttaataaaattggttaaaaattgagtcttttcctgaagtgctctttccaggtgaaaactactcttttggttttgtttgaaagaaagaaagggaggggaaactttgctcttttaataattatgttcagcctatgatgaagtatttgattattagacagcaacatcactaataagttttaagttgtccaaagttaattgtaaacatcagtacagtactcttagttacagtaaagcaattgtcgcaagatgaatggctcatattttggtgcagtgtttgat

SEQ ID NO: 11739 - DNA, 691 bp, Macaca Fascicularis
  misc_feature (1)...(691): n = A,T,C or G
gatcaatgggggatnnnncctggtgctggacggtannncagaggccgagcagagagacaggctgatgnncagatgggacgtctctaatggtgtggcccggcgttgctggtcagggaaccagaaggcctatgagattatctgccagaccatgcaggagaacagcagcttggtggtgacactgccccacgaggtggaggatgagcgggtgctccagcaggccctgcagatctgagggagccacgagtcgcggcccctgcctctcnnnnnnnnnnnnnnncttcacctgcccaaccatgnnnnnnnnnnnnnnnnnacacacgcaccacatgcacttctcgcacatcctcacgtggcctttatggtgccctgcgcagggtgccaccacagcctcattttacagatagcccgccgaggcccagagacgtgcagccctctgtccacgaccatgccacttgcctgggagccccgaaggctgtcaaagtccatttaggggtgagtcccaagcctgcctaggggccctgcggtgaacactggcnnnnnnntctccggctgggatgatcacaccctctgcttcctggccacctgccagcctccatgcaaatctgtctgtctgctgcccatatgctgtctgtgnnnnnnnnnnnnnnncccttgnnnnnnnnnnnnnnnnnnntggaggagttcaggaagg

SEQ ID NO: 11740 - DNA, 783 bp, Macaca Fascicularis
  misc_feature (1)...(783): n = A,T,C or G
gcaggcaaggtggaggacaagtggtacagnngagcggaggcagggggacgacaaggagggcatgatcaacctcgtcatgtnnnacgcgctgctgccagctgccatggtgatgccaccccagccnnnnnnnnnnnnnnnnnnnnnnnnnnnnnngggcgtcggctacgtgcccatcacagggatgcccgccgtctgcagccccggcatggtgcccgtggccctgcccccggccgccgtgaacgcccagccccgctgtagcgaggagnnnnnnnnnnnnnnncaggacatgttccccaacatggaccaggaggtgatccgctcggtgctggaagcccagcgagggaacaaggacgccgccatcaactccctgctgcagatgggggaggagccgtagagcccccgcctcgctgccgtgtcaccccagctcttcggacgccgaccgggcgctccccaaggaatgctgtcccaacaagatccccgtgacacggcccctgtcgcccctcccatggacgtctgggctgccccgcccacgcccgctctgggtgcatgggggttttcggttcctggcggcccaggacggggcgggggctcccttcgcctcttgtgctgggaggtctcggcgcattctcctgtccccaggacgtgcgtctccccttctcatgnnnnnnnnnnnnnntgttcttgctgtagagagcagctgcttctccagggtgttggaggtggtggagcgccttctgattccattcatggcattttgtgatgtgacgtaatggaatagagctg

SEQ ID NO: 11741 - DNA, 716 bp, Macaca Fascicularis
  misc_feature (1)...(716): n = A,T,C or G
ctgtactggccnnnggtggttcagctgtgaggccgctgcnnnccgctttcctatgcttccctccagtcctcgccgcatgtgtaggcgtctccacgctggagggggccnnnnnnnnnnnnnnnnnnnnnnngagggctgcatccttctaggcccatgtgagctgtgcgtttctcagaccctccttttgtccctacacctgctccctggaacccccctctgtggccaccctgaagaatgtgctgaaacacttgtgtggcctgtccccgtctctctgacagccttccatttgtgaagtgccctgtggccctgtccctagcaccacctctgtctgnnnnnnnnnnnnnnnnnnnnnnnnnnnnnnnnnntttcctggcccagccctcaccacagtccatggaagccacaaacaggctcatagcgaagctgtgacctggtcctgaccatctggggcgcgagggcctgagctcccctgctaggctggagcagccctgtcacctgtgcacatcttgctggtggaggcatggcccactgtgcaggaccccaccctcgggggctctctgctcccacactaatgattctccccagcatccacactgggtctggcactacgtactcagggcccccagccctcgtgtcctggaggaagagctggctccagacacatgctgatcacctagaagagctctggctaaagcgcaattttctagaaataaaac

SEQ ID NO: 11742 - DNA, 726 bp, Macaca Fascicularis
gcctggagccgctcacgccgcgcggcgtgctcacggtggacggggagcaggtggagtatgggccgctacaggcacagatgcaccctggcctcggtacactgctcaccgggcctcctggctgcccagggcgggagccctgaaactcaacgaggttggaacccgccgggggcggggcctacattccaatggggcggagcctgagctaggggtgtggcctggctgctagagttgtggtggcagcccgcaagtgcaagggccctggccccgtctcaggattgcgcccgccttcatgggaccagacgtgatgctggagagtgggcgtcgtcacgagggtagtgcctgatcaatgagggcggggcctggcgtctgatctcgggacgcccttaaggggcagggcttagtcctgaagctagccacctgctcctacccggccaggctggctgagggcggagcctgttttacgcgtcgcccaatgacaggacctggaatgtactggctggggtaggcctcagtgattcggcccttcagggcccgcagcctcgccccatccactccggtgcctccatttagctggccaatcagcccaggaggggcaggttccccggggccggcgctaggatttgcactaatattcctccccccgcgggtgggggcggggaaattcatatcccctgttcgtctcatgcgcgtcctccgtccccaatctaaaaagcaatgaaaaggtct

SEQ ID NO: 11743 - DNA, 677 bp, Macaca Fascicularis
  misc_feature (1)...(677): n = A,T,C or G
atctatccntggttcagctccaggggtgcaggcaatgtttggaagcccttagcagcagcatcactgtgggagctgccagtgtctccatccacagacaaaatctgctccaagggatggagaaggagcactgttaggaccctgcccagccttaccctcagcccacagtgccatctgcttctgtcacttattaggattcaccaaaaaaggagggggaatggtagggttttaaccagaacacaaagtggtagatcctcccagctgtaggagggtgggctgtcctgcaccagtgtctgcatgggctcctgcccactgaggggactcaggccccaggagtcccggcctggcccataagaggagtgctgccctcctgagggtcaactggagtctggctggtgtggaccacgacagtcttctcatccacaatctcacaggtagggttggtgaaggcagacaagggcagagtgattcgctgcatctccctctcacacattttctgatcatgctgttctttcaaatccttccccctcttgtaggagtagcccaagatgatgccagctccgatggcaatgatgatcaccatcatggtaatgcccagcacgtagcccagagttcccaggtcctttttctccttggagttcatccgcacccgctggctgatcccaatcactggctgcaca

SEQ ID NO: 11744 - DNA, 602 bp, Macaca Fascicularis
  misc_feature (1)...(602): n = A,T,C or G
acaggcccaggacnnnnnnnnnnnnnnnnnnncttgccccctggtacctactcaggccccacccagctgatacagcccagggccccagggcccgctgcaatgcccgtagcacctggacctgccctctacccagcccctgcctacacaccggagctgggccttgtgccccgatcctccccccagcatggcgtggtgagcagtccctatgtgggggtagggccggcnnnnnnnnnnnnnnnnnnnnnnnncgccccacctcctcaattctcaagccccgagctgaccatggtggttaagccagccaccaccacagtagatagcatccaggcgcccatccccagccacacagccccacggccaaaccccacgactgctcctccccagccccgcttcccggtgcccccaccacagtcactgcccacaccttacacctaccccgtagggaccaagcaacccgtcccagcccagcaccacttctctcctgggannnnnnnnnnnnnnnnnnnnnngaggattgggccccagccccagccccatccttcacgagcatttgggcctcaacccccacagcagccccttccactccagcacccccacctcaa

SEQ ID NO: 11745 - DNA, 783 bp, Macaca Fascicularis
  misc_feature (1)...(783): n = A,T,C or G
ctgctggagtgtgnctacctggtnnctgccatgctcctggagattccctacatggctgcccatgagagcgatgcccgccgacgcnnnnnnnnnnnnnnnnncaccaccagttgcgcgtgggcgagcgacagcccctactgggtccccctgagtccatgcgggaacatgtggtcgctgcctccaaggccatgaagatgggtgactggaagacctgtcacagttttatcatcaatgagaagatgaatgggaaagtgtgggaccttttccccgaggctgacaaagtccgcaccatgctggttaggaagatccaggaagagtcactgaggacctacctcttcacctacagcagtgtctacgactccatcagcatggagaccctgtcagacatgtttgagctggatctgcccactgtgcactccatcatcagcaaaatgatcattaatgaggagctgatggcctccctggaccagccaacgcagacagtggtgatgcaccgcaccgagcccactgcccagcagaacctggccctgcagctggccgagaagctgggcagcctggtggagaacaatgagcgagtgtttgaccacaaacaaggcacctacgggggctacttccgagaccagaaggacggctaccgcaaaaacgagggctacatgcgccgcggtggctaccgccagcagccatctcaaacggcctactgagctctccactctgtctcacgcctagactatccaaccttgaagtcctaagccacaccccaggcataaannnnnattaaagtgt

SEQ ID NO: 11746 - DNA, 691 bp, Macaca Fascicularis
  misc_feature (1)...(691): n = A,T,C or G
cggcatnncnnngacatcctccctcccacagtcacattctttcacaacctgactttcacagaaccttcaaaccagaaggaacctggttcagagagcatcttgcttcacagatggggaaatcatnnnnnnnnnnnnnnnnnnnnnnnnnnnnnnnnnnnnnnnnnnnnnnnnnnnnnnnnnnnnnnnnnnnacttcacaagaacggatggcattttgcattttacaaggatcacacgaaagcacnnnnnnnnnnnnnnnnnnnnnnnatcatgacattaaaggttgatgtgtaattcctgtggcactgccaacgcnnnnnnnnnnnnnnncctaatggctttccttctggcagccctctacaccctgcaccccgcaccgagagcactgctcaagctgcctgaggactgaaagttacagctactcctcccacgccatccccttgcacacaagctgttaagannnnnnnnnnnnnnnnnnnnnatgcagctgcttcaggggaggaaatgtgtggtcatccttcaaactgtcttcacaatacaannnnnnnnnnnnnnnnnnntccatattcaaacaggcnnnnnnnnnnnnnnnnnnnnnnnnnnnnnnnnnnntttagtactcatgaactttcaagaagttttttttaaaaagnnnggatcttgttaccctggcttgttttcttattagttta

SEQ ID NO: 11747 - DNA, 688 bp, Macaca Fascicularis
  misc_feature (1)...(688): n = A,T,C or G
cagagccgtccctatctatgcagttaacccaccncggctgnctcccncgctccactgcgcacggttgagttctggagtctgacccatcgcggggtggcgcgcaaaccttggaaggcagcagtgtttcctggtcctaccaactgggaggaagggnnnnnnnnnnnnnnnnnnnnnngannnnnnnnnnnnnnnntaactgttgcctcgggctgcgtgactgccccccctccagtctgctgtggagggaacccaggatcctgaaattctcctggccacaaggactccccacggacagaagagggtctccacctatggccctaggcctttgcgatcttgcttcacccaacgcgaccccacaatatttctgtgctgtctacaccatctagcatcccgacatccgcactcccttctagcacccccaacggaaaagccagagggaacaatcgcctcctggtggtggtacgaggtagcgcaccgtccggcccgggtcctgccagccaataacctcgcagcgtgtgacggtgtctccttgcaccccagcctcatctatgcagcaagagaccagggactttaccaaagtcacccttgcgggctgggccctccacgcatccccctccccacccccatggaacagaaagccatgatgtttttaagcagaaccagcgaaacccaagcccctccttcctct

SEQ ID NO: 11748 - DNA, 620 bp, Macaca Fascicularis
  misc_feature (1)...(620): n = A,T,C or G
catgggaaacctctgggggactggccacccccctgcnncatgngtannnnncagccccgcgtattgcaaccctgtgcccgtcatgcccagcaggctcttactctagcccagcccccagggagcagaccccaggtgctggccccgggggttttnnnnnnnnnntcagtcactgtgttacatcttcggtgctgggacccggctctccgtcttaggtcagcccaaggcttcccccacggtcactctgttcccgccctcttctgaggagctccaagcaaacaaggccannnnnnnnnnnnnnnnnnnnnnnnnnnnnnnnnnnnnnnnnnnnnnnnnnnnnnnnnnnnnnnnnngcgctgtcaacacgggagtggagaccaccacgccctccaaacagagcaacaacaagtatgcagccagcagctacctgannnnnnnnnctgaccagtggaagtcccacaagagatacagcnnnnnnnnnnnnnnngaagggagcactgtggagannnnnnnnnnnnnnnnagaatgttcataggttcccacccctaccccacccacgggggcnnnnnnnnnnnnnnnnnnnngggaggggtctctctctctccatcacaaggcatcaagcc

SEQ ID NO: 11749 - DNA, 669 bp, Macaca Fascicularis
  misc_feature (1)...(669): n = A,T,C or G
tgcaagatgaaatagaagaagccctaagaaggcatgacctccttactacccttgtcaggaaagagtatgaacataacaagagactgcaagacnnnnnnnnnnnnattcgtaggcaaaggttgacccaatcaaagataaaagaaaatcgacagcaaatcgttcgtgctcgaaaatattatgatnnnnnnnnnnnnnnnntgcatgcaaaaatgatgagaatgaggacccgggaagaaatgatatttaagaaactgtttgaagaaggtttaaacattcaaaagcaaagattacgagacctaagaaactatgccaaagaaaagcgagatgaacaaaggagacgccaccaggatgaactggactccatggagaactactataaggaccnnnnnnnnnnnnnnnnnnnnnnnnnnnnnnnggaacatcaagaacttaaagccagagagaaatctcaggcccagacattacataaggtgaagcgggagctgagatctaagatggagaaggaaattcaacagctgcaggacatgataacacagaatgatgatgatgttttcttccgggaactggaagctgagcgcttcagatctcggcttcagctggcttcctttcagtacagtaaaagtccctccctgtgaggccagacttgatcataggtgaaggttctggagg

SEQ ID NO: 11750 - DNA, 782 bp, Macaca Fascicularis
  misc_feature (1)...(782): n = A,T,C or G
aacattnnnntgnnncagcctataactactggtaaaacancttcacctcgtgctgctnnnnnnnnnnnnnnnnnnnnnnnnnnnnnnnnnnnnnngggaggnnnnnnnnnnnnnnnnnnaatgaatgatcttcactnnnnnnnnnnnnatacnnnnnnnnnnnnnnnnnnnnnnnnnnnnnnnnnnnnnnnnnnnnnnnnnnnnnnnnnnnnnnnnnnnnnnnnnnnnnnngatcatctttttctctttggaggatttaccactgataaannnnnnnnnnnnnnnnnnnnnnnnnnnnnnnnnagtaaaaatgaatggatannnnnnnnnnnnnnnnnnnnnnnnnnnnnnnnnnnnnnnnnnnnnnnnnnnnnnnnnnnnnnnnnnnnnnnnnnnnnnnnnnnnnnnnnnnnnnnnnnnnnncttgtccatcacagagctgcacacagtaatgaaatactannnnnnnnnnntcaaccaaaatctcttgtacggctaagcttagaagcagtcatttgctttaaagaaatgttagccaacnnnnnnnnnnnnnnnnnnaaacacttacttcacagtgttannnnnnnnnnnnnnnnnnnnnnnnnnnnnnnnnnnnnnnncttcataaataatgcnnnnnnnnnnnnnncatggnnnnnnnnnnnnnnnnnnnnnnnnnnnggcatcatttgtataattatatgcattgttgtagtttgcagcttttggttttnnnnnnnnnnnnnnnngccnagagaacctatttttgtgtctataaagtt

SEQ ID NO: 11751 - DNA, 1265 bp, Macaca Fascicularis
  misc_feature (1)...(1265): n = A,T,C or G
gcggaaactggacctnnctgatactaagtctattcgagcttttgctaagggcttcttagccgaggaaaagcacctccacannnngatcaacaatgcaggagtgatgatgtgtccctactcgaagacagcagatggctttgagatgcacataggagtcaaccacttgggtcacttcctcctgacccatctgctgctagagaaactaaaggaatcagccccatcacggatagtaaatgtgtcttcccttgcacatcacctgggaaggatccacttccataacctacagggcgagaaattctacaatgcaggcctggcctactgtcatagcaagctagccaacatcctattcacccaggaactggcccggaggctaaaaggctctggcgttacgacgtattctgtacaccctggcacagtccaatctgaactggttcggcactcatctttcatgagatggatgtggtggcttttctcctttttcatcaagactcctcagcagggagcccagaccagcctgcactgtgccttaacagaaggtcttgagattctaagtgggaatcatttcagtgactgtcatgtgacatgggtctctgcccaagctcgtaatgagacaatagcaaggcggctgtgggacgtcagctgtgacctgctgggcctcccaatggactaacaggcagtggcagttggacccaagagaagactgcggcagactacacagtacttcttgtcaaaatgattctccttcaaggtttccaaaacctttagcacaaagagagcaaaatgtctatcatgtnnnnnnnnnnnnnnnttctgnnnnnnnnnnnnnnnntagagatatcataataggataagaagaccctcatatgacctgcatagctcgtattctccttctgaaagaaactactacctaggagaatctaaactatagcagggatgatttatacgaatttgaactagcttttctattcacaattcagtttctcccaaccaaccagtcttcacttcaaaagggcnnnnnnnnnnnnnnnnnnaaactccatgagctcaggagtagggcttgaccaggcatggtggatcaccggaggtcagtagttcaagaccagcctggccaacatggtgaaaccccacctctgctaaaaatacaaaattagctgggcatggtggcacacacctgtaatcccagctactcaggaggctgaggcaggagaatcgctcaaacccgaagggtgtaaagtaagctgagattgcatcactgcactagagcc

SEQ ID NO: 11752 - DNA, 695 bp, Macaca Fascicularis
  misc_feature (1)...(695): n = A,T,C or G
cacnnnacctggctgcagctccagcnnnnnnctggagaggtttgctgagctggttgnnnnnnnnnnnnnncaagactggtccacagagtgtatgaccacaagcagccatcaaggtactgaggacagnnnnnnnnnnnnnnnnnnnnnnnnnnnnnnnnnnnnnnnnnnnnnctnnnnnnnnnnnnnnnnnnnnnnnnnnnnnnnnnnnnnnnnnnnnnnnnnnnnnnnnnnnnnnnnnnnnnnnnnnnnnnnnnnnnnnntttagggacccccaacctcaggcaattcctacctcttcacatgccccttccccagcttgccgtaaaacttgcctaagttttgttttgtttttcagtgttaatgtaaaggggcagcagtcccaaatataatcagagataaaacttaggtcaaatttcatagagttgccgtaaactatatgactggccacacaggaccttttgtatttaaggattctgagattttgcttgagcaggattagataaggctgttctttaaatgtctgaaatggaacagattttaaaaaaaagaatgcacaatctagggtaggagcaaggaaggaaagatgtgaataggctgatgggcaaaaaaccaatttnnnnnnnnnnnnnnnccttctctcaaggagaggcaaagaaaggagatacagtggagacatctggaaagttttctccact

SEQ ID NO: 11753 - DNA, 526 bp, Macaca Fascicularis
ggcttcttggagttttgctaccagccgaggctgtgcgggcagaatgggtcagcgtcccgtcgtgagagaagctgtgtttgtgggacgaagaccaggcacccgccagagaggggaaggtaccaggctgcgtcctctcaggctgcgcattgttacaggacactcactgggggcctgggcccttgccagcagcaggtgcggccaccacggcccaaggccaccttcactcacagtctgagttcttgtccgcctgtcacgccctcaccaccctccccttccagccaccaccctttccgttccgctcgggccttcccacaagcgtcctgtgactctgggagatggtgacgtcacatcactaaggagccgactccgtggagtaacgcgcccggcaccgacgcatatcgggcctcccctccctctgggggctttggccgcgagattcccgttgacacctttgttttgtgtgcttttaaattcaggttaaatgttgcaataatctgatgcggaagactcagcttctcaagggaga

SEQ ID NO: 11754 - DNA, 774 bp, Macaca Fascicularis
  misc_feature (1)...(774): n = A,T,C or G
agcagccacagnnnnatcacggccaacgtgcnnnaccagacggtgatgcgaaacgtcgacctggacagcttcactactcacaggagacaccgggggctgatccgtgcctacgagtttgcagtggannnnnnnnnnnnnnnnagccctctccctgtctgccgttcatcctgtgacgccatggccactcactactatgacctcgcactggcctttccctataaccacgtttagggacgtgcctcaggagcaaggagaaaaatnnnnnnnnnnnnnnnnnnnnnnnnnnnnnnnnnnnnnnnnnnnnnnnnnnnnnnaaatgtttaggggaagaaggcggcccagggtgctgnnnnnnncggcatgtgtctccctgacccctgcacttccccggnnnnnnnnnnnnnnnnnnnnnnnnnnnnnnncaagtcgcacatgctgccaacacaaacgtagcctccttccccacccagccgaccactctggcctcagctccctcaggacacctcagggatctcgctgtgaggtcccatatggtccctgctcaaccagcttctctgtgttcgccttcccagctccagccctgcaggccgtctttccagtctccagtcccttccctcttttcctccgagggcctttggatgtgcttgtccctggcctccaaggcaataacctccatgtccttttccctgtatttacttagggtgctcttctgtgacacttgccaccaccaccttccagtnnnnnnnnnnnagagcagtactttncttcacagct

SEQ ID NO: 11755 - DNA, 738 bp, Macaca Fascicularis
  misc_feature (1)...(738): n = A,T,C or G
gagcaactgcaaataaaactgcgactcttctggaaagaatcaacgttgtcgtccacctgctgggccagcttgccgccggcagtgcagcgagcagcagcaccgttcagtgactgcacagagccgtgtcccagacacgctgtcnnnnnnnnnnnnnnnnnnncggtttgttcattcggtgctttgtttcattaaataatnnnnnnnnnnnnnnntaaaacaggtatatcagtggaaacacagagttattttaagtgacagacaaattacggttgagttctgtggcttcttcacttgaagtgctaacatcagaatcaaacttaaagcttccactatttgtttctttaagaagcacatagtacctcagtattcacagacttgctgtgatgcagctacactttcctatttttgaagtatgtcaagctacatggtctaagatatggttattttggataaaatgttactttggtcaagagaacttttatccaaatgacattacaggttcaagtgggttaaggagacttcctgtgcatctacagtgtttccttttaaattgcccaggaaaaaggtgtgnnnnnnnnnnnnnnnnnngcaggatttttcaaagactagctgttgtgcaattgctgtatttaatgcatgttctgaaaggattcacttttgactttatatgacagtcgatcaagagcaggtactaccccttgttttcattttaaacttgaaactgtgaataaggtaaga

SEQ ID NO: 11756 - DNA, 1073 bp, Macaca Fascicularis
  misc_feature (1)...(1073): n = A,T,C or G
gccaaaccccgnnnnnnaaagaagttttaaaatcaaagatgggaaaatcggagaaaattgcccttccccacnnncagcttgttcatggtatacacttgtatgagcaaccaaagataaacagacagaaaagcaaatataacttgccactaaccaagatcacctctgcaaaaagaaatgaaaacagcttttggcaggattctgtttcatctgacagaattcagaagcaggaaaaaaagccttttaaaaataccgagaacattaaaaattcgcatttgaagaaatcagcatttctaactgaagtgagccaaaaggaaaattatgctggggcaaagtttagtgatccaccttctcctagtgttcttccaaagccacctagtcactggatgggaagcactgttgaaaattccaaccaaaacagggagctgatggcagtacacttaaaaacgctcctgaaagttcaaacttagatttcagtatgtgtgtaaaacataatttttcccatacccctggactcttgagaaaattggtacagaaatggaaatttgccttgttgcaacatacaattgcaaaagatgagtttaaaaaattacatacaaacagcttgtattatattttatattttgtaaatactgtataccatgtattatgtgtatattgttcatacttgagaggtatattatagttttgttatgaaagtatgtattttgccctgcccacattgcaggtgttttgtatatatacaatggagaaattttaagtgtgtgctaaggcacatggaagaccgattttatttgcacaaggtaatgagatttnnntcaagaaacagctgtcaaatctcaaggtgaagatctaaatgtgaacatgtttaataatgcaatactgaagtttaaatctgtggcacaatcaatgtaagcatggggtttgtttctctaaattgatttctaatttgaaattactgaacaactcctattcccatttttgccaaannnnnnatttcatggtggtatatatccattccagcttaatgcctctaattttaatgccaacaaaattggttgtaatcaaatttaaaa

SEQ ID NO: 11757 - DNA, 679 bp, Macaca Fascicularis
  misc_feature (1)...(679): n = A,T,C or G
ttctccccctnnnntnggtcttctagagctctctctgcccctcaggtcctggcctttgggtccttgtcaaccagaggtctagggaaccacaacccttactgtcctgagtgccggcaaaggctaagtgatagtgacctcatcgatgttgggtcctgtggggtaccagtttaggttcctaagtaacagtgacccttttcgtcctggagcccgagtggaccagtcggaagcctaagtgacgatgaccctcgcatgtcctaggtccctgggtggacccatcaggaccccaagtgatagtgacccagtggtcttttagatcctcagtagaacaatccagaagcctaagagacagtggccccttgataatctgggtctcacgggaccagccaggggtccaggtttcagtccgtaaataacagtggtccatgtcctgaagacacccctccgctacaaagactgtgacgctctggggcttctgtggccaagccccaccctttcctggtcagggtacccgtacagtgttaatggccacagctcaaagggggctttcatgtctccctgtgcagtcagtgtttgcagtaccacctctctcccgtgcccactctcagctatttatttatgtgtgccagtgacggtgggtggggactgggccttccccgccacctccacccctgttgtgacc

SEQ ID NO: 11758 - DNA, 731 bp, Macaca Fascicularis
  misc_feature (1)...(731): n = A,T,C or G
gccaaatgggattagtgctgaggtcatggacacttacgttaaaagctgtgnnnnnnnnnnnnngatcacgtatatacttggagttggagannnnnnnnnnnnnnnnnttttgctaacaaaaacaggcaaactcttccacatagactttggatatattttgggtcgggatccgaagcctcttcctccnnnnnnnnnnctgaataaagaaatggtagaaggaatggggggcacacagagtgagcagtaccaagagtnnnnnnnnnnnnnnnnnnnnnnnnncctccacnnnnnnnnnnnnnnnaatctgattttgaacttgttttccttgatggnnnnnnnnnnnnnnncagatattgcacttgaaccagataaaactgtgaaaaaggttcaggataaattccgtttagacctgtcggatgaagaggctgtgcattacatgcagagtctgatcgatgagagtgtccatgctctttttgnnnnnnnnnnnnnacagattcacaagtttgcccagtactggagaaaatgtaactgggagtgacnnnnnnnnnnnnnnnnnnnnnataagaaaaccacgttaggggcaannnnnnnnnnnggagacnnnnnnnnnnnnnnnnaaggaacagaaaacttaatcgtcaagttatcatattttccagatattacatggtacctgaattctacttccttggatgtcattgcttagatatagtcctgaagggtttgttgtg

SEQ ID NO: 11759 - DNA, 737 bp, Macaca Fascicularis
  misc_feature (1)...(737): n = A,T,C or G
agnnnnnnnnnnnagctgnnnaagccggggcgtgacttcttgctgcaccccgnnnntccagaggtcctccgtagggtctttcttgggatagtgttctgctcatgcttttctgtcctgggcatgggtccagggcctaacaccccctccccgcccctgtggccctggccactaaagcttcagactcaagcaccctttctgtttccccccagcagccccccgaaacctccagcctccctgtctccagctgcctgggcctagaagggctttggttccttctctgggtctgattttctcactgaactccactgaccaactgccctaagcccccaggtctccagggcccaggttcaagacccaaccccccgaaatccaaagcttctcttgaaaagttcagggaccgtccaggggagatggggaggagatatggagtcagtcactttctgccggagacgccgacttctctctccaggatgcttagttggctttgcccacccctcactccccggggagctctggggacagctccctcacacccctgtcccacccacacagctgccctagctgaccctgagaagtgctcttggctgacccctctggtgtgtggtgaggggctttctcttccccttcctgtttcagacccccccatctcccgcacatggtgtggggggctgggggaggtcccnnnnnnnnnnnnnnnnnnnnnnnnnnnnnntttttggttattggtttttttttca

SEQ ID NO: 11760 - DNA, 746 bp, Macaca Fascicularis
  misc_feature (1)...(746): n = A,T,C or G
gcagccatggcnnngcnnnccgcctcggaggctgcgaccgccatcagccnnnaggccatccagatcctgggcggcatgggctatgtgacagagatgccagcagaacggcactaccgcgatgcccgtatcactgagatctacgagggcaccagnnnnnnnnnnnnnnnnnnnntcgccgggcacctgctcaggagctaccggagctgagcccgtggcgggctgcccgaggactgtgggaaggggtgggagccggggcctccaccctgaccccggctcagagactgggcggcccggcgggggctccctggggccccggccccctggactggccggatgggctcagtgctgccacccggatcagaccgcaagggagtgaggccctccgaccactggcagctctgcctctgggcctttctgcctcctcaccactgtgcctcatgttcctcacctgagtggccctggcctcctgggggcagggttgtggggggagctgagtgacactcagggacacctcagttgtgctcccgggggccctggtgccccggcatgaagacccagtgggacaggcccttggtggggtctggcttttccttgaggtcagaggtcaggagcagggctggggtcagaatgacgaggcccagggtcctggcgttgggcaggcggtggggctgggccacggaggcccctcagcccttcgtaaagtctgctgaaggcaggggtggtgattcatgtcgtgtgactgaccg

SEQ ID NO: 11761 - DNA, 707 bp, Macaca Fascicularis
aaaaatccagatgaattctactacaaaatgactcgggttaaactccaggatggagtacatattattaaggagactaaggaagaagtaaccccagaacaactaaagctgatgagaactcaggacgtcaaatatatagaaatgaagagggttgcagaagctaagaaaattgaaagactaaaatcagagctccatctgctggatttccaggggaagcaacagaacaagcatgtgttcttttttgacaccaaaaaggaagttgaacagtttgacgttgcaactcacctgcaaacagccccggagctagtcgacagagtctttaataggcccaggatagagaccttgcagaaagaaaaagtgaaaggagttaccaatcagactggacttaagcgaatagctaaagaaaggcaaaagcaatataactgcctgacacagcggattgaacgagagaagaaattgttcgttattgctcagaaaattcaaacacgcaaagatcttatggataaaactcagaaagtgaaggtgaagaaagaaacggtgaactcgccagctatttataaatttcagagtcgtcgaaaacgttgacatgttatagataagcctcgtcattctgcatcaaaaatctgttgtctttttctagtaacttcaaattccattagtccaaatggcatggtttgtaaccataactaaattgtcagtctgacatttaa

SEQ ID NO: 11762 - DNA, 750 bp, Macaca Fascicularis
  misc_feature (1)...(750): n = A,T,C or G
gagnnaatttcnnnnnacgcccgtcatgagccaggaggagntggagcactggttctacccccagnnnnnnntcatcgacnnnnnnnnnnnnnnnnnnnnnnnnnnnngaggtgacggatttcctgagcttttatacgctgccctccaccatcatgaaccatccaacccacaagagtctcaaagctgcttattctttctacaatgttcacacccagacccctcttctagacctcatgagcgacgcccttgtcctcgccaaaatgaaagggtttgatgtgttcaatgcactggatctcatggannnnnnnnnnnnnnnngagaagctcaagtttggcataggggacggcaacctgcagtattacctttacaattggaaatgccccagcatgggggcagagaaggttggannnnnnnnnnnnnnnnnagtcaccactgagattctggataaagccactgaaaagtcgaaccaggaaatggaaccccaccactgttggtccaattttcacacacgtgagaatccctggcaaagggagcagaactgnnnnnnnnnnnnnnnnnnnnnnnnnnnnnnnnnnnnnnnnnnnnnnnnnnnngggctgcgtgacgtcacctccggtcgtgtctctggtctccgtgnnnnnnnnnnnnnnnnnnnnnnnnnnnnnnnnnatcaagggaatgtaactgctgaaaactagctcgtgattggcatataatggagttaacgggtgaataataaaagtatatata

SEQ ID NO: 11763 - DNA, 778 bp, Macaca Fascicularis
  misc_feature (1)...(778): n = A,T,C or G
aaagaggaagagattngnnnnacnnnnnnnnnnnnnnnnnnnnnnnnnnagtggaagagcagccattttgaaagaagagacaacatggatgacaattttctcgagggtgaagaggaaaatgagctgaccttgaatnnnnnnnnnnnnntcccagaatnnnnnnnnnnnnnnngggagaaaaagcccttctcggaggatgtgaactgggggtatgagaagagaaacctcgccagggtccccaagctggacctgnnnnnnnnnnnnnnnnnnnnnnnnnnnnnnnnnnnnnnnnnnnnnnacaggaagaagtcagccgagtttccagacttttatgattctgaggagccgataagcacccgccaggagacagaaaatgaaaaggacaggnnnnnnnnnnnnnnnctgacagaggacgagaaaaaagaacttgaaaacttggctgcaatggatttggaactacagaagatagctgagaaattcagccaaaggggctgactgtnnnnnnnnnnnnnnnnnctgttaagaagcagcccnnnnnnnnnnnnnnnnnnnnnnnnnnnnnnnnnnnnnnnnnnnnnnnnnnnnnnnnnnnnnnnnnnnnnnnnnnnnnnnnnnnnnnnnnnnnnnnnnnnnnnnnnnnnnnnnnnnnnnnnnnnnnnnnnnnnnnnnnnnnnnnnnnnnnnnnnnntagcatattcttttccgcaaaatagacatattaacatgcttgtgacaatgactgtgctactgtcttggaaaaatgtttgtctcagtgcaa

SEQ ID NO: 11764 - DNA, 820 bp, Macaca Fascicularis
  misc_feature (1)...(820): n = A,T,C or G
cccgnnnnnnnnnnnnnnnnagggagcagtacgagcnnanggaggataagagagaccggcatgctgaggcctgttcttcagcaagactgaggagctgaacaaagaggtggcctccaacacagaaatgatccagaccagcaagacggagatcacagacctgagacgcacgatgcaggagctggagatagagcttcagtcccagctcagcatgaaagctggnnnnnnnnnnnnnnnnnnnnnnnnngagtgccgctatgccannnnnnnnnnnnnnnnnnnnnnnnnnnnnnnnnnnnnnnnnnnnnnnnnnnnnnnnnnnnnnnnnnnnnnnnnnnnnnnnnnncaggagtacaannnnnnnnnnnnnnnnaagacgcggctggagcaggagattgccacctacnnnnnnnnnnnnnngggccaggatgccaagatggctgacattggcatcagggaagcctcttccggaggtggcggtagcagcagcaatttccgcatcaacgtagaggagtcagtggatggaaaggtggtnnnnnnnnnnnnnnnnnnnatctgagtgcccattgcaggagaaacatcccttgccactccccactctcatcaggccaagtggaggactggccagggggcctgaacgtgcaaactccagtccccgccttcagagagctgaaaagggtccctcggtcttttatttcagggctttgcatgcgctctgttccccctctacctctccccgccttctttagagcaaggaggtgcagaagcagctgcgttgtgtaacaagctcatttgtatggtgtctgttcatgcaataaagaat

SEQ ID NO: 11765 - DNA, 703 bp, Macaca Fascicularis
  misc_feature (1)...(703): n = A,T,C or G
gcagatggccacccagtcaggaaagaatgtatattgacggctcaccaaggagtctgggaacagcattgtgctcttgtttaaaatgatcagcaccagggcggccagcgggctctacagagcgataacagagacgcacgcgtnnnnnnnnnnnnnnnnnnnnnnnnnnnnnnnnnngatgcagtatagccgtgacttgaagggccacttggcatctctgtttctgaatgaaaacattaaccttggcaagaaatatgtctttgatattaaaagaacatcaaaggaggtgtatgaccatgccaggagggctctgtacaatgctggcgttgtggacctcgtttcaagaagcaaccagagcccttcacactcgcctctgaagtcctcagaaagnnnnnnnnnnnnnnnnnnnnntgagggcctcagctgccagcagacccgggcgctgcaggagaagctgcgcaannnnnnnnnnnnnnnnnnntgcatgnnnnnnnnnnnnnnnnnnnnnnnnnnnnnnnnnnnnnnnnnnnnnnnnnnnnnnnnnnnnnnnnnntgcgccacccagctacagtcatgtcccgtctgcaggtcgcatgtggagcacgtccagcacgtctatctgccaacccacaccagtcttctcaatctgactgtaatctaatctgttgtgctttnnnnnnnnnnnnnnnnnnnnnnnnnnnnnnac

SEQ ID NO: 11766 - DNA, 712 bp, Macaca Fascicularis
  misc_feature (1)...(712): n = A,T,C or G
gaaagggaatgtgtttcatcccccactgcagcaggcacaccaaataaggaaactgctggcttgaaggtaggggtttctagccgcatcaatgaatggctaactaaaaccccagatggaaacaagtcacctgctcccaaaccttctgacttgagaccaggagatgtatccagcaagcggaacctctgggaaaagcaatctgtggataaggtcacttcccccactaaggtttgagacagttcaagaaagaacccaagctcaagacgcgggacgagctcagttgtagannnnnnnnnnnnnnnnnnnnnnnnnnnnnnnnnnntactaaattgggttcattttcttttatttttcaatatcccaataaacccatgtatattatcactatatttaataatcacagtctagagatgttcatggtaaaagtactgcctttgcacaggagcctgtttctaaagaaacccatgctgtgaaatagagacttttctactgatcatcgtaactctgtgtctgaacagtgataccaaccacatctgaagtcaacagaagatccaagtttaaaattgcctgcggaatgtgtgcagtatctagaaaaatgaaccgtagtttttgtttttttaaatacagaagtcatgttgtttctgcactttataataaagcatggaagaaattatcttagtaggcaattgtaacacttttgaaagtaacccattcg

SEQ ID NO: 11767 - DNA, 867 bp, Macaca Fascicularis
  misc_feature (1)...(867): n = A,T,C or G
tcnnnnnnccaatgaaaggacagagtctgaggtaccccccagaccatcctcccccgaggtcgccaggagccccacggagacagctgccccggtggaggatatggctcggaggaccaagcgcccagcaccagcccggcccaccatgccgcccccccaggtctccggctcccgttcctcccctccagccccacccctgccccctggctctggaagccctgggaccccccgagccctgccccgacgtctggttggcagcagcctccgagcccccacagtgccacccccattaccccccacaccccctcagcctgcccggcgccaaagccggcgttcaccagcctcccccagcccggcctccccaggtccagcctcccccagcccagcctccccaggtccagcctcccccagcccagtctctctgagtacccctgcacaggtggacctgggggctgccacagcagagggaggagcccctgaggctgtcagtggggtccccactaccccagctatcccccctcagccccgccccaggagccttgcctcagagactaactgagtggctggtttcttcctaagcagcccccagcatcccctccctccacacctggccctcccaggacagctctcaccccccacaaaggggcgtgggcctccagcctttgcccacaagtgcctcagtgcccactgggtcggcccccatggccaggagggctcaggacagtcccccacttcctgaccttttcctcatccaccctgggcttggggagcccctgctggactctccactctccggcaggtcctcggggagccaccggaaggaaggagaagcttccctgctcctaggggaccgattcttctcttgccaac

SEQ ID NO: 11768 - DNA, 749 bp, Macaca Fascicularis
  misc_feature (1)...(749): n = A,T,C or G
agctccggcaagagctaccctgctcccgccgagttccgcgctcagctcgaccccgccttcatcaagacctatgaggagatcagggacacacccctcccggcgcttccaggtggtggactcccgagccgccggcagattccgcggcaaagagcccgagccctcgaactgcattgaacctggccacatcccgggtaccgtgaacatccccttcacagacttcctgacccaggaggggctggagaagnnnnnnnnnnnnnnnnnnnnnnnnnnnnnnnnnnnnnnnnnnnnnnnnnnnnnnnnnnnnnnnnncacgtgtggctctggcgtcacggcctgccacgtggcactaggggcatacctttgcggcaagcccgacgtgcccatctatgatggctcctgggtggagtggtacatgcgtgcccggcccgaagatatcatctcagagggccgggggaagagccactgaggctgggcaggacgcaggcaagctcgagtgatgctnnnnnnnnnnnnnnnnnnnnnnnnnnnnnnnnnnnnnnnnnnnnnngagagagtgtttnnnnnnnnnnnnnnnnnnacttttgggtgannnnnnnnnnnnnnnnaatcctgttgacttgttggctgcccgtgggggtgggaggaaaggcagaggcaagccctggaggagggaggctgcaactctgagctgcccacttggtgctgaggtggggccccgcctcctttctgttttatttttgaagaaataa

SEQ ID NO: 11769 - DNA, 704 bp, Macaca Fascicularis
  misc_feature (1)...(704): n = A,T,C or G
tgacgttcaggtaatggtggtatctgggtnnctagaatnnnnnnggaaagaaagatgccatgnggatagggtttctcactagaacagttctggaaaatagcacaagttatgaggaagccaagaatatattgaccaagaccaagatactggccccagcctactttatcctgggaggcaaccagtctggggagggttgtgtgattacacgagacagaaaggaatcattggatgtatatgaactcgatgctaagcagggtagatggtatgtggtacaaacaaattatgaccgttggaaaaatcccttcttccctgatgatcgcagaacgnnnnnnnnnnnntgtctgaaccgcaccacccaagagaatatctcatttgaaaacatgtatgatgtcctgtcaacaaaacctgtcctcaacaagctgaccgtgttcacaaccttgatagatgttaccaaagatcaatttgaaacttacatgcgggactgccctgacccttgtataggttggtgagcacacgtctggtctacagaacgcggcctctgaaacatgaagacaccacctccatgtgactggatactgcagctctctgatcctccgaagactaagactcggggcaggttctctttgagtcacaagcttgtctcctgcagctgttgacaactgacagactttttttttttttttttgccctatcagttgattttt

SEQ ID NO: 11770 - DNA, 756 bp, Macaca Fascicularis
  misc_feature (1)...(756): n = A,T,C or G
taatagcatgatcatttctagcagaggctgagttaggacagcagcttccattgagaagtctttctgtgtcgtgaatagcattttaatgacctcttggctcacataagcaaacaacatagggacgtatctgctatgaaaatccacaaatttttcagatagtgccctaaaaacaattttatatgcctcactggttgttattcttaggttgtttccacacttgactttatcattgtttactactagtaaaaagcannnnnnnnnnnnnnnnnntaattttccactaaaaatataatgaaatgatgttaagctttttgaaaagtttaggttaaacctactgttgttagattaatgtatttgttgcttccctttatctggaatgtggcattagcttttttattttaaccctctttaattcttattcaattccatgacttaaggtttgagagctnnnnnnnnnnnnnnnnngataacagactgacagttttgcataattataatcggcattgtacatagaaaggatatggctaccttttgttaaatctgcactttctaaatatcaaaaaagggaaatgaagtataaatcaatttttgtataatctgtttgaaacatgagttttatttgcttaatattagggctttgccccttttctgtaagtctcttgggatcctgtgtnnnnnnnnnnnnnnnnnnnnnncaaacagnnnnnnnnnnnnnnnnnnnnnngcnnnnnnnnnnnnnncatattctacttaaca

SEQ ID NO: 11771 - DNA, 717 bp, Macaca Fascicularis
  misc_feature (1)...(717): n = A,T,C or G
atgacccaccccagccccctnaacccccttcatggacagatcccccacagcctggggcagaagaggcgtcgagggcgccagaagtggcggcagcagcagccgcagcagccaaagagaggcaagagaaggagaaagcgggcggtggagggnnnnnnnnnnnnnnnnnccccgtggatgagatggtnccnntggttgaattggaagaggccatagccccaggctcggaggcccagggcgctgggtctggtggggactcgggggtgcccccaatggtgcagcgnnnnnnnnnnccactagggggtgatggagaggaagggggccaccccagggccattaacaaccagtactccttcgtatgagccgaccccacccactccaccctttttaagccccctcccagccctgctcgtgagattgggctgagtagggacagaggaggccgaaatccctcccccgtgcttcctgacccttgtcggccaaggnnnnnnnnnnnnnnnnnnnnnnnnnnncaagagaggctcccgtcacacactacaggtcccctccccagggcaggggatttgggctctatgagctccttgaggggctcttctggtcagccccaccctgggggccatttccccattaaccacccccagcccgaggcagggtgagggggaagggctgtcagttatattaaggtggttgttgttgttgttttaaacaaaatngnaagca

SEQ ID NO: 11772 - DNA, 692 bp, Macaca Fascicularis
  misc_feature (1)...(692): n = A,T,C or G
tctcattgcacagccgtatacaaagggcttcctgctcaagtgatgttttggtaagaactgctctgagttccactgtggattacagtttgcatggactactactgtaaattatagcttgtttggagggatatcagtcattattttattcctgacaggtagactacaattcgaacttagggttccctcagtctttagccattactgcttatttcttgcccccaagtcacaaaaaacttgtaagctgttgggttaaagcagaggccgcctgtcagatctaccctacccttatttggttacatggcacctgagagtttcactcagaccagggatcttccttaggagggtcaaaaagcagatcagaccatgcagaagtagggcgaaccagctgcacggaccaggttcccgcagaacattgctagctagtgaggcataatttgctcaaagtatagaagcagcccacctatgnnnnnnnnnnnnnnnnntcaggacagatataaaatcacttcttccaacgaagcctaagtgaaaaatctatttgtaaatggaccacaactccggggtgttgtttctgtgctgtgacttcctaactattgctaaagaactactgtttcgttggtgatggagtaaaattacattcagctccttcttgtcatataagaggaatttggagggtgttgcttaaaattttattc

SEQ ID NO: 11773 - DNA, 616 bp, Macaca Fascicularis
  misc_feature (1)...(616): n = A,T,C or G
attttttttgtgaccccacagagtctcaaatttttacttcactaccnnnnnnnnnnnnnnnnnnnnnnnnngctccatatttgccagtggaggaagtgggcatcagagtaaagaatacttcgtatgtttacacatttgcatagactacacacnnnnnnnnnnnnnnnnnnnnnnnnnnnnnatttgttcccaaaaataataatgttgannnnnnnnnnnnnnnnnnnnnnnatacagaaacacaaaacacttcaatcgtaaacttgtttcttcagaagccaaactaatttgcagaatnnnnnnnnnnnnnnnntaatgtttcctcaagataggttttagtgcaagctagtattctgtgtgtccgtagaaatggttcaacacctgcagctggtgaattaggaattgtatttgttgccttttttatattagatgaggtgcaaacattttaatgctagtcagtatgcaccatcacaggaaagttagatcccattagcacttgaaactacactttgggaaacttaggctaagttaatttggatttgttatttgattcacctactgaccttttcttttgtttgaaatnnnnnnnnnnnnnnngagctaggtgtcgtgcgta

SEQ ID NO: 11774 - DNA, 716 bp, Macaca Fascicularis
  misc_feature (1)...(716): n = A,T,C or G
cactaagaaagaaggagatgaatggaagaaagaaaagggagagaaggaaaaaaggatggaagaaaaaaggatggaagaaagaagcattgaaaacaaagacattcttcccccttcttggatttttaaacnnnnnnnnnnnnnnnnngctgctgtagaaaggaaatagactttgtatgaactcttcagttgaaaagtatacgtggtttggatgtgtgcgttaattcagttttagaaattaataccactacccatgaattatatggcctgacaatgtgagttaggtgtactgtactaaagaacagtattccgcaaacatgagtggtaacaagagttccatcccaggaggccaaannnnnnnnnnnnnnnnnnnnnnnnnnnnnnnnnnnnnnnnnnnnnnnnnnnnnnnnnnnnnnnnnnnnnnnnnnnnnaagaaaaatccggaaaacaaattttgtttgatttttgttttttgtttttatcttgtctgtagaggtgtttggtataggttttcaaggccactttttatacatttctagatctagattttcaacttcttccactgagggaagtatacacatttggttttgctgtgtgtctatgtgaggtttaactgtacaggtgatccttttacaacaagcctcattgtttgcagtatagctgttagtggaactatccaaaatataaatacagcagcgtgcactgtatttgatgtgagg

SEQ ID NO: 11775 - DNA, 682 bp, Macaca Fascicularis
  misc_feature (1)...(682): n = A,T,C or G
aagtggactggccacatccctggggatgtggtgcgggacatggcccagatcgcccccatgctggctcagctcggctatgacccttatgcaaaccccccccaactacggcaaccctgaccccattgtcgtcaataacacacagcgggtcttgaaaggggactataaaacaccagccaatctgaaaggatatnnnnnnnnnnnnnnnaacagcacctcctcccacttaggaagctcgtgatttccagatctctgcaaatgaacttcattgccaagaagagaagaaactgcatttaagtggaaatcagacctctaatccaagcatattgcttgctattaatcgccaaaacaggactgnnnnnnnnnnnnnnnnnnnnnnnnnnnnnnnnnnnnnnaatcattgaaaatgtaccttgaaactctctatctttggacacgccagggtagagaacgaagggtatggaagtagtccggcttttgaaacttaggtattttatatttttcccctcaagaacttttttttaagannnnnnnnnnnnnnnnnnnnnnnnnnnnnnnnnnnnnttggtggctttgtttgctgggacaaggcccacaaactgtgcctctcctattgacccttactttgaattcaaagaatctatttaagaatttaatatatgaggctttctttgattcctcctca

SEQ ID NO: 11776 - DNA, 756 bp, Macaca Fascicularis
  misc_feature (1)...(756): n = A,T,C or G
ttcaattgctatctttgaaaggcaccagtatgtgttttagattgatttccctgnntcagggaaatcacagacggtagnnncagttctgatggtataagcaaaacaaataaaacatgtttataaaagttgtatcttgaaacactggtgttcaacagctnnnnnnnnnnnnnnnnnncccccataccacgttagtgtcacaaattttatggttatctccagcaacatttctctagtacttgcacttattatcttttgtctaatttaaccttacctgaattctccttttctcctggaggcatttatattcaaagtgataattcctttccttagatgcatagggagagtctctaaatttgatggaaatggacacttgagtagtgacttagccttatgtactctgttggannnnnnnnnnnnnnnnnnnnnnnnnnnnnnnnnnnnntnnnnnnnnnnnnnnnnttattatctcattctgacttcatgnnnnnnnnnnnncacctttaagcaaaggctactaagttaatggtgttttctgtgcagaaattaaattttattttcagcatttagcccaggaatttttccagtaggtgctcagctatttaaaaacaaaactattctcaaacattcatcattagannnnnnnnnnnnnnnctggttttgtaacctaccaaaatggataggctgttgaacattccacattcaaaagttttgtagggtggtgggaaatggggaatcttcaatgtttatttaaaataa

SEQ ID NO: 11777 - DNA, 703 bp, Macaca Fascicularis
  misc_feature (1)...(703): n = A,T,C or G
aacagaaaagaggcctcaggatgccaagaacactatgatccttgagatctgtaccaggtaccggggagaccaggatgccactatgtctatactggacatatccatgatgactggcttcgttccagacacagatgacctcaagcaggctccacctttccccagctggcaaacggcgttgacagatacatctccaagtatgagctggacaaagccttctccgataggaacaccctcatcatctacctggacaagcttttgtctctgggtcacacgagccctaggctagaggagacaaggtctgtgttgctgggcgacgggaaggagcttgtaaaataagggggtcaacccagcatcttctataaacatctcatcttctgaccattgacctcctccagcttcttatcagagtcttaaccaatgaaaaagagccccttcggatttttttttttccagttctttgtagacagaaaggtcttgccttgttcccttgcccaatcctgacctttgtttctttttttgcatctatttctctcttctgttgttttctttctttcaagnnnnnnnnnnnnnnnnnnnnnnnnnnnnnnnnnnnnnnnnnnnnnnnnnnnnnnnnnnnnnnnnnnnnnnnnnnnnnnnnnnnnnnnnnnnnnnnnnnnnnnnnnnnnnnnnnnnnnattgcaggcctgcgacactgcacccagct

SEQ ID NO: 11778 - DNA, 713 bp, Macaca Fascicularis
ggtactaaaggagctgctggggcagggaattgatttatgagaagatcctgaagctcacggctgacaccaagtttgagtcaggcgatgtgaaggccacagtggcagtgctgagtttcatcctctccagtgcggccaagcacagtgtcgatggcgaatctttgtccagtgaactgcagcagctggggctgcccaaagagcacgcggccagcctgtgccgctgttatgaggagaagcaaagccccttgcagaagcacttgcgggtctgcagcctacgcatgaataggttggcaggcgtgggctggcgggtggactacaccctgagctccagcttgctgcagtccgtggaagagcccatggtgcacctgcggctggaggtggcagctgccccagggaccccagcgcagcctgttgccatgtccctctcagcagacaagttccaggtcctcctgacagaactgaagcaggcccagaccctaatgagctccctgggctgaggagaagggcattccaggcctgtgtgaagccgccctgcctgtatggaatcactccctctgaactgctcttcaggaggcagccctagttctaggatgctgaggtcctggcctggactctggcctcccagatccccagctgcctcacttctctcttgagaactcggctcagggctcctgaggacgtttcccagacattaccttcccttccctcgaaaggca

SEQ ID NO: 11779 - DNA, 1144 bp, Macaca Fascicularis
  misc_feature (1)...(1144): n = A,T,C or G
gtcagtggagaaggtgatccaggtgccccccaagaaagnnnnnggctggctnnnnnnnnnaatgccaggcntgatcaccgacatcctgctgtccctggatgaccgctnnnnnnnnnnnnnnnnnnnnnnnnnnnnngacctgaggcagtatgacgtctctgatccacagagaccccgcctcacaggacagctcttcctcgggggcagcatcgttaagggaggccccgtgcaagtgctagaggaccaggaactaaagtcccagccagagcccctggtggtcaagggaaaacgggtggctggaggccctcagatgatccagctcagcctggacgggaagcgcctctacgtgaccacgtcgctgtacagcgcctgggacaagcagttttaccctgatctcatcagggaaggctctgtgatgctgcaggttgatgtagacacagtaaaaggagggctgaagttgaaccccaacttcctggtggacttcgggaaggagcctctaggcccagccctcgcccatgaactccgctaccctgggggcgattgtagctctgacatctggatttgaactccaccctcatcaccctcagtccatattttgagccctcacttccttggggacctggcttcattctgctctctcttggcacccaacccttggcagcatgtaccannnnnnnnnnnnnnnnnnnnnncaacgtgttgagtggtatccatttaccgaccactgttgcttgttgctcactgtgcttcttttccatgagctcttggaggcaccaagaaataaactgttgaccctgttcttcagatggccttgtctttgggggcctgaggcctgtgtctcctcttctgtctatgctttgtatcttgtacaagaaaaggctaaagaggcctctgggggggttatggtaactagttcacaccagtgatgctaataatgccaaaatctcacttttatggccagacagaatctgaaaattttggggatgattgtcacaaggagacctgggggtagagaatgtaaatttgtgtttctgaagttttgtttttttaacccatgctttcttttaatgaacctaaaaatctcacccatcactcccaagacaatgtaatatgctccctcacacacaggagaccccaggacccc

SEQ ID NO: 11780 - DNA, 731 bp, Macaca Fascicularis
  misc_feature (1)...(731): n = A,T,C or G
agcacagggcccctccctgctcatgctcgggccctgcaggagttggacctcacnnnnnnnnnnnnnnnnnntgatgccagtttagccaaggtgctccagttcccccagctgaggcagctgtccctgagcctgttgccagaacttacagacaagggcttgttggctgtggccgggggctgtcctagcctggagcacttggcgctgagtcactgcacccgcgtcagtgacaaaggctgggcccaggcagccagctcctggccgaggctgcagcacctcaacctgtccagctgcagtcagctcacagagcagacactggatgccattgggcaggcgtgcaggcagctccgggtgttggatgtggccatgtgccctnnnnnnnnnnnnnnnnnnntnnnnnnnnnnnnnnnnnnnnnnnnnnnnnnnnnnnnnnnnnnnnnnnnnnnnnnnnnnngggctgacctgaccctaacactctgaggccggctacacgtggctgccacaggcccctgnnnnnnnnnnnnnnnnnnnnnnnnnnnnnnnnnnntgctctctggccaagccctgggcgggaggccaggcccccagcaggcggggtctggtgctgggaggagcaaagcccctgcctcttgcctgccctcttctcagacctaaggcccagctccacctactcctgtgggactctcccagcaccctgnnnnnnnnnnnnnnnnnnngctgagcccaggtctatg

SEQ ID NO: 11781 - DNA, 794 bp, Macaca Fascicularis
  misc_feature (1)...(794): n = A,T,C or G
cacacagtattgannnnnnnnnnnnnnnnnnnnnnnagctggagtngnnncagggcaggnntcctgacttnnntcttgcnnnnncaannnnnnnnactnnaccagctgatgctcttcaccctgccagggacccctgtgttcagctacggggatgagattggccnnnnnnnnnnnnnnnnnnnnnnacagcctgtggaggctccagtcatgctgtgggatgagtccagcttccctgacatcccaggggctgtaagtgccaacaagaatgtnnagggccagagtgaagaccctggctccctcctttccttgttccggcagctgagtgaccagcggagtaaggagcgctccctattnnnnnnnnnnnnnnnnnnnnnnnnnnnnnnnnnnnnnnncttctcctatatccgccactgggaccagaatgagcgttttttggtagttcttaactttggggatgtgggcctctcggctgggctgcaggcctccgacctgcccgccagnnnnnnnnnnnnnnnnnnnnnnnnncttgtgctcagcacccagccaggccgtgaggagggctcccnnnnnnnnnnnnnnnnnnnnnnnnnnnnnnnnnnnnnnnngctgctgctccgcttcccctatgtggcctgacccnnnnnnnnnnnnnnnccactaccctcctttccttcctagaccctttgggttctggtttttctcttttttccccttttttaaaaaacaacaacaaaacggttgcagattataaatgaacccccaaataggggggttcatcctaaaaacaaaagttg

SEQ ID NO: 11782 - DNA, 939 bp, Macaca Fascicularis
  misc_feature (1)...(939): n = A,T,C or G
tgcnnnccgtcancnnngccacagtaacgaatatattgaattacaccgtaaacgctatggnnnnnnnnnnnnttaccatgagaaaaagagaaagaaggaaagtcgagaggctcatgaacgttcaaagaaggcaaagaaaatgattggtctgaaagctaagctttaccataaacnnnnnnnnnnnnnnnnaatacaaatgaaaaagactatcaagatgcatgaaaagagaaacaccaaacaaaagaatgatgaaaagactccacagggagcagtacctgcctatctgctggacagagagggacaatctcgagctaaagtactttccaatatgattaaacagaaacgaaaagagaaggcgggaaaatgggaagtccctctgcctaaagtacgtgcccagggagaaacagaagtattaaaagttgttcgaacaggaaagagaaagaagaaagcatggaagaggatggttactaaagtgtgctttgttggagatggctttacaagaaaaccacctaaatatgaaagatttatcaggccaatgggcttgcgtttcaagaaagcccatgtaacacatcctgaactgaaagctaccttttgcctaccgatacttggcgtaaagaagaatccctcatccccactgtatacaactttgggtgttattaccaaaggtactgtcattgaggtaaatgtgagcgaattgggccttgtgacgcaaggaggcaaagttatttggggaaaatatgcccaggttaccaacaatcctgaaaatgatggatgtataaatgcagtcttactggtttgacagcaatttcatatataattatcgaggactacacaccaattgagaaaactgccattacnntgatatttctgaatactaccaaacagccatacctgtctgcannnnngagatttattaaattgtaaacattaaaatggtcc

SEQ ID NO: 11783 - DNA, 731 bp, Macaca Fascicularis
  misc_feature (1)...(731): n = A,T,C or G
taacatatttaatagaaatattaaaataatcattacacttcctctcattgcggaaaccatgaaagaataggccttttgtaatcaaagtaataattttttatcatgcaaaaaggtatttttgttatgacattcataagtagagactgtattttaaaacaagtttatacagacttcaaaaggtctaaagtcaaagagaaagtaaaatatatttaaatatgattagttacattgtaggcaggtggcatactcaaattcacagtttataaagtaaaaaaactaaactcttcatgtcagctctgaaatagatgcattttcattaatacattcactagttaggtctgttcttctaagacaggaggaaagaccgatatatgagatattatttaaagaacaaactcaacatatcagcagcaaatttcagttaaactaaattggaaaccnnnnnnnnnnnnnnnnnnnnnnnaaagtcagttctccagctcagaatgagaattaagagtataaactgaaggcttaagagaacttcagagagcatactgtgtggtgattaacacataaatattaaaaatagaattatcaaatttttgattgaagaacaccacaattttgatctagtcattaaaacatatgcagaggcgtcaaaggcaagtaatgctaccacctaagtttattctggggaactgtgaagatgtagcacggacctccaaggtgtctttctaaaatcccttctg

SEQ ID NO: 11784 - DNA, 1021 bp, Macaca Fascicularis
  misc_feature (1)...(1021): n = A,T,C or G
catggacgcccannnnntccagataaaagagatcacttacatggacccccacttccacaaggcactcctccactattgcccatgtcctgctcaagatgtcataatgccacttttggcacgaatggggcccaaagacatcctcataataattnnnnnnnnnnnnnnnnnnnnnnnnnnnnnnnnnnnnnacaccatcctcatggacaccatccccatgcacaccatcctcacgaacacggtacccatagacagcatccccatggacaccatccccacgggcaccatccccatgggcaccatccccatgggcaccatccccatggacaccatccccactgccatgatttccaagactatggaccttgtgacccaccaccccataaccaatgtcaccattgccatggccacggcccaccacctgggcacttaagaagacgaggcccgggtaaaggacaccgtcccttccattgcagacaacctggatctgtgtaccgactcccttctctaaggaaaggtgaggtgctgccacttcctgaagccaattttcccagcttcccattgccgcaccacaaacaccctctaaagccagacattcagccctttcctcaatcagcctctgaatcatgtccagggaagttcaagagtgagttttcacaagtttccaattttttcacacattcacttccaaaataaaatgtgattcctttgaagaggaaaatgaattatacattgaattagaatcataaataaaatgaccagtaattttgaaaattacagttcttttctacttgctttcatactggagatgcagcaaaatgtgaatgggaaaagagatggcctgagaagaaagatcaaatggaaaggagaggaaagaactcagtgctgccaattagtagttaattctgtcactcaccactacatcnnnnnnnnnnnnnnnnnnnnnnnnnnnnnntccttctttcctggacttaactctaattctagagtctctgttactgcttgggctatacctgggcaacca

SEQ ID NO: 11785 - DNA, 1078 bp, Macaca Fascicularis
  misc_feature (1)...(1078): n = A,T,C or G
aaatagcagttnnnattgtaaaagcattagaacatttacacagtaagctgtctgtcattcacagagacgtcaagccttctaatgtactcattaatgctctcggtcaagtgaagatgtgcgattttggaatcagtggctacttggtggactctgttgctaaaacaattgatgcgggttgcaaaccatacatggcccctgaaagaataaacccagagctcaaccagaagggatacagtgtgaagtctgacatttggagtctgggcatcacgatgattgagttggccatccttcgatttccctatgattcctggggaactccatttcagcagctcaaacaggtggtagaggagccatcgccacaactcccagcagacaagttctctgcagagttcgttgactttacctcacagtgcttaaagaagaattccaaagaacggcctacatacccagagctaatgcaacatccatttttcaccctacatgaatccaaaggaacagatgtggcatcttttgtaaaactgattcttggagattaaaaagcaatggacttaatcggttgaccctactgtggattggtgggttttggggtgaagcaagttcactacagcgtcaatagagagtcatctttgagataattgaacccttcctctgagagggttttctctcccaattttctttttattccccctcttgagggggccttgggatctatagtatagaatgaactgtctagatggatgaattatgataaaggcttaggacttaaaaaggtgattaaatatttaatgatgtgtcatatgagtcctcaagcttctcagatttctctttttctttacaaaatgaatgcattagccctgacaaaaaggtgctacagtagtgatgaaattataagtagatttgtagttcgtcccatttattattttaatatttatgtttaagtgcttgcttgaaaagattccattttatacaagaagggagattcaaaaaaaaaaaaaaagacaaggttgggttggcaatatttatagggcttttattttttaagttcaattgtgtctgtgatccagaagaaattatttaa

SEQ ID NO: 11786 - DNA, 768 bp, Macaca Fascicularis
  misc_feature (1)...(768): n = A,T,C or G
atttgatggtgttactgtgacagttggaaaagttgggcagatgttataagcacatgtccttggccctgaatannannnnnnnnnnnnnnnnnnnnnnnnnnnnnnngcctctnnnnnnnnnnnnnnnnnnnnnnnnnnnnnnnnnagaaatccgacagtactgcaatcactggcgaaattttgctgacattgatgattcctggaaaagtataaagagtatcttggactggacatcttttaaccaggagagaattgttgatgttgctggaccaggggnnnnnnnnnnnccagatatgttagnnnnnnnnnnnnnnnnnnnnnnnnnnnnnnnnnnnnnnnnnnnnnnnnnnntctgggctatcatggctgctcctttattcatgtctaatgacctccgacacatcagccctcaagccaaagctctccttcaggataaggatgtaattgccatcaatcaggaccccttgggcaagcaggggtaccagcttagacagggagacaactttgaagtatgggaacgacctctctcagacttagcctgggctgtagctatgataaaccggcaggagatcggtggacctcgctcttataccatcgcggttgcttccctgggtaaaggagtggcctgtaatcnnnnnnnnnnnnnnnnnnnnntcctccctgtgaaaaggaagctagggttctatgnnnnnnnnnnnnnnntaagaagtcacatnnnnnnnnnnnnnnnnnnnnnnnnncggctggaaannnnnnnnnnnatgtcaa

SEQ ID NO: 11787 - DNA, 763 bp, Macaca Fascicularis
  misc_feature (1)...(763): n = A,T,C or G
agcagcgaggatgaggaagacagtggannnnnngaacccacagnnaaagnnnctagaaagacggccacactgcgcagcaccagtggtgaggagagtgacttggagagggaagtgagtgacatcgaggcagggggcggcccccagggggagaggaagaaccgctcttccaagaagagctccaggaaaggcaggacacggagctcctcttccnnnnnnnnnnnaagtccagaggccaaaggagggaaggctggctcaggtcgccgtggagaggaccacccagctgtgatgaggctaaannnnnnnnnnnnnnnnnnnnntgcccatcgaaactacaagaagctgttgggctcctgttgctcacacaaggagcgcctaagtatcctccgggcagaactggaagccctaggcatgaaaggccgnnnnnnnnnnnnnnnnnnnnnnnnnnnnnnnggagaagcagcacccccaggggagctgtaccgtcggaccctggactcagatgaagagcggccccgtcccgcacccccggactggtcacannnnnnnnnnnnnnnnnnnnnnnnnnnnnnnnnnnnnnnnnctctgccaccctcaggaaggacccttgatccatgtacaaagcatacatnnnnnnnnnnnnnnnntgtctgtggaacagaagcagctttcttcagagaagactgccgttcccgaggacacaagctgttgggatgctacttctcagcttcacactctccatttaaggtgtttatttttaagactc

SEQ ID NO: 11788 - DNA, 798 bp, Macaca Fascicularis
  misc_feature (1)...(798): n = A,T,C or G
attctccatgcaaaatgaaggaagactgctttcgttattattcctctgagtaccactatgtgggaggtttctatggaggctgcaatgaagcnnnnatgnnncttgagttggtctatcatgggcccttggcagttgcttttgaagtctatgatgacttcctccactaccaaaatgggatctaccaccacactggtctaagagaccctttcaacccctttgagctgnnnnnnnnnnnnnnnnnnnnnnnnnnnnnnnnnactgactcagnntctggnnnnnnnnnnnnnnnnnnnnnnnnnnnnnnnnnnnnnnnnnnnnnnnnnnnnnnnnnnnnnnggatccgcagaggaacagatgagtgtgcaattgagnnnnnnnnnnnnncagccacaccaattcctaaattgtagggtatgcctcccagtatttcataatgatctgcatcagttgtaaaagggaattgatatattcacagactggagactnnnnnnnnnnnnnnnnnnnnnnnnnnnnnagattcctatgaagatttttgtctttagaattaaaactgccctcaattttaatatacctttcaattacccactggctacttttttctaagtattcaattaagtgggaatattctggaagagggtcagctatgaagtaatagagtttgtttaatcatttgtaattcaaacagatgctatattttttaaaatcaatgtgaaaacatacttattttttaattgtaccaatcacaagaaaataatgtcaataattatcaaaactttcgaaataaatgctcatatttaa

SEQ ID NO: 11789 - DNA, 692 bp, Macaca Fascicularis
gtcgacccccctcagcagccctgtgtactgcctgcgtctcaccaccaagcatctctatgctgcgctgtcttacaacctccatgtcctggattttcaaaacccatgaccgtcagggccacccctgcctctgggccagggaaaccagctactcagggacctctcttgcctggagggtgcagtgatagctcctccccagtgccccactgtgctcctgggcctgtgaccccagtgctcaggcaccttgcactagaggcttctgactcctggggctttggggcttaccagagatgcagtccctcccaggaacctgttggagaggcaggacctgctgctttggaagagtgcggctgaaccggggccttgcgtccctgtttggccagagcaaggatctggcctggagaggcccatcctataccccttattagagccatgatagcctacagagtgaggtgaggtgctcccaccttcccagatggttcctttctgccccttcctggaaggaaaggtaaggctgccaatagcccactggcaccagccagacctcactcttgaccaacctctcggggccgggggttccttcctggggcactgtgacctggttttgctttgaaaccaataaagagcagagggaacccagcagttctgagttctgagccagccctacctcaggctggctgttgagacaagctaca

SEQ ID NO: 11790 - DNA, 758 bp, Macaca Fascicularis
agagagagacatggacaggatcgctgtggtgacaccaggcagacccttcccacctgccttagtagggaaaatgggtgggcacagcaggggctggccttgcgcaccgcctccctctttcaggagtgttctaggtgtggccaagaggttgggaagcccctgcttgtgaaactatccctgagatggggacctgggtgccaagagctggatgcagatggtccctgctggtgtccctccctgtgtcacctgagggggtgccctttccgtgggccagtactgagctgggtggggagaccctttgggaggggccccattggcccccatcacccagagcataaggtctgcctggctgtgtctgagaactggggtgttggggggtacaggtccagcttaggggtgctggtgttcaccccgtcaccccaagccctctcacatgacaccatcaaaattcagaaagcccgggtccttggggccacacccgcccactgtactctcgggtctctgcgtgatggctaatggtggagactttcttttgagggcacacacatgcccctggcacagacaggacacagacagctctcccaggatcagtcccgaccttaacccactgggacacacccggagtttgaattccagctctgcctctcaccgactgtgtgatctcaggcaagctgcctaacctctctgagcctccgtgtcctcacctgtaaaatgaggatgttgatgacagtgagaatatatgaggcaacatacacaaagca

SEQ ID NO: 11791 - DNA, 730 bp, Macaca Fascicularis
  misc_feature (1)...(730): n = A,T,C or G
aaatannnnnnnnnnnnnnnnnnntnnnnnnnnnnnnnnnnnnnnnnnnnagtgttacctgaagaagtacatagtcgttccttacgaattggagctaatcgacgcacagaaattatagaagatctggccttctactctagtacagtagtgtctctattgatgacctgtgtagaaaaagcaggaacagatgagaaaatgcttatgaaggtttttcgctgtttgggaagttggtttaacttgggagttttggacagtaacttcatggctaacaataaattactagcactcctttttgaggttttgcaacaggataagacctcatctaacctacatgaagctgcttcagactgtnnnnnnnnnnnnnnnnnnnnnnnnnnnnntgtggannnnnnnnnnnnnnnagctatgcaactttttcagggagtgctgacgttggagactgcctatcnnnnnnnnnnnnnnnntgaagatttagacaaagttctgaattactgccgtattttcactgaactatgtgaaacttttcttgaaaaaattgtttgtactccaggccaaggtcttggggacctccgaactctggagctgcttcttatctgtgcaggacatcctcaatatgaggtagtgtttatgctattctaaggctattattctccaagttgtgtgctgcatattatctatatttcattacctcatgcccagcttttattgttgagaaattatagtcttgttt

SEQ ID NO: 11792 - DNA, 738 bp, Macaca Fascicularis
  misc_feature (1)...(738): n = A,T,C or G
aaaaggacatgcccactgnnttcaggtccttgagtcaaaaaaaaaatcntctgctgcacattttgtttaagtgttactgtttctgcctgttaatgttgggaacacaaatagtgcaatttgtgcaattggagaatcttgccttttttcttggctccccccaaaaatacaaaccaacagaaacttgttatgcactcatcaaaatgtactaatgggtactctgaactcattaacattgacatctgcaacaggaggcaacagggaaaaaaatctttcatcttcttttccggtagagaatagtttgtgaaatgatgagggcattttatctgcttgctgtgaccagcgtgtgtacacataaaccttaacaagactacaagtatattccagaaggaagtcattttagttatgaactaaataacaaaaattagaacttcaaatgcgatggtcttgactattagaccagatttagtagctccatatctaagatttttctacctgcccctcttcagtacagggatggctggctgctcaacacactcctcctccccttttttcctttctttaagctgtgtacagtgaaaattgtctttactgtatttttgttctctggtaatgtaataagcatgatggtgccttctattaatacatcattccagtcttgctggtaattttgtacagtatagtgtatgaattgctgtgctgcaaagccaannnnnnnnnnnnnnnnnnnnatcatcgaaa

SEQ ID NO: 11793 - DNA, 724 bp, Macaca Fascicularis
  misc_feature (1)...(724): n = A,T,C or G
gcaaacctgaaatcattaaagccagacaagcctgactctgaggagcaagccaagatagcaaagcttggacttaagctgggtttgctcacctctgatgctgactgcgaaattgagaagtgggaagatcaggagaatgagattgttcaatatggacggaacatgtccagtatggcctattctctgtatttatttactagaggagaggggccactgaaaacttctcaggatttaattcatcaactagaggttttcgctgcagagggtttaaaacttacttcnnnnnnnnnagctnnnnnnnnnnnnntgaaagacgatgacaagcttatgcttctcctggaaataaacaagctaattcctctatgccaccagctccagacagtaactaagacttctttgcagaataaagtatttctaaaggttgataagtgtattacaaagacaagatccatgatggctctcttagtccaacttctttcactttnnnnnnnnnnnnnnnngaagcttcagatggaaaataacggatggatctcagttacaaataaggacagtatggatggtaaaatttgagaggcttttgggatcagatctcgggaacatcatgtgatgaagctgacattttaaaaaagcaaatgatcctttatgttnnnnnnnnnnnnnnnnnnnnnnnnnnnnnnnnntattgaaattttgctctattttctgatcatgaaactgtaaagctttt

SEQ ID NO: 11794 - DNA, 741 bp, Macaca Fascicularis
  misc_feature (1)...(741): n = A,T,C or G
gggacaagtcactctcgccacatgaactcaaggccnntcgctggaaagacagctgggacancttgatnnnaaaacactagaacaagnnnnnnnnnnagaacacccgagctggggtcgggacaaggtcgaagggtcttnnnnnnnnnnnnnnnnnnnnnnnnnnnnnnnnnnnnnnnnnnnnnnnnnnnnnnnnnnnnnnnnnnnnnnnnnnnaacgcgtgggggtctcattcttgaaaagccctctgatgagcacctccttttgtgcaaagttcattttttctcaacaatgaagatgttccctccgtgttttcacccctgagctaagacacagggagtatttcagcggccagtgtaggagtcatcgatgaagaaaagccgagaaccnnnnnnnnnnnnnnnnnnnagtggcctcagcagaccggggcctggtccttgctaaccgctgcagggtggagtttgatctggcagacccgatcctccttcatgaacacccagcaacctgagcaagtcccagccctgccctgagtgagcctggcaggtgtcccgggacaggcgtccaggagggccnnnnnnnnnnnnnnnnnnnnnnnnnnnttgcgagtcattctctgtgacagcatcaagactggccctccgcaccatgctgtgtggnnnnnnnnnnnnnnnnnnnnngacggggctgagtgaaatcttcctcagtggtcaaggtgtgtgtcatccatacagctccttgccttta

SEQ ID NO: 11795 - DNA, 749 bp, Macaca Fascicularis
  misc_feature (1)...(749): n = A,T,C or G
ggaggaccagtctgtgtantnntgccgagtcgagctggacacacggagatcagggaggcagcagttgcagtccatcgaggggaccaaactcaccatcacccaggctgtcatgaccaccaccacctggaggcccagcagtgcaaccaccacagctggactcagggtcacagaaggcaaagggcactcagaatcatggcacctaagtctggacactgctatcagtgtggcattnnnnnnnnnnnnnnnnnnnnctgtcgctttgggactgctgtgcctcctcaggtggaaaagaaggaaaggtcagcagcagactaaagccacaactccagccagggtgtggagagacgggatgtgtattagccccagaggatgtgctgtgagacccgcttgnnnnnnnnnnnnnnnnnnnnnnnnnnggcaagatacatggagagcatcctgaggacctaaaaaaggcagagccgcaaggcagaaggagcctgggtccctgaatcaccaactggaggagagatacctaccagagccttcatccaggagcatccactctgcaatgacacaggaatgaggtctgaactccactgaattaaatcactggcattcgggggctattcattatagcagtgctaagagttcctttgtcttccccagggatggagaactacaatttattttgcttaccatataccccttttctccttgtccacattttccaatctgtacagtggctgtcttctcctgtggcaggggtt

SEQ ID NO: 11796 - DNA, 684 bp, Macaca Fascicularis
ttctattatcaatcacttctccaaaagtgtctctttccagctctgatttattcaaaaacacacaagcattcctgtttagagattctagcctatgggttatctggctagttactaccgctcctgttcacttagttatactttattattgctcacaggttggggaggcagaatgactctgtcaccactaggagccgttagggcttcttccctggaggactgcctgcatgctctctggggactagccctcatttcccttctgtggtacagtggggcaagttatttgtattaaacaaacatttatgagaaacaacctcctccccaaaatggaacccccaagtaaagcacaagcctgaaagattatgaactatgaattgtctctaatggagataaatttttgcaaatatatctcagtctttccttgtgtttttctggtgattaagaagttgctttttggtaaggaaaaggatttttgaccatagagttaggcatcatggaaattcaaaccagatttcttaatacctgatcttcctcaaagagaaataataacagtaatagtggtgctgggaacaatacggcagattattgaatgaaatggattaacttgaataaaatgctgtgaattatctccagctgaatgcttttcttgtatttgtcagttttgacatatttgattcttcttctcaa

SEQ ID NO: 11797 - DNA, 757 bp, Macaca Fascicularis
  misc_feature (1)...(757): n = A,T,C or G
gacagctctagtgtattgtgtgattaaatacctcaaagnnnnnnnnnnnnnnnnnnnnnngaagtgnnnnnnnnnnaagacactgaggtttagaattgtttgattctagaccataactgaagggaataaatggaaacaggaaatgaagggaaacaagtagcatcatggagctgaaaagtggtgcatcacccaatgactagcacaaacaaggatcgcgctgtccattctcttgtctgctagagtaagcattttcttgcctcctttgnnnnnnnnnnnnnnnnnnnnnnnnnagagggatcagaaatgactgtgtcatggtgctcattcactgcagcctcccagttgcaagctccttggctccccccggagggagcnnnnnnnnnnnnnnnnnnnnnnnnnnnnnnnnnnnnnnnnnnnnnnnnnnntttgcatgggactgccactcatgactgtcctgatattggaagaaaggactttgttaatcttctcccccatagctttgctgcgtaggtctacaccttactcagactcactacacattcctctagtcttcctccnnnnnnnnnnnnnnnnnnnnnnnnnnntttattgaaactaaatacataatacatacaatgagatgaagacaatatagaagnnnnnnnnnnnnnnnnnnnnnnnntccttggccggttgaggcagctcagtggctgagcccagtcaagccaacccacagcttcattcacgacttccaagatttgatgctaattcttttgga

SEQ ID NO: 11798 - DNA, 557 bp, Macaca Fascicularis
cagtttcagtgcaccatgtgtttgctttgtgaaggtgaagaatatgttggtttagagaaagaaattggatgtaattttatgcaatttacttttaaagacgaacataattagttagcagagaatattttaataaatgcaaaacaacagctggactgctgtacatcaaggactgattaactggaaaacatatgttccttatgtgtgatcgagagctgttcagaaaagacttcttttgtgttcagcctacacttttccatatggcataccttgaaaaaaattagcacaccatggttatttttctaccttttataaaagatagagcctgtttactcatttagaagatagagaaaattggtctaaaattgaacatcttagattcacactcccaagtcacttaaggaaagatgatttgatggtgaggaaaatgatggacaaagcccaacaatgatctcaggaattacattttccaacagaccaaaaaatgttttcacgtagcagcaatgcggatttggtgaatatttaatatatattttagtatatatttcactttatgaact

SEQ ID NO: 11799 - DNA, 766 bp, Macaca Fascicularis
  misc_feature (1)...(766): n = A,T,C or G
tatttaaacctagtgagccaaggccattgtatattcaaaagggtatctccagagaggaagtccagtggggagtgnnnntccacgagatgtccctgaatctttcacctcagaagnnnnnnnnnnnnnnnatagatcccagttttacttcctaacaaaatcacagagtttattgacattcagtacaaagtctccagaagaaaaactcacaccaacaagcaaacagctgctagcagaagaaagtcttcccacaaccccattttannnnnnnnnnnnnnnncacaggcaactgcaggatgaaaaattaaatgaaactttagagaatgagctggtacaactacccttaacagaaaacatacctgcagttagtgagcttcttcacactccagcccatgtcctgccatctgctgctttcctgtgctccatgtttgtaaattcattgctgctgtctaaagagactaagagtgctaaagaaattcctgaagatgtagatatggaagaagaaaaagaaagtgaagattcagacgaagaaaatgattttatcgaaaaggtccaggatacaaataacacaggtttaggagaggacattatacatcagttgtcaaaatctgaagaaaaagaactgagaaaatttaggaaaatagactacagctggatagctgccctttaggccttggagatggggaggattcttggactttgtgtgtctgattgtatgttgatattccaaaaacatctattttaatgttatttctgttctaaaaacaag

SEQ ID NO: 11800 - DNA, 757 bp, Macaca Fascicularis
  misc_feature (1)...(757): n = A,T,C or G
tggggccnnnnnnatcaggacaggcatccaaggccttaaaggagaccagggggaacccgggccctctggaaaccccggcaaggtgggctacccagggcccagtggccccctcggggaccgtggcatcccaggaattaaaggtatcaagggcaacccaggaaacatcaaggaccagccgcggccggccttctcggccattcggcggaacccaccgatggggggcaacgtggtcatctttgacatggtcatcaccaaccaggaagagccgtaccagaaccactcaggccgattcgtctgtactgtacccggctactactacttcaccttccaggtggtgtccgagcgggagatctgcctgtccattgtctcctcctcaaggggccaggtcagacgctccctgggcttctgtgacaccaccaacaaggggcttttccaggtggtgtcagggggcatggtgcttcagatgcagcggggtgaccaggtttgggtcgaaaaagaccccagaaagggtaacatttaccaaggtcttgaggctgacagagttttcagcgggttcctcatattcccgtccacctgagcccgggaaggacccctcccccacccacctctctggcttccatgctccgctttgtaaaatgggggcgctgttgtttcagctgctgaagggagggggctggctccgagagccccaggactggctgcccccgtgacacatgctctaagacagctcgtttcttagaactcttcctgaaataaa

SEQ ID NO: 11801 - DNA, 745 bp, Macaca Fascicularis
  misc_feature (1)...(745): n = A,T,C or G
aagactgatacaacctggagaaagtccagtggtaccaatgaggcgttacagtggtggccttgtctccagtctccttggtggtacctttgtgggcattgcatacttcctcacacagctgatttttgtgaatgatttagacatttctgccccccagtggccaattattgcatttggtggtttagctggattactaggatcaattgtggactcatacttaggggctataatgcagtatactgggttggatgaaagcactggcatggtggtcaacagcccaacaaatgaggcaaagcacatagcagggaaacccattcttgataacaatgcggtgaatctgttttcttctgttcttattgccctcttgcttccaactgctgcttggggtttttggcccaggggatgaactttatttcatnnnnnnnnnnnnnnnctgatgagtccagctaaatttgcaattccaacttctatcctaagaagaataannnnnnnnnnnnnnnnnnnnnnnnnnnncctcctatattccattgtgatgggatttcacattttgctctcatcaactcccctgtaacagctagcatctttctagtgaaagagaagaattccaagaacttacgcatatttttttctgctgaatggaagtcttgagcaatgaagctatattgtccctacgtactgctgtatattgaactgaaagttcttacataatcagtgtcaagttttgtcttattttgttttgtttgttaaa

SEQ ID NO: 11802 - DNA, 780 bp, Macaca Fascicularis
  misc_feature (1)...(780): n = A,T,C or G
cagtaccttgaggagtcnctctgtcttagtagcagaatggcccgctgacgagcgaaaatgtggctgtccaactctcctccaagttgcannncagtttcnnnncaaaacttattacctcccctaatcgtgagactttggaaaaggtggaagnnnnnnnnnnnnnnnnnnntcccactccctgcatgtgtcaacattgtgatgtcagtatttactaatcaaccttcagtgnnnnnnnnnnnnnnngctgtaggaagaagagatccaggatactagaggtggatatttgggtcatttacttgtacactacatagcaagtggatactcacgttgcatgttcttttaannnnnnnnnnnnnnnnnttaagtctttaacttccaatagtttatcatgtatgtaaccttccatgtttgcttctgataaatggaaatgtagagtcactgccacttcctgggatatttctgctcacgcttccaagttctcaatgacattnnnnnnnnnnnnnnnnnnnnnnnntcccctacacatggtaaatcttgtgttgttccctgccatcctccgtattatgtgactgggaaataaatctcatagcagttaatataagacgtcttccgaggatggcagagaacaggagagaagataggaaacaaaatagagaatttttaagattttgtttaaaccaaatgtttcatgtagaatacaaaatgttggcacgtcaaaaatatggatgtgtagacaactgtagttgtgcnnnnnnnnnnnnnnnnnnnnnntgtatttta

SEQ ID NO: 11803 - DNA, 743 bp, Macaca Fascicularis
agttggggtcagtgctgcctgttcccatgcttaacatacccgcctagctgctgtcaacatttttcttgttttgtccttttattttttttctaataacctaaaaactggcgaaatagttctgcaggttgaagccatgtctatatgaaagtcctcagtaagtgttagagggaacagggcagagagatccttacgccacccccgctggaagatgtgggcagcttagggccctggaggcggtgcagcagggaagaggggtgcagaggctgtggctggtgagccggtcgggcacacaaggggctctcggagcgtgcactggttggttttgccattttgttgtgtgtatgctgcttttcttttctaaccaagaggctggttttggcatctctttcccattccctgggatctggtggtcagccctaggatacaaagccagggctggagaacaagaaagggccaggagatggaattccttcaggccggcacccgcaccctaggacatgcaagccctcatgtccaggggaccctcatgcggatagtgggaaatcaggtctggaaatttaaaaataaaaggcatgagactaaggccatctgcttcccctatgccctgactggagaggggagagaagagaggcaaggcccacagagggcatcccagctaggccttgggatggctgcagtgaggagaaatcctgggaactgtattgacacaaagattcttattgcacttgtattttttgtattaa

SEQ ID NO: 11804 - DNA, 726 bp, Macaca Fascicularis
  misc_feature (1)...(726): n = A,T,C or G
agtcagctgctgcaagatttcagacttttgaggatgttgtgtgagggtgtttgactgtaattggagaagcttagactactttgcatgtaaatnnnnnnntgttttctttgttgagaacaactagcaacaaaagcaacccatgtgtgaccagttctccccaaggtctatgctaaattatagcaagagccctgggcaaccccaaacctagttctnnnnnnnnnnnnnnntgtaaggcaggagcagacagctcggcttgagcagacattgggtggggggtggggggtggttgaggggggaggcagcacagtgcagcaaatgtttcttgggaggaagaagcctgnnnnnnnnnnnnnnnnnnnnnnatgtagcttggagtctcctttgtacaactatccctttcgatttggctttaccttcatctatcttgatcctttcnnnnnnnnnnatcctcttgggcccaaatgaacattgtaccatagtcttctggaaagcaaacatgcttcctgctatgtaattgctaacatttacattagatgatgtgttgtagtttgatcttccttagcctactgcnnnnnnnnnnnnnnnnnttaggtggtatcgtagtgccttttgattaatttaagtatttaattttcatcttcatttggatctatttggcctctcaaatgaactgagattcctgttaaagattgatgttattgtctcttgtagaggaaactaataaag

SEQ ID NO: 11805 - DNA, 726 bp, Macaca Fascicularis
  misc_feature (1)...(726): n = A,T,C or G
tatgagaagacggacaannnannnnnngccctggaagactataaatctatattagaaaaagatccatcagtacatcaagcaagagaggcttgtatgagattacctaagcaaattgaagaacgtaatgaaagactaaaagaagagatgttaggtaaattaaaagatcttgggaacttggttctccgaccttttgggctctccacggaaaatttccagatcaaacaggattcctctaccggctcgtactccatcaatttcgttcaaaatccaaataataacagataacaaagataacaatagctttacaagctgacttggaattgtgtgctgcttgctgttagcaaggggaaaggccctnnnnnnnnnnnnnnnttaaaagcatcttatctaaaagaaaggctatccagtagagcctagtgctcccttttccctcctttatgatcagggtgaaatgtacttcctgatgtaatgaacctaatttgatnnnnnnnnnnnnnnnnngtctnnnnnnnnnnnnnnnnnnnnttgnnnnnnnnnnnnnnnnnnnnnnnnnnnnnnnncgaggctgaccttccttatccacacagacacacagcccagcaaaagcctctcctgaaccaaacagacctgttggttgggagactgcccagacatgactgatgacgggttcccgcctgcctgtcccctccctgatcacacagctaacgaggctgcctccagccattt

SEQ ID NO: 11806 - DNA, 714 bp, Macaca Fascicularis
agtaagtaaacaatatatttggccatctaaaaagtgaggattataattatatgaattataattaaactttaattttgttgaatgtgtatatttaatcttctaaattgaagccattattctcaattaagtactacaactatgacaatgcttgacctacatttttaaaataattctttttttgataaataaaccacaattttaccagaaattaccgtctaaatgtgtattagcagtattttttaaggtgaaattgccatggtatctaatgaatgtgtagacagagagagaaaatgaaggagtgccagactagttagaatagaagttaggattaggttagttttgaaaaacgatgttgtaatatatgggttctaacacatcctaccatgaaaactggaggagatatgtataacctggttaatttgggatggtggacattttgggctaatactgacaaaatacatcttaggactactatacatgtgacacggattgctaggaggaacgaaaaactaaactgtatagtttatattccgtaaaccattttataatgttcaaagattaggtttcgttattggtagtattaaatacacagtttctcttaacagtgatgggtcaaaacattttactggataatggaatgtttaccagaacatgttttgattcttggatgtacataataatgccatctaacttatttactttcttgtttacatg

SEQ ID NO: 11807 - DNA, 735 bp, Macaca Fascicularis
  misc_feature (1)...(735): n = A,T,C or G
aaacaaagcaaaacccagcagactgtacttagcattgtctaaatccattctcaaattccaaacatcacagacaccnnncacacaagaaatacaaaaaccaccaccctccagcctgggcaacgtagtgaaaccttgtctatccaaaaatttaaaaataagctgggcgtggtggtacacgcctgtggtcccagctactacagaggctgagccaggaggatcgctcgagcccaggagttcgaaaatgcagtgagctgtaattgcatcactgtactccagcctgggcaacagagatcctgtctcaacaacccccacccccactacccctgttattctaggtataaattgaatttcatatgatgtaagggacgagaaaaacccaacaggaaacagacacatcctccagttctatggattgtgcagacattgagtttctagaaaaacatatccatggtaactggtccctggcaattttgtttacatgaaatggggagaaagtcaccgaaatgggtgnnnccgccaccccccccccttcattccgtaacctgcgaacctttccaacttctcacatcaggcctttgagacttctttcctcctctcctggtttccacacctcagacacgcacagttcaccaagtgccttctgtaaccacatgaattgaaaaggagacgctgctcccacggaggggagcaggaatgctgcactgtttacaccctgactggntaaaaaacacctca

SEQ ID NO: 11808 - DNA, 744 bp, Macaca Fascicularis
cagccaggacccgcggcgggaggcactgaggagggccctgagtcagtacctgacggacagggctcgctggagggactgcagccggccgtgcccaccggggcggcagaagagcccccgagacccgtgccagtgtgtgtgccatggctcagcggtcaccacccaggactgctgccctcgacagaggggcctggcccagctggaggtgaccttcatccaagcgtggggcctgtggggggactggttcactgccacggatgcctatgtgaaggtgttctttggtggccaggagctcaggacgaacacccagtggagcaataacaaccccatctggtcaatgccgctggattttggggatgtgctcctggccacaggggggcccctgaggttgcaggtctgggatcaggactctggctgggacgatgacctccttggcacctgtgatcaggctcccaagtctggttcccatgaggcgagatgcaacctgaaacatggccacctgaaattccgctatcacgccaggtgcttgccccacctgggaggaggcacctgcctggactacgtcccccaaatgcttctgggggagcctccaggaaaccggagtggggccgtgtggtgagaacagtgagcttggagaggactcgtgtgcttggactgaaggggttctcacagtgggagccagggctgtcttcgtattcccattagaccaagctcgtccaacccgaggcccgcatgtggcccgggatg

SEQ ID NO: 11809 - DNA, 716 bp, Macaca Fascicularis
  misc_feature (1)...(716): n = A,T,C or G
ctgtcaaaatgatcaaattctacttctgaagtcaggttgcttggaagtggttttagtgagaatgtgccgtgccttcaacccattaaacaacactgttctgtttgaaggaaaatatggaggaatgcaaatgttcaaagccttaggttctgatgacctagtgaatgaagcatttgactttgcaaagaatttgtgttccttgcagctgaccgaggaggagatcgctttgttctcatctgctgttctgatatctccagaccgagcctggcttatagaaccaaggaaggtccagaagcttcaggaaaaaatttattttgcacttcaacnnnnnnnnnnnnnnnnnnnnnnnnnnnnnnnnnnnnnnnnnnngttaatagccaagataccaaccatcacggcagtttgcaacttgcacggggagaagctgcaggtatttaagcaatctcatccagagatagtnnnnnnnnnnnnnnnnnnnttatacaaggagctctttaatcctgactgtgccaccggctgcaaatgaaggggacaagagaactgtctcatagtcatggaatgcatcaccattaagacaaaagcaatgtgttcatgaagacttaagaaaaatgtcactactgcaacattaggaatgtcctgcacttaatnnnnnnnnnnnnnnnnnnnnnagtttgaagaatgtaaatatgcacctgagtggggctcttttatttgtttgt

SEQ ID NO: 11810 - DNA, 710 bp, Macaca Fascicularis
  misc_feature (1)...(710): n = A,T,C or G
agtnnnaagactattctcctaaagtggtcaanctgcacttctcacaaccaaggtagtttgtatcattttcaaaagtacacattattagggtctagttgccccctggtccttagcttgctcagctgcaaaataagcatgctaaattaaatggtcttaaggtttttccacttcattttgtgactttgtgtggttcgaatttctnnnnnnnnnnnnnnnnnnnnnnntgtcaaagtcaaaggctgcagtatgtctatattcttgctgtattcatttgtagtttcagtatatgtaatgtgagtttaaatagnnnnnnnnnnnnnnnnnnnnnnnaaaatggaaaatagtaaatatgggaattgattttattctggttgtctataatacttcattttaaaggtaaatggccactctgcattnnnnnnnnnnnnnnnnnnnnntctgtgtgatttgttagatgagacaaaatgaccactaaatgagtttatagattattctgtatcaagataaatctgattccagttaagctataaacttgtggaatttccttgtagccctatagttctgtgacttcatttgctatacgctttaaatgtgttgnnnnnnnnnnnaacctaaagacatactgcagtttgttcataaatgtgttcagtcttttattctttataattctgtgtaaatgttaattaaaatagtggattcctcccgtgtta

SEQ ID NO: 11811 - DNA, 672 bp, Macaca Fascicularis
  misc_feature (1)...(672): n = A,T,C or G
tcannnntgctttctccatgctgtatgtcntcactgctgagctctacccaannntggtcaggaacatggcagtgggggtcacatccatggccnnnnnnnnnnnnnnnnnnnnnnnnnnntactttgtttacctcggtgcttacaacagaatgctgccctacatcgtcatgggtagtctgactgtcctgattggaattctcaccctttttttccctgaaagtttaggaatgacnnnnnnnnnaaccttagagcagatgcagaaagtgaaatnnnnnnnnnnngggaaaaaaacaagagactcaatggagacannnnnnnnnnnnnnnnnnnnnnnnnnnnnnnnnnnnnnnnnnnnnnnnnnnnnnnggtgaagtgaaaaacagataaataagactctgtnnnnnnnnnnnnnnnnnnnnnnnnnnnggactgactgtaatgattgacactaaaatgaaccttgctatcaagaaatgctcgtcatacagtaaactctnnnnnnnnnnnnnnnnnnnnnnnnnnnnnnnnnnnnnnnnncatttctagagagtctccttactcatnnnnnnnnnnaaatggattggtaagaggtcttgaaaacatgttagtcaaggactggtaaaatatatataaagattaaccctctcttccaattatacaaatgctatccaa

SEQ ID NO: 11812 - DNA, 757 bp, Macaca Fascicularis
  misc_feature (1)...(757): n = A,T,C or G
ggagttccagtcctgcctaaannngnnngaacagtacctagaagcccacgaccgtctccttgcagagacccactaccagctgggcttggcttatgggtacaactctcagtatgatgaggcagtggcacagttcagcaaatctattgaagttattgagaagagaatggctgtactaaatgagcatgtgaaggaggctgaaggattgtctgctgaatacaagaaagaaattgaggaactaaaggaactgctacccgagattagagagaagatagaagatgcaaaggagtctcagcatagtnnnnnnnnnnnnnnnnnnnntctgaaagctactctggtggagagctctacttcannnnnnnnnnnnnnnnnnnnnnnnnnnnnnnnnnnnnnnnnnnnnnnnnnnnnnnnnnnnnatggtgcttccnnnnnnnnnnnnnnnnnnactgatatttcccaccttgtcagaaagaagaggaaaccagaggaagagagtcnnnnnnnnnnnnnnnnnnagaaagccaaaccagagccggaggtgaacggaggcagtggggnnnnnnnnnnnnnnnnnnnnnnagtttcggaaaacatggaggaggaggctgagaatcgggctgaaagccgggcggcagtggaggcgacagtggaggctggagctacagttgaaagcactgcatgttaagaggcggcacagcccccctcccaagggaaagtgtttttgtatataatgtattttttcacttttggaggcttcttt

SEQ ID NO: 11813 - DNA, 780 bp, Macaca Fascicularis
  misc_feature (1)...(780): n = A,T,C or G
agannnnnnnnnnnnnnnnnnnnnnnnataaagtnncgacccagtgtggaacattcaaattgcaaggatgcttgagctgnncactatcnacaggaaaatttatnnnnnnnnnnnnnnnnnnnnagccctagagaaagaagnnnnnnnnnnnnnnncaggcgccctggacctccccagtctcacgagtttgctgagtgaaaaagccaaagaattcctcatggagaacagagtgcagagctttnnnnnnnnnnnnnnnnnnnnnnnnnnnnnnnnnnnnnnnnnnnnnnnnnnnnntgtgattcacagtgcctgctccgaccaagtgaattttaagaaggacaccannnnnnnnnnnnnncatagtatatttaagaatgctatacaactgctgcgggaaaaaggacttgttttccagaaggatgatggttttgataacctgtactatgtaaccagagaagacaaagacctgcacagaaannnnnnnnnnnnnnnnnnnnnnnnnnnnnnnnnnccaaatcacatggagaagggctgtcacttcctgcacatcttggcctgcgctcgcctgagcattcgcnnnnnnnnnnnnnnnnnnnnnnnnnnnnnnnnnnnnnnnnnnnnnnnnnnncagagtgacatcgtcagcacaatggagcactactacacggcgttctgagcagagacacgcagaccagctgaggacaaagataaggtggcgttcactcccaggctctgactttcaacatcatgcaggggcttgtctgtctggaggcagttgct

SEQ ID NO: 11814 - DNA, 738 bp, Macaca Fascicularis
  misc_feature (1)...(738): n = A,T,C or G
gctaaggctgtcacaaatttataaaattgtagcaaagtgcctgaggacatgaagggcctaaatcagaggaatattagatgnnnnnnnnnnnnnntatatcagacaacatagacgtctttagagaaaaggaggtgaaccaagagttccggtcctgctgcccgcnnnnnnnnnnnnnnnnnnnngtgagccaggggcctcctgtggctcctgctcacctctgtgctccctgttctggaggggtagagtgacttgggtgcttttgatggnnnnnnnnnnnnnnnnnnnnnnnnnnnnnnnnnccatctcccatctttccaggagatgggaaatgcagtcccagagttttgtggtgctttgactcagcttttggtctgctgagactcactcacaaatgtgtcattccgttctgccatccactttgttttctttctcttttctcagttctcagaatcttttttcctaatcattcaaccaacttgttgacatccttctcatgcctatgactaggaaggcagtccccaccccagagtggcnnnnnnnnnnnnnnntggctcaggagccctctccagggggcctctgcctgggatggtccctgtggtgagttagtgaatgaatgatgagatacgtgtgagagaatttcacctggtaacaccctttgttttttggaccaggattcccaaagaaatnnnnnnnnnnnnnnnnnnnnnnnnnnnnnnnnnnnntccttttctggatttc

SEQ ID NO: 11815 - DNA, 752 bp, Macaca Fascicularis
  misc_feature (1)...(752): n = A,T,C or G
agagagagaggaacngggaggcannggaacgcgaacggcagcgcaggagacaagggcaagagttgtcagcagcacgacagcggctacaggaagatgagatgcgccgggctgcagaggagaggcggagggaaaaggccgaggagttagcagccagacaaagagttagagaaaagatcgagagggacaaagcagagagagccaagaaggtaggtgattgagaagacgccacgggtaatggagtgggcaggttagtaaatcttttccagcttcagagggaaatcttgggcttacatnnnnnnnnnnnnnnnagggtgggtgagtacctgattgagtgttttgctttgcccttcagtatggtggcagtgtgggctctcagccacccccaccggcaccagagccaggtcctgttccctcttnnnnnnnnnnnnnnnnnnnnnnnnnnnnnnnnnnnnnnnnnnnnnnnnnnnnnnnnnnnnnnnnnnnngggacctcactgacccagacgttccgggcccgggaacagctggcagccgtgaggctctatgtggagctccaccgtggggaggaaccaggaggaggccaggaccctgtgcagttgctcagtggcttccccagacgggccttctcagaagctgacatggagcggcctctgcaggagctgggactcgtgccttctgctgttctcattgtggccaagaaatgtcccagctgagggcctttgtcccatcgtccctctgtgaccccttcatctt

SEQ ID NO: 11816 - DNA, 728 bp, Macaca Fascicularis
  misc_feature (1)...(728): n = A,T,C or G
actttgagacagattatgctgaataccgcatcctgcatgcccgtgttgggactgcaagccaaaaggttcacagagctgggagcagagattaaaagagttcagcgaggaactccggaatataaggtgctggaagacaagatagtccaggaatatnnnnnnnnnnnnnnnnnnnacccaggttacaaagaagaaaagcnnnnnnnnnnnnnnnnnnnnnnnnnnttgtcccacattaaaggtctcatcctggagtttgaggaaaagaacaggggcagctgaagttatcaagggaattcttgagcctnnnnnnnnnnnnnnnnnnnngaacaaagcagctgtaaactaaatagaatgnnnnnnnnnnnnnnnnnnnnnctgaccactggagtccgtggtggcaagtagagagttgctctagcttcctgaggtttggttttcattgttaatttttagggtgtgggcactgtgcaaagactccatagctatgcctaggagtttaggaaaagtgacagaggcttggcttttttacctttagttcagccaagtcattttcaagtcctgagaaatgacatcatcttcaggataagataatgaggacattagacaaaccaaactaagtgaatttagtctactagcctccctaaggaaacagtaataataacttttggtaagagctaaaataacttgtagcatacctagatataatgggaaagggcctgggtgttacc

SEQ ID NO: 11817 - DNA, 1207 bp, Macaca Fascicularis
  misc_feature (1)...(1207): n = A,T,C or G
acgcggaccagatctacctgagcgccggcgtgcaggaggaccacgtgcagtatgtgacggccggcaccggggccgtnnnnnnnnnnnngaccatctgcgccgtgttcgtggtggannnnnnnnnnnnnnnnnnnnnnnnnnnnnnnnnnnnctccatctgcctcacnnnnnnnnnnnnnnnnnnnncggctctggcactacaggacacgnnnnnnnnnnnnnnnnnnnnnnnnnnnnnntgtgttatcgcctacgtcataggacacgcccttgggcccagtcccatacccgcgctgctcatcactgagatcttcctgcagtcctttcggccatccgccttcatggtggggggcagcgtgcactggctctccaacttcgccgtgggcttgatcttcccatnnnnnnnnnnnnnnnttggcccgtacagcttcattgtcttcgctgtgatctgcctcctcaccaccatctacatcttcttgattgtccctgagaccaaggccaagacgttcatagagatcaaccagattttcaccaagatgaataaggtgtctgaagtgcacccggaaaaggaggaactgaaagagcttccacctgtcacttcggaacagtgactccggagaggaagccagtggagcgggtctgccgggggcttccccctttggcttatttttctgacttctagctgtctgtgaatatccagaaataaaatgactctgatgtggaatgcagtcctcatctccagcctcccaccccagtgggaactgtgcaaagctgggctgtctctctccaggttggcctgtcaccggccccaagtcaagcaaacagctggttctccactttgctgtatcaacctttgtnnnnnnnnnnnnnnnnnngctccaccttgctgggtcagcctttgtgtggctcttggtaacataacaaaagcagttactatagtggcgagatggaaggaatcaaattttgccagagaaactaactcagtggccccgacaggtcttccggggccatgggcatttgtttagagccaaattcatcctcttaccagatccttttccagaaatacctgtctaggaaggtgtaatgcagaaacaatgacatccagaaagctgaggaagaggttcctgtggagacactgagtcagaattcttcatcctaaattatattgttagtggaaaatggaattgcttctgtgtagtcaataaaa

SEQ ID NO: 11818 - DNA, 694 bp, Macaca Fascicularis
  misc_feature (1)...(694): n = A,T,C or G
ccagactacattcagtgtcctcactgtagccaccactttgctcccaaggtggctgagcaacacattcccaagtgtaagaccatcaagaaccgtcctcnnnnnnnnnnnnnnnnnnntagttgagcagacaacaatggaaacttttggataggtcagaaagctctgcttnnnnnnnnnnnnnnnnnnnnnnnnnnnnnnnngcaaagcagagagaaatcaaacnnnnnnnnnnnnnnnnnnnnnnnnnnnnntctgtgaggagagagccactgctaagcagcaggaggcagannnnnnnnnnnnnnncccactaannnnnnnnnnnnnnnnnnnnnnnnnnnnnnnnnnnnnnnnnnnnnnnnnnnnnnnnnnnnnnnnnnnnnnnnnnnnnnnnnncattaaagctctcttcttgcatgcctgannnnnnnnnnnnnnnnnnnnnnnnnnnnnnnnnnnnnnnnnnnnnnnnnnnnnnnnnnnnnnnnnnnnnnnnnnnnnnnnnnnnnnnttgtagaannnnnnnnnnnnnnnatgtgttggagtcagaggggcatgatcacccagatggtaactcttatgaaagataatataattttgctgtaaggcattattaatggaaatctatccttggtctccctggtgcatgatcctggccaaaaaccaatacaagtatgtaaggttaaggcaccaa

SEQ ID NO: 11819 - DNA, 669 bp, Macaca Fascicularis
  misc_feature (1)...(669): n = A,T,C or G
aacagtgatgaaaggcacaatcaacaggaccagttattaggttttcaattatagcagcaannnnnnnnnnnnnnnnnnnnnnnnnnnnnatccaacaagtacctaaaatattactacagatacgaatcattcagccaatgaagacattttaaggaaaatatatacaatacatttaaggaaaaaaaaaaaaaaaatctggtacaacctggcaaggagattcctcaggcagcttctctaagggatgcttccagaaacatcccctaatgcaaagacaacctttccaaagtgttctgaatgggacacttcagttttttcattccataaatgaaacacagttgttatactatgctgatttctaaatctttcttagaaaacattactgcctacactgaaatgaaaagtatcaaatctactggcagtgcatcttacagtactgtcgatagcagccannnnnnnnnnnnnnnnaatatgtcttcaaaagatattttcaccannnnnnnnnnnnnnnnnagcatttcaaataaataatggaatgctaatcaagcaaaagtaccaaacccttggatccaggacagtttgctaattactaacacaatgaaacagctaggagcaagtgacacataaaatagcctccctaaagtccaagagtattaaaatattccccacaac

SEQ ID NO: 11820 - DNA, 740 bp, Macaca Fascicularis
  misc_feature (1)...(740): n = A,T,C or G
acgtgcaggacatnnngaggacggagctggctgcggaggtgcaccgcgtgctgtgcctcgagcnnngccacatgttngtctgcggcgatgtcaccatggcaaccaacgtcctgcagaccgtgcagcgcatcctggcaaccgagggcgacatggagctggacgaggccggcgacgtcatcggcgtgctgcgggatcagcaacgctaccacgaagacattttcgggctcacgctgcgcacccaggaggtgacaagccgcatacgcacccagagcttttccttgcaggagcggcagctacggggcgcagtgccctgggcgttcgacccgcccggctcggacaccaacaccaacggcccctgagagccccctggctttcccttccagttccgggagagcggctgccccactcaggtccgcccgaccaggaccagccccgctcctcccctcttgagatggtgccttcccacatctgtccagaggatgcaaggattcagcataattccaccaggaaggagcaaaacgcctgtttccctctgtatgcctgttgcctctggcctgggtccgcctaaatctggaaggcccctcccagcagccgtaccccagggcctactgctacccgcttcctgtttcttaggcaaaggttagattccccttacctctctcaggagtatcttacctgtaaattctaatctctaaatcaagtatttattattgaagatttactgtaagagactgtgccag

SEQ ID NO: 11821 - DNA, 696 bp, Macaca Fascicularis
ctggaggtatgataggtcagaggctgggtgttgaacttagttaatggaagactgagagcagaacaggtttgtcatctccgcaaggccagaaagtgaccacaaaaagaggcagataatagacattggggtaggatcataccctagggaaatacctttcctgggcttgttttctagcatatcattgacctgggatctttgggtgatcaagggcgtggttagtggaggctttgtgctgcacgtatgcagtatcctatctctttctacatcaggtcaaaacattaagttggtgtactgcctcgacctttttacacctcatcctggaacatatacagggttgagaattttagacaatctctaggtagaggagacaagatgtagacccagacggaagaaatctgcttccctaccatgcctattgcaacaccccacctgtaattcccaagtcctctaaggtactaatttgtagttgctctgaagtaatgatttcagattcaactggtagggaaagactctgcacctgctgtcttagggaagaaatggtttaaatccatgtggtgacattgcgttagtctccctttcactgttttcttattctataattgtttgttagatttcccaaaaagtcttgatcactaagcaaagctgctagtgggattctatatttcgtgtcatcttttttattataatttattgcaa

SEQ ID NO: 11822 - DNA, 765 bp, Macaca Fascicularis
  misc_feature (1)...(765): n = A,T,C or G
aggtgattgccagaagannnnnngttaaagaagcattacttcgagaaactataatgggcttaataagcagagaaaagaaacctcgtttattccctctgaaaatgagaagatttctaaacagctccacctttgttataatattgtgaaagatcgttatgttcgagtttcaaataacaatcaaaccatttctggatgggagaatggtgtgtggaaaatggaatctatattcagaaaagttgaaacagactggcacatggtatatttggcccgaaaggaaggatcatcttttgcttatatttcctggaagtttgagtgtgggtcgnnnnnnnnnnnnnnngatagcatttctattagaacaactagtcaaacttttcaaactggaacaatagaatggaaattgcgatctgatacagcacgagtagaactgacaggcgataacaatcttcactcctatgctgatttttctggtgccactgaagttattttggaagcagaattaagcagaggagatggtgatgtcgcttggcaacacacccagctgtttagacaaagcttaaatgaccatgaagaaaattgtttggagataattataaaatttagnnnnnnnnnnnnnnntgaacattatagaannnnnnnnnnnnnnnnnnnnnnnnnnaaagtagtctgttggttcagtgcatgnnnnnnnnnnnnnnnnnnnnnnnnnnnnncatatttcttttgctagctatccatcatgtaacccnnnntgannnnttatctttt

SEQ ID NO: 11823 - DNA, 742 bp, Macaca Fascicularis
  misc_feature (1)...(742): n = A,T,C or G
gaacaagtgttcagagcagatagaagcagtgtggtggcaccgttgaaaggcagaaagagccaggagaaagctgatggagccaggatagagatctttcagccactagcttcctattgtgtgcagagtgtggtggaattaaacaccatttattaagtatccctgtgcctggcacacagaatcattcatatgtgttaaagtgatcatggggtttcctttgcacttgggtgattatgtatcatttgggggaggaagcatgtgttctgtgaggttgtttggctnnnnnnnnnnnnnnnnnnnnnnnnnncccctgccgtttgcttttggtaatgtgatgttcatgttctccccctacccccaaccatggccttgagggtggcagggcagcagcatannnnnnnnnnnnnnnnnnnnnttccagaggcggcctgggtgagtgagccatggggcagttgacctgggtcttgaaagagtcgggagtgacaaggtcagagagcatgaactggtgctggcatgaaggatttcaggaagatcatggagacnnnnnnnnnnnnnnnaacagagatgatggagtccaaggaaacaccctctctggggaaagggactttctttggtggacacttggcaccagctctgagagcccttcccctgtgtgctgccaccctgtgggttagatgtactctctgtcacatgaggagagtgctagttcatgtgttctcctttcttgtgagcatcctaataaaga

SEQ ID NO: 11824 - DNA, 700 bp, Macaca Fascicularis
  misc_feature (1)...(700): n = A,T,C or G
tgatcatgctgggcccgttcgtgttgttagcattaagggcgttgattccaacatgtgctgtgggacccatgtgagcaatctcagtgaccttcaggtcattaagattctgggcactgagaaggggaaaaagaacaaaaccaacctgatannnnnnnnnnnnnnnnnggtgctgaannnnnnnnnnnnnnnnnnnnnnnnnnnnnaagcactgactgctctgcttaagtgtggagcagaggatcatgtggaagcagtgaaaaagctccagaactccaccaagatcctgcagaagaataacccgaatctgctcagagacctggctgtgcacattgcccatagcctcaggaacagcccagactggggaggtgtggtcatgttacacaggaaggagggtgattcagagttcatgaatatcattgccaatgagattgggnnnnnnnnnnnnnnnttattcttaaccgtgggcgatgagaaaggtgctggactcttcttactggcagggccacctgcgtctgtggagaccctggggcccagggtggctgaggtcctggaaggcaaaggagcagggaagaaaggccgttttcagggcaaggccaccaagatgagccggcggacagaggtgcaggcacttctccaggactacatcaccacgcagagtactaaggagcgagggcttagggtactcacctcctgttccaca

SEQ ID NO: 11825 - DNA, 705 bp, Macaca Fascicularis
gagggacaaatggagagccaaaggacgggggcccatggaagagaagaaagcagcaatttggccaacgtccgggggttccaggggagcaggcctcctccttggcagaggacagctgcaaggctccatgccaccccatgactgtcccaggccaagcctaggctagacctggctgtcctgctgccatccagtgctgggcagcggtgctgggactcatcgccacagcacgacagagtgcccggtctgtgacataaaggagctcagggccccctgaggtgaagcgaagggcccagctcctgctagaagacatagatcttgtcccgctgcacagtgtccaggtcgtcatccagtgtcagcaacacctggggggtggacgccagatcagccacagagaaggaggcagctgctaccttcacgcacccacccggcttggccgagaggcccgcttaccaggaaggacccgaacatggcgatggaggagaggaagtgccagatgtcgtggtcgtcaaagaagtcgaggaggatgcagtcccggttgtgctcccttgactccgcaggggttttcttggggagcaacaagaaaaactgccgagtgaccctgctctgccagggccagacccatctgccatcttgctcctgggcacccctctctccagccccaggcaggacagcagcaattctgacctgtcccttgtccccacccctccc

SEQ ID NO: 11826 - DNA, 767 bp, Macaca Fascicularis
  misc_feature (1)...(767): n = A,T,C or G
gaacatggtgatttattctattgataaagccaaaaagttccgactcaacagagaaggcaaacaaaaagcagataagaaccgtgcccgagtagaagagaacttcttgaaactgacacatgtgcaaagacaggaagcagcacagtctcggcgggaggagaaaaaaagagcagagaaggagcgaatcatgaatgaggaagatcctgagaaacagcgcaggctggaggaagctgcattgaggcgtgagcaaaagaagttggaaaagaagcaaatgaaaatgaaacaaatcaaagtgaaagccatgtaaagccatcccagagatttgagttctgatnnnnnnnnnnnnnnntgaattcataggaaacatgaaaaacgctagtccatttctcaaccttaaatttcagacagttttgggcaactgagaaatccttatttcatcatctactctgtttggggtttggagttttacagaggttgtagataaccttgaaagggctctgtttcaagaattnnnnnnnnnnnnnnnnnnnnnnnnnnnnnnattttataaaaggaatgatctatgaaatgtgtgtttttaagtattttaaaaattataatacgaatcatcagtgcttttagtacttaagcgtttgaagaaataccatgaaatttataggtagataaccagattgttgctttttgtttaaaccaagcagttgaaatggctataaagactgactctaaaacaagattctgcaaataatgatggaatgcacaataaacattgc

SEQ ID NO: 11827 - DNA, 734 bp, Macaca Fascicularis
  misc_feature (1)...(734): n = A,T,C or G
accagtactaataatccctgatctgtnnnnnnnnnnnnnnnntgaaaaactattttattatgaatttcaaaaggataaatcaaatattcaaaaggccatggtcatatagcccaaggaaattaattcctgtggacaatgcccagtctctgttcagatccaaaagcacaaaatgttgtatatagagtcaaagtcaggctcaatagaagaattaagagactcaagacaaaccaagataaagtaactgtgtgttgaatactctttccacaagttgcaagcatattgcaacacacattctttgggttttttgtctcccctnnnnnnnnnnnnnnnatctgaggaacttgttcatgggaaacatggaaaaagcactgcctcagactgggaaattctgactgtttctgaactgtctccttttgcaagactgaacatagtttgggccattggtgcatgcacatatattaacttgtgactaaagacaggcattgcttaaacctgttccaattttaacttnnnnnnnnnnnnnnnnnnnnnnnnnnnnnnnnnnnnnnnnnnnnnnnngtttttnnnnnnnnnnnttttgctgttcccaatctaaacttttctgggattgtatatatgcactttaatatcttatttatgccttgctggagttttgttttgttgctccaatttttaacttgggggtgaaggatttgagaactcagcctcattagatcaacggaccaaataaacaa
